United States Patent Application Publication US 2008/0034453 A1 - sequence listing, part 35

SEQ ID NO: 276166 - DNA, 283 bp, Glycine max
cggcttccaccgcagctatgtcagaaatgcttggaaaccccgtgagcctgagaggcgccaccaggtctgctccatcaccgtctacacctgttactttcaagaccgttgcgcttttctccaagaagaaggcagcaccacctcctccaaagaaaaagcctgctgctgtatcccccgccaatgaggaactcgccaagtggtatggtcctgacagaaggatcttcttgcctgagggtctcttggaccgatcggagatccccgagtacttgaccggagaagtgcctgg

SEQ ID NO: 276167 - DNA, 283 bp, Glycine max
  unsure (1)..(283): unsure at all n locations
gcttcttcaatccctaatgcgccttctgcgttcaattctcagagctacgttggtctcagagcgccactgaggaccttcaacttttcttctcctcaagctgccaaaattcctcgctcccaacgccttttcgtcgtcagagcctccgattcggagttcgnagccgccgttgtcgccggtaaggttcncccggcgcctcccgtgccgcccagaccggcggctccggttggaacaccggtggttccttcacttccacttcaccggcgtcctcgtcggaaccggaagt

SEQ ID NO: 276168 - DNA, 281 bp, Glycine max
  unsure (1)..(281): unsure at all n locations
gcaccttatgtggcaaagtctgagaaaaggaaagtggagtacgagaagaacatgagagcctataacaagaaacaggcggaaggtcctactggtggggatgaagaagaatctgagaagtctgtatctgaggtgannnnnnnnnnnnnnnnnnnnnnnngcagtggcgaggaagaggatgacgattagagaatggactgataattgcatttatgtaggttctgatgattttgatcatctgttgtaggtggtctggtcattcctgataaacatatttcttgctt

SEQ ID NO: 276169 - DNA, 287 bp, Glycine max
  unsure (1)..(287): unsure at all n locations
caagaatccagctttgtatggtgaacttgccaaaggccagagccccaagtttatggtgtttgcttgctcagactcaagggtgtgcccatctcatgtgctagatttccaaccaggagaggcctttgtggtcagaaatgttgctaacattgtcccaccatatgaccagtcaaaatacgctggaactgggncagcagttgagtatgctgttttgcatcttaaggtgtctgagatgtggtcatggacacagtgcttgtggtggtattaaggggctctgtctttcccatatg

SEQ ID NO: 276170 - DNA, 283 bp, Glycine max
gaaatgttgccaacattgtcccaccatatgaccagtcaaaatacgctggaactggggctgcagttgagtatgctgttttgcatcttaaggtgtcggagattgtggtcattggacacagtgcttgtggtggtattaaggggcttctgtctttcccatatgatggaacctactctactgattttattgaggagtgggtcaaaattggcttgcctgcaaaggcaaaggtgaagacacagcatggggatgccccttttgctgagttgtgctcacactgtgagaagga

SEQ ID NO: 276171 - DNA, 285 bp, Glycine max
caatcaacggttatacccttttctatttgagcatcatcatgtccaccgcagcgcagcccaaggccaagaaaacggcgtcgtccaagaagcccctctcccatcctaccttcgccgcgatgatagcggaggcgatagcgagtctgaaggagagaaccggttcgagccaatacgcgataaccaaattcatcgaaggcaagcacaaggagttgcctccaacctacaagaagcttgttctcgttcatctcaagaagtctgttgctgctggcaagctcgttaaggtcaaaa

SEQ ID NO: 276172 - DNA, 282 bp, Glycine max
cacactctcatagctgtagcggcgacactaagatcggagaaagaatggcgaaaacgacgtcgttgctgctctttacactgctcctcttcggaaccctagctctcatccaggcgaagaaatcgaaggaggatttgaaggaggtgacccacaaggtttactttgatgttgagattaatggaaaagaagcaggtcgtattgtaatgggtctttatgggaaggctgttccaaaaactgcagaaaacttccgagcactttgcacaggggaaaagggaactggtaaaa

SEQ ID NO: 276173 - DNA, 281 bp, Glycine max
  unsure (1)..(281): unsure at all n locations
ctcacaaacaactcttgagaaagaaagaatggctgccaacacattgatgagntctgccatctcagccttcccatctctcctttcctcctcaaaatccagatttgccgcagcagttcctctttccagctttgttgtcaccaatgcctcttcttctcgcttttccatgagtgctgactggatgcctggccagcctagacccccctaccttgatggttcagcacctggtgactttggattcgaccctcttcgtcttggtgaagtaccagagaatcttgagaggt

SEQ ID NO: 276174 - DNA, 281 bp, Glycine max
tgtcattggaatcttgccctaacattggcaatgaaggtctactagctattgggaagttgtgctccaatctaaggttcatatccatcaaggactgctctggtgttagtgatcagggaattgcaggattgttttcttcaacttctttgtttctaacaaaggtgaagctccaggcactgactgtttcagatctctctctagctgttattggtcattatggcaagtcagttactgatcttgtccttaattgcctcccaaatgtcagtgagagggggttctgggtc

SEQ ID NO: 276175 - DNA, 288 bp, Glycine max
  unsure (1)..(288): unsure at all n locations
aagngnttcaagaccggcatggctaatgaagaggaacagacaaaccacctcttcggcatcaaagatctcggtcacaagactctccttcagagtgatgcactctatcagtatatacttgaaaccagtgtctatccaagagagcacgagtgcttgaaagagatacgcaagatgactgcaaaacacccactgaacatcatggcaacaccagcagacgaaggacaacttctgagcatgcttgttaagctcacgaattcaaagaacgccttggaaattggtgtattcatggtt

SEQ ID NO: 276176 - DNA, 282 bp, Glycine max
gggcacgatgaccccaacgtggcactcttcttcttggaaaaggacttgcactacggaacaaagttgaaccttcacttcactcgctacttcacctcaagtgttgatgcctcgttcttgcctcgatcagttgctgattccatacccttttcttcaaacaaggtgaatgaagtgttaaacaagttctccatcaaggaagggtcagatgaggctcaaactgtgaagaacaccatcagtgagtgtgaagtgcctggcattaagggagaggaaaagcgttgcgtgact

SEQ ID NO: 276177 - DNA, 283 bp, Glycine max
ggttcttcatctgcatgcacacagttgcatagttttggaaaccaagaattcctgaagaagggtagcatcaacaagcagttctgaaaatggagatcaccaatgtcagtgagtatgaggctattgcaaagcagaagttgccaaagatggcgtttgactactacgcatctggtgcagaggaccagtggactctgcaagagaacagaaatgccttttccagaattttgtttcggccacgtattcttattgatgtgagcaagatagacttgacaactactgtcctagg

SEQ ID NO: 276178 - DNA, 279 bp, Glycine max
  unsure (1)..(279): unsure at all n locations
ggaaggagcaaagagtcgtctccatttttttgaaatggatcttcttgacatcgactccattgccgctgccataaagggttgctccggcgtaatccacctcgcatgtcctaacatcatcggtcatgtcgaagatcctgagaagcagatactggagccggcgataaaaggaacagttaatgtgttgaagncggcgaaggaagcgggggtggagcgcgtggtggcgacttcgtcgatctcatccattatgccaagccctaactggccagctgataagattaa

SEQ ID NO: 276179 - DNA, 280 bp, Glycine max
  unsure (1)..(280): unsure at all n locations
acctcttccataaacgggtggtgcctctcttccatctccccagccaaaacctctctcaggaaggccacattacgcccttccgtcttcgcaacccttaacactccttcttctccttcctcttcatcttccttcccctctctcattcaagacaggcctgtttttgctgcccctgcccccatcatcaccccnactgtgagagaggatatggcaaaggaatacgagaaagctattgaagaacttcagaaattgttgagggagaagagtgaatcaaagcgacant

SEQ ID NO: 276180 - DNA, 292 bp, Glycine max
  unsure (1)..(292): unsure at all n locations
attcccanttcctaatngtttaaacctaattctcatttcntcatcgttcgattcttctccncctaaagattnagatcttcgtgaaaacttngaccggtaagaccatcacccttgaggtggagtcctccgacaccatcgataacgtgaaagctagattcaagacaaggaagggntcccacctgaccaacaganacttatctttgcgggtaaacagcttgaggatggtcgaacccttgcngactacaacatccagaaggaatccntctccacctcgtgcntcggctcaggggtg

SEQ ID NO: 276181 - DNA, 267 bp, Glycine max
  unsure (1)..(267): unsure at all n locations
caagaaatcaaggccgcgtaccggcgactagccagagtctgacaccccgaantggcggccatcgaccggaaaaattcgtccgctgacgaattcatgaagatccacgccgcgtactctactctttctgatccgacaagcgcgctaactacgatcggagcctattccggcgacaacggccgttgtcgacggcggcggtgttctccggttacacgcgtcggaactgggaaacggatcagtgctggtagtgagtcactgagtcgactcgct

SEQ ID NO: 276182 - DNA, 283 bp, Glycine max
aaaaaagagaagaaatcaattggtgaacttgagcaggaattcctccaagcactgcaagcattctattatgagggaaaggctatcatgtcaaatgaagagtttgataatctcaaggaagaactcatgtgggaaggaagcagcgttgtatgctaagttctgatgagcaaaaattcctggaagcttcgatggcttatgtgtctggaaaaccaattatgagtgacaaagagtttgatgagttgaaactgaggctaaagatagaagggagtgaaattgtagctgaggg

SEQ ID NO: 276183 - DNA, 282 bp, Glycine max
  unsure (1)..(282): unsure at all n locations
atgccaagcctcatccagacccctacctgaaaggtctcgaagctctgaaggcatcaaaggaccacacatttgtatttgaggattctgtttcagggatcaaagctggagttgcagctgggatgcctgttattggtttagctactcgaacccagaaaatttattgatggaagcaaaacctgcctttctgattaangattatgaggatccaaaattgtgggcagctttggaagaacttgacaaggctaccagtgctcgttcagtttgaattactagtgcaactga

SEQ ID NO: 276184 - DNA, 274 bp, Glycine max
ctttctctttccaaccctacgtcacagtcagaatgcactgctgaagaagcttacaagtggagccagggacgtgccatttttgcaagtgggagcccatttcctcccgttgagtatgaggggaaagtgtttgtgcctggcaggccaataatgcatacatatttcctggatttggtcttggtttaataatgtctgggaccattcgagtgcatgatgacctgcttctggctgcctctgaggctttggctgcacaagtgagccaagagaactttgataa

SEQ ID NO: 276185 - DNA, 278 bp, Glycine max
  unsure (1)..(278): unsure at all n locations
tcgaacttgtggtgaggganntggaaccggatccgctgttcaattcgggccgtggatctgccctgacagaaaaaggaacggtggagatggaggctagcatcatggatngtccaaaacgacgatgcggcgccgtttcgggtcttccaccgttaagaacccgatctcgcttgctcgtttggttatggacaaatccccgcaagctacntcacccttctccggcgccgaagaatttgctaggcaacagggtgtggaggttgtggacaacgagtactttatca

SEQ ID NO: 276186 - DNA, 288 bp, Glycine max
  unsure (1)..(288): unsure at all n locations
caaagattttgctcaaaaatgtgtcgacgccaccaaaattgcaggattcgcccttgccacctcagctctcgttgtttctggagcnagtgcagaaggtgttccaaagaggctaaccttcgacgaaatccagngnaagacatacttggaatgaagggaactggaactgctaatcagtgcccaaccantgaaggtggagtggactcatttgccttcaaggcagggaaatacaaggcccagaagttgtgcctggaaccaacttccttcacggtgaaggcagagggtgtggcc

SEQ ID NO: 276187 - DNA, 281 bp, Glycine max
cgcggggatcattggtgtggacttggccaaggatattctccaggcgaaccctaataactacgcggtggtggtgagcacggagatggtggggtacaactggtaccaggggaaggacaggtctatgcttatcccgaatagcttcttccgcatggggtgttctgctgttctgctttccaaccgtcgaagggactatagccgcgcaaagtaccgtcttgaacacattgttcgcacgcataagggtgccgatgaccgcagcttcaggtgtgtttaccaagaggaag

SEQ ID NO: 276188 - DNA, 284 bp, Glycine max
  unsure (1)..(284): unsure at all n locations
agtntgtatagtgtaggatttgttggtattcgtgataaaaacacctcatcctattcattttgccatgacgggcgaactccagataaaggttttgaaagtaatgagaaattattaattcatccatgttactggcttggtttgaatctaatcgtaatgcacttgctccagaggaagcagaggagataaatgacgaatatgatattaatattatttcagataattcagccattagaaataanacaataggtcaaataactactcatctagatcagataccgataggt

SEQ ID NO: 276189 - DNA, 280 bp, Glycine max
  unsure (1)..(280): unsure at all n locations
gaaaatgttagaaatattcctgttcttaacttgtagctgttcattgcatctgatatccacatttgactgaattctctaggtatgaaggtgcacgtactgcagaagcccttgcggcgtttgtgaacattgaagcaggtacaaatggaagatagcttctgttccatccagtgtggtagttctctctccnnataactttgatgaggttgtcttggatgaaacaaaagatgttctggtggaattctatgcaccatggtgcggtcattgcaaggcccttgcccct

SEQ ID NO: 276190 - DNA, 277 bp, Glycine max
gaggagaaagatggaggtctcccttggattcagatgatggatcgttctacccctaccatgagttacaaagcatggcgtagagaaccaaaggatggtcctccccaatatagaagcagcactatttttgaagatgctacccctggatggtgagggacttgttttgggatgacgagttccgaccgagatgggatgacatgcttgcaagctcttcaatcattgaagagtgtcccactactggtactatgaaagtgcagtggatacggaagtttcccttttt

SEQ ID NO: 276191 - DNA, 278 bp, Glycine max
actatccatacatagccacttcacactcactcactcttgttgccttcatggccaagccagtgtccattgaggtatggaacccaagtggcaaatacagagttgtcagcaccaaaccaatgcctggaactcgttggatcaatcttctcattcaaaatgatgttcgccttgaaatatgtaccgagaagaaaacgattttgtcagttgaagacatcattgctttgattggtgataagtgcgatggagttattggacagttgactgaagactggggagaagag

SEQ ID NO: 276192 - DNA, 278 bp, Glycine max
  unsure (1)..(278): unsure at all n locations
ggntaattagggaaaatgagggagatccttcacgttcagggatggcaatgcgggaaccagattcggttcgaagttctgggaagtggtgtgcnactagcacggcatagatccgacggggaagtacgtcggaaactcagatctacactcgagcgcgtgaacgtgtactacaacgaagcttcctgcgggcggtttgtcccacgcgcagtgctgatggacctggagcccggaaccatggacagngtgcggactgggccgtacgggcanatattccggcccnt

SEQ ID NO: 276193 - DNA, 285 bp, Glycine max
  unsure (1)..(285): unsure at all n locations
actttcttgatgattttaacactaagaatgggggtcagcgtatagcaacagtgctgatgtaccttactgatgttgaagaagggggtgagacagtgtttccagctgccaaagggaattttagttctgtnccatggtggaatgagcttctgagtgtggaaaaaaaggactttcgattaaaccaangaggggtgatgctctacttttttggagtatgaagccagatgcaagtttagatccatcaagcttacatggtggttgtccagtgatcaagggtaataaatggcc

SEQ ID NO: 276194 - DNA, 279 bp, Glycine max
  unsure (1)..(279): unsure at all n locations
ggttaattagggaaaatgagggagatccttcacgttcagggagggcaatgcgggaaccagatcggttcgaagttctgggaagtggtgtgcgacgagcanggcatagatccgacggggaagtacgtcggaaactcagatctacactcgagcgcgtgaacgtgtactacaacgaagcttcctgcacgcggtttgtcccacgcgcagtgctgatggacctggagcccggaaccatggacagcgtncggactgggccgtacgggcagatattccggcccgaca

SEQ ID NO: 276195 - DNA, 168 bp, Glycine max
  unsure (1)..(168): unsure at all n locations
tcgcatcgcaccttcaacttaaccnattccactngtaatcgtaaangctntgctagangnnnngacaaagtgtgtctgtgtgtgtgagagaganagcaatggctggctcgtgggcangccgttctctgantntnctagcnancatnnccttcggatgtctattngcga

SEQ ID NO: 276196 - DNA, 275 bp, Glycine max
  unsure (1)..(275): unsure at all n locations
ctgacagtattcgggttatgggtgacaaagcaactgccagagagacaatgaagaaagcaggtgttcccaccgttccgggaagtgatggccttttacagagcacagaagaagctatcagactggcaaatgagattggtttcctgtgatgatcaaggcaacagctggtggtggaggacgtggcatgcgtcttgctaaagaacctgctgagtttgtgaagtttttacagcaagctaagagtnatgcagctgctgcatttggcaatgatggggttattt

SEQ ID NO: 276197 - DNA, 274 bp, Glycine max
  unsure (1)..(274): unsure at all n locations
tcccctttgccgctgttgttgttgctgcaccaccgaacaacttnccctgtaaatcgcgtttcgtttgtgcaaggttttaaaagatggctgatgctgaggacattcaacctcttgttgttgataatggaactggaatggcaaggctggttttgcaggtgatgatgctcctagggccgtgttccccagnattattgggagaccacgccatactggtgtaatggttgggatgggtcagaaggatgcttacgtgggtgatgaagcccaatcaaaaagg

SEQ ID NO: 276198 - DNA, 277 bp, Glycine max
ggggaaacctgaattcactgaccatttgacacacaagctaaagcaccatcctggtcaaattgaggctgctgctattatggagcatatcttggatggaagttcctacatgaaagctgctaagaagttgcatgagattgatccttgcaaaagccaaaacaagatagatatgcccttagaacttcaccacagtggcttggtcctcttattgaagtgattcgtttctcaaccaagtcaattgagagagagatcaactctgtgaatgacaaccctttgattg

SEQ ID NO: 276199 - DNA, 275 bp, Glycine max
caatcaacggttatacccttttctatttgagcatcatcatgtccaccgcagcgcagcccaaggccaagaaaacggcgtcgtccaagaagcccctctcccatcctaccttcgccgcgatgatagcggaggcgatagcgagtctgaaggagagaaccggttcgagccaatacgcgataaccaaattcatcgaaggcaagcacaaggagttgcctccaacctacaagaagcttgttctcgttcatctcaagaagtctgttgctgctggcaagctcgtt

SEQ ID NO: 276200 - DNA, 252 bp, Glycine max
  unsure (1)..(252): unsure at all n locations
aaacactatagcaatagncacatttgcttttgaaaaancccctcactncttcatcactacacctagctanccacatacaatgtcgaccaaatttaaggtgtttcgtgaattcacaacgatgactcattcctaaaccaagttatccctgaaaacatcaccgaattccaagtgactctgtccctcgctagagactacgatggcaacaactcaaccaacggaaagttcattccttactgggacactgaaaaggtc

SEQ ID NO: 276201 - DNA, 275 bp, Glycine max
  unsure (1)..(275): unsure at all n locations
ctccctctgcgcaggaattgggaacattcgacaggtagagtttcttcaatggctcctaaagttgataagaagaacgacccaaaggcacaggccttgaagactgctaaggcagttaagtctggtgctacctttaagaaaaggcaaagaagatccgaacttctgtcacttnccacagaccgaggacattgaagaaggataggaaccccaagtaccctcgcattagcgcgcctccaagaaataagcttgatcattatcagatcctgaaataccctctg

SEQ ID NO: 276202 - DNA, 270 bp, Glycine max
gagcaccaacccccaacttgcaccacggctgcggtttatggttcgtgatgttctagatttgcgttctaataactggattccaagacgtgaagaggtgaaagccaaaaccatcactgaaattcattcagaggcagaaaaaatcttggattgcgtccaggtgccactgcaagtatgagaagtaaccgtgtagtttctggcgctcaaggaaataccggtccaggaggattcccaattgcccgacctggtacaggtggtttgatgcctgggatg

SEQ ID NO: 276203 - DNA, 272 bp, Glycine max
gatcgagataactagaaacagtgtgatgaaaatgaaggtccttgttttcttcgttgctacaattttggtagcatggcaatgccatgcgtacgatatgttccctctccgaatgaacactggctatggtgcccgtactcggaggtgaaatgcgcaagttggaggcttgctgtggaagcacacaacatctttggctttgagaccattcctgaagagtgcgttgaagcaacaaaggaatacatccatggcgaacaatatagatcagactccaaaac

SEQ ID NO: 276204 - DNA, 273 bp, Glycine max
  unsure (1)..(273): unsure at all n locations
gnatgccaatggcattctatccgtcactgctatcgacaaaggcacagggaagaaacaagatattaccatccactggtgctancaccttgccttcagatgaggnggagagaatggtaaacgaagctgagaaattttcgangaagacnaagagaagagggatgctattgacacnaaganccaggcagacttnttggtataccagacanantaagcnattgaaanagcttggtgacaagttcctgggncnttgtaanagaaggtgatccaaacttg

SEQ ID NO: 276205 - DNA, 269 bp, Glycine max
  unsure (1)..(269): unsure at all n locations
attttatccaattganatnttaaaaatgactgggatanacttaaganttcaattattgaaattgaataagtanacaatttaattggantggncgaatggtatcaaaaaaatggagtactaactcccatntcttattattattgaattaaccgatcaacttgctttgttatcgaacatntctttttgatttcaaaaattttccggaaaanatttgaatctattttatatgcgntcnannctactacntctggtcctgaggttcngcgcct

SEQ ID NO: 276206 - DNA, 293 bp, Glycine max
tgggaattttgggggctagaagttggctctgtaggagcatttcttcaagtccattgcgggtgtgtgttgttggaagtggtcctgctggtttctacactgccgagaagatgttgaaggctcaccaacaagcacaagttgatatcattgacaggttgcccacggcttttgggttggttcgctccgttgttgcacccgatcaccctgaaaccaagaaaacttgcaacaaattgtcatcaaccagttttcaaaggtggcacaacatgaacgatgctcatttttggggaatgtgaccc

SEQ ID NO: 276207 - DNA, 231 bp, Glycine max
ggttttctttctcgaactcgaacgaagatgcgtgagattcttcacatccagggagggcaatgcgggaaccagatcggagccaagttctgggaggtggtgtgcgcggagcacgggatcgattcaacggggaggtaccaaggggacaacgagttgcaactcgagcgagtcaacgtctactacaatgaagcgagttgcggaaggttcgtgcctagggcggtgctcatggatctg

SEQ ID NO: 276208 - DNA, 292 bp, Glycine max
  unsure (1)..(292): unsure at all n locations
tttcctttcgggattggtttctatggcttctgaagtaatagagtaccgatgctttntcggtgggcttgcttgggccaccgacagcgatgctctcgagaaagccttctctcattatggttatcatcgatcgtgaaactggaagatcgagagggtttggatttgtgaccttcgcctcggagcaggcgatgaaanacgcaatcgaaggaatgaacggtcagaacctcgacggtcgtagtatcacagtgaacgaagcacaatcccgtggaagaggcggtggtggcggtggatacgt

SEQ ID NO: 276209 - DNA, 293 bp, Glycine max
  unsure (1)..(293): unsure at all n locations
ctctctccttctcgctctttcagctttgacttttgtnggnaactaaggcctaatcaaaatggtgaagttcncagctgaagagctacgtcgtattatggactataagcataatatcccgtaatatgtctgtcattgctcatgttgatcacggaaaatcaaccctcactgattctcttgtggctgctgctggtattattgctcaagaagttgccggtgatgtccgtatgactgatacccgtgcagatgaagctgagcgtggtattaccatcaagtctacaggtatctcacnctac

SEQ ID NO: 276210 - DNA, 302 bp, Glycine max
caaaggattctacccgccgctcgatgggaattgcgcttcaaggcgtctcgtagggctaatccgcctcacgagggtcaccaacggcacgtgcctttggggggccgaggccccctactgctggtcggcaaacggacggcgggcgcacgcgtcgcttctagcccggattctgacttagaggcgttcagtcataatccaacgcacggtagcttcgcgccactggcttttacaaccaagcgcgatgaccaattgtgcgaatcaacggttcctctcgtactaggttgaatactattgcgacactgtca

SEQ ID NO: 276211 - DNA, 301 bp, Glycine max
tacaactccaaacacaaagacatcatcatccatggctgcctccgtctccactgtcggagctgtcaacagagctcttttgaacctgaatggttctggagctggagcttcagctcccagttcagccttctttgggaccagcttgaagaaggttattgcctcaagggtccccaacagcaaggtttcctctggaagcttcaagattgttgctgtagaagagaagaaagagattgaagagacccagcagaccgacaaggacagatggaagggtcttgcctatgatatctcagacgaccaacaagac

SEQ ID NO: 276212 - DNA, 300 bp, Glycine max
cgttgccattctcatcctcttctttctctctctaccattgccatggatccctacaagcaccggccatccagcgccttcaattctcccttctggactacaaattctggtgctcctatttggaacaacaactcctctttaaccgttggagctagaggtccaattctgctggaggattatcatcttgtggagaagcttgcaaattttgatagggaacgtatcccagaacgtgttgtccatgccaggggcgctagtgcaaagggtttctttgaggtcacccatgacatttctcacctgacatgt

SEQ ID NO: 276213 - DNA, 294 bp, Glycine max
aacaacacaaggccatcatcatggcagctgcttctcctatggcaagccaactcaagtccaccttcactaaaactcttgtagctcccaagggcctctctgcctcttcaccactccacctcctgccttctaagaggcaatttagcttcactgttagggccatccaatcagaaaagccaacctatcaagtgattcaaccaatcaacggtgatcccttcattggaagccttgaaaccccagttacatccagccccttgattgcatggtacttatcgaacctccccgcatacaggaccg

SEQ ID NO: 276214 - DNA, 258 bp, Glycine max
  unsure (1)..(258): unsure at all n locations
gatggcaaatgaactacccgtcaaagctttnggttgggctgcttcagacacttctggcacccttgccccttttcatttcnccagaagggaaaatggcgtcgatgacgtcactctcaagattctcttctgcggggtttgccactctgattnccacacnctcaaaaacgactggggtttcaccacctaccctgtcgttcctgggcatgaaattgttggtgttgtgacagaagttggaaacaagtggnaaaaacttcaaag

SEQ ID NO: 276215 - DNA, 300 bp, Glycine max
aaaatgctgttgataacttcagagctggaaaaacatgggttttgattgctactgatgtagttgcccgtggcatggatttcaaaggtgtgaactgtgtgatcaattatgatttccccgattctgctgctgcttatgtccacagaattggtcgttctggcagagcagggaggactggagaagcaattactttttacacagaagatgacattcctttccttcggaatgttgctaatcttatggcagcatcgggctgtgaggttccttcctatctcatggagttgcgcaaaaagaagtggaaga

SEQ ID NO: 276216 - DNA, 296 bp, Glycine max
actcaacttcagttcaagagaaagcaatgccatccaaaagggtctttctacgtctccgcatcgagcaccaagaaaatcctaataatgggaggcaccaggtttattggtgtgtttttgtctaggctccttgtcaaagagggtcaccaggtgactttattcacaagaggtaaagcgcctgtcactcaacagttgccaggtgaatcagacagtgattatgctgatttttcttccaagatcttgcatttgaaaggagacaggaaggacttcgactttgtaaaatccagtctctcagcaga

SEQ ID NO: 276217 - DNA, 297 bp, Glycine max
gagatctagtgctgccaaacctcgctgaaaattagggtttcgtttcggaggtagacgaagatgttcggaagggcaccgaagaaaagcgacagcaccaggtactacgaaatcctcggcgtttcgaagaacgcttcgccggatgatttaaagaaggcttacaagaaagccgccattaagaaccaccctgacaaaggcggtgatcctgagaagttcaaagagcttgctcaagcctatgaggttctgagtgaccctgagaagcgtgaaatttatgacacatatggagaagatgctcttaag

SEQ ID NO: 276218 - DNA, 288 bp, Glycine max
  unsure (1)..(288): unsure at all n locations
gggaaaacatcaaggccttcaaccttgccggaatggggtgcagtgcaagtgttgttgctatcgatgtggtgcaacagcttttcaagacttacaagaactccgttgggattgttgtgagcaccgaggatctcggtgcgcattggtactgtggnagggacaagaagatgatgctctctaactgtctctttcgctctggtggctgctccatgatgtttacaaacaaggcttctntcaagagccgtgcgatattgaagctcaagcacatggagaggactcagtatggtgctg

SEQ ID NO: 276219 - DNA, 291 bp, Glycine max
  unsure (1)..(291): unsure at all n locations
ggatgggtcatttcacaaaaggctanataaagctggaatatatatggttgaagacttcttaagacttgtggtcagagaccctcagagattgcggaatattcttgggagtggcatgtcaaataagatgtgggatattcttgttgagcacgcaaagacctgtgttctcagtggaaaactttacgttcactatcctgaagatgcaagaaatgtgggtgttgttttcaataatatttatgaattaagtggcttaattgccaacgaccaatattactcagctgnantctctctctg

SEQ ID NO: 276220 - DNA, 302 bp, Glycine max
  unsure (1)..(302): unsure at all n locations
aaacactcataacacaaagcacaaagcaaagctcatccttgagttaaaaaatgggcagcagcttcttccatggctctctcatccccatccttggctggcaaggccgtgaagctgggcccatcagccccagaagtgggaagggtgagcatgaggaagaccgtcaccaagcaggtctcctcaggaagcccatggtanggcccagaccgagtcaagtacttgggcccattctctggcgagcccccgtcctacctaaccggtgagttcccaggcgactacggctgggacactgctgggctttccgc

SEQ ID NO: 276221 - DNA, 295 bp, Glycine max
  unsure (1)..(295): unsure at all n locations
cttcaacttccaaagggagaacgtggcaaagcaagtgcctgagcagaacggcctcacacactttgaggctggtgatacacgtgccaaggagtatgtcagcctcctcaaatccaatgaccctgttggattcaacattgttgatgtcttggcttggggctccattggccatgttgttgcttactacatcttggccaccactagcaatggctatgaccctgcattctttggctgatttaattcancatcatgttgttccaactgtgtttcttgcttactttttagtatgtaatgtaat

SEQ ID NO: 276222 - DNA, 276 bp, Glycine max
  unsure (1)..(276): unsure at all n locations
ttgagaactaagaagaaggaaatangcttcctcaatgatcncctccccagctgttaccaccgtcaaccgtgccggtgccggcatggttgctccattcaccggcctcaaatccatggctggcttccccacgaggaagaccaacaatgacattacctccattgctagcaacggtggaagagtacaatgcatgcaggtgtggccaccaattggcaagaagaagttcgagactctttcctacttgccagacctcgatgatgcccaattggcaaaggaagt

SEQ ID NO: 276223 - DNA, 293 bp, Glycine max
  unsure (1)..(293): unsure at all n locations
aggactagaatcatagaaaatgaacatactaatcccagatggtatgagtcttttcacatttattgtgctcatatggcttcaaatatcatattcactgtgaaagatgataatcctattggggcaactttaattggaagagcttatgtgcctgtttcggaggtcttggatggtgaggaaatagataggtgggttgaaatcttggacgaggaaaaaaacccaatacaagagggttcaaagatccatgtgaagctgcnatattttgatgtcacaaaagaccgcaactgggctcgagg

SEQ ID NO: 276224 - DNA, 293 bp, Glycine max
ctaaattctcaaaggcaccaatttcattgctcagagttcccaaattctccccaagagataaaatgtctctaatcccaaacttcttcggtggccggagaaacaatgtgttcgatcctttctcactggacgtgtgggatcccttcaaggattttcctttcccaaatacgctttcttcagcttccttccctgaattttctcgggaaaattcagcatttgtgagcacccgtgtggactggaaggagaccccagaggcgcacgtgttcaaggcagatattccaggactgaagaaggag

SEQ ID NO: 276225 - DNA, 289 bp, Glycine max
  unsure (1)..(289): unsure at all n locations
tctnactnttgagcagggctatccanaacnngnngttgttcatctnagatcaccangantatctcatnccatanttgaggaanatacatgcantataccncanagncttatgctacaagaaccatatttntcttgaaaaatcatggaanttgacgccattggccattgagtnaagtangccacatcctcagggtgaagcatatggtcctgttagcgangtctacgtgccttcgagtgaaggagtcgaagctnacatttggttactggccnaggctacgttgtngtgaat

SEQ ID NO: 276226 - DNA, 292 bp, Glycine max
agtgtcccacgttgttgctttgcaagttgcgagtctctcttcctacgacaaccgtttcctctcgccggaaaaccgacattgatctctctctccgccgatccgtccgccatgagttccggcgagctcctccacatacaaccccaggagctgcagtttccctttgaattgaggaagcagatctcatgctctttgcagttgtctaacaagactgacaactatgtggctttcaaggttaagacaacaaatcctaaagaaatattgtgttagacctaacactggagttgtgatgcct

SEQ ID NO: 276227 - DNA, 296 bp, Glycine max
ggcggggataagattaaagattcaacaatggcctctgcttctgctactcttctcaagtcatctcctgttcttgacaagtgcgagtgggtcaaaggccagacccttcgccaacctctcgtgagatgtaacccttcctcagcatcagctctcaccatcaaagctgcttcctatgctgacgagctcgtcaaaaccgccaaaacagtggcctcaccggggcgtggtattttggcgatggatgagtcaaatgcaacctgcgggaagcgtttggcatctattgggttagagaacacagaagt

SEQ ID NO: 276228 - DNA, 293 bp, Glycine max
gcagaatgttccccctgctttgcttgttcgatttttgagggagcatcgatcagagtgggctgattatggagttgatgcatactctgctgcatgccttaaagctagtccctatgcagttccttgtgcaagacctggtggcttccccagcacccaggtcattttaccccttgctcatactattgagcacgaggagttcctggaggtagttcgaatagagggtcatgcattttctcccgaggatgttgcgttggcacgtgatatgtatctattgcagctgtgcagtggagttgatg

SEQ ID NO: 276229 - DNA, 293 bp, Glycine max
caactatccgagaagaacaaatatgtcgtttcacgtctgatagcaaagagagattccgtggtaatgctggagttgttgtgacaacatataatatggttgcttttggtggtaagcggtctgaagaatctgaaaagatcattgaagaaataagaaacagagaatggggattgctcctcatggatgaggtgcatgtggtaccggcccatatgtttcgtaaagtcattagtatcactaaatctcattgtaaacttgggctcacagctacacttgtcagagaggatgaaaggattaca

SEQ ID NO: 276230 - DNA, 287 bp, Glycine max
cttcaaaacactcataacacaaagcacaaagcaaagctcatccttgagttaaaaaatggcagcagcttcttccatggctctctcatccccatccttggctggcaaggccgtgaagctgggcccatcagccccagaagtgggaagggtgagcatgaggaagaccgtcaccaagcaggtctcctcaggaagcccatggtacggcccagaccgagtcaagtacttgggcccattctctggcgagcccccgtcctacctaaccggtgagttcccaggcgatacggctggga

SEQ ID NO: 276231 - DNA, 284 bp, Glycine max
aaggaagttgtggagaagggtcatggtgacttaaaagataagccttggtggcctaaactgcagactgtggaggatctcattcaatcctgctctattatcatatggacagcttcggctctccatgcagctgttaattttgggcaatacccttatggaggttatatcgtgaaccgtccaactctagccagaaggtttatcccagaagaaggaaccaaagaatatgatgagatggtgaaggatcctcaaaaggcatatctgagaacaatcacacccaagttcgagac

SEQ ID NO: 276232 - DNA, 286 bp, Glycine max
  unsure (1)..(286): unsure at all n locations
cagaaaaacaagtagttgagaactaagaagaaggaaatggcttcctcaatgatctcctccccagctgttaccaccgtcaaccgtgccggtgccggcatggttgctccattcaccggcctcaaatccatggctggcttccccacgaggaagaccaacaatgacattacctccattgctagcaacggtggaagagtacaatgcatgcaggtgtggccaccaatnggcaagaagaagttcgagactctttcctacttgccagacctcgatgatgcccaattggcaaagg

SEQ ID NO: 276233 - DNA, 293 bp, Glycine max
  unsure (1)..(293): unsure at all n locations
gttggaaagtggaaatgcaggagagccagcaaaactgatcaggcagagataccgtgaagccgcagacttgatcaagaagggaaagatgtgtgctctcttcatcaacgatcttgatgcaggagctggtcgtcttggtggaaccacccaatacactgtcaacaaccagatggtgaatgccaccctcatgaacattgctnataaccccaccaatgtgcagcttcctggtatgtataacaaggaagagaatccccgtgtgcccatcatcgtcaccggtaacgatttctccacactct

SEQ ID NO: 276234 - DNA, 290 bp, Glycine max
  unsure (1)..(290): unsure at all n locations
agagtttgttgtgagctataagctagtttatcgtgaggagaatatgaagttgtttgttttctttgttgctgcagtagttttggtagcatgcccatgccatggcgcaggctaccaaaggttccctctccgaatgaaaactggctatggtgagcgttcttcggaggtaaaatgcgcaagttttaggcttgctgtggaagcacacaacatccgagcctttaaaaccattcctgaagagtgcgttgaaccaacaaaggactanttaatggcgaacaatttagatcagactctaa

SEQ ID NO: 276235 - DNA, 289 bp, Glycine max
gtttccatcagagctcaagtcaccactgaggcaccagccaaggttgaaaaagagtccaagaaacaggatgaaggtgtggttgtgaacaagtttaaacccaagaccccttacattggtagatgcctgctcaacacaaagatcactggggatgatgctccaggagaaacttggcacatggtcttcagcaccgagggagagattccttacagagaaggacaatcaattggggtaattccagatggtattgacaagaatggcaaacctcataaactgagattgtattctattg

SEQ ID NO: 276236 - DNA, 300 bp, Glycine max
  unsure (1)..(300): unsure at all n locations
ccggtgtcttgaaacctggaatggtggttacctttgcaccaactggactaacaactgaagttaagtctgtggagatgcaccatgaaactctcactgaggcccatcctggtgacaatgtgggattcaatgttaagaatgttgctgtcaaggatctcaagcgtggttttgttgcgtctaactctaaggatgaccctgccaaggaggctgctaacttcacatcccaagttatcatcatgaaccaccctggacagattggaaatggctatgcacctgttcttgattgccacaccncccacatnc

SEQ ID NO: 276237 - DNA, 299 bp, Glycine max
ctcattagagagtgatatttttgttcccacatatgatggaaatatggccaaagtggttgagggccaccgcagatatcttgggttcaagaaaacgattttgttgaacagaaaactcctagtcgaattgatagatcaatacaataatggagtgctgaactgggatgaattctcttcagcagtgaaggaagcccatgccaatcgcatgggtagccaaaccaagaggtttgtaatccctgacaagccaaaagaagaggattatttctatgccaacccacaggagtgtttggaaccatcagcat

SEQ ID NO: 276238 - DNA, 290 bp, Glycine max
  unsure (1)..(290): unsure at all n locations
ttcccaattcctaattgtttaaacctaattctcatttcttcatcgttcgattcttctcctcctaaagatgcagatcttcgtgaaaactttgaccggtaagaccatcacccttgaggtggagtcctccgacaccatcgataacgtgaaagcncagttcaagacaaggaagggatcccacctgaccagcagagacttatctttgcgggtaaacagcttgaggatggtcgaacccttgccgactacaacattccaaaaggaatccactctccacctcgtgcttcgcctcaggg

SEQ ID NO: 276239 - DNA, 293 bp, Glycine max
  unsure (1)..(293): unsure at all n locations
ttccacaagaactctccaancatcctccttcccacgagattctttggtgggaaaaatccaagaggtttgaaatttgaaggcagggaagatggattatttcaatgcaccaggaagaaaccatctctttgttccagggccggttaacattccggaccagatcatccgggccatgaacagaaacaatgaggactaccgttctccagcaattccagctatgacaaaaactttgcttgaggatgtcaagaagattttcaagaccactactggaaccccattctcatccctacaatggt

SEQ ID NO: 276240 - DNA, 287 bp, Glycine max
cctccggcggcgaaacggcttcgttctgcttcaggtcgaaggagttggttgaactgacgaagatgtgcagagatctgaggcacaaggtgccggagatattggaggtggaggtggatccgaagggaggaccgaggattcaagaggcggcgatgaagctctacgtttcgaagagcgcgttcgagaaggttcacttgttgcaggcgatgcaggcgattgaggcggcgatgaagagattcttctacgcgtataagcaggtgttggcggtggtgatgggaagctccgaggct

SEQ ID NO: 276241 - DNA, 290 bp, Glycine max
  unsure (1)..(290): unsure at all n locations
ctcttcttctcttgcggctngggttttagcgcagcttncttctagatttaaggaagatgggtaaggaaaaggttcacatcagtattgtggttattggccatgttgactctgggaattccactaccactggccacctgatctacaagcttggaggcattgacaagcgtgttattgagagatttgagaaggaagctgctgagatgaacaagaggtctttcaagtatgcctgggtgcttgataagcttaaggctgagcgtgaaagaggaatcacaattgatattgccttgtgg

SEQ ID NO: 276242 - DNA, 290 bp, Glycine max
  unsure (1)..(290): unsure at all n locations
tttgcattggatcttgtaatgaatagtgatggcacttgccaaggagtgattgccttgaatatggaggatggaacactacatcgtttcaaagctgcttcaacaattttggccacagggggttatggtagagcatacttctctgcaacctcagcacatacttgcactggagatggcaatgccatggttgcacgtgctgggatccctcttgaggatttggagtttgtacaatttcacccaacaggtntatntggagcaggttgccttatcacagaaggatctcgtggtgaagg

SEQ ID NO: 276243 - DNA, 290 bp, Glycine max
  unsure (1)..(290): unsure at all n locations
agtagttgagaactaagaaggagaagcaaatggcttcctcaatgatctcttccccagctgttaccactgtncaaccgtgccggtgccggcatggttgctccattcactggcctcaagtccatggctggcttccccaccagaaagaccaacaatgacattacctccattgctagcaacggtggaagagtgcaatgcatgcaggtgtggccaccagttggcaagaancngtttgagactctttcctacctgccagaccttgatgatgcacaattggcaaaggaagtagaata

SEQ ID NO: 276244 - DNA, 286 bp, Glycine max
gcactacaggaaatgcatggaagagaggttcaaggaattagtggcaagcaaaggtctagatgctgtccaaactgaggtcaaggatatggactgggagagcaccttccacttgcgtcacctccctgaatcaaacatctcagagatccctgatctcattgatgagtacaggaaggtgatgaaggattttgctttgaggttagagaaactagcagagcagctgctggacttgttgtgtgagaatcttggcctagagaaagggtacctcaagaaggctttctatggatca

SEQ ID NO: 276245 - DNA, 288 bp, Glycine max
caagactgtggctctgacaaattttgatacagagagattacaaattattcttgaaaacgagattcctgttgtaagcaatcaggtgcaacattcacttgttgatatgcgtccccaacagagaatggcagagctttgtcagcatacaggagtcaaactgataacgtatggaacagtaatgggtggtctgttgtcggagaagttccttgacaccaacatatctattccttttgctggtcctgcaataaacaccccctccctccaaaagtacaaaaggatggtagatgcttg

SEQ ID NO: 276246 - DNA, 294 bp, Glycine max
  unsure (1)..(294): unsure at all n locations
cgactgcgcttcacgatgggtgcttacaagtatgtttcggagctatggcgcaagaagcagtctgatgttatgagattcttgcagcgggtgaggtgctgggagtaccgccagcaaccttctattgtccgtttgacaaggtctactcgcccagacaaggctcgccgcttgggtttcaaggctaagcagggttatgtgatttaccgtgtncntgnacgaaggggtggccggaagagaccagttccaaaaggtattgtntatggncaagcccaccaaccaaggtgttactcaatgaat

SEQ ID NO: 276247 - DNA, 294 bp, Glycine max
cctgttgtaaccataacttgaaagatgatatactgcgcttatatcaaccggttcatttactagttggaactccaggaagaatattagatcttaccaagaaaggtgtttgtattctgaaagattgcgctatgcttgttatggatgaggccgataagcttctgtccccagagtttcaaccatctatagagcagctgattcattttcttcctacaacccgtcaaatcttgatgttttcagccacatttcctgttactgtaaaggattcaaagacaggtatcttcaaaagccttatgt

SEQ ID NO: 276248 - DNA, 289 bp, Glycine max
  unsure (1)..(289): unsure at all n locations
tgagctataagctagtttatcgtgaggngaatatgaagttgtttgttttctttgttgctgcagtagttttggtagcatggccatgccatggcgcaggctaccaaaggttccctctccgaatgaaaactggctatggtgagcgttcttcggaggtaaaatgcgtaagttttaggcttgctgtggaagcacacaacatccgagcctttaaaaccattcctgaagagtgcgttgaaccaacaaaggactacattaatggcgaacaatttagatcagactctaaaacagttaa

SEQ ID NO: 276249 - DNA, 285 bp, Glycine max
tttaccccattttctctaaatccaaacaggccccaaaagaaagagagggaaaattctcttccatggcctcttcacgccctgccaatgtgggaatccttgccatggacatctacttccctcccacctgcgtcacccaggatgctttggagggtcatgatggggtgagcaaagggaaatatactattgggcttggacaggattgcatggccttctgctctgaggttgaagatgttatctcaatgagcttgacggtagttacttcacttcttgaaaaatttaatgttg

SEQ ID NO: 276250 - DNA, 292 bp, Glycine max
  unsure (1)..(292): unsure at all n locations
ctagtttcttacaaggctctactctactgcttcaccttctgctctagaaaattcagtggtgatacatggcttcggctactctctctgtagccaaaccagcccttcaggcaaatgggaaaggcttctctgaattctctggcctccgcagctcatcaggcttccttcccttttctagaaaatcttcagaggatttccattctgtcattgccttccagacctatgcagttggaagcagtggaggatacaagaagggtgtgacagaagcaaaactgaaggttgccataaaggnttg

SEQ ID NO: 276251 - DNA, 291 bp, Glycine max
ctagggttatcatttctccatttccattttctctctcacttttcaagaatcgtaagctatgggaaagtcttacccaactgtgagtgctgattaccagaaggccgttgagaaggcgaagaagaagctcagaggcttcatcgctgagaagagatgcgctcctctaatgctccgtttggcatggcactctgctggaacctttgacaagggcacgaagaccggtggacccttcggaaccatcaagcaccctgccgaactggctcacagcgctaacaaggtcttgacatcgctgtt

SEQ ID NO: 276252 - DNA, 286 bp, Glycine max
gggccttctacggcttccagatcgccatcgagaacatccactccgagatgtacagcctcctcctcgaaacctacatcaaggactccgaccagaagaaccacctcttccgtgccatcgacaccatcccctgcgtcgctaagaaagcccagtgggcccttcgctggatcgattcctccgactccttcgccgagcgtctcgttgccttcgcatgtgttgaaggtattttcttctctggaagcttctgcgctatcttctggctcaaaaaacgaggatcatgccggggctc

SEQ ID NO: 276253 - DNA, 287 bp, Glycine max
caaaggagttgtaaattaagagcatggctgcacaagctcttgtatcatcatcatctcttaccttctcagccgaggctacaagacaaagtcttggaccaagatcactccaatctccatttggcttctcaagaaaagcctcctttcttgttaaggcagctgctactccccctgtcaagcaaggatcagacagacctttgtggtttgcatcaaagcaaagtctttcctacttggatggcagccttccgggtgactatggatttgaccctctgggactttcggaccctgaa

SEQ ID NO: 276254 - DNA, 290 bp, Glycine max
gttacagccgcaccttgattcagagcagagcgaccttgaagagctatggctgtcggaaagaataagaggatttccaagggaaagaagggtggcaagaagaaagccgctgatccctttgccaagaaggactggtacgatatcaaggccccttccgtctttcaggtcaagaatgttggcaaaaccctcgtctctcgtacccagggaaccaagattgcttctgaaggactcaaacatagagtgtttgaggtctcattggctgatctccaaggagatgaagaccatgccttcaa

SEQ ID NO: 276255 - DNA, 292 bp, Glycine max
  unsure (1)..(292): unsure at all n locations
caattgaagttaaaagccttagccttccctacaactccaaacancgaagacatcatcatccatggctgcctccgtctccactgtacggagctgtcaacagagctcttttgaacctgaatggttctggagctggagcttcagctcccagttcagccttctttgggaccagcttgaagaaggttattgcctcaagggtccccaacagcaaggtttccggtggaagcttcaagattgttgctgtagaagagaagaaagagattgaagagacccagcagaccgacaaggacagatg

SEQ ID NO: 276256 - DNA, 288 bp, Glycine max
gaggacgggcgcaccctcgccgactacaacatccagaaggaatcaacccttcacctcgtcctccgtctccgtggtggcatgcagatcttcgttaagaccctcaccggcaagactataaccctagaagtcgagagctccgacaccatcgacaacgtcaaggctaagatccaggacaaggagggtatccccccagaccagcagaggctgatcttcgccggcaagcagctcgaggacggacgtacccttgctgactacaacatccagaaggagtcaactctccattggtgt

SEQ ID NO: 276257 - DNA, 284 bp, Glycine max
ctcgtgtttccgtttccgtttcaatttcctctcacaggctttaaccttaccagctcgagataagacatggaccggatcaaaggcccatggagtccggaggaggacgaggctctgcagaagctggtggagaaacacgggcccaggtactggtctctgatcagcaagtccatcccgggccggtccggcaagtcctgcaggctccggtggtgcaaccagctgtccccccaggtggagcaccgggccttcacggccgaagaggacgacaccataatccgggcccatgc

SEQ ID NO: 276258 - DNA, 286 bp, Glycine max
  unsure (1)..(286): unsure at all n locations
acaaaacttatcaaaatctcatatactgattcagttctatacataaccatcganatttactatcaaaccaaaaattctccaaaatctcttcacctctgtgatgaccatggaatacagaaccttagaactcaacatcatatccgcaaaggacataagaacgttaacctcttctccaagatggacgtatacgccgtcgttacgctctccggcgaccctctccaccctcagggcgccaccacccagtccacaaagacgcggcagcaaccccagtggaatacccgtgaaa

SEQ ID NO: 276259 - DNA, 282 bp, Glycine max
  unsure (1)..(282): unsure at all n locations
ggttctgatgctccaaaagacagctgggatcttgaaaaactaactgcaaaaattcagcaatattgctacttgttgaatgatctatcccctgatttgctggggaacacatgttcagattacgaggaattgcggaattatctccgtcttcgggtcgtgaagcctacctgcagaaaagggatattgtggagcaacaagcagcaggcttgatgaaagaagcagagcggttcctaatcttaagcaatatcgatcgcctgtggaaagaacatctgcagcataaanttg

SEQ ID NO: 276260 - DNA, 282 bp, Glycine max
  unsure (1)..(282): unsure at all n locations
tcntcttctcttgcggctagggttttagcgcacttcttctagatttanggaagatgggtaagganaaggtncacatcagtattgtggtcattggccatgtcgactctgggaaatccactaccactggtcacctgatttacaagcttggggcattgncaagcgtgttattgcgaggtttgagnaggnagctgctgagatgaacaagaggtctttcaagtatgccgggtgctggacaaacttaaggctgngcgtgnaagaggaatcaccattgatattgctttg

SEQ ID NO: 276261 - DNA, 283 bp, Glycine max
  unsure (1)..(283): unsure at all n locations
ctgagtcttgcaattgaagttgaagtcttgcccttctctcttcaactccaaacacaagacattcatcatccatggctggcctccgtctccactgtcggagctgtcaacagagctcttttgaacctgaatgggtctggacctggggtttcnctcccagttcatccttctttgggagcagcttgaagaaggttattggctcaagggtccccaacacaaagatttcctctggaagcttcaagatgttgctgtagaagagaagaaagagattgaagagacccagcag

SEQ ID NO: 276262 - DNA, 281 bp, Glycine max
  unsure (1)..(281): unsure at all n locations
gnagtgaccccaatatacttagccatatctttacttcccaaaacttgctctacaatgagtttccttcgttcttttgcaagaaacaaggatatatcaaaagtaggacgcagaggtatccattgcatgcagaaactatgtgcagaaaaatatctcctgattcactagagaaggcccaaaatcgtgtgatagatgctgcactcacacttgttcgagaaaatacaaggcttaagaaagaatcgtggcatagtttgggaggtgctgtggcaattcaatcttcttgg

SEQ ID NO: 276263 - DNA, 285 bp, Glycine max
  unsure (1)..(285): unsure at all n locations
cttttctcttctctgtctaaggggtgccctgagatcacattgaaccaatggtgaaggctgtggccgttcttggcagcagtgagggtgtcactggaactattcacttcgttcaggagggaagtggtccaaccaccgtaactggatctcttgtggtcttaagcctggtctccatggtttccatgtccatgccttgggggacactaccaatggttgcctctcaactggatcacatttcaatcctaataacaaggagcaggtgcncctgaggatgagaatcgtcagctg

SEQ ID NO: 276264 - DNA, 280 bp, Glycine max
  unsure (1)..(280): unsure at all n locations
agaaattcttcgttacacatattatcaccagaatgaagacggaggatggggactacacatagagggtcatagcactatgttttgtactgcactgaactatatatgcatgcnaatgcttggagaaggacctaatggaggtcatgacatgcttgtgctagagcaagaaagtggattcgagatcatggtggtgtaacacatataccttcatggggaaaaacttggcttcgatactcggtgtatttgattggtgcggaacaacccaatgcccccagagttttgg

SEQ ID NO: 276265 - DNA, 280 bp, Glycine max
agaagaacaagtagttgagaactaagaaggagaagcaaatggcttcctcaatgatctcttccccagctgttaccactgtcaaccgtgccggtgccggcatggttgctccattcactggcctcaagtccatggctggcttccccaccgaaagaccaacaatgacattacctccattgctagcaacggtggaagagtgcaatgcatgcaggtgtggccaccagttggcaagaagaagtttgagactctttcctacctgccagaccttgatgatgcacattgg

SEQ ID NO: 276266 - DNA, 282 bp, Glycine max
  unsure (1)..(282): unsure at all n locations
gcacgcaggaggaggagattgatcgagagaagagaagatgactacacgcttcaagaagaacaggaagaagagaggccacgtgagtnccggccatggccgcatcgggaagcaccggaagcaccctggaggacgcggtaatgccggagatggcaccaccaccggatcctctttgacaagtaccaccctgngttcttcggcaaggtcggaatgcgctattttcacaagctccgcaacaattctgactctccgatcctacaacatcgacaagctctggtccctggt

SEQ ID NO: 276267 - DNA, 275 bp, Glycine max
  unsure (1)..(275): unsure at all n locations
ggcaatgacacatccgatggcagtgcactaactgcaatattgatatggaaagtttactctctgaccagaaccgaagcattgccacacttgccattactactctattgaagacaggnaatgaatcaagtgtggaccgtcttatgaanagattacaaatttcatgtctgatattgctgatgagttcaaaattgttgttgttgaagcaataagatcatgtgctgaaattcccttaaaatatagatctctgatgaattcctaagtaacatcttagggaa

SEQ ID NO: 276268 - DNA, 276 bp, Glycine max
atctttcttctctctctgtgtgtgcgcttcaacggcaaccagaagcagccatggccactgcaaggactgtgaaggatgtttcacctcatgagttcgttaaggcgtactcctctcacctcaagcgatccggcaagatggagctgccgagtggactgatattgtgaaaactgcaagatttaaggagttggctccttatgatcctgactggtactatgtcagagctgcttccatggcaagaaagatctactgagaggaggattggtgttggtgccttca

SEQ ID NO: 276269 - DNA, 270 bp, Glycine max
  unsure (1)..(270): unsure at all n locations
tttctctctcccttagtcaaagggactcgttgttcttctcccaggttatttagannagcaaaatggtgaagatttgctgcattggtgctggatatgtggggggtcctactatggcagtcattgcacttaagtgccctccattgaagttgctgttgttgatatctctaaatcccgcattgcagcctggaacagtgaccagcttcctatctatgaacctggccttgatggtgttgtgaagcaatgccgtggcaagaacctcttcttcagcac

SEQ ID NO: 276270 - DNA, 282 bp, Glycine max
tggtacagtgtcagggctttggttttgggcaccaacaagggagcttgcacaacagattgagaaggttatgcgagctctaggtgattaccttggtgtcaaggttcatgcttgtgttggtgggaccagtgttcgtgaggatcagcgcatctccaagctggtgtccatactgttgttggcactcctggacgtgtgtttgacatgctacgaagacaatctcttcgcccagatcacataaaaatgtttgttttggatgaggctgatgaaatgctttcagtggtttca

SEQ ID NO: 276271 - DNA, 278 bp, Glycine max
  unsure (1)..(278): unsure at all n locations
caagtctttaattctcgaagacattccaaaccatggaaccacncacttccatatgtaactcctgggtttacaattcaaaacactacaagactgatcgcatttnctttgccaacaatacatatcnncccaagcnagacaccggcncacttgtcaagtacagagaagaagaattgaagaatgtaagaggggatggaactggtgagcgcaaggaatgggataggatctatgattatgatgtctacaatgacttgggcgatccagataagggtgaaaagtat

SEQ ID NO: 276272 - DNA, 273 bp, Glycine max
ctagtatccgatcctctgtcctctcgaagctttcatcgttcaacatattctcaccatctcagtccatgggcctgctatcttgttttaggtctaccgtcctgagaaaatgttccaaaggaagctctggcatgtcaagattccttatacgaacaattttcaacgaaacttgatttcgtctggtggcaatgaatcgtattatgggtattttaacaggagatccatacacttcactttatatgggaatggaatgtgggtgggatacaagtgctagaa

SEQ ID NO: 276273 - DNA, 191 bp, Glycine max
gagaaagaaaagaatggcaaagttaataaaattctttgagttgaacacaggggccagattccttctgttgggttaggcacttggcaagctgagcctggtgttgtagccaaagctgtcaccacagccattctggttggatacaggcatattgattgtgctcaagcgtataacaatcaagcagagattggttc

SEQ ID NO: 276274 - DNA, 273 bp, Glycine max
tgcaattgaagttgaagtcttgcccttctctcttcaactccaaacacaagacatcatcatccatggctgcctccgtctccactgtcggagctgtcaacagagctcttttgaacctgaatgggtctggacctggggtttagctcccagttcatccttctttgggagcagcttgaagaaggttattggctcaagggtccccaacacaaagatttcctctggaagcttcaagattgttgctgtagaagagaagaaagagattgaagagacccagca

SEQ ID NO: 276275 - DNA, 270 bp, Glycine max
  unsure (1)..(270): unsure at all n locations
agaaatggcgatggcaatngcgcttcgcaggctttcatcttcaattgacaagcctctgcgccctctcttcaatgccggtnccctctactacaagtcgtctntgcctgatgaagctgtttacgacaaggagcgacccgagttacatggccgaagcagttgaatgctccacttgaggtcgtggatcctgagattgctgatattattgagcttgagaaagctaggcaatggaaggggctagantgataccgtcagagcatttcacctctgtgt

SEQ ID NO: 276276 - DNA, 256 bp, Glycine max
  unsure (1)..(256): unsure at all n locations
ctccactctctttctctagtcctgttatttctcagcgcgtaaancatggctnanttggtggagaaaaccacgagtggtcgcnagtacaaggtcaaggacctttcccaggccgacttcggcgcctcgagatcgagctggccgnggttgagatgcccggcctcatggcctgtncggaccgagttcggcccctcccagcccttcaagggggcccgcatcaccggctccctccacatgaccatccagaccgccgttctca

SEQ ID NO: 276277 - DNA, 249 bp, Glycine max
  unsure (1)..(249): unsure at all n locations
tgcaattgaagttaaaagccttagccttcccnnacacactcattacatcaagacatcntcatccatgggcngcctccgtctccactgtcggagctgtcaacagagctcttttgacctgaatggttctggagctggagcttcagctcccagttcagccttctttgggaccagcttgaagaaggttattgcctcaagggtccccaacagcaaggtttccggtggaagcttcaagattgttgctgtagaaga

SEQ ID NO: 276278 - DNA, 271 bp, Glycine max
  unsure (1)..(271): unsure at all n locations
gttttgtttatttgaaattaacaagtagtaaagatgtttggaatcatcggaggaaacaagggtcacaagataaaggggaacttggtgattatgcgaaagaatgtgttggatatcaacagcattaccagtgttaagggttcatcggaaccggcattaacatcattggaggagtcgtcgacaccgttacngctttggcgtcccacatctccatccagctncatagtgccaccaaggctgatggactgggaaaggaaaagttggaaagctacaa

SEQ ID NO: 276279 - DNA, 270 bp, Glycine max
gtctaagcagaaatggcctcttcagtgatggcatctgtggccctcaaacctgcccctttcactgttgagaagtcctcagttagaggccttccctccctctcaaggaactcctcttcattcagagttgtggccagtgtggcaagaagatcaagactgacaagccttatggaattaatggtggcatggctttgagggaaggagttgatgcatctggcaggaaaggaaagggaaagggcgtttaccagtttgtagacaaatacggtgctaatg

SEQ ID NO: 276280 - DNA, 270 bp, Glycine max
  unsure (1)..(270): unsure at all n locations
ctacatttggctatgaaggggatccaatgnngctgcttttctccaaatctgcaagcnctcatcatggatttgcagcatattattcctttgttgagaaaatcttcaaagctgatgctgtacttcattttgggacacaggttcccttgaattcatgcctggaaaanaggtggggatgagtgatgtatgttaccctgacagtctgattgggaatattccaaatgtatattactatgctgcaaacaacccttctgaggccaccattgccaagcg

SEQ ID NO: 276281 - DNA, 296 bp, Glycine max
  unsure (1)..(296): unsure at all n locations
gccttcctctctgcagagtgcagagctttctctccccgttgcttcattcattctcaacaacaaaccaatntttaaaatgagggggggcttgtggcaacttgggcaatcgatcactcgccgtcttgcccatggagataagaaggctgttgctcgtcgatgttttgcctcagaagctgagctgaaaaagacagtgtttcatgacttccatgttgctcatggtgggaagatggttccatttgctgggtggagcatgccaatccaatacaaggactcaatcaggactctaccatcaatgg

SEQ ID NO: 276282 - DNA, 290 bp, Glycine max
  unsure (1)..(290): unsure at all n locations
cacctcgagggattgcgggaagaagaggtttggcagggactattctggttcacaagnnnnnnnnnnnnnnnnnnnnnnnnnnnnnnnnncttgctgatgttgctgctgaagcaaaacatgcatctgaaatagtgggaacaatgggtgttgctttgactgtgtgctcaattcctggtcaagttgcatcagatcgtttggggccaggaaagatggaacttggtcttggaattcaggagaacctggggcagctgtggctgatatcagcccgtaaagtggtggtttctcatgtt

SEQ ID NO: 276283 - DNA, 291 bp, Glycine max
  unsure (1)..(291): unsure at all n locations
tgattttaaaatacgtaccgttgagcaagatggaaagaccattaaactacagatctgggacacagctgggcaagaacgatttaggacaatcaccagtagctactaccgtggtgcccatgggatcattattgtttatgatgtgacagatgaagagagcttcaataatgtgaagcagtggctcagtgaaattgatcgctatgcaagtgataatgttaacaagcttttggttggcaacaagtgtgatctggaagcaaatagagcatgtcatatgaaacagctangcnttgcaga

SEQ ID NO: 276284 - DNA, 290 bp, Glycine max
gttggtactatcgtaccaaaatcttctataaataagacccccagccctgaagtcatatccatgctaaatgatatgtgcaatgatcctaaaaatactgtgttcattgtgagtggaaggggaagagattctttaagtgattggtttacttcatgcaaaatgattggacttgcagccgaacacggatactttctaaggtggagtaaagatctgaatgggaaaccagtcccttgtctcctggatctgattggaaaaagatgtggaacctgtcagcattgtatacagaggcaacg

SEQ ID NO: 276285 - DNA, 297 bp, Glycine max
  unsure (1)..(297): unsure at all n locations
gaccgncaccaagcaggtctcctcaggaagcccatggtacggcccagaccgagtcaagtacttgggcccattctctggcgagcccccgtcctacctaaccggtgagttcccaggcgactacggctgggacactgctgggctttccgcagacccagaaaccttcgccaagaaccgtgaactcgaagtgatccactccaggtgggccatgctcggagccttgggctgcgtcttcccggagttgctgtcccgcaacggggtgaagttcggagaagccgtgtggttcaaggccgggtccca

SEQ ID NO: 276286 - DNA, 296 bp, Glycine max
  unsure (1)..(296): unsure at all n locations
gaccgtcaccaagcaggtctcctcaggaagcccatggtacggcccagaccgagtcaagtacttgggcccattctctggcgagcccccgtcctacctaaccggtgagttcccaggcgactacggctgggacactgctgggctttccgcagacccagaaaccttcgccaagaaccgtgaactcgaagtgatccactccaggtgggccatgctcggagccttgggctgcgtcttcccggagttgctgtcccgcaacggggtgaagttcgggagaagccgtgtggntcaaggccgggtcc

SEQ ID NO: 276287 - DNA, 234 bp, Glycine max
tagtgcctccttgccagaagttaaaatggcccaagaaactttcctattcacatctgaatcagtgaacgaggggcaccctgacaagctctgtgaccagatctccgatgctgtgctcgatgcatgcttggagcaggaccctgacagcaaggttgcctgtgaaacctggcaccaagaccaacatggtgatggttttcggagagatcacaaccaaggccaagtggactatgagaagat

SEQ ID NO: 276288 - DNA, 252 bp, Glycine max
tctcagatctcttctttctctacgccgcacgccgaaaccatggccggaaaaggagagggtcctgctatcggaatcgatctcggaaccacctactcttgcgtcggtgtgtggcaacatgaccgcgttgaaatcatcgccaacgaccaagggaacagaaccacgccgtcttacgtcggattcactgacaccgagcgtctcatcggtgatgcggccaagaatcaagtcgccatgaaccccatcaacaccgtcttc

SEQ ID NO: 276289 - DNA, 297 bp, Glycine max
  unsure (1)..(297): unsure at all n locations
cttgaagttatcagattttctcgcttatggaancaaatctgtatcccaagatgtcttgcctgtcttgactgatgcattcgatggaaatattttgagccttgagtttgataattttgctgaagtgcacaaactctatgaaggtggagttacactacctacaaactttcttagcaagatcgcccctataccagtgatcaaggaaatttttcgaactgatggcgaacagttcctcaagtatccaccacctaaagtgnatggcaggtggataagtctgcatggatgactggatgaagaatt

SEQ ID NO: 276290 - DNA, 290 bp, Glycine max
  unsure (1)..(290): unsure at all n locations
gcttcaccttctgctctagaaaattcagtgctgaaacatggcttcggctactctctctgtagccaaaccagcccttcaggcaaatgggaaaggcttctctgaattctctggcctccgaagctcatcaggcttccttcccttttctagaaaatcttcagaggatttccattctgtcatgcctccagacctatgcagttgncaagcagtggaggatacaagaaggtgtggacagaagcaaaactgaaggttgccataaagggnttggaaggattggaangaattcttgagtg

SEQ ID NO: 276291 - DNA, 297 bp, Glycine max
aaggaactggggtgtttgtagacagagaaggtgcagggaaacacattcaagcaggagctaagaaggtgctcattactgctcctggtaaaggagacatccccacatatgtggttggtgtcaatgagtatgattacagccctgatgaacccatcatcagcaatgcatcttgcaccactaactgccttgcaccctttgtcaaggtccttgatcagaaattcggtatcatcaagggcaccatggaccaccacttcactccttacaccggcggaccaaaggcttctcgacgcgagccaccgt

SEQ ID NO: 276292 - DNA, 295 bp, Glycine max
  unsure (1)..(295): unsure at all n locations
cnggaagatatcttgacaaaatggccgtaacagaagcaaacctaaagaaggctggcttccacacatgggagcagtnaattctcaaggatccacatcttatcactccaaatgcactttcatacaaatcagcaatgagagagaatctgttgaggcagggatacagaattgttggaatcattggagaccaatggagcgatctgcttggagaccacagaggcgaaagcaggacctttaagcttcctaatcccatgtactacattgagtagtaccttcacctctctcaacaatctagcta

SEQ ID NO: 276293 - DNA, 289 bp, Glycine max
  unsure (1)..(289): unsure at all n locations
atccctctttcttcctcttcctcagtagtgcgattttcgattctcttctctgcaactatgcctaaccctaaggtcttcttcgacatgaccatcggcggtcaacctgccggccgcatcgtgatggagctctacgccgacgtgactccgagcaccgccgagaacttccgcgcgctctgcaccggcgagaagggcgccgggcggagggcaagcncctccactacaaaggctcgtccttccaccgcgtgatcccgaattcatgtgccagggcggcgacttcaccgccggaaag

SEQ ID NO: 276294 - DNA, 290 bp, Glycine max
gccaatgcgcagaacaaagagagagcgaggcttaagaaactcttcgaagaagcctacgagagatgccgcaatgctccaatggaaggtgtttccttcaccatcgaagacttcactgctgctcttgacaagtacgacttcgattctgaagttggcggcaagattaaaggcactgtgttctacacagataacaatggagcagttgttgatatcactggcaaatcttcgggcatattgccactggcaagaggcgtgcatccacaggttaagcagttgaagaagcaggcttattc

SEQ ID NO: 276295 - DNA, 288 bp, Glycine max
  unsure (1)..(288): unsure at all n locations
tctttttctcaaccaaaaggggttcaattctagctagttctattacatcgtccgcncaccatgaacatggcgatcgtgcttctgttcatggttttcgcagtttcatcagctttagacatgtcaataatatcacatgacaacgctcatgcggatagggccacgaggcgcaccgacgacgaggtgatgtcaatgttcgaggagtggctggtgaaacacgacaaggtgtacaacgcgctcggtgagaaggagaagagtttcaaatctttcaagaacaatctgcgcttatcg

SEQ ID NO: 276296 - DNA, 290 bp, Glycine max
  unsure (1)..(290): unsure at all n locations
cnaggnttcccttagtaacggcgagcgaaccgggaaaagcccaccatgaaaatcggtcgccctcggcgtccgaattgtagtctggagangcgtcctcagtggcggaccgggcccaagtcccctggaagggggcgccaganagggtgagagccccgtcgtgcccggaccctgtccgcaccacgaggcgctgtcggcgagttcgggttgtttgggaatgcagccccaatcgggcggtaaattccgtccaaggctaaatactggcgagagacgatagcgaacaagtacgcgag

SEQ ID NO: 276297 - DNA, 289 bp, Glycine max
  unsure (1)..(289): unsure at all n locations
gttccgcagaaaggccttcttgcattggtatactggagaaggtatggatgaaatggagttcactgaagctgagagcaacatgaatgaccttgtgtctgagtaccagcaataccaagatgcaactgctgatgacgagggctatgagtatgaagatgaggaagaanctcaggaagatgaggcttaaaacagtgtagtagtgttttgcagggtgttctgtttgtgtgttttgttgtgatactctgtttaacgttgtgttttttttcatcatccctggacctgaatacttttt

SEQ ID NO: 276298 - DNA, 157 bp, Glycine max
gcataccccatgacttattggacactgtggagaggttgaccaaagagcactacaggaaatgcatggaagagaggttcaaggaatttatggcaagcaaaggtctagatgctgtccaaactgaggtcaaggacatggattgggagagcaccttccacac

SEQ ID NO: 276299 - DNA, 283 bp, Glycine max
  unsure (1)..(283): unsure at all n locations
ttcttccccaccatcacaccaancaaacctcactctncctggccatggtcatgnnngcctttccgccacttcgaaccggtttccaaatgcagcaccgaaaaccggtttaaccaaaccgtggcctcggacttggacggcaccctcctggtgtcccctagcgcctttccttactacatgctcgtcgccatcgaagccggcagcttcctccgtggccttgtcctccttggatccgtccctttcgtgtacttcacgtacatattcttctccgagaccgcggccatca

SEQ ID NO: 276300 - DNA, 288 bp, Glycine max
  unsure (1)..(288): unsure at all n locations
tgaagttgaagtcttgcccttctctcttcaactccaaacacaagacatcatcatccatggctgcctccgtctccactgtcggagctgtcaacagagctcttttgaacctgaatgggtctggacctggggtttcagctcccagttcatccttctttgggagcagcttgaagaaggttattggctcaagggtccccaacacaaagatttcctctggaagcttcaagattgttgctgtagaagagaagaaagagattgaagagacccagcagaccgncaaggacagatggc

SEQ ID NO: 276301 - DNA, 276 bp, Glycine max
  unsure (1)..(276): unsure at all n locations
gactagcaagtgatgatgaaccatttgctggactagcttttaagatcatgagtgatccatttgtaggttcccttacgtttgtcagggtgtatgctggnaagctaggtgctgggtcttatgtactcaatgcaaacaaagggaaaaaggagagaattggtagactttagaaatgcatgcaaacagcagagatgatgttaaagtggcttagctggtgatatatgctctgcagtttgaaagatactattacagtgaaacatgtgtgacccggatatccat

SEQ ID NO: 276302 - DNA, 285 bp, Glycine max
  unsure (1)..(285): unsure at all n locations
cttggattaccttggaagaaatggtgattccatgggtggaactggttggaagatgactgaatttggttgggatgtcaagtatgctggtgttcagacattagttgccaagttcctgatgcaaggcaaagctgggcatcatgctccagttttcgagagatatcagcagaaggctgaatctttcatgtgttcgtgcctggaaagggtgatcgcaatgttcagaagactccgggtggcctcatcttccgccagagcatggaacaacatgcatttgtcacaatgcctcnt

SEQ ID NO: 276303 - DNA, 285 bp, Glycine max
  unsure (1)..(285): unsure at all n locations
gncatggaaacaggcatagcatgctacactcgcgggcctttcttgcctagtgtttcttccaagcactctccaccttccatttctccatcttttggcttgaggagtctgaaatcaagctctttatttggagaatcgctaagagtggcctccaaatcaacaataaaggtttcaaagacaaagaatacttcactcgtgaccagatgtgaaattggtgacagtctcgaagaattcctcacaaaagcaacaccagataaggggttgatcagttgttggtgtccagggaga

SEQ ID NO: 276304 - DNA, 283 bp, Glycine max
tgcaattgaagttgaagtcttgcccttctctcttcaactccaaacacaagacatcatcatccatggctgcctccgtctccactgtcggagctgtcaacagagctcttttgaacctgaatgggtctggacctggggtttcagctcccagttcatccttctttgggagcagcttgaagaaggttattggctcaagggtccccaacacaaagattcctctggaagctcaagatgttgctgtagaagagaagaaagagatgaagagacccagcagaccgacaagaca

SEQ ID NO: 276305 - DNA, 282 bp, Glycine max
  unsure (1)..(282): unsure at all n locations
cttggattaccttggaaganatggtgattccatgggtggaactggttggaagatgactgaatttggttgggatgtcaagtatgctggtgttcagacattagttgccaagttcctgatgcaaggcaaagctgggcatcatgctccagttttcgagagatatcagcagaaggctgaatctttcatgtgttcgtgcctggaaaggtgatcgcaagttcagaagactccgggtggcctcatcttccgccagagaggaacaacatgcatttgtcacaatgcctcatt

SEQ ID NO: 276306 - DNA, 287 bp, Glycine max
gctaaaatcacttcatcatggcttcctcgtgtgcttcctctgccattgcagctgttgccatctccacaccaagttcccagaagaatggatcactcttgggaagcacaaaagcttcttttcttagtgggaggaaactgaaggtgaacaactttacagcaccagttggagcacgatccagcactacagtttgcgcagttgctgagcctgataggcctctgtggttcccagggcagcacccctcctccatggctagatggcagtttgccaggagatttggcttgatcctc

SEQ ID NO: 276307 - DNA, 284 bp, Glycine max
gtccaagcagcctccaattcgtgccactctcttcaaaatggccgttaccttctcaaatctccacacagaatcaggtctcaagtccctcgacgacttcctctctgggaaggtctacgtttctggggatcagttcacaaaggacgacatcaaagtgtatggtgctgttttggagaagccaggtgactcttttcccaatgctgccaagtggtacgaggttgtctcatctcagcttgctgcaagcttccccggcaatgctcaagggtgagatcatggcaaagctctgc

SEQ ID NO: 276308 - DNA, 276 bp, Glycine max
aaaggattctacccgccgctcgatgggaattgcgcttcaaggcgtctcgtagggctaatccgcctcacgagggtcaccaacggcacgtgcctttggggggccgaggccccctactgctggtcggcaaacggacggcgggcgcacgcgtcgcttctagcccggattctgacttagaggcgttcagtcataatccaacgcacggtagcttcgcgccactggcttttcaaccaagcgcgatgaccaattgtgcgaatcaaggttcctctcgtactaggt

SEQ ID NO: 276309 - DNA, 283 bp, Glycine max
cgctttatgaattcattccgatctttggagaataatactcaggggcaaccagataaagttgtttccttggcaaaatggaggatcttaaatagactgcatgataggaatgagactttgtactacagagttcttattgataatattaaagagtttgctccaataatatatactcctacagttggattagtgtgtcaaaattattcagggttatttaggcgtccacgtggaatgtatttagtgccaaagataaaggagagatgatgtcaatgatctataactggcc

SEQ ID NO: 276310 - DNA, 284 bp, Glycine max
  unsure (1)..(284): unsure at all n locations
ttaatcctatcctatcgtagcaaagaaaganaganagaaaaccctagcttaccttttcaactttcaagatgcaaatccttccgttaagacactcactggtaagacaatcacccttgaggtggagagttcagataccatagataatgtaaagtccaagattcaagacaaggaagggatcccaccagaccagggccgtctcatttttgctggcaagcagcttgaggatggacgtacacttgctgatacaacatccaaaaggagtccactcttcacttggtgctcgg

SEQ ID NO: 276311 - DNA, 284 bp, Glycine max
  unsure (1)..(284): unsure at all n locations
gttaaaagccttagccttccctacaactccaaacnggtnagacatcntcatccatggctgcctccgtctccactgtcggagctgtcaacagagctcttttgaacctgaatggttctggagctggagcttcagctcccagttcagccttctttgggaccagcttgaagaaggttattgcctcaagggtccccaacagcaaggtttccggtggaagcttcaagattgttgctgtagaagagaagaaagagatgaagagacccagcagaccgacaaggacagatgga

SEQ ID NO: 276312 - DNA, 282 bp, Glycine max
  unsure (1)..(282): unsure at all n locations
ctttgttcactcttcttctcttgcggctagggttttagcgcantttcttctagatttaaggnagatgggtaaggnaaaggttcacatcagtattgtggtcattggccatgtcgactctgggaaatccactaccactggtcacctgatttacaagcttggaggcattgacaagcgtgttattgagaggtttgagaaggaagctgctgagatgaacaagaggtctttcaagtatgcctgggtgctggacaaacttaaggctgagcgtgaaagaggaatcaccat

SEQ ID NO: 276313 - DNA, 277 bp, Glycine max
ttgaatcaggtttaccaaatattgcaatatgtggaattgtatcagagagaaaacaggctcaaacccatgcctattatactctgtggtgactggaatggaagcaagcgtgggcatgtttacaagttcctaaggtcacaggggtttgtatcatcatatgacattgctaatcaatacagtgacagttatgcagattctcacaagtgggttagtcaccgaaatcataggggaaatatctgtggtgttgactcattggcttgcaatcccaaccaagcacgta

SEQ ID NO: 276314 - DNA, 279 bp, Glycine max
  unsure (1)..(279): unsure at all n locations
cgaganatggcgatggcaatggcgcttcgcaggctttcatcttcaattgacaagcctctgcgccccctcttcaatgccggttccctctactacaagtcgtctttgcctgatgaagctgtttacgacaaggagcgacccggagttacatggccgaagcagttgaatgctccacttgaggtcgtggatcctgagattgctgatattattgagcttgagaaagctaggcaatggaaggggctagaatgataccgtcagagaatttcacctctgtgtctgtga

SEQ ID NO: 276315 - DNA, 296 bp, Glycine max
  unsure (1)..(296): unsure at all n locations
annaaaagctaaagttgggaaggggaagaaagttcaagggatcctaacatgcctaagcgtcctcccacagctttctttgtcttcttggatgattttagaaaatctttcaaagaagctaatcctgattctaaggatgttaaaagggttggtaaagaggctggtgaaaantggaggtctatgactgatgaagagaagaagccatatcttgacaaagttgctgagcttaaggaagagtacgagaaggctatgggaaagctngaagctggtccagatgaagaagatcaaactgtgtctga

SEQ ID NO: 276316 - DNA, 281 bp, Glycine max
  unsure (1)..(281): unsure at all n locations
aattgttgtaactttttgattnctaaattctctaaaattcgaaattntnatttcgtnangggatagnnatntntgtgcntgagngagtatggctggacaaggtgagggtcctgctancggaatcnatttgggaacgattactcttgcntcggcgtgtggcaacacgatcgtnttgaaatcatagccaacgatcagggtaacagaactaccccatcctacgtggcttcaccgacacagaanggttgatcggcgctgcggcnagaaccaggtcgctatgaacc

SEQ ID NO: 276317 - DNA, 288 bp, Glycine max
  unsure (1)..(288): unsure at all n locations
gagataactagaaacagtgtgatgaaaatgaaggtccttgttttcttcgttgctacaattttngtancatggcaatgccatgcgtaacgatatgttccctctccgaatgaacactggctatggtgcccgtactccggaggtgaaatgcgcaagttggaggcttgctgtggaagcacacaacatctttggctttgagaccattcctgaagagtgcgttgaagcaacaaaggaatacatccatggcgaacaatatagatcagactccaaaacagttaaccaacaagctta

SEQ ID NO: 276318 - DNA, 292 bp, Glycine max
  unsure (1)..(292): unsure at all n locations
gntcatnttcctctttttctcaaccaaaaggggttcaattctagttagttctanttacatcntccgtnancatgaacatggcnacnnntgcttctgnncatnaantttcncagnttcatcagctttagacatgtcaataatatcacatgacaacgctcatgcggatagggccacgangcngcccgacgacgaggtgatgtcaatgttcgaggagtggctggtgaaacacgacaaggtgtacaacgcgctcggtgagaaggagaagaggtttcaaatcttcnnnnncnatctg

SEQ ID NO: 276319 - DNA, 293 bp, Glycine max
  unsure (1)..(293): unsure at all n locations
aaaaagctanagttgggaaggggaagnnagtcaaggatcctaacatgcctaagcntcctcccacagctttctttgtcttcttggatgattttagaaaatctttcaaagaagctaatcctgattctaaggatgttaaaagggttggtaaagangctggtgaaaantggaggtctatgactgatgaagagaagaagccatattcttgacaaagttgctgagctaaggaagagtacgaganggctatggaaagctagnagctggttcaagatgaagaagatcaaactgtgtctgga

SEQ ID NO: 276320 - DNA, 290 bp, Glycine max
  unsure (1)..(290): unsure at all n locations
taacaaaacagagcaaagagagagtgtgtgaaaagtgaaacaaaaaacagaacaacaatggcgacacttaaggttcctcagcctcttccccccgttgcagatgattgtgagcagctccgaaaagccttctcaggttggggaactaacgaggagctgattgtatcgatcttggctcataggaatgctgctcagagganactatcagagaaacttatgcccagacctatggagaagatctcctcaaggccttggacaaagaactcacgagtgattttgagaggctggttcac

SEQ ID NO: 276321 - DNA, 197 bp, Glycine max
  unsure (1)..(197): unsure at all n locations
tttgcacacagcggtcttggaaacgtccttatggggttggactcctggtagctggattagatgaatcaggagctcacctctattacaactgtcccagtggaaactattttgaatatcaggctttgctattgggtctcgctctcaagctgctaagacatatttggaagcagtttgaganttcgtgggttctcgagaga

SEQ ID NO: 276322 - DNA, 291 bp, Glycine max
  unsure (1)..(291): unsure at all n locations
tctttcgtttcgatcttcgatctctgaaaatgagagagtgcatttccaatccacatcggtcagggccggtnttcaggtcggaaacgcctgctgggagctctactgcctcgnacacggcattcagcctgatgggcagatgccaagtgataagactgttggtggaggtgatgatgcttcaacaccttcttcagtgaaactggggctggaaagcacgtgcctcgtgcgattttgtagatctcgagcctactgtgattgatgaagttaggactgggacataccgccaatatttca

SEQ ID NO: 276323 - DNA, 273 bp, Glycine max
  unsure (1)..(273): unsure at all n locations
ttgaaattggaggttcctaaggctggagagacgcctgattcagaaccaaagaatagaattggtgctttggtgcaactaattaagccgagcctagtggaggccgttgactcgtctggcttaaaagatctgtttgaaaatctggtgtctaatgatggaagtttgacacatgaagatccagctagagacagtctcaccgatgaccatagagggtgaaattggtgcaaatgcaccattctatgtgattcatctaaactacacaaanatcgtcatgtg

SEQ ID NO: 276324 - DNA, 287 bp, Glycine max
aataatcgcagaagcagtttccggtgcatctcatgcgtcttccaaaatgaacgacgcagatgtctcgaagcaaattccagcagatggtgcgtttcatccgccaggaagctgaggagaaagccaacgagatctctgtatctgccgaagaggaattcaatatcgagaagctgcagttggttgaagccgaaaagaagaagatcaggcaagaatacgaacgcaaagagcgccaagtcgaaattcgcaagaagattgagtactcaatgcagctgaatgcttctcggttaaag

SEQ ID NO: 276325 - DNA, 277 bp, Glycine max
  unsure (1)..(277): unsure at all n locations
gnttgacaaaagactttctggaaaaaggacgttcattgtacttgatgacgtgaatgagttctggccaattnnaaanccctatgtggaaatcgtaantggttcggtcaaggaagtgtaataatcattacaactagagatcgacgtctgcttgaccaacttaaagttganntgtttatgatgtggataanntggacgaaaacgagtcccttgagctttttagttggcatgcntcnatgaagcnntaccaanacnngnttnnaatgagctgcanganagt

SEQ ID NO: 276326 - DNA, 289 bp, Glycine max
  unsure (1)..(289): unsure at all n locations
tgcaattgaagttgaagtcttgcccttctctcttcaactccaaacacaagacatcatcatccatggcngcctccgtctccactgtcggagctgtcaacagagctcttttgaacctgaatgggtctggacctggggtttcagctcccagttcatccttctttgggagcagcttgaagaaggttattggctcaagggtccccaacacaaagattncctctggaagcttcaagatgttgctgtagaagagaagaaagagatgaagagacccagcagaccggacaaggacaga

SEQ ID NO: 276327 - DNA, 289 bp, Glycine max
  unsure (1)..(289): unsure at all n locations
gtaatggcttcgtcgcgagtngatctggatgggaaccccataaagcccatcaccatttgcatgattggcgccggtggcttcattgggtcccacctctgcgagaagctcatgtcggagacccctcacagtgtcctcgccttggatgtctacaatgacaagatcaaacacctcttggaaccccacacgctcccttgggcctctcgcatccagttccatcgcctcaacatcaagcacgattcccgtctcgaaggcctcatcaaaatgtcagatctgactattaatctggctg

SEQ ID NO: 276328 - DNA, 285 bp, Glycine max
  unsure (1)..(285): unsure at all n locations
anggttttgaaaaggatganaatgagtccagtgttagtattnctgttgttggagcctctggagaccttgctaanaagaagatatttccggctctctttgcgctttactatgaggattgtctccctaagcacttcaccatctatggttatgcacgaagtaagatgactgatgcagaactgagaaatatggttagcaagaccctcacttgtagaattgataagagagagaactgcaatgagangatggaccatttctaataagatgtttctaccatctggtcaatag

SEQ ID NO: 276329 - DNA, 285 bp, Glycine max
  unsure (1)..(285): unsure at all n locations
tagtttcttacaaggctctactctactgcttcaccttctgctcnagaaaattcagtggtgatacatggcttcggctactctctctgtagccaaaccagcccttcaggcaaatgggaaaggctctctgaattctctggcctccgcagctcatcaggcttccttcccttttctagaaaatcnccagaggatttccattctgtcattgccttccagaccaatgcagttggaagcagtggaggatacaagaagggtgtgacagaagcaaaactgaaggttgccataaac

SEQ ID NO: 276330 - DNA, 281 bp, Glycine max
  unsure (1)..(281): unsure at all n locations
tttaccccattttctctaaatccaaacaggccccaaaagaaagagagggaaaattctcttccatggcctcttcacgccctgccaatgtgggaatccttgccatggacatctacttccctcccacctgcgtcacccaggatgctttggagggtcatgatggggtgagcaaagggaaatatactattgggcttggacaggattgcatggncttctgctctgaggttnaagatgntatctcaatgancttgacggtagttacttcacttcttgaaaatttnagt

SEQ ID NO: 276331 - DNA, 264 bp, Glycine max
  unsure (1)..(264): unsure at all n locations
caacacttccatatcttatcttctccncctccatctttgaggttctcacgganacttctgaagatggctggcatagcattcggaagcttcaatgattctttcagtttggcctccatcaaggcctacattgctgagttcatctcaacccttctctttgtttttgctggtgttggttcagccatagcctatgctaagttgacatcagatgcagctcttgatccaactgggttggtagctgttgccattgccaggttttgctctctt

SEQ ID NO: 276332 - DNA, 279 bp, Glycine max
  unsure (1)..(279): unsure at all n locations
ganaaattggaaagagtacaaatttaagaggaaagataacattaccaaccttgggagctggcgaacaagcatacgatgttaattttgaatgggacagtgacttcggaattcccggtgcattttatattangaacttcatgcaaaatgagttctacctcaagtctctaattctcgaagacattccaaaccacggaaccatncacttnntatgcnactcctgggnttacaattcagaaaactacaagactnctcgcattntctttgccaacaatacatatc

SEQ ID NO: 276333 - DNA, 278 bp, Glycine max
  unsure (1)..(278): unsure at all n locations
cnaggtggggtccacagagctgtggtatgtgatcaacttgacggaggataatcacccgcttcacattcatttgggtttgttcaaggtgttggatcagacggaactggtgaaaccgcatgatgagtttacggaatgcatgacgacaatcaacgatgcggtgaagtgccacgtggacaagtncgcgcgtggcannatnatagangtgccaacncatntnaaagggtnaatagctgcgttcacnctggtgcccgngcagtgacnaacgttactctnaagnt

SEQ ID NO: 276334 - DNA, 281 bp, Glycine max
tcgagataactagaaacagtgtgatgaaaatgaaggtccttgttttcttcgttgctacaattttggtagcatggcaatgccatgcgtacgatatgttccctctccgaatgaacactggctatggtgcccgtactccggaggtgaaatgcgcaagttggaggcttgctgtggaagcacacaacatctttggctttgagaccattcctgaagagtgcgttgaagcaacaaaggaatacatccatggcgaacaatatagatcagactccaaaacagttaaccaa

SEQ ID NO: 276335 - DNA, 281 bp, Glycine max
  unsure (1)..(281): unsure at all n locations
aagaatggtacttcttttctcctcgggatcggaaatacccgancggttcacggccgaaccgtgccgccggaagcggtattggaaagccaccggcgccgataaggcgatcggaaaaccgaaagcgctagggatcangaaagctctggttttttacgccggaaaantccccaaaggnnngaaaaccaattggatcatgcacgaatatcgnctcgccaangttgaccgatctgcctccanggaaaaacaacaacaacttgaggctgntgattgggtgttgtgtc

SEQ ID NO: 276336 - DNA, 277 bp, Glycine max
  unsure (1)..(277): unsure at all n locations
ctgaacattgtcccaaccagcactggagctgccaaggctgtgtcactagtgttgccacagctgaagggcaagcttaatggaatagcgctccgtgtgcctacacccaatgtttcagttgttgaccttgttgngaatgttgagaagaagggtctactgctgaagatgtgaatgcagcattcagaaaggcagctgagggtccactgaaaggtgtgttggactgtgtgatgttccactgtgtctatcgactccgctgctctgagtttcctctatattgact

SEQ ID NO: 276337 - DNA, 265 bp, Glycine max
  unsure (1)..(265): unsure at all n locations
gaaaagtgatggaactttgacgccattggccattgagttaagtaagccgcatcctcaaggtgaagaatatggtcctgttagcgangtctncgtgccttcgagcgaaggagttgaagctatatttggttattggcaaaggctatgttgttgtaaatgactcgtgctaccatcaactcgttagccatggctaaacactcatgcggttgttgagccatcgtcatagcaacaaataggcatctgagtgtggttcaccctattacaaact

SEQ ID NO: 276338 - DNA, 279 bp, Glycine max
  unsure (1)..(279): unsure at all n locations
gttctcgtaattggctacatagagttccagaggaacgcagagctggacccagaaaagaggctgtacccaggtggcagttacttcgacccactgggcctggcctcagatccagagaagaaagccacccttcaattggcggagatcaagcacgcccgtctcgccatggtgggcttcttgggctttgcagtccaagctgccgccactggcaagggcccgctcaacaactgggccacccacttgagtgacccatccacacaaccatcatgnacacttctcatc

SEQ ID NO: 276339 - DNA, 279 bp, Glycine max
tattgctctgagaatttcctcataatttcaacggatttatctgaaggttccgctgaccataaagatacgttgggtgcaccactgtgcccttgccggcattatgatgataaagctgctgaggttgcacaaggattttggaattgcccttgtgttcccatgagagagaggaaggaatgccactgcatgctatttctcactcctgataatgatttgctggcaatgaacagactatcaccttggatgaaataaagaatcaacagccaacatgtaacagattat

SEQ ID NO: 276340 - DNA, 279 bp, Glycine max
  unsure (1)..(279): unsure at all n locations
gcactgagggttaaggttcttgtcagcattggaaacangaacaaacaatttcctttcaccattggctcggactcgaacagcgaacatgggtctccgaggccactgcttcgctgaagagcatcattaaaacctacaaccttgatggcatcgatgtcagctacgaggncatcgccgccaacgaagccgactttgtnaattccgttggggggcttgtgaggaacctgnagcagnacgagctncatactgtggcttccttcgcaacaagcgctgatgccgcca

SEQ ID NO: 276341 - DNA, 295 bp, Glycine max
  unsure (1)..(295): unsure at all n locations
gcattgaccctaaatataacgatcaacaattaagagcaacagtaaatcttcctaagggaanccggaanacccgttaaagtggctnttacttactacaangcgaaaaattcgatgangcaaaaaatgccggagctgatttggtgggtggagaggntctgatagaacagataaaagcagggttcatggagtttgataaactaattgcttctccagatatgatgcctaaggntnctagcctagggnagatctgggttcagaggacnntnccatacccanaagctggcatgtaacacca

SEQ ID NO: 276342 - DNA, 289 bp, Glycine max
  unsure (1)..(289): unsure at all n locations
ccagaatccgcgccgccattcccaccatncaaacatctcatccaaaacggcgccaaagtcattctctccagccacttgnggcggccgaanggtgtcactcccaaatacagcttggcgcctcttgtaccccggctttctgagctcattggtatccagattgtcaaggccgaggacagtattggtccagaagtagaaaagttggtggcttctctccagatggaggtgttctcctctagaaaatgtgaggttttacaaggaggaagaaaagaatgaccccgagcatgcaaaa

SEQ ID NO: 276343 - DNA, 292 bp, Glycine max
  unsure (1)..(292): unsure at all n locations
acgaatcgancgactacattcccatccctcagacgccagaccgacctcccattcctcctcgccgtcgaaganttttctccatcaccggccgtgggaccgtcgccaccggccgcgtagagcgtggcaccgtcaaagtaggggaaactgttgaccttgtaggattgagagagacaagaaacacaacggttcacaggtgtggaaatgttccagaagattctagacgaagccctcgccggggacaacgtggngctgttgctgagnggggttcaaaagacggacatccagagaggga

SEQ ID NO: 276344 - DNA, 284 bp, Glycine max
  unsure (1)..(284): unsure at all n locations
ttaattcacttgcccgcaaatccttngtcaatgccgacggtattatagagaaaacattcttgtggggtaggtactctttggaaatgtctgctgttatttacaaggattgggttttcaccgatcaagcattgcctaatgatcttgtcaagagaggagttgctgttaaggatccatctgctccccatggagttcgacttttgatcgaggactatcctatgctctgatgggctagagatatgggatgctatcaagtctgggtggagaatatgtctcatctactacaa

SEQ ID NO: 276345 - DNA, 292 bp, Glycine max
  unsure (1)..(292): unsure at all n locations
gcggctcttgcttctacaaggatcccttcaaacacaaggttcccattccanggcctctacacttctttcccaacccaatgcgccttaaagagacttgaggtgacagaattctctgggcttagatccacttcatgtgtcacatatgctaacagtgctagagaatcttccttttttgatcttgtagcttcccaactcactcccaacaccaatggatcaactcctgtgaggggagagacagtggccaagttgaaggtggcaatcaatggtttcggacgcattggtagaaattccc

SEQ ID NO: 276346 - DNA, 289 bp, Glycine max
  unsure (1)..(289): unsure at all n locations
acgatacgtaataagttctatcattgaggaagtttcctgtgcatcgtctccgaaaatgaacgacgcagatgtctcaaagcaaatccagcagatggtgcagttcatccgccaggaagctgaggaaaaggccaacgagatctctgtctccgccgaagaggaattcaatatcgagaagctgcagttggtacgaagccgacaagaagaagatcagggcaagaatacgaacgcaaagagcgccaagttgaaattcgcagaagntgagtactcgatgcagctaangcntctcgga

SEQ ID NO: 276347 - DNA, 283 bp, Glycine max
ggcactgctttctttaagtgccatggacatgagcaatttgagatgacgggtttggatcctgagtataataggttgttcaatgagggcatggtgtgcactgctagggttgtgtccaaggctgtgatcactggctacaaagatgggttcaaccagattaagtccttggttgatgttggaggtggcattggagggtctctttcggagattgttagggctatcctcatatcaatgccatcaactttgacttgcctcatgtggttgccactgctcctaagttcgatgg

SEQ ID NO: 276348 - DNA, 288 bp, Glycine max
  unsure (1)..(288): unsure at all n locations
atccctctttcttcctcttcctcagtagtgcgattttcgattctcttctctgcaactatgcctaaccctaaggtcttcttcgacatgaccatcggcggtcaacctgccggccgcatcgtgatggagctctacgccgacgtgactccgagcaccgccgagaactnccgcgcgctactgcaccggcgagaagggcgccgggcggagggcaagcccctccactacaaagcttcgtccttccaccgcgtgatcccgaatttcatgtgccanggcgncgatttaacgncggga

SEQ ID NO: 276349 - DNA, 287 bp, Glycine max
  unsure (1)..(287): unsure at all n locations
gtggtactaacatangccttcgccaggtaacagcgaaggcagtgtatggagccattgccaagtataaagtgactcatttttgtgcagcaccagtggttcttaacacactaattaangccccagctgaggacaccattcttcctctaccccatgttgtgcatgtgaatacagctggggctgcacctcctccttctgttctttccggcatgtctgaacgtggatttcgtgtcacacacacttatggtctctcagaaacctatggcccctctgtctactgtgcctggaaa

SEQ ID NO: 276350 - DNA, 282 bp, Glycine max
  unsure (1)..(282): unsure at all n locations
acgatacgtaataagttctatcattgaggaagtttcctgtgcatcgtctccgaaaatgaacgacgcagatgtctcaaagcaaatccagcagatggtgcagttcatccgccaggaanctgaggaaaaggccaacgagatctctgtctccgccgaagaggaattcaatatcgagaagctgcagttggtcgaagccgacaagaagaagatcaggcaagaatacgaagcncagagcgccaagttgaattcgcaagaagatgagtactcgtgcnctaaatgcttctt

SEQ ID NO: 276351 - DNA, 283 bp, Glycine max
  unsure (1)..(283): unsure at all n locations
acgatacgtaataagttctatcattgaggaagtttcctgtgcatcgtctccgaaaatgaacgacgcagatgtctcaaagcaaatccagcagatggtgcagttcatccgccaggnagctgaggaaaaggccaacgagatctctgtctccgccgaagaggaattcaatatncgagaagctgcagttggtcgaagccgacaagaagaagattcagggcaagaatacgaacgcaaagagcgccaattgaantcgcaagaagattgagttatacgatgcagctaatgc

SEQ ID NO: 276352 - DNA, 275 bp, Glycine max
  unsure (1)..(275): unsure at all n locations
ccctcgctctatttctcantctctgtgtttgcggctgaggattccgaacgantgaccttcttcgtttctacgcaaagtttaagtaatcatgggtaangaaaaggttcacatcaacattgtcgtcattggacatgtcgactctgggaagtccaactaccactggtcacttgatctacaagcttggaggtattgacaagcgtgtgattgagaggttcgagaaggaggcgccgagatgaacaagagtcntccagtagcctgggtgctcnacaanctcc

SEQ ID NO: 276353 - DNA, 279 bp, Glycine max
  unsure (1)..(279): unsure at all n locations
ctagtttcttacaagcctctactatactgcttcaccttctgctctagaaaattcagtgctgaaacatggcttcggctactctctctgtagccaaaccagcccttcaggcaaatgggaaaggcttctctgaattctctggcctccgaagctcatcaggcttccttcccttttctagaaaatcttcagaggatttccattctgtccattgcctccagacctatgcagttggnagcagtggaggatacaagaagggtgtgacagaagcaaaactgaaggttg

SEQ ID NO: 276354 - DNA, 278 bp, Glycine max
attggaggctacatctttgtttgcaacaatgataccatggctgagaatctcaagagacaactctttggtctgcctccacgatacagagattctgttcgggccattactccggggttgccccttttcctttacaactattccactacaccaactccatggaatctttgaggctgcaagttttggagggtcaaatattgatccatcagcttgggaggataagaagtgccctggtgaatctcgtttccccgctcaggtacgagtgataataggaaaactgt

SEQ ID NO: 276355 - DNA, 281 bp, Glycine max
  unsure (1)..(281): unsure at all n locations
gtttggttgactcccttttccaagctccacaggatgctggaactcactatgcagtcatgagctcctacgagtacctacagcactggacttcgccagtacttggacaacaaaatggatggattctacattgctccagcttttatggacaagcttgttgttcacatctccaagaacttacatgaccctgcccaacatncaaggttcctctcattcttggtatctggggaggcaagggacaaggaaaatctttccaatgtgagcttgtcttgccaagatgggaa

SEQ ID NO: 276356 - DNA, 280 bp, Glycine max
  unsure (1)..(280): unsure at all n locations
catggcttcggctactctctctgtagccaaaccagcccttcaggcaaatgggaaaggcttctctgaattctctggcctccgaagctcatcaggcttccnncccttttctagaaaatcttcagaggatttccattctgtcattgccttccagacctatgcagttggaagcagtggaggatacaagaagggtgtgacagaagcaaaactgaaggttgccataaacgggtttggaaggattggaaggaattcttgaggtgctggcaggtcgcaaagatcccct

SEQ ID NO: 276357 - DNA, 271 bp, Glycine max
  unsure (1)..(271): unsure at all n locations
gccactcaggcttccattgcaggatgtctacaaaattggtggtattggtaccgtgccagtgggacgtgttgagactggtgtcgtgaagcccggtatggtggtgacttttggtcccactgggctgacaactgaggttaagtctgttgagatgcaccatgaggctctcacagaggctctccaggtgacaatgttggcttaatgtgaagaatgttgcagtcaaggatctcaagcgtggttttgntgcatccaactccaaggatgaccctgccaa

SEQ ID NO: 276358 - DNA, 279 bp, Glycine max
ctcataacacaaagcacaaagcaaagctcatccttgagttaaaaaatggcagcagcttcttccatggctctctcatccccatccttggctggcaaggccgtgaagctgggcccatcagccccagaagtgggaagggtgagcatgaggaagaccgtcaccaagcaggtctcctcaggaagcccatggtacggcccagaccgagtcaagtacttgggcccattctctggcgagcccccgtcctaacctaaccggtgagttcccaggcgactacggctggga

SEQ ID NO: 276359 - DNA, 279 bp, Glycine max
gggcagtagccgagattccgtgagttgcaaaaatgaagacgattctttccaccgagaccatgaacatcccggacggcgtgagcatcaaagttcatgccaaggtcatcgaagttgagggcccccgcggaaaattggtgcgagacttcaagcatttgaatctcgattttcagctcattactgacgaaaacggtaaaagaaagctgaaaatcgacgcgtggtttggttctcggaaaacatccgccgccattcgcaccgccttgagccacgtggagaatctta

SEQ ID NO: 276360 - DNA, 279 bp, Glycine max
  unsure (1)..(279): unsure at all n locations
gtgaaagaggaatcacaattgatattgccttgtggaagtttganaccaccangtactattgcacagtcattgatgcccctggacacagggatttcatcaagaacatgatcactgggacatcccaagctgactgtgctgttcttatcattgattccactactggtggttttgaagctggaatttcaaaggatggacagactcgtgaacatgctctgctttcattcacccttggtgtgaaacagatgattgttgctgtaacangatggatgctactacacc

SEQ ID NO: 276361 - DNA, 284 bp, Glycine max
  unsure (1)..(284): unsure at all n locations
ggtgagggccttccatggcttccgcttgtgcttcctctgcaattacagctgttgccatctctacgccgagttccgggcagaagaatggatcaggaggttgttttcttagtggaaggaaattgagggtgaaaaaggagagagcagcaattggggacgatcgatgggcacgacagtgtgcgcagttgctgagcctgacagacctctanggttcccaggcagcacccctcctccatggcggatggcatctacctggagattcggctttgaccctcttggtcttggat

SEQ ID NO: 276362 - DNA, 278 bp, Glycine max
  unsure (1)..(278): unsure at all n locations
ataactagaaacagtgtgatgaaaatgaaggtccttgttttcttcgttgctacaattttggtagcatggcaatgccatgcgtacgatatgttccctctccgaatgaacactggctatggtgcccgtactccggaggtgaaatgccaagttggaggcntgctgtggaagcacannacatctttggctttganaccattccngaanagtgcgttgaagcaacnaaggnatacatccanngcggacnatataggtcggattcnaaaccgttaancaacnag

SEQ ID NO: 276363 - DNA, 285 bp, Glycine max
  unsure (1)..(285): unsure at all n locations
aaacactcataacacaaagcacaaagcaaagctcatccttgagttaaaaaatggcagcagcttcttccatggctctctcatccccatccttggctggcaaggccgtgaagctgggcccatcnggcccagaagtgggaagggtgagcatgaaggagaccgtcacnaannaggtctcctnagganagcccatggtacggcccagaccgagtcaagtattgggcccattctctggcgagcncccgtctactaaccggtgagttcccaggcgantacggctgggacatg

SEQ ID NO: 276364 - DNA, 284 bp, Glycine max
  unsure (1)..(284): unsure at all n locations
gtggtttctctcttgttggggactttacttcagagcgagattgatcccattgcaaattccagtagactatngacgacttgtnantactgccactttctntgctgggattactccaagcaacgctaggggtttnaaaggttaaggattttngattgntnccnatctcatgctgcaattgtcggntttatggggggagctgncatcacaattgcccttcaacagctcaagggntcctttggattgcaaagttttcaaagaaaactgatgtnatctcngtgagcatc

SEQ ID NO: 276365 - DNA, 283 bp, Glycine max
ctgcagcattagggtttatcatctgcttcaatggggaagggaacagggagcttcggtaagaggaggaacaagacccacactctctgtgtgaggtgtggccgccgcagcttccacctccagaagagtcgctgcgccgcttgtgctttccccctgcacgcacgcggaaatataactggagcgtcaaggcaattcgcagaaagaccaccggaactggcaggatgagatacttgcgtaacgtgcctcgccgtttcaagagtggcttcagagaaggtaccgaagctgc

SEQ ID NO: 276366 - DNA, 272 bp, Glycine max
  unsure (1)..(272): unsure at all n locations
ctttctctgagtaccccccacttggtcgctttgctgtcagggatatgcgtnnaactgttgctgtgggagtcatcaagaacgtggagaagaaggatcctactggagccagggtcacaaggnngccnagaagaggaagtgatcgtgcggtttggttcatcaggggatgtcgtttcttatggttacaataaatgttggtttcttgcccttgtgtcttcgtttcnaggtagcttgtttttcggacatagtttgaagtctccaccatcatctcgcaa

SEQ ID NO: 276367 - DNA, 286 bp, Glycine max
  unsure (1)..(286): unsure at all n locations
cttactcctcctgcagttgaggcaatatcagagagttttggagagtggattatcaaaggtttaaagaaggaaaaaggataccctgtagagaatgttagancgtctctccgggcgtgaccctcgagtccacagggtcccaaattgagcgtcgcagttttgcaggtctggctcgcgccggttgcatggtgtatgatatgggactagccaccaccccggcttgtttcatgagcatttgttgcctccattgcctatgatgcttcaatgatgatganagcttctcacttgc

SEQ ID NO: 276368 - DNA, 284 bp, Glycine max
gtggaggaccacttggtgaaggacttgacccaatctaccctggtggtgcttttgaccctcttggtctggctgatgaccctgatgcattcgctgagttgaaggtcaaggaactcaagaacggtcgcttggctatgttctccatgtttggttctttgttcaggctattgtcactggcaagggccctattcagaacctttacgaccacgttgctgatcctgttgccaacaatgcttgggcttatgccactaactttgtccctggacaatgaggatgcctacatgcaa

SEQ ID NO: 276369 - DNA, 283 bp, Glycine max
  unsure (1)..(283): unsure at all n locations
gcaggaggtggatctacttctacccggtacagcaagactacaaatccagctaggtgtgaacatgcctgctagggcagagcagattcctggaaaagaggaagttcaaatgttccatgaggcttacgatcncgtactttaccttggtataattgacatattgcaagagtacaacatgactaagaagattgaacatgcatacaaatctattcagtttgattcatatctatctcggcggtggacccaacattctactcgcgtcgcttcctggattttattcagaaaa

SEQ ID NO: 276370 - DNA, 282 bp, Glycine max
ctaaacgactctatctctcttcgttttgttcttccttgcgctcctcctcgttcgttcgttctcccttcgcgtagatcggcaatggcggagaccgagacgtttgctttccaggctgagatcaaccagctcctcagtctcatcatcaacacttctactccaacaaggaaatcttccttcgtgaactcatcagcaacgcctctgatgctttggacaagattagatttgagagtttgacggacaagagcaagctcgatgctcagccagagttgttcattcatatta

SEQ ID NO: 276371 - DNA, 269 bp, Glycine max
ctctccactggttcttcatctgcatgcacacagttgcatagttttggaaaccaagaattcctgaagaagggtagcatcaacaagcagttctgaaaatggagatcaccaatgtcagtgagtatgaggctattgcaaagcaaagttgccaaagatggcgtttgactactacgcatctggtgcagaggaccagcggactctgcaagagaacagaaatgccttttccagaattttgtttcggccagtattcttattgatgtgagcagatagat

SEQ ID NO: 276372 - DNA, 284 bp, Glycine max
  unsure (1)..(284): unsure at all n locations
cagaaaagccaacctatccaagtgattcaaccaatcaacggtgatcccttcattggaagccttgaaaccccagttacatccagccccttgattgcatggtacttatcgaacctccccgcatacaggaccgcagtgagcccactactaaagggatcgaggtgggcctggcccatggctaccttctggtgggcccattcgtgaaggccgggcctctgaggaacaccgagatcgccgggcaagcangctctctcgccgctggtgggcttgtggtgatcctcagcctt

SEQ ID NO: 276373 - DNA, 268 bp, Glycine max
  unsure (1)..(268): unsure at all n locations
cacacctctcctcgttcacgctacccctttctgctcttcttctacctttcaagttntaaaagtataaagatggcagagacattcctatttacctcagagtcggtgaacgagggacacctgacaagnctgcgaccaaactccgatgctgtcctcgacgcttgcctcgagcaggacccagacagcaaagttgcctgcgaaacatgcaccaaaaccaattggtcatggtcttcggagaaatcacgaccaggccaagttgactacgagaaga

SEQ ID NO: 276374 - DNA, 266 bp, Glycine max
actggggagccatcataggttggtatctctgcatgtttcgccctgacaaagttaaggcctatgtctgcctcagtgttcttttctccgcagagacccaaacatcagaacggtagatggcatgcgtgctttgtatggagacgactactatgtctgcagatttcagaaaccaggcgaaatggaagctcagatggctgaagttggcactgggtatgttctcaaaaacatccttacaagtcgcaaaactggtcctccatccttccgcatgg

SEQ ID NO: 276375 - DNA, 281 bp, Glycine max
  unsure (1)..(281): unsure at all n locations
gtcttngtncttcagcagaaggancangncaatntcccccagnnattntgtnnnnccgcatncntncagnttccgccanggncatgtaatcttctgantgttctgcattcccttttccacaataactananggncttttttctcctgcaaaccttttcanncttgcactgtgggcagcgatctctgtcgttgatggtttctccagtacccttgcattcatgcaagcatgctgcatctgctgaaanttggacgggccaagatgtcttatagaaaccttcata

SEQ ID NO: 276376 - DNA, 279 bp, Glycine max
cactctctgctcctagggtttctccttcgagtgagggaaatggctcccaaaccgcctagtacgggtctgtttgttggactgaacaagggtcacgtcgtcaccaagaaggaattgcccccacgcccctcagatcgtaaggggaaaacaagcaagagggtgcactttgtgaggaacctcataagagaggttgctggttttgcaccctatgaaaagcgtataactgagttgctgaaggttgggaaggataagagggcatgaagttgcaaagagaaagcttgg

SEQ ID NO: 276377 - DNA, 277 bp, Glycine max
gcaaatgacacagcacaatttgctgagctcttgacacaaggagaactgacccgtagagcatgggaaaaggatgttcaggtgatgaatgaaggactggaccacatcccaatgcacaagattcctgaaaacatgcagaaacagttagatggtgtagtgaagcgcctttttacactcttggtcctttaacaactgatattgcccccggctatgatcacatcacctctgcaattggtgctgccaatattggggcattggtatgctcttctctgttatgtga

SEQ ID NO: 276378 - DNA, 273 bp, Glycine max
  unsure (1)..(273): unsure at all n locations
cctttgttcactcttcttctcttgcggctagggttttagcgcanttcttctagatttaaggaagatgggtaagganaaggttcacatcagtattgtggtcattggccatgtcgactctgggaaatccactaccactggtcaccgatttacaagcttggaggcattgacaagcgtgttattgagaggtttgagaaggaagctgctgagatgaacaagaggtctttcaagtatgcctgggtgctggacaaattaaggctgagcgtgaaagaggaa

SEQ ID NO: 276379 - DNA, 272 bp, Glycine max
  unsure (1)..(272): unsure at all n locations
cagaaaagccaacctatcaagtgattcaaccaatcaacggtgatcccttcattggaagccttgaaaccccagttacatccagccccttgattgcatggtacttatcgaacctccccgcatacagggaccgcantgagcccatactaagagggatcgangtgggcctgggccatgggntacttcnggtnggcccntcntngagggcngggcttttgnggacaacnagnnggcngggaancaaggttttttngcggttgttggntnttgttanc

SEQ ID NO: 276380 - DNA, 277 bp, Glycine max
  unsure (1)..(277): unsure at all n locations
agtgtttgaagatcagaaaagaattncacgtgaactccaggaacgactggcagagaaagaattccaagtaattgaaggggagaagttaaggaaaaaattgcataacactatnctggagctaaaanganatattcgngtgttctgccgtgtccgacctttgctaccggatgatggtcctggaacagatatggttgtntcatatcccacgtcaaccgaagctcttggccggggtattgaattactacagagcgggcagaagtacccttttactttgaca

SEQ ID NO: 276381 - DNA, 272 bp, Glycine max
  unsure (1)..(272): unsure at all n locations
gaaaaagaaaagccttcaatcatatagcattctaagaaatgaagagccctaccattttcattctctttctactttctgccttctacacctcactcctaccttcagccaccgctcaagtcgtggttgacatggaaggtaatgtcttcaaaatggtgggaaatattatgtgttgccagtaatagagtcatcatntggtggaataagagtagccgcaactggaaaagaaagatgccctctcatgttgtacaatctgccgatccgtatgataaggg

SEQ ID NO: 276382 - DNA, 272 bp, Glycine max
  unsure (1)..(272): unsure at all n locations
ctccgcactccgtcttcatcaatcagcatcatcaccgctccaacacaggggaaaatgagggagatccttcacgttcagggagggcaatgcgggaaccagatcggttcgaagttctgggaagtggtgtgcgacgagcacggcatagatccgacggggaagtacgtcggaaactcagntctacaactcnaacgcgtgaacgtgtatacaacgaagnttcctgcnggcggnttgttccaagcncntgntngntgacctngaacccngaacattgg

SEQ ID NO: 276383 - DNA, 272 bp, Glycine max
ctgaaatcaaggttgttgctggtgacccttataactcagacccacaagatccagaattcatgggtgttgaagtcagagagcgtgtacttccaaggagaggaactttctgttgtcttgaccaaaattaacatggttgatttgcattgggagctacagaagatagagtgtgtggaacaattgacattgagaaagccctgactgagggtgtcaaggcatttgagcctggactatggctaaagctaataggggaatctatatgttgatgaagttaa

SEQ ID NO: 276384 - DNA, 291 bp, Glycine max
gcgaacaatttagatcagactctaaaacagttaaccaacaagctttcttttatgctagtgaacgcgaagtccatcacaacgacatatttatattcggcatagataacaccgtactctctaatatcccatactatgaaaaacatggatatggggtggaggaatttaatgaaaccttatatgatgaatgggttaacaagggcgacgcaccggcattgccagagactcttaaaaattacaacaagctgttgtctcttggcttcaagattgtattcttgtcaggaagatatcttg

SEQ ID NO: 276385 - DNA, 285 bp, Glycine max
  unsure (1)..(285): unsure at all n locations
gaaaaacaaaagagtagtggcctttaggtggtgaagaacaagagctcaaatcaaatcgaatcgaaaaaagaaagaaagatcatattcatggcgatggcaagcctggctcgacggaagggttacgccgtcgttttgtcgtcgaggtcgtcgttttgtctgacaagctggaggggattcgcgtccggatctgacgaaaacgacgtcgtctncatcggcggcggtcccggcggctactggccgccatcaaagccgcgcanttcggtctgaaaaccattgcatcgaaaa

SEQ ID NO: 276386 - DNA, 291 bp, Glycine max
  unsure (1)..(291): unsure at all n locations
ctacgctctcccaaccgccagtcctctgacccgaagagcgaaccataatggaagagtaaattaccggaaaccgaataaccgtttctccgtgaaagcctccgccaaagagattgcctttgaccagcattcccgctctgctatgcaggnccggcattgacaagctcgccgacgctgttgggctcactcttgggcccagagggaggaatgttgtgttggatgagtttggaagtcctaaagtggttcaacgatggtgttcaccatgctacgcgcaatcgagttcccgatcctatg

SEQ ID NO: 276387 - DNA, 282 bp, Glycine max
  unsure (1)..(282): unsure at all n locations
ggcttttacagaaggtgggattttgactagctgggtntttggctgttgagtttatggagggccaagttcctgttgaacagtgtttgtnttgcctttatctgcagcttttaattgaaccaatcctaccctctttgtttccatatgaaaanatcggtnttntgtgattcctccgctcattgttgttgaagggtctcgtgaaatcaatctagttttgagacctgtttactggcagaggtgacggatttcagttttgtaagtgcagatcataataataagttttta

SEQ ID NO: 276388 - DNA, 290 bp, Glycine max
  unsure (1)..(290): unsure at all n locations
agaaaaacaagtagttgagaactaagaagaaggaaatggcttcctcaatgntntcctccccagctgttaccaccgtcaaccgtgccggtgccggcatggttgctccattcaccggcctcaaatccatggctggcttccccacgaggaagaccaacaatgacattacctccattgctagcaacggtggaagagtacaatgcatgcaggtgtaggccaccaattggcaagnagaagttcgagactctttcctacttgccagacctcgatgatgcccaattggcaaaggagtc

SEQ ID NO: 276389 - DNA, 285 bp, Glycine max
cttgataggaagactggcagcaacttgcttcagtggcctgttgctgaggtggagagtttgagattgagaagtgatgaattcaaaaatttgaaggctaaaccagggtcagtcgtgtcaatagatattgaaacagccacacagttggacattgttgccgagtttgagatagacaaggaaacccttgagaaaacacctgaatccaacgaggagtacacgtgtggcaacagtggtggatctaaacaacgtggtgcctaggaccttttggtctttggttttggcagatga

SEQ ID NO: 276390 - DNA, 286 bp, Glycine max
  unsure (1)..(286): unsure at all n locations
aaggcagaaagcaagctcatcctagagttttaaaaatggcagcagcctcctccatggctctctcttccccatccttggctggcaaggccgtgaagctgggcccatcagcccccgaagtcgggagggtcagcatgaggaagaccgtcaccaagcaggcctcctccggaagcccatggtacggcccagaccgcgtcaagtacttgggcccattctctggcgagcccccgtcctaccttcactggcgagttcccaggtggattacggctgggacatgctgggnttcggc

SEQ ID NO: 276391 - DNA, 283 bp, Glycine max
  unsure (1)..(283): unsure at all n locations
tgaagttgtttgttttctttgttgctgcagtagttttggtagcatggccatgccatggcgcaggctaccaaaggttccctctccgaatgaaaactggctatggtgagcgttcttcggaggtaaaatgcgcaagttttaggcttgctgtggaagcacannacatccgagccttaaaaccattcctgaagagtgcgttgaaccaacaaaggactacattaatggcgaacaatttagatcagactctaaaacattaaccaacaagctttctttatgctagtgaagc

SEQ ID NO: 276392 - DNA, 287 bp, Glycine max
  unsure (1)..(287): unsure at all n locations
ctggaataacagttagaatggttactggtgacaacattaatactgcaaancgctatagccagggagtgtgggattttaactgatgatggcatagccattgaaggtccagaatttagagagaagagtcaggaagagttgcttgaactgattcccaaaattcaggttatggctcgatcctcacctttagacaaacacacactggtgaaacacttgcgtaccacttttggggaagtggtagctgtaacaggtgatggaactaatgatgccccagcacttcatgaagctga

SEQ ID NO: 276393 - DNA, 280 bp, Glycine max
gcacaatgtcaacctcttccataaacgggtggtgcctctcttccatctccccagccaaaacctctctcaggaaggccacattacgcccttccgtcttcgcaacccttaacactccttcttctccttcctcttcatcttccttcccctctctcattcaagacaggcctgtttttgctgcccctgcccccatcatcaccccaactgtgagagaggatatggcaaaggaatacgagaaagctattgaagaattcagaaatgttgaggagaagatgaatcaaag

SEQ ID NO: 276394 - DNA, 288 bp, Glycine max
  unsure (1)..(288): unsure at all n locations
ctctttttctcaaccaaaaggggttcaattctagctagttctattacatcgtccgcncaccatgaacatggcgattcgtgcttctgttcatggttttcgcagtttcatcagctttagacatgtcaataatatcacatgacaacgctcatgcggatagggccacgaggcgcaccgacgacgaggtgatgtcaatgttcgaggagtggctggtgaaacacgacaaggtgtacaacgcgctcggtgagaaggagaagaggtttcaaatcttcaagaacaatctgcgcttta

SEQ ID NO: 276395 - DNA, 281 bp, Glycine max
attgcacaatgtcaacctcttccataaacgggtggtgcctctcttccatctccccagccaaaacctctctcaggaaggccacattacgcccttccgtcttcgcaacccttaacactccttcttctccttcctcttcatcttccttcccctctctcattcaagacaggcctgtttttgctgcccctgcccccatcatcaccccaactgtgagagaggatatggcaaaggaatacgagaaagctattgaagaattcagaaatgttgagggagaagagtgaatc

SEQ ID NO: 276396 - DNA, 281 bp, Glycine max
  unsure (1)..(281): unsure at all n locations
tgcaattgaagttgaagtcttgcccttctctcttcaactccaaacanaagacatcatcatccatggctgcntccgtctccactgtcggagctgtcaacagagctcttttgaacctgaatgggtctggacctggggtttcagctcccagttcatncnnatttgggagcagcttgaagaaggttattggctcaagggtccccaacacaaagattcctctggaagcttcaagatgttgctgtagaagagaagaaagagatgaagagacccagcagaccgacaag

SEQ ID NO: 276397 - DNA, 284 bp, Glycine max
  unsure (1)..(284): unsure at all n locations
tggtaatggcagcgtcactacaagcagcagctactttcatgcaacccnccaagttgagcaggagcaacactttgcagcaaaagtctactcagtccatttccaaggnttttggtttggaacctgttggagctaaaaaggtcacatgctcccttcaggctgatcttaaggacttggctcacaagtgtgttgatgctaccaaaattgcaggattcgcccttgccacctctgccctcgttgtctctggggcaagtgctgaaggtgttccaaagaggctaacttcgacg

SEQ ID NO: 276398 - DNA, 269 bp, Glycine max
actggggagccatcataggttggtatctctgcatgtttcgccctgacaaagttaaggcctatgtctgcctcagtgttccttttctccgcagagacccaaacatcagaacggtagatggcatgcgtgctttgtatggagacgactactatgtctgcagatttcagaaaccaggcgaaatggaagctcagatggctgaagttggcactgggtatgttctcaaaaacatcctacaagtcgcaaaactggtcctccatccttccgcatggaga

SEQ ID NO: 276399 - DNA, 284 bp, Glycine max
  unsure (1)..(284): unsure at all n locations
tttttctctctttccgcggcctagatctgagcagtttggaaaccctaactgctctgcaccaacgacatcaccactnctctccgatcaactacctctttcgtcgccctaagtcatggcaggaattgcacccgagggatcacagtttgatgctcgtcaatatgatagcaagatgaatgagctgcttacgtccgatngtcaggatttcttcacatcctacgatgaggtttatgacagttttgatgctatgggcttgcaagagaatctcctgagaggcntttatgcat

SEQ ID NO: 276400 - DNA, 283 bp, Glycine max
  unsure (1)..(283): unsure at all n locations
caggtggataagtctgcatggatgactgatgaagnatttgctagagaaacgattgctggtgtaaatccaaacgtcattaagattcttgaggagttcccaccacgtagcaagctagatacacaagcctacggtgatcatacctgtataataacaaaacaacatttggaacctaacttgggtgggctcactgttgagcaggctatccagagcaagaagctgttcatcttagatcaccatggactatctcattccatatttgaggaaaataatgcaattaccacag

SEQ ID NO: 276401 - DNA, 279 bp, Glycine max
tacaaaggttataaggctgttttggattcaaaatccattgatgaaacactggcattgcatgcaagttgggagccaaggcattcgaggtactgtcataggtttccatggcagcagtatgtaaaagtcggagctgttcttcgtcaatttggttatactgtggtagctttacatggctgtttgagaacagaaattcagacacctagatcagttagagccatgttcaaggacccctggcattcggctggcagcagaggtatccaaatacttgaccaatttcga

SEQ ID NO: 276402 - DNA, 269 bp, Glycine max
  unsure (1)..(269): unsure at all n locations
cttgtggacctaacagtgatagagatattgtcaaggcatgcttctgatgangtctaccttggacagagggacaatccaaattggactgatgacacaaaggcaattcaagcctttaagaagtttggaaacaagctgaaggaaattgaggacaaaatctcagggaggaacaagaattcaagcctaggaaccgtaatggaccggcgcagatgccctacactgtgctcttccttaccagtggggaaggccttactttcagaggantcccaaca

SEQ ID NO: 276403 - DNA, 269 bp, Glycine max
  unsure (1)..(269): unsure at all n locations
ccgcaaccctggacactttgaagaaacttaatgaagctgaaaaggcgaagaaanaactagaacagcaagaatattttgatccaaagttggctgatgatgagagagaaaaaggaaatgaattcttcaagcagcagaagtatcctgatgctgtgaagcattacacagagtctatacgaagaaatgccaaaagatcctagggctatagtaacagagcagctgctacactaattgggggcatgcctgaaggttaaaggtgcagagaagtgcnt

SEQ ID NO: 276404 - DNA, 275 bp, Glycine max
  unsure (1)..(275): unsure at all n locations
ttcttctcttgcggctagggttttagcgcagtttcttctagatttaaggaagatgggtanggaaaaggttcacatnagtattgtggttatnggccatgttgactctgggaagtccactaccactggccacctgatctacaagcttggaggcattgacaagcgtgttattgagagatttgagaaggaagctgctgagatgaacaagaggtctttcaagtatgcctgggtgctgataagcttaaggctgagcgtgaaagaggaatcanattganntg

SEQ ID NO: 276405 - DNA, 276 bp, Glycine max
  unsure (1)..(276): unsure at all n locations
caaagcattgaattcaaaaacttaagttcattccttgtgttttgctttcttcctccaaaaccaaacatgtcgaacacatgcggcaactgcgactgcgctgacaagactagctgcaccaagnncaacagctatggtgttattgtagagactgagaagagttacatcgagactgttgtcatggatgttccagcagctgagcatgatgggaagtgcaagtgtggcactaactgcacttgcanggactgcacctgtggccataaggaatatgtagaaaag

SEQ ID NO: 276406 - DNA, 281 bp, Glycine max
  unsure (1)..(281): unsure at all n locations
ggaagaatcactcccttatccatttccacacaacataanagangaaancaacgntntctcttcagcntccattctangctctcccaacngnnagtctctgatccgaagagcgaaccataatggaagagtaaattacnggaaaccgaataaccgtttctccgtgaaagcctccgccaaagagattgtntttgaccagcattcccgctctgctatgcaggccggcattgacaagctcgcngacgctgttgggnnnagtnttgggcccagagggaggaatgttg

SEQ ID NO: 276407 - DNA, 279 bp, Glycine max
  unsure (1)..(279): unsure at all n locations
cgaganatggcgatggcaatggcgcttcgcaggctttcatcttcaattgacaagcctctgcgccctctcttcaatgccggttccctctactacaagtcgtctttgcctgatgaagctgtttacgacaaggagcgacccggagtncacatggccgaagcaggtgaatgctaccacttgaggtcgtggattncgagattgctgatattattgagcttgagaaaaccnaggnntgaaaggggctaganttaccgncanagaanttcacacctcgtgtctgtg

SEQ ID NO: 276408 - DNA, 276 bp, Glycine max
attttagaagaataccccctcttttgctgcatcagaggagttgtaaattaagagcatggctgcacaagctcttgtatcatcatcttctcttaccttctcagcggaggctgcaagacaaagtcttggaccaagatcactccaatctccatttggcttctccagaaaagcctcctttcttgttaaggcagctgctaccccccctgttcaagcaaggatcagacagacctttgtggtttgcatcaaagcaaagtctttcttacttggatggcagccttc

SEQ ID NO: 276409 - DNA, 274 bp, Glycine max
gtggtgcttagcttaccacaaagagaattttgcttatgagcactgggatgagatacttgacatctgcaaccagtatgatgtggctctatccattggtgatgggctaagacctggatccatctatgatgcaaatgacacagcacaatttgctgagctcttgacacaaggagaactgacccgtagagcatgggaaaaggatgttcaggtgatgaatgaagggacctgggacacatcccaatgcacaagattcctgaaaacatgcagaaacattaga

SEQ ID NO: 276410 - DNA, 278 bp, Glycine max
  unsure (1)..(278): unsure at all n locations
gtggtgcttagcttaccacaaagagaattttgcttattcgcactgggatgagatacttgaacatctgcaaccagtatgatgtngctctatccattggtgatgggctaagacctggatccatctatgatgcaaatgacacagcacaattncctgagctcttgacacaaggagaactgacccgtagagcatgggaaaagggtgttcaggtgatgaatgaaggacctggganacattccaatgcncaagatttcctgaaaacatgcagaaacanttagant

SEQ ID NO: 276411 - DNA, 271 bp, Glycine max
  unsure (1)..(271): unsure at all n locations
ttcttctcttgcggctagggttttagcgcanttcttctagatttaaggaagatgggtaaggaaaaggttcacatcagtattgtggtcattggccatgtcgactctgggaaatccactaccactggtcacctgatttacaagcttggaggcattgacaagcgtgttattgagaggtttgagaaggaagctgctgagatgaacaagaggtcttcaagtatgcctgggtgctggacaaacttaaggctgagcgtggaaagaggaatcaccntga

SEQ ID NO: 276412 - DNA, 287 bp, Glycine max
tgaagttgtttgttttctttgttgctgcagtagttttggtagcatggccatgccatggcgcaggctaccaaaggttccctctccgaatgaaaactggctatggtgagcgttcttcggaggtaaaatgcgcaagttttaggcttgctgtggaagcacacaacatccgagccgttaaaaccattcctgaagagtgcgttgaaccaacaaaggactacattaatggcgaacaatttagatcagactctaaaacagttaaccaacaagctttcttttatgctagtgaacgc

SEQ ID NO: 276413 - DNA, 277 bp, Glycine max
tgaggccaaatatttaatgttgttgccaaccccagaatgattgttagagttgcagacgtgcaaagagtacgataaggatttgattttcgatcaatttgaaagaacttatccatttcttgcaattttagttgtgtacccataactccatgcatgcaactcgttgagctatctcaataaatgccgtttgtatgtgttagtatttatatttatatacctttcggcagtttcgctgctattgttgtggactatgtgttcctgtaatccaataataagaaag

SEQ ID NO: 276414 - DNA, 283 bp, Glycine max
cttgaatcttcgttatccttctttttttctccttgaactcgaatattcactatggcagatgaggtggttctgctagatttctggccaagtccatttgggatgagggtcaggattgcacttgctgaaaagggtatcaaatatgagtccaaagaagaggacttgcagaacaagagccctttgctcctcaaaatgaacccggttcacaagaaaatcccggttctcatccacaatggcaaacccatttgtgaatctctcgttgctgttcagtacatcgaggaggtct

SEQ ID NO: 276415 - DNA, 282 bp, Glycine max
cttgtggagaagcttgcaaattttgatagggaacgtatcccagaacgtgttgtccatgccaggggcgctagtgcaaagggtttctttgaggtcacccatgacatttctcacctgacatgtgcagatttccttcgagcccctggagttcagacgcctgtaattgttcgtttctcaactgtcatcatgagcgtggtagccctgaaaccttgagggaccctcgaggttttgccgtgaagttttacaccagagagggtaactttgaccttgttggaaacaaccttc

SEQ ID NO: 276416 - DNA, 277 bp, Glycine max
gcagagagaagagaagggctacacaaacacaatctctaatggcactcaggatgtgggcttcttccactgccaatgcactcaaactctcttctgtctccagacctcatctcttgcctcctttttctttctccagatgcttatcttccgtcttggatggacttaagtacgctgattcacatgaatgggtcaagcacgaaggctcagtcgccaccattggtatcactgaccatgcccaggaccatcttggagaggttgtgtatgtggagctgccagaacc

SEQ ID NO: 276417 - DNA, 278 bp, Glycine max
ctttggtggccacagcaacaataacaatggcagcctcactacaagctgcagctaccttcatgcaacccaccaaggtgggcatggccactcgcaacctcaaatctacacaatgcatttctaaggcttttggcttggaacccgctgcagctaaactcatttgctcccttaagcccgatctcaaagattttgctcaaaaatgtgtcgacgccaccaaaattgcaggattcgcccttgccacctcagctctcgttgtttcgggagcgagtgcagaggtgtcc

SEQ ID NO: 276418 - DNA, 285 bp, Glycine max
  unsure (1)..(285): unsure at all n locations
gcagagagaagagaagggctacacaaacacaatctctaatggcactcaggatgtgggcttcttccactgccaatgcactcaaactctcttctgtctccagacctcatctcttgcctcctttttctttctccagatgcttatcttccgtcttggatggacttaagtacgctgattcacatgaatgggtcaagcacgaaggctncagtcgccaccattggtatcactggaccatgcccagggaccatcttggagaggttgtgtatgtggagctgccagaaccagtgg

SEQ ID NO: 276419 - DNA, 278 bp, Glycine max
  unsure (1)..(278): unsure at all n locations
cttgtggagaagcttgcaaattttgatagggaacgtatcccagaacgtgttgtccatgccaggggcgctagtgcaaagggtttctttgaggtcacccatgacatttctcacctgacatgtgcagatttccttcgagcccctggagttcagacgcctgtaattgntcgtttctcaactgtcattcatgagcgtggtagccctgaaaccttgagggaccctcgaggttttgccgtgaagttttacaccagagagggtaatttgaccttgttggaaacaac

SEQ ID NO: 276420 - DNA, 275 bp, Glycine max
gtcaaatctccgagaatacgtactcctcattatcttcctggtttgcataatgaaggaacaaggaagagacagagggcagctatggtagattatacttggtctgttggggatagggttgatgcatgcagtgaagaaagttggcaggaaggagttattacagatcagaacaagaaagataaaacattaactgttcacttccctgtcagtggaaaaacaaaacttgtcagagctggcatctacgtccatcccgtttttggaaggatgggaaatggatt

SEQ ID NO: 276421 - DNA, 275 bp, Glycine max
  unsure (1)..(275): unsure at all n locations
tacaaaggttataaggctgttttggattcaaaatccattgatgaaacactggcattgcatgcaagttgggagccaaggcattcgaggtactgtcataggtttccatggcagcagtatgtaaaagtcggagctgttcttcgtcaatttggttatactgtggtagctttacatggntgtttgagaacagaaattcagacacctagatcagttagagccatgttcaaggacccctgcattcggctggcagcagaggtatccaaagtactgatagaact

SEQ ID NO: 276422 - DNA, 278 bp, Glycine max
  unsure (1)..(278): unsure at all n locations
ggctatacgangntctctcataacttccttcatattttatttgtccaatcttccaggaagttatganagatccacatgtagctgcagatggttttacatatgaagctgaggctatacgaggatggcttgatggtggtcatgacaattcgcccaatgactaacagtaagcttgcacatcacaatcttgttcccaaccgcgctcttcgcttctgcaatccagggactggcttcaaaaccactgatcaagctcattattttctctgcccatttgattgaac

SEQ ID NO: 276423 - DNA, 190 bp, Glycine max
  unsure (1)..(190): unsure at all n locations
gtgaaactgttgttgaagtgcctaatgtcagctgggaagacattggaggccttgaaaatgtcaagcgtgaactgcaagagactgtacaatatccagttgagcncccagaaaagtttgagaagtttggtatgtctccatctaaaggagtacttttctatggtcctccaggatgtgggaaaactttgttagc

SEQ ID NO: 276424 - DNA, 276 bp, Glycine max
  unsure (1)..(276): unsure at all n locations
ctccttcgcaaatgccagtatcatgttactacaactaatcaggcagttgaggcactgaccaatgttganggnaaacaganataagtttgacctcgttatcagcgatgtgaatatgcctgacattgatggatttaagctccttgagttggtgggacttgaaatggacctacctgtcatcatgtggtcagcacacggtgatacaaagctggtgatgaagggtgttncacanggtgcatgtagactatttgctggaaactgttcgaattgnagagtgga

SEQ ID NO: 276425 - DNA, 277 bp, Glycine max
aacacaaagcacaaagcaaagctcatccttgagttaaaaaatggcagcagcttcttccatggctctctcataccccatccttggctggcaaggccgtgaagctgggcccatcagccccagaagtgggaagggtgagcatgaggaagaccgtcaccaagcaggtctcctcaggaagcccatggtacggcccagaccgagtcaagtacttgggcccattctctggcgagcccccgtcctacctaaccggtgagttcccaggcgataaggctgggacatg

SEQ ID NO: 276426 - DNA, 275 bp, Glycine max
caaaacactcataacacaaagcacaaagcaaagctcatccttgagttaaaaaatggcagcagcttcttccatggctctctcatccccatccttggctggcaaggccgtgaagctgggcccatcagccccagaagtgggaagggtgagcatgaggaagaccgtcaccaagcaggtctcctcaggaagcccatggtacggcccagaccgagttcaagtattgggcccattctctggcgagcccccgtccttacctaaccggtgagttcccaggcgat

SEQ ID NO: 276427 - DNA, 275 bp, Glycine max
tttctctcttctctctccacccaaaccctaactcccgaccctgttcccctctcgtatccgtcatgaaaggaggaaagtccaagaccgaatctaagagagccgatcccaaacttgctgtgaataagaagggagccgccaccaaggctaggaaacccgccggcaaggggaaggcagcgaaagaccctaacaagccaaagaggcctccaagtgctttcttcgttttcatggaggagttcaggaaggtattcaacaaagaacatcctgaaaacaaagca

SEQ ID NO: 276428 - DNA, 272 bp, Glycine max
tcgatcaattaatttccaatggccgatcagctcaccgacgaacagatctctgagttcaaggaagcctttagcctcttcgacaaggacggcgatggttgtattaccaccaaggaacttgggactgtgatgcggtcgcttgggcagaacccaactgaggctgagctgcaggacatgataaatgaggttgatgctgatgggaatggtaccatgatttcccagaattcctcaatctcatggcgcgcaagatgaaagacatgattcagaggaagagc

SEQ ID NO: 276429 - DNA, 273 bp, Glycine max
  unsure (1)..(273): unsure at all n locations
attattggaaggtacctatataaaagcatgggcagtagtgacatggacaaaaccccgaaagaggagtctaagacacctccagctacgtcacaggagcagtcatcaacaactggcatgccaacaactaatcctgactggtctaactttcagacgtattctcctatacctccacatgggttcttggcatcaagcccccaagcccacccatatatgtggggcgtccagcatattatgcctccctatggcatccaccttcatccctatgttgcangt

SEQ ID NO: 276430 - DNA, 149 bp, Glycine max
cactcataacacaaagcacaaagcaaagctcatccttgagttaaaaaatggcagcagcttcttccatggctctctcatccccatccttggctggcaaggccgtgaagctgggcccatcagccccagaagtgggaagggtgagcatgagg

SEQ ID NO: 276431 - DNA, 275 bp, Glycine max
  unsure (1)..(275): unsure at all n locations
tcaaaatggctgtttcggctatcacaggagcgaggctaaccctagggatagggttggcgatacctctttcctctcccacgcgctctcgaaccntcgcaatggccgtatccgtcgaccccaagaccgacaacaaactcactcttaccaagtccgaggaagctttcgctgctgccaaggagctgatgcctggaggtgtcaactccccagttcgtgccttcaaatccgtgggtggtcaaccaattgtgattgattcagtcaaagggtctcgtatgtgg

SEQ ID NO: 276432 - DNA, 273 bp, Glycine max
ccaaaacagcagagagaagagaaggtgtagacaaacacaatctctaatggcactcaggatgtgggcttcttccactgccaatgcactcaaagtctcttctacctccagacctcatctcttgcatcctttttctttctccagatgcttgtcttccgtcttggatggacttaagtatgcagattcacacgaatgggtcaagcacgaaggctcagtcgccaccattggtatcactgaccatgcccaggaccatcttggagaggttgtgtatgtgga

SEQ ID NO: 276433 - DNA, 271 bp, Glycine max
gggatgaacctggaggacatcactctcaactggtattttggcaacaacaggtcaatgctagtctcaaattgtctcttcagaatgggtggagctgcagttctactctccaacaagtcttctgatcgcagaagagccaaataccaactgatccatacagtgcgtactcacaagggtgcagatgacagatcatatggttgtgtcttccaagaagaagatgagaagaaaacaattggtgtggcatctcaaaggacttaatggctgttgcaggaga

SEQ ID NO: 276434 - DNA, 275 bp, Glycine max
  unsure (1)..(275): unsure at all n locations
atgaatgctcaggtgggactcacaagcccgggttggataggagcagatngttgccatctcaattntccacaagacattttgcatccctcatggaggaggtggccctggcatgggacctattggtgtaaagaaacacttggcaccatttttaccttcacacgtgtgatagaaactggtggaattcctgcccctgacaaacctcaaccacttggtaccatcgctgctgcaccaggggcttcagcactcatatgccaatctcttaacatttacatagc

SEQ ID NO: 276435 - DNA, 267 bp, Glycine max
ttacattagattggtggtaatggcagcgtcactacaagcagcagctactttcatgcaacccaccaagttgagcaggagcaacactttgcagcaaaagtctactcagtccatttccaaggcttttggtttggaacctgttggagctaaaaaggtcacatgctcccttcaggctgatcttaaggacttggctcacaagtgtgttgatgctaccaaaattgcaggattcgccctgccacctctgccctcgttgtctctggggcaatgctg

SEQ ID NO: 276436 - DNA, 298 bp, Glycine max
  unsure (1)..(298): unsure at all n locations
cgaacgtgtgccctttctcttcaccatcaagcagttggtggcatcngggaagccagatagctttagtggggagtttctagtcccatcctaccgtggaagctctttcttggaccccaagggaagaggtgcttccacaggttatgacaatgcagttgctttgcctgctggtggaagaggagatgaggaagaacttgccaaggaaaacaataaaagtgcctcatcatccaagggcaaaatcaccttgagtgtcaccaagaccaagcctgagacgggtgaggttatcggtgtgttcgagagt

SEQ ID NO: 276437 - DNA, 292 bp, Glycine max
taagaagcatgcttgtgtatccagcagtattgttgggtggcattcaactgttgggcaatgggctcgagtggataatatgaccatccttggagaagatgtccatgtatgtgatgaaatttacagcaatggtggtgttgttttgccgcacaaggagatcaagtcaaatattctgaagccggagattgtcatgtgagtgaggtcaatgatgttcaaattggtaccatgtggtgaggaggtagaaaaattattgagtctggaatatgtttgtccgtttcattggttttccttttac

SEQ ID NO: 276438 - DNA, 283 bp, Glycine max
aagcaaagctcatccttgagttaaaaaatggcagcagcttcttccatggctctactcatccccatccttggctggcaaggccgtgaagctgggcccatcagccccagaagtgggaagggtgagcatgaggaagaccgtcaccaagcaggtctcctcaggaagcccatggtacggcccagaccgagtcaagtacttgggcccattctatggcgagcccccgtcctacctaaccggtgagttcccaggcgattacggtgggacatgctgggtttccgcagaccca

SEQ ID NO: 276439 - DNA, 286 bp, Glycine max
  unsure (1)..(286): unsure at all n locations
cttccagagtgatcaacatangtnaggacatctttgctggatttaattgtacncttcgtggaggtaatgtcactcaccatgagtacattcaggttggaaagggaagggatgttgggttgaatcaagtatcaatgtttgaagcaaaggttgccagtggaaatggggagcaagtcctaagtagagatgtgtacagattgggtcataggctggattttttccggatgctctcattcttctacactactgtggggncctcttcaacactatggtggtggttctgactgta

SEQ ID NO: 276440 - DNA, 292 bp, Glycine max
ctgctctagaaaattcagtggtgatacatggcttcggctactctctctgtagccaaaccagcccttcaggcaaatgggaaaggcttctctgaattctctggcctccgcagctcatcaggcttccttcccttttctagaaaatctacagaggatttccattctgtcattgccttccagacctatgcagttggaagcagtggaggatacaagaagggtgtgacagaagcaaaactgaaggttgccataaacggatttggaaggattggaagaattcttgaggtgctggcaggtc

SEQ ID NO: 276441 - DNA, 291 bp, Glycine max
cacttctgctccgcaattatcatgggcaaggtcaagatcggaatcaacggatttggaagaattggccgtttggtagccagagtggctctgcagagagacgatgttgaactcgttgccgttaacgaccctttcatcaccaccgattacatgacatacatgtttaaatacgacagtgttcatggacactggaagcatcacgatgtcaccgttaaggacgagaagaccctctcttcggtgacaagccagtcactatttttggacacagaaaccctgaagagatcccatgggggt

SEQ ID NO: 276442 - DNA, 288 bp, Glycine max
gaaaaagttaatgggatcgctgaggatcttaactgggaggttttcagggacaccctgattgaacaagctgagcagggtgtagattacttcaccatccatgcaggagttcttctgagatatgttccattaacggcaaggcgcatgacaggaatagtatccaggggagggtctattcatgcaaagtggtgcttagcttaccacaaagagaattttgcttatgagcactgggatgagatacttgacatctgcaaccagtatgatgtggctctatccatggtgatgggctaa

SEQ ID NO: 276443 - DNA, 293 bp, Glycine max
  unsure (1)..(293): unsure at all n locations
ccccctccacccacccagcatatctctctattcnnatttattagcacccctcacattaccttgtgtcaccaactactttgactcctttaccataccattacaataattatcaaacctaaccagtaaaaatggtgaccgtggaggaaatccgcaacgctcagcgttcccatggacccgccaccatcttggccttcggcaccgccacgccgtccaactgcgtctcccaagccgattaccctgactatacttccgcattaccaacagcgtacacatgactgatctcaaagaaaagt

SEQ ID NO: 276444 - DNA, 298 bp, Glycine max
cgatgaggaagctgttgctcgccttgaggaaataaaaaaatccattgaggcgaactggctttacggcaaagcaatttgaatccagaaaggcctgactcaggatttttaaggacattggattctagcattaagcgcaacactgctgttattaagaaactgaagcagattaatgaagaacagtgtgaagctctgatggacgagttgcgaagtgtcaacttaagcaaatttgtcagtgaagccgtggctgctatatgtgatgccaagcttagaagttctgatatacaagctgcagttcaga

SEQ ID NO: 276445 - DNA, 291 bp, Glycine max
  unsure (1)..(291): unsure at all n locations
ccggcgctgaccgcaaggnggccgccgagagcacgctctccgcctacaaagccgctcaggacattgctaataccgagttgcctccaactcaccctatcaggctgggtcttgctctgaacttctccgtgttttactatgagattcttaactctcctgatcgggcttgcagccttgcaaaacaggcttttgatgaggctattgctgaattggatacattgggagaggagtcatacaaggatagcactttgatcatgcaactgctacgtgataacctcaccctctggacctctg

SEQ ID NO: 276446 - DNA, 282 bp, Glycine max
  unsure (1)..(282): unsure at all n locations
attccttcatttttaaacctagctccatctccctccactcancataacatgnccatcagnagcaaatgctgccaacaccaacttctgtgtaaatgttagcaacaatggctacattagtgctaatgaccccttgaactggggtgcggcggcggaggctatggctgggagccacctcgacgaggtcaagcgcatgctagaggagtaccggaggcccgtcgtcaagctcggtggagagaccctgaccatctcgcaggtcgcggcgatcgcggcccacgaccaggg

SEQ ID NO: 276447 - DNA, 288 bp, Glycine max
  unsure (1)..(288): unsure at all n locations
cacatgctcttatcctgtgtttcgaaatgaatatgattatnttgtggcagttctgaatctctatttcaaatataatgttacgagcgttctaaatgatgctggatatgttccgtctaatactgaaaagtatccccttggaggcatcatctctgccattgagaatgcttttcacgcatctcctcaaatagtttgctcgaaagattctgttgaggaacttcgcctatgcttttataaggacttccagccacgagattgtgctcttggatctgacataanatcaacaggtta

SEQ ID NO: 276448 - DNA, 287 bp, Glycine max
tggaactcactatgctgtcatgagctcctacgagtaccttagcactggacttcgccagtacttggacaacaacatggatggattttacattgctccagcttttatggacaaacttgttgttcacattaccaagaacttcatgaccctgcccaacatcaaggttcctctcattcttggtatctggggaggcaagggacaaggaaaatctttccaatgtgagcttgtctttgccaagatgggaatcaaccccatcatgatgagtgctggagagttggaaagtggaaatg

SEQ ID NO: 276449 - DNA, 287 bp, Glycine max
  unsure (1)..(287): unsure at all n locations
gtgcctctaactgtccacgacacggaggaggacgacggttctgatggctccaccgnnnnnnnnnnnnnnnnnnnnnnnnnnnnnnnnnnnnagcctaaganaggcaaggccgcgttgcctcttaagagggacaggacgagatctaagaggttcttggaaattcancaattgagggagcgtaaganagagtatgacttgaagacagcaatatctttggttaaagaaacagctaanaccaagtttgtagaaacagtagaagcccntnccgcctcaacttgacctaaata

SEQ ID NO: 276450 - DNA, 290 bp, Glycine max
  unsure (1)..(290): unsure at all n locations
gcaaaggttgcagattntggtcttgcaaagttttcntctgatgtcaatacccatgtttctactcgagtgatggggacttttgggtatttggctccagaatatgcttctagtggaaaactcacagacanatcagatgttttctcctatggaatcatgctcctgagttaataaccggacgacggccagttgataaaaatcaaacttacatggaggatagtttggtagactgggctaggcctttgctcacacgagctttggaagaggatgattttgattctattattgaccca

SEQ ID NO: 276451 - DNA, 293 bp, Glycine max
cacacacagagcaacactgcactgtgtggaaacgaaacatggcaagagtggtggcactccaacagaaccaactatctttctctaccttagcttcctctctttctgacttcagtggaaccagacttcaaactcaacttcagttcaagagaaagcaatgccatccaaaagggtctttctacgtctccgcatcgagcaccaagaaaatcctaataatgggaggcaccaggtttattggtgtgtttttgtctaggctcctgtcaaagagggtcaccaggtgactttattcaccaaga

SEQ ID NO: 276452 - DNA, 291 bp, Glycine max
gggactatgagaaggttggtaaaaagatagagcgatctggaaaatcaataagttctcctccagggttgttttttcaacatgcaggtcatagggataaagttgttgacttccattggaatgcatatgatccatggacgattgttagtgtgtctgatgactgtgaaagtactggaggagggggaacgttgcagatatggcgcatgagtgatttgatctacagaccagaagatgaggttttggccgagctggagaaattcaaatctcatgttgtggcgtgtgcttcaaagactg

SEQ ID NO: 276453 - DNA, 287 bp, Glycine max
ttcgatttctgattcttaatttttatttattaattgttactgtgttactttacaggattggctacttatggagagaaagagtggtacttcttttcaccacgggaccggaaatacccaaacggttcgaggccgaaccgggcggctggcaccggttactggaaggcaaccggggcggataagcccattggtcagcccaaaccggttgggattaaaaaagctttggtgttttacgcagggaaagctcctaaaggggacaaaagcattggatcatgcacgagtatcgtctc

SEQ ID NO: 276454 - DNA, 289 bp, Glycine max
aatcaacaaaccaaaaaggtaaactttttgcaacaaccatggttgcaatggcagcagcaacagcatccacccagttgattttctcaaagccttgttccccttcacgtctatgccccttccaactatgtgtctttgcacactaaacaagtgctatcaagtggcaggagaaggcatgtggggggttctggagttaggtgcatggctgtgggggaagcagcaaccactgggacaaagaagagaagtggatatgagcttcaaacactcactagctggttgctgaagcaggagc

SEQ ID NO: 276455 - DNA, 283 bp, Glycine max
  unsure (1)..(283): unsure at all n locations
gctttggaaaactatgcatacaacatgaggaacactgtgaaggatgacaaaattggtgagaaacttgatcctactgacaagaagaagattgaggacgcaattgagcaagctatccagtggctagacagcaaccagctcgncgaagcagatgaatttgaggacaaaatgaaggaattggaaagcatctgcaatcctatcattgccaagatgtaccaaggtggtgctggtcctgacatgggtggtgctggtgctggggcagccgaggatgntatgctgctcctct

SEQ ID NO: 276456 - DNA, 291 bp, Glycine max
tggcaaaagcttttatccaggttcttggtaatgagaaggccagcaaggaagtattcaacatctcgggagataagtatgtcacatttgatggattagcaagagcatgtgctaaggctggtgggttcccagagccagagatcattcactacaaccctaaagattttgattttgggaaaaagaaatcatttccattccgtgaccagcatttctttgcatcagttgagaaagcaaagagcgtgcttggattggaacctgaatttggacttgtagagggtctagcagactcgtaca

SEQ ID NO: 276457 - DNA, 287 bp, Glycine max
  unsure (1)..(287): unsure at all n locations
ggaagaagcancaatggcgccgaagataacacgtaaggttagcagaaaccctgaattgatnaggggaattcggaaagtactcgaggtcgcagatgtaccacaagaggggcatttgggctatcaaggccaaaaacngtggcgttttacctcgccacgaccctaaacccaagcctgaagctcctgctgaaaaaccacccaaattttaccctgctgatgatatcaagaagccccttgtcaacaagcacaaaccgaaaccagctaagcttcagggctagcntactcccggg

SEQ ID NO: 276458 - DNA, 287 bp, Glycine max
ggaagaagcagcaatggcgccgaagataacacgtaaggttagcagaaaccctgaattgataaggggaatcggaaagtactcgaggtcgcagatgtaccacaagaggggcatttgggctatcaaggccaaaaacggtggcgttttacctcgccacgaccctaaacccaagcctgaagctcctgctgaaaaaccacccaaattttaccctgctgatgatatcaagaagccccttgtcaacaagcacaaaccgaaaccagcttaagctcagggctagcattactcccggg

SEQ ID NO: 276459 - DNA, 286 bp, Glycine max
tacctgggctgctttttggttgattttacttggcgtagttatgattgctggtggggcattccttgtgtacaagtacagaataaggcaatacatggattcagaaatcagagcaatcatggcgcaatatatgcccttggacagccaagcagaagttccaaatcatgtcaatgatcaaagagcatgaaggcaaaaatgggccaatccctggaatttcacggcaggcagcatgggtgtgacttttcctgtgccattttgaactctggtcattgaacttaatagactgtat

SEQ ID NO: 276460 - DNA, 284 bp, Glycine max
  unsure (1)..(284): unsure at all n locations
tacctgggctgctttttggttgattttacttggcgtagttatgattgctggtggggcattccttgtgtacaagtacagaataaggcaatacatggattcagaaatcagagcaatcanngcgcaatatatgcccttggacagccaagcagaagttccaaatcatgtcaatgatcaaagagcatgaaggcaaaaatgggccaatcccttggaatttcacggcaggcagcatgggtgtgacttttcctgtgccattttgaactctggtcatgaacttaatagactgt

SEQ ID NO: 276461 - DNA, 275 bp, Glycine max
  unsure (1)..(275): unsure at all n locations
aactccatagccttcaaatccttcgtcggcctccgccagtcctcgccggaggncccgcatttcgccgctccagccaagacccgccactccccaccgcaaattccgcgtcttggctggaaaattcagccccaagctcaatggccggaacanccgcgtggcggtggtgggaggcggtccggctggcggggccgccgcggagacgctggcgaaggcggcgtggagacgttctgatcgagcganagatggacaactgcaagccgtgcggtggcgccatc

SEQ ID NO: 276462 - DNA, 287 bp, Glycine max
  unsure (1)..(287): unsure at all n locations
caaaatactactatagaattggaagtggtgattctgctcgagacttttggttcgaaacacctcctaaagttgggccagatactccctacaaatttgggatcnttggtgatttggggcaaacgtttaattctctttcgacccttgagcattatttggagagtggaggagaggctgtgttatatgttggagatctttcttattctgatgaacatgactacaaagatatgggtttacggtgggatacatggggccgatttgctgaaaggagtgcagcatatcagccatgg

SEQ ID NO: 276463 - DNA, 284 bp, Glycine max
  unsure (1)..(284): unsure at all n locations
atgcattcccgggtccnaagtacgacngcaagttcttacataataaagcacgtgagttgctgcaggatacgcgattgagccagacactgaccaatgttgtaataccaaccttcgaccttaagaaacttcacccagttatattctcaaactttcagctgaagacagttcctagctttgatgcgaantgtcagatatatgcattgggacctcagcagcaccaacttatcttccaccctattactttgagaatgatggcactgaattcaatttggttgatggtggcg

SEQ ID NO: 276464 - DNA, 277 bp, Glycine max
  unsure (1)..(277): unsure at all n locations
aaaatggcagcagcctcctccatggctctctcttccccatccttggctggcaaggccgtgaagctgggcccatcagcccccgaagtcgggagggtcagcatgaggaagaccgtcaccaagcaggcctcctccggaagcccatggtacggcccagaccgcgtcaagtacttgggcccattctctggcgagcccccgtcctacctcatggcgagttcccangtgatacggctgggacntgctgggtttcggcgacccagaaaccttcgccagaaacgtg

SEQ ID NO: 276465 - DNA, 288 bp, Glycine max
  unsure (1)..(288): unsure at all n locations
attctctctgtgtatttccctacctctcncttcaagatgcagatcttcgtcaagaccctcaccggcaagaccatcacccttgaggtggaaagctctganaccatcgacaacgtcaaggccaagatncaggacaaggaaggaatccccccggaccagcaacgtctcattttcgccggaaagcaacttgaggacggccgtacccttgctgactacaacnttcagaaggagagtatcttcacctcgtcctccgtctccgtggtggnatgcagatcttcgttaagaccctca

SEQ ID NO: 276466 - DNA, 284 bp, Glycine max
  unsure (1)..(284): unsure at all n locations
aaangagncanttatgcatctnctgctgctggaattagagaggaaactgggcagcaactgggagnnccgtattagttttagtgggcaggtgcaaaattaccaaagcacagtgtctcaagtggtaaatttactgggaaatgaggactcagctgaaattacttgagcaagtgcatatactcaattgggttgggtagcaatgattacctcaacaactatttcatgcctcaattctattccagcagcaggcagtactcaccagatgagtatgctggatgttcttattc

SEQ ID NO: 276467 - DNA, 198 bp, Glycine max
  unsure (1)..(198): unsure at all n locations
ctctncactctgcttctgcttctttggaaagcacttaaccaaactctctgtttcagcttcctctgntttttgggtacnaacagagtttctcctgttttngacgatggccataaaggcgattgaactgttnaaagggtgcggatcanaagaaaaataatggaagtgcttgctgcggtggcttcgganttgggggatgtg

SEQ ID NO: 276468 - DNA, 287 bp, Glycine max
tgaaatatatgtttcctgatgctgagtgggtttgtggaaactatcttcattgtcacaatccgagattggagcaaaaatggatagaagttatggttgatactcaagtggatgaactcataaaggctgtgaatcacagattcagatctgaagattggttaatgctggtggcattcacagaacaatggtgtttgccaacactgttgaggctgttgaagctgtggcaaagatattactccgatctgggattgaatgttctcgttatcataagaatgcacattggaagagcg

SEQ ID NO: 276469 - DNA, 279 bp, Glycine max
  unsure (1)..(279): unsure at all n locations
cattagcacttcttcttttcacactgccgctgcaacaatggcttcagagaagaaactttcgaacccaatgagggagataaaagtgcagaagctcgttctcaatatctctgttggcgagagtggagatcgtctcaccagagccgccaagggttggaacaacttagtggccaaaccccagtgttttccaaagcaaggtacactgttcgttcctttgggattagaagaatgagaagattgcatgctatgtcatgtcagaggtgacaaggcangcaattttgg

SEQ ID NO: 276470 - DNA, 282 bp, Glycine max
  unsure (1)..(282): unsure at all n locations
gggactatgagaaggttggtaanaagatncgagcgatctggaaaatcaataagttctcctccagggttgttttttcaacatgcaggtcatagggatnaagttgttgacttccattggaatgcatatgatccatggacgattgttagtgtgnctgatgactgtganagtactggaggagggggaacgttgcagatatggcgcatgagtgatttgatctacagaccagaagatgaggttttggccgagctggagaaatcaaatctcatgttgtggcgtgtgctt

SEQ ID NO: 276471 - DNA, 282 bp, Glycine max
caaaaccctcttttttctctctcttgcaaaacctaattttcatttcttccctcaaatttcaaaatgcgtgagatccttcacatccagggtggccaatgcggcaaccagatcggcgccaagttctgggaggtggtttgcgcggagcacggatcgaccctaccggaaggtacggtggggactcggagttgcagctcgagaggatcaatgtctactacaacgaggccagttgcggtcggttcgtgccgcgcgcggttctcatggacctcgaaccgggcaccatgg

SEQ ID NO: 276472 - DNA, 288 bp, Glycine max
  unsure (1)..(288): unsure at all n locations
aaacactatagcaatagaaacatttgcttttgaaaaacccctcactcttcatcactacactagctancccacatacaatgtacgaccaaatttaaggtgtttcgtgaattcacaagcgatgactcattcctaaaccaagttatccctgaaaaatcaccgaattccaagtgactctgtccctcgctagagactacgatggcaacaactcaaccaacggaaagttcattccttactgggacactgaaaaggtcactcccgaagtgataaaaaaattcaagaaaaaatacg

SEQ ID NO: 276473 - DNA, 288 bp, Glycine max
tctcactcgcgccatcttagggtttctccttttgtttcgcaacatggttgccgctaagaaaactaagaagacccatgagagcatcaacaacaggctcgctcttgtcatgaagagtggcaaattcaccctcggttacaagaccgttctcaaattcttaggaactccaaaggaaaattgattatcattgctaacaactgcccccctttgagaaagtcagagattgaatactatgctatgttggcaaaggttggagttcatcattacaatgggaacaatgtggatttgggc

SEQ ID NO: 276474 - DNA, 287 bp, Glycine max
  unsure (1)..(287): unsure at all n locations
ggagaatatgcaacagcaagagctgcatctgctgctggaacaatcatgactttgtcctcatgggctacttccagtgttgaagaggtggcttcaacaggacctggcattcgctttttccagctatatgtgtacaaggacaggaatgtggttntcagcttgtgagaagagctgaaagggctggattcaaagccattgcccttactgttgataccccaatactaggacgcagagaagctgatatcaagaacagattcacattgccgccatttttgacattgaagaacttt

SEQ ID NO: 276475 - DNA, 282 bp, Glycine max
agatcttgaaggtcatcagaaagaacttggttaagaagtgccttgagctcttctttgaaattgcagagaacaaggaggattacaacaagttctatgaggctttctccaagaacttgaagctaggtatccatgaggattcacagaacaaggaaagattgctgaattgctcaggtaccactccaccaagagtggtgatgaaatgacaagcctcaaggattatgtgaccaggatgaaggaaggtcagagtgacatctactacatcacaggtgaaagcaagaaggc

SEQ ID NO: 276476 - DNA, 281 bp, Glycine max
  unsure (1)..(281): unsure at all n locations
attgaagttaaaagccttagccttccctacaactccaaacancnaagacatcatcatccatggctgcctccgtctccactgtcggagctgtcaacagagctcttttgaacctgaatggttctggagctggagcttcagctcccagttcgccttctttgggaccagcttgaagaaggttattgcctcaagggtccccaacagcaaggtttccggtggaagcttcaagattgttgctgtagaagagaagaaagagattgaagagacccagcagaccgacaagg

SEQ ID NO: 276477 - DNA, 274 bp, Glycine max
cttttaaccagagccagtatcctcgattggttgctgaggactttttgccattgccttccaaagggcatactgacaaggatggatggtaccctcctggccatggagatgtctttccatcattattgaacagtggcaaacttatgcactattgtcacagggtaaagagtatgtatttgttgccaattcagataacttgggagctatagttgacttgaaaatcttaaatcattgatccagaacaagaatgaatactgtatggaggtgactcccaaaa

SEQ ID NO: 276478 - DNA, 276 bp, Glycine max
attgaagttgaagtcttgcccttctctcttcaactccaaacacaagacatcatcatccatggctgcctccgtctccactgtcggagctgtcaacagagctcttttgaacctgaatgggtctggacctggggtttcagctcccagtcatccttctttgggagcagcttgaagaaggttattggctcaagggtccccaacacaaagatttcctctggaagcttcaagattgttgctgtagaagagaagaaagagattgaagagacccagcagaccgac

SEQ ID NO: 276479 - DNA, 275 bp, Glycine max
atcgagataactagaaacagtgtgatgaaaatgaaggtccttgttttcttcgttgctacaattttggtagcatggcaatgccatgcgtacgatatgttccctctccgaatgaacactggctatggtgcccgtactccggaggtaaatgcgcaagttggaggcttgctgtggaagcacacaacatctttggctttgagaccattcctgaagagtgcgttgaagcaacaaaggaatacatccatggcgaacaatatagatcagactccaaaacagtt

SEQ ID NO: 276480 - DNA, 275 bp, Glycine max
agcgtgctagggttcatcaggtgttgtagagagacacatctattgacactgtgaattactcaagagggctcgacaatcccacaaagtagaaaaagaggttatgttatggcgggcaaaggtgttagttcggtggctaaggcggtacagaatatcagtatccttggcgtgagaagttggggaaatataaggatgagcttgccaagggtgtgtggggatactgggagctgggggcatggaagccgctgagtatcagtgctcggcatcgtgctagaatc

SEQ ID NO: 276481 - DNA, 282 bp, Glycine max
cgttgatgaaaactactctctaggaaaatcactcaccaccaaccaaatcttaaaactcgcgtccaagggtccacagagaaacgccatcaacatcgttctaacttctgctgaagtggcagtggaggggttctgttcgagtaggtgcggacacacgggtcctccgtgggggcgcgtgtgaacggtaagaggtataagttcgcctacatgtgggtgggtaactcagagacacagtgccctggtcaatgcgcgtggccgttccaccaacccatttacggtccccag

SEQ ID NO: 276482 - DNA, 282 bp, Glycine max
cagaagtgaccccaatatacttagccatatctttacttcccaaaacttgctctacaatgagtttccttcgttcttttgcaagaaacaaggatatatcaaaagtaggacgcagaggtatccattgcatgcagaaactatgtgcagaaaaatatctcctgattcactagagaaggcccaaaatcgtgtgatagatgctgcactcacacttgttcgagaaaatacaaggcttaagaaagaatcgtgcatagtttgggaggtgctgtggcaattcaactcttcttg

SEQ ID NO: 276483 - DNA, 272 bp, Glycine max
  unsure (1)..(272): unsure at all n locations
gggactttcggaccctgaaggaacaggagggttcattgagccgaaatggctagcncatggtgagataatcaatggtcgttatgcaatgttgggtgcagttggtgcaatagcacctgaaattctaggcaaggctggtctgatcctcaggagacagcactcccatggttcagaaccggtgtgttcccacctgcaggaacctacaactactgggcagactcctacacactgttcgtgtttgagatggcatgatgggatttgcagagcacagaaga

SEQ ID NO: 276484 - DNA, 271 bp, Glycine max
  unsure (1)..(271): unsure at all n locations
caaacaaccttctttctntttctgtgagcctttctttcangttcttaacttgatcagtgtgcagtgtccaaatcataagggnagttgcaaattgcaatggctaagcatgatgttgagggtggttccttctctgcaaaggataccatgatcctcctccagcaccgttgattgatgctgaggaactcacacagtggtccttctacagggctttgattgctgagttcatgccacaatgctcttcctttacatcacagtgctcactgtgattggt

SEQ ID NO: 276485 - DNA, 277 bp, Glycine max
cgttgatgaaaactactctctaggaaaatcactcaccaccaaccaaatcttaaaactcgcgtccaagggtccacagagaaacgccatcaacatcgttctaacttctgctgaagtggcagtggaggggttctgttcgagtaggtgggaacacacgggtcctccgtgggggcgcgtgtgaacggtaagaggtataagttcgcctacatgtgggtgggtaactcagagacacagtgccctggtcaatgcgcgtggccgttccaccaacccatttacggtc

SEQ ID NO: 276486 - DNA, 281 bp, Glycine max
  unsure (1)..(281): unsure at all n locations
ggcatagcatgctacactcgcgggcctttcttgcctagtgtntcttccaagcactctccaccttccatttctccatcttttggcttgaggagtctgaaatcaagctctttatttggagaatcgctaagagtggcctccaaatcacaataaaggtttcaaagacaaagaatacttcactcgtgaccagatgtgaaattggtgacagtctcgaagaattcctcacaaaagcaacaccagatnaggggntgatcaggttgttggtgtccatgggagaagcattg

SEQ ID NO: 276487 - DNA, 263 bp, Glycine max
  unsure (1)..(263): unsure at all n locations
tgcaattgaagttaaaagccttagccttncctacaactccaaacatccagaaatcatcatcccatgggctgnctccgtctccactgtcggagctgtcaacagagctcttttgaacctgaatggttctggagctgagcttcagctcccagttcagccttctttgggaccagcttgaagaaggttattgcctcaagggtccccaacagcnnggtttccggtggaagttcaagatgttgcngtagaagagaagaaagagattgaag

SEQ ID NO: 276488 - DNA, 275 bp, Glycine max
caagaactctccaaggatcctccttcccacgagattctttggtgggaaaaatccaagaggtttgaaatttgaaggcagggaagatggattatttcaatgcaccaggaagaaaccatctctttgttccagggccggttaacatccggaccagatcatccgggccatgaacagaaacaatgaggactaccgttctccagcaattccagctatgacaaaaactttgcttgaggatgtcaagaagattttcaagaccatactggaaccccatttctcat

SEQ ID NO: 276489 - DNA, 267 bp, Glycine max
taaaaacctagtattttatctggaggcatgtgaatctgggagtatctttgaaggtcttcttcccgaagatatcaatatttatgcaaccacagcttccaatgcagaagaaagtagttggggaacatattgccctgggagtatcctagtcctcccccagaatattcaacctgcttgggtgatctgtacagtgttgcttggatggaagacagtgacagacacaatttacgaacagaaactctgcatcaacaatataaattggttaaagag

SEQ ID NO: 276490 - DNA, 278 bp, Glycine max
cgagataactagaaacagtgtgatgaaaatgaaggtccttgttttcttcgttgctacaattttggtagcatggcaatgccatgcgtacgatatgttccctctccgaatgaacactggctatggtgcccgtactccggagtgaatgcgcaagttggaggcttgctgtggaagcacacaacatctttggctttgagaccattcctgaagagtgcgttgaagcaacaaaggaatacatccatggcgaacaatatagatcagactccaaaacagttaaccaa

SEQ ID NO: 276491 - DNA, 281 bp, Glycine max
cttaatcgatcatcacttcacttcactaatacatcatggcagacgagacccagaacaagtatgagagctctgaggttgaggtccaggatcgtggtgtttttgactttctcggtaagaaaaaggatgaagaagacaagcctcatctcaggaggaggtcatcgccaccgagtttcaaaaagtcactgtctcagaccaaggagagaacagcacagcctcttagaaaagcttcaccgatctgacagcagctctagctcttcaagtgaggaggaaggagaagatgg

SEQ ID NO: 276492 - DNA, 296 bp, Glycine max
aaagggtttccgatcaccgaacggatcaaggaggatgaagatagcggtggaagggtgcatgcacggggacctggacaatgtctacagaacccttcaacagttggagaaatctgaaaacacgaaaatcgaccttctcctctgctgcggcgatttccaaccgtgaggaacgagcatgacttgaagagcctgaacgtccctctcaaataccgctccatgaactccttctggaagtactattccggcgccgaggttgccccctaccccaccatcttcatcggcggcaaccacgaagcttc

SEQ ID NO: 276493 - DNA, 292 bp, Glycine max
  unsure (1)..(292): unsure at all n locations
cgtgaattcacaagcgatgactcattcctaaaccaagttatccctgaaaacatcaccgaattccaagtgactctgtccctcgctagagactacgatggcaacaactcaaccaacggaaagttcattccttactgggacactgaaaaggtcactccgaagtgataaaaaaattcaagaaaaaatacgaacccaccgcactgagggttaaggttcttgtcagcattggaaacaaaaacaaacaatttcctttcaccattggctcggactcgaacagcgaanatgggtctccgag

SEQ ID NO: 276494 - DNA, 255 bp, Glycine max
  unsure (1)..(255): unsure at all n locations
gatggcaaatgaactacccgtcaaagcttttggttgggctgcttcagacacttctggcacccttgccccttttcatttctccagaagggaaaatggcgtcgatgacgtcactctcaagttctcttctgcggggtttgccactctgatctccacactctcaaaaacgactggggtttcaccacctanncctgtcgttcctgggcatgaaattgttggtgttgtgacagaagttggaaacaatgtgaaaaacttcaa

SEQ ID NO: 276495 - DNA, 289 bp, Glycine max
  unsure (1)..(289): unsure at all n locations
gtgaattcacaagcgatgactcattcctaaaccaagttatccctgaaaacatcaccgaattccaagtgactctgtccctcgctagagactacgatggcaacaactcaaccaacggaaagttcattccttactgggacactgaaaaggtcactccgaagtgataaaaaaattcaagaaaaaatacgaacccaccgcactgagggttaaggttcttgtcagcattggaaacaaaaacaaacaatttcctttcaccattggctcggactcgaacagcgaanatgggtctccg

SEQ ID NO: 276496 - DNA, 289 bp, Glycine max
  unsure (1)..(289): unsure at all n locations
aagctagtttatcgtgaggngaatatgaagttgtttgttttctttgttgctgtcagtagttttggtagcatggccatgccatggcgcaggctaccaaaggttccctctccgaatgaaaactggctatggtgagcgttcttcggaggtaaaatggcaagttttaggcttgctgtggaagcacacaanatccgagcnttaaaaccattcctgaagagtgcgttgaaccaacaaaggactanattaatggcgaacaatttagatcagactctaaaacagttaaccaacaagc

SEQ ID NO: 276497 - DNA, 285 bp, Glycine max
  unsure (1)..(285): unsure at all n locations
tttgttgtgagctataagctagtttatcgtgaggngaatatgaagttgtttgttttctttgttgctgcagtagttttggtagcatggccatgccatggcgcaggctaccaaaggttccctctccgaatgaaaactggctatggtgagcgtcttcggaggtacaatgcgcaagttttaggcttgctgtggaagcacacaacatccgagcntttaaaaccattcctgaagagtgcgttgaaccaacaaaggactacattaatggcgaacaatttagatcagactcta

SEQ ID NO: 276498 - DNA, 285 bp, Glycine max
caagtacaagaacaagaagaaacaatgtcttgctccaatctcacaatgttggtgtcctcaaaaccttccctttccgatccctccaatctctccttccgctctgtcctcaacccttttcagctcccttcacaaaacccaacttcatgcactcttcacgctcctcaaccacccaaattcagtgtggtctgagagaactcagaacccgcattgattccgtgaagaacactcagaaaatcaccgaggctatgaagcttgtggctgcagccaaagtgagaagagctcaag

SEQ ID NO: 276499 - DNA, 284 bp, Glycine max
  unsure (1)..(284): unsure at all n locations
gttgcttggnggggataagattaaagattcaacaatggcctctgcttctgctantcttctcaagtcatctcctgttcttgacaagtgcgagtnggtcaaaggccagacccttcgccaacctctcgtgagatgtaacccttcctcagnanagctctcaccancaaagctgcttcctatgctgacgagctcgtcaaaanngcnaaaacagtggcctcaccggggcgtggtattttggcgatggatgagtcaaatgcaacctgcgggangcgtttggcatctattgg

SEQ ID NO: 276500 - DNA, 290 bp, Glycine max
tttaggccttagtgagaaggataacgccatttggttttggcttggaatacgtcatccactatcaatcaactgggctttgaaatggtgaaggagaccgaatactatgacgtgctgggtgtcagccctacggcatccgaagccgagattaagaagcttattacattaaggcacggcaagtgcatccagataaaaacccaaatgaccctcttgctgcacaaaattttcaggttttaggtgaggcttaccaagttctgagtgacccagctcaaagacaagcttatgatgctcat

SEQ ID NO: 276501 - DNA, 287 bp, Glycine max
  unsure (1)..(287): unsure at all n locations
tgctggangcccgtggcaatttattggccttttgtctctctttgacccacctaggcatgatagtgcagaaacaatacggagggcactaaaccttggagtcaatgtcaaaatgattacaggggatcagctagctataggaaaggaaacaggngtcgcttgggaatgggtaccaacatgtatccttcatcagctttacttgggcaggacaaggatgaatccattgttgccttgccaattgatgaactaatagaaaaggctgatggatttgctggtgtatttcctgagca

SEQ ID NO: 276502 - DNA, 217 bp, Glycine max
  unsure (1)..(217): unsure at all n locations
tgattgaagaagatgccgatcagaaacatcgccatcggaaggcctgaagaggctactcaccccgacacgttgaaggcgggttggctgagttcatctccaccttgatcttcgtgttcgccggttcaggttccggcatcgcctanaacaagctcaccgacaacggcgccgccantcccgccggcctcatctccgcttccatcgcccatgctttcgccct

SEQ ID NO: 276503 - DNA, 278 bp, Glycine max
ccaccattctagatatcagagaactttgcagctctcttaggtttttaaaaaacaccacgcaaacagcaagatggccacttccgacagtaacatgctaactaaattatgttccagtttatgtgatgctcccactcggagttgtcatgttgacaatgtttttgaagacccagatggccttaaagaacagctcttgcagcttcgagctgcgggtgttgacggggttatggttgatgtgtggtgggggatcatagaactgaaggggcctaagcagtatgatt

SEQ ID NO: 276504 - DNA, 283 bp, Glycine max
  unsure (1)..(283): unsure at all n locations
tggagggaaaaaatgaagcagagaattatcaaattcgttctagaaaagccaaacgtgtagtaattttgactaataaatctaaattttttaagaagtacgatacttataatcctacaggagatactgataacgctgaaaaaaaaaaaatgaattggctttaatangttattcccaacaatcggnttttcggcgagacataatcaaaggntctatangtgctcaaaggngtaaaacagttacttggaaatttttncaaaaaagggtgcattcccccctttttttg

SEQ ID NO: 276505 - DNA, 282 bp, Glycine max
tcatcatacgtgggcaagaaaacaatcttatccacatggacaaatccatggatataggatgtcactttgggcagaacatacaggaacaattgaagagtgctttttgcaacccgagagccttgaatgtgtaagaagggttaaagcaatggtgaaatgaactggaaacaattttcagctaaggaagcaacagagatgaaagggcatctactgaaatacccggtagaagttgatcgaaatggcaaggttagaccccttcaggactgtgaagagttcccggatgtg

SEQ ID NO: 276506 - DNA, 289 bp, Glycine max
  unsure (1)..(289): unsure at all n locations
ctccanctgatgatggatccggacgatttcttgaggctaaagaatcaactctcggtgaaatcctcgagcggcgaaacggcatcgttctgcttcagatcgaatgagttagtggaactgacgaagatgtgcagagatctgaggcacaaggtgcgnanatattggaggtggaggtggatccgaagggaggaccgatgattcaagaggcggcgatgaagctctacgtttcgaagagcgagttcgagaaggttcattgttgcaggcgatgcaggcgattnaacgcggcgatgaa

SEQ ID NO: 276507 - DNA, 284 bp, Glycine max
catcatcaaagtttcttcctttctctgctctttgccttctctgacacatttggtgccttgtagagcgtgttttggcaggaaggtggtatggcgaaggacgttgaggttgctgagcgtggctccttctctgggaaggactaccaggacctccaccagcaccactcattgatgctgaggagctcacaaagtggtccttttacagggctctcattgctgaattcattgccactttgctcttcctctacattactgtgctcacagtcatagggtacaagcaccagact

SEQ ID NO: 276508 - DNA, 282 bp, Glycine max
  unsure (1)..(282): unsure at all n locations
ggccaatcaatccccatcantttgtgggctgtcactggctcctgttgttattggtgtgtccatggcatnnttgaccgagctctcattcaactgggtcggcttcataagtgctatgatttcaaacatttcntcacgtaccgaagcattattcaaagaaagccatgactgatatggacagtaccaatatctatgcctacatttccatcattgctctaattgtgtgtataccacctgccgtaattttggaagggcccacactgttgaagcacggcttcaatgatg

SEQ ID NO: 276509 - DNA, 282 bp, Glycine max
  unsure (1)..(282): unsure at all n locations
ctttgtctctgttctgtgtgtgcgaganatggcgatggcaatgaccgcttcgnaggcttncatcttcaattgacaagcctctgcnccctctcttcaatgaccggttccctctactanaagtcgtctttgcctgatgaagctgtttacgcaaggagcgacccggagttacatggccgaagcagttgaatgctccacttgaggtcgtggatcctgagattgctgatattattgagcttgagaaagctaggcaatggaaggggctagaattgataccgtcagaga

SEQ ID NO: 276510 - DNA, 269 bp, Glycine max
  unsure (1)..(269): unsure at all n locations
gttttccatgtgggagaactatgtgatattggtttggaatgttgggtttttggnngctttgctctantcagttttctatgtttctttggatctgaaagctggctctttggctgctttgctttgtgctctttgttgattggtagtagctttgttgcaagccaacttgggttgtctctagcttggaaggttgttcttgtggttcagatagtatgttggacagggcagttcattggtcatggagtatttgagaaacgagctcctgctctttt

SEQ ID NO: 276511 - DNA, 286 bp, Glycine max
  unsure (1)..(286): unsure at all n locations
gcagaaagcaagctcatcctagagttttaaaaatgggcagcagcctcctccatggctctctcttccccatccttggctggcaaggccgtgaagctgggcccatcagcccccgaagtcgggagggtcagcatgaggaagaccgtcaccaanaggcctcctccggaagcccatggtacggcccagaccgcgtcaagtacttgggcccattctctggcgagcccccgtcctacctcactggcgagttcccaggtgactacggctgggacatgctgggctttcggccgac

SEQ ID NO: 276512 - DNA, 284 bp, Glycine max
  unsure (1)..(284): unsure at all n locations
ctgngtcttgcaattgangttgaagtcttgcccttctctcttcaaactccaaacacaagacatcatcatccatggctgcctccgtctccactgtcggagctgtcaacagagctcttttgaacctgaatgggtctggacctggggtttcgctcccagttcatccttctttgggagcagcttgaagaaggttattggctcaagggtccccaacacaaagatttcctctggaagcttcaagattgttgctgtagaagagaagaaagagattgangagacccagcaga

SEQ ID NO: 276513 - DNA, 281 bp, Glycine max
  unsure (1)..(281): unsure at all n locations
ttcgccttcngcngcccctccaacggcttcatcngccgccacttcttcggcctacgagattacccgatgggctcntctccctccggcgactacagcttcttcctctancagtnggccttcgccatcgccgccgcaggaatcaccagggctccatcgccgagagtacacagttcgtggcttaccttatctactcttctttcttaaccggtttcgtttaccccatcgtttcgcattggttctggtcctcggacggttggtccagctcgagttgtagcgacgga

SEQ ID NO: 276514 - DNA, 278 bp, Glycine max
  unsure (1)..(278): unsure at all n locations
gagtctgacatgtgtgcgagtcaacgggcgagtaaacccgnaaggcgcaaggnagctgattggtgggatccccctgtgggttgcaccgccgaccgaccctgatcttctgtgaagggttcgagtgagagcatacctgtcgggaccgaaagatggtgaactatgcctgagcggggcgaacagaggaaactctggtggaggcccgcagcgatactgacgtgcaaatcgttcgtctgacttgggtataggggcgaaagactaatcgaaccgtctagtagctg

SEQ ID NO: 276515 - DNA, 280 bp, Glycine max
  unsure (1)..(280): unsure at all n locations
gttgcttggcggggataagattaaagattcaacaatggcctctgcttctgctantcttctcaagtcatctcctgttcttgacaagtgcgagtnggtcaaaggccagacccttcgccaacctctcgtgagatgtaacccttcctcacatcagctctcaccatcaaagctgcttcctatgctgacgagctcgtcaaaaccgccaaaacagtggcctcaccggggcgtggtattttggcgatggatgagtcaaatgcaacctgcgggangcgtttggcatcta

SEQ ID NO: 276516 - DNA, 282 bp, Glycine max
  unsure (1)..(282): unsure at all n locations
ttcacaaaaaaattatcgagatcccctttttctcctaagaaaagccatggctaagggtcccggtctctactctgacatcggcaagaaagccagggatctgctgttcaaggactaccacagtgaccagaagttcaccatcaccaccnctcacccactggagttgctataacagcatcaggaaccaggaaaagtgaactgtttgtggctgatgtcaacacccagttgaagaacaaaaacatcactactgatatcaaagtgatacagattctaatctcttcacaa

SEQ ID NO: 276517 - DNA, 276 bp, Glycine max
  unsure (1)..(276): unsure at all n locations
atggattatgatggtatgagaaaaccttccaaaaacttatttcactctcgcttcttcctttttgggttctattgctgggattgggagttcttgaccgctctcctcctttttagttcttccccttaatcttctttcttcacaattttatttccttccttattagacgtattagatcagattgaacaaaagggnnnnnnnnnnnnnnnnnnnnggggaataataganataagaaaagattagtgaggttgaaatgtcgcaacgatcggtgccggcgcc

SEQ ID NO: 276518 - DNA, 279 bp, Glycine max
  unsure (1)..(279): unsure at all n locations
agaagtgaccccaatatacttagccatatctttacttcccaaaacttgctctacaatgagtttccttcgttcttttgcaaganacaaggatatatcaaaagtaggacgcagaggtatccattgcatgcagaaactatgtgcagaaaaatatctcctgattcactagagaaggcccaaaatcgtgtgatagatgctgcactcacacttgttcgagaaaatacaaggcttaagaaagaactcgtgcatagtttgggaggtgctgtggcaacttcaactctt

SEQ ID NO: 276519 - DNA, 281 bp, Glycine max
  unsure (1)..(281): unsure at all n locations
acaaaagaaagttcgaaaaaagaggaggaaaaaaaaaaggaaaatgaggaaagaaaangtatagaaatagcagaagcctgggatagcattatatttgctcaagtaataagaggtattttattaataacccaatccattcttagaaatatattctattaccttcattgataataactaaaaatattgctcgtatactattttttcaatttcccgaatggtcggaagattttagggattggaagagagaaatgtatattaaatgcacatataatggtgttcaa

SEQ ID NO: 276520 - DNA, 279 bp, Glycine max
  unsure (1)..(279): unsure at all n locations
aaaaaataaagtacacccagcatttgtcagggaaaggagagcaatgaagagggattatgaagaatttaaggtgaggattaacagtttggtggcaacagcacaaaaggttcctgaggatggatggaccatgcaagatgggactcctggcctggaaataatgtgaggnnatcatcctggcatgattcaggtcttccttggtcaggatggtgtgnttgatgttgaaggaaatgagctaccccgcttggtctatgtttctagagaaaagaggccagggtttga

SEQ ID NO: 276521 - DNA, 279 bp, Glycine max
  unsure (1)..(279): unsure at all n locations
ctttgccttcccatatctcctgcagtttatccgtgagtacacnggcaaagttgatgaactggtgaaggataaaattgaagcgcagaaccaagtgaaggctaaagaacaagaagagaaggaagtaattgctcaacagaatatgttgctcagttgttgcctcttgctttncccgcaccaccaatgcctggaatgggaggaggctttgcgcctccccctccaatgggtggattggggatgcctccaatgcctccttttggaatgccacccatgggcagctac

SEQ ID NO: 276522 - DNA, 278 bp, Glycine max
  unsure (1)..(278): unsure at all n locations
tcttgcagtcgcagaggnanancctagctagtagtctcagttcgtttgagagagaaaaaatggcagagggtctcgttctccgcggnaccatgcgcgcccacancgacgtcgtgacggcgattgccactcccatcgacaactcgacatgatcgtnacggcgtcgcgcganaaatccatcattctctggnacctcaccaaggaggncaagacctacggtgtcccccgccgccgcctcaccgganattctcacttcgtccaggacgtcgtcctctcatccg

SEQ ID NO: 276523 - DNA, 272 bp, Glycine max
  unsure (1)..(272): unsure at all n locations
ggctttggctttggcctgaacttcagaattttgtccctatctcctagtttcaggaangctatctatagaccacattgtccctgcatatgaaaggagcagttgcagggcaatctttttggattatgatggtacggtgtgcctcaggcttccattgttaaaccgcccagtcctgaagtcatatccgtgctaaataatatatgcagtgatgttagaaacactgtgtttattgttagtggcaggggaaaaacctcactgagtgaatggtttgatca

SEQ ID NO: 276524 - DNA, 302 bp, Glycine max
  unsure (1)..(302): unsure at all n locations
ctccactcagaagcgaagaanaagccacagagaactagtctcctacttctcacccgcaaganaaaaatggcatctcacatcgttggatacccccgtatgggtcccaagagagagctcaagttcgctctcgagtctttctgggatggcaagancagcgccgaggatttgcagaaggtgtcttctgatctcagggcatccatctggaagcagatggctgatgctgggatcaagtacatccccagcaacactttctctcactatgaccaggttctcgacgccaccgccaccctcggtgccgttcc

SEQ ID NO: 276525 - DNA, 257 bp, Glycine max
gttcttctcgaacgaacctccaatctgcttgtcacaaaagaggaagggttggaactctatgaagacatgatattagggaggttttttgaggacaagtgcgctgagatgtattataggggcaaaatgtttggttttgttcacttgtacaatggccaagaggctgtgtcaactgggttcatcaagcttctgaagaaggaagattctgtagtgagcacctacagagatcatgttcatgcattgagtaagggggtcccatc

SEQ ID NO: 276526 - DNA, 287 bp, Glycine max
ctcctcaatccacataccagtgccagagggagattaaagaatctgctgccgccatcaaaattcaaactgcatttcggggttacctggcaaagaaggctttgagggcattgaagggaatagtgaagcttcaagctatcattcgtggccgagcagtaagacgccaagctatgagtactcttaagtgcttacagtccattgtgagtatccagtcacaggtctgtgcaaggaggctccaaatggttgaagggagatgtgattactctgaaaatgaagacatgcaagattct

SEQ ID NO: 276527 - DNA, 276 bp, Glycine max
aaagtttcttcctttctctgctctttgtcttctctgacacatttggggccttgttgagtgtgtttttgcaagagggtatggcgaaggacgttgaggttgctgagcgtggctccttctctgggaaggactaccaggaccctccaccagcaccactcattgatgctgaggagctcacaaagtggtccttttacagggctcttattgctgagttcattgccactttgctcttcctctacattactgtgctcacagttatagggtacaagcaccagacgg

SEQ ID NO: 276528 - DNA, 285 bp, Glycine max
ctgagcttgaacagctctggagctggagcttcagttcccagttcagccttctttggcaccagcttgaagaaggttattgcctcaagggtccctaacgtcaagatttcttctggaagtttcaaaatcgttgccgcggaaaaagagattgatgagaaacaacagacagacaaggacagatggaaaggtcttgcctatgatgtttcagacgaccagcaagacatcacaagagggaagggtttggttgattccctcttccaagctccacaggatactggaactcactat

SEQ ID NO: 276529 - DNA, 287 bp, Glycine max
  unsure (1)..(287): unsure at all n locations
agtntgtatagtgtaggatttgttggtattcgtgataaaaacacctcatcctattcattttgccatgacgggcgaactccagataaaggttttgaaagtaatgagaaattattaattcatccatgttactggcttggtttgaatctaaatcgtaatgcacttgctccagaggaagcagaggagataaatgacgaatatgatattaatattatttcagataattcagccattagaaataaaacaataggtcaaataactactcatctagatcagataccgataggaaa

SEQ ID NO: 276530 - DNA, 283 bp, Glycine max
gcctttttggttctgtgttctgtgattttgggcctgagtttactgttgttgatgtggatggtgaagaaccccatactggcattattgcatccataagcaatgacaaccctgctctagtatcctgtgttgatgatgagaggcttgagtttcaggatggagatcttgttgtattctctgaagttcatggtatgaaagaattgaatgatggaaagccaagaaagattaaagatgctagagcatactcttttactcttgaagaagacaccacaaattatggtacgta

SEQ ID NO: 276531 - DNA, 293 bp, Glycine max
cggaagagggttgcgcgctggatttgttcctgtttctccaaccaaagtttactggttcatctgcttcaatagtccatctgcaggtccaaaaataactgattcattggagctgaagaagcaagctaaggaactggtgaagaattggccttcagagctattgaacatagtggattctacgccggatgacactgtcattaagactccattagtagataggtggctttggccagccataagtccttctgcttctgcaggaagagttgtggtggttggagatgcatggcatccaatga

SEQ ID NO: 276532 - DNA, 289 bp, Glycine max
  unsure (1)..(289): unsure at all n locations
gccatttattcccactgtttattgaacatggcacagattttggctccctctacgcaatggcagatgagaatctcaaaatcctctcccaatgcaagtcccattacatcnaacatgtggagttctttattgtggaaacaaaataagaaagtttcacccacaagttctgctaaatttagagtgatggcaattaagtctgacaatagcatcatcaacaggctagagggtctacttaatttggatatcactccattcacggacaagataattgctgagtacatttggattgggg

SEQ ID NO: 276533 - DNA, 289 bp, Glycine max
  unsure (1)..(289): unsure at all n locations
cgtgaattcacaagcgatgactcattcctaaaccaagttatccctgaaaacatcaccgaattccaagtgactctgtccctcgctagagactacgatggcaacaactcaaccaacgcnaagttcattccttactgggacactgaaaaggtcactcccgaagtgataaaaaaattcaagaaaaaatncgaacccaccgcactgagggttaaggttcttgtcagcattggaaacaaaaacaaacaatttcctttcaccattggctcggactcgaacagcgaacatgggtctc

SEQ ID NO: 276534 - DNA, 287 bp, Glycine max
  unsure (1)..(287): unsure at all n locations
tngagggtgagatcttgcagtcatccaatctgaagaactttagtttgacagaactcacagctgccacaagaaatttccgtaaagacagtgttttaggaggagaaggtgattttggatcagttttcaagggctggattgataatcaatcactggctgctgccaaacctggcactggcgttgttgttgcagtgaaaagacttagtctggatagcttccaaggtcagaaggattggttggatgaagtaaactatctaggccagctttctcatcctcatctagtgaaatta

SEQ ID NO: 276535 - DNA, 280 bp, Glycine max
  unsure (1)..(280): unsure at all n locations
gtatattcactccaagtggggccttctcaatgttgcagctaaattgcctcattactccttgcagaatgatgtaggacccaagatatatatatcttatgggattagtgatgaacttggtagaggtgattcagtgacaaatctccacttcaatatgcgtgacatggtgtaccttttggttcatacaaatgaagtaaagctgaaggactggcagagaactanaattgaaatgatgcanaaagctaaagctaataaggaatttgaggcaaaagaatcacatggg

SEQ ID NO: 276536 - DNA, 286 bp, Glycine max
ataaccaacccttcgctgttgctaaagagttggtgcgagagatcgaaatttcccattggggcaatatacagatcacagagcattacagtattatccatgctggtgctcagagcaaaggagaattttctaggcttgactatcagaccaggcaatttttaagaggtgcatcagcctttaggcgtcttgttgccaagctaccaccaagagctcattctgtgtactacagggatgaaattggcaacatttccacttctagtttatggggtgactcaaaaaaagacagaac

SEQ ID NO: 276537 - DNA, 284 bp, Glycine max
atcaacaaaccaaaaaggtaaactttttgcaacaaccatggttgcaatggcagcagcaacagcatccacccagttgattttctcaaagccttgttccccttcacgtctatgccccttccaactatgtgtctttgacactaaacaagtgctatcaagtggcaggagaaggcatgtggggggttctggagttaggtgcatggctgtgggggaagcagcaaccactgggacaaagaagagaagtggatatgagcttcaaacactcactagctggttgctgaagcagg

SEQ ID NO: 276538 - DNA, 284 bp, Glycine max
tacctgggctgctttttggttgattttacttggcgtagttatgattgctggtggggcattccttgtgtacaagtacagaataaggcaatacatggattcagaaatcagagcaatcatggcgcaatatatgcccttggacagccaagcagaagttccaaatcatgtcaatgatcaaagagcatgaaggcaaaaatgggccaatcccttggaatttcacggcaggcagcatgggtgtgacttttcctgtgccattttgaactctggtcattgaacttaatagactg

SEQ ID NO: 276539 - DNA, 278 bp, Glycine max
  unsure (1)..(278): unsure at all n locations
gtcaggaatccctgctttaggtggtggattgccaagagttattgcaacatggggtcttactatagttctcacttacttgaactataggggtatgaccattntgggatgggttgctgtttgtttaggggttttctcactcctcccttttgtggttatggggtttttgtcaattccagacctaaagccttcaagatggactgtgacaaatctgaatgatgttaactggaatttgtatctgaatactctattttggaatctcaactattgggactccataa

SEQ ID NO: 276540 - DNA, 278 bp, Glycine max
  unsure (1)..(278): unsure at all n locations
ggccaggcaagccccactcaaccaccacacctctcctcgttcacgctacccctttctgctcttcttctacctttcaagttttaaaagtataaagatggcagagacattcctatttacctcagagtcggtgaacgagggacaccctgacaagctctgcgaccaaatctccgatgctgtcctcgacgcttgcctcgagcaggacccagacagcaaagttgcctgcgaaacatgcaccanaaccaacttggtcatggtcttcggagaaatcacgaccaagg

SEQ ID NO: 276541 - DNA, 276 bp, Glycine max
aatcactgagaagaagagcaaggataatgactgatggattcaacagttgcagaaatgtggtttgtaattttactgaaggtgccatgtattcattccctcaaatacgcttgccgccaagagctttagaggctgctaaacaggctggaaaggttccagatgtttactactgcctcaagcttttggaagccactggcatatccactgttcctggttcaggatttggtcagaaagaaggggtgttccatttgaggacaactattttaccagctgaggaag

SEQ ID NO: 276542 - DNA, 276 bp, Glycine max
  unsure (1)..(276): unsure at all n locations
tttcgtttcgttcattcggcgtagaagcaaaagagagagataganngagggaaaaaggttgctaccaacaacaaacaaaaacagtgttgcttgattccgcggtggcgagaaccgacgtgagcggcggaggagaggcgcggaacggtggtcttcagggttttctgacgtctctgttctcgaccctcggcggtgttttcgggtcaacgtttcaagaaccgcatcaaagtgttatcatggcttccagattggaacaacagcaacaacccaccaatgttg

SEQ ID NO: 276543 - DNA, 284 bp, Glycine max
  unsure (1)..(284): unsure at all n locations
cttctccaattcccctttctctgaatctagancgttgagcttcaanttcagctcatttatgtacgatatggcgtcacctaacaacgatgccttgtccatcttggatacatttggaactacagctcgtagagatagaatctttgattcagcttttctctcctttgtctctcggcttccacgtgattcagcggcnccctctctgccgttggccggctttcgccccctcttccgaggccgtttctccggctccatcactctgctgtctgcctgtttcaccatggaag

SEQ ID NO: 276544 - DNA, 284 bp, Glycine max
cactcataacacaaagcacaaagcaaagctcatccttgagttaaaaaatggcagcagcttcttccatggctctctcatccccatccttggctggcaaggccgtgaagctgggcccatcagccccagaagtgggaagggtgagcatgaggaagaccgtcaccaagcaggtctcctcaggaagcccatggtacggcccagaccgagtcaagtacttgggcccattctctggcgagcccccgtcctacctaaccggtgagttcccaggcgactacggctgggacact

SEQ ID NO: 276545 - DNA, 282 bp, Glycine max
ctgctcttgacaagtacgacttcgattctgaagttggcggcaagattaaaggcactgtgttctacacagataacaatggagcagttgttgatatcactgcaaagtcttcggcatatttgccactgcaagaggcgtgcatccacagggttaagcatgttgaagaagcaggcttagttcctgggttcaaagaggagtttttgatcattggtgagaactcaatagatgatagcttggtcttgagtttaaggtctcttcagtttgaccttgcatgggaacgttgta

SEQ ID NO: 276546 - DNA, 275 bp, Glycine max
aatcactgagaagaagagcaaggataatgactgatggattcaacagttgcagaaatgtggtttgtaattttactgaaggtgccatgtattcattccctcaaatacgcttgccgccaagagctttagaggctgctaaacaggctggaaaggttccagatgtttactactgcctcaagcttttggaagccactggcatatccactgttcctggttcaggatttggtcagaaagaaggggtgttccatttgaggacaactattttaccagctgaggaa

SEQ ID NO: 276547 - DNA, 253 bp, Glycine max
cccttagccaacacaaccatcatggccacctctgctattcagcaatcagcattcactggtcaaactgctctgaagcagctcaatgagttcgtccgcaagaccggtggcgccggcaaaggtcgcactaacatgcgccgcaccgtcaagagtgctcctcagagcatttggtatggccctgaccgtcccaagtacttgggtccattctcggagcagattccatcatacctgaccggagaattccctggtgactacg

SEQ ID NO: 276548 - DNA, 276 bp, Glycine max
cgtgaattcacaagcgatgactcattcctaaaccaagttatccctgaaaacatcaccgaattccaagtgactctgtccctcgctagagactacgatggcaacaactcaaccaacggaaagttcattccttactgggacactgaaaaggtcactcccgaagtgataaaaaaattcaagaaaaaatacgaacccaccgcactgagggttaaggttcttgtcagcattggaaacaaaaacaaacaatttcctttcaccattggctcggactcgaacagc

SEQ ID NO: 276549 - DNA, 273 bp, Glycine max
gacctgagaagaaaaatgctgttgtctcagatgagaagaagaaattagtagcctatcatgaggctggccatgctctagtgggtgctttaatgccagaatatgaccctgtagccaagatatcaattattcctcgtggccaagctggtggtctcacattttttgctcccagcgaagagaggctcgagtctggattgtacagtagaagttaccttgaaaatcagatggctgttgccctgggtggaagggttgccgaagaggttatttttggccagg

SEQ ID NO: 276550 - DNA, 275 bp, Glycine max
  unsure (1)..(275): unsure at all n locations
tacaatgnaaaaagttacaaaagggatcgcattttctttgctaataagacatatcttccaaatgaaactccaacnnccactagtgaagtacagaaaagaagaattggaaaatctaagaggagatggaaaaggagagcgcaaggnatatgataggatctatgattatgatgtctataatgatttgggtaacccagacaagagcaatgatctagctcgtcctgttcttggagggtctagtgcctatccatatcctcgcaggggaagaactggtagaa

SEQ ID NO: 276551 - DNA, 282 bp, Glycine max
  unsure (1)..(282): unsure at all n locations
gcaagctggttaccagcttgaccaggggaactgttcgctcacctttagcgcagtgccttttgatccgttacacaagtcaggttattcatgaatcaggccatacacagtgcaggggaacgccccttctatgattatcttgagagtngccttcgccacaagtcagacatngtgatttttgaagctgccagggcaataacagagctcaatggtgtaacaagccgagaattaactccagcgattactgttcttcagctattcttaagttcgactaagccagtcttg

SEQ ID NO: 276552 - DNA, 280 bp, Glycine max
  unsure (1)..(280): unsure at all n locations
cagcattgctgtggggatttatattttgcttcgtgctgttgaccggtttgctgctaattacaacagctttccaggacagtttgacagtgcaatggatgaagatatacctcgattaaagagcacagcaattggcctacttaatgacttgggatgcaatggagccactttggctgaggaccttatcaatgagatgtgtcgatttggtgcggcagagcttcatgctgttgctgctttggtnggaggaattgcatcgcaagaagtgatcaagctcataacaagg

SEQ ID NO: 276553 - DNA, 281 bp, Glycine max
gcatggcaatgccatgcgtacgatatgttccctctccgaatgaacactggctatggtgcccgtactccggaggtgaaatgcgcaagttggaggcttgctgtggaagcacacaacatctttggctttgagaccattcctgaagagtgcgttgaagcaacaaaggaatacatccatggcgaacaatatagatcagactccaaaacagttaaccaacaagcttacttttatgccagagacctcgaagtccatcccaaggacacatttgtgttcagtatagatgg

SEQ ID NO: 276554 - DNA, 274 bp, Glycine max
gtacaatgcagttatgcagggttggcaacttgtattcaactgggagcaaggattgaactttcaggttcgagatgtatgtgctcgcgtcttgacagacatggcttgggttaccatgaaaacatatgttgacatggatacagggccattcaatgtgaccaatatttatgagttccataatggacggtggtatatggttcatcatcacagttctgtggatggggatgtggaccatcagattgtgcatggataatagtgagagatgatgatacattgt

SEQ ID NO: 276555 - DNA, 273 bp, Glycine max
ccggcgctgaccgcaaggaggccgccgagagcacgctctccgcctacaaagccgctcaggacattgctaataccgagttgcctccaactcaccctatcaggctgggtcttgctctgaacttctccgtgttttactatgagattcttaactctcctgatcgggcttgcagccttgcaaaacaggcttttgatgaggctattgctgaattggatacattgggagaggagtcatacaaggatagcactttgatcatgcaactgctacgtgataacc

SEQ ID NO: 276556 - DNA, 275 bp, Glycine max
  unsure (1)..(275): unsure at all n locations
ccggcgctgaccgcaaggaggccgccgagagcacgctctccgcctacaaagccgctcaggacatcngctaataccgagttgcctccaactcaccctatcaggctgggtcttgctctgaacttctccgtgttttactatgagattcttaactctcctgatcgggcttgcagccttgcaaaacaggcttttgatgaggctattgctgaattggatacattgggagaggagtcatacaaggatagcactttgatcatgcaactgctacgtgataacct

SEQ ID NO: 276557 - DNA, 187 bp, Glycine max
  unsure (1)..(187): unsure at all n locations
gtgtggttgaaagttaagaagtagcaaagatgtttccattcnggcacaagggtcaaaagataaaggggactatggtggttatgcagaagaatgtgttggatatcaacagcatcaccagtgttgacgggatcgtcggcaccggcttagacttcttaggcatgcatcgatacagttacttttttagccc

SEQ ID NO: 276558 - DNA, 294 bp, Glycine max
  unsure (1)..(294): unsure at all n locations
gggagctggaaacagcgaaagtgaaataccactacttttaacgttattttacttattccgtgaatcggaagcngggcactgcccctcctttttggacccaaggtcggcttcggccggtcgatccgggcggaagacattgtcaggtggggagtttggctggggcggcacatctgttaaaagataacgcaggtgtcctaagatgagctcaacgagaacagaaatctcgtgtggaacaaaagggtaaagctcgtttgattctgatttccagtacgaatacgaaccgtgaaagcgtgg

SEQ ID NO: 276559 - DNA, 290 bp, Glycine max
  unsure (1)..(290): unsure at all n locations
tcgtctattgcnccgccggcatatcagggggacacataaacccggcggtgacgttcgggttgtttttggcgaggaaggtgtcgctgacaagagctgttgggtacatggtggctcaggtgtngggggccataagtggggtggggcttgtgaaggctttgcagaagagctactacaacaggtacaaaggtggcgtgaacatgctcgctgatggttacagcaaaggaaccggtttgggcgctgagattattggcacctttattcttgtctacaccgtcttctctgctaccgat

SEQ ID NO: 276560 - DNA, 289 bp, Glycine max
ttctgggctaaatagaggccttgctgcaagcgaagacgatcttcgaaaggcagatgatgctgctaaggaacttgaagctgctggaggacttgtggatctctcgcttggtcttgacaatttgcaaggaagatggaaactcatttatagcagcgcattttcgtctcgaacccttggtggaagccgtcctggtcctcccataggaagactccttcctattactcttggacaggtttttcaacgaatgacatcttgagcaaagatttgataacatagtggagcttcaataggt

SEQ ID NO: 276561 - DNA, 291 bp, Glycine max
tcagcagagagaagagaagggctacacaaacacaatctctaatggcactcaggatgtgggcttcttccactgccaatgcactcaaactctcttctgtctccagacctcatctcttgcctcctttttctttctccagatgcttatcttccgtcttggatggacttaagtacgctgattcacatgaatgggtcaagcacgaaggctcagtcgccaccattggtatcactgaccatgcccaggaccatcttggagaggttgtgtatgtggagctgccagaaccaggtggcacag

SEQ ID NO: 276562 - DNA, 291 bp, Glycine max
gttgaagtcttgcccttctctcttcaactccaaacacaagacatcatcatccatggctgcctccgtctccactgtcggagctgtcaacagagctcttttgaacctgaatgggtctggacctggggtttcagctcccagttcatcctcctttgggagcagcttgaagaaggttattggctcaagggtccccaacacaaagatttcctctggaagcttcaagattgttgctgtagaagagaagaagagattgaagagacccagcagaccgacaaggacagatggaaggtctgc

SEQ ID NO: 276563 - DNA, 289 bp, Glycine max
  unsure (1)..(289): unsure at all n locations
gcaagaagatatatcagacaacttcctcaatatcctcgccaacctttagctcaagtcttcccccatgttcatcccgcagccattgatcttgttgataaaatgctgacagttgatcccaccaaaagaattacagttgaagaagcactagcccatccataccttgaaaaactgcatgatgtagctgatgaaccaatctgcatggaggcattcctcattggatttggagcaacaagaattgggnggaggagcaattaaaggngnggnccaccagggaggattaggcanggat

SEQ ID NO: 276564 - DNA, 285 bp, Glycine max
ttgcagtggagctggtttccaatccatcaataatattcatggatgaacctacatctggtttggatgctcgagcagctgcagttgttatgcgtgcagtgaagaatgttgttgccactggcaggacgacggtttgcactatacaccaaccaagcatcgacatatttgagacttttgatgagttgattctaatgaaatctggaggacggattatttatagtggaatgctaggccatcattcaagtagactgattgaatattttcagaatatacctggggtgccaaaga

SEQ ID NO: 276565 - DNA, 290 bp, Glycine max
atctgtttcccgccatatatccaataagctttaaccatgtctgcctttgttggaaagtacgcagatgagcttatcaagaatgccaagtacatagccacacctgggaagggcatcttggcagcagatgagagcactggcaccattgggaagcgcctatcgagcataacgttgagaacattgaggccaaccgccaagctcttcgcgagcttctctcaccgctccagatgccctccaatacctctctggtgtcatcctctttgaggaaactctttaccagaaaacctccgatg

SEQ ID NO: 276566 - DNA, 292 bp, Glycine max
gggcagactagtatccgatcctctgtcctctcgaagctttcatcgttcaacatattctcaccatctcagtcatgggcctgctatcttgttttaggtctaccgtcctgagaaaatgttccaaaggaagctctggcatgtcaagattcctgtatacgaacaattttcaacgaaacttgatttcgtctggtggcaatgaatcgtattatgggtattttaacaggagatcatacacttcactttatatgggaactggaactgtgggtgggattacaagtgctagaatcagggtgcc

SEQ ID NO: 276567 - DNA, 282 bp, Glycine max
ttcccaaccactactactcactcactgcagatctcaattgcatcgctgtccatggctaccatcgttagcatcaaggcccgccagatcttcgacagtcgtggcaatccaactgtcgaggtggatttgacttgctccgatggtacttttgccagagctgctgttccaagtggtgcatccactgggatttatgaggcccttgaattgagagatggaggatctgactaccttggaaaggtgtatcaaaggctgttgacaatgtgaacaccgtcattggccctgctt

SEQ ID NO: 276568 - DNA, 288 bp, Glycine max
ggcaaatgcagttgctcagcaagctttaattgctcactggcaaagtattgtgaaaagcttaaacaattatctaaagataatgaaagccaactatgcaccccctttcttggtccgaaaagtgttcactcaaatattctcattcatcaatgttcaattattcaatagtcttctgttgcgtcgggagtgttgttcgtttagcaatggagagtatgtaaaaacaggtctggctgaattagagcatggtgcatcgaggcaacggaggagtatactggctctgcttgggaggaa

SEQ ID NO: 276569 - DNA, 293 bp, Glycine max
  unsure (1)..(293): unsure at all n locations
gnacaatgtcaacctcttccataaacgggtggtgcctctcttccatctccccagccaaaacctctctcaggaaggccacattacgcccttccgtcttcgcaacccttaacactccttcttctccttcctcttcatcttccttcccctctctcattcaagacaggcctgtttttgctgcccctgcccccatcatcaccccaactgtgagagaggatatggcaaaggaatacgagaaagctattgagaacttcagaaattgttgagggagaagagtgaatcaaagcgacagtgct

SEQ ID NO: 276570 - DNA, 190 bp, Glycine max
  unsure (1)..(190): unsure at all n locations
gggaacaggngaagcgcagagactttgacagantctatgattatgatatctataatgatttgggcaatccagatggtggtgatcctcgcccaatcattggaggctctagcaactatccttaccctcgcagggttagaaccggtagaganaagaccaggaaagatcccaacagtgagaaaccaggcgagat

SEQ ID NO: 276571 - DNA, 289 bp, Glycine max
  unsure (1)..(289): unsure at all n locations
gnaagaatcactcccttatccatttccacaccacatcatngcnacaaccaacgctctctcttcagcctccattctacgctctcccaacntccagtctctganccgaagagcgaaccataatggaagagtaaattaccggaaaccgaataaccgtttctccgtgaaagcctccgccaaagagattgcctttgaccagcattcccgctctgctatgcaggccggcattgacaagctcgccgagctgttgggctcactcttgggcccagagggaggaatgttgtgttggatg

SEQ ID NO: 276572 - DNA, 288 bp, Glycine max
ttccaatatattccattctctctgtgtatttccctacctctcccttcaagatgcagatcttcgtcaagaccctcaccggcaagaccatcacccttgaggtggaaagctctgacaccatcgacaacgtcaaggccaagatccaggacaaggaaggaatccccccggaccagcaacgtctcattttcgccggaaagcaacttgaggacggccgtacccttgctgactacaacattcagaaggagagtactcttcacctcgtcctccgtctccgtggtggcatgcagatct

SEQ ID NO: 276573 - DNA, 291 bp, Glycine max
cttaccttttctcttaatccaaatacgatggcagccatggcaaccacaaccctctcttcaaaccccaaactctcattcttcaacggaaagcccgtcacatattcttcccgcgtcgcgcccaccaccaaattatcctcatccaaacaaagaatccatcgtgtcacgggaaatgacgcgccgctacatgaccgacatgataacctacgccgacaccgacgtcgtaatcgtcggagccggttcggccgggctctcctgcgcgtacgagctcagcaagaaccccgccgtgagcgt

SEQ ID NO: 276574 - DNA, 289 bp, Glycine max
cttcctcttcctcagtagtgcgattttcgattctcttctctgcaactatgcctaaccctaaggtcttcttcgacatgaccatcggcggtcaacctgccggccgcatcgtgatggagctctacgccgacgtgactccgagcaccgccgagaacttccgcgcgctctgcaccggcgagaagggcgccgggcggagggcaagcccctccactacaaaggctcgtccttccaccgcgtgatcccgaacttcatgtgccaggcggcgattcaccgccggaaacggcaccggagg

SEQ ID NO: 276575 - DNA, 283 bp, Glycine max
  unsure (1)..(283): unsure at all n locations
ancacgccgtcttacgtcggattcactgacaccgagcgtctcatcggtgatgcggccaagaatcaagtgcgccatgaaccccatcaacaccgtcttcgatgccaagaggttgattggtcgtagattcagtgattcctctgttcagagtgatatcaaattgtggcctttcaaggtcattccctggtgctgctgacaagccaatgatcgtggttaactacaagggtgaagagaagcatttgccgcagaagaatctcttccatggtgctcatcagatgcgtgagat

SEQ ID NO: 276576 - DNA, 288 bp, Glycine max
ctgagtcttgcaattgaagttgaagtcttgcccttctctcttcaactccaaacacaagacatcatcatccatggctgcctccgtctccactgtcggagctgtcaacagagctcttttgaacctgaatgggtctggacctggggtttcagctcccagttcatccttctttgggagcagcttgaagaaggttattggctcaagggtccccaacacaaagatttcctctggaagcttcaagattgttgctgtagaagagaagaaagagattgaagagacccagcagaccga

SEQ ID NO: 276577 - DNA, 286 bp, Glycine max
  unsure (1)..(286): unsure at all n locations
ggnctgccaagaatctggcagctgtcaacccagaaaggaccatctttgatgtcaagagacttattggaagaaagttcgaagataaggaagttcaaagagatatgaagcttgttccttataagattgtcaacaaggatggaaaacctacatacaagtgaaaattaaggatggtgagaccaaggtgttcagccctgaggaaatcagtgccatgattctgactaagatgaaggaaactgcgnaagcattccttggaaagaaantaagatgccgtggtcatgtcccagct

SEQ ID NO: 276578 - DNA, 283 bp, Glycine max
  unsure (1)..(283): unsure at all n locations
cactcacctgcctcttcctcacccctttctccatctaacgagtaaggnaaaatggcgcgtaagaagatcagagagtatgactcaaagaggttgttgaaggagcactttaagagactttctggcaaggagttgccgatcaagtctgcacaaattactgcatcaactgatttcactgagctacaagagaaggaaccctggctttcatcttctaaattggttgtgaaacctgacatgttattggaaagcgtggcaaaagtggtttggttgcctaaattggatttgc

SEQ ID NO: 276579 - DNA, 288 bp, Glycine max
  unsure (1)..(288): unsure at all n locations
cnatttttgtnttttttttttcaatttttaatctcctatccctttttttaattttggaatcgaaatatctaattctaaataatccaaaaattcactcttaatcttgacagtgatatatgttgtatatgtaaatcctagatgtaaaaataggcagacttctcccgggaaaaaaagtnggtaaaaaaatatgctaagtataaattgtctactgatgaaatacgaaagctgatgatattgaaaaaaaaagnattgtaaataaggttcaggttcgacttccatagagaatat

SEQ ID NO: 276580 - DNA, 288 bp, Glycine max
  unsure (1)..(288): unsure at all n locations
atagcgttgccattctcatcctcttntttctctctctaccattgcccatggatccctacaagcaccggccatccagcgccttcaattctcccttctggactacaaattctggtgctcctatttggaacaacaactcctctttaaccgttggagctagaggtccaattctgctggaggattatcatcttgtggagaagcttgcaaattttgatagggaacgtatcccagaacgtgttgtccatgccaggggcgctagtgcaaagggtttctttgaggtcacccatgaca

SEQ ID NO: 276581 - DNA, 282 bp, Glycine max
  unsure (1)..(282): unsure at all n locations
accttagtaacattgccacatattntgttcattttggaattgtgccactaaaattcnattcaattcatctatggctgcctcttcttatgctatgcaatcaatcctggcaaaccctttgatccgcatttccagcgggtctagggtgaaccaatttggcgttcctgctttgcacatgagaaggaatgttggcctgagagttaggtccatggctaaggaagatcaaccaagtgagcngcaaccccagttacaccgccaccatcagtagaacccaagccacagcca

SEQ ID NO: 276582 - DNA, 289 bp, Glycine max
  unsure (1)..(289): unsure at all n locations
ctttatcatcaccagtgttccatatttcagagaanntcggctttattcatctccctctctagtgttcaccgtacagaggtgtcaaccggagctggtggctcctgctaaacccactcctcgcgaagttaaacccctctccgacatagatgaccaacagggcttgcgtttccaaattccattcannctattctatggtaatgaaccatcaatggcagggaaagaccctgctaaggtcattagagaggcacttgcgcaaactcttgttttttactacctttgcgggtaggat

SEQ ID NO: 276583 - DNA, 288 bp, Glycine max
  unsure (1)..(288): unsure at all n locations
ctccagaaaggtgccgaagttgaccccaaagatcgatgggggagcacgcctcttgcagatgctattttttacaaaaagaatgacgtgatcaaactattggagaagcatggagcaaagcttctgatggcccctatgcatgttaatcatgcacgtgaagtcccagagtatgaaatcaatcctaaagagcttgattttaccaacagtgtggagataacaaaggggactttctgtattgcactgtggcgtggaacagaggttgcagtaaaaaagctgggaggatgtantagt

SEQ ID NO: 276584 - DNA, 279 bp, Glycine max
ggttgctccattcactggcctcaagtccatggctggcttccccaccaggaagaccaacaatgacattacctccattgctagcaacggtggaagagtgcaatgcatgcaggtgtggccaccagttggcaagaagaagtttgagactctttcctacctgccagaccttgatgatgcacaattggcaaaggaagtagaataccttcttaggaagggatggattcctgcttggattcgagttggagcaggtttcgtgtaccgtgagcaccagtcaccaggata

SEQ ID NO: 276585 - DNA, 287 bp, Glycine max
attgcacaatgtcaacctcttccataaacgggtggtgcctctcttccatctccccagccaaaacctctctccaggaaggccacattacgcccttccgtcttcgcaacccttaacactccttcttctccttcctcttcatcttccttcccctctctcattcaagacaggcctgtttttgctgcccctgcccccatcatcaccccaactgtgagagaggatatggcaaaggaatacgagaaagctattgaagaacttcagaaattgttgaggggaagagtgaattcaaa

SEQ ID NO: 276586 - DNA, 284 bp, Glycine max
caaaaccctcttttttctctctcttgcaaaacctaattttcatttcttccctcaaatttcaaaatgcgtgagatccttcacatccagggtggccaatgcggcaaccagatcggcgccaagttctgggaggtggtttgcgcggagcacgggatcgaccctaccggaaggtacggtggggactcggagttgcagctcgagaggatcaatgtctactacaacgaggccagttgcggtcggttcgtgccgcgcgcggttctcatggacctcgacgggcaccatggaca

SEQ ID NO: 276587 - DNA, 282 bp, Glycine max
gcaggtctggcttgtgaaggtcttaaacctttctgtgcaatttactcatcattcatgcagagggcttatgaccaggtggtgcatgatgtggatttgcagaagctgcctgtaagatttgcaatggacagggctggattagttggagcagatggtcccacacattgtggttcttttgatgtcacatttatggcatgcctgcctaacatggtggtgatggctcctctgatgaagccgacctttccacaggttgccaccgcagcagccatatgatcgacctagttg

SEQ ID NO: 276588 - DNA, 284 bp, Glycine max
  unsure (1)..(284): unsure at all n locations
gnggaaggagcgaatgatggtttttctggacctggaccaaatgattcgcttcttcctggtcttattgatgatgttgccttgaattgtcttgcttggcttagtggatccgattatgccgcactatcgtgtatcaataaaaagttcaataaactgatcaatagtgggtatctatatgggttgaggaaacaattgggggctgtggagcatttggtgtatatggtttgtgatccaagaggatgggtggccttgaccccaagataaacaggtggatcatacccaagata

SEQ ID NO: 276589 - DNA, 285 bp, Glycine max
ctagcacacaaaacttgctatagcagtaagctataactcatttgaggctctgtgagaattgagaaatggctaaagatgttgaggttcaagagcaaggaggagagtactctgccaaagactaccatgaccctcctccagcacctttgttcgacccagaggagctcacacagtggtccttctatagagccctcatcgctgagttcatagcaaccctctgctccttatgtcatgtgctcaccatatggctacaaaaggcagactgatacaaggagtggcacggatgtg

SEQ ID NO: 276590 - DNA, 283 bp, Glycine max
cagatcaaacgcacacagttacgctcttcaaatcaatctcttctcagaaatgggtgtggctcaaaacattcccgatgcggaggagggaaccttggagattggaatggaatacagaactgtgtctggagttgctgggccattggtcattcttgataaagttaagggacctaagtttcaagagattgttaatattcgcttgggagatggaactactcggcgtggacaagtgctagaagttgatggtgaaaaggctgttgttcagtcttgagtacatctgggatga

SEQ ID NO: 276591 - DNA, 287 bp, Glycine max
caagtagttgagaactaagaaggagaagcaaatggcttcctcaatgatctcttccccagctgttaccactgtcaaccgtgccggtgccggcatggttgctccattcactggcctcaagtccatggctggcttccccaccaggaagaccaacaatgacattacctccattgctagcaacggtggaagagtgcaatgcatgcaggtgtggccaccagttggcaagaagaagtttgagactctttcctacctgccagaccttgatgatgcacattgcaaaggaagtagat

SEQ ID NO: 276592 - DNA, 247 bp, Glycine max
tgaatcgcgattgttctgtgcgagagaaagaagagagagatcgaaaatggcgttggctttcgacgagttcggaaggccgttcataatcctgaaggagcaggagcagaagagcagactccgaggattggacgctcagaaagccaacatctccgccggcaaagccgtggctcgcatcctccgaacctccctcggccccaaaggcatggacaagatgctccagagccccgacggcggtcaccatcacgaa

SEQ ID NO: 276593 - DNA, 282 bp, Glycine max
gcttcaccttctgctctagaaaattcagtgctgaaacatggcttcggctactctctctgtagccaaaccagcccttcaggcaaatgggaaaggcttctctgaattctctggcctccgaagctcatcaggcttccttcccttttctagaaaatcttcagaggatttccattctgtcattgccttccagacctatgcagttggaagcagtggaggatacaagaagggtgtgacagaagcaaaactgaaggttgccataaacgggtttggagatggaaggaattc

SEQ ID NO: 276594 - DNA, 285 bp, Glycine max
  unsure (1)..(285): unsure at all n locations
ggnaggaagatatggtcctcgtccagctgaggaggctgcaatttctgcactaaagagagctnngggtgctttgaacacacaccttgcttccaatacttacctggttgggcattctgtgaccctggccgacatcataatgacatgcaatttgtatttgggttttgcaaacatcctggttaagagctttacctctgagtttcctcatgttgagagatactttggacctggtcaatcagccaaacttccgaaaaataattgggcagtcaagcggctgaagctattcct

SEQ ID NO: 276595 - DNA, 297 bp, Glycine max
  unsure (1)..(297): unsure at all n locations
ggaggagaagagtacctcttcaagatcgtcataatcggagactctgcggtgggcaaatccaaccttctctcccgctacgcccggaacgagttcaacatgcactccaaggccaccataggtgtcgagttccagactcagtgcttggaaatcgactccaaggaagtcaaggctcagatttgggacaccgccggccaagagcgattccgcgccgtccacctaccgccttactcaccgcggcgctgtcggcgccctncatgtctcacgacatcttcccgccgaccacctttcggattagcg

SEQ ID NO: 276596 - DNA, 280 bp, Glycine max
aacgatttctcaacactctatgcacctctcatccgtgatgggcgtatggagaagttctactgggcaccaacaagggaagaccgcattggtgtttgcaccggaattttccgcactgatggtattcctgaacaggacattgtcaagcttgttgacaccttccctggccaatccattgatttctttggtgcactgagggccagagtatatgatgatgaagtgaggaagtggattctggtgttggtgttgacatgttgggaagaagctgtaactcaaaagagga

SEQ ID NO: 276597 - DNA, 273 bp, Glycine max
  unsure (1)..(273): unsure at all n locations
atcgagataactagaaacagtgtgatgaaaatgaaggtccttgttttcttcnntgctacaattttggtagcatggcaatgccatgcgtacgatatgttccctctccgaatgaacactggctatggtgcccgtactccggaggtgaaatgcgcaagttggaggcttgctgtggaagcacacaacatctttggctttgagaccatcctgaagagtgcgttgaagcaacaaaggaatacatccatggcgaacaatataganagactccaaaacatt

SEQ ID NO: 276598 - DNA, 289 bp, Glycine max
acaaggcagaaagcaagctcatcctagagttttaaaaatggcagcagcctcctccatgggctctctcttccccatccttggctggcaaggccgtgaagctgggcccatcagcccccgaagtcgggagggtcagcatgaggaagaccgtcaccaagcaggcctcctccggaagcccatggtaacggcccagaccgcgtcaagtacttgggcccattctctggcgagcccccgtcctaaccttcactggcgattcccaggtgattacggctgggactgctgggctttcggc

SEQ ID NO: 276599 - DNA, 283 bp, Glycine max
  unsure (1)..(283): unsure at all n locations
gggactttcctcgagatcaatttcagattgccacaaagtttgggattgtcanaatggaaaatggtaatgtgatagtgaacggttcccctgaatatgttcggtcctgttgcgagggtagcctccaacgccttggtgtcagctacattgatctctattatcagcaccgtgttgacnnaactgtacccattgaagacaccatgggagagcttaaaaggctggtccaagaggganaaataaggtacataggatgtcggnagctagccctgacaattaggaggcactg

SEQ ID NO: 276600 - DNA, 286 bp, Glycine max
tttaaagaaatcaacacacacaaacacaacaacatatggaggtgctaagggtgcaaaccatagcttccaaatccaaagatgctgccatcccagccatgtttgttagggcagagacagagcaaccaggcatcacaaccgttcaaggggtgaaccttgaggtgcctattattgattttagtgacccagatgaagggaaagtggtgcatgagattttggaggcaagtagggactggggcatgttccaaattgtgaaccatgacatacctagtgtgttataagaaagttg

SEQ ID NO: 276601 - DNA, 285 bp, Glycine max
atcatggccacctctgctattcagcaatcagcattcgcaggtcaaactgctctgaagcagctcaatgagttggtccgcaagaccggtggcgccggcaaaggtcgcaccaacatgcgccgtaccgtcaagagtgctcctcagagcatttggtatggccctgatcgtcccaagtacctgggtccattctcagagcagattccgtcatacctgaccggagaattccccggtgactcacggatgggacactgctggactatcagctgacccggaccttcgccagtaacc

SEQ ID NO: 276602 - DNA, 281 bp, Glycine max
  unsure (1)..(281): unsure at all n locations
gggactttcctcgagatcaatttcagattgccacaaagtttgggattgtcaaaatggaaaatggtaatgtgatagtgaacggttcccctgaatatgttcggtcctgttgcgagggtagcctccaacgccttggtgtcagctacattgatctctattatcagcaccgtgttgacacaactgtacccattgaagacaccatgggagagcttaaaaggctggtccaagagggaaaaataaggtacataggatgtcggaagctagccctggnacattaggaggca

SEQ ID NO: 276603 - DNA, 274 bp, Glycine max
  unsure (1)..(274): unsure at all n locations
cccaattataatactaaattcaaaaaaaggagagtaatgagtataatctttcgctcagacgatgtactgatatattctatggcggaggttcgaagaacaagcaatttattttgggccgttttcactttgttaggttcattggggttattgttcgttgcaatttaccagttatcttggtatggattgttctttatttctgagaaaatagtgattttctttattccggacttatttattttccattatccacacaanaanantgcaaacananaaa

SEQ ID NO: 276604 - DNA, 281 bp, Glycine max
  unsure (1)..(281): unsure at all n locations
aagtagttgagaactaagaaggagaagcaaatggcttcctcaatgatctcttccccagctgttaccactgtcaaccgtgccggtgccggcatggttgctccattcactggcctcaagtccatggctggcttccccaccaggaagaccaacaatgacattacctccattgctagcaacggtggaagagtgcaatgcatgcaggtgtggccaccagttggcaagaagaatttgagactcttcctacctggccagaccttgatgatgccantgggcaaaggaag

SEQ ID NO: 276605 - DNA, 284 bp, Glycine max
  unsure (1)..(284): unsure at all n locations
catgttcttgtacagtgtcttatattgtttgattacttgaaggcccctggaaaaggtgacaaggatttgccatctgaaaacatgaaagaagagattacatcatgggaggnacgtgttaaaaaacttcttgaactgacaccaccaaaagggacagaatttcttcacaaaattgagcatatattggaacgagaaaaaaattgggtgtggtggaaacgtgatggctgcctcccatatgaaaaacaacgtatagagaagaaagcagtaccagaggcccaagaaacgta

SEQ ID NO: 276606 - DNA, 284 bp, Glycine max
  unsure (1)..(284): unsure at all n locations
cacatcagcacaacacnncaattcactaagctaaaatcacttcatcatggcttcctcgtgtgcttcctctgccattgcagctgttgccatctccacaccaagttcccagaagaatggatcactcttgggaagcacaaaagcttcttttcttagtgggaggaaactgaaggtgaacaactttacagcaccagttggagcacgatccagcactacagtttgcgcattgctgagcctgataggcctctgtggttcccaggcagcacccctcctcaggctagatggca

SEQ ID NO: 276607 - DNA, 279 bp, Glycine max
gttcaacggcatcgctactcttattcctaaaagcgcgcgtaagatcgacgacgatctttaccgcgccgttgatatctatctcaaggcgcatccacagttggatgagatagagagagagaaggtgtgcagcgtgatggatccgttgaagctttcatacgaggcgcgtgtgcacgcgtcgcagaacaagcgattgccggtgcagattgtgctgcacgcgcttactacgaccagcttacggctgaggagcggggcggaggagcgtgatggcgacggagaaga

SEQ ID NO: 276608 - DNA, 281 bp, Glycine max
  unsure (1)..(281): unsure at all n locations
gnaattcactctgtacaattcttcgttcgttctctgcagttatatcctttttgagcttcaatggcggacgctgaaaccttcgctttccaggctgagatcaaccagcttctaagtctcatcatcaacacattctacagcaacaaggagccannnttgcgtgaactgcatcagcaatgcttctgatgctttggataagattcgattcgagagcttaaccgacaagagcaagctcgatgctcanccangagctcttcattcgtctgtgtcgacaaggataacaa

SEQ ID NO: 276609 - DNA, 287 bp, Glycine max
  unsure (1)..(287): unsure at all n locations
aaacactcataacacaaagcacaaagcaaagctcatccttgagttaaaaaatggcagcagcttcttccatggctctcctcatccccatccttggctggcaaggccgtgaagctgggcccatcagccccagaagtgggaagggtgagcatgaggaagaccgtcaccaagcaggtctccttcaggaagcccatggtacggcccagaccgagtcaagtacttgggcccattctctggcgagcncccgtccttaccttaaccggtgagttcccagcggattacggctggga

SEQ ID NO: 276610 - DNA, 284 bp, Glycine max
taagatggcttcctttgtatccttcctagtgctgcttcttgcagcccttatcctcatgcctccaagggcttgctacttactacaaaccaattaagaagccaccagtgtacaagcctccagtgtacaagccaccagtgtacaaaccaccggtttataagccaaaaccaccggtttacaagccgaaaccaccggtttacaagccaccatataagaagccaccatacaagaaaccaccttatggaaagtaccctccagtagaggacaacacctgcctaaagcaagca

SEQ ID NO: 276611 - DNA, 278 bp, Glycine max
  unsure (1)..(278): unsure at all n locations
caaatcagagtaattggaacttgaaacttgtcattcattcatggcgattgaggcatggttgatggacgaaagcaatgaagatccaagactccctcaccgccgcaatcccaacaagtcagtttcattggaccaattagcagaatttggggtgttatactggaagctgaatccaactatctatgagaacgatgaagagttggccaagattagagangataggggatacaactacatggacctgctgatttatgcccagaaaagtgaaantnatgaacaga

SEQ ID NO: 276612 - DNA, 273 bp, Glycine max
  unsure (1)..(273): unsure at all n locations
tgcggctagggttttagcgcanttcttctagatttaaggaagatgggtaaggannaaggttcacatcagtattgtggtcattggccatgtcgactctgggaaatccactaccactggtcacctgatttacaagcttggaggcattgacaagcgtgttattgagaggtttgagaaggaagctgctgagatgaacaagaggtctttcaagtatgcctgggtgctggacaaacttaaggctgagcgtgaaagaggaatcacttgatattgcttgtg

SEQ ID NO: 276613 - DNA, 278 bp, Glycine max
  unsure (1)..(278): unsure at all n locations
caaaagagaaggcaatcttatttggcctttgctactggacaatgttaggccagacatgagaatcgcatgggaagagccatttggaccagttttaccagtaattaggatcaattcagttgaagaaggaatccatcattgcaatgctagcaactttggacttcagggatgtgtctcacaaaggatgtcaacaaagcaataatgatgcagtgatgcaatggaaacgggaacagttgcagataantccgccccggctcgtgggccagatcatttcccttcag

SEQ ID NO: 276614 - DNA, 285 bp, Glycine max
ttgatgttgtgtttgggggatgggatatcagtaacttgaacctggctgatgccatggccagggccaaggtgtttgatatcgacctgcagaaacagttgaggccgtacatggaatccatggttccactccccggaatctatgacccggatttcattgctgccaaccaaggagaccgtgccactaacgtaatcaggggcacaaagaaagaacaagttcaacaaattcattcaaagacttaaggagttcaaagaaagcactaaggttgacaaggtggttgtcctgtgg

SEQ ID NO: 276615 - DNA, 280 bp, Glycine max
tgaccctgcccaacatcaaggttcctctcattcttggtatctggggaggcaagggacaaggaaaatcttccaatgtgagcttgtctttgccaagatgggaatcaaccccatcatgatgagtgctggagagttggaaagtggaaatgcaggagagccagcaaaactgatcaggcagagataccgtgaagccgcagacttgatacaagaagggaaagatgtgtgctctctccatgcaactatctgatgcaggagctggtcgtctggtggaaccacccaatac

SEQ ID NO: 276616 - DNA, 276 bp, Glycine max
  unsure (1)..(276): unsure at all n locations
aagaatcatacataaagactcttgtacttaatggaaaaacttatgacctctatgttcacagttacttggcactttggtaaagaagcatctcgtgcggagatgttgaaggtcactggtgattcagctaacccttgcattttagccggttataatgggacctacacatattcgggagttaaatataaggcctggcctccacttctgggtccaatttcgataaatgtcgagaggtagctcttaaagctctgaaatgnaatgaaccagccctcatcagaa

SEQ ID NO: 276617 - DNA, 277 bp, Glycine max
  unsure (1)..(277): unsure at all n locations
ggcgaatgcttggcttggaacatgaatctaagaggggttacatagggcttgaatactttggccgtacaatattcattaaaatattgcctccagggattcacatgggtcgactgcaatctaccttagatcacccttcctcttccaacaaagtcagaganntccaccaacaatataaggggaaaaagcttatagttggtgttgatgatatggacttattcaaaggtatcggtttaaattctggccaggagcaactccggcagcaatatccagaacagca

SEQ ID NO: 276618 - DNA, 287 bp, Glycine max
gtgctaggaaagtgagtgagagaaagagatcacatagcagaatgggcttctactcaatgtttcttgcaccaccatgctcttaccacccctgccagatccccatcacaacgcatcatggttagcaccaagcctaaccagcttgtttgcaaggcacagaagcaagaggatattgatgtcagcccaatctctcgccggttagctctaaccgtgctcattggtgctgctgctgttggctccaaagtccaacctgctgatgcagcttatggggaagctgccaatgtgtttgg

SEQ ID NO: 276619 - DNA, 276 bp, Glycine max
ctctgctcgtgcctctagggttatcatatctccatttccatttcctctctctcagtttccaagaatcttaagctatgggaaagtcttacccaaccgtgagcgctgattaccagaaggccgttgagaaggcgaagaagaagctcagaggcttcatcgctgagaagagatgcgctcctctaatgctccgtttggcatggcatctgctggaacttacgacgtgagctcgaagaccggtggtcccttcggaaccataaagcacccctccgaatcgtcagg

SEQ ID NO: 276620 - DNA, 274 bp, Glycine max
  unsure (1)..(274): unsure at all n locations
tggcaccgtactctctaatattccatactacaaaaaacatggatatggggtggagaaatttaactcgaccttgtatgatgaatgggttaacaagggcaatgcaccggcactgcccganactcttaagaattacaacaagctggtgtctcttggcttcaagattatattcttgtgcaggaagaacactggacaaacaggccgtaacagaagcaaacttaaagaaggctggctaccacacatgggaaaantattctcaaggatccacaagatcctc

SEQ ID NO: 276621 - DNA, 276 bp, Glycine max
cggaaattgaatggtacccgggaaaatgtttgactcagaaggttttgaagaaaaagcctaagaagggttcaaagaatgctaaaccaattaccaaaaccgagagctgtgaaagtttcttcaattttttcaaaccaccagaagtccctgaggatgatgttgacattgatgaagatttggtatgacagtctgtcccaataaacctaaggctaaaaatatgaagctttgtctattgctataataacttaattttttcaacaggctgaggaactttcagaa

SEQ ID NO: 276622 - DNA, 276 bp, Glycine max
gttgaagtcttgcccttctctcttcaactccaaacacaagacatcatcatccatggctgcctccgtctccactgtccggagctgtcaacagagctcttttgaacctgaatgggtctggacctggggtttcagctcccagttcatccttctttgggagcagcttgaagaaggttattggctcaagggtccccaacacaaagatttcctctggaagcttcaagattgttgctgtagaagagaagaaagagatgaagagacccagcagaccgacaagga

SEQ ID NO: 276623 - DNA, 280 bp, Glycine max
ttgtaaattaagagcatggctgcacaagctcttgtatcatcatcatctcttaccttctcagccgaggctacaagacaaagtcttggaccaagatcactccaatctccatttggcttctcaagaaaagcctcctttcttgttaaggcagctgctactccccctgttcaagcaaggatcagacagacctttgtggtttgcatcaaagcaaagtctttcctacttggatggcagcctccgggtggactaggattggaccctctgggactttcggaccctggaa

SEQ ID NO: 276624 - DNA, 281 bp, Glycine max
  unsure (1)..(281): unsure at all n locations
tgaagttgaagtcttgcccttctctcttcaactccaaacacaagacatcatcatccatggctgcctccgtctccactgtcggagctgtcaacagagctcttttgaacctgaatgggtctggacctggggtttcagctcccagttcatccttctttgggagcagcttgaagaaggttattggctcaagggtccccaacacaaagatttcctctggaagcttncaagatgttgctgtagaagagaagaaagagattgaagagacccagcagaccgacaaggac

SEQ ID NO: 276625 - DNA, 275 bp, Glycine max
cattctctctgtgtatttccctacctctcccttcaagatgcagatcttcgtcaagaccctcaccggcaagaccatcacccttgaggtggaaagctctgacaccatcgacaacgtcaaggccaagatccaggacaaggaaggaatccccccggatcagcaacgtctcattttcgccggaaagcaacttgaggacggccgtacccttgctgactacaacattcagaaggagagtactcttcacctcgtcctccgtctccgtggtggcatgcagatct

SEQ ID NO: 276626 - DNA, 277 bp, Glycine max
  unsure (1)..(277): unsure at all n locations
ggggagcttgagtcattactaaaagactcatacttgaaaccacaagtattacctanatttttngatataagtaagggcattgaangttccttggagaaagcattaaataagctttgtgaggctgcagatgaagctgtncagaaatggttcccagctgcttattctatcagacncttcagaagcactggaaccaactcatcctggctattcccatactccttgctgttggtactgttccatcagcntctaatccagatggcctgcgaatgntcagctt

SEQ ID NO: 276627 - DNA, 277 bp, Glycine max
  unsure (1)..(277): unsure at all n locations
ccaggattcggttgattaatcaggacaagaacaaatataacaccccgaaatatcgctttgttgttcgtttcagcaacaaagacattgttgcacaaataatatctgctagcattgctggcgatattgttcttgctgcagcatatgcacatgagctgccacgatatggtcttgaagtagggcttacaaattatgctgcagcttattgtactggtctcctgttggcncgaagagtcctcaaaacacttgaaatggatgaggagtacgaggaaatgttgag

SEQ ID NO: 276628 - DNA, 276 bp, Glycine max
aacacaacaacactctctcttctcgctcttggcttttcgctcttcactcactctccattcattcatttccaccgttacatggatccagtaagcgtgtggggtaacacgcccttggcgacggtggatcccgagatccatgacctcatcgagaaggagaagcgccgtcaatgccgcggaatcgagttcatcgcctccgagaacttcacctgccttcgccgtcatcgaggccctcggcagcgctctcacgaacaaatactccgagggcatgccgggcaa

SEQ ID NO: 276629 - DNA, 272 bp, Glycine max
tgcagccatggccacccacgcggctctagcttctacaaggatccccactaacaccaagttcccatccaaggcttcacactctttcccaacccaatgcgcctcaaagagacttgaggtgacagaattctctgggctaagatccacttcatgtgtgacatatgctaacgatgctagagaatcttccttttttgatcttgtagcttcccaacttcactcccaagaccaatggatcatcaactcctgtgaggggagagacagtggccaagttgaag

SEQ ID NO: 276630 - DNA, 272 bp, Glycine max
  unsure (1)..(272): unsure at all n locations
gccgaaggcttctctacacgctcgccgatnccgcagttgcggcgggaccctgcggttannagcggacactgcggcttccaccaccgatgctgccgtacagaagagcggaggttggttcggcttcatctccgaagctatggagttcgttctcaaggtgttgaaggatggtctttctgccgtgcatgtgcccttatgcatatggatttgctatcatattgctcactgttatagttaaggcagcgacgcttcccctggacaaagcaacaggttga

SEQ ID NO: 276631 - DNA, 272 bp, Glycine max
  unsure (1)..(272): unsure at all n locations
cacacacacagcaacacactgcactgtgtggaaagtaagcatggcaagagtggtggcactccaacagaaccaactatctttctctcccttagcttcctctctttttgacttcagtggaaccagacttcaaactcaacttcagttcaagagaaaactatgccatccaaaagggtctttctacgtctcggncatcgagcaccaagaaaatcctaataatgggaggcaccaggtttattggtgtgtttttatctaggctcctgttaaagagggtc

SEQ ID NO: 276632 - DNA, 240 bp, Glycine max
  unsure (1)..(240): unsure at all n locations
gaattattgttcgttcgncccttttacttagtattccctgtttccggtattcgctcccttttttctgcattctggttttacttagatctctgtcccgcaccagatctggtgcagggtgagagggttgggttcattaattttgtatcaatcttccttctgagcggtaggcgtggggataccagagtcttttcgggaagcaagagagggttctctccgttttcaatagatctctcactgtct

SEQ ID NO: 276633 - DNA, 270 bp, Glycine max
  unsure (1)..(270): unsure at all n locations
caacaacaacatggctgccactgctgctgcaggcatagcttccttgttttcttcttctattaacagtgtncaaatgtcttcgttcctccaagaactgctccataatagaccctctcataacaacagtgccctcaaaccgtggcatgtttgggtcacacttggtggaacctttgtccattaattcgcacaagttgtggggacctagaatttctgctgctgttgcacaagaagaggctgttgttgttgtggatgatgaggtgctggtttagt

SEQ ID NO: 276634 - DNA, 267 bp, Glycine max
caaacatggcgagagggttaaagaaacacctgaagaggctcaatgctccaaaacattggatgcttgacaagcttggtggtgcctttgcacccaagccatcatctggaccccacaagtcccgggagtgtcttcctctgatcctcatcctacgaaacaggctaaagtatgctctaacatatagagaagttattgccatcttgatgcagcgccatgttcttgttgatggcaaggttaggacagacaagacataccctgctggtttcagga

SEQ ID NO: 276635 - DNA, 257 bp, Glycine max
  unsure (1)..(257): unsure at all n locations
cggtactattgcaaggtctgggaccaaggaattcatggaagccctggctgctnntgctgatgtgagcatgattggacagtttggtgttggtttctactcggcttatcttgtagctgacaaggttattgttaccacaaagcacaatgatgatgatcagtatgtctgggagtcccatgctggtggctcatttactgtgacaagggatacatctggtgagaacctggtaggggaacaaagataactttgtttctcaagga

SEQ ID NO: 276636 - DNA, 267 bp, Glycine max
  unsure (1)..(267): unsure at all n locations
agaaaagaaggaggatcccaacgcgctttccaacttcaggatttcggaacccttgaggcaaaaattgaaggagaagggtatcgaatcactgtttcccattcaggccatgaccttcgacaccgttctcgatggttctgatttggtcggtcgggctcgcaccggtcagggtaaaactctggcatttgtgntgcccatattagagtctttaataaatggtccaacaaaagcttcaagaaagactggctcgggaggatccaagtgntcttg

SEQ ID NO: 276637 - DNA, 280 bp, Glycine max
  unsure (1)..(280): unsure at all n locations
tcaaattagttcattctctttgcgcagttccctacctctcctttcaagatgcagatcttcgtcaagaccctcaccggaaagaccatcacccttgaggtggaaagctctgacaccatcgacaacgtcaaggccaagatccaggacaaggaaggaattccccnggancagcaacgtctcatcttcgccggaaagcancttcgaggacggccgtaccctacgccggactacaacatnccagaaggagttcaacccttncaccttgtcttcgtctccgtggtgg

SEQ ID NO: 276638 - DNA, 305 bp, Glycine max
  unsure (1)..(305): unsure at all n locations
ctaacctcgcagttccttgatctctcctctcaagatgcagatattcgtgaaaactttgaccggcaagaccatcacccttgaggtggaatcctccgacaccattgacaacgtaaaagntaagattcaagacaaggaagggatcccacctgaccagcagagacttatctttgcgggtaaacaacttgaggatggtcgcacccttgccgattacaacatccaaaaggaatcaaccctccatctcgtgcttcgnctcaggggtggcatgcaaaatctttgtcaagactttgaccgggaagaccatcacc

SEQ ID NO: 276639 - DNA, 301 bp, Glycine max
  unsure (1)..(301): unsure at all n locations
agtgganaccctatattaattattgctgaggatattgaacaagaagctttagcaactcttgtggtgaacaaacttagaggatcactgaaaattgcagcactcaaggcccctgggtttggagatcgcaagagccagtaccttgatgatattgccatcttgactggcaggtactgtaatcagagaagaggttggccttactttggacaaagctgggaaagaggttctcggatatgcctccaaggtggttctcancaggatacaaccacaattgttggtgatggaagtacccaggaagcagtga

SEQ ID NO: 276640 - DNA, 299 bp, Glycine max
  unsure (1)..(299): unsure at all n locations
agtggataccctatattaattattgctgaggatattgaacaagaagctttagcaactcttgtggtgaacaaacttagaggatcactgaaaattgcagcactcaaggcccctgggtttggagatcgcaagagccagtaccttgatgatattgccatcttgactggaggtactgtaatcagagaagaggttggccttactttggacaaagctgggaaagaggttctcggatatgcctccaaggtggttctcancaaggatacaaccacaattgttggtgatggaagtacccaggaagcagt

SEQ ID NO: 276641 - DNA, 299 bp, Glycine max
atcagttcgtgcccgatcagaagctcccatgatcagtgatggatgccaatggagaaaatatggacaaaaaatggccaaggggaatccatgccctcgagcatactacagatgcactatggcagttggttgcccagttcgcaaacaagttcaacgttgtgctgatgatagaaccattttggttacaacatatgaaggcacgcataaccatccactgccacctgctgctatggccatggcatcaaccactacagctgctgctagcatgttgctttctggatcatgtccagtgcagatggata

SEQ ID NO: 276642 - DNA, 303 bp, Glycine max
  unsure (1)..(303): unsure at all n locations
acacagtcggttnttccttctcaaatattcttgagatcnccattntntccgaagcaaagccatggctaagggncctggtctctantctganatcggcaagaaagctaggganctgctgttcaaggactaccacagtgaccagaagttcaccatcaccanctactcaccgactggagtggctattacagcatcaggaacnaggaaaagtgaactgtttctgggctgatgtaagngaccagttgaagaacaagaacatcactactgatatcaaagttgatacagattctaatctcttcacaatat

SEQ ID NO: 276643 - DNA, 302 bp, Glycine max
  unsure (1)..(302): unsure at all n locations
agccttctttgcttatgaaaaacctgaatttgtcattgtagctgcagccaaagttggtggcatccatgccaacaacacctaccctgctgatttcattgccatcaacctccaaatccagaccaatgtcatcgattctgcatatcgcaatggtgctaagaaactgttgtttttgggttcctctngcatttaccccaaatttgcaccccaaccgattccggaagatgctttgcttactggaccttagagcccacaaatgaatggtatggccattgccaagattgctgggatcaaaatgtgccagg

SEQ ID NO: 276644 - DNA, 301 bp, Glycine max
ccatgcatcagccatgagcagtgatggtggatgcatggacaaaaccatactccagggaatatgcagccttcccagctccttggctccgtactgcaaagttctggcctaccacaggacgtgttgataatgtgtacggtgaccgcaacctcatttgcacccttctcccagcatcacaggctgttgaagaacaagcagctgccacagcataatgtgttcaaatgacaactattttcatttcccgttgtacataaactcttattcctattcatacagttcttgcacttgttgaatattgctcatc

SEQ ID NO: 276645 - DNA, 297 bp, Glycine max
caaggcagaaagcaagctcatcctagagttttaaaaatggcagcagcctcctccatggctctctcttccccatccttggctggcaaggccgtgaagctgggcccatcagcccccgaagtcgggagggtcagcatgaggaagaccgtcaccaagcaggcctcctccggaagcccatggtacggcccagaccgcgtcaagtacttgggcccattctctggcgagcccccgtcctactcactggcgagttcccaggtgactacggctgggacactgctgggctttcggccgacccagaaa

SEQ ID NO: 276646 - DNA, 296 bp, Glycine max
gctgatcgagaaaaggtaaaatcttgtttgactgagttggcagatagtagcaatgctttcaagcaagctttgaatgctggcatagaacaacttgtggcaaccattacacctcgcattagaccgttattagacagtgtaggaacaatcagctatgagctttcagaggctgagtatgcagataatgaggtgaatgacccatgggttcagagacttctctatgccgttgagtcaaatgtggcatggctgcagccactaatgactgctaacattatgacacgtttgttcatttgattatt

SEQ ID NO: 276647 - DNA, 303 bp, Glycine max
  unsure (1)..(303): unsure at all n locations
ctcgtgaacatgctctgctttcattcacccttggtgtgaaacagatgatttgctgctgtaacaaaatggatgctactacacccaantattccaaggccaggtatgatgaaattgtgaaggaagtctcttcctacttgaagaaagtaggatacaaccctgacaagattccttttgttcctatctctggttttgagggagacaacatgattgagaggtccacaaaccttgactggtacaagggtccactctgcttgatgcacttgaccagattagtgagcccaagaggccctctgacaagcccct

SEQ ID NO: 276648 - DNA, 298 bp, Glycine max
  unsure (1)..(298): unsure at all n locations
ggcaatggattagtaaaaccaaagcaccctgatttcaaacgcaaggatcgcaattctctctggcttggcaaggatgaaaagtggggttttgcctaaattggaaggacttcaatttgatgttccaactgctatatccaaaaaaggtgatggtggtgagccctgtaatgatttggtgcaaaactatgctaactggtgggataatagattanataagaggaatgcaaaagctcccgatttcaagcacaaagaaaccggtaaagggttgtggcttgattcttcatcagagtgggttttggaa

SEQ ID NO: 276649 - DNA, 299 bp, Glycine max; identical to SEQ ID NO: 269250

SEQ ID NO: 276650 - DNA, 258 bp, Glycine max
ccgatcgcatagctcgctcgcaaccaccatgccttcccgaagaagaactctcttgaaggtcatcattctcggtgacagtggggtggggaagacatctttgatgaaccaatatgtgaataagaagtttagtaatcagtacaaggcaaccattggagcggattttttaaccaaagaagtgcaattcgaagataggcttttcaccttacagatttgggatacagctggccagaaagattccaaagccttggagttgctttc

SEQ ID NO: 276651 - DNA, 295 bp, Glycine max
gggctaccctaacctcgtcttcctctctactaatttcagctatggccgacgaagctgtggttgttccagatcccacccagatcgatgtcaagctctttaaccgctggagcttcgaggatattgaggttactgacatttcactggctgattacattggagttgcggcatccaagcacgccacatatgttcctcacaccgccggaaggtactccgtgaagcggttcaggaaggcgcagtgccccattgttgagaggctcaccaactctctcatgatgcacggtagaaacaatggcaa

SEQ ID NO: 276652 - DNA, 297 bp, Glycine max
  unsure (1)..(297): unsure at all n locations
gctcccaagtgtgctcaccacaacaatcatcatgaaggtttcatgaatttcattcacagggatgaggaggttaattacttcccttcaaggtatgancctgttcgtcatgcagaaacgttccccatacctcctgctatctgcagtggaaggcgtgaaaagtgtggaattgagaaggagaacaactttaagcagcccggagagagataccgatcttgggcacctgacaggcaagatagatttaatcgccgatgggttgatgctttatctgacccacgggtcacccatgaaatccgcagt

SEQ ID NO: 276653 - DNA, 297 bp, Glycine max
  unsure (1)..(297): unsure at all n locations
ccaagacacactcgttcatatatctctctgctcttctcttctcttctacctctcaagtttttgaagtataaagatggcagagacattcctattcacctcggagtcagtgaacgagggacaccctgataagctctgcgaccaaatctccgatgctgtcctcgactntgnatcgaacaggacccagacagcaaggttgcctgcgaaacatgcaccaagaccaacttggtcatggtcttcggagagatcaccaccaaggccaacgttgactacgagaagatcgtgcgtgacacctgcagg

SEQ ID NO: 276654 - DNA, 276 bp, Glycine max
gtccgaaacccctcacaccgtccacgccctcgacgtctacacgcgacaagatcaaacacctacctggatcccgccgattcccccctcccttgggctggccgcatcaccttccaccgcctcaacatcaaacacgactctcgcctcgaaggcctcatcaagatggcagatctcactattaatctggctgcgattgcatcccgcggattacaacactcgccctctcgacaccatttacagcaatttcatcgacgcgctccccgtggtgaaatatgttcc

SEQ ID NO: 276655 - DNA, 296 bp, Glycine max
  unsure (1)..(296): unsure at all n locations
gcaattgaagttaaaagccttagccttccctacaactccaaacanaaagacatcatcatccatggctgcctccgtctccactgtcggagctgtcaacagagctcttttgaacctgaatggttctggagctggagcttcagctcccagttcagccttctttgggaccagcttgaagaaggttattgcctcaagggtccccaacagcaaggtttccggtggaagcttcaagattgttgctgtagaagagaagaaagagattgaagagacccagcagaccgacaaggacagatggaagg

SEQ ID NO: 276656 - DNA, 292 bp, Glycine max
  unsure (1)..(292): unsure at all n locations
cttgcagaattcaaaganggcgtcttcataaacgcctttattctccgtttccgtttccttcccggaattcgatttttcatctctgaaaatgagagagtgcatctcgatccacattggtcaggccggtatccaggtcggaaatgcttgctgggagctctactgtcttgagcacggcatcgggcccgatgggcaaatgccaagtgacaaaacagttggcggaggtgatgatgctttcaacactttcttcagtgagactggtgctggaaagcacgtgccacgtgccgtctttgtt

SEQ ID NO: 276657 - DNA, 290 bp, Glycine max
  unsure (1)..(290): unsure at all n locations
ggccatagaactcaaatgccctatctgttggagtttgctcgattctgctgtgtcgcttacctgcaatcatcttttctgcaactcgtgcattttcaagtccatgaaatcagcctctgcttgtcctgtctgtaaaattcctttcantcgtcgagaggttngccntgctccgcanatggacaacttggtcagnntatatntagacatggaagttcttcaggagttagtacatttgtaacccagaatgcccctgtnactagcttatcanatggagaaaaggnatgtgagggtgg

SEQ ID NO: 276658 - DNA, 294 bp, Glycine max
ggaaaattcctttgtgaagaccagtctcaagactctacaagtcacagacaacagttccaagagaaagagctattggacaactagtaatgaagttgttaagactgaatctgatgcaaagacaaaactagggttcagtccagctgagatagtaattgtgaaccctaataagaagacttccactggaaatgaagtagggtaccgtttggtttcaaatgcagcggttcatcctcttctcacagatgatgattaccctcaaacacgtggtgctttcaccagttacaatgtttgggttac

SEQ ID NO: 276659 - DNA, 296 bp, Glycine max
  unsure (1)..(296): unsure at all n locations
ggtcaccctcccctcggatggtcagatacattggcttacctggtcttgcctgtgttgctggtcgtctctcagtacatcactgtccaaataatgcagtcatcacagcctaatgatcccaacatgaaaagttctcaagccttgaccaatttccttccattaatgattggttactttgctctctcagttccttctggtcttagcctttactggttaacaaataatatattgagcatgcacaacaagtatgggttcnaaagttaggangtgtaaaaatcctgtgangcaagtcccagatg

SEQ ID NO: 276660 - DNA, 297 bp, Glycine max
cttgttgcagccatggccacccacgcggctctagcttctacaaggatccccactaacaccaagttcccatccaaggcttcacactctttcccaacccaatgcgcctcaaagagacttgaggtgacagaattctctgggctaagatccacttcatgtgtgacatatgctaacgatgctagagaatcttccttttttgatcttgtagcttcccaactcactcccaagaccaatggatcatccaactcctgtgaaggggagagacagtggccaagttgaaggtggcatcaatggtttcgg

SEQ ID NO: 276661 - DNA, 286 bp, Glycine max
tgtagacagagaaggtgcagggaaacacattcaagcaggagctaagaaggtgctcattactgctcctggtaaaggagacatccccacatatgtggttggtgtcaatgagtatgattacagccctgatgaacccatcatcagcaatgcatcttgcaccactaactgccttgcaccctttgtcaaggtccttgatcagaaattcggtatcatcaagggcaccatgaccaccactcatcctacaccggcgaccaaaggttctcgacgcgagccaccgtgacctgaggcg

SEQ ID NO: 276662 - DNA, 165 bp, Glycine max
  unsure (1)..(165): unsure at all n locations
ctcttntncttctctctcaacaacttcaccttcttcctcctcgatcatgtctcacttcaagggcaagtaccatgatgagcttatcgccaatgctgcgtacattggcactcctggaaagggtattcttgctgctgatgagtcaacagggacaattggcaagcgttt

SEQ ID NO: 276663 - DNA, 291 bp, Glycine max
gcaattgaagttgaagtcttgcccttctctcttcaactccaaacacaagacatcatcatccatggctgcctccgtctccactgtcggagctgtcaacagagctcttttgaacctgaatgggtctggacctggggtttcagctcccagttcatccttctttgggagcagcttgaagaaggttattggctcaagggtccccaacacaaagatttcctctggaagcttcaagattgttgctgtagaagagaagaaagagattgaagagacccagcagaccgacaaggacagatg

SEQ ID NO: 276664 - DNA, 287 bp, Glycine max
gagagagagagatggggctaagaagtaaattaagaatgtcagcgtcagtggtgcagcaggggatgaaggaaataagaaggagcgtgacgtacatgcctcgaccgggggacggtgcgccgcggggggtgacgctgataccgggggacggaattgggcctctggtgactcatgcggtggagcaggtgatggaggcgatgcacgcccccatatacttcgagaagtacgatgtgcacggggacatgaggcgtgtgccggaggaggtgctggattcgatacggaagaacaag

SEQ ID NO: 276665 - DNA, 284 bp, Glycine max
  unsure (1)..(284): unsure at all n locations
gaagaacaagtagttgagaactaagaaggagaagcaaatggcttcctcaatgatctcttccccagctgttaccactgtccaaccttgccggtgccggcatggttgctccattcactggntcaagtccatggctggnttccccaccaggaagaccaacaatgacattacctccattgctagcaacggtggaagagtgcaatgcatgcaggtgtggccaccagttggcaagaagaagtttgagactctttcctacctgccagaccttgatgatgcacaattggcaa

SEQ ID NO: 276666 - DNA, 283 bp, Glycine max
caaaaaggtaaacttctgcaacaaccatggttgccaatggcagcagcaacagcatcctcccagttgattttctcaaagcctcgttcaccctcgcgtctctgccccttccaactatgtgtctttgacaccaaacaagtgctgtcaagttcaagtggcaggagaaggcatgtggggggttctggagttaggtgcatggcggtgggagaagctgcaaccactgagactaagaagagaagtggatatgagcttcaaacactcactaactggttgctgaagcaggagc

SEQ ID NO: 276667 - DNA, 288 bp, Glycine max
  unsure (1)..(288): unsure at all n locations
ctcccttatccatttccacaccacannntanancacaaccaacgctctctcttcagcctccattctacgctctcccaaangccagtctctnacccgaagagcgaaccataatggaagagtaaattaccggaaaccgaataaccgtttctccgtgaaagcctccgcnaaagagattgcctttgaccagcattcccgctctgctatgcaggnnggcattgacaagctcgcngacnctgttgggctcantcttgggcccagaagnangaatgttgtgtttgatgantttgg

SEQ ID NO: 276668 - DNA, 282 bp, Glycine max
  unsure (1)..(282): unsure at all n locations
tctcttcaaactagggttttacagaatataagctctctctatctttggttttcgtcattcaaatccaatccaatatcaaanatgagtcgtcatcccgaggttaagtgggctcaganacttgacaaggtctatatcacggtgcaattggctgattcaaaaaatgccaaggtggatcttacaccagatggtatttttaccttctctggtagtgctggtgctgaagaccatcagtatgagctaaaactggagctctttgacaaggttaatgtagaggagagcaaa

SEQ ID NO: 276669 - DNA, 278 bp, Glycine max
  unsure (1)..(278): unsure at all n locations
gatgccaaaagatggaaaattgaaggtgaaaatgagggtatgtctgcccctggaagtagaacagtaagagaacctagantgtagttcagacaaccagtgacattgatatcctagatgatgggtatagatggagaaaatacgggcagaaagtagtgaagggcaatccnaatccaaggagttactacaagtgtacacacccaggatgtccagtgaggaagcatgtggaaagagcttcacatgacctaagggctgtgatcacaacctatgaggggaagcac

SEQ ID NO: 276670 - DNA, 282 bp, Glycine max
agcagaaggaggagaagcagaaagaggagacgaagcaatggcgccgaagaagccccgaaccacgtcgaggaaccctgatttggtcaggggaattggcaaatattcgaggtcgcagatgtaccacaagaggggcatctgggccatcaaggccaaaaacggcggtgttttgcccctccacgatcccaagcccaaacccgaggccccggcccagaagccgcccaagttctacccggccgatgacgtgaagaagcccctcgtcaacaagcacaagcccaagcccgc

SEQ ID NO: 276671 - DNA, 281 bp, Glycine max
acgatacgtaataagttctatcattgaggaagtttcctgtgcatcgtctccgaaaatgaacgacgcagatgtctcaaagcaatccagcagatggtgcagttcatccgccaggaagctgaggaaaaggccaacgagatctctgtctccgccgaagaggaattcaatatcgagaagctgcagttggtcgaagccgacaagaagaagatcaggcaagaatacgaacgcaaagagcgccaagttgaaattcgcaagaagattgagtactcgatgcagctaaatgc

SEQ ID NO: 276672 - DNA, 272 bp, Glycine max
  unsure (1)..(272): unsure at all n locations
ccctttcattttccctcactttctcgctcgccaaacgcccctctctctcctccantggccgaccagctcaccgacgaccagatcgccgagttcaaggaggccttcagcctcttcgacaaggacggcgatggttgtattactactaaggaacttgggactgtgatgcggtcactagggcaaaacccaactgaggcagaactgcaggatatgattaatgaggttgatgctgatggcaatggaaccatcgacttcccagagttcctcaacctgat

SEQ ID NO: 276673 - DNA, 243 bp, Glycine max
  unsure (1)..(243): unsure at all n locations
tgaatcgcgattgttctgtgcgagagaaagaagagagagatcgaaaatggcgttggctttcgacgagttcggaaggccgttcataatcctgaaggagcaggagcagaagagcagactccgagncttggacgctcagaaagccaacatctccgccggcaaagccgtggctcgcatcctccgaacctccctcggccccaaaggcatggacaagatgctccagagccccgacggcgacgtcaccat

SEQ ID NO: 276674 - DNA, 284 bp, Glycine max
  unsure (1)..(284): unsure at all n locations
cttggtttgcctcttgtagcttgagacttgaggagaatggataccttcctgttcacttctgagtcggtgaacgagggtcatcccgacaagctgtgtgatcagatatctgatgcagtgctcgatgcctgcctggagcaagaccctgaaagcaaggttgcctgtgagacatgcaccaagaccaacttggtcatggtatttggagagatcaccacaaaagccaatatngactatgagaagattgtgcgcgatacgtgccgttctataggatttgtgtctggtgatgt

SEQ ID NO: 276675 - DNA, 280 bp, Glycine max
  unsure (1)..(280): unsure at all n locations
ctggtcttactgtgtggtgactgtgctctgctctcatctcattcatattcatttcaatggcaactcaaggtcaagtcntacctgcaaagctgcggtggcctgggaacccaacnagcccttaaccgtccaagacgttcaggttgctccgcctcaggccggcgaggtccgtgtccaaatcctcttcaccgntctctgccacaccgatgcttacacttggggcggcaangatcccgaaggtctcttcccctgtattctcggcnacgaagctgcagggattgtg

SEQ ID NO: 276676 - DNA, 268 bp, Glycine max
  unsure (1)..(268): unsure at all n locations
cacctttgttcactcttcttctcttgcggctagggttttagcgcantttctttctagntttaaggaagagggtaagggaaaaggtcccatcagtattgtggtcatttgccatntcgactcggggaanccnctaccactngncncctganttacaagcttggnggcattgacaancgtgttattgagaggtttganaaggaancngctgagatgaacaagaggtctttcaagtatgcctgggtgctggacaaacttaaggctgagcgtg

SEQ ID NO: 276677 - DNA, 278 bp, Glycine max
  unsure (1)..(278): unsure at all n locations
cttatccttattgagagaaaaaatggccaaatcaatcaaattctttgagttgaacacaggggccaagattccttctcttgggttagggacttggcaagctgaacctggtgttgtagctgaagctctcaccacagccattcaggttggatacaggcatattgactgtgctagtgcgtataagantcaagcagagattggttctgctcttaagaagctttttgatgatggtgtggtgaagcgtgaggacttatggatcacttccaaactctggtgttcag

SEQ ID NO: 276678 - DNA, 279 bp, Glycine max
  unsure (1)..(279): unsure at all n locations
gataaactcaaaagccggancagaaatttttcagctttctaccgggggaagttctgcttgcatcgttggatggattcagtaaagtgtgtgatgctgttgaagtagctggaaaaaatgtcatgtcaacatcatcaactgtgacaactgagcttgtcgatcacagatatggagaacaagcagctgaagcaacaagtgaagggtttagtgctgctggtcatgctttgggtactgcatgggctgcttttaagattaggaaggctctcaaccctaagagtgttc

SEQ ID NO: 276679 - DNA, 282 bp, Glycine max
  unsure (1)..(282): unsure at all n locations
ctggtgattgatgctttagagcaaagnagaagagatgatctcgagtctcttggttatgttttgatgtacttcttgagaggaagtcttccttggcagggtcttaaagcgggaacaaagaaacagaagtacgagaaaatcagtgaaaaaaaggtttctacctcgattgaagccttgtgtcgaggttatccaacagaatttgcatcttacttccattactgccgatcattgaggtttgatgataagccagattatgcttatctcaaaggatattccgtgacttgt

SEQ ID NO: 276680 - DNA, 278 bp, Glycine max
gtgtctcagagggtctgtgacacacagactcacttccaagttccaagctttggccatttattcccactgtttattgagaacaactgcagaacatggcacagattttggctccctctacgcaatggcagatgagaatctcaaaatcctctcccaatgcaagtcccattacatcaaacatgtggagttctttattgtggaaacaaaataagaaagtttcacccacaagttctgctaaatttagagtgatggcaattaagtctgacaatagcatcatcaac

SEQ ID NO: 276681 - DNA, 276 bp, Glycine max
catgttcttgtacagtgtcttatattgtttgattacttgaaggcccctggaaaaggtgacaaggatttgccatctgaaaacatgaaagaagagattacatcatgggaggaacgtgttaaaaaacttcttgaactgacaccaccaaaagggacagaatttcttcacaaaattgagcatatattggaacgagaaaaaaattgggtgtggtggaaacgtgatggctgcctcccatatgaaaaacaacgtatagagaagaaagcagtaccagatgggccc

SEQ ID NO: 276682 - DNA, 275 bp, Glycine max
gcaaaaaacacgaggacgttcctattttctccatgctaacaccttcgttcctccacgatttcgccattacgaagacatacgcgatcttctgtgatattcagctcggattgaaccctcttgacatgatctccggtggctcccccgtcggctccgtcgcctccaagttcccaaggatcggaatcctccctcgtgatgctaaggatgagtcgatgatgaagtggtttgaggtgccggggttcaacatcattcacgcgataaacgcgtgggaggaggac

SEQ ID NO: 276683 - DNA, 278 bp, Glycine max
attctacattgctccagcttttatggacaagcttgttgttcacatctccaagaacttcatgaccctgcccaacatcaggtcgctctcattcttggtatctggggaggcaagggacaaggaaaatctttccaatgtgagcttgtctttgccaagatgggaatcaaccccatcatgatgagtgctggagagttggaaagtggaaatgcaggagagccagcaaaactgatcaggcagagataccgtgaagctgcagacatgatcaagaagggaaagatgtg

SEQ ID NO: 276684 - DNA, 256 bp, Glycine max
  unsure (1)..(256): unsure at all n locations
cgtagatagccgatgtgcttgtnttaangtgtcagtnattcctgttacctcaanncagctttgtagtgancagatataatggctgtngaaaggtccggaattgncananatgttacggaattgnttggtaaanccccattagtatntctnaatanacttgcggatggntgtgttgcccgggtngctgctanactggngtngatggagcnatgctctagtgtgaaggacaggnttgggtatagtatgattgctgatg

SEQ ID NO: 276685 - DNA, 276 bp, Glycine max
  unsure (1)..(276): unsure at all n locations
gttctgtgctgcgcggacgaggcagcactgtgctgggaatgcgacgagaaggttcacgcagcaaacaagctccgccagcaagcaccagagggnnnnnnnnnnnnnnnnnnnnnnnnnnatgcccaagtgtgacatatgccagganatngttggttatttcttctgtttagaggatcgngctttgctatgtaggaattgtgatgtatctatacatacagcaaatgcctgtgtctctgatcatcaaaggtttttgcttactggtgtgagagtaggcct

SEQ ID NO: 276686 - DNA, 272 bp, Glycine max
ctcgtgtttccgtttccgtttcaatttcctctcacaggctttaaccttaccagctcgagataagacatggacggatcaaaggcccatggagtccggaggaggacgaggctctgcagaagctggtggagaaacacgggcccaggaactggtctctgatcagcaagtccatcccgggccggtccggcaagtcctgcaggctccggtggtgcaaccagctgtccccccaggtggagcaccgggccttcacggccgaagaggacgacaccataatt

SEQ ID NO: 276687 - DNA, 271 bp, Glycine max
gaagattcagcaagcaagacccctcatttccgtggttaacaaggctgcctctctatcttcccccgtgaccaccagcgtcggcgttcggtttcggctggacaatttggggccgcaaccgggttcgaggaagagggctaagagaaagggtagaggaatatccgcagggcaaggggcaagttgtggttttgggatgagaggtcagaaatctcgatctggacctggcgttaggaagggtttcgaaggtggccagatgccgctttatcgccgaatc

SEQ ID NO: 276688 - DNA, 243 bp, Glycine max
  unsure (1)..(243): unsure at all n locations
gatggcgttgttggttgagaaaacaagcagtggaagggagtacaaggtgaaggacatgangcaagccgatttcggaagattggaaatcgagctggcggaggttgaaatgcccggcctcatgtcctcccgcaccgagttcggcccctctcaacccttcaagggcgctaggatcaccggctccctccacatgaccatccaaancgccgtcctcatcgagaccctcaccgccctcgggccgaggtc

SEQ ID NO: 276689 - DNA, 273 bp, Glycine max
gttgctccggcggggttcttcgacaagtacccggctctggtcaccggatttttcttcttcacgtggtacttctgaacgtgattttcaacatcctcaacaagaagatctacaattacttcccctatccatacttcgtatcggtaatccatttattcgtgggagtggcgtactgtttggtgagctgggccgtgggccttccaaagcgtgctcctatagactccaacctactgaagttgctcattccagtggctgtgtgtcatgcattaggccatg

SEQ ID NO: 276690 - DNA, 273 bp, Glycine max
  unsure (1)..(273): unsure at all n locations
ggtcaatgccgacggtattatagagaaaacattcttgtggggtaggtactctttggaaatgtctgctgttatntacaaggattgggttttcaccgatcaagcattgcctaatgatcttgtcaagagaggagttgctgttaaggatccatctgctccccatggagttcgacttttgatcgaggactatccttatgcntctgatgggctagagatatgggatgctatcaagtcttgggtggaagaatatgtctcattctactacaagtcagatgg

SEQ ID NO: 276691 - DNA, 275 bp, Glycine max
gccttcctctctgcagagtgcagagctttctctccccgttgcttcattcattctcaacaacaaaccaatctttaaaatgagggggggcttgtggcaacttgggcaatcgatcactcgccgtcttgcccatggagataagaaggctgttgctcgtcgatgttttgcctcagaagctgagctgaaaaagacagtgtttcatgacttccatgttgctcatggtgggaagatggttccatttgctgggtggagcatgccaatccaatacaaggactcaa

SEQ ID NO: 276692 - DNA, 253 bp, Glycine max
  unsure (1)..(253): unsure at all n locations
attagcgttgccattctcatcctcctcngtntctctctctccaccaangccaggntccttacaagctccggccatccagcgccttcanttctcccttctggactacaaattctggtgctcctgtttggancaacanctcctctttaaccgttggagctagaggtccaattctgcttgangattannatcttgnggngaagctngcaaactttgacagggaacgtntcccagaacgtgttgtccatncnagggg

SEQ ID NO: 276693 - DNA, 217 bp, Glycine max
  unsure (1)..(217): unsure at all n locations
gagagagtattggcgcttcattcaagatgggtatttctagggattccatgcacagnggcgtgccactggtggcaagaaaaaggcttggaganagaagagaaagtntgagcttgggcgtcaggcagcaaacaccaagttatcaagcaacaagacaatcaggaggattcgtgttagaggtggcaatgttaaatggagggcttgaggctggatactngca

SEQ ID NO: 276694 - DNA, 272 bp, Glycine max
  unsure (1)..(272): unsure at all n locations
gcagaatggngctttgctaataggtgcaaagcctcgaggacctggaatggaacgagcagacttgttagacatnaatgggcagatttatgcagcgcagggaagngctttaaatgccgttgcatcccgcaatgtcaaagttatagtagtgggaaacccttgcaatacaaatgcattaatatgcttgaagaatgctcctaacattcctgcaaaannttttcatgctttaactcgtttagatgagaacagagcaaaatgtcagctagccctcaagg

SEQ ID NO: 276695 - DNA, 269 bp, Glycine max
ctacgctctcccaaccgccagtctctgacccgaagagcgaaccataatggaagagtaaattaccggaaacgaataaccgtttctccgtgaaagcctccgccaaagagattgcctttgaccagcattcccgctctgctatgcaggccggcattgacaagctcgccgacgctgttgggctcactcttgggcccagagggaggaatgttgtgttggatgagtttggaagtcctaaagtggtcaacgatggtgtcaccattgctcgcgcaatc

SEQ ID NO: 276696 - DNA, 271 bp, Glycine max
ctctttttcttctctctcaacaacttcaccttcttcctcctcgatcatgtctcacttcaagggcaagtaccatgatgagcttatcgccaatgctgcgtacattggcactcctggaaagggtattcttgctgctgatgagtcaacagggacaattggcaagcgtttggccagcatcagtgtagagaacattgaatccaacaggcgagctcttagggagctgcttttcactgctcctggtgttcttcaatatctcagtggtgtcatcctcttt

SEQ ID NO: 276697 - DNA, 278 bp, Glycine max
  unsure (1)..(278): unsure at all n locations
gcaatgcaccggcactgcccgagactcttaagaattacaacaagctggtgtctcttggcttcaagattatattcttgtcaggaagaacactggacaaacaggccgtaacagaagcaaacttaaataaggctggctaccacacatgggaaaaattaattctcaaggatccacaagatcctttccactccaaatgcagtttcatacaaaacagcagcgagagagaaactgtaagggcagggatacaacntgttggggatcatggagaccattggacgact

SEQ ID NO: 276698 - DNA, 278 bp, Glycine max
caacctggtcttactgtgtggtgactgtgctctgctctcatctcattcatattcatttcaatggcaactcaaggtcaagtcattacctgcaaagctgcggtggcctgggaacccaacaagcccttaaccgtccaagacgttcaggttgctccgcctcaggccggcgaggtccgtgtccaaatcctcttcaccgctctctgccacaccgatgcttacacttggggcggcaaggatcccgaagtctttcccctgtattctcggccacgaagctgcaggga

SEQ ID NO: 276699 - DNA, 273 bp, Glycine max
  unsure (1)..(273): unsure at all n locations
ccgcaaccctgacactttgaagaaacttaatgaagctgaaaaggcgaagacagaactagaacagcaagaatattttgatccaaagttgcgctgatgatgagagagaaaaaggaaatgaattcttcaagcagcagaagtatcctgatgctgtgaagcattacacagagtctatacgaagaaatccaaaagatcctagggcttatagtaacagagcagcatgctacactaaattgggggcatgcctgaagggttaaaggatncagagaagtgcat

SEQ ID NO: 276700 - DNA, 275 bp, Glycine max
agagagagagatggggctaagaagtaaattaagaatgtcagcgtcagtggtgcagcaggggatgaaggaaataagaaggagcgtgacgtacatgcctcgaccgggggacggtgcgccgcggggggtgacgctgataccgggggacggaattgggcctctggtgactcatgcggtggagcaggtgatggaggcgatgcacgcccccatatacttcgagaagtacgatgtgcacggggacatgaggcgtgtgccggaggaggtgctggattcgatac

SEQ ID NO: 276701 - DNA, 257 bp, Glycine max
  unsure (1)..(257): unsure at all n locations
gttcatttctacacatccctagctcngtcgttccgtcgttgacactggcnnttcgggtgcgaancctgacctccgctctctctttcttctctctctcttgtccatcgcttccgccaatgtcttcttcgaagagcgtttcgatgacgggtgggaaaatcgatgggttaaatcagattggaaaaaagatgagaacgtggctggggagtggaaccacacctctggtaatggaatggagacgctaatgacaaaggtattca

SEQ ID NO: 276702 - DNA, 274 bp, Glycine max
gagaactgtgactgcttgcaggggttccaaatttgtcactcactgggaggaggaactgggtctggaatgggtaccttgcttatctcaaagatcagagaagagtatccggataggatgatgttgacattctcagtgttcccgtctccaaaggtctctgacaccgtggttgaaccctacaatgccactctctctgttcatcaactagttgagaatgcggatgaatgcatggtccttgataacgggcactctatgatatctgtttccgtacactcaa

SEQ ID NO: 276703 - DNA, 266 bp, Glycine max
  unsure (1)..(266): unsure at all n locations
caagctagcatttactggctcaacagataccggaaaagttgtactcnaactngctgnaagaagcaatcttaagccagtgacattggagcttggagggaaatcgcctttcataatatgtgaggatgctgatgttgacaaggctgttgaactgcacactttgctctgttctttaatcaggggcaatgttgctgtgccggctcacgtacctttgtacatgagcgtgtctatgatggttcttggagaaatcaaagaaacgggctttgaga

SEQ ID NO: 276704 - DNA, 280 bp, Glycine max
  unsure (1)..(280): unsure at all n locations
ctatcccatggtcccaggacatgaagtggttggtgaggtactganaggtggggtcagacgttagcaggttcagagtgggaganttggtgggagttggactcctcgtaggttgctgcaaaaactgccgccatgccaacaagacattgagaattactgcatcaagaagatctggtcttacaatgatgtttatgtcgatggaaaacccacgcagggtggctttgctgaaancatggtcgttgagcaaagtttgtggtganaattccagagggtttggcgccag

SEQ ID NO: 276705 - DNA, 278 bp, Glycine max
  unsure (1)..(278): unsure at all n locations
accttagtaacattgccacatattgtgttcattttggaattgtgccactaaaattctattcaattcatctatggctgcctcttcttangctatgcnatcaatcctggcnaaccctttgatccgcatttccagcgggtctanggtgaaccaatttggcgttcntgctttgcanatgagacaggaatgttggcctgngagttaggtccatggctanggaagaacaaccaagtgngcctgcaacccagttacaccgccaccatcagtagaanccaagccac

SEQ ID NO: 276706 - DNA, 121 bp, Glycine max
caactgtttagttaaggggtgtttatctcttgtagagcttttagtttgatttagagttttcttgttgaaatctggttaagtttgtatcaatataattggcttatcattcgctttctgctgt

SEQ ID NO: 276707 - DNA, 274 bp, Glycine max
  unsure (1)..(274): unsure at all n locations
agctgatgtgccatttataagttgttctgctagtgagtttgtagagttatatgttggtatgggtgcttcccgtgtgaganatctctttgcaagggcaaagaaagaagcaccatccataatatttattgatgagatagatgctgtggctaaaagtcgtgatggtaaatttcgcattgtcagcaatgatgaacgggaacaaaccttgaaccagctgctcactgagatggatggttttnacacagttctgctgtcattgttcttggagcaactaatc

SEQ ID NO: 276708 - DNA, 205 bp, Glycine max
tagtgcctccttgccagaagttaaaatggcccaagaaactttcctattcacatctgaatcagtgaacgaggggcaccctgacaagctctgtgaccagatctccgatgctgtgctcgatgcatgcttggagcaggaccctgacagcaaggttgcctgtgaaacctgcaccaagccaacatggtgatggttttcggagagatcacaa

SEQ ID NO: 276709 - DNA, 272 bp, Glycine max
  unsure (1)..(272): unsure at all n locations
ccactcgggacaagcatctgctanaatgtcatgaggttgaaagaacttatgangtgaaggttttgaatcacaatgctgctcttcaactgcttacttggaatgcttttaaaagagagaaaattgatccaagttatgaggacgtcttgaatcgtgtagtaacttatgcttctggccttccattggctttggaaatcataggttccaatatgtttggaaaanntgtagcnggatnngaatcgcggtggaacattataaaagaattcccaacgatg

SEQ ID NO: 276710 - DNA, 273 bp, Glycine max
ctcagatcaaaattgcggagtggaatcccgagaaggacttgctcgccatggtgactgacgattctaagatcttgctccatcgtttcaattggcaacgcttgtggaccattactccaggcagatgcataacatctttgtgttggcgtcctgatggaaaagcaattgctgttgggcttgatgacgggacattgtcactgcatgatgttgagaatggaaagctattaagaagcttaaaatcacattgcgctgccattatatgtctcaactgggagg

SEQ ID NO: 276711 - DNA, 270 bp, Glycine max
gtttcttacaaggctctactctactgcttcaccttctgctctagaaaattcagtggtgatacatggcttcggctactctctctgtagccaaaccagcccttcaggcaaatgggaaaggcttctctgaattctctggcctccgcagctcatcaggcttccttcccttttctagaaaatcttcagaggatttccattctgtcattgccttccagacctatgcagttggaagcagtggaggatacaagaagggtgtgacagaagcaaaactga

SEQ ID NO: 276712 - DNA, 267 bp, Glycine max
ggcaattgtgaatcccaaggaatgaaggatttcatgaatgagagcaagctgaatgatctcttgaacagctctgattatgtcccaacctatgaggacaaggatggtgactggatgctgtcggtgatgtcccatgggagatgtttgttgaatcatgcaagcgtttacgcatcatgaaaggaaaggaggctattggtcttggtcttgcaccaagagccatggcaaaatgcaagaacggagctagactagtcgcacaattcatgacctgcc

SEQ ID NO: 276713 - DNA, 268 bp, Glycine max
cacttttcagttacaaagcatttcattgttttacaatatacaacactacaatggctgcttcaacaatggctctctcttcatcatcattggctggccaagctatcaagcttgccccctccacccctcagcttggtgttggaagggttagcatgagaaaaacagcctccaagactgtttcctcaggaagcccatggtacggcccagatcgtgtcaagtacttgggcccattctctggtgagcccccatcctacctcactggtgaattccc

SEQ ID NO: 276714 - DNA, 268 bp, Glycine max
  unsure (1)..(268): unsure at all n locations
cacaaaacactatagcaatagaaacatttgcttttgaaaaacccctcactcttcatcactacactagctancccacatacaatgtcgaccaaatttaaggtgtttcgtgaattcacaagcgatgactcattcctaaaccaagttatccctgaaaacatcaccgaattccaagtgactctgtccctcnctagagactacgatggcaacaactcaaccaacggaaagttcattccttatgggacactgaaaaggtcatcccgaagtgata

SEQ ID NO: 276715 - DNA, 266 bp, Glycine max
atcgtgttcaagaacaacgcaggtttcccccacaacgttgtgttcgacgaggacgagattcctagcggcgtggatgcagggaaaatctccatgagcgatgaagaccttctcaatgcgcctggtgagacttacagcgttactttggatgctaagggaacctacagtttcttctgttcgcctcaccaaggagctggtatggtgggaaaagtcactgttaattaattattgtctcagggctcgtctcctacgtctaagttctcatatgg

SEQ ID NO: 276716 - DNA, 268 bp, Glycine max
caaagcacaaagcaaagctcatccttgagttaaaaaatggcagcagcttcttccatggctctctcatccccatccttggctggcaaggccgtgaagctgggcccatcagccccagaagtgggaagggtgagcatgaggaagaccgtcaccaagcaggtctcctcaggaagcccatggtacggcccagaccgagtcaagtacttgggcccattctctggcgagcccccgtcctactaaccggtgagttcccaggcgactacggctggga

SEQ ID NO: 276717 - DNA, 267 bp, Glycine max
  unsure (1)..(267): unsure at all n locations
cacagatctgtcttccgaagcaggaactaaatatggctgacttgttggaatggtcaaagcaagatnagaaacgaatgcttcatgtcgtctaccgtgttggtgaccttgatcgcaccatcaaattttacacagaatgtttaggaatgaagcttttgaggcaaagagatatcccagaggagaaatatgctaatgcttttcttggatttggccctgaagaatcccattttgttgttgaattaacatataattatggggttacctcgtatg

SEQ ID NO: 276718 - DNA, 263 bp, Glycine max
ttgctctctgtgaggcttcaatttctaattagggtttcgcttagagtaaccaataaccatgggagtcttcacctttgtcgtccgcaaatccggcagcgaatggagcgccaagcaacattccggcgacatcgaggcctccgccgattccaccttcgatctccaacggaagctcgtgcaagccgctctcgccgttgattcctccggtggagttcagtcctctttctctcccggtctcctacctccgctgtgttccaggtgatagt

SEQ ID NO: 276719 - DNA, 263 bp, Glycine max
  unsure (1)..(263): unsure at all n locations
gaaattttaaaaatgactnggataaacttaagaattcaattattgaaattgaataagtaaacaatttaattggattggtcgaatggtatcaaaaaaatggagtactaactcccatttcttatttattattgaattaaccgatcaacttgctttgttatcgaacatttctttttgatttcaaaaattttccggaaaaaatttgaatctatttttatatgcgaatcaatccactacttctggtcctgaggtttctgcgcttgaaa

SEQ ID NO: 276720 - DNA, 266 bp, Glycine max
gaccctgcccaacatcaaggttcctctcattcttggtatctggggaggcaagggacaaggaaaatctttccaatgtgagcttgtctttgccaagatgggaatcaaccccatcatgatgagtgctggagagttggaaagtggaaatgcaggagagccagcaaaactgatcaggcagagataccgtgaagccgcagacttgatcaagaagggaaagatgtgtgctctcttcatcaactatcttgatgcaggagctggtcgtcttggtg

SEQ ID NO: 276721 - DNA, 279 bp, Glycine max
gggcttcctccaccgctttcttcacacccctccatgatttcactcaagccagaacaaccccatcaccccctttgcctttcatcaaatcctcctttgcttcctccaagtcaaccttttttcaccctgccctttccctacaaacctcttccaactttcccaggctttttggaaagcctaagtttttctctgttcatgcaagggctgccacagaaaaaaccatttatgattttactgtcaaggatattgacagaaaggatgtttctcttagcaagtttaagg

SEQ ID NO: 276722 - DNA, 271 bp, Glycine max
  unsure (1)..(271): unsure at all n locations
tccgtaaattattcatagcatatttcanaccacactcannaggcttcnctcnctnacttngattngattgatttcatnacatggctacactatntgtttnnnantngtgaattgcatttgctacactatattttaaggacaattatacatagactatatggggttgatggctgcgaaccaaactcnattgttgtctaagatggccatcgganatggacatggtgaagcatccccatattttgatggatggaaggcttatgatgaaaacccc

SEQ ID NO: 276723 - DNA, 275 bp, Glycine max
ccgcagactcctgttctagataactggtatcgcctgcctgttgcctaccatggacgggcatcttctgttgttatttccggaacagatattgtccggccaagaggtcaagctcatccagttggcagctctaccccctactttggcccttcattaaagctagactttgagttggaaatggctactattgttggacctggaaatgaattgggaaaacctgtggatattaacaatgctaaagatcacatctttggacttgttctgatgaatgactggag

SEQ ID NO: 276724 - DNA, 284 bp, Glycine max
  unsure (1)..(284): unsure at all n locations
gtgtgcttctgctggcggcggcggttcaagctggcgctggcggaggcgncgtcggaaatcaagaccctattacaatgagncctccgagaatgagctcatgagcaccttcgcatcttaagagattcctggtcgatgtgcagaggcaagcagnaggcnactgaagaagacgangcaagccatcatcgatagctcatgcatttccatcgcagaggcgctggcctcaatctcgaaactttcttcaagtacctcttcagtngactntaagcctcctcttcttccttctc

SEQ ID NO: 276725 - DNA, 273 bp, Glycine max
tttcaactcatttgtcttctgtcaggttttcaatgagataaattcacgtgaaatggagaaaataaacgtttttaaaggcatattggataactatgttttcgtgggtgtcatcagtgctactgttttcttccaaatcataatagttgagtacttgggaacctttgcaaacacaacacctctcaccctgtcacagtggttcttttgcttattggttggatttatgggcatgcctattgctgctcgcttaaagaagattcctgtttgaagcacctg

SEQ ID NO: 276726 - DNA, 269 bp, Glycine max
gcagaaagcaagctcatcctagagttttaaaaatggcagcagcctcctccatggctctctcttccccatccttggctggcaaggccgtgaagctgggcccatcagcccccgaagtcgggagggtcagcatgaggaagaccgtcaccaagcaggcctcctccggaagcccatggtacggcccagaccgcgtcaagtacttgggcccattctctggcgagcccccgtcctacctcactggcgagttcccaggtgactacggctgggacact

SEQ ID NO: 276727 - DNA, 270 bp, Glycine max
tctctccgcagcagccacacttcttcgccgtttcagctgaagagccatccgcaggtaagcaatggttaagcataataatgttatccccaatgggcacttccggaaacactggcaaaactatgtgaagacttggtttaatcaaccagcccgaaagaccagaagacggttggctcggcagaagaaggctgtcaagattttccccaggcctactgctggatctctcaggcctattgttcatggccagactctgaaatacaacatgaaagtcag

SEQ ID NO: 276728 - DNA, 271 bp, Glycine max
caaaatactactatagaattggaagtggtgattctgctcgagacttttggttcgaaacacctcctaaagttgggccagatactccctacaaatttgggatcattggtgatttggggcaaacgtttaattctctttcgacccttgagcattatttggagagtggaggagaggctgtgttatatgttggatcatctttcttattctgatgaacatgactacaaagatatgggtttacggtgggatacatggggccgatttgctgaaaggagtg

SEQ ID NO: 276729 - DNA, 272 bp, Glycine max
tgaacaatgatttgttccggaagaccatggggccagtgaagaagggctatggaagatgcaggattacagaagagtcagattgatgagattgttcttgttggtggaagcacaaggattccaaaggtacaacagcttttgaaggactactttgatggaaaggagccaaacaagggtgtcaaccctgatgaagcagttgcctatggtgctgcagtgcaaggaagcattttgagtggagagggtggtgaagaaaccaaagacatccttctcctgga

SEQ ID NO: 276730 - DNA, 265 bp, Glycine max
  unsure (1)..(265): unsure at all n locations
tctccaaagacagctctttggtctgcctccacgatacagagattcagtaagaacaataactccagggttgcccatttttctgtacnactactccactcaccaactccatggtatctttgaggctgcaagttttggaggatccaatattgatccaacggcttgggaggacaagaagtgccctggtgaatctcgtttccctgctcaggttcaagtgattactaggaaagtttgtgagccactagaggaagattcctttagaccaatt

SEQ ID NO: 276731 - DNA, 231 bp, Glycine max
caccattgccatggatccttacaagctccggccatccagcgccttcaattctcccttctggactacaaattctggtgctcctgtttggaacaacaactcctctttaaccgttggagctagaggtccaattctgcttgaggattatcatcttgtggagaagcttgcaaactttgacagggaacgtatcccagaacgtgttgtccatgccaggggagctagtgcaaagggttt

SEQ ID NO: 276732 - DNA, 269 bp, Glycine max
gccttcctctctgcagagtgcagagctttctctccccgttgcttcattcattctcaacaacaaaccaatctttaaaatgagggggggcttgtggcaacttgggcaatcgatcactcgccgtcttgcccatggagataagaaggctgttgctcgtcgatgttttgcctcagaagctgagctgaaaaagacagtgtttcatgacttccatgttgctcatggtgggaagatggttccattgctgggtggagcatgccaatccaatacaagga

SEQ ID NO: 276733 - DNA, 265 bp, Glycine max
gtagaactagtgatgcaggacaccagcattcttggtgctgaaagtcaccctctccatttgcatggctttaacttctttgttgttggtcaaggttttggtaactttgatccaaagaaggaccctgtaaacttcaatcttgttgatcctgttgaaaggaacacagttggtgtcccatctggtggatgggttgcaatcagattcctaactgataacccaggggtatggttcatgcattgccatcttgaagtccacaccagctggggtc

SEQ ID NO: 276734 - DNA, 268 bp, Glycine max
ctgcagcattagggtttatcatctgcttcaatggggaagggaacagggagcttcggtaagaggaggaacaagacccacactctctgtgtgaggtgtggccgccgcagcttccacctccagaagagtcgctgcgccgcttgtgctttccccgctgcacgcacgcggaaatataactggagcgtcaaggcaattcgcagaaagaccaccggaactggcaggatgagatacttgcgtaacgtgcctcgccgtttcaagagtggcttcagag

SEQ ID NO: 276735 - DNA, 270 bp, Glycine max
ttcattctcatctttctctcttctctctccacccaaaccctaactcccgaccctgttcccctctcgtatccgtcatgaaaggaggaaagtccaagaccgaatctaagagagccgatcccaaacttgctgtgaataagaagggagccgccaccaaggctaggaaacccgccggcaaggggaaggcagcgaaagaccctaacaagccaaagaggcctccaagtgctttcttcgttttcatggaggagttcaggaaggtattcaacaaagaac

SEQ ID NO: 276736 - DNA, 261 bp, Glycine max
  unsure (1)..(261): unsure at all n locations
cgaganatggcgatggcaatggcgcttcgcaggctttcatcttcaattgacaagcctctgcgccctctacttcaatgccggttccctctactacaagtcgtctttgcctgatgaagctgtttacgacaaggagcgacccggagttacatggccgaagcagttgaatgctccacttgaggtcgtggatcctgagattgctgatattattgagcttgagaaantaggcaatggaaggggctagaattgataccgtcagagaat

SEQ ID NO: 276737 - DNA, 261 bp, Glycine max
  unsure (1)..(261): unsure at all n locations
ggggatgaacatggtgtcaaaaggtgttcaaaatgttcttgattttcttcaggatgacttccctgatatggatgttattggaatctctggcaatttctgttcggacaagaaagccgcagccgtgaattggattgaagggcgtggcaagtctgtggtgtgtgaggccataattaaggaggatgttgtgaagaaggtgttgaaaaccagtgtgncaggccctgnggcaacttaatatgctcaaaaaccnntacgggctcagcc

SEQ ID NO: 276738 - DNA, 262 bp, Glycine max
cacgcacactgtcacaggtgtagcggcgaaactgaggtcgtagaaagaatggcgaaaacgacgtcgttgttgctctttacactgctcctcttcggaaccttagctctcatccaggcgaagaaatcgaaggaggatttgaaggaagtgacccacaaggtttactttgatgttgagattaatggaaaagaagcaggtcgtattgtgatgggtctttttggaaaggctgttccaaaaactgcagaaaactttcgagctctttgca

SEQ ID NO: 276739 - DNA, 264 bp, Glycine max
ttgaagttgaagtcttgcccttctctcttcaactccaaacacaagacatcatcatccatggctgcctccgtctccactgtcggagctgtcaacagagctcttttgaacctgaatgggtctggacctggggtttcagctcccagttcatccttctttgggagcagcttgaagaaggttattggctcaagggtccccaacacaaagatttcctctggaagcttcaagattgttgctgtagaagagaagaaagagattgaagagacc

SEQ ID NO: 276740 - DNA, 266 bp, Glycine max
  unsure (1)..(266): unsure at all n locations
ctcgtgagcatgctcttcttgctttcacccntggtgtgaagcagatgatctgctgctgtaacaagatggatgccactaccccgaagtactctaaggctaggtatgatgaaattgtgaaggaagtctcttcctacttgaagaaggttggttacaacccagacaagattccatttgtgcccatctctggtttcgagggtgacaacatgattgagaggtccaccaaccttgactggtacaagggaccaactctccttgaggctcttgac

SEQ ID NO: 276741 - DNA, 258 bp, Glycine max
  unsure (1)..(258): unsure at all n locations
gctataagctagtttatcgtgaggagaatatgaagttgtttgttttctttgttgctgcagtagttttggtagcatggccatgccatggcgcaggctaccaaaggttccctctccgaatgaaaactggctatggtgagcgttcttcggaggtaaaatgcgcaagttttaggcttgctgtggaagcacacaacatccgagcntttaaaaccattcctgaagagtgcgttgaaccaacaaaggactacattaatggcgaac

SEQ ID NO: 276742 - DNA, 258 bp, Glycine max
acgagtctctcatactatgatactatagctacacttcccactgtgtctcagggtctgtgatacacacagactcacttcaagttcccagcttttgccatttttcccactgtttattgaactgcagaacatggcacagattttggctccctctacgcaatggcagatgagaatctcaaaatcctctcccaatgcaactcccattacatcaaacatgtggagttctttattgtggaaacaaaataagaaagtttcacctac

SEQ ID NO: 276743 - DNA, 259 bp, Glycine max
  unsure (1)..(259): unsure at all n locations
ggctgatttagaagatgcactgtcaccgacctgggaaaatcttattagtggtcaagtgaacttgaaggatgctgtggatgggaccataagcttccatgacaaagtaaggnacaggatttacaagctcaatgatcagacagcaaagctttttgtgagaccaagancttggcatctacctgaagcacatattctgnttgatggtgaacctgcaactggttgccttgttgatnttggcctctacttctaccacaaccactca

SEQ ID NO: 276744 - DNA, 260 bp, Glycine max
gttgaagtcttgcccttctctcttcaactccaaacacaagacatcatcatccatggctgcctccgtctccactgtcggagctgtcaacagagctcttttgaacctgaatgggtctggacctggggtttcagctcccagttcatccttctttgggagcagcttgaagaaggttattggctcaagggtccccaacacaaagatttcctctggaagcttcaagattgttgctgtagaagagaagaaagagattgaagagaccc

SEQ ID NO: 276745 - DNA, 263 bp, Glycine max
gacaaacacttcgccaaccttctgctgcatcagttgtgagatgcaaccccaccaccccatcaggcctcaccatcagagctggttcctatgctgatgagctcgttaagaccgcgaaaacagtggcttcaccagggaggggtattttggccatggatgagtccaatgctacctgtgggaagcgtttggcttcaattgggctagagaacactgaagctaaccgccaggcataccgtaccctccttgtgacagttccaggacttggt

SEQ ID NO: 276746 - DNA, 266 bp, Glycine max
ctcatcaagggttgtgaaagcagagaagtgagatacactaagttatcctcataaatacactctaattaggtggcaagataagtgtctaaccttagtaacattgccacatattgtgttcattttggaattgtgccactaaaattctattcaattcatctatggctgcctcttcttatgctatgcaatcaatcctggcaaaccctttgatccgcatttccagcgggtctagggtgaaccaatttggcgttcctgctttgcacatgaga

SEQ ID NO: 276747 - DNA, 267 bp, Glycine max
  unsure (1)..(267): unsure at all n locations
cctggctctgttccgtcgatgacgatggcgnntagggtgcgaaacactgacctccgctttctcattcttctctctctcttgtccatcacttccgccaaggtcttcttcgaggagcgtttcgatgacggatggggaaatcgttgggtaaatcagattggaaaaaagatgagaacctggctggggagtggaaccacacctctggccaatggaatggagacgctaacgacaaaggtattcaaaccagtgaggattacagattctacgcta

SEQ ID NO: 276748 - DNA, 279 bp, Glycine max
gcggcagctaacttcgggctccatcttcttcgatctctcaaactctatcggcgcagaaccaatcctatatcactatggggaagacacatggaatgggagctgcccgcaagctgaagtctcaccgtaggagacaaaggtgggctgacaagtcatacaaaagtctcatcttggaaatgaatggaagaagccttttgctggttcatcccatgcaaagggtattgttcttgaaaagataggtattgaggctaagcagcccaactctgccattcgaaaatgtgc

SEQ ID NO: 276749 - DNA, 276 bp, Glycine max
ttacacaagaactctccaaggatcctccttcccacgaaattcatttggtgggaaaatccaagaagagggtggaatttcaagccagggaagatggattatttcaatgcaccaggaagaaaccatctctttgttccggggccggttaacatcccgaccagatcattcgggccatgaacagaaacaatgaggactaccgttctccagcaattccagctatgaccaaaacactgcttgaggatgtcaagaagattttcaagaccataactggaatcccat

SEQ ID NO: 276750 - DNA, 276 bp, Glycine max
  unsure (1)..(276): unsure at all n locations
ctgaaattcatggtatganagaanttgaatgatggaaagccaagaaagataaaaaatgctagagcatattcttttactcttgaagaagacaccacaaattatggtatgtatgagaaaggtggtattgtcacgcaggtcaaacaacctaaggtatgaactttaagccactcagggaagcactcagtgatcctggcgattttcttctgagtgatttttcgaagtttgatcgcccacctctccttcacttagctttccaggctttggataaattcattt

SEQ ID NO: 276751 - DNA, 267 bp, Glycine max
  unsure (1)..(267): unsure at all n locations
gttaaaagccttagccttccctacaactccaaacatgnaagacatcatcatccatggctgcctccgtctccactgtcggagctgtcaacagagctcttttgaacctgaatggttctggagctggagcttcagctcccagttcagcttctttgggaccagcttgaagaaggttattgcctcaagggtccccaacagcaaggtttccggtggaagcttcaagattgttgctgtagaagagaagaaagagattgaagagacccagcagac

SEQ ID NO: 276752 - DNA, 276 bp, Glycine max
  unsure (1)..(276): unsure at all n locations
caagtctgagtgggtgaagggacaaacccttcgccaaccttctgcatcagttgtgagatgcaaccccaccaccccatcaggcctcaccatcagagctgnttcctatgctgatgagctcgttaagaccgcgaaaacagtggcttcaccagggagggtattttggccatggatgagtccaatgctacctgtgggaagcgtttggcttcaattgggctagagaacactgaagctaaccgccaggcataccgtaccctcctcgtgacagttccaggcttg

SEQ ID NO: 276753 - DNA, 269 bp, Glycine max
  unsure (1)..(269): unsure at all n locations
ctggtgattgatgcttnagagcaaagcagaagagatgatctcgagtctcttggttatgttttgatgtacttcttgagaggaagtcttccttggcagggtcttaaagcgggaacaaagaaacagaagtacgagaaaatcagtgaaaaaaggtttctacctcgattgaagccttgtgtcgaggttatccaacagaatttgcatcttacttccattactgccgatcattgaggtttgatgataagccagattatgcttatctcaaaaggata

SEQ ID NO: 276754 - DNA, 280 bp, Glycine max
  unsure (1)..(280): unsure at all n locations
ccatgcatcagccatgagcagtgatggtggatgcatggacanaaccatactccagggaatatgcagccttcccagctccttgggctccgtactgcaaagttctggcctaccacaggacgtgttgataatgtgtacggtgaccgcaacctcatttgacccttctcccagcatcacaggntgttgaagaacaagcagctgccacagcataatgtgttcanatgacaactattttccatttnccgttgtacataaactctattcctatcatacagttcttgca

SEQ ID NO: 276755 - DNA, 272 bp, Glycine max
  unsure (1)..(272): unsure at all n locations
cgtctgtgacacacacagactcacttcaagttcccagcttttgccatttttcccactgtttattgaacatggcacagattttggctccctctacgcaatggcagatgagaatctcaaaatcctctcccaatgcaactcccattacatcaacatgtggagttctttattgtggaaacaaaataaganagtttcacctaccagttctgctaaatttagagtgctggcaattaagtctgacaatatcaccatcaacaggctcgagggtctactta

SEQ ID NO: 276756 - DNA, 268 bp, Glycine max
ctcaaggtcaagtcattacctgcaaagctgcggtggcctgggaacccaacaagcccttaactgtccaagacgttcaggtggctccgcctcaggccggcgaggtccgtgtccaaatcctcttcaccgctctctgccacaccgatgctacacttggggcggcaaggatcccgaaggtctcttcccctgtattcttggccatgaagctgcagggattgtggagagtgttggagaaggtgttactaatgttcagcctggggatcatgtcatt

SEQ ID NO: 276757 - DNA, 268 bp, Glycine max
  unsure (1)..(268): unsure at all n locations
cttctcttgcggctagggttttagcgcanttcttctagatttaaggnagatgggtaaggnaaaggttcacatcagtattgtggtcattggccatgtcgactctgggaaatccactaccactggtcacctgatttacaagcttggagcattgacaagcgtgttattgagaggtttgagaaggaagctgctgagatgaacaagaggtctttcaagtatgcctgggtgctggacaaacttaaggctgancgtgaaagaggaatcaccattg

SEQ ID NO: 276758 - DNA, 272 bp, Glycine max
  unsure (1)..(272): unsure at all n locations
gaaacagcgaaagtgaaataccactacttttaacgttattttacttattccgtgaatcggaagcngggcactgcccctactttttggacccaaggtcggcttcggccggtcgatccgggcggaagacattgtcaggtggggagtttggcgggcggcacatctgttaaaagataacgcaggtgtcctaagatgagctcaacgagaacagaaatctcgtgtggaacaaaagggtaaaagctcgtttgattctgatttccagtacgantacgaac

SEQ ID NO: 276759 - DNA, 271 bp, Glycine max
  unsure (1)..(271): unsure at all n locations
gttgaaaagaaaccctagcaagtggagcaatggcagacgttgaagtcgatgtgnnnnnnnnnnnnnnnnnnnggctgccgaagaagagaacgttcaagaagttcagttttcgaggcgtggatctcgatgcacttctcgacatgtccacgatgaactcgtcaagatgttcagtgcccgcgctcgtagaaggttccagagaggcctcaccagaaagcccatggccttgatcaagaagctccgtaaagcgaaaagggaagctccaccaggtgag

SEQ ID NO: 276760 - DNA, 272 bp, Glycine max
  unsure (1)..(272): unsure at all n locations
cagaagtgaccccaatatacttagccatatctttacttcccaaaacttgctctacaatgagtttccttcgttcttttgcaaganacaaggatatatcaaaagtaggacgcagaggtatccattgcatgcagaaactatgtgcagaaaaatatctcctgattcactagagaaggcccaaaatcgtgtgatagatgctgcactcacacttgttcgagaaaatacaaggcttaagaaagaactcgtgcatagtttgggaggtgctgtggcaactt

SEQ ID NO: 276761 - DNA, 266 bp, Glycine max
  unsure (1)..(266): unsure at all n locations
tcaaaagcagcttggattgaagcacagtatgctgcatgggagaagcagcagaaagaaattgngcatacaagagacttgataagtagattaggtgctggagcaaattctggccgtgccttcttctgctgagaagaagctggagagnttcaggaagaggaactagtggagaagccatttgaacggaaacaaatgaaaatcaggttccctgagcgtggaaggagtggaagatctgttgtagcaattcagaacttggaatttggctttga

SEQ ID NO: 276762 - DNA, 267 bp, Glycine max
gagtttgttgatcgagataactagaaacagtgtgatgaaaatgaaggtccttgttttcttcgttgctacaattttggtagcatggcaatgccatgcgtacgatatgttccctctccgaatgaacactggctatggtgcccgtactcggaggtgaaatgcgcaagttggaggcttgctgtggaagcacacaacatctttggctttgagaccattcctgaagagtgcgttgaagcaacaaaggaatacatccatggcgaacaatataga

SEQ ID NO: 276763 - DNA, 263 bp, Glycine max
ccttggaaggctttcttagggttcatgaatgggaaggctccacagactatattaaccgaccaaaatatatgtctcaaagaagcactatccacagaaatgccaacaacaaaacatgctttctgtatatggatgatagtagcaagtttccatcttggtttaatgctgttttaggggaacgatacaatgattggaaggcagaattttatagactttataatcttgagtcagttgaggattttgaactaggctggagggaaatggct

SEQ ID NO: 276764 - DNA, 269 bp, Glycine max
  unsure (1)..(269): unsure at all n locations
ctatttttcatttntgaatacatggattgtaatctttatcnactaataaaggagagagaaaagccctttcagaggaagagatacggtgctttatgaggcaagtgctacaaggacttagtcacatgcncaagagaggattctttcangggatttaaaacctgagaatatgctggtaacaaatgatgttttgaaaattgctgattttggactggctagagaagtatcatcgatgcctccatatactcaatatgtttccacacggtggtatc

SEQ ID NO: 276765 - DNA, 266 bp, Glycine max
  unsure (1)..(266): unsure at all n locations
ctaattgtttaaacctaattctcatttcttcatcgttcgatanttctcctcctaaagatgcagatcttcgtgaaaactttgaccggtaagaccatcacccttgaggtggagtcctccgacaccatcgataacgtgaaagctaagatcaagacaaggaagggatcccacctgaccagcagagacttatctntgcgggtaaacaggttgaggatggtcgaacccttgccgactactacatccaaaaggatncantctccactcgtgct

SEQ ID NO: 276766 - DNA, 265 bp, Glycine max
  unsure (1)..(265): unsure at all n locations
caagctcatcctagagttttaaaaatggcagcagcctcctccatggctctctcttnccccatccttggctggcaaggccgtgaagctgggcccatcagcccccgaagtcgggagggtcagcatgaggaagaccgtcaccaagcagcctcctccggaagcccatggtacggcccagaccgcgtcaagtacttgggcccattctctggcgagcccccgtcctacctcactggcgagttcccaggtgactacggctgggacactgctg

SEQ ID NO: 276767 - DNA, 262 bp, Glycine max
cgaaacatggcaagagtggtggcactccaacagaaccaactatctttctctaccttagcttcctctctttctgacttcagtggaaccagacttcaaactcaacttcagttcaagagaaagcaatgccatccaaaagggtcttctacgtctccgcatcgagcaccaagaaaatcctaataatgggaggcaccaggtttattggtgtgtttttgtctaggctccttgtcaaagagggtcaccaggtgactttattcacaagagg

SEQ ID NO: 276768 - DNA, 261 bp, Glycine max
  unsure (1)..(261): unsure at all n locations
ttaccagttgccacactacaccgagatnccccctaaacccgnttgcgttgttgtttgcgaagaaatggcgactaagaggagcgtgggaacgttgaaggagggtgatttgaaagggaagagggtgttcgtgagggtcgatctaacgtgccttggatgacaaccttaacatcaccgatgacactagagtccgtgctgctgttcccaccatcaagtacttaactggtcatggagccaaagtgatcctttctagccacttgggag

SEQ ID NO: 276769 - DNA, 291 bp, Glycine max
cctaaatagggttagggtttatgcaatcgaactccagcgacggtgcatttgtgcgtaatcgatggcgaatcgcacggatccagcagcgaagagcataagagggacgaaccctcagaacctggtggagaagattctccgatcgaagatctaccagaacacgtactggaaggagcaatgtttcgggttaacggcggagacgttggtggacaaggccatggagctcgaccacctcggcggcaccttacggcggcaaccgcaaacccacgccgttcatgtgcctcgtcatgaaga

SEQ ID NO: 276770 - DNA, 286 bp, Glycine max
ttttagaagaataccccctcttttgctgcatcagaggagttgtaaattaagagcatgggctgcacaagctcttgtattcatcatcttctcttaccttctcagcggaggctgcaagacaaagtcttggaccaagatcactccaatctccatttggcttctccagaaaagcctcctttcttgttaaggcagctgctaccccccctgtacaagcaaggatcagacagacctttgtggtttgcatcaaagcaaagtctttcttacttggatggcagccttccgggtgact

SEQ ID NO: 276771 - DNA, 293 bp, Glycine max
gttccagatcgtgcttaccatcatcagagatgggttgaagaccgatcccaccaggtaccgcaagatgaaggagcgtctcgttggggtttctgaggaaaccaccactggtgttaagaggctatatcagatgcaggcgaatgggactctactcttcctgctattaatgtcaatgactctgttaccaagagcaagtttgacaacttgtacgggtgccgtcactctctccctgatggtctgatgagggctactgatgtgatgattgctggaaaggtggctgttgtggctggatatgg

SEQ ID NO: 276772 - DNA, 291 bp, Glycine max
  unsure (1)..(291): unsure at all n locations
gcaccgtcgccgccgggtccaattcggctgggccttgcagctctctctcttgaacgccctacattncagacgttgggaataggacatgcgttttcttcgtttatttggctctgtggccccattacaggtcttgtggttcaaccatgcgttggtattggagtgataaatgtacttcaaggtttggcagaagacggccgttcattctggcaggatctcttatgatatgtctggctgtgatattaatcggattttctgctgacattggatatgtattaggtgatacacatgagc

SEQ ID NO: 276773 - DNA, 291 bp, Glycine max
  unsure (1)..(291): unsure at all n locations
gtttggtataactttagccgaggtcnggaggagcactagctaagttcacaatttcaaaatgggctaggggactaaagaagcatttgaaaaggctcaatgctcctaagcattggatgcttgacaaactgggtggtgcatttgcgcctaaaccctctctggaccacacaaatcgagggagtgcctccccctcattcttattctgcgaaaccggctgaagtatgctctgacataccgtgaagtcatgctattctgatgcagcgccatgttcttgttgatggcaaagtcaggatg

SEQ ID NO: 276774 - DNA, 286 bp, Glycine max
agcgttgccattctcatcctcttctttctctctctaccattgccatggatccctacaagcaccggccatccagcgccttcaattctcccttctggactacaaattctggtgctcctatttggaacaacaactcctctttaaccgttggactagaggtccaattctgctggaggattatcatcttgtggagaagcttgcaaattttgatagggaacgtatcccagaacgtgttgtccatgccaggggcgctagtgcaaagggtttctttgaggtcacccatgacatt

SEQ ID NO: 276775 - DNA, 277 bp, Glycine max
  unsure (1)..(277): unsure at all n locations
gtcaccttcttcttctactgtgttgtgattccccttacaatcctggtccctgaggttcatgttccaatctggggagctgtttatattccttctgtcatcaccattctcaattcagttggaacaccaaggtccattcacctnctgttctattggatcctctttgagaatgtgatgtctttgcaccgtaccaaggcaacatttataggtctcttagagtatgggagggctaatgaatgggttgtgactgaaaaacttggtgactctgtcaacaataata

SEQ ID NO: 276776 - DNA, 291 bp, Glycine max
gaagttggaagtcatgggcagcaacattgatggcagcaacaacaagttctggtactcttaaagcaactcctttccttggccaaggcaagggtgccaatgccaatgctcttagggatgttgtctccatgggaactgggaagtacaccatgggcatgatttgtggtatggaccagacagagtgaaatacttgggacccttctcagctcagaccccttcatacttgaaaggagaattccctggggattatggatgggacactgctggcttatctgctgacccagaagcatttgc

SEQ ID NO: 276777 - DNA, 289 bp, Glycine max
ggtgatccatgggcgatgggccatgcttggagcactaggatgcatcaccccagaggtgctagagaagtggttgagagtggacttcaaggagccagtgtggttcaaagctggagcccaaatattctccgaaggtgggcttgactatttgggaacccaaaccttgtccatgcacaaagcatcctggcagtgctgggcttccaagttatcctaatgggccttgttgaagggtaccgcatcaatgggcttgatggggtgggagagggcaatgacctctaccctgggggccagt

SEQ ID NO: 276778 - DNA, 283 bp, Glycine max
  unsure (1)..(283): unsure at all n locations
agttggaagtcatgggcagcaacattgatggcagcaacaacangttctggtactcttanagcaactcctttccttggccanggcaagggtgccaatgccaatnctcttagggatgttgtctccatgggaactgggaagtacaccatggcaatgatttgtggtatggnccagacagagtganatacttgggacgcttctcagctcagacccctngcatacttgagactagnattccatggggattatggntnggacactgtggcttatcttgctgacccnnaag

SEQ ID NO: 276779 - DNA, 284 bp, Glycine max
  unsure (1)..(284): unsure at all n locations
agaacaagtagttgagaactaagaaggagaagcaaatggcttcctcaatgatctcttccccagctgttaccactgtcaaccgtgccggtgccggcatggttgctccattcactggcctcaagtccatggctggcttccccaccaggaaaccaacaatgacattacctccattgctagcnncggtggaagagtgcaatgcatgcaggtgtggccaccagttggcaanaagaagtttgagactctttcctacctgccagaccttgatgatgcacaattggcaaagg

SEQ ID NO: 276780 - DNA, 287 bp, Glycine max
gtctgcttcatataaccaaactcttcactctgcttctgcttctttggaaagcacttaaccaaactctctgtttcagcttcctctgttttttgggtacgaacagagtttctctgtttttgacgatggccataaaggcgattgaactgttgaagggtgcggatcacaagaagaaataatggaagtgcttgctgcggtggcttcggatttgggggatgtgatcgatgatgtgaacaccttgcaggtgattccactgaatggtgcaatgaccaatgaggtttttcagataa

SEQ ID NO: 276781 - DNA, 286 bp, Glycine max
cagggggacccttagcctggggcttatgctacagcaaggaattgagtcctgataaattctactgcgatgactactataaattaacctacccttgcactcctggcgcagatactatggccgtggtgccatcccactttactggaactacaactatggaaaagccggggaagccttgaaggtggatctgttgaaccatccagaatacatagaacaaaacgccactctagccttccaggctgcactctggcagtggatgaccccaccagagaagcacctaccatcaccc

SEQ ID NO: 276782 - DNA, 283 bp, Glycine max
ggagacgataaagaactttgcggtgatatacctggtggacataacggaggtgccggatttcaacaccatgtacgagctctacgacccttccacggtgatgttcttcttcaggaacaagcacatcatgattgatctcggaaccggtgacaacaacaagatcaactgggctctcaaggacaagcaggagttcattcgacattgttgagaccgtctatcgtggagccaggaagggacggggtctcgtcatcgctcccaaagattatccaccaagtaccgttactat

SEQ ID NO: 276783 - DNA, 284 bp, Glycine max
cgctgggagttggagttggcaacgccttggtgttggagatcgtgatgaccttcggtctggtgtacacggtctacgcaactgccattgaccccaagaagggtaatttgggaattattgctcccatcgccattggtttcattgtcggcgtaacattttgttgggtggggccttctctggagcggccatgaaccccgctgtgacatttgggcctgctgtcgtgagctggacctggaccaaccactggatctactgggccgggcctctcatcggtggtggaatcgctg

SEQ ID NO: 276784 - DNA, 286 bp, Glycine max
gttgagaccaagacacactcgttcatatatctctctgctcttctcttctcttctacctctcaagtttttgaagtataaagatggcagagacattcctattcacctcggagtcagtgaacgagggacaccctgataagctctgcgaccaatctccgatgctgtcctcgacgcttgcctcgaacaggacccagacagcaaggttgcctgcgaaacatgcaccaagaccaacttggtcatggtcttcggagagatcaccaccaaggccaacgttgactacgagaagatc

SEQ ID NO: 276785 - DNA, 290 bp, Glycine max
  unsure (1)..(290): unsure at all n locations
caacaagcaacggtcacgcgcagttcacccctcttcacctggcgtcctctctgnatttccgacaaggatggcattttctctcaagcgctttcaaacgccgccggcgaagaatccgcgcgcgcggcggaggagtcatcaacaatgcactgagaagctgccgtctcagtctcctcttccggacgaggttcccgcgagcaatgccctcgtcaaagccatccgcagagcgcagactctgcagaagaaacgcggcgacacgcacttggccgtcgaccaactcatcctcggccttt

SEQ ID NO: 276786 - DNA, 286 bp, Glycine max
gaaggttattgcctcaagggtccccaacagcaaggtttccggtggaagcttcaagattgttgctgtagaagagaagaaagagattgaagagacccagcagaccgacaaggacagatggaagggtcttgcctatgatatctcagacgacaacaagacatcacaagaggaaagggtttggttgactcccttttccaagctccacaggatgctggaactcactatgcagtcatgagctcctacgagtacctcagcactggacttcgccagtacttggacaacaaaatgg

SEQ ID NO: 276787 - DNA, 286 bp, Glycine max
  unsure (1)..(286): unsure at all n locations
ctcactaggagctcttctccattggttctncatctgcatgcacacacttgcatagttttggaaaccaagaatttttgaagggtagcatcaacaagaagttctggaaatggagatcaccaatgtcagcgagtatgaagctattgcaaagcgaagttgccaaagatggtgtttgactactacgcatctggtgcagaggaccagtggactctgcaggagaacagaaatgccttttccagaattttgtttcggccagtattcttattgatgtgagcaagatagacatcac

SEQ ID NO: 276788 - DNA, 285 bp, Glycine max
aagacctcgaaacggagattcaaagtgggttgcctcacaaggactaccacgacccaccccccgccccattctacgaccccgccgagctccgaaagtggtccttcttccgagccctcatcgccgagttcgtcgccaccctcctcttccttacgtcaccatcctcaccgtcatcggctacaaccaccagacagccaccgccgccgagccctgcagcggcgtcggcgtcctcggcatcgcttgggcctttggaggcatgatttttgtcctcgtctattgcacgccggc

SEQ ID NO: 276789 - DNA, 285 bp, Glycine max
  unsure (1)..(285): unsure at all n locations
agaacaagtagttgagaactaagaaggagaagcaaatggcttcctcaatgatctcttccccagctgttaccactgtnaaccgtgccggtgccggcatggttgctccattcactggcctcaagtccatggctggcttccccaccaggagaccaacaatgacattacctccattgctagcaacggtggaagagtgcaatgcatgcaggtgtggccaccagttggcaagaanaagtttgagactctttcctacctgccagaccttgatgatgcacaattggcaaagga

SEQ ID NO: 276790 - DNA, 287 bp, Glycine max
  unsure (1)..(287): unsure at all n locations
ggnatggggtgtcatggccagtcacagaagtggagagactgaggataccttcattgctgacctttctgttggtttggctacgggtcaaattaagactggagctccatgcaggtctgagcgtcttgctaaatataaccagctcttgagattgaggaggagcttggtgctgaagcagtgtacgccggagctaacttccgtacccccgttgaaccctactaaagttttcaagtggaaaaaacctggagatccacacgagtttgagcattgagatttgggtgcgcggtttt

SEQ ID NO: 276791 - DNA, 284 bp, Glycine max
ctctgggggtccccaacctggaggcatgttcttcccagtgactcatggaatccatgctgtgaggcttggcaatgaggcctcaatctcccaaaatatcaaggtcaaacccggtcaactgtatgctctaattcttggggcctcaaggattgtgcacaggatgaagttttgaggatctctgtgcctccacagactggtgatgttcctttgcagaccctttatagcctcaatggtgatgttattgcttgggggtttaaggccacttctagtgttgtcaaagtgacttt

SEQ ID NO: 276792 - DNA, 279 bp, Glycine max
  unsure (1)..(279): unsure at all n locations
actgaaagcactcagtagggtttgcggtttcagagtttgtgacgcacgcatccatggccaccaccaccaacgccgccgcagccccgccgcgccagctctcccagaaggaagccgacatccagatgatgttagccgccgacgtncacctcggcaccaaaaactgcgacttccaaatggaacgttacatcttcaagcgccgcaacgacgggatttacattattaaccttgggaagacatgggagaagcttcagttagcagctagggttattgttgcattga

SEQ ID NO: 276793 - DNA, 281 bp, Glycine max
ctcataggaaggttgacaagcctcgatttgtatctgcattctgtcaatcaaattgtggagatgttagtccaaatgtgcttggagcattttgcatagacactggattaccttgtgacttcaatcatagtacatgtggagggaagacgaattatgctatagccggggacctggctacccagatgaatttgaaagtacccgcattataggagaaagacaatttagaaaagcagtggatctttttaatgctgcagatgaagagattgaagggggcgttgattttc

SEQ ID NO: 276794 - DNA, 284 bp, Glycine max
  unsure (1)..(284): unsure at all n locations
ctcaaactttgtaacttcaaaacatactcctctgttctctctgtttctcttcaatcttcctgaaaaaaacaaaaacacganaaatcatcnnnnnnnnnnnnnnnnnnnnnnnnnnnctttcaactaatatggcaattgaaaaccaaacaacactgtcagagaaatcaagccaaagaacaggagaatcatgggtgctggaggccctgatgatgacgacaataggtggccaccgtggttgaagccactgctgaaagagagcttctttgttcaatgcaagttgcatg

SEQ ID NO: 276795 - DNA, 283 bp, Glycine max
gacagggataaatgcttacgtgatagcatttacagccctagccagtggaacctcatggcctgatctagtggcaagcaaaattgctgcagaacgtcaaaaaactgctgattctgcaattgcaaacatcacttgcagcaattcagtgaatatatatgttggtattggtgttccatggcttattgatactttgtacaacttcatagcatatagagaacctctccgaatccaaaatgcagggggactaagcttttcgttgattgttttcttctccacttctgtcggg

SEQ ID NO: 276796 - DNA, 287 bp, Glycine max
  unsure (1)..(287): unsure at all n locations
gcgaagagaatggctcccaagggtttaatctttttgggctgtgttatgcttntccagcactgtcactgagtcgttgtcttgcggaggataatggacttgttatgaacttctacaaggaatcatgccctcaggctgaagacatcatcaaagaacagtcaagcttctctacaagcgccacaagaacactgctttctcctggctcagaaacatcttccatgactgtgctgttcagagttgtgatgcttcactgttgctggactccacaagaaggagcttgtctgagaagg

SEQ ID NO: 276797 - DNA, 284 bp, Glycine max
  unsure (1)..(284): unsure at all n locations
ccgtggatgaagagataaaccagacagtaattgaaggaatgggagaattacatcttgaaatcattgttgatcggctcaaaagagaatttaaggtggangctaacgttggtgccccccaagtaaactacagggaaagcatttccaaaatctcaaagtgaagtatgtgcacaagaaacaatcaggtggacagggtcagtttgcagatatcactgtccggtttgaacccatggacccaggtagtggatatgagttcaagagtgaaatcaaaggaggtgtgtaccaag

SEQ ID NO: 276798 - DNA, 283 bp, Glycine max
aaacaaaatgactgtgttttggatttacaagacgttttcaagagattctcgttcgacagcatttgtagattctccttgcgggttggaccctatgtgtctggagctgtctctgcctatatcggagtttgctatgtcctttgacttggcgtcaaactgtccgcggagagagccatgtcggtgtcccctctaatatggaagatcaaacggttcctcaacgtgggctccgagaagaagctgagaaaagctattaaaatgattgacatcttagccagagaagtcataa

SEQ ID NO: 276799 - DNA, 283 bp, Glycine max
tgcaattgaagttgaagtcttgcccttctctcttcaactccaaacacaagacatcatcatccatggctgcctccgtcctccactgtcggagctgtcaacagagctcttttgaacctgaatgggtctggacctggggtttcagctcccagtcatccttctttgggagcagcttgaagaaggttattggctcaagggtccccaacacaaagatttcctctggaagcttcaagattgttgctgtagaagagaagaaagagattgaagagacccagcagaccgacaa

SEQ ID NO: 276800 - DNA, 289 bp, Glycine max
  unsure (1)..(289): unsure at all n locations
gcatgatatntgctttgcagcatccaaatcttgtgaaactttatggctgttgcattgaaggnaaccagttgctgctagtatatgagtacatggagaacaatagtcttgctcgtgcactttttggtaaagaanatgagaggatgcaattggactgcccagaagantgaaaatttgtgtggggattgcaaagggattagcttatcttcatgaggagtcaaggttgaaaattgtgcacagggatattaaggcaaccaatgtcttacttgataaacatctgcatgccaagatc

SEQ ID NO: 276801 - DNA, 277 bp, Glycine max
  unsure (1)..(277): unsure at all n locations
tgcctgcaacagccttgatcatgaccctgatctgcagcacatgccggtgcttcgncgtgtctcgcggttnttgcaattcgataacttctcatgtcctatgggaggaagttggagtttgatttcattgcaaggttcttgatctgcaccagcacttcactttttacccggttatgtgtgttgccagggtcaacttgtatctgcagaccattctgctattgttttcgaggcgtaaagtgcaggatagagccttgaacataatggggatccttgtgttttg

SEQ ID NO: 276802 - DNA, 280 bp, Glycine max
  unsure (1)..(280): unsure at all n locations
ccaaggtctctgattttnggctagccaaattagctcttgatgcanatacanatataaccactcgtgtnatgggaacttangggtatatggcccctgagtatgcgtcaagtggcaaattgactgagaagtctgatgtatattcttttgggtcgtgcttttggagctaattaccggaaggaagccagtagatgcatcccaacctttgggagatgagagcttagttgaatgggctcgacctttactgagtcatgcactcgacactgagncatttgatattttg

SEQ ID NO: 276803 - DNA, 282 bp, Glycine max
  unsure (1)..(282): unsure at all n locations
atatactacgcctaanagatcccaacaggcctttccccactggtcaagccagtgatgctggaggtgttggtcttttaaagtggagaatgcaaagtactgatgagtcaatggtgccgctgacaatcaactgttggccctcttcttctanaacgaaacttatgtcaacattgaatatgaggcttcatcaatgtttgatctgcggaatgttgtgatctctgtacctcttccagctcttcaagaagcaccatctgttaggcagattgatggggaatggaggtatga

SEQ ID NO: 276804 - DNA, 289 bp, Glycine max
  unsure (1)..(289): unsure at all n locations
ctataagctagtttatcgtgaggagaatatgaagttgtttgttttctttgttgctgcagtagttttggtagcatggccatgccatgggcgcaggctaccaaaggttccctctccgaatgaaaactggctatggtgagcgttcttcggaggtaaatgcgcaagttttaggcttgctgtggaagcacacaacatccgagcctttaaaaccattcctgaagngtgcgttgaaccaacaaaggactacattaatggcgaacaatttagatcagactctaaaacagttaaccaa

SEQ ID NO: 276805 - DNA, 287 bp, Glycine max
  unsure (1)..(287): unsure at all n locations
cttntccattggttcttcatctncatgcacacacttgcatagtattggaaaccaagaatttttgaagggtagcatcaacaagaagttctggaaatggagatcaccaatgtcagcgagtatgaagctattgcaaagcagaagttgccaaagaggtgtttgaactactacgcatctggtgcagaggaccagtggactctgcaggagaacagaaatgccttttccagaattttgtttcggccacgtattcttattgatgtgagcaagatagacatcacaactactgtnct

SEQ ID NO: 276806 - DNA, 283 bp, Glycine max
  unsure (1)..(283): unsure at all n locations
ctccatttccatttcctctctctcagtttccaagaatcttaagctatgggaaagtcttacccaaccgtgagcgctgattaccagaaggccgttgagaaggcgaagaagaagctcagaggcttcatcgctgagaagagatgcgctcctctatgctcctggaagagaggacaaacctgagccaccaccagagggtcgcttgcccgatgccactaagggttctgaccatttgagagatgtgtttggcaaagctatggggcttagtgaccgagatatcgtngctctg

SEQ ID NO: 276807 - DNA, 282 bp, Glycine max
ccgcaagaaccgttctttggaaagtctgcaagctaatgtgcagaggctgaaaacatacaaggccaaattggttgtgttcccaagacgggcacagaaggttaaggctggtgattctactcccgaggagcttgcaaatgcaacgcaagtccgggttctttcttgcctattgtgagggagaagccaactgttgaacttgtaaaggttacagatgacatgaaggcttttaaagcttattacaagcttcgacttgaacgcacaaacaaacgccattatggtgccaga

SEQ ID NO: 276808 - DNA, 263 bp, Glycine max
  unsure (1)..(263): unsure at all n locations
cganacccttnctgttagggatgancttcttagagctcttctgaattctgaccttattganttgcatacttttgattatgccaggcatttcctctcctgttgcagcagaatgcttggnatttcttaccatccaagcgtggctacattggccttgagtactatggaagaacagtaagcattaagattcttcctgttggtattcatataggtcagctccaatctgtcatgagtcatcccgagacagaaagcaaggttgcagagtt

SEQ ID NO: 276809 - DNA, 281 bp, Glycine max
  unsure (1)..(281): unsure at all n locations
gcagaacgaggagaagcagaaggagcaaaagcaatggcgccgaagaagccgagaaccacgacaaggaaccctgatttggttagggggattggcaagtattcgaggtcgcagatgtaccacaagaggggcatctgggccatcaaggccaaaacngtggcgttttgccccgccacgatcccaagcccaagcccgaggccccggcccagaagccgcccaagttctaccccgcggacgatgttaagaagcccctcgtcaacaagcacaagcccaaacccgcgaaa

SEQ ID NO: 276810 - DNA, 278 bp, Glycine max
atgccaccctcatgaacattgctgataaccccaccaatgtgcagcttcctggtatgtataacaaggaagagaatccccgtgtgcccatcatcgtcaccggtaacgatttctccacactctatgcgcctctcatccgtgatgggcgttggagaagttctactgggcaccaacaagggatgaccgcattggtgtctgcactggaatttttcgcaccgattcaattcctgaacaggacgttgtcaagattgttgacaccttccctggccaatccattgatt

SEQ ID NO: 276811 - DNA, 283 bp, Glycine max
  unsure (1)..(283): unsure at all n locations
gcagaacgaggagaagcagaaggagcaaaagcaatggcgccgaagaagccgagaaccacgacaaggaaccctgatttggttagggggattggcaagtattcgaggtcgcagatgtaccacaagangggcatctgggccatcaaggccaaaacngtggcgttttgccccgccacgatcccaagcccaagcccgaggccccggcccagaagccgcccaagttctaccccgcggacgatgttaagaagcccctcgtcaacaagcacaagcccaaacccgcgaaatc

SEQ ID NO: 276812 - DNA, 284 bp, Glycine max
  unsure (1)..(284): unsure at all n locations
ggcttcangaagagaatctcaatggaggcccaggagctgaagcgcgtgttccagatgttcgaccgcaacggcgacgggagaataacgaagaagganctgaacgactcgctggagaacctgggcatcttcatctctgacaaggacctgaccaaatgatccagaggatcgacgtcaacggcgacggttncgtggacatggacgagtttggggagctgtatcagaccataatggacgagcgcgacaatgaggaggacatgagggaggccttcaacgtcttcgaccag

SEQ ID NO: 276813 - DNA, 279 bp, Glycine max
aagaataccccctcttttgctgcatcagaggagttgtaaattaagagcatggctgcacaagcttcttgtatcatcatcttctcttaccttctcagcggaggctgcaagacaaagtcttggaccaagatcactccaatctccatttgcttctccagaaaagcctcctttcttgttaaggcagctgctaccccccctgtcaagcaaggatcagacagacctttgtggtttgcatcaaagcaaagtctttcttacttggatggcagccttccgggtgactat

SEQ ID NO: 276814 - DNA, 276 bp, Glycine max
  unsure (1)..(276): unsure at all n locations
ttcagatcaaacgcacacagttacgctcttcaaatcaatctcttctcagaaatnggtgtggctcaaaacattcccgatgcggaggagggaaccttggagattggaatggaatacagaactgtgtctggagttgctgggccattgtcattcttgataaagttaagggacctaagtttcaagagattgttaatattcgcttgggagatggaactactcggcgtggacaagtgctagaagttgatggtgaaaaggctgttgttcaggtctttgagggta

SEQ ID NO: 276815 - DNA, 275 bp, Glycine max
  unsure (1)..(275): unsure at all n locations
gctgggctggctactatgattgctgctatgcgacctgatattgataacattgntgantatcttaggaacactantgctagggccttagtgttgttgcttctgcacttggtattcctgcactgttgccattcttgaaggctgtggtcagagtaagaaatcatggcaagctaggcacacagggattaagatcgtgcagcagatcgccattttaattggttgtgcggtgttgccacatctgagatctcttgtggaaattatagagcatggtctgaatg

SEQ ID NO: 276816 - DNA, 262 bp, Glycine max
aagaaggggaaatgactgataagaacgggacaaagaaggaaacactttcgtctcgatttggttggtaaatcttcatctcaatacaaagatgcagatattctcgtcttcaacactggccactggtggaccatgataaaacttctaaagggcaggactattaccaagaaggtagccatgtgtatgctgaattaaacgttcttgaggcattcagaagagctttaacgacttggagcaagtgggttgatgccaacataaatccgtc

SEQ ID NO: 276817 - DNA, 276 bp, Glycine max
gtgaaaccccagtgacttgggaaaagggcagcaaccatggatgaggtcctccaggaggcagatataattagtcttcatcctgtcttgggtaaaaccacttatcatctagtcaacaaggaaagactagctaagatgaagaaggaacaattcttataaattgcagtagagggcctgttattgatgaagctgcacttgtggagcatttaaaacataacccaatgtttcgagtaggccttgatgtgtttgaggaagagccctacatgaaacctgggcttg

SEQ ID NO: 276818 - DNA, 274 bp, Glycine max
atagtagaaggtcggggatagtaaagagagaaatccgaatagaaaaagaagctagctagggtttcggcgcgaagaagaatggggaagaagaaggtggagataaagcgaatcgagaacaaaagcactcggcagataacattctccaagaggcgcaatggattgatgaagaaagctcgcgagctatccattctctgcgatgcgaaggtggcgctgctcatcttctccagcaccggaaagctctacgagctctgcaacggtgacagtttggccgagg

SEQ ID NO: 276819 - DNA, 293 bp, Glycine max
  unsure (1)..(293): unsure at all n locations
cttcaattngctacttcaattctggattgcaaccacgacactactnccaccttccaacatgggcggtatcngccttgaggaaatcaaaaacgaaaacgtcgatctggaaaaaattccagtagaggaagtgttngagtcgctgaaatgttcaagagcaggtttaacatcagacgaaggagccagccggcttcaagtttttggaccaaacanattggaagagaaanaggagagcaaacttttgaagtttctgggtttcatgtggaaccccttatcatgggtcatggaagctgctg

SEQ ID NO: 276820 - DNA, 288 bp, Glycine max
ctgagaatgggatggtgagtagtgagggtgaaaccagtttcacttgtgtcatgaagtttggtggctcctctgtggcttctgctgataggatgaaagaggtggctacccttatattgagttttcccgaggagaggcctattgttgttctctctgctatgggaaaaacaacaaacaagcttttgctggctggagagaaagctgtgagttgtggtgttatcaatgtatcaagtattgaggagctttgctttataaaagacctgcatctaaggactgtggatcagcttggtg

SEQ ID NO: 276821 - DNA, 286 bp, Glycine max
cacctaatcaactcagtgtaatgcaaggattcaggacagatttcttaagggcatttagtgtggttggcaacgccgcatctaaagggcattttatagatggttgctatgcacactgccaaactggaatacaagagacatggctgagaaatgactccccagtggtggccaagacatcaattgcaaaggcagtgggtgattggttttatgatcgaaggcccttccgtgagatagattgtgcctacccttgcaaccctacttgccataatcgtatttttgatcagaatga

SEQ ID NO: 276822 - DNA, 285 bp, Glycine max
  unsure (1)..(285): unsure at all n locations
gtgagaagagaatggagagtaaagaggaagatgttaacgttggagcaaacaagttctcagaaaggcaaccaattggtacagcagctcagggtggtggtgacaaggactacaaggaggcacccccagctcctttgtttgaacctggtgagctcaaatcatggtccttctacagagctggaattgctgagtttgtggcaactttcttgttcctctacattaccatcttaactgtcatgggtgtnaacaggtcaccctccaagtgtgcctctgttggcattcaaggca

SEQ ID NO: 276823 - DNA, 271 bp, Glycine max
  unsure (1)..(271): unsure at all n locations
gtgntnatggcagcgtcacnncaagcagcagctactntccatgcaacccaccaagttgagcangngcaacactttgcagcaaaagnctactcagtccatttccaaggctntnggtntngaacctgttggagcnnaaaaggtcacatgctcccttcaggctgatcttaaggacttggctcanaagtgtgtngatgctaccaaaattgcaggatgcgcccttgccacctctgccctcgatgtcnctggggcaagtgctgaaggtgttccaagg

SEQ ID NO: 276824 - DNA, 288 bp, Glycine max
gagctcgaagtgatccactccaggtgggccatgctcggggccttgggctgcgtcttccccgaactgttgtcccgcaacggggtcaagtttggagaagctgtgtggttcaaggccgggtcccagatcttcagcgagggtgggctggactacttgggcaacccaagccttgtccacgcccagagcatcctcgccatctgggccacccaagttatcctaatgggtgctgttgagggttatcgtattgctggtgggcccctcggtgaggtcactgacccaatctaccctggt

SEQ ID NO: 276825 - DNA, 286 bp, Glycine max
atgaccgaaatgaatggcgtttattgttctagtaggcccatgcgaataggtgttgcaactcccaagaaaacttatggcttccaacaacaatattcttctcaagctgtggtattggctgggggacactcagctaatggtgctgtggcccaaggttcccattctgaaggggatataaacaacactactatatttgttggagggcttgattctgataccagtgatgaggatctcagacaaccatttttgcaatttggtgaggttgtctctgtgaaaattccagttggta

SEQ ID NO: 276826 - DNA, 286 bp, Glycine max
gaagttggaagtcatggcagcaacattgatggcagcaacaacaagttctggtactcttaaagcaactcctttccttggccaaggcaagggtgccaatgccaatgctcttagggatgttgtctccatgggaactgggaagtacaccatgggcaatgatttgtggtatggaccagacagagtgaaatacttgggacccttctcagctcagaccccttcatacttgaaaggagaattccctggggattatggatgggacactgctggcttatctgctgacccagaagca

SEQ ID NO: 276827 - DNA, 285 bp, Glycine max
gagaagccctccgccattcagcagcgggccgtcacgcccatcattcagggccgtgacgtcatcgctcaggcccaatccggaacggggaaaacgtccatgattgctctcaccgtttgccaggtcgtcgatacctccgtcagagaggttcaggcattgatattgtcaccaacgagggaactggcctcacagactgagaaagttatattggctattggggatttcattaatatacaagctcatgcatgcgttggtggtaaaagtgtgggagaagatataaggaaactt

SEQ ID NO: 276828 - DNA, 282 bp, Glycine max
aatcagtggatcttcaagacctcttgcttcggctcacttttgacaacatatgcggcttggctttcggccaagacccgcaaaccctagccgtggggctcccagataacgctttcgctctctccttcgatcgagccaccgaggccactctacaacgctttattttacccgagatcttgtggaagctgaagcgatggctcaggctcggaatggaagtgagcctgagccggagcctgaaacacatcgacaattacctctcccacatcatcaagaaccgcaagctgg

SEQ ID NO: 276829 - DNA, 283 bp, Glycine max
tttctcctctctccgattccttttattaattggagttttctcgctcctttttctttccctgaaaacatttcatcttcgtattgatgtcggaaaagggtcggccacttcccaaatttggtgaatgggatgtcaatgatccagcctcagctgaggggttcacagtgatttttaataaggccagggatgagaaaaagacaggtggcaacccagagtcaccaggaaagactgctactgatcctcatagcaaacctgcagtagagcctggcaaaactcagactaaaaa

SEQ ID NO: 276830 - DNA, 289 bp, Glycine max
ataagattaaagattcaacaatggcctctgcttctgctactcttctcaagtcatctcctgttcttgacaagtgcgagtgggtcaaaggccagacccttcgccaacctctcgtgagatgtaacccttcctcagcatcagctctcaccatcaaagctgcttcctatgctgacgagctcgtcaaaaccgcgaaaacagtggcctcaccggggcgtggtattttggcgatggatgagtcaaatgcaacctgcgggaagcgtttggcatctattgggttagagaacacagaagc

SEQ ID NO: 276831 - DNA, 286 bp, Glycine max
  unsure (1)..(286): unsure at all n locations
caacttctgctacttcctactccaaccgcacttctgctccgcaattatcatgggcaaggtcaagatcggaatcaacggatttggaagaattggccgtttggtagccagagtggctctgcagagagacgatgttgaactcgttgccgttaacgaccctttcatcaccaccgattacatgacanacatgtttaaatacgacagtgttcatggacactggaagcatcacgatgtcaccgttaaggacgagaagacccttctcttcggngacaagccagtcactattttt

SEQ ID NO: 276832 - DNA, 288 bp, Glycine max
tagccttgttgcagccatggccacccacgcggctctagcttctacaaggatccccactaacaccaagttcccatccaaggcttcacactctttcccaacccaatgcgcctcaaagagacttgaggtgacagaattctctgggctaagatccacttcatgtgtgacatatgctaacgatgctagagaatcttccttttttgatcttgtagcttcccaactcactcccaagaccaatggatcatcaactcctgtgaggggagagacagtggccaagttgaaggtggcaat

SEQ ID NO: 276833 - DNA, 284 bp, Glycine max
  unsure (1)..(284): unsure at all n locations
agttctcatcggaaaatggacgttcaccgaagacccattccttcttccggcgaacaccgacaaacccagaagctgaagnnnnnnnnnnnnnnnnnnnnngattcgaaatcgcaatcgcaggcgcttctgcctctctacctcaccaacgccctcttcttcggggtgttcttctccgtcgcgtacttcctcctccaccgctggcgcgagaagatccgcaccgccactcccctccacgccgtcagccccgccgagaccgccgccatagtctccctcgtcgcctccgc

SEQ ID NO: 276834 - DNA, 288 bp, Glycine max
tgaggtcgtagaaagaatggcgaaaacgacgtcgttgttgctctttacactgctcctcttcggaaccttagctctcatccaggcgaagaaatcgaaggaggatttgaaggaagtgacccacaaggtttactttgatgttgagattaatggaaaagaagcaggtcgtattgtgatgggtctttttggaaaggctgttccaaaaactgcagaaaactttcgagctctttgcactggggaaaagggaactggtaaaagtggcaagcctctccattacaaaggtagctcatt

SEQ ID NO: 276835 - DNA, 286 bp, Glycine max
ctccaactccactagtgaagtacagaaaagaagaattggaaaatctaagaggagatggaaaaggagagcgcaaggaatatgataggatctatgattatgatgtctataatgatttgggtaacccagacaagagcaatgatctagctcgtcctgttcttggagggtctagtgcctatccatatcctcgcaggggaagaactggtagaaaaccaacaacaaaagactctaagagtgagtcaccatccagcagcacctacatcccaagagatgagaactttggtcactt

SEQ ID NO: 276836 - DNA, 286 bp, Glycine max
  unsure (1)..(286): unsure at all n locations
gtgaaccaagttgctgacaaatattgggatctgtattctaacgagtcacttgagcatgaccttcccggtcaccttctccgctaccccatcggggttgccagtgaaggagatgtcaccgagctgccaggatttgaattctttcccgacaccaaggctcgcattcttggtggcaaagnttcgntacctcccccctattctcactacttaatttgattttgtactttgttacaaacttgttattgcttacatcctaatctgtgttttcattactacttagtaataatct

SEQ ID NO: 276837 - DNA, 284 bp, Glycine max
ataagctagtttatcgtgaggagaatatgaagttgtttgttttctttgttgctgcagtagttttggtagcatggccatgccatggcgcaggctaccaaaggttccctctccgaatgaaaactggctatggtgagcgttcttcggaggtaaaatgcgcaagttttaggcttgctgtggaagcacacaacatccgagcctttaaaaccattcctgaagagtgcgttgaaccaacaaaggactacattaatggcgaacaatttagatcagactctaaaacagttaac

SEQ ID NO: 276838 - DNA, 281 bp, Glycine max
  unsure (1)..(281): unsure at all n locations
gttacttgcacgttggagaggagttgcagttggaccataaganatccccgtttctcaaccctgacggggatgcttcctgcgcccataacttggaggctcacttgcacttgctagatggataccatgggaagaatcgtggatttgagcgaacaagtgagagggaccttgcnctggtgaacaaggactgtgacttcttgaaagatgagcattcggtgccaccacggtggaggcaagacttgaacaaaaacatggtcaggactgaagatggacgctgggtgctc

SEQ ID NO: 276839 - DNA, 285 bp, Glycine max
  unsure (1)..(285): unsure at all n locations
gagacagtggccaagttgaaggtggcaatcaatggtttcggacgcattggtagaaacttccttcgctgctggcacggccgaaaagactcaccccttgangtcgttgttgtcaacgacagtggtggtgtcaagaatgcttcgcacctgcttaaatatgattccatgctgggaacttttaaagcagatgtgaaaatactggacaatgaaaccatcactgttgatggtaagcccatcaaggttgtttcaagcagggaccctcttaagcttccttgggctgaacttgga

SEQ ID NO: 276840 - DNA, 286 bp, Glycine max
gttttctcttcctcgttcgtttcatttcgtttcgttgaagagcaacttttctctctctgtctctgtacaattctcccttttcttccctcgtagatcgaaagggaatattcttccatggcctccaagcggattctgaaggagctcaaggacctacagaaagaccctccaacctcttgcagtgccggtcccgtagcagaagatatgtttcattggcaagcaactataatgggtccccctgatagcccttatgctgggggtgtttttctagttactattcattttcctc

SEQ ID NO: 276841 - DNA, 283 bp, Glycine max
gaaggtgaaagatattgaacttcaagtgacagaaagattcagggacagagtggtggaggaaggttataaccctagttatggagctagacctctaagaagagccataatgcgacttttggaggacagcatggctgagaagatgcttgccagagagatcaaggagggcgactctgttatagtggatgttgattctgatggtaatgtgattgtgctcaatggtagcagcggacccccgaatccttgccagagacgcttcctgtataatgcggttaatttgctaata

SEQ ID NO: 276842 - DNA, 283 bp, Glycine max
tatcatcactgactgcttccctgaggtttgatggagccttgaatgttgatgtcaatgaattccagaccaaccttgtgccataccccaggattcattttatgctttcatcttatgctcctgtaatttcagccgagaaggctcaccatgagcagctatcagttggtgaaatcaccaacagtgcattcgagccatcatctatgatggccaagtgtgatccccgccatggcaaatacatggcgtgctgtctcatgtacagaggtgacgtagtgcctaaagatgttaa

SEQ ID NO: 276843 - DNA, 282 bp, Glycine max
tttgaacatcgttttgcagccatggaaacaggcatagcatgctacactcgcgggcctttcttgcctagtgtttcttccaagcactctccaccttccatttctccatcttttggcttgaggagtctgaaatcaagctctttatttggagaatcgctaagagtggcctccaaatcaacaataaaggtttcaaagacaaagaatacttcactcgtgaccagatgtgaaattggtgacagtctcgaagaattcctcacaaaagcaacaccagataaggggttgatc

SEQ ID NO: 276844 - DNA, 259 bp, Glycine max
ggaaattaaaaatggaagacttgctatgtttgccatgcttggtttctacttccaagcttatgtcactggagaaggtcctgttgagaaccttgcaaaacatctcagtgacccttttggcaacaacttgctcactgtcatttctggatctgctgagagagctccaactctctaaatcattcatcttcatgtttttctccaatcttacttaatgtacaatacatatcactgagatattaaggcatttggctttgttccttgg

SEQ ID NO: 276845 - DNA, 259 bp, Glycine max
  unsure (1)..(259): unsure at all n locations
ggaaattaaaaatggaagacttgctatgtttgcnatgcttggtttctacttccaagcttatgtcactggagaaggtcctgttgagaaccttgcaaaacatctcagtgaccctnttggcaacaacttgctcactgtcatttctggatctgctgagagagctccaactctctaaatcattcatcttcatgtttttctccaatcttacttaatgtacaatacatatcactgagatattaaggcatttggctttgttccttgg

SEQ ID NO: 276846 - DNA, 270 bp, Glycine max
ggagaattagagttgccacctgggttcagatttcaccccactgatgaagaattggtgaatcactacttgtgtaggaagtgcgctggtcaaccaatcgcggttcccgtcatcaaagaggtcgatttgtacaagtttgatccatggcagcttccagaaattggtttttacggcgagaaagaatggtacttcttttctcctcgggaccggaaatacccgaacggttcacggccgaaccgcgccgccggaagcggctattggaaagccaccggc

SEQ ID NO: 276847 - DNA, 267 bp, Glycine max
gagaactgtaagttgctgttagttgacaaaaagataaccaatgcaagggatcttatcaacatactggaggatgctattagaagtggataccctatattaattattgctgaggatattgaacaagaaaagcagcaacaatgtcgggtcgcggaaagggtgggaagggtttaggaaagggaggagcaaagaggcatcgcaaggtgctccgcgacaatatccagggaatcacgaagcccgcgattcggagactggcgagaagaggtggcg

SEQ ID NO: 276848 - DNA, 267 bp, Glycine max
gagagacaagtatcgattattgatctgaaacgaaaaaaagagcaacaactgtgaaatctgtggaatcaaaggggcaagctgagaagtgtgccaagagaaagaggaagaaccagtatcgcggaatccgccagcgtccatggggaaagtgggctgctgagattcgcgacccaagaaagggggttcgtgtttggcttggaactttcagcactgctgaagaagctgcaagagcttacgatgctgaagcaaggaggatccgtggcaagaaag

SEQ ID NO: 276849 - DNA, 272 bp, Glycine max
ttcttcttcccttttctctcttctctctctttctccggcgacgatctcagattccggtccactcctgctcgccggcgatcccttattcctccgtcctccgtcgagtcctttccgattcgaatcgttcccagccttgtgccaccatgaatcccgaatacgattatttgttcaagcttttgctgattggagattctggtgtaggcaagtcatgtcttctcctgaggtttgctgatgattcataccttgacagctatatcagtaccattggagtg

SEQ ID NO: 276850 - DNA, 269 bp, Glycine max
  unsure (1)..(269): unsure at all n locations
cactaccactaaagtttacattgtttactattctatgtacggacatgttgagaagctagctgaagagattaaaaaagganntgcttctgttgaaggagtagaagcaaagctatggcaggtacctgaaacactgcctcaagaggtccttgggaaaatgggagcacctccaaagagtgatgtaccaattattacacccaacngagctacctgaggctgatggcttattgcttggtttccccacaagatttggactgatggctgctcaattc

SEQ ID NO: 276851 - DNA, 268 bp, Glycine max
acgacattcattcatctatggctacccttattgctcccagcaaccactctccccaagaagacgctgaggctctcagaaaggcttttgaaggatgggggactgatgagaaaactgtcatagtaatattgggtcatagaactgtttatcagaggcagcaaatcagaagagtctatgaggaaattttccaggaggatcttgtgaaacgcctagagtctgagatcaaaggagactttgagaaagccgtgtaccgatggatactagaacctgc

SEQ ID NO: 276852 - DNA, 265 bp, Glycine max
  unsure (1)..(265): unsure at all n locations
cgaaagattttatccaatnganattttaaaaatgactgggataaacttaaganttcaattattgaaattgaataagtagacaatttaattggattggtcgaatggnatcanaaaaatggagtactaactcccatttcttatttattattgantnaaccgatcnacttgctttgtnatcgaacatttcttgttgattncaaaaatttnccggaaaanatttgaatctantnttatatgcgaatcaatcctactacttctggtcctg

SEQ ID NO: 276853 - DNA, 269 bp, Glycine max
  unsure (1)..(269): unsure at all n locations
aagggattctgtttgctgcaatcggattcactccgcagctgcagcactcaaaaccctagagaggacgagagagcgtgcaactttcggcaaccacagaccatgacattcaagcgcaggaatggaggtcgcaacaaacacggccgcggccatgtcaaattcatnccgatgctccaactgcggaaaatgctgccccaaggacaaggccatcaagaggtttttggttaggaacattgttgaacaggctgcagtcagagatgtgcaggaagctt

SEQ ID NO: 276854 - DNA, 270 bp, Glycine max
  unsure (1)..(270): unsure at all n locations
ctcttcctcagtagtgcgattttcgattctcttctctgcanctatgcctaaccctaaggtcttcttcgacatgaccatcggcggtcaacctgccggccgcatcgtgatggagctctacgccgacgtgactccgagcaccgccgagaacttccgcgngctctgcaccggcgagaagggcgccgggcggagggcaagcccctccactacaaaggctcgtccttccaccgcgtgatcccgaacttcatgtgccagggcggcgacttcaccgcg

SEQ ID NO: 276855 - DNA, 268 bp, Glycine max
  unsure (1)..(268): unsure at all n locations
gtnccattcctccaaactcaaattacacatacaagtttcaggccaaggatcagattggtacatatacatactttccatcaactcaactgcataaagcagctggagggtttggagcactgaatgtttatcatagatctgtcatcccaatcccttatccaaaccctgatggagattttactttactcgttggtgattgntacaaaaccaaccacaagacgctaaggcaaactttagaatctggaaaacctcttgcatttcctgatggcct

SEQ ID NO: 276856 - DNA, 267 bp, Glycine max
  unsure (1)..(267): unsure at all n locations
agaaaaaanaaaacccttancnanacncaaccatcatggccacctctgctattcagcaatgcagcattcactggtnaaactgctntgaagcagctnaatgagttcgnccgcaagaccggtggcgccggcaaaggtcgcactaacatgcgncgcaccgtcaanagngctcctcagngcatttggtatggccctnaccgtcccaagtacttgggtccattctcggngcagatnccatcatacctgaccggagaattccctggngatacg

SEQ ID NO: 276857 - DNA, 267 bp, Glycine max
  unsure (1)..(267): unsure at all n locations
gcatatcatgtgactgagccgcgtcctgatggggctggtgttattctttgcattgaaanggcattagctcagtctggagtatcaaaagaggatgtgaattacataaatgcacatgccacatccacaccagctggagatcttaaggagtaccaagctctaatgcattgttttggtcaaaaccccaagttacgagtgaattctacaaaatctatgattggtcatctactaggggcagctggcgctgtggaagctgtggccacaatacag

SEQ ID NO: 276858 - DNA, 267 bp, Glycine max
  unsure (1)..(267): unsure at all n locations
cttctctgtttatggcaaaaaccctgagaaattcangtgnctgttgaacagttacatgtcttctgtgaggaagatggcatgtgagattcttgagttgatggcagaagggttgaagattcagcaaaaggatgtgtttagcaagcttctaatggataaacaaagtgactctattttcagggtgaatcattacgctgcttgtcctgaaatgactctgaatgatcagaacttgattgggtttggagaacacacagacccacaaatcatctc

SEQ ID NO: 276859 - DNA, 265 bp, Glycine max
  unsure (1)..(265): unsure at all n locations
cttctctgtttatggcaaaaaccctgagaaattcaggtgnctgttgaacagttacatgtcttctgtgaggaagatggcatgtgagattcttgagttgatggcagaagggttgaagattcagcaaaaggatgtgtttagcaagcttctaatggataaacaaagtgactctattttcagggtgaatcattacgctgcttgtcctgaaatgactctgaatgatcagaacttgattgggtttggagaacacacagacccacaaatcatc

SEQ ID NO: 276860 - DNA, 266 bp, Glycine max
ggagacgataaagaactttgcggtgatatacctggtggacataacggaggtgccggatttcaacaccatgtacgagctctacgacccttccacggtgatgttcttcttcaggaacaagcacatcatgattgatctcggaaccggtaacaacaacaagatcaactgggctctcaaggacaagcaggagttcatcgacattgttgagaccgtctatcgtggagccaggaagggacggggtctcgtcatcgctcccaaagattactcca

SEQ ID NO: 276861 - DNA, 264 bp, Glycine max
cctgtttcttgcactcatagcattgtcagtaggatgatgatcaatgaggagcttcatgcaagctgggaccagccaactgggtgcattcttttccaagattttgaacactctaggctgcaggccttggcattccagttgacagagaaattatctatccttgcagagagtaatgaaagagcaacagaggcaaggataggtggtggtggattggatctgcctctaaggcgcagagatggccaggactatgccgctgccgctgctggt

SEQ ID NO: 276862 - DNA, 235 bp, Glycine max
aaagaatggtacttcttttctcctcgggatcggaaatacccgaacggttcacggccgaaccgtgccgccggaagcggtattggaaagccaccggcgccgataaggcgatcggaaaaccgaaagcgctagggatcaagaaagctctggttttttacgccggaaaagcccccaaaggagtgaaaaccaattggatcatgcacgaatatcgcctcgccaatgttgaccgatctgcctc

SEQ ID NO: 276863 - DNA, 265 bp, Glycine max
  unsure (1)..(265): unsure at all n locations
ctgagttttgacaacttgcctgtggatattcaacacctacgttgtaaagtaaacttccaagctttaacctttgtttnccatatcagaacacttggagatgcccttatcagccgccttcgctatcctcaaggctcagctgaagaaatgggcttcaactaccttcaagaggtcactggtgcaggtgctaggaaaaatgcagggaaatttgttgttctacacctccgatttgataaggatatggcagcccattcggcctgcgattttg

SEQ ID NO: 276864 - DNA, 261 bp, Glycine max
aagcactatgttcatatattgacaaggatcgtccatttctgggcatttgtccttggacttcaactactttttgaatctagtgaggagaatggaccagtaaaaggtcttggcttaatacctggaactgttgggcgatttgactcatcaaatggttttagagtaccacatattggctggaatgctttacaaatcactgaggactcgggaattttggatgatgttggaaatcaccatgtctattttgtgcactcttatcgtgcc

SEQ ID NO: 276865 - DNA, 265 bp, Glycine max
ggaagatctacctgggctgctttttggttgattttacttggcgtagttatgattgctggtggggcattccttgtgtacaagtacagaataaggcaatacatggattcagaaatcagagcaatcatggcgcaatatatgcccttggacagccaagcagaagttccaaatcatgtcaatgatcaaagagcatgaaggcaaaaatgggccaatcccttggaatttcacggcaggcagcatgggtgtgacttttcctgtgccattttga

SEQ ID NO: 276866 - DNA, 273 bp, Glycine max
actgaaagcactcagtagggtttgcggtttcagagtttgtgacgcacgcatccatggccaccaccaccaacgccgccgcagccccgccgcgccagtctcccagaaggaagccgacatccagatgatgttagccgccgacgtccacctcggcaccaaaaactgcgacttccaaatggaacgttacatcttcaagcgccgcaacgacgggatttacattattaaccttgggaagacatgggagaagcttcagttagcagctagggttattgttgc

SEQ ID NO: 276867 - DNA, 267 bp, Glycine max
gaaatggcaacagaaacaaaagtgcaagaattaggtggcatcaccgatgtgcatggagctgccaacagcgtcgagatcaacaatctcgctcgctttgctgtagaggaacaaaacaaaagagagaattcagttctggagtttgtgagggtgattagtgcaaagcagcaagtggttgctggagtgaattactacataacattggaagcaaaagatggtttgattaaaaatgagtatgaagcgaaggtttgggtgagggaatggttgaac

SEQ ID NO: 276868 - DNA, 266 bp, Glycine max
  unsure (1)..(266): unsure at all n locations
gatcancaagaacctcaaccaggatgagtttgaggcactgctccaggagttcaagactgactacaaccagacacactttgtgaggaacaaggagttcaaggaagctgctgacaaacttgaggggccactcaggcagatctttgtggagttccttgagaggtcctgcactgctgaattctctggcttccttctctacaaagagcttggaaggaggctcaagaaaaccaaccccgtggtggcagagattttctctctgatgtctaggg

SEQ ID NO: 276869 - DNA, 262 bp, Glycine max
  unsure (1)..(262): unsure at all n locations
actttggctgccatggtgggttgccatcacaagcctttgagtacattaaatacaatggtggactagagacagaggaagcatatccctacacaggaaaagatggtgtctgcaaattctcagctgaaaatgttgctgttcaagtccttgactctgtgantatcaccttgggtgctgaagatgaactaaaacatgcagttgcatttgttcggccagttagtgtggcctttcaggtggtgaatgggttccatttctacgagaatgg

SEQ ID NO: 276870 - DNA, 265 bp, Glycine max
gttccaaacaaaacccatcaaagtctttctccctcagtgatcatatattcattcagttctatacaaaatcctcaaaaactcttcctctctgccatgaccatggaatacagaaccttagaactcaacatcatatccgcaaaggacatcaagaatgttaatctcttctccaagatggacgtatacgccgccgtttcgctctccggtgaccctctccaccctcagggcgccaccacccacgtccacaaagacgccggcagcaacccca

SEQ ID NO: 276871 - DNA, 256 bp, Glycine max
  unsure (1)..(256): unsure at all n locations
ccgagtttgaaatcatcgccaacgaccaagggaacagaacgacgccgtcanacgtcggcttcactgataccgagcgtctcatcggtnatgcggctaagaaccaagtcgccatgaaccccatcaacaccgtcttcgatgccaagaggttgattggtcgtagattcagtgactcctctgttcagagtgatatcaaattgtggccttttaaggtcattgctggtgctgctgacaagccantgatcgtggttaactacaa

SEQ ID NO: 276872 - DNA, 268 bp, Glycine max
  unsure (1)..(268): unsure at all n locations
caaccaccacacaattcctacacatttctactcnttagtttctccaattttctttctcaattgctcaacaatggccactacaacacaacttcacttaccccctggattcagatcccatccaacagatgaagaactcgtcatccactacctttgtcgcaaatgcgcttcgcaacatatcgcggttcccataatcgccgaaattgatctgtacaagtacgacccttgggaccttccaggaatggctttgtacggagagaaagagtggtat

SEQ ID NO: 276873 - DNA, 269 bp, Glycine max
  unsure (1)..(269): unsure at all n locations
ggtgtgcagaagagcgtcgcagttgtaaccctaatcagaagaagcgcanttcaagcgagtgacagccaccagccatgggtcgtatgcacagccgcggtaagggtatatcctcttctgctttgccctacaaaaggacacctcctagctggctcaagatctcttcgcaagatgtcgaagaaaatatctgcaagtttgcgaagaaaggtttgaccccgtctcagattggtgtcattctcagagattctcacggtattgctcaggtcatagcg

SEQ ID NO: 276874 - DNA, 275 bp, Glycine max
  unsure (1)..(275): unsure at all n locations
ttcttctcttgcggctagggttttagcgcanttcttctagatttaaggaagatgggtaaggaaaaggttcacatcagtattgtggtcattggccatgtcgactctgggaaatccactaccactggtcacctgatttacaagcttggaggcattgacaagcgtgttattgagaggtttgagaaggaagctgctgagatgaacaagaggtctttcaagtatgcctgggtgctggacaaacttaaggctgagcgtgaaagaggatcaccatgatatgc

SEQ ID NO: 276875 - DNA, 284 bp, Glycine max
  unsure (1)..(284): unsure at all n locations
aaaaaaaaaccctctctttctctctcttccaaaacctaattttcatttttnctcttcaaacaaattttccaaaatgcgtganatccttcacatccagggtggccaatgcggcaaccagatcggcgccaagttctgggaggtggtttgcgcggagcacgggatcgaccccactggaaggtacggtggggactcagagcttcagctcgagaggatcaatgtctactacaacgaagccagctgcggccggttcgtgccgcgcgcggttcnatggacctcgaaccggg

SEQ ID NO: 276876 - DNA, 290 bp, Glycine max
taagaattacaacaagctggtgtctcttggcttcaagattatattcttgtcaggaagaacactggacaaacaggccgtaacagaagcaaacttaaagaaggctggctaccacacatgggaaaaattaattctcaaggatccacaagatccttccactccaaatgcagtttcatacaaaacagcagcgagagagaaactgataaggcagggatacaacattgttgggatcattggagaccaatggagcgatctcctcggaggccacagaggcgagcaggacctttaagctt

SEQ ID NO: 276877 - DNA, 282 bp, Glycine max
gccatgggctggcccatggtaaccttctggtgggcccattcgtgaaggccgggcctctgaggaacaccgagatcgccgggcaagcaggctctctcgccgctggtgggcttgtggtgatcctcagcctttgcctcacaatctatgggatttcatcttttaacgaaggagacccatccactgccccgtcactgaccttgacgggccgcaagaaggagcccgatcagctccaaactgctgatgggtgggccaagttcaccggaggcttctcttcggagcatttcg

SEQ ID NO: 276878 - DNA, 284 bp, Glycine max
  unsure (1)..(284): unsure at all n locations
ctcgagcgagnaaattgctttgctgtaagtttctgattcctttcttcagaattccaagttttcatttcgttagggacaaaagattgtgagatagagtatggctggaaaaggcgagggtcctgctatcggaatcgatttgggaacgacgtactcttgcgtcgnccgtgtggcaacacgatcgtgttgaaatcatagccaacgatcagggtaatagaactaccccatcctacgtggctttcactgatacagaacggttgatcggcgatgcgcgaagaaccaggtcg

SEQ ID NO: 276879 - DNA, 279 bp, Glycine max
  unsure (1)..(279): unsure at all n locations
cgaaagattttatccaattgaaattttaaaaatgactgggataaacttaaganttcaattattgaaattgaataagtaaacaatttaattggattggtcgaatggtatcaaaaaaatggagtactaactcccatttcttatttattattgaattaaccgatcaacttgctttgttatcgaacatttctttttgatttcaaaaattttccggaaaaaatttgaatctatttttatatgcgaatcaatcctactacttctggtccgaggtttctgcgctga

SEQ ID NO: 276880 - DNA, 279 bp, Glycine max
gaaagttgttgtaaagccttgttgctgccatggccacccacgcggctcttgcttctacaaggatcccttcaaacacaaggttcccatccaaggcctctcactctttcccaacccaatgcgccttaaagagacttgaggtgacagaattctctgggcttagatccacttcatgtgtcacatatgctaacagtgctagagaatcttccttttttgatcttgtagcttcccaactcactcccaagaccaatggatcaactcctgtgaggagagacagtggcc

SEQ ID NO: 276881 - DNA, 279 bp, Glycine max
atcactttctgtatatttggaatatgtctctggtggttctatccataaattacttcaggagtatggttcatttaaggagcctgttattcaaaattataccagacagattgtctctggacttgcctatctgcatggaagaaatacagtacacagggatattaaaggggcgaacatactagttgatcctaatggtgaaatcaaactggcagactttggaatggctaaacatataaattctctgcctcaatgcttcatcaaaggaatccatactggatggca

SEQ ID NO: 276882 - DNA, 286 bp, Glycine max
gaaagtagcaaagatgacaggtgggatgtttggaaggaaggggcaaaagataaaggggacagtggtgttgatgccaaagaatgtgttggacttcaacgccataacctccgtcggaaaaggcagtgctaaggacaccgccaccgatttcttgggcaaaggcttggacgcattaggtcatgcagttgatgctctcactgccttcgctggccatagcatctccttgcagcttatcagtgctactcagactgatggtagtggaaaaggaaaagtggaaacgaagcctatt

SEQ ID NO: 276883 - DNA, 278 bp, Glycine max
ggatctcttcaggaaatgtatggagccggtggagaaatgtttgagggatgctaagatggacaaaagaagtgttgatgatgttgtccttgttggtggttctaccagaattcccaaggttcaacaactgctgcaggacttctttaatggaaaagagctttgcaagagcattcatcccgatgaggctgttgcatatggtgcggctgttcaggctggcaatcttaagtggtgagggcaatgagaagttcaggatctctcctccgggagtcacccctcgtctc

SEQ ID NO: 276884 - DNA, 285 bp, Glycine max
  unsure (1)..(285): unsure at all n locations
aagaaagaggagcacaaaggagaacaccatggtgagcacaaaggtgaacacaaaggagaacaccatggtgagcacaaaggtgaacacaaaggagaacaacaccatggggagcacaaggagggacttgtggataagatcaaggacaagatccatggtgatggccatgacaagggtgnnnnnnnnnnnnnnnnnnnnnnnnnnnnnnnnnnnnntggacatgaccatcatggtcatagcagcagcagtgacagtgattagatcttatatgttagcagtgtacggtac

SEQ ID NO: 276885 - DNA, 280 bp, Glycine max
  unsure (1)..(280): unsure at all n locations
gtttgttgtgagctataagctagtttatcgtgaggagaatatgaagttgtttgttttctttgttgctgcagtagttttggtagcatggccatgccatggcgcaggctaccaaaggttccctctccgaatgaaaactggctatggtgagcgttcttcggaggtaaaatgcgcaagttttaggcttgctgtggaagcacacaacatccgagcctttaaaaccatcctgcnagagtgcgttgaaccaacaaaggactacattaatggcaacatttagatcaga

SEQ ID NO: 276886 - DNA, 267 bp, Glycine max
caaggttcctctcattcttggtatctggggaggcaagggacaaggaaaatctttccaatgtgagcttgtctttgccaagatgggaatcaaccccatcatgatgagtgctggagagttggaaagtggaaatgcaggagagccagcaaaactgatcaggcagagataccgtgaagccgcagacttgatcaagaagggaaagatgtgtgctctcttcatcaacgatcttgatgcaggagctggtcgtcttggtgaaccacccaatacatg

SEQ ID NO: 276887 - DNA, 279 bp, Glycine max
aaccattgaaggatttgcaagtggaccagttcatttcccctggcaattcatgggtacaattcaagaaaagatcttcctggaaagaggattttctttccaataagccatatttacccggggatacacctgctgggcttagattattgagggagaaagagctgagaaatctcagaggtgatggcaaaggagttagaaacttatctgacagaatatatgactatgatatatacaatgatttgggaaatccagataaaggaattgacttgccaggccaaatct

SEQ ID NO: 276888 - DNA, 283 bp, Glycine max
  unsure (1)..(283): unsure at all n locations
gtgtgcgaganatggcgatggcaatggcgcttcgcaggcttncatcntnaattgacaagccntctgcgccctnctcttcaatgccggttccctctactacaagtcgtctttgcctgatgaagctgtttacgacaaggagcgacccggagttacatggccgaagcagtngaatgctccacttgaggtcgtggatcctgagattggcngatattattgagcttgagaaagctaggcaatggaaggggctagaattgataccgtcaganaattcactctgtgtcgt

SEQ ID NO: 276889 - DNA, 285 bp, Glycine max
  unsure (1)..(285): unsure at all n locations
ctcgagcctcgaaacgaggtcgttttgtgttccgccgaangacncggaggttgtagacangctagcagctatggatttggcatccaatctcggtggcaagattgacaaagccgaagttctctctgncgttcagaagtatgagaagtatcatgtttgctatggaggtcaagaggaagagagganagctaattataccgatatggttaataaatactacgatcttgttaccagcttttatgagtttggctggggggaatcttccatttgcaccagatggaaagggga

SEQ ID NO: 276890 - DNA, 274 bp, Glycine max
  unsure (1)..(274): unsure at all n locations
caactcagtgaaagagaatccgaggcgaagagaagagaaaaattaagatggaggggaaggagcaggatgtgtcgctgggagcgaacaagttcccggagagacagccgattgggacggcggcgcagagccaagacgacggcaaggactaccaggagccggcgccggcgccactggttgacccgacggagtttacgtcatggtccttttacagancagggatagcagagtttgtggccattttctgtttctatacatcatgcttaaccgtcnggga

SEQ ID NO: 276891 - DNA, 275 bp, Glycine max
  unsure (1)..(275): unsure at all n locations
gttcatttctacacatccctagctctgtcgttccgtcgttgacgatggcgtttcgggtgcgaancctgacctccgctctctctttcttctctctctcttgtccatcgcttccgccaatgtcttcttcgaagagcgtttcgatgacgggtgggaaaatcgatgggttaaatcagattggaaaaaagatgagaacgtggctggggagtggaaccacacctctggtccaatggaatggagacgctaatgacaaaggtattcaaccagtgaggattaca

SEQ ID NO: 276892 - DNA, 275 bp, Glycine max
gtccgtttggtggctggcaacatggctactggacaactttacagtcatctaatacccctcacactacttcttgttgatggtagcagtccaattgatgttaccgattcacagtgggagctgtatattgtgtgtcagaagaaaactgatcagcagggagagatccaatataggttgactggttttactgctgtttatcgattttatcactatcctgatgattcccgattgcgactaagccagatactggtattacctccttacagcacaaggttagg

SEQ ID NO: 276893 - DNA, 279 bp, Glycine max
cagaaaaacaagtagttgagaactaagaagaaggaaatggcttcctcaatgatctcctccccagctgttaccaccgtcaaccgtgccggtgccggcatggttgctccattcaccggcctcaaatccatggctggcttccccacgaggaagaccaacaatgacattacctccattgctagcaacggtggaagagtacaatgcatgcaggtgtggccaccaattggcaagaagaagttcgagactctttcctacttgccagacctgatgatgcccattggc

SEQ ID NO: 276894 - DNA, 187 bp, Glycine max
  unsure (1)..(187): unsure at all n locations
cagggtctgtgacacacacagactcacttcaagttcccagcttttgcnatttnncccactgtntattgagangaactgcagaacatggcacagattttggctccctctacgcaatggcagatgagaatctcaaaatcctctcccaatgcaactccnattacatcaancatgtggagttctttattgt

SEQ ID NO: 276895 - DNA, 283 bp, Glycine max
  unsure (1)..(283): unsure at all n locations
gtagccctgaaaccttgagggaccctcgaggttttgccgtgaagttttacaccagagagggtaactttgaccttgttggaaacaaccttcccgtcttctttgtacgtgacggcatgaaatttccagatatggttcatgctcttaaacccaatcccaagaaccacatccaagagaattggaggatccttgacttcttctctcactttccagaaagccttcacatgttcacctttttatttgatgatttgggtgttccacaagattacngcatatggatggtttt

SEQ ID NO: 276896 - DNA, 278 bp, Glycine max
gaaaatgtgaggttttacaaggaggaagaaaagaatgatcccgagcatgcaaaaaagcttgcctctctggcagatctgtttgtgaatgatgcatttggtactgctcacagggcacatgcatcaacagagggtgttactaaatacctgaagccatctgttgctggttttctttgcaaaaggaacttgattacctgttggggcggtatcaagccccaaaaggccattgctgccatgttggtggttccaaggtctctctaaaattgagtgattgagtcatt

SEQ ID NO: 276897 - DNA, 279 bp, Glycine max
tgaaacgaagaagccctaactacgcacgcactcattcttgagaaagctcaatattcattcgtccatggcactctcttctcgtctcttttccaaatccaaattgatctatggctgtcaaatacttctgcaaaaggagcatgctattccagttcgtcactttgctaaagagtctgcccctcctgcccttaagggagatcagatgctgaagaacattttgtggaggtgaagaacaaatttgagactgccataggaatattaaagagggaagatcaccatgac

SEQ ID NO: 276898 - DNA, 305 bp, Glycine max
gaaaaacaagtagttgagaactaagaagaaggaaatggcttcctcaatgatctcctccccagctgttaccaccgtacaaccgtgccggtgccggcatggttgctccattcaccggcctcaaatccatgggctggcttccccacgaggaagaccaacaatgacattacctccattgctagcaacggtggaagagtacaatgcatgcaggtgtggccaccattggcaagaagaagttcgagactctttcctattgccagactcgatgatgcccattggcaaaggaatcgaatacttctaaggaaagg

SEQ ID NO: 276899 - DNA, 297 bp, Glycine max
gcacaatctgaggctgaaattcttcatgatgctgtaaaagagaagaagggtagctatgaagagaccattagggtcttgactacaaggagcaggacccaacttgttgcaactttcaaccgctacagagagatccatggcacttccatctctaagaaattggtggatgaaggatctgatgagtttcagagggcattgtacactgccattcgtgccatcaatgatcctattaagtactatgaaaaggtggtgcgcatgcaatcaaaaaggttggaaccgatgaggtgcactcatcgcgtg

SEQ ID NO: 276900 - DNA, 300 bp, Glycine max
  unsure (1)..(300): unsure at all n locations
cttgcaattgaagttgaagtcttgcccttctctcttcaactccaaacacaagacatcatcatccatggctgcctccgtctccactgtcggagctgtcaacagagctcttttgaacctgaatgggtctggacctggggtttcagctcccagttcatccttctttgggagcagcttgaagaaggttattggctcaagggtccccaacacaaagatttcctctggaagcttcaagattgttgctgtagaagagaaganagagattgaagagacccagcagaccgacaaggacagatggaaggg

SEQ ID NO: 276901 - DNA, 301 bp, Glycine max
gtgtgagtgagtgtatcaatcggccacacagaaatgggcagtgcttctctgattccagtttcctggttgccttggcggccactttctcctttcaagggaacggtgaaaaccttggtcgcaaaaccatggctgaagaagattcagcaagcaagacccctcatttccgtggttaacaaggctgcctctctatcttcccccgtgacagcacccagcgtcggcgttcggtttcggctggacaatttggggccgcaaccgggttcgaggaagagggctaagagaaagggtagaggaatatccgcag

SEQ ID NO: 276902 - DNA, 295 bp, Glycine max
  unsure (1)..(295): unsure at all n locations
gcaacagaaacaaaagtggcagtattaggtggcatcaccgaagtgcagggagctgccaacagcgtgcgagatcaacaatctcgctcgctttgctgtagaggaacaaaacaaaagagagaattcagttctggagtttgtgagggtgattagtgcaaagcagcaagtggttgctggagtgaattactacataacattggaagcaaaagatggtgagattaaaaatgagtataaagcgaggtttgggagagggaatcccaagagttgctagantcagccaacntaggtgcaggaggca

SEQ ID NO: 276903 - DNA, 295 bp, Glycine max
gaggcatcccaatattgtcaggttcaaggaggtaatattgacccctacacatttggctattgtgatggaatacgcttctggaggagagttatttgagcggatatgcaatgcaggacggtttagtgaggatgaggcacgcttcttcttccaacaacttatatcaggggttagctactgtcatgcaatgcaagtatgccatcgtgacttgaagttggagaacacattgctggatggtagtccagctcctcgtttgaagatttgtgattttgggtattcgaagtcctctgtgctacat

SEQ ID NO: 276904 - DNA, 305 bp, Glycine max
  unsure (1)..(305): unsure at all n locations
gnaacagaaacaaaagtggcagtattaggtggcatcaccgaagtgcagggagctgccaacagcgtcgagatcaacaatnctcgctgcgctttgctgtagaggaacacaacaaaagagngaattcagttctggagtttgtgagggtgattagtgcaaagcagcaagtggttgctggagtgaattactacataacattggaagcaaaagatggtgagattaaaaatgagtatagagcgaaggtttggganagggaatcccaaganttgctagaattcaagccaacattaggtgcnggaggcatcatc

SEQ ID NO: 276905 - DNA, 297 bp, Glycine max
atgagttcatgagggcaggattatatgatggatggctacctcatctatttgttggaaacttgctcaagggacaaactgttggtgtaattggagctggtcgaattggatccgcttatgcaagaatgatggttgaagggttcaagatgaacctaatttactatgatctctaccagtccacacgactagaaaagtttatcacagcctatgctacattcttgaaagcaagtggtgaaacccccgtggacttggaaaagggcagcaaccatggatgaggtcctccaggaggcagatataatt

SEQ ID NO: 276906 - DNA, 297 bp, Glycine max
  unsure (1)..(297): unsure at all n locations
tnatcttcaaaatggtgggaaatattatgtgttgccagtaatagagtcatcatatggtggaataagagtagccgcaactggaaaagaaagatgccctctcacanttgtacaatctgccgatccgtatgataaggggattgcaacaattatttcaaccccatatcgagttcctgttatccgcgaaggctttccnntgaacattacgttcggtaattttgcagttatactgccttgtgtcccccttcgttctgagtggaccgtcgttaatggccaaccagaaggacccgcagttaaaat

SEQ ID NO: 276907 - DNA, 283 bp, Glycine max
ctggggcaggagactttggtcctccaaattttggctttgaaactggaagacagtgaagctgctgagcaatattgtgctgagataggaagagctgatgcatatatgcagttgcttgaaatgtatttggatccacaagatgataaggatcccatgtttactgctgctgttcgccttctgcataatcatggagaatcattagatccattgcaagttttagagaaactgtctccagatatgccattcaacttggcttctgacactttactaagaatgttcagggcca

SEQ ID NO: 276908 - DNA, 292 bp, Glycine max
  unsure (1)..(292): unsure at all n locations
gggctgtgcaaattgcattgcaaagaattcgaaccntcgtgcttcaaaacaaggaggtcatngttcctancaaganacattncctggcacagtaacttgaggttgagcctcaaaaccagaaggtttgatgatatcatgatgtcacctcactcccctatacctcagtcccctttggttaaagccacaatttgagttgccatatttctctgcaccatctcagaagaagtaactgatatacgatgattatttggttcttgatttgttaacnggcaggtacataagtgctggattt

SEQ ID NO: 276909 - DNA, 229 bp, Glycine max
tgaattcgcgattgttctgtgcgagagaaagaagagagagatcgaaaatggcgttggctttcgacgagttcggaaggccgttcataatcctgaaggagcaggagcagaagagcagactccgaggattggacgctcagaaagccaacatctccgccggcaaagccgtggctcgcatcctccgaacctcctcggccccaaaggcatggacaagatgctccagagccccgac

SEQ ID NO: 276910 - DNA, 290 bp, Glycine max
gttgtgctgcggtgattcactcgtactttgcttaatatggcggttgagaagttgagcattgcaaaagatgtgactgaattaattggcaaaactccattggtatatctcaaccgcatcgtggatggctgtgttgccaaagttgctgcgaactagaaatgatggaaccttgctccagtgtcaaagacaggatagggtatagcatgattgtagatgctgaggagaaaggactcatcacaccgggtgaaagtgtcctcattgagcctactatggaaacactggcataggtttgg

SEQ ID NO: 276911 - DNA, 291 bp, Glycine max
attggagatgatgattttgagcagagttctcaaaagtgtaaatcaggaggggatgaatatgatgaagatgaacctgatgccaaaagatggaaaattgaaggtgaaaatgagggtatgtctgcccctggaagtagaacagtaagagaacctagagttgtagttcagacaaccagtgacattgatatcctagatgatgggtatagatggagaaaatacgggcagaaagtagtgaagggcaatccaaatccaggagttactacaagtgtacacacccaggatgtccagtgagga

SEQ ID NO: 276912 - DNA, 290 bp, Glycine max
  unsure (1)..(290): unsure at all n locations
ctgatttacaagcttggaggcattgacaagcgtgttattgagaggtntganaaggnanctgctgagatgaacaagaggtctttcaagtatgcctgggtgctggacaaacttaaggctgagcgtgaaanaggnatcancattgatattgctttgtggaagtttgaaacaacaaagtattantggcacagttattgatgcgcctggacatagggatttcattaagaatatgattactgggacatcccaagctgactgtgctgnncttntcatngattcgaccactggtggtt

SEQ ID NO: 276913 - DNA, 289 bp, Glycine max
attagttcattctctttgcgcagttccctacctctcctttcaagatgcagatcttcgtcaagaccctcaccggaaagaccatcacccttgaggtggaaagctctgacaccatcgacaacgtcaaggccaagatccaggacaaggaaggaattcccccggatcagcaacgtctcatcttcgccggaaagcagcttcgaggacggccgtaccctcggccgactacaacatccagaaggagtcaacccttcaccttgtccttcgtctccgtggtggcatgcagatcttcgtc

SEQ ID NO: 276914 - DNA, 286 bp, Glycine max
gaaatcaagctctttatttggagaatcgctaagagtggcctccaaatcaacaataaaggtttcaaagacaaagaatacttcactcgtgaccagatgtgaaattggtgacagtctcgaagaattcctcacaaaagcaacaccagataaggggttgatcaggttgttggtgtccatgggagaagcattgagaacaatttccttcaaagtgaagacggcttcatgtggtggaacacaatgtgttaatacttttggggatgagcagcttgcagtggatttgctagctatc

SEQ ID NO: 276915 - DNA, 283 bp, Glycine max
  unsure (1)..(283): unsure at all n locations
ctctgggggtccccanncctggaggcatgttcttcccagtgactcatggaatccatnctgtgaggcttggcaatgaggcctcaatctcccaaaatatcaaggtcaaacccggtcaactgtatgctctaattcttggggcctcaaggacttgtgcacaggatgaagttttgaggatctctgtgcctccacagactggtgatgttccttgcagacccttatagcctcaatggtgatgttatgcttgggggtttaaggccacttctagtgttgtcaaagtgatttc

SEQ ID NO: 276916 - DNA, 283 bp, Glycine max
  unsure (1)..(283): unsure at all n locations
gctggcatacgaaactgtggccaggatgggattaatgaaattaaattcctgatcaaagaggcgcacaaacgaggaatagaggtcatcatggatgttgttttcaatcatacagctgaggggaatgagaatggtcccattatttctttcnnaggtgtcgacaacagtatgtattacatgttagcacccaagggggagttctataactattcaggatgtgggaacacgttcaattgcaaccatccagttgtgcgacaatttatagttgactgcttaagatattggg

SEQ ID NO: 276917 - DNA, 282 bp, Glycine max
ctgctctagaaaattcagtgctgaaacatggcttcggctactctctctgtagccaaaccagcccttcaggcaaatgggaaaggcttctctgaattctctggcctccgaagctcatcaggcttccttcccttttctagaaaatcttcagaggatttccattctgtcattgccttccagacctatgcagttggaagcagtggaggatacaagaagggtgtgacagaagcaaaactgaaggttgccataaacgggtttggaaggattggaaggaacttcttgagg

SEQ ID NO: 276918 - DNA, 282 bp, Glycine max
ataacacaaagcacaaagcaaagctcatccttgagttaaaaaatggcagcagcttcttccatggctctctcatccccatccttggctggcaaggccgtgaagctgggcccatcagccccagaagtgggaagggtgagcatgaggaagaccgtcaccaagcaggtctcctcaggaagcccatggtacggcccagaccgagtcaagtacttgggcccattctctggcgagcccccgtcctaacctaaccggtgagttcccaggcgactaggctgggacatgctg

SEQ ID NO: 276919 - DNA, 262 bp, Glycine max
  unsure (1)..(262): unsure at all n locations
gtgagtttgttgatcgagataacanagaaacagtgtgatgacnaatgaaggtccttgtttacttcgttgctacaattttggtagcatggcaatgccatgcgtacgatatgttccctctccgaatgaacactggctatggtgcccgtactccggaggtgaaatgcgcaagttggaggcttgctgtggaagcacacaacatctttggctttgagaccattcctgaagagtgcgttgaagcaacaaaggaatacatccatggcga

SEQ ID NO: 276920 - DNA, 281 bp, Glycine max
  unsure (1)..(281): unsure at all n locations
accaaatcggcnacgtcgccttccgctacagatccgcggcggaaccaccgtatctgactatctccgattgatcttccgataaaagtggaccggaaatgccggttgccgcttccgccatttactttctcaacctccgcggcgacgttctcatcaaccgcctctatcgcgacgatgtcgggggaaatatggtggatgcttttaggacgcatgttatgcaaacgaaggagcttggtacttgccctgtgaggcagattggtggatgctcttcttttacatgagga

SEQ ID NO: 276921 - DNA, 283 bp, Glycine max
tttggttcttccattgttcagctcagttactctctccaaggttggggcgctattcttgctcatttgtatgctcgcaaggcggatataattctgcgaggatactctggttggaattcaaggcgtgctgtgcaagttctggatgaaattttccctaagaacgccactgagcaaccagatttggtaattgtgtactttggtggtaatgattctcttcttccacatccaagtggtcttggtcaacatgtacctctccaagaatacattgaaaatatgagaaagattg

SEQ ID NO: 276922 - DNA, 206 bp, Glycine max
  unsure (1)..(206): unsure at all n locations
ganaaacaagtagttganaactaagaagaaggaaatggcttcctncaatgatntcctccccagctgttaccaccgtaaaccgtgccggtgccggcatggttgctccattnaccggcctcaaatccatggctggcttccccacgaggaagaccaacaatgacttacctccattgctagcaacggtggaagagtacaatgcatgcagg

SEQ ID NO: 276923 - DNA, 281 bp, Glycine max
  unsure (1)..(281): unsure at all n locations
tgcttcaccttctgctctagaaaattcagtgctgaaacatggcttcggctactctctctgtagccaaaccagcccttcaggcaaatgggaaaggcttctctgaattctctggcctccgaagctcatcaggcttccttcccttttctagaaaatcttcagaggntttccattctgtcattgccttccagacctatgcagttggaagcagtggaggatacangaagggtgtgacagaagcaaaactgaaggntgccataaagggtttggaaggatggaaggaa

SEQ ID NO: 276924 - DNA, 274 bp, Glycine max
  unsure (1)..(274): unsure at all n locations
ccctttcattttccctcactttctcgctcgccaaacgcccctctctctcctccaanngccgaccagctcaccgacgaccagatcgccgagttcaaggaggccttcagcctcttcgacaaggacggcgatggttgtattactactaaggaacttgggactgtgatgcggtcactagggcaaaacccaactgaggcagaactgcaggatatgattaatgaggttgatgctgatggcaatggaaccatcgacttcccagagttcctcaacctgatgg

SEQ ID NO: 276925 - DNA, 280 bp, Glycine max
atatacaaataacatatatggcttcttccttctctccaagcctatcatcacttgtgcctctgcttgtgagccttttcattgtggtttgtgctgccggtaacttcaaccaagactttcagattacgtggggagatggtcgtgcaaaaatactcaacaacgccaatcttctcactctctcccttgacaaggcctctggctctggcttccaatccaagaacgaatacttatttgggcaagattgacatgcagctcaagctcgttcctggaaactctgctggca

SEQ ID NO: 276926 - DNA, 271 bp, Glycine max
aagaaagttgcacttgttgtggtcaccggcgaccgtggtctctgcggcggtttcaacaacgcaatcataaagaaagctgaggctagaatcagggaattgaaggagcttggcttggaattcactgtcataagtgttggcaagaagggtaactcttatttcatcagaaggccttatattccggttgacaggtttctagaaggtggcacacttccaactgctaaggaagctcaggccattgctgatgatgttttctcactctttgtgagtgaag

SEQ ID NO: 276927 - DNA, 292 bp, Glycine max
tggcgatggcaatggcgcttcgcaggctttcatcttcaattgacaagcctctgcgccctctcttcaatgccggttccctctactacaagtcgtctttgcctgatgaagctgtttacgacaaggagcgacccggagttacatggccgaagcagttgaatgctccacttgaggtcgtggatccagagattgctgatattattgagcttgagaaagctaggcaatggaaggggctagaattgataccgtcagagaatttcacctctgtgtctgtgatgcaagcggttggatcggt

SEQ ID NO: 276928 - DNA, 288 bp, Glycine max
  unsure (1)..(288): unsure at all n locations
caacgacaagggcaggctttctaaggaggagattgagaagatggtgcaggaagctgagaaatacaagtctgaggacgaggagcataagaagaaagtggaggccaaaaatgcattggaaaattatgcctataacatgaggaacacaatcaaggatgacaagattgcttccaaactgtcttctgatgataagaagaaaattgaagatgcgattgagcaggctatccatggctagatggaaaccaacttgctgaggctgacganttgaggataagatgaaggagttggaga

SEQ ID NO: 276929 - DNA, 287 bp, Glycine max
attggaattgcctgtagaagtgatgacgataaaatggcagaatacattgattcacttaatcatgaagaaacaaggctagcagttgtctgtgaaagggcctttcttcagactttggatgggtcttgccgcactcctattgcagggtatgcttgtagaaacgaggatggcaattgtttgtttagaggattagttgcttcccctgatggaaccagagtgctagagacatccagggttggtccatatgctgttgaagatatgattgagatgggtaaggatgctggcaagga

SEQ ID NO: 276930 - DNA, 287 bp, Glycine max
  unsure (1)..(287): unsure at all n locations
gaagttgaagtcttgcccttctctcttcaactccaaacacaagacatcatcatccatggctgcctccgtctccactgtacggagctgtcaanagagctcttttgaacctgaatgggtctggacctggggtttcagctcccagttcatccttctttgggagcagcttgaagaaggttattngctcaagggtccccaacacaaagatttcctctggaagcttcaagattgnngctgnagaagagnaganagagatgnagagacccagcagaccgacaaggacagatgga

SEQ ID NO: 276931 - DNA, 277 bp, Glycine max
  unsure (1)..(277): unsure at all n locations
tttcgatccgaacatcgtcgctcacttgatctcctcctccgtgcggcaggcgctggagcagcctctcaattacgcgagaaattacctcgttgaccttctggagagttgcgtggagagggtgatttacntggactccgatctggtggtagtggatgacgtggcgaaactgtggagcgccggtctggactcgcgtgccatcggcgcgccggagtactgccacgcgaacttcaccaagtatttcacggcggggttctggtctgagtcgagttgtcgggga

SEQ ID NO: 276932 - DNA, 285 bp, Glycine max
cttatccttattgagagaaaaaatgggccaaatcaatcaaattctttgagttgaacacaggggccaagattccttctcttgggttagggacttggcaagctgaacctggtgttgtagctgaagctctcaccacagccattcaggttggatacaggcatattgactgtgctagtgcgtataagaatcaagcagagattggttctgctcttaagaagctttttgatgatggtgtggtgaagcgtgaggacttatggatcacttccaaactctggtgttcagatcatg

SEQ ID NO: 276933 - DNA, 285 bp, Glycine max
attggaattgcctgtagaagtgatgacgataaaatggcagaatacattgattcacttaatccatgaagaaacaaggctagcagttgtctgtgaaagggcctttcttcagactttggatgggtcttgccgcactcctattgcagggtatgcttgtagaaacgaggatggcaattgtttgtttagaggattagttgcttcccctgatggaaccagagtgctagagacatccagggttggtccatatgctgttgaagatatgattgagatgggtaaggatgctggcaa

SEQ ID NO: 276934 - DNA, 296 bp, Glycine max
  unsure (1)..(296): unsure at all n locations
cttcttctcttgcggctagggttttagcgcanttcttctagatttaaggaagatgggtaaggaaaaggttcacatcagtattgtggttattggccatgttgactctgggaagtccactaccactggccacctgatctacaagcttggaggcattgacaagcgtgttattgagagatttgagaaggaagctgctgagatgaacaagaggtctttcaagtatgcctgggtgcttgataagcttaaggctgagcgtgaaagaggaatcacaatgatattgcttgtggaagtttgaaacc

SEQ ID NO: 276935 - DNA, 295 bp, Glycine max
  unsure (1)..(295): unsure at all n locations
attttttgtagctgattgtatgggctccaacaagagaaaaagcaattgaacgcatgaaaagggcacttgatgacactattatcacaggagttcctactacaattgattatcataaacttatccttgacatagaggatttcagaaatggaaaggttgatactgcttttattccaaaacacgaggaagagttggcaatggtaagaacccaatataaccttgaaaatattaatgtccctaacaatggatttaaaaattactttcgttgttgaagctgaccantttggtaggaaaactc

SEQ ID NO: 276936 - DNA, 289 bp, Glycine max
gtgagctataagctagtttatcgtgaggagaatatgaagttgtttgttttctttgttgctgcagtagttttggtagcatggccatgccatggcgcaggctaccaaaggttccctctccgaatgaaaactggctatggtgagcgttcttcggaggtaaaatgcgcaagttttaggcttgctgtggaagcacacaacatccgagcctttaaaaccattcctgaagagtgcgttgaaccaacaaaggactacattaatggcgaacatttagatcagatctaaaacagttaac

SEQ ID NO: 276937 - DNA, 283 bp, Glycine max
gccatgggctggcccatggctaccttctggtgggcccattcgtgaaggccgggcctctgaggaacaccgagatcgacgggcaagcaggctctctcgccgctggtgggcttgtggtgatcctcagcctttgcctcacaatctatgggatttcatcttttaacgaaggagacccatccactgccccgtcactgaccttgacgggccgcaagaaggagcccgatcagctccaaactgctgatgggtgggccaagttcaccggaggcttcttcttcggaggcattcg

SEQ ID NO: 276938 - DNA, 284 bp, Glycine max
  unsure (1)..(284): unsure at all n locations
gnctgccaagaatctggcagctgtcaacccagaaaggaccatctttgatgtcaagagacttattggaagaaagttcgaagataaggaagttcaaagagatatgaagcttgttccttataagattgtcaacaaggatggaaaaccttacatacaagtgaaaattaaggatggtgagaccaaggtgttnagccctgaggaaatcagtgccatgattctgactaagatgaaggaaactgcggaagcattccttggaaaganattaatgatgccgtggtcantgtccc

SEQ ID NO: 276939 - DNA, 280 bp, Glycine max
gtttgttgttgtaactcgttcttcttcttttgttgttctgtgtttgtgtttgttttttctctcacctgaaaatgtcttgctgcggtggtaactgtggttgcggaagctcctgcaagtgcggcaacggctgcggaggctgcaagatgtacccagacttgagctacactgagtcaaccaccaccgagaccttggtcatgggagtggcacctgttaaggctcaatttgagggtgctgaaatgggtgtgcccgctgagaacgatggctgcaaatgtggaccaaa

SEQ ID NO: 276940 - DNA, 284 bp, Glycine max
  unsure (1)..(284): unsure at all n locations
ggcactgttgctgcccataattcctgcaatagggtgggttctgttcaacattctgcagccggcgctgaaccaactgaaccgcatgcgcanaaccaaaggcgtgatcattgggttggggcttggcggcttggctggcttggtggctgcgccgcatgcatcggcggcggcggcttctgaagtggcggcgatggctgaagctgcctcgaacgacaacaggggacagcttctgctgtttgtggttacgccggctattgcttgggttcttacaacatcttgcagcctgc

SEQ ID NO: 276941 - DNA, 284 bp, Glycine max
  unsure (1)..(284): unsure at all n locations
ggatgatagagttgtgcttgataggaaggctttatttaagaacactttgagganagcagcttatgcatggaaaaggatattgagctccgtctcagtgaggaagctgctatgctcagatcctttgtggaccaacctgcttttacggatctacattggggatgtttgttcctgctatcaaaggacnaggaactgaggaacagcagnngaagtggntgcctttggctcataagatgcaaataattggttgttnagcccanactgaacttggccaggatctaatgttc

SEQ ID NO: 276942 - DNA, 296 bp, Glycine max
  unsure (1)..(296): unsure at all n locations
gatcgagataactagaaacagtgtgatgaaaatgaaggtccttgtnttcttcgttgctacnantttggtagcatggcaatgccatgngnaacgatatgttnccttctccgaatgaaccactggctatggtgcncgtactcnggaggtgaaaatgcgcaattgggggcttgctgtggaagcanacaacatctttggcttngagaccattcttgangatgcgttgaagcaacaaaggantacntccatggcgaacatatagatcagactcnaaaacagttatccacaagttattttnt

SEQ ID NO: 276943 - DNA, 292 bp, Glycine max
gtttgttgttgtaactcgttcttcttcttttgttgttctgtgtttgtgtttgttttttctctcacctgaaaatgtcttgctgcggtggtaactgtggttgcggaagctcctgcaagtgcggcaacggctgcggaggctgcaagatgtacccagacttgagctacactgagtcaaccaccaccgagaccttggtcatgggagtggcacctgttaaggctcaatttgagggtgctgaaatgggtgtgcccgctgagaacgatggctgcaaatgtggaccaaatgctcctgcaac

SEQ ID NO: 276944 - DNA, 291 bp, Glycine max
  unsure (1)..(291): unsure at all n locations
ggaagctgctgatgtagatggaaatggctcaattgactacatagaattcatcactgctacaatgcatagacacaaattagaaagagatgaccaacttttcaaggccttccaatattttgataaagacaacagtgggtttattacaagagatgaactagaaacagccatgaaagaatatggtatgggtgatgatgccacaatcaaggaaatcatatctgaagttgatacaattatatctgaagtggacacagatcatgatggtagaatcaactatgaagantctctgcgatg

SEQ ID NO: 276945 - DNA, 281 bp, Glycine max
caaagaaaaaaaaaaacccttagccaacacaaccatcatggccacctctgctattcagcaatcagcattcactggtcaaactgctctgaagcagctcaatgagttcgtccgcaagaccggtggcgccggcaaaggtcgcactaacatgcgccgcaccgtcaagagtgctcctcagagcatttggtatggccctgaccgtcccaagtacttgggtccattctcggagcagattccatcatacctgaccggagaattccctggtgactacggatgggacactg

SEQ ID NO: 276946 - DNA, 282 bp, Glycine max
ctcactaggagctcttctccattggttcttcatctgcatgcacacacttgcatagttttggaaaccaagaatttttgaagggtagcatcaacaagaagttctggaaatggagatcaccaatgtcagcgagtatgaagctattgcaaagcagaagttgccaaagatggtgtttgactactacgcatctggtgcagaggaccagtggactctgcaggagaacagaaatgccttttccagaattttgtttcggccacgtattcttattgatgtgagcaagataga

SEQ ID NO: 276947 - DNA, 282 bp, Glycine max
caaagttagaaacaaggagaaagaaagaagatggcaggaaagaaaatcccagatgtgttgctgaattcaggacacaaaatgccagttataggcatgggaacttcagtggagaatcgtccatcaaatgagacccttgcttctatctatgttgaagccattgaggtgggttaccgtcattttgacactgctgcagtgtatggaacagaggaagccataggcctagccgtggccaaagccatagacaaaggccttataaagagtagagatgaagttttcatcatt

SEQ ID NO: 276948 - DNA, 277 bp, Glycine max
ttttgatctcatgtatgaacaagttaaagctcttaaggatggaattgctgttgaaaaaccaatctacaaccatgtcactggtctcctggatccccctgagctcattaaaccccccaaaatcttagtcattgaaggcttgcacccaatgtatgattctcgggtcagagatctcttggactttagcatctacctagacattagcaatgaggtcaaattcgcttggaaaattcagagagacatggcagagcgtggacacagtcttgaaagcatcaaggct

SEQ ID NO: 276949 - DNA, 279 bp, Glycine max
gttcttcttaagagaggtgagtgcagagcaaaaggtggggcacctggattcaaagttgcaattttgggggctgctggaggaattggtcaatccctttctttgctgatgaagatgaacccattggtttcagttcttcatctttatgatgttgtcaacacccctggtgtcacagctgatgttagccacatggacactggtgctgtggttcgtggcttctggggcagcaacaacttgagagtgcatcactggcatggacttggtaatcataccgctggggtg

SEQ ID NO: 276950 - DNA, 282 bp, Glycine max
gagtttgttgtgagctataagctagtttatcgtgaggagaatatgaagttgtttgttttctttgttgctgcagtagttttggtagcatggccatgccatggcgcaggctaccaaaggttccctctccgaatgaaaactggctatggtgagcgttcttcggaggtaaaatgcgcaagttttaggcttgctgtggaagcacacaacatccgagcctttaaaaccattcctgaagagtgcgttgaaccaacaaaggactacattaatggcgaacaatttagatca

SEQ ID NO: 276951 - DNA, 280 bp, Glycine max
  unsure (1)..(280): unsure at all n locations
ctaagctgaaatctgaagctaacttaagggaaatgagatggccaatggcaacactagtcatcgcttcaagctcttgcttttccttctaactctgcactcttcattcgctgagattttcttcgaagagagattcgaagatggatggaagagccgttgggtgctatccgattggaaaaggagncaaggaaaagcgggtaccttcaagcacacagcaggaaaatggtctggggatcctgatgacaaaggtcttcagacatataatgacgccaagcattttgcc

SEQ ID NO: 276952 - DNA, 277 bp, Glycine max
  unsure (1)..(277): unsure at all n locations
gganaatcanattcaggggaaggtgnggaggatcctgttcgctggaaaccacttacagatntcgtagatggttactctncaactcttcctcatcttaaaggtcttcaaaatggggatactgcaactagtgccatcaancaggttgcttctggaaggnttngtgtcaccccaanattcttggcaaatgctgatcagttagaaatcaagatngcacaaggtgcaaaacctggtganngtggacaattgcctggnaaaaaagttagcatgtatattgccc

SEQ ID NO: 276953 - DNA, 281 bp, Glycine max
cgttttgcagccatggaaacaggcatagcatgctacactcgcgggcctttcctgcctagtgtttcttccaagcactctccaccctccatctctccatcttttggcttgaggagtctgaaatcgagctctttatttggagaatctctaagagtggcatccaaatcaacactaaaggtttcaaagacaaagaatacttcactcgtgaccagatgtgaaattggtgacagtctggaagaattcctcacaaaagcaacaccagataaggggttgatcaggttgtt

SEQ ID NO: 276954 - DNA, 292 bp, Glycine max
cgagaaatggcgatggcaatggcgcttcgcaggctttcatcttcaattgacaagcctctgcgccctctcttcaatgccggttccctctactacaagtcgtctttgcctgatgaagctgtttacgacaaggagcgacccggagttacatggccgaagcagttgaatgctccacttgaggtcgtggatcctgagattgctgatattattgagcttgagaaagctaggcaatggaaggggctagaattgataccgtcagagaatttcacctctgtgtctgtgatgcaagcgggtg

SEQ ID NO: 276955 - DNA, 284 bp, Glycine max
  unsure (1)..(284): unsure at all n locations
atcttgatataatgcaagggttgcagtggcctggtttgtttcacattctagcttcaagacctggtggagcaccttatgtgaggctcacggggcttggtacctctatggaagcacttgaagccacgggaaaacgtttgtctgattttgcaaacaaactttgccttccctttgagttcttccctgttgctgagaaagttgggaaccttgacnctgagaggctcaatgttagcaaaacagaagctgttgctgttcactggttgcaacatccctctatgangtcatgg

SEQ ID NO: 276956 - DNA, 278 bp, Glycine max
cgattttgtcagttgaagacatcattgctttgattggtgataagtgcgatggagttattggacagttgactgaagactggggagaagagttgttctctgctttgagcaaagcgggaggcaaagctttcagtaacatggctgttggttataacaacgtggatgttgatgctgcaaacaagtatggtgttgctgttggaaatactcctggagtgctcactgagacaacagcagagttggcagctcactaactttggcagctgctagaaggatagttgagc

SEQ ID NO: 276957 - DNA, 277 bp, Glycine max
  unsure (1)..(277): unsure at all n locations
ggaaaagagaatttgcagttgatgtatagtgatggcgagaaagcgtttggtacatcaagtgacctctttattgatgaaagattgaaaattgcattagatggcatcatagtggttaacatggaaatatttcgccctcaaaatttagacagtccagttgagaacaccttaaaaggaaatgncgaattaccaccagatgcctgtggcttgacaaggggaagctgttggatgctctccataaagctgctcatgctgctcttgcaagctgccctgtaagctg

SEQ ID NO: 276958 - DNA, 278 bp, Glycine max
gagaagtcttaaggttagatgggatgaaacatcaaacataccacgtcctgagagagtttcacaatggaagatagagcctgctcttgcacctcctgctctgaatcctctaccaatgcccaggcctaaaaggcctcgatctaatgtggttccatcatccccggattcctctgttcttactcgtgaagcttcatctaaagtcagcgtagatcctttgccaacaagtgggtttcaaagggtcttgcaaggtcaagaatgtcgaccttgagaggtaattttgc

SEQ ID NO: 276959 - DNA, 279 bp, Glycine max
tagtttcttacaaggctctactctactgcttcaccttctgctctagaaaattcagtggtgatacatggcttcggctactctctctgtagccaaaccagcccttcaggcaaatgggaaaggcttctctgaattctctggcctccgcagctcatcaggcttccttcccttttctagaaaatcttcagaggatttccattctgtcattgccttccagacctatgcagttggaagcagtggaggatacaagaagggtgtgacagaagcaaaactgaaggttgc

SEQ ID NO: 276960 - DNA, 277 bp, Glycine max
  unsure (1)..(277): unsure at all n locations
tgcttcaccttctgctctagaaaattcagtgctgaaacatggcttcggctactctctctgtagccaaaccagcccttcaggcaaatgggaaaggcttctctgaattctctggcctccgaagctcatcaggcttccttcccttttctagaaaatcttcagaggatttccattctgtcatgccttccagacctatgcagttggaagcagtggaggatacaagaanggtgtgacagaagcaaaactgaaggttgccataaacgggtttggaaagatggaa

SEQ ID NO: 276961 - DNA, 278 bp, Glycine max
gtggaagcacaaggattccaaaggtacaacagcttttgaaggactactttgatggaaaggagccaaacaagggggtcaaccctgatgaagcagttgcctatggtgctgcagtgcaaggaagcattttgagtggagagggtggtgaagaaaccaaagatatccttctcctggatgtggctcccctcactctcggaattgaaactgttggtggagtcatgacaaagttgattcccagaaacactgttatcccgaccaagaaatctcaagtgttcaccacc

SEQ ID NO: 276962 - DNA, 275 bp, Glycine max
aacacaacaacactctctcttctcgctcttggcttttcgctcttcactcactctcattcattcatttccaccgttcatggatccagtaagcgtgtggggtaacacgcccttggcgacggtggatgccgagatccatgacctcatcgagaaggagaagcgccgtcaatgccgcggaatcgagttcatcgcctccgagaacttcacctccttcgccgtcatcgaggccctcggcagcgctctcacgaacaaatatccgagggcatgccgggcaaccg

SEQ ID NO: 276963 - DNA, 273 bp, Glycine max
gcgcctctcatccgtgatgggcgtatggagaagttctactgggcaccaacaagggatgaccgcattggtgtctgcactggaatttttcgcaccgattcaattcctgaacaggacgttgtcaagattgttgacaccttccctggccaatccattgatttctttggtgcactgagggccagagtatatgatgacgaagtgaggaagtggatttctggtgttggtgttgacggcattgggaagaagctgtgaactcaaaagatggacctccaacct

SEQ ID NO: 276964 - DNA, 271 bp, Glycine max
atagtaatatacataagtaacataaccaatggaagcgcgtgcaggagccatcagcgtattgcaagaatctctgctcatcttcagcctccaaatttccaggaagggagtgatgttctcttaagagtgctgagtgcagagcaaagggtggggcacctggattcaaagttgcaattttgggggctgctgggggaattggtcaacccctttctttgctgatgaagatgaacccattggtttcagttcttcatctttatgatgttgtcaacacccc

SEQ ID NO: 276965 - DNA, 273 bp, Glycine max
  unsure (1)..(273): unsure at all n locations
gtttcaaatggaaccaaacaccgggagtgactttgatgatgttggctggggtggatnaagccaagcaggactttatggaggtggtggagtttttaaagaagcctgagaggtttactgctgttggggctcgcattcctaaaggagttctcttgttggtcctccaggaactgggaanaccttgttagccaaggctattgctggtgaagctggtgttccatttttctctatatcaggttctgagtttgttgagatgtttgttggtgttggtgcttc

SEQ ID NO: 276966 - DNA, 278 bp, Glycine max
  unsure (1)..(278): unsure at all n locations
ttgctccctcagcagcnaagaagaagccacagagaactagtactcnctantctcacccgcaagannnaaatggcatctcacatcgntggatacccccgtatgggtcccaagagagagctcnagttcgtnctcgagtctttctgggatggcaagagcagcgccgaggatttgcagaaggtgtcttctgatctcagggcatccatctggaagcagatggctgntgctgggatcaagtacatccccagcaacactttctctnactatggccagttctcnac

SEQ ID NO: 276967 - DNA, 276 bp, Glycine max
cttggcatctcttagcaccttccagcagatgtggattgcaaaggcagaatatgacgaatctggtccatcaattgtgcacagaaagtgcttctaaactgtttcgatagatagggttattgaagggaaagactactatcatcacgatttgtctggaagcaatgcattgcagattgtaaccctttgattctagcttttgttatcctttcattttattctcttgttggagtgatcatttatttgcagaaggtgaggagagttgttttttaaaatggtcca

SEQ ID NO: 276968 - DNA, 278 bp, Glycine max
  unsure (1)..(278): unsure at all n locations
ggntcnagccganttgaaatcatcgccaacgaccaagggnacagancgacgccgtcttacgacggcttcacngataccgagcgtctcatcggtgatgcggctaagaaccaagtngccatgaaccccatgcaacaccgtcttcgatgccaagaggttgattggtcgtagattcagtgactcctctgttcagagtgatatcanattgtggccttttaaggtcattgctggtgctgctgacaagccaatgatcgtggttaatacaagggtgaanagaagcc

SEQ ID NO: 276969 - DNA, 299 bp, Glycine max
  unsure (1)..(299): unsure at all n locations
ctttctccggccggattccgncggagctcggcgattgtattagtttantatgntnagnnctgaatgtcaatatgttcancnngaccgttccgccggagctgttcaagcagtcngggaagatcgccgtgaatttcntcagtgggaagacgtatgtgttataaagaacgatgggagcaaggagtgccatngtacggggaacttgcnngagcntgcggggatcagtcagcagcngctgaacaggatttcgacgagtaatcccngnatttcactagggtttatggaggtangttgcagcnaac

SEQ ID NO: 276970 - DNA, 290 bp, Glycine max
gttgaaattaagccagtgggtcccactgtatctgaaggagctgattcaacaaatcagaactcaaaagttcaaggcggttcattggattctcgtaagcttgatacaaaaaagcagaatgatgttgttcattggcataacaggggggtacctgcccgaccattacatttatccaggggagtggagaaaccaagtgggagggtcacatacacagttgttcttgaaggtttatgcagatttagtgtccaggaactgagcacaagaggaatataccatactgcgaggataacttc

SEQ ID NO: 276971 - DNA, 289 bp, Glycine max
gaacgaagggtttttggcggggcagaggcaattgttgaagacgataaagaggaggaggcacgtgacagtgacacagacacagtcacacgagggaggaagtggggcttgtgttgaattgggggagtttgggttggaaggtgagatggagaggtgaggagagacaggacagtgttgatggctgaaattgtgaggttgagacaacaacagcacaactcgagggagcaattgttgtccatggagactaggttgcaagccactgagaagaaacatcaacagatgatgaattttc

SEQ ID NO: 276972 - DNA, 294 bp, Glycine max
caacctctcaagtccaacctacccctttttcttctcccaccaacttcaccgtcttcttcctcgatcatgtctcacttcaagggcaagtaccatgatgagcttattgccaatgctgcttacattggcactcctggaaagggtattcttgctgctgtgagtcaacagggacaattggcaagcgtttggccagcatcagtgtagagaatgttgaatccaacaggcgtgctcttagggagctgcttttcaccgctcccggtgctcttaaatatctcagtggtgtcatcctctttgagg

SEQ ID NO: 276973 - DNA, 293 bp, Glycine max
ccatcctcaaaatctccaaactcgcgatcctcctcgttttgttcgcttcagtctgcaacgtcgctatgtcggactccaccgccaaacccctcgaccagcacgccaccacgggctctgaccctactgcgccagggttcacatcgtgtacaccggagaccacagaacgaggagcctgaggcctaccacatcagaaccctcacttcagtccttggcagtgaggaggctgcaaaggaagctttgttgtatagttacaagtctgcagccagtgggttctcagctaagcttactccgga

SEQ ID NO: 276974 - DNA, 287 bp, Glycine max
cggcgaagaaccaggtcgctatgaacccaaccaacaccgtttttgatgctaagcgtttgattggaaggcgtttttccgatgcatcagtacaaggtgacatgaaattgtggccgttcaaggtgattcctggccctgctgagaaacctatgttgtggtgaactacaagggggaggagaaacagttttccgcggaagagatatcctccatggttcttatgaagatgaaggagattgcggaggcgtatctaggttccaccataaagatgcggttgtcactgtgcctgctta

SEQ ID NO: 276975 - DNA, 280 bp, Glycine max
tttaaacgaagccttccccgttactgtactcaatttattgagatatgcatacatgctatgtgccgaccatggtccttgtgtctctggtgctcacaatactattgtgacagcaagggcagggaaagacctagtttccagtctgtatcaggtttgctaacaattggtcctcgatttgggggtgccatcgatgatgctgctcgctacttcaaggatgctcatgacagggcacttactccttatgagtttgttgaaggtatgaaaaagaagggaattcgtgtgg

SEQ ID NO: 276976 - DNA, 289 bp, Glycine max
  unsure (1)..(289): unsure at all n locations
tgcttggagaccacanaggcgaaagcaggacctttaagcttcctaatcccatgtactacattgagtagtaccttcacctctctcaacaatctagctagagtttgctcctatctatatgtaataaggtatgctgatatgcactattcaataggagcattagctatgtttgttaatgtcactttatgttatgtgggtaagtcacctaagacactccacgtacctacttgttgtctcttacgcggctttaataaatcttctgcccttgttccatatttactaaanaaaaaaa

SEQ ID NO: 276977 - DNA, 282 bp, Glycine max
  unsure (1)..(282): unsure at all n locations
agaagaacaagtagttgagaactaagaaggagaagcaaatggcttcctcaatgatctcttccccagctgttaccactgtcaaccgtgccggtgccggcatggttgctccattcactggcctcaagtccatggctggcttccccaccagaaagaccaacaatgacattacctccattgctagcaacggtggaagagtgcaatgcatgcaggtgtggccaccagttggcaagaagnagtttgagactctttcctacctgccagaccttgatgatgcacaattgg

SEQ ID NO: 276978 - DNA, 293 bp, Glycine max
ggccacccacgcggctcttgcttctacaaggatcccttcaaacacaaggttcccatccaaggcctctcactctttcccaacccaatgcgccttaaagagacttgaggtgacagaattctctgggcttagaaccacttcatgtgtcacatagctaacagtgctagagaatcttccttttttgatcttgtagcttcccaactcactcccaagaccaatggatcaactcctgtgaggggagagacagtggccaagttgaaggtggcaatcaatggtttcggacgcattggtagaaa

SEQ ID NO: 276979 - DNA, 281 bp, Glycine max
  unsure (1)..(281): unsure at all n locations
gttacggtgcaacctagcagcctccaaatccaatggcttcagagaagaaactttcgaacccaatgagggagataaaagtgcagaagctcgtcctcaatatctctgttggcgagagtggagatcgtctcaccagagccgcaaggtgttggaacaacttagtggatncnaccccagtgttttccaaagcaaggtacactgttcgttcctttgggattagaagaaatgagaagattgcatgctatgtcactgtcagaggtgacaaggcaatgcaacttttggag

SEQ ID NO: 276980 - DNA, 285 bp, Glycine max
caagctcatcctagagttttaaaaatggcagcagcctcctccatggctctctcttccccatccttggctggcaaggccgtgaagctgggcccatcagcccccgaagtcgggagggtcagcatgaggaagaccgtcaccaagcaggcctcctccggaagcccatggtacggcccagaccgcgtcaagtacttgggcccattctctggcgagcccccgtcctacctcactggcgagttcccaggtgactacggctgggacactgctgggctttcggccgacccagaa

SEQ ID NO: 276981 - DNA, 283 bp, Glycine max
ggaattgttgtaactttttgattcctaaattctctaaaattcgaaattctaatttcgttaggggaaagagattgtttgtgtgtgagtgagtatggctggaaaaggcgagggtcctgctatcggaatcgatttgggaacgacgtactcttgcgtcggcgtgtggcaacacgatcgtgttgaaatcatagccaacgatcagggtaacagaactaccccatcctacgtggctttcaccgacacagaacggttgatcggcgatgcggcgaagaaccaggtcgctatg

SEQ ID NO: 276982 - DNA, 272 bp, Glycine max
  unsure (1)..(272): unsure at all n locations
cgcgtcgctccgcaccagtttcaccgcacgaatatcttgttgtttggnngcgatncgagaaaaactctgtaaacatgttggtttaccaggacctccttacaggtgatgagcttctctctgactccttccgttacaggaaattgagaatggaatgctgtgggaagttgaggggaagtgggttgttaaaggagcagttgatgtagacattggtgcaaacccttctgctgagggtggaggagaagatgagggagttgatgatgcagctgttaagg

SEQ ID NO: 276983 - DNA, 279 bp, Glycine max
cagagcccgaaggaaacgtatgtagtagggaaataattgttgagttggaagaaagagtggacaagattgtcaatatcgataacatttactctgatacgcagctttgtgcaacctatgtttgtgacatctacaaacacctactgaatccgaggaaaagaaaaggccttccactgacttcatggacacaattcagaaggacataaatgttagcatgcgcgctatattggttgactggcttgttgaggtggctgaggagtatcgtcttgtacctgaaacatt

SEQ ID NO: 276984 - DNA, 280 bp, Glycine max
agaaagagtggtttgtgcggtggtgaagaagcgttcggaatagaagaagaagatgtcgtcggtttacgttctagagcctccgacgaaggggaaggtggtggtgaacactacgcgcggtccttggacattgagctgtggccgaagaggctccgaaggccgcgaggaacttcgttcagctctgcctcgaaaactattacgacaacaccatcttccaccgcatcatcaaggacttcctcgtccaaagcggcgaccccaccggcaccggcaccggtggtgaaag

SEQ ID NO: 276985 - DNA, 281 bp, Glycine max
ttcgtcactctcgtgtcgggtgaaggcgaaaaccaaatcaagatgctgagagtgggcgcaaagaggcttttgggaacgacgtcgttgggcgttagggttccggcgaggctgtaccacgagagggttgtggatcactacgacaaccccggaacgttggatcgttagacaagaacgacccgagcgtggggacgggtttggtgggggcgccggcgtgcggcgacgtgatgaagctccagattaaggtcgacgacaaaaccggaaaaatcgtcgatgctcgattc

SEQ ID NO: 276986 - DNA, 283 bp, Glycine max
  unsure (1)..(283): unsure at all n locations
caatcttctgagagtgtttggttganagtagcaaagatgtttcctttcgggcaanagggtcaaaagataaaggggactatggtggttatgcagangantgtgttggatatcaacagcatcaccagtgttggagggatcgtgaccaaggcttaggcttcataggcagtgcagtcgatgcacttacttttgcagccaccaaaatctccatccagttgattagtgctaccaaggctgatggtgggaaaggaaaaattggaaagagtacaaatttaagagganagat

SEQ ID NO: 276987 - DNA, 280 bp, Glycine max
atcaaagatctctttaacccagaccgtgttcttattggaggcagggaaaccccagagggccaaaaagctattcaagcattgaaggatgtttatgctcaatgggtccccgaagaaagaatactaaccacaaatctctggtcggagaactatctaagcttgcagctaatgccttcttggcccaaaggatttcatctgtcaatgccatgtcagcactttgtgaggctaccggggcaaatgttcaacaggtgtcctattctgttggaacagactcaaggattgg

SEQ ID NO: 276988 - DNA, 276 bp, Glycine max
  unsure (1)..(276): unsure at all n locations
gtttcacttgtccgtgatcacaacatcaaaganaagctagtggaacaaggcatatctgttcaaagctacaatggagatctgttgtatgagccatgggaagtaaatagtgagagtggacgtgcttttactaccttcaatgcttttggaagaaatgcttgcacatgcaaatggatattgtttcagttgttcctccatggcaattaattccagctgaaggaaaaattgaggaatgttcattggaggaactggtcttgaaaagaatcagaaaaaccagta

SEQ ID NO: 276989 - DNA, 269 bp, Glycine max
  unsure (1)..(269): unsure at all n locations
gtcttgctcgatcaatgccaacaagcggtgctctggaccgtgttgctaaaaaattgaacctccctttctttgaggtccccactggttggaaattttntgggaatcttatggatgctgggaatttgtccgttgcggggaagagagttttggaacaggttctgatcacattcgtgagaaagatggcatctgggctgtcttagcttggctttctattattgcacatcgcaacaaagacaagaatcccggggagaaattgatctccgtatctg

SEQ ID NO: 276990 - DNA, 253 bp, Glycine max
  unsure (1)..(253): unsure at all n locations
gaagatggcttcacgcangctcgtatcttctctgattcgatcctcccttgcgtagatctcaatcgaagccctcaatttccgcatcganatcnnnaancacgtcatcnaancgtgcctcaccgcacggatacttgctgaaccgcgtcgccgagtacgccaccgccgcggctgatgctaccannnnnnnnnnnnnnnnnnnnnnggggaagaaggagctcggcggcggcgggaagatcaccgatgaattcacggg

SEQ ID NO: 276991 - DNA, 279 bp, Glycine max
ggaaaatttgttgatgacgaacctactactggaggtgttattcctccaggcaaaggcttcagggaagctcttggtcttggttcaggtcctttatttggattcacgaaagcaaacgagctatttgtgggaagattggctcaatgggtttcgttttctcattgattggagaaattataaccggaaagggagcactagcccaactcaacattgagactggggtaccaatcaacgaaatcgagcccctagtgttgttcaatgttcttttcttcttcattgctg

SEQ ID NO: 276992 - DNA, 276 bp, Glycine max
gaggccgccgccgtcgtggaggacgtcaagaacaaccccgacgccgccgtctccggcaccgtcatccgccgccgcctccagctcatgatgtacaacaacatgtaccgcatcatgttcgaccggaggttcgagagcgaggggatccgatcttccagaggcttagggccttgaacggagagaggagtcgcttggcgcagagctttgagtataactatggcgattttattcccatcttgagaccctttttgaagggttacttgaagatttgtaaggagg

SEQ ID NO: 276993 - DNA, 264 bp, Glycine max
  unsure (1)..(264): unsure at all n locations
ganaaaaaaaaataaaagagaagaacatggcctcatctagangactactaactctccctgtgactgcctgcaagttcttgagaagaaaatgcatgccggattgcattttctccccgtatttcccccagaagagcctcagaagttcgccaatgtgcacaagatatttggagcaagcaacgtgagcaagcttctaaatgaggtgcagccccaccagagggaggatgcagtgaactcactggcctatgaagccgaggcacggntaaa

SEQ ID NO: 276994 - DNA, 282 bp, Glycine max
  unsure (1)..(282): unsure at all n locations
gcgttgccattctcatcctcttctttctctctctaccattgccatggatccctacaagcaccggccatccagcgccttcaattctcccttctggactacaaattctggtgctcctatttggaacaacaactcctctttaaccgtggagctagaggtccaattctgctggaggattatcatcttgtggagaagcttgcaaattttgatagggaacgtatcccagaacgtgttgtccatgccagggcgctagtgcaaagggtttctttganggtcacccatgac

SEQ ID NO: 276995 - DNA, 284 bp, Glycine max
agcgttgccattctcatcctcttctttctctctctaccattgccatggatccctacaagcaccggccatccagcgccttcaattctcccttctggactacaaattctggtgctcctatttggaacaacaactcctctttaaccgtggagctagaggtccaattctgctggaggattatcatcttgtggagaagcttgcaaattttgatagggaagtatcccagaacgtgttgtccatgccaagggcgctagtgcaaagggttcttgaggtcaaccatgacattc

SEQ ID NO: 276996 - DNA, 283 bp, Glycine max
caaaggttgctgtaggagataagattgcagtagtgctaagtgctaacacctgcagtgaacaatggcctctgcatcagcatctctgctcaagtcttcacttgttcttgacaagtctgagtgggtgaagggacaaacccttcgcaaccttctgcatcagttgtgagatgcaaccccaccaccccatcaggcctcaccatcagagctggttcctatgctgatgagctcgttaagaccgcgaaaacagtggcttcaccagggaggggtattttggccatggatgagt

SEQ ID NO: 276997 - DNA, 278 bp, Glycine max
cacactaacaccaccacttcatcaactttacttgacaacaatattgtaaaactcaaaatctagtttcatactttttttcttcttcttgaaatggctctccaggctgcttctcttgttcctgcttctttctcggttcttaagagggaaagagtggtgtgtctctcaaggactccaccttgttcggtctttcattttcagaacctatcaaagctaacttcagctcttctgcattgaggtgcaagagggaattcgaacaaaagctctgtgctgtgagggcc

SEQ ID NO: 276998 - DNA, 277 bp, Glycine max
agcaacaataacaatggcagcctcactacaagctgcagctaccttcatgcaacccaccaaggtgggcatggccactcgcaacctcaaatctacacaatgcatttctaaggcttttggcttggaacccgctgcagctaaatcatttgctcccttaagcccgatctcaaagattttgctcaaaaatgtgtcgacgccaccaaaattgcaggattcgcccttgccacctcagctctcgttgtttctggagcgagtgcagaaggtgttccaaagaggctaa

SEQ ID NO: 276999 - DNA, 273 bp, Glycine max
aattaacgtcgtaaacgacgtcgcaaaagagatgataaagcagagaagagaaatggggttcaagacgcggaacgaccttctctcgcggttcatgggatcaatagacgacgacgtttatttaagagacattgtggtgagtttctattagcgggtcgtgacaccatcgctgccgggttaacgggcttttttatgttgttatcgaaaagcccggaggtggaggagttgattagggaggaggtgggccgggtgatgggcccgggccaggagtttcct

SEQ ID NO: 277000 - DNA, 276 bp, Glycine max
ctctgttggaactgatgccaagggaaacattaatatagaagagctgaggaaggctgctgaaacacacaaggataacttatctgcacttatggtaacatatccttcaacccacggtgtttatgaggaaggtattgacgaatttgcaatattattcatgataatggaggccaagtatatatggatggtgccaacatgaatgctcaggtgggactcacaagcccgggttggataggagcagatgtttgccatctcaatctccacaagacattttgcatc

SEQ ID NO: 277001 - DNA, 284 bp, Glycine max
  unsure (1)..(284): unsure at all n locations
gttgatcgagataactagaaacagtgtgatgaaaatgaaggtccttgttttcttcgttgctacaattttggtagcatggcaatgccatgcgtacgatatgttccctctccgaatgaacactgncctatggtgcccgtactccgaggtgaaatgcgcaagttggaggcttgctgtggaagcacacaacatctttggctttgagaccattcctgaagagtgcgttgaagcaacaaaggaatacatccatggcgaacaatatagatcagactccaaaacagttaacc

SEQ ID NO: 277002 - DNA, 295 bp, Glycine max
tctctcctccaatggccgaccagctcaccgacgaccagatcgccgagttcaaggaggccttcagcctcttcgacaaggacggcgatggttgcattactaccaaggaacttgggactgttatgaggtcacttggtcaaaacccaactgaggcagaactgcaggatatgataaacgaggttgatgctgatggcaacggaaccatcgatttcccagagttcctcaacctgatggctcgcaagatgaaagacaccgactcagaggaggagcttaaggaggctttccgtgtgtttgacaa

SEQ ID NO: 277003 - DNA, 291 bp, Glycine max
  unsure (1)..(291): unsure at all n locations
atttcggaattcggaaaacccagtgctgatcgctctctgggtgttcccaaaatgaagcttcggagatcttcgctgtgcgtctttctanggtttctggcgctgttcctttcgccgccgccgtcaatggcgaaattcgtngtggagaagaacagcttgacggtgacgtcgccggacaacatcaagggcacgcacganagcncgattgggaacttcgggataccccaatacggaggcagcatggctgagaacgtgttgtacccaaaggncaacaaaaagggntgcnaggagttc

SEQ ID NO: 277004 - DNA, 288 bp, Glycine max
  unsure (1)..(288): unsure at all n locations
gagtttgttgtgagctataagctagtttatcgtgaggagaatatgaagttgtttgttttctttgttgctgcagtagttttggtagcatgcccatgccatggcgcaggctaccaaaggttccctctccgaatgaaaactggctatggtgagcgttcttcggaggtaaaatgcgcnagtttnaggcttgctgtggaagcacacaacatccgagcctttaaaaccattcctgaagagtgcgntgaaccaacaaaggactacattaatggcgaacaatttagatcagactct

SEQ ID NO: 277005 - DNA, 284 bp, Glycine max
  unsure (1)..(284): unsure at all n locations
cgttgccattctcatcctcttctttctctctctaccattgccatggatccctacaagcaccggccatccagcgccttcaattcncccttctggantacaaattctggtgctcctatttggaacaacaactcctctttaaccgttggagctagaggtccaattctgctggaggattatcatcttgtggagangcttgcnaattttgatagggaacgtatcccagnacgtgtngtccatgccaggggcgctagtgcaaagggtttctntgaggtcacccatgacat

SEQ ID NO: 277006 - DNA, 283 bp, Glycine max
gagacagcaaattggggtcttgatgttaatgaacttcgtcaatcagttgaacaggctcgctttaaaggaataactgttaaagcaatggtgatcataaatcctggaaaccctactggtcaatgccttagtgaagctaatctaagagaggttttgcaattctgctatcaagaaaatttagccttgcttggagatgaggtttaccagacgaatatatatcaggatgaacgacccttcatcagttctagaaaggttttgatggaattggggccacctataagcaagg

SEQ ID NO: 277007 - DNA, 276 bp, Glycine max
  unsure (1)..(276): unsure at all n locations
attgttctcttcattacccacacacacaaaagaaacaacactccaagaggaccaccaggtcctccacctcttcctctcatcggcaaccttcaccaactccacaactcatccccacatctcngcctatggcaactcgccaaactccacggtcctctcatgtcgtttcgcctcggcgccgtgcaaaccgtcgtggtttcatcggccagaatcgccgaacaaatcttgaaaacccacgacctcaacttcgcttccaggcctctcttcgtgggcccgaga

SEQ ID NO: 277008 - DNA, 274 bp, Glycine max
ttttcatagcattttcagaggaaaatggcgggtacggtttcgacttgttacttcttcgtgtttcttctttctctccttcttccttttcagatctccgctgaggaatcctcggagaaggagttcgtactcacattggatcactctaactttcacgacactgtcagcaagcacgatttcatcgtcgtcgagttctacgccccatggtgtggtcactgtaagaagcttgctccggagtatgagaaagctgcttctatcttgagtagtcatgatcctc

SEQ ID NO: 277009 - DNA, 269 bp, Glycine max
atgctgtctaacggttcttatgtatggagtaagaagtattcattcaaggcatccccatatcctggacagaactctttgcaacgtgttatcatatttggtgacatgggaaaggctgagcgtgatggttcaaatgaatatgctgattatcaaccgggttctctaaacaccacagaccaactcgtcaaggatttagaaaattatgacattgttttccacataggagacatgccttatgcaaatggatacatctcacaatgggaccaattcac

SEQ ID NO: 277010 - DNA, 240 bp, Glycine max
  unsure (1)..(240): unsure at all n locations
actgcttctctttttcttcngctttctacaactggaggctattttggaccctgctgatttcctcgctctgcaaaacattcgtaaagctctgcaagacatgcctgcttccgatttcttctcttcctgggatttcaccgcagacccatgcaacttcgccggcgtttactgcgactccgacaaggtcatcgcgctcaacctcggcgaccccagggctggctctcccggcctcaccggccgcct

SEQ ID NO: 277011 - DNA, 271 bp, Glycine max
  unsure (1)..(271): unsure at all n locations
cgctattaagaagtatttgttttctgatgcgaaaccgacggtgaagatttngtttgaaggcacaaagttggggattcagccatctcctgtggtggcagcgtttagctctagaggacccaactcgatcaccccgcagatccttaagccagatcttatcgcgccaggtgtcaacatcctagccgggtggtccaaggcggtgggacccaccgggttaattngttgataacaggcgcgtggatttcaacatcatttctggcacgtccatgtcgtg

SEQ ID NO: 277012 - DNA, 278 bp, Glycine max
caacaacaataacaatggctgcctcactacaagctgcagctaccttcatgcaacccaccaaggttggcatagcctctcgcaacctcaaatctacacaatgcatttctaaggcttttggcttggaacctgctgcagctaaactcacttgctcccttcagcctgatctcaaagaatttgctcaaaaatgtgtcgacgctaccaaaattgcaggattcgcccttgccacctctgctctcgttgtttctggagcaagtgcagaaggtgttccaaaaaggcta

SEQ ID NO: 277013 - DNA, 277 bp, Glycine max
  unsure (1)..(277): unsure at all n locations
gattgctagaatggaatttcgatgctcagtcatctcttttaccattctcttctctcttgctcttgcaggagagagccatgtccatgcatcgctacctgaggaagattattgggaagctgtttggccaaacactcccattcccactgcactgcgagagcttctaaagcctctccctgcangtgttgaaatcgatgaactccctaagcaaattgatgatacacagtacccaaaaacattcttctataaagaagaccttcatccaggcaaaacaatgaaa

SEQ ID NO: 277014 - DNA, 275 bp, Glycine max
  unsure (1)..(275): unsure at all n locations
cgaaacatggcaagagtggtggcactccaacagaaccaactatctttctctaccttagcttcctctctttctgacttcagtggaaccagacttcaaactcaacttcagttcaagagaaagcaatgccatccaaaagggtctttctacgtctccgcatcgagcaccaagaaaatcctaataatgggaggcaccaggtnnnnnatgtgtttttgtctaggctccttgtcaaagagggtcaccaggtgactttattcacaagaggtaaagcgcctgtc

SEQ ID NO: 277015 - DNA, 282 bp, Glycine max
  unsure (1)..(282): unsure at all n locations
aaagcagattaatacttttgcaaagaaggcaaatgatggatctttatcaattgatgagatggctggaggcactcttacaatatccaatggtggtgtttatggaagccttttgagtacccctattatcaaccctcctcagtctgcaatcttgggtatgcattccatagtgagccgtccaacggttgttggaggaaatattgncccaagaccaatgatgtacgtggctctaacatatgaccacagaattattgatggaagagaggccgtgttctttctgcgacg

SEQ ID NO: 277016 - DNA, 281 bp, Glycine max
  unsure (1)..(281): unsure at all n locations
caaagctcatgacacgtttgacctacactcttgatgagattgagggaccctttgaggtgtcttctgatggcactgtgaagtttgaggagaaagatggaattgactatgcggccgtcacagtccagctaccgggaggcgaacgtgttccgttcctcttcaccatcaagcagttggtggcatcagggaagccagacagctttagtggagagtttctggtcccancataccgtggaagctctttcttggaccccaagggaagaggtgcctctacaggttatgac

SEQ ID NO: 277017 - DNA, 277 bp, Glycine max
  unsure (1)..(277): unsure at all n locations
gctcattgaactctttgagtcatggatgtcaagacatggcaagatttaccaaagcattgaggagaagctgcacaggttcgatattttcaaggacaacctaaagcacattgatgagaganacaaggtggtcagcaactactggcttggcttgaatgagtttgctgatttgagccaccaagagttcaagaacaaatatctcgggcttaaggtagactactctagaaggagagagtcccctgaagaattcacttacaaagattttgaattgcctaagtca

SEQ ID NO: 277018 - DNA, 276 bp, Glycine max
  unsure (1)..(276): unsure at all n locations
atttggagaagattgctgaaactgcaaaacgggttggaacaattgtgatctctgatgaagtttatggtcaccttgcatttgggagcaagccttttgtaccgatgggagtttttggctctactgttcctgttctcactcttggctcactttctaagagatggatagttcctgggtggaggcttggttggtttgtgacaaatgatccatctggcacttttagagaaccaaaggtagtcgagcgtatcaaaaagtattttgatcttctagnaggtccag

SEQ ID NO: 277019 - DNA, 276 bp, Glycine max
actcataacacaaagcacaaagcaaagctcatccttgagttaaaaaatggcagcagcttcttccatggctctctcatccccatccttggctggcaaggccgtgaagctgggcccatcagccccagaagtgggaagggtgagcatgaggaagaccgtcaccaagcaggtctcctcaggaagcccatggtacggcccagaccgagtcaagtacttgggcccattctctggcgagcccccgtcctacctaaccggtgagttcccaggcgactacggctg

SEQ ID NO: 277020 - DNA, 272 bp, Glycine max
ttgtaaagccttgttgctgccatggccacccacgcggctcttgcttctacaaggatcccttcaaacacaaggttcccatccaaggcctctcactctttcccaacccaatgcgccttaaagagacttgaggtgacagaattctctgggcttagatccacttcatgtgtcacatatgctaacagtgctagagaatcttccttttttgatcttgtagcttcccaactcactcccaagaccaatggatcaactcctgtgaggggagagacagtggc

SEQ ID NO: 277021 - DNA, 270 bp, Glycine max
gtgaagaggaaactgaagagacctgtagcacaaagccacctgtgaaaagcaagttctcaaggacttctaccttgggaagaatagaatggtgtattgaagagaaactttggagatctgaggaaaagggaaatggagttggggaattggaatctgtttcggatagtagctcaccttcaaggtatgagaatggtccattagagaataggtatagaggtatatatgacagtgaacattgggtgaaattgagaaatggagtgcgcaggctgtgca

SEQ ID NO: 277022 - DNA, 269 bp, Glycine max
  unsure (1)..(269): unsure at all n locations
aggatgatcttgtcgactgtnggtcgtggaggtgaaggagatgtcggacagaggattcgggatgaaatccttgttatccagagaaataatgattgtaaaggtggaangatggaggaatggcaccagaaattacacaataatactagtcctgatgatgttgtaatctgtcaggcactaattgattatataaatagtgactttgatattggtgtttactggaaaacattgaatgcgaatggnataacaaaagaacgacttctgagctatga

SEQ ID NO: 277023 - DNA, 274 bp, Glycine max
ttgggagttaggttctgcacgctctgcttccagcgagtgttctttcttcgtttcaacaccttaatttgcacacgctgcttcttcagcttgagaaatggcacaagaaacctttctattcacatctgaatctgtaaacgagggtcaccccgacaagctgtgcgaccagatctctgatgcagtgctcgatgcgtgccttgaacaggaccctgacagcaaggttgcctgtgagacatgcaccaagaccaacatggtcatggtctttggagagatcaca

SEQ ID NO: 277024 - DNA, 273 bp, Glycine max
  unsure (1)..(273): unsure at all n locations
ccagaganacnaagaaaagaagaaaatggctgtggccaacaatgtgctttgcatttncttcattatctccttaacatgtatggttcnagctcgaatcccaggggtntactctgctggtgcatggcaaagtgcccacgccaccttctacggnngctccgatgcttccggcaccatngggggngcgtgtgggtatggaaacctgtacagccanggttatggtgtgnacacggcggcattgagcacggcgctcttcaacagcgggcttagctgcgg

SEQ ID NO: 277025 - DNA, 274 bp, Glycine max
  unsure (1)..(274): unsure at all n locations
ctccantgnctgcnnctcttccncctctctctgcatcgctgcgntttccgaatcgaaaggtgaggttagtaagtaacaatggtggagaaggccaagggtangaaggnngangntgtcactcgagagtacaccatcaacctccacaaacgcttgcatggctgcacatttaagaagaaggctcctanagcaattaaggagataaggnagtttgctcnnnaagcgatggggacgaatgatgtnagagtngatgtgaagctcaacaaggctntgtggt

SEQ ID NO: 277026 - DNA, 273 bp, Glycine max
  unsure (1)..(273): unsure at all n locations
ttccttcttcttcttccaataatgtcttcttcattctctgttcgttttcttgctcctcttcctcnnnnnnnnnnnnnnngcttccccaccagctctctgccgaagacatggctctgcgccgccgccaccccaacggtggctccgtcaaccaccacctcctcctcggaggtggaggcttccaggttggagcctagagtggaggagagagatgggttctgggttttaaaggaagagtacaggggaggcatcagccctcaggagaaagtgaagctt

SEQ ID NO: 277027 - DNA, 258 bp, Glycine max
  unsure (1)..(258): unsure at all n locations
tccgcaagggcaacgccgccgtcggcgtcccgcggcaccgacaatgttgtcctncggcgtcgagaagaaatccaccgccaaactccaagactccaggtcggtgaggaagatagtgaatctggacgaccacattgcgctggcctgcgcggggctgaaggccgacgcacgcgtgctcataaacagggcacgtgtggagtgccagagtcacaggctcaccgtggaggatcccgtcacggttgagtacataacgcggtacat

SEQ ID NO: 277028 - DNA, 273 bp, Glycine max
caaaggcactctctgcgtaatgcagcttgcatttccggatgctgtgtacttggttgatgcgattgaagggggagaggagcttatcatagcgtgtaagcctgcacttgagtctaattacatcacaaaagtgattcatgattgcaaacgggacagtgaggcattatactttcagtttggcatcaagttgaacaacgtagtggatacccagattgcttattcacttatagaggagcaagaaggacgaaagagattgcgagatgactacatttcatt

SEQ ID NO: 277029 - DNA, 267 bp, Glycine max
  unsure (1)..(267): unsure at all n locations
actggggagccatcataggttggtatctctgcatgtttcgccctgacaaagttaaggcctatgtctgcctcagtgttccttttctccgcagagacccaaacatcagaacggtagatggcatgcgtgctttgtatggagacgactactatgtctgcagatttcagaaaccaggcgaaatggaagctcagatggctgaagttggcactgggtatgttnctcaaaaacatccttacaagtcgcaaaactggtcctccattccttccgcat

SEQ ID NO: 277030 - DNA, 305 bp, Glycine max
  unsure (1)..(305): unsure at all n locations
ctgatttctgttccatatgttganatgactctgaagttgatggagcgttttggagtttctgtggaacacagtggtaattgggataggttcttggtccatggaggtcaaaagtacaagtctcctggcaatgcttttgttgaaggtgatgcttcaagtgccattatttactagctggtgcagcaattactggtgggactatcactgttaatggctgtggcacaagcagtttacagggagatgtaaaatttgctgaagttcttgaaaagatgggagctaaggttacatggtcagagaacagtgtcact

SEQ ID NO: 277031 - DNA, 311 bp, Glycine max
  unsure (1)..(311): unsure at all n locations
tgcaattgaagttaaaagccttagccttccctacaactccaaacannaaagacatcatcatccatggctgcctccgtctccactgtcggagctgtcaacagagctcttttgaacctgaatggttctggagctggagcttcagctcccagttcagccttctttggaccagcttgaagaaggttattgcctcaagggtccccaacagcaaggtttccggtggaagcttcaagattgttgctgtagaagagaagaaagagattgaagagacncagcagaccgacaaggacagatggaanggtcttgcctatggt

SEQ ID NO: 277032 - DNA, 207 bp, Glycine max
  unsure (1)..(207): unsure at all n locations
tgagaaggaggttgatgctgctggagatggtgatgttctggtgatattggacttacgtcctgatgagtcattgtttgaggctggtgctgctcgagagattgttaataggattcagaagttacggaanaaagttgctcttgaaccaactgacatggtggggtttactttgaatcattagatgatgacaaatcggtctctcatagagtc

SEQ ID NO: 277033 - DNA, 304 bp, Glycine max
  unsure (1)..(304): unsure at all n locations
tataagctagtttatcgtgaggagaatatgaagttgtttgttttctttgttgctgcagtagttttggtagcatggccatgccatggcgcaggctaccaaaggttccctctccgaatgaaaactggctatggtgagcgttcttcggaggtaaaatgcgcagttttaggcttgctgtggaagcacacaacatccgagcctttaaaaccnttcctgaagagtgcgttgaaccaacaaaggactacattaatggcgaacaatttagatcagactctaaaacagttaaccaacaagctttcttttatgc

SEQ ID NO: 277034 - DNA, 299 bp, Glycine max
agtgtgcatagtacacctgtggaaatgcgtgaaaaacttgccataccagaagcagaatggccaagagccattgcggagtttgtagtctgaatcatattgaggaagcagctgttctgagcacctgcaacagaatggagatatatgttgttgctcttccaagcaccgcgttgtcaaagaagtcactgaatggatgtccaaaacaagtgggatcccggttgcagacctttgccagcatcagtttctgctatacaacaaagatgcgacacagcacctttttgaagtatctgctggtcttgatt

SEQ ID NO: 277035 - DNA, 293 bp, Glycine max
  unsure (1)..(293): unsure at all n locations
ggcagcaactgggagggcgcattagttttaggggacaagtgcaaaattaccaaaacacagtgtctcaagtggtaaatttactgggaaatgaggactcagctgcaaattacttgagcaagtgcatatactcaattgggttgggtagcatgattacctcaacaactacttcatgcctcaattctattccagcaaccaggcagtactcaacngatgagtatgctgatgttcttnttcaagcatatactgancaactaaaaacttggtatattatggagccaggaaaatggtgcntt

SEQ ID NO: 277036 - DNA, 302 bp, Glycine max
  unsure (1)..(302): unsure at all n locations
gcgaganatggcgatggcaatggcgcttcgcaggctttcatccttcaattgacaagcctctgcgccctctcttcaatgccggttccctctactacaagtcgtctttgcctgatgaagctgtttacgacaaggagcgacccggagttacatggccgaacagttgaatgctccacttgaggtcgtggatcctgagattgctgatattattgagcttgagaaagctaggcaatggaaggggctagaattgataccgtcagagaatttcacctctgtgtctgtgatgcaagcggttggatcggtta

SEQ ID NO: 277037 - DNA, 299 bp, Glycine max
ggcgatggcaatggcgcttcgcaggctttcatcttcaattgacaagcctctgcgccctctcttcaatgccggttccctctactacaagtcgtctttgcctgatgaagctgtttacgacaaggagcgacccggagttacatggccgaagcagttgatgctccacttgaggtcgtggatcctgagattgctgatatttttgagcttgagaaagctaggcaatggaaggggctagaattgataccgtcagagaatttcacctctgtgtctgtgatgcaagcggttggatcggttatgaccaa

SEQ ID NO: 277038 - DNA, 297 bp, Glycine max
gttcagtatagatggcaccgtactctctaatattccatactacaaaaaacatggatatggggtggagaaatttaactcgaccttgtatgatgaatgggttaacaagggcaatgcaccggcactgcccgagactcttaagaattacaacaagctgtgtctcttggcttcaagattatattcttgtcaggaagaacactggacaaacaggccgtaacagaagcaaacttaaagaaggctggctaccacacatgggaaaaattaattctcaaggatccacaagatccttccactccaaat

SEQ ID NO: 277039 - DNA, 295 bp, Glycine max
  unsure (1)..(295): unsure at all n locations
tctagggtttacagagaagctaagaggcgcagcgtaagcaaaagctcgtggaattgctagcaatggcgaggatcaaggtttacgagctgaggcagaagacgaaggctgatctgctgaatcaactgaaggacctgaaggcgganttgccttgcttctgttgctaaggtcaccggtggtgcccctaacaagctttccaagataaaggtggtgaggttgaacattgcccaggttttgacggtgattctcagaagcagaangctcgttganggatgctacaagaataagaatnttgccc

SEQ ID NO: 277040 - DNA, 252 bp, Glycine max
  unsure (1)..(252): unsure at all n locations
tcacaatcacaatggcgcgagtggatctggatggtaaccccatcaagccacttacgatctgcatgatcggcgctggcgggttcatcgggtcgcacctctgcgagagctcatgtccgaaacccctcacaccgtcctcgcccncgacgtctacagcgacaagatcaaacacctcctggatcccgccgattcccccctcccttgggctggccgcatcaccttccaccgcctcnacatcaaacacgactctcgcct

SEQ ID NO: 277041 - DNA, 297 bp, Glycine max
  unsure (1)..(297): unsure at all n locations
gctganagtnaagaagtancacagatgtttccattcgggcacaagggtcaanagataaaggggactatggtggttatgcngaagaatgtgttggatatcaacagcatcaccagtgttgacgggatcgtcngcaccggcttngacttcttctgagtgcactcgatacngttacttttttagcctcctccatctccatccancttnttagtgcnaccaaggctganggtgggaaagganaagttggaaaggctacaaatttganagganagataacattaccaaccataggagctaagg

SEQ ID NO: 277042 - DNA, 294 bp, Glycine max
  unsure (1)..(294): unsure at all n locations
anaagattaacaataaaagtgtggagtactgttgatagcaaagatgtttgggatcttcgacaaggggcaaaagataaaggggacagtggtgttgatgccaaagaatgtgttggacttcaacgccataacctccatcggtaaaggtggtgttatgacacagccaccggcatcttaggccaaggcgtcacttagttggtggagtaattgatactgccacttccttcttaggccgtaatatctccatgcaattgatcagtgctactcagactgatggcagtggaatgggaagttgga

SEQ ID NO: 277043 - DNA, 289 bp, Glycine max
  unsure (1)..(289): unsure at all n locations
ttgtgattcaacaagctcgcacgatggaccgtcacctctctccctcgttnccaaatttccccagccagcatgtccattttcagcgtgctaaccatgatgtcaggagttgttctatatgaacgcctctttgttccctttgcgcgcaattcacagggaacccttctggaatcacatgtttgcaaagaatgggaataggcttcataatcaatatcatagccactgtgattgctggcctaatggaaatgaaaaggaaatctgttgctgctaagtaccacttattggatgatcc

SEQ ID NO: 277044 - DNA, 294 bp, Glycine max
tattgttttcttcatatcttccttgtcactgcccgtgtgtcgccgccatggccaccgtcaccacccaagcctccgccgcaattttccggccatgtacctcgaaatcgaggtttttgaccggctcttccggtaaacttaaccgggaagtgacatgcggccaatggggtgccctccttctgcctctttcaaggttgaagccaagaagggagagtggttacctggcttggcctccccaacttacctcaatggcatcttcctggtgacaatggatttgaccctctggggctagctgag

SEQ ID NO: 277045 - DNA, 293 bp, Glycine max
  unsure (1)..(293): unsure at all n locations
gaagaacaagtagttgaganctaagaaggagaagcaaatggcttcctcaatgatctcttccccagctgttaccactgtcaaccgtgccggtgccggcatggttgctccattcactggcctcaagtccatggctggcttccccaccaggaaaccaacaatgacattacctccattgctagcaacggtggaagagtgcaatgcatgcaggtgtggccaccagttggcaagaagaagtttgagactctttcctacctgccagaccttgatgatgcacaattggcaaaggaagtaga

SEQ ID NO: 277046 - DNA, 242 bp, Glycine max
gcaatggctggaatggttcccctttgcattgcatcattggtcactctttttgttgcaacaagtgctagaattcctggggttttcaatggtggtgcatgcagggtgcccacgccactttctacggtggaaatgatgcctctggaacaatgggtggggcatgtgggtacgggaacctatacagccaagggtatggcgtgaacaccgcggccttgagcacggcgctgttcaacaacgggttgagc

SEQ ID NO: 277047 - DNA, 296 bp, Glycine max
gtccatccaaatcttaaaaatattcagtgaagatcaacctcaatggcatctcttggcgtgcgaccagttcttccccctccattaacttccatctccgacccacctcctcttttcgatggcaccaccaggttgtacatcagttattcttgccctatgcacaacgtgtgtggatcgctaggaactacaaggggctacaagataagatcaatttggtccctattaaccttcaagacaggccagcttggtataaggagaaagtctaccctgaaaataaggtgccatccttggagcacaat

SEQ ID NO: 277048 - DNA, 287 bp, Glycine max
cagaaagcaagctcatcctagagttttaaaaatggcagcagcctcctccatggctctctcttccccatccttggctggcaaggccgtgaagctgggcccatcagcccccgaagtcgggagggtcagcatgaggaagaccgtaccaagcaggcctcctccggaagcccatggtacggcccagaccgcgtcaagtacttgggcccattctctggcgagcccccgtcctacctcactggcgagttcccaggtgactacggctgggacactgctgggctttcggccgaccc

SEQ ID NO: 277049 - DNA, 289 bp, Glycine max
gctaagagagaatatggagagtagtgagggaattaggtgtaaggtatgcgtgaccggcggtgctagttacataggctcttgccttgtcaagaagcttctgcaaaagggctacaccgtccactccaccctcagaaactttaaggacgatcaaagataggccttctgagagggttgcctcatgctaatgatgagagactggtgttatttgaagcagacatatataaaccagacgagtacgagccagcaattcaaggctgtgagattgtctttcacgttgctactccctatg

SEQ ID NO: 277050 - DNA, 288 bp, Glycine max
  unsure (1)..(288): unsure at all n locations
ttcggtaacaagattagcacccaaactggtattggaacagcgattgcaattgctggtgtggcactctactcgttcatcaaagccagaatggaggaagaaaagcgacaagcaaaagcagcataagaggaaagtcgtcaacctggagntgtcttgcactgtaaatcaccacaaatttccttcaaaataattgagtgactggttcagtgttgtactatccttgtgatagcgcccttttatttttccttctatttttgtcaaatattttctttttcctttttttcctttttc

SEQ ID NO: 277051 - DNA, 292 bp, Glycine max
  unsure (1)..(292): unsure at all n locations
cttaaacgcagttanaaaggcttgttgaagctgatgctcttaagatggaaattattcccaatccaaaggaagttgacggaataaaagttcttcagctggaaactgcagctggtgctgcaataaggttctttgacaaggctattgggattaatgttcctcgatcacgattccttcctgtgaaggcaacttcagatttgcttcttgtccagtctgacctctacactttggaagacggatttgtcatcggaacaaagctagggaaaatcctgaaaaccttctatgaactgggaca

SEQ ID NO: 277052 - DNA, 289 bp, Glycine max
gtgagctataagctagtttatcgtgaggagaatatgaagttgtttgttttctttgttgctgcagtagttttggtagcatggccatgccatggcgcaggctaccaaaggttccctctccgaatgaaaactggctatggtgagcgttcttcggaggtaaaatgcgcaagttttaggcttgctgtggaagcacacaacatccgagcctttaaaaccattcctgaagagtgcgttgaaccaacaaaggactacattaatggcgaacaatttagatcagactctaaaacagtta

SEQ ID NO: 277053 - DNA, 269 bp, Glycine max
  unsure (1)..(269): unsure at all n locations
ttagccaacacaaccatcatggccaccttctgctattcagcaatcagcattacactggtcaaactgctctgaagcagctcaatgagttcgtccgcaagaccggtggcgccggcaaaggtcgcactaanatgcgccgnaccgtcaagantgctcctcagagcatttggtatggccctgaccgtcccaagtacttgggtccattctcggagcagattccatcatacctgaccggagaattccctggtgactacggatgggacatgctggat

SEQ ID NO: 277054 - DNA, 290 bp, Glycine max
gcgggcctttcctgcctagtgtttcttccaagcactctccaccctccatctctccatcttttggcttgaggagtctgaaatcgagctctttatttggagaatctctaagagtggcatccaaatcaacactaaaggtttcaaagacaaagaatacttcactcgtgaccagatgtgaaattggtgacagtctggaagaattcctcacaaaagcaacaccagataaggggttgatcaggttgttggtgtccagggagaagcattaagaacaatttccttcaaagtgaagacgg

SEQ ID NO: 277055 - DNA, 289 bp, Glycine max
  unsure (1)..(289): unsure at all n locations
gagagctcttcctccctttctcacagcaatggccgccgcagcacgccctctcgtcaccgtgcaggccctcgacggtgacntggcaaccgatgcctccgccaccgttcccatccctgacgtcatgaaggcctctatccgccccgacatcgtcaatttcgtacactcgaacatctccaagaacagccgccagccatacgccgtcagtcgtcgcgctggtcaccagacctccgccgaatcctggggtacggccgagccgtctcccgtatcccccgtgttcccggcggcggaa

SEQ ID NO: 277056 - DNA, 289 bp, Glycine max
gtgagagaaagagatcacatagcagaatggcttctactcaatgtttcttgcaccaccatgctcttaccacccctgccagatccccatcacaacgcatcatggttagcaccaagcctaaccagcttgtttgcaaggcacagaagcaagaggatattgatgtcagcccaatctctcgccggttagctctaaccgtgctcattggtgctgctgctgttggctccaaagtccaacctgctgatgcagcttatggggaagctgccatgtgtttggaaagccaaagacagacaca

SEQ ID NO: 277057 - DNA, 287 bp, Glycine max
gatgacattatggataactctcacacacgccgtggtcagccatgctggtttagagtgcccaaggttggaatgattgcagccaatgatggagttctactaagaaaccatattccacgtatccttaaaaagcacttcaggggaaagccatattacgttgatcttcttgatttgtttaatgaggttgtacttgtacaaatgttgaagtttaatttatgtggatttcatcttgttaaaatgctaaagttgactatcatgcttttcttttaggttgagttcctgactgcttc

SEQ ID NO: 277058 - DNA, 287 bp, Glycine max
gcttcaacttgctccctcagaagcgaagaagaagccacagagaaccagtctcctactctctctcacccacaagaaaaatggcatctcacatcgttggatacccccgcatgggtcccaagagagagctcaagttcgctctcgagtctttctgggatggcaagagcagcgccgaggatttgcagaaggtggctgctgatctcaggtcatccatctggaagcagatggctggtgctgggatcaagtacatccccagcaacactttctcgttctatgaccactgctcgacg

SEQ ID NO: 277059 - DNA, 283 bp, Glycine max
gcagcatatcttgttttacctattcttcttgtcgtttctcaatacgtttcaatggaaatcatgaaaccacctcagacagatccttctcaaaagaatcaacttcttattttaaagtttcttccactcatgattggctacttctcattatctgtcccatctggactaacaatttactggtttataaacaatgtcctgagcacagctcaacaagtatggttgcgaaaattgggaggtgcaaagcctgttgtgaatgaaaagcggtgggatattactgcagacgtgc

SEQ ID NO: 277060 - DNA, 276 bp, Glycine max
  unsure (1)..(276): unsure at all n locations
cgcttcctcctccgncacttctccgacgccatgggcctctccggcctcctacgttctccctgcagtctttcggagcnatttatttgggggagaccttctgcagctanatcagtataaacaacagctccaattttgaagtcagagaagtccttatcaaggctganattcanacagagagacagagaatacttcttttagacacatcanaatcgccagttganacgatacgtgcgggtgggcgntagatttattgtagnncagatgtganagagctgg

SEQ ID NO: 277061 - DNA, 288 bp, Glycine max
tttgggagttaggttctgcacgctctgcttccagcgagtgttctttcttcgtttcaacaccttaatttgcacacgctgcttcttcagcttgagaaatggcacaagaaacctttctattcacatctgaatctgtaaacgagggtcaccccgacaagctgtgcgaccagatctctgatgcagtgctcgatgcgtgccttgaacaggaccctgacagcaaggttgcctgtgagacatgcaccaagaccaacatggtcatggtctttggagagatcacaaccaaggccaacg

SEQ ID NO: 277062 - DNA, 277 bp, Glycine max
  unsure (1)..(277): unsure at all n locations
cgggnatcttatcaacatactggaggatgctattagaagtggacaccctatattgattattgctgaggatattgaacaagaggctttagcaactcttgtggtgaacaaacttagaggatcactgaagattgcagcactgaaggcccctgggtttggagagcgcaagagccagtaccttgatgatattgccatcttgactggaggtactgtaatcagagaagaggttggccttactttggacaaagctgggaaagaggttctcggatatgcctccagg

SEQ ID NO: 277063 - DNA, 284 bp, Glycine max
ttcccagtggaaaatacctctttgctggagtggttgatggaaggaacatctgggccaatgaccttgctgcttctctcactacattgcagggtcttgagggcattgtgggcaaagataagcttgttgtgtccacctcctcctcccttcttcacactgctgttgatcttgttaacgagaccaagttggatgacgagatcaagtcatggctagcatttgctgcacaaaaaattgttgaagttaacgcattggctaaggcattgtctggcaacaaggagtggccttct

SEQ ID NO: 277064 - DNA, 287 bp, Glycine max
  unsure (1)..(287): unsure at all n locations
ccaattcaagcgtgcataggatcaaaagtncatcgctagtgaagcgatatccgcaataaggaaggatgtactagccaaatgctacggtggggatatttcgagaaaaaagaaattgcttaagaaacaggctgaaggaaagaaaaggatgaagtctattggtaaagttgatgttccccaagaagctttcatggcagttttgaaacttgaaaaggaggtaatatgatcgtgtttacgtgtaagttgcaacatgatatgaattgtaaatatattaagaaaatattagaacc

SEQ ID NO: 277065 - DNA, 286 bp, Glycine max
atcagactccaaaacagttaaccaacaagcttacttttatgccagagacctcgaagtccatcccaaggacacatttgtgttcagtatagatggcaccgtactctctaatattccatactacaaaaaacatggatatggggtggagaaatttaactcgaccttgtatgatgaatgggttaacaagggcaatgcaccggcactgcccgagactcttaagaattacaacaagctggtgtctcttggcttcaagattatattcttgtcaggaagaacactggacaaacag

SEQ ID NO: 277066 - DNA, 285 bp, Glycine max
attaaggatcatgcctttgtggcatcagaatatccagttgtaataaccctagaagaccaccttacaccagatcttcaggctaaagtggctgagatggttacccaaacatttggagacatactatttactcctaactcagaaagtgtgaaggaattcccttctcctgaatcacttaagaagagaattattatatcaaccaaaccacctaaggagtaccttgaggcaaaagaaaaggaaaaaggggatgattcacagcacgaaaaggagaaagggatgattcagagc

SEQ ID NO: 277067 - DNA, 283 bp, Glycine max
cactcattctttggtgttggatatgttgctggtgtactttgtgcaattgtgtctcatcctgctgataatcttgtctcttttctgaacaatgcaaaaggagcaacagttggtgatgcggtgaagaagcttggtttgtggggtctctttacgcgtggtctccccctccgaattgttatgattggaactcttactggagcccaatggggaatatatgatgcattcaaagtcttcgtcggattgccaaccactggtggtcctgctcctgcagctgctccagctcctg

SEQ ID NO: 277068 - DNA, 281 bp, Glycine max
  unsure (1)..(281): unsure at all n locations
ggtactcgtaattggctacatagagttccagaggaatgcagagctcgacccagagaagaggttgtacccaggtggcagttacttcgacccattgggcctggcctcagacccagagaagaaagccacccttcaattggcggagatcaagcacgcccgtcttgccatggtgggcttcttgggctttgcagtccaagccgccgccaccggcaagggcccgctcaacaactgggccacccacttgagtgacccactccacacaaccatcattgncaccttctcat

SEQ ID NO: 277069 - DNA, 282 bp, Glycine max
ggccaattcagcttgctttggattgatcagcagcaacgcctgaaattcaatgttgatgttgtagagagtgaatggggccagggtgctaagcttgatgttctggaatcaaagattgcttcagatacttcacacactattaaggcaatttgcattgtccacaatgagactgcaactggggtcaccaatgacttggccaaagtgagacaaattctcgattcctaccggcatccagccctccttattgttgatggagtgtcttctatttgtgctctgatttccgca

SEQ ID NO: 277070 - DNA, 283 bp, Glycine max
cagcaatgcctcttgcaccactaactgccttgcaccctttgtcaaggtccttgatcagaaattcggtatcatcaagggtaccatgaccaccactcactcctacaccggtgaccaaaggcttcttgatgcgagccaccgtgacctgaggcgtgcaagggcagcagcactcaacattgtccccacttcaacaggagcagcaaaggcagtggcccttgtcctcccaaccctcaaaggcaaactcaatggcattgcactccgtgtgccaacaccgaacgtctcagtg

SEQ ID NO: 277071 - DNA, 282 bp, Glycine max
  unsure (1)..(282): unsure at all n locations
gtttgctgcacccatcaatggcaggcgtttctctcaagtgcggtgactgcngtgctctgctgagaaccgtagaagaagcgcaagagcacgctgaactcacctcccactccaacttctccgaatccaccgaaccggttctcaacctcatctgcaccgcttgctccaaaccctgccgatccaaaaccgagagtgatttgcacacgaaaagaaccggccataccgagttcgttgacaagacttccgaggccgttaaaccgattagtttggaggctccgaagtggg

SEQ ID NO: 277072 - DNA, 281 bp, Glycine max
agcggagatagcaatctcatctcattcatttcaatggcaactcaaggtcaagtcattacctgcaaagctgcggtggcctgggaacccaacaagcccttaactgtccaagacgttcaggtggctccgcctcaggccggcgaggtccgtgtccaaatcctcttcaccgctctctgccacaccgatgcttacacttggggcggcaaggatcccgaagtctcttcccctgtattcttggccatgaagctgcaggattgtggagagtgttggagaaggtgttacta

SEQ ID NO: 277073 - DNA, 281 bp, Glycine max
agataatcaaacaggtcttagccagtcaaaggaaaaggatgaagtgcctaaggaaagtattgttggatcacggaagtctagaaaacatgctaaaataaaattagattctgaatttggagttgtaaggggaattgactttaaaaatgtatacacggttataaactttgaaatgcctcagagtgttgcaggatatgtacatcgaattggacgtacaggaagagcatacaattctggtgcttctgtctctctggtttccacggatgaaatggatactttagaag

SEQ ID NO: 277074 - DNA, 279 bp, Glycine max
ccaatctacaataaacgatgattctcattatctccctcattttttctcttctctctttctcccatgcttctgtcctagatttctgtgttgcagattatgcaggtcctattggacctgcaggatattcctgcaagaagccttcaaaggtcacagcagatgattttgcttacagtggccttggcattgctggtaacacctcaaacattatcaaagctgcagtgacccctgcatttgatgctcagtttgctggtctcaacggtcttggcattccgcagcacg

SEQ ID NO: 277075 - DNA, 270 bp, Glycine max
cagaaagcaagctcatcctagagttttaaaaatggcagcagcctcctccatggctctctcttccccatccttggctggcaaggccgtgaagctgggcccatcagcccccgaagtcgggagggtcagcatgaggaagaccgtcaccaagcaggcctcctccggaagcccatggtacggcccagaccgcgtcaagtacttgggcccattctctggcgagcccccgtcctacctcactggcgattcccaggtgactacggctgggacatgctg

SEQ ID NO: 277076 - DNA, 279 bp, Glycine max
tagaagaataccccctcttttgctgcatcagaggagttgtaaattaagagcatggctgcacaagctcttgtattcatcatcttctcttaccttctcagcggaggctgcaagacaaagtcttggaccaagatcactccaatctccatttggcttctccagaaaagcctcctttcttgttaaggcagctgctaccccccctgtcaagcaaggatcagacagacctttgtggtttgcatcaaagcaaagtctttcttacttggatggcagccttccgggtga

SEQ ID NO: 277077 - DNA, 272 bp, Glycine max
  unsure (1)..(272): unsure at all n locations
aggctttttgaacgaggattagcttatgttggaacagattatctttcttttcccctctgggataaatacattgaatatgagtacatgcngcaggactgggcctgccttgctgtgatctacaccagaatattagagaatccaaatcaacaattagatcggtatttcagcagcttcaaagagttagctggaaatcgtcctttatcagagttacgaactgctgatgaagctgctgcagtggcaggagttgcttcagaggctactggccaagctac

SEQ ID NO: 277078 - DNA, 272 bp, Glycine max
aaaaaaaaccctctctttctctctcttccaaaacctaattttcattttttctcttcaaacaaattttacaaaatgcgtgagatccttcacatccagggtggccaatgcggcaaccagatcggcgccaagttctgggaggtggtttgcgcggagcacgggatcgaccccactggaaggtacggtggggactcagagcttcagctcgagaggatcaatgtctactacaacgaagccagctgcggccggttcgtgccgcgcgcggttctcatgga

SEQ ID NO: 277079 - DNA, 209 bp, Glycine max
gctgatggtaatgaaactgctggatcatacaaagttgctgtggttaacaggaagagaccctcaattcttgcactttctaggcaaaagttgacccaacttccaggaacttctattgagggagttgaaaagggtggctacaccatttcagacaactcatcaggtaacaagcctgatgttattttgattggaactggttctgagttggaaat

SEQ ID NO: 277080 - DNA, 274 bp, Glycine max
tctgaattcattagttatcctatttacctttggactgagaagacaaccgagaaagagatcagcgatgatgaagatgatgaacccaagaaggaggaagaaggagacattgaggatgttgacgaggagaaggagaaggattccaagaaaaagaagaagatcaaggaggtgtctcatgagtggcaactcatcaacaagcagaaaccaatttggctgcgaaagccagaagagatcaccaaggatgaatacgcttctttctacaagagcctcaccaatg

SEQ ID NO: 277081 - DNA, 265 bp, Glycine max
  unsure (1)..(265): unsure at all n locations
ctcgagaatataggagagagacagcaaaaggagcaaaaatgtatagtgcngctacagcncgctacagttgatgttcagctgactggaaaagagggagaagaaaaggtcaagttgcacacgcactcttactgttgtctagattatgcacagatatatgatgtggttaggtacagaatacatcgcatgaaaaagctgctgaaagatgaattggacaacaagaacacaattgaggaatatatctgtacaanatgtggaaaaagatatt

SEQ ID NO: 277082 - DNA, 270 bp, Glycine max
gctaagggctacaaaatgaaaacccacaaggcatctgcaaagcggtttagggtgaccggacgaggcaaaatagtgcgtaggagagctggcaagcagcatttgctcgtcaagaagaataccaagcgcaaatcccgactctccaaaatgcacgcggtcagcaggagcgactatgacaacgtaattggagccttgccatttctgtttactttcagatatggcaaggctccaattacgttgtcatatctgaaagtaaacagaaatgctacatag

SEQ ID NO: 277083 - DNA, 268 bp, Glycine max
ctcattcttcatccatagacatggccaccgtcacttctgcagccgttgctattccctcattcactggcctcaaggcaagcgcaggcaaagtgagtgccgcagttaaagtctcagctccccaagccacaaggttgggcatcaaggcttcgctgaaagacgttggagtcgctgttgtggccactgccgcgagtgcagtgctggctagcaacgccatggccattgaagtgttgctgggtggtgatgacgggtctctggctttcgttcccaa

SEQ ID NO: 277084 - DNA, 263 bp, Glycine max
  unsure (1)..(263): unsure at all n locations
aaaagattgctattctgggatttgccttcaagaaagacactggtgacacangggagactcctgccattgatgtatgccaggggctactaggtgataaggccaacctgagcatatacgacccgcaagtaaccgaggaccaaatccagagggatctatccatgaacaagtttgattgggatcatcctatccacttgcagcccacaagtcctactactgtgaagaaggtcagtgttgtttgggatgcctatgaagcaacaaaggat

SEQ ID NO: 277085 - DNA, 271 bp, Glycine max
ctggtggatgttgcccacactgctgtaagaaatgatccaagaatcaactggctctgcaatccagtccataaacacagggaactgcgtggcctcacttctgctgggaaaagcaataggggtttacgtggcagaggacatctctaccacaaaaatcgtccatcacgcagggcaacctggaagagaaacaataccctctcccttcgtcgctaccgttgattttgttgcagttatcgtatgttgcttcattttctgagtatttggaggaaaatcg

SEQ ID NO: 277086 - DNA, 269 bp, Glycine max
attctcaagaccactactggaaccccatttctcatccctacaactggtactggtgcttgggagagtgctctcacaaacacactgtctcctggggatcgaattgtatcgttcctgattggccaattcagcttgctttggattgatcagcagcaacgcctgaagttcaatgttgatgttgttgagagtgaatggggccatggtgctaagcttgatgttctggaatcaaagattgcttcagatacttcacacactataaaggcaatttgcat

SEQ ID NO: 277087 - DNA, 205 bp, Glycine max
tagtgcctccttgccagaagttaaaatggcccaagaaactttcctattcacatctgaatcagtgaacgaggggcaccctgacaagctctgtgaccagatctccgatgctgtgctcgatgcatgcttggagcaggaccctgacagcaaggttgcctgtgaaacctgcaccaagaccaacatggtgatggttttcggagagatcaca

SEQ ID NO: 277088 - DNA, 273 bp, Glycine max
  unsure (1)..(273): unsure at all n locations
gnaacaaattgctacatagcacacactccctcttctcttctacggttatggcgtccacgttgggcacttcttcaattgcggttcttccttcgcgctgcatctcttctttttcttccaagccttccattcacacactctctctaacttcagggcagagctatgggcggaaattttatgnaggaattggaattcatggcatcaagggaaggtctcagctctcagttgccaatgttgccactgaagttaactctgtagaacaggcccaaagtattg

SEQ ID NO: 277089 - DNA, 268 bp, Glycine max
cacgaatatcttgttgtttggagcgatccgagaaaaactctgtaaacatgttggtttaccaggacctccttacaggtgatgagcttctctctgactccttccgttacaaggaaattgagaatggaatgctgtgggaagttgaggggaagtgggttgttaaaggagcagttgatgtagacattggtgcaaacccttctgctgagggtggaggagaagatgagggagttgatgatgcagctgttaaggttgttgacattgttgacacatt

SEQ ID NO: 277090 - DNA, 266 bp, Glycine max
caggagtatataatctgagcgatgtcagatctcgaggctcccttgcgccctaagaggaagaaggtttgggtggactattttgttcagtttcgatggatccttgttatttttgtggtccttcccatctccttcaccatttatttccttacataccttggggatgtaagatccgagtggaagtcctataagacgcgtcagaaggaacatgatgagaatgtgaagaaggttatcaaacgtctcaaacagaggaatccatcaaaagatgg

SEQ ID NO: 277091 - DNA, 267 bp, Glycine max
  unsure (1)..(267): unsure at all n locations
ctctccttctacattactctctcttctcctaaaaatttctaatgcttccattgcttcatctgactcactcatcaatggctctgagactgaaccctatccccacccaaaccttctccctcccccaaatgcccagcctcagatctccccgcttccgcatggcttccaccctccgctccggttccaaagaggttganaatattaanannccattcnntcctcccananangtgcatgttcaagtnacccactctatgcntccncaganga

SEQ ID NO: 277092 - DNA, 267 bp, Glycine max
ttatcatcgtacctgatcaagaagttgacacgtcacgggtccctaaacggttgttagaataccctgttgttgatttatccagtgtggcgcacacacgctatgttgctatgtacgagtacgcgagcgacattgatgagccgacacacttgtacctaaatgcgaaaccgtatgaagcagcggctacggaaaccccgaaggtggggtccacagaggtgtggtatgtgatcaacttgacggaggataatcacccgcttcacattcatttgg

SEQ ID NO: 277093 - DNA, 262 bp, Glycine max
  unsure (1)..(262): unsure at all n locations
cncacatggnggtggttntggnggcggccaaggaggtggagcaggtggagggtatggtgctggtgccgagcatggtggtggatatggcggtggtgaaggaggtggagcaggtcgagggtatgntgcanctngagaacatggtggtggttatngtggtggtcaaggaggacgaagtggaggaggntatggtgctgntggagatcatggtgctgctggctatgntggtgnagcttgangtgnagctcgtngaggctatggtgcc

SEQ ID NO: 277094 - DNA, 265 bp, Glycine max
cacattttttgttgcattatcacaaacacctcgtccctcacaatgcagctagcaatggcggccaacgctgtcgtttcaccgtcgccgttccgacctcagccctttctccggtcatccttctccggcgtctccgtcaagctcactccccaatccataacgctttcacgctccaagcccctcaccgtcttcgccgccaccaagaaggccgtcgccgtcctcaaggggacctccgccgtcgaaggcgtcgccactctcatccaagaag

SEQ ID NO: 277095 - DNA, 262 bp, Glycine max
ctaggcttcagaccgtgaaccgcaaactcactgcaatgaacaagttgttgatggaggagaatgatcggttgcagaagcaggtgtcacagcttgtttgtgagaatggttttatgaggcagcaattgcatactccatcggcaacaactactgatgctagttgtgattcggtggttaccactcctcagcataccctgagagatgctagtaaccctgctggactcctatcaattgcagaggaaactttgacagagttccttcaaag

SEQ ID NO: 277096 - DNA, 269 bp, Glycine max
ctctctcagaatttctatctatctcttgtttcaatttcaacaacggttactcctttttcgttttgagtttcaatcaagccatcatcatgtctaccgcatcgcaacccaaggccaagaaaacggcgtcgtccaagaagcccctctcccaccctcccttcgccgtgatgatagcagaggcgattgcgagtctgaaagagagaaccggttcgagccaatacgcgataaccaaatacatcgaagggaagcacaaggagttgcctgcaacctac

SEQ ID NO: 277097 - DNA, 257 bp, Glycine max
  unsure (1)..(257): unsure at all n locations
ctcgaggactagttctagatcgcgagctagaaccnntagctcgagccgctcgagcttcgaggttccaggcaactctgctggcaccgtcacagcctactacttatcttcaaanggagcaacatgggatgagattgactttgaattcttgggtaatttgagcggtgagccatacatccttcacaccaacgtgttcagccaaggcaagggcaatagggagcaacaattctacctctggtttgacccaactgcagattttc

SEQ ID NO: 277098 - DNA, 256 bp, Glycine max
gatttctgacgatgaggatgaggaagagaagaaggatgaggagggtaaggtggaggatgttgatgaggagaaggagaaggaagaaaaaaagaaaaagaagatcaaggaagtgtcacatgaatggtccttggtgaacaagcagaagcctatttggatgaggaagcctgaggagatcacaaaagaggagtattctgctttctacaagagtcttaccaatgactgggaagagcatttggctgtcaagcacttctctgtt

SEQ ID NO: 277099 - DNA, 265 bp, Glycine max
  unsure (1)..(265): unsure at all n locations
tccaaatccaatggcttcagagaagaaacttncgaacccaatgagggagataaaagtgcagaagctcgtcctcaatatctctgttggcgagagtggagatcgtctcaccagagccgccaaggtgttggaacaacttagtggccaaaccccagtgttttccaaagcaaggtacactgttcgttcctttgggattagaagaaatgagaagattgcatgctatgtcactgtcagaggtgacaaggcaatgcaacttttggagagtggt

SEQ ID NO: 277100 - DNA, 153 bp, Glycine max
gaatggtcactttctgagttggatttgaatggtctatgtaaaatatgctatgtttatgtcttagattctttactgacttctgtccttttttttaagtatctattttatagttgctaatgtatatgtgtattaaggggccttaataataaatca

SEQ ID NO: 277101 - DNA, 264 bp, Glycine max
gtgtatttccctacctctcccttcaagatgcagatcttcgtcaagaccctcaccggcaagaccatcacccttgaggtggaaagctctgacaccatcgacaacgtcaaggccaagatccaggacaaggaaggaatccccccggaccagcaacgtctcattttcgccggaaagcaacttgaggacggccgtacccttgctgactacaacattcagaaggagagtactcttcacctcgtcctccgtctccgtggtggcatgcagatc

SEQ ID NO: 277102 - DNA, 264 bp, Glycine max
gtcatttcttcagatgaaccattgctctgcgtggatgaccttgctgaccagattgcagaagtgcttgatttctttgggctaagggaggttctgtgcttgggtgtaacagctggtgcttatgtcctcactctattagctatgaaatacaaagaacgagtgcttggattgattcttgtttcacctatttgcaaatctccttcatggactgaatggctttacaacaaggtcttaatgaatttattatacttctatggtatgtgcggt

SEQ ID NO: 277103 - DNA, 304 bp, Glycine max
  unsure (1)..(304): unsure at all n locations
gaaggtgaaagatattgaacttcaagtgacaganagattcagggacagagtggtggaggaaggttataaccctagttatggagctagacctctaagaagagccataatgcgacttttggaggacagcatggctgagaagatgcttgccagagagatcaaggagggcgactctgttatagtggatgttgattcnnctggtaatgtattgtgctcaatggtagcagcggagcccccgaatcctgccagagacgctcctgtataatgcggttaatttgctaatactatgtacttatttgtttaaacc

SEQ ID NO: 277104 - DNA, 301 bp, Glycine max
  unsure (1)..(301): unsure at all n locations
cacaaggcagaaagcaagctcatcctagngttttaaaaatggcagcagcctcctccatggctnctctcttccccatccttggctggcaaggccgtgaagctgggcccatcagcccccgaagtcgggagggtcagcatgaggaagaccgtcaccaagcaggctcctccggaagcccatggtacggcccagaccgcgtcaagtcttgggcccattctctggcgagcccccgtcctacctcatggcgagttcccaggtgatacggctgggacatngctgggtttcggccgacccagaaacttcg

SEQ ID NO: 277105 - DNA, 300 bp, Glycine max
  unsure (1)..(300): unsure at all n locations
gcaaagttaataaaattctttgagttgaacacaggggccaagattccttctgttgggttaggcacttggcaagctgagcctggtgttgtagccaaagctgtcaccacagccattctggttggatacaggcatattgattgtgctcaagcgtataacaatcaagcagagattggttctgctcttaagaagcttttgatgaggtgtggtgaagcgtgaggacttatggatcatntccaaactctggtgttcagatcatgcttcagaagatgtgcccaaattttggataaaacatgcaggant

SEQ ID NO: 277106 - DNA, 190 bp, Glycine max
acaggattggctacttatggagagaaagagtggtacttcttttcaccacgggaccggaaatacccaaacggttcgaggccgaaccgggcggctggcaccggttactggaaggcaaccggggcggataagcccattggtcagcccaaaccggttgggattaaaaaagctttggtgttttacgcagggaaag

SEQ ID NO: 277107 - DNA, 176 bp, Glycine max
  unsure (1)..(176): unsure at all n locations
tgttgatcgagataactagaaacagtgttatgaaaatgaaggtccttgtnttcttcgttgctacaattttggtagcntggcaatgccatgcgtacgatatgttccctctccgaatgaacactggctatggtgcccgtactccggaggtgaaatgcgcaagttggaggcttgctgtg

SEQ ID NO: 277108 - DNA, 307 bp, Glycine max
aatagattatcctaagtctttgggaatagtgctgcaatggcttcaagtcaggaggaggtgacccttttgggagctactggaagcccatttgtgtgcagggttcatattgccctcaagttgaagggagttcaatacaaatatgtcgaagaaaatttgaggaacaagagtgaactgcttctcaaatccaacccagttcacaagaagttccagtgtttattcacaatgagaagcccatagcagagtctcttgtgattgttgaatacattgatgagacatggaagaacaaccccatcttgccttctgatcc

SEQ ID NO: 277109 - DNA, 300 bp, Glycine max
  unsure (1)..(300): unsure at all n locations
ctagttctagatcgcgagcagccacgtgnnagtgttttgtttgtntccttcggaagcggtgggacactctcgagtgcacagatcaacgagctggttctcgggttggaaaaaagtgagcaacggtttctgtgggtggtgaagagcccaaacgaagaaatagccaangcgacgtacttcagcgccgagagccaagcgganccttgcagttcttaccggaagggttcgtggagagaacaaaaggaagagggtttttggttcagtcttgggctccgcagcctcaggtattgggccatccatcca

SEQ ID NO: 277110 - DNA, 183 bp, Glycine max
  unsure (1)..(183): unsure at all n locations
gtttgttgtgagctataagctagtttatcgtgaggagnatatgaagttgttacgttttctttgttgctgcagtagttttggtagcatggccatgccatgggcgcaggctaccaaaggttccctctccgaatgaaaactggctatggtgagcgttcttcggaggtaaaatgcgcaagttttagg

SEQ ID NO: 277111 - DNA, 122 bp, Glycine max
catttctccatttccattttctctctcacttttcaagaatcgtaagctatgggaaagtcttacccaactgtgagtgctgattaccagaaggccgttgagaaggcgaagaagaagctcagagg

SEQ ID NO: 277112 - DNA, 294 bp, Glycine max
  unsure (1)..(294): unsure at all n locations
cncanaatggngcgagtngatctgggacnggaaccccatgaaggcacttangatctgcatgatcggngctggnggcttcataggctcgcatntctgcgagaagctcatgtccgaaanccctcacaccgtcctcgccctcgacgtctacaacgacaagatcaaacacctcctcgaaccctccgattccncctgggcggccgcntcacnttccacagaatataacaattnagcatgatctcgcttcgaangctgcatcagagggagatcaaatnattnatttggctgnaattgcac

SEQ ID NO: 277113 - DNA, 284 bp, Glycine max
gttgtgttcgacgaggacgagattcctagcggcgtggatgcagggaaaatctccatgagcgaagaagaccttctcaatgcggctggtgagactacagcgttactttggatgccaagggaacctacagtttctactgttcgcctcaccaaggagctggtatggtgggaaaagtcaccgttaattattatatattgtctcctacgtctaagttctcatatgcttgttttcctagaagagcctaattcatcttctgttagggcctatgggatgaatcaacaatataa

SEQ ID NO: 277114 - DNA, 311 bp, Glycine max
  unsure (1)..(311): unsure at all n locations
gttcctaccatagtgctaggaaagtgagtgagaganagagatcacatagcagaatggcttctactcaatgtttcttgcaccaccatgctcttaccacccctgccagatccccatcacaacgcatcatggttagcaccaagcctaaccagcttgtttgcaaggcacagaagcaagaggatattgatgtcagcccaatctctcgccggtagctctaaccgtgctcattggtgctgctgctgttggctccaaagtccaacctgctgatgcagcttatggggaagctgccaatgtgtttggaaagccaaagacag

SEQ ID NO: 277115 - DNA, 311 bp, Glycine max
  unsure (1)..(311): unsure at all n locations
gtgatttcagtgagtgatcggtgttcacttgatctcatcataatcgtcagcgtcaattgaagaagntgccgatcagaaacatcgccgtcggaaggcctgaagaggcgactcaccccgacacgttgaaggcggctttggctgagttcatctcaaccttcatcttcgtgttcgccggctcaggctccggcatcgcctacaacaagctcccgacaacggcgctgccacccctgccggcctcatctccgcctccatcgcccatgcattcgccctcttcgtcgccgtctccgtcggcgccaacatctccggcggcc

SEQ ID NO: 277116 - DNA, 307 bp, Glycine max
  unsure (1)..(307): unsure at all n locations
tacaaaacactcactatcctaaggncaaattgcctaaaactattacacacaaatggaagtangatgacctattgaaggctcccaacttacttccaatgaaaggtcttttgttacaaaatttgaaagcaaagcaaattgccaattacaaaattacatanaaaaattcctcaattttggtggttattctctctttggtgtttcactctttggagtgctcttagtccaatagctcttaaggtggttggcccctagcttcttgactcaaattcttcaagggatgacaccaatcctccttccaatccctata

SEQ ID NO: 277117 - DNA, 293 bp, Glycine max
ttgaagttgaagtcttgcccttctctcttcaactccaaacacaagacatcatcatccatggctgcctccgtctccactgtcggagctgtcaacagagctcttttgaacctgaatgggtctggacctggggtttcagctcccagttcatccttctttgggagcagcttgaagaaggttattggctcaaggtcccccaacacaaagatttcctctggaagcttcaagattgttgctgtagaagagaagaaagagattgaagagacccagcagaccgacaaggacagatggaaggg

SEQ ID NO: 277118 - DNA, 292 bp, Glycine max
gtcaccatgcattatttttatagatgaaattgatgcaattggtacaaagcgttttgatagtgaagtaagtggagacagagaggtacaacgaactatgttagaattgcttaatcagcttgatggttttagcagtgatgaccggatcaaggtgatagcagcaactaaccgtgcagatattcttgatcctgccctatgcgttctggtcgtttggatcgtaaaattgagtttccacacccaagtgaagaagcaagagctcgaattctacagattcattcaaggaagatgatgttca

SEQ ID NO: 277119 - DNA, 304 bp, Glycine max
  unsure (1)..(304): unsure at all n locations
gttgagggaggtcatcgagccattgtcttcaatcgtgttgtcggtgtcaaggataaggtttatcctgaagggacacatattatgattcctttgttcgagaggcctgtgatctacgacgtacgtgcacgacctcatttagtagagagtacatcagggagccgtgatctccaaatggtgaaaattggactcagagtcctacgcgcctgttcctgaccagttaccgacagtttatcgaaccctgggtgagaattataatgaaagggtcctgccttcnttatacacgaaatctcaaagctgtagttgc

SEQ ID NO: 277120 - DNA, 292 bp, Glycine max
tggaaacaggcatagcatgctacactcgcgggcctttcctgcctagtgtttcttccaagcactctccaccctccatctctccatcttttggcttgaggagtctgaaatcgagctctttatttggagaatctctaagagtggcatccaaatcaacacaaaggtttcaaagacaaagaatacttcactcgtgaccagatgtgaaattggtgacagtctggaagaattcctcacaaaagcaacaccagataaggggttgatcaggttgttggtgtccatgggagaagcattaaga

SEQ ID NO: 277121 - DNA, 281 bp, Glycine max
  unsure (1)..(281): unsure at all n locations
gaacaagtagttgagaactaagaaggagaagcaaatggcttcctcaatgatctcttccccagctgttaccactgtcaaccgtgccggtgccggcatggttgctccattcactggcctcaagtccatggctggcttccccaccaggaagaccaacatgacattacctccattgctagcaacggtggaagagtgcatgcatgcaggtgtggccaccagttggcagaagaagtttgagatctttctactgccagacttgatgatgcacattggcaangagtaga

SEQ ID NO: 277122 - DNA, 293 bp, Glycine max
tggtaatggcagcgtcactacaagcagcagctactttcatgcaacccaccaagttgagtaggagcaacactttgcagcaaaagtctactcagtccatttccaaggcttttggtttggaacctgttggagctaaaaaggtcacatgctcccttcaggtgatcttaaggacttggctcacaagtgtgttgatgctaccaaaattgcaggattcgcccttgccacctctgccctcgttgtctctggggcaagtgctgaaggtgttccaaagaggctaaccttcgacgaaatccaga

SEQ ID NO: 277123 - DNA, 280 bp, Glycine max
  unsure (1)..(280): unsure at all n locations
cgcantgctgttattcgcaccgcaaacaaacagtgagccatggccgtcggaaagaacaagcgcatctccaaagggaaaaagggtggcaagaagaaggcagctgatccctttgccaagaaggattggtatgacattaaggccccttctcttttcaagtgaaaaatgttggcaaaaccctcgtctctcgtacgcagggtaccaagattgcttctgaaggacttaaacatagagtgtttgaggtctcttggcgatcttcaggggtgaggatctgcttcaagaa

SEQ ID NO: 277124 - DNA, 273 bp, Glycine max
caaggttcctctcattcttggtatctggggaggcaagggacaaggaaaatctttccaatgtgagcttgtctttgccaagatgggaatcaaccccatcatgatgagtgctggagagttggaaagtggaaatgcaggagagcagcaaaactgatcaggcagagataccgtgaagccgcagacttgatcaagaagggaaagatgtgtgctctcttcatcaacgatcttgatgcaggagtggtcgtcttggtggaaccacccaatacatgtcaacaa

SEQ ID NO: 277125 - DNA, 226 bp, Glycine max
  unsure (1)..(226): unsure at all n locations
atcctctnctttctctctctaccattgcnatggatccctacaagcaccggccatccagcgccttcaattctnccttctggactacaaattctggtgctcctatttggaacaacaactcctctttaaccgttggagctagaggtccaatcctgctggaggattatcatcttgtggagaagcttgcaaattttgatagggaacgtatcccagaacgtgttgtccatgc

SEQ ID NO: 277126 - DNA, 277 bp, Glycine max
cttcctcttcctcagtagtgcgattttcgattctcttctctgcaactatgcctaaccctaaggtcttcttcgacatgaccatcggcggtcaacctgccggccgcatcgtgatggagctctacgccgacgtgactccgagcaccgccagaacttccgcgcgctctgcaccggcgagaagggcgccgggcggagcggcaagcccctccattacaaaggctcgtcttccaccgcgtgatcccgaattcatgtgccagggcggcgattcaccgccggaaag

SEQ ID NO: 277127 - DNA, 281 bp, Glycine max
gggtttttgagtgcggtgcggcgatcctagcactctcttctgcagctttcgccgacagcttcattcaccatggctgagcaaaccgagaaggcttttttgaaacaaccaaaagtgtttctcagctcgaagaaaactgggaagggaaaggacccggaaagggtgggaaccgcttttggaaatccattgggcttggatttaagactcccagggaagccatcgaaggaacctacattgacaagaagtgccccttcatggcatgtttccatccgtggccgtatctt

SEQ ID NO: 277128 - DNA, 295 bp, Glycine max
  unsure (1)..(295): unsure at all n locations
caaaacagcagagagaagagaagggctacacaaacacaatctctaatggcactcaggatgtgggcttcttccactgccaatgcactcaaactctcttctgtctccagaccttcatctcttggcctcctatttctntctcccagatgcttatcttcgtcttgggatggacttaagtacgtgattcacatgaatgggtcaagcacgaangctccagtcgccaccattggtatcatgacnatgcccaggaccatcttggngaggttgtgtatgtggagctgccagaaccaggtggcac

SEQ ID NO: 277129 - DNA, 276 bp, Glycine max
aacagaaacaaaagtggcagtattaggtggcatcaccgaagtgcagggagctgccaacagcgtcgagatcaacaatctcgctcgctttgctgtagaggaacaaaacaaaagagagaattcagttctggagtttgtgcgggtgattgtgcaaagcagcaagtggttgctggagtgaattactacataacattgggaagcaaagatggtgagttaaaaatgagtataaagcgaaggtttgggagagggattcccagagttgctagaatcagccaacat

SEQ ID NO: 277130 - DNA, 279 bp, Glycine max
ttcaaaatcaaaaacaccaaatcctctaattcaagtttgcaccaagttttcctgagaaaatgtctggtcgtggaaagggtggaaagggtttgggaaagggaggtgccaagaggcacaggaaggttcttcgcgacaacattcagggttacgaaacctgcgattcgtaggttagcgagaagaggtggcgtgaagaggatcagtggtttgatctacgaggaaaccagaggggttctgaagatattcttggagaacgtgattcgcgatgctgtgacttatacc

SEQ ID NO: 277131 - DNA, 259 bp, Glycine max
cgagataactagaaacagtgtgatgaaaatgaaggtccttgttttcatccgttgctacaattttggtagcatggcaatgccatgcgtacgatatgttccctctccgaatgaacactggctatgtgcccgtactccggaggtgaaatgcgcaagttggaggcttgctgtggaagcacacaacatctttggctttgagaccattcctgaagagtgcgttgaagcaacaaaggaatacatccatggcgaacaatatagatca

SEQ ID NO: 277132 - DNA, 302 bp, Glycine max
  unsure (1)..(302): unsure at all n locations
ggccaccagagcttttgcttggngccacttattatggcactgctgtggatttatggagtacaggttgcatacttgctgagctgtatgcaggcaagcctataatgcctggaagaactgaggtggagcaattgcataaaatttttaaactttgtggttcacttctgaggactattggagaaaatcaaagttgcctcatgcaacaatatttaagcctcaacaaccctataggcgatgtgtttctgaaacgttcaaggagtttcctgcacctgcaatagaattgatagagatccttttgtccatag

SEQ ID NO: 277133 - DNA, 300 bp, Glycine max
  unsure (1)..(300): unsure at all n locations
ctcattcttcatccatagacatggccaccgtcacttctgcagccgttgctattccctcattcactggcctcaaggcaagcgcaggcaaagtgagtgccgcagttaaagtctcagctccccaagccacaaggttgggcatcaaggcttcgctgaaagagttggagtcgctgttgtggccactgccgcgagtgcagtgctggctagcnnccgccatggccattgaagtgttgctgggtggtgatgacgggtctctggctttcgttcccaacaatttctccgtggcctctggggagaagatcg

SEQ ID NO: 277134 - DNA, 294 bp, Glycine max
  unsure (1)..(294): unsure at all n locations
aagagacccagcagaccgacaaggacagatggaagggtcttgcctatnatatctcagacgaccaacaagacatcacaagaggaaagggtttggttgactcccttttccaagctccacaggatgctggaactcactatgcagtcatgagctcctacagtacctcagcactggacttcgccagtacttggacaacaaaatggatggattctacattgctccagcttttatggacaagcttgttgttcacatctccaagaattcatgaccctgcccaacatcaaggttcctctcatt

SEQ ID NO: 277135 - DNA, 288 bp, Glycine max
  unsure (1)..(288): unsure at all n locations
ttatccctctaatcactctagctgttgcaaatttctactatanttcaatggcttctgcagatgttgagttccgttgctttgttggtgggcttgcttgggtcaccggcaacgatgccctcgagaaagccttttcaatctacggcgacatcgtgaatcgaaggttatcaacgaccgtgagactggaaggtccagaggattcggatttgtgaccttcgcctcagagcagtcaatgaaagatgcgatcgcaggaatgaacggccaggaccttgacggtcgtaacatcactgt

SEQ ID NO: 277136 - DNA, 289 bp, Glycine max
  unsure (1)..(289): unsure at all n locations
agacgcttcgcaaatctcaatcgaatctcagaaaaatgagagaaatcatcagcattcacataggtcaggccgggatccaggtcggaaactcctgctgggaactctactgcctcgaacatggcatccagcccgacggcatgatgccttctgacccaccttcggtgtagcccacgacgcnttcaacaccttcttcagcgaaaccggatctggcaagcacgtcccccgtgctgtcttcgtcgacctcgaacccaccgtcatcgacgaggtccgctgcggcacctaccgtcaa

SEQ ID NO: 277137 - DNA, 288 bp, Glycine max
  unsure (1)..(288): unsure at all n locations
acnagcngccgctcgcnatctagaacctcgagcngctgcgagcnnnaccnagcactctctctcaccaaagccttcctagaacgaaaanacnaaagaagagcnantttccctcaccaaagaagaagaagcaaacaatggccgatcaacttaccgataacagatctccgagttcaaggaagccttcagcttgttcgacaaggacggcgatggttgcatcacaaccaaggagcttggaactgttatgcgttcattggggcaaaacccaactgaggcagagtccaggactga

SEQ ID NO: 277138 - DNA, 281 bp, Glycine max
tctaaatttatcattgctagcctgttagctttttccttgggatgcatggcttttgtttgtaaagctatggttacttgatttgtcttttgcaggatctgggtccagttacttgtatggtttctttgaccaagcctggaaagagggaataccaaggatgaagccgaggatttagtaaaaaaggcagtttcactggctattgctcgtgatggtgcaagtggtggggtggtgcgaacagtcataataaactcagagggagtgaccaggaatttctaccctggcga

SEQ ID NO: 277139 - DNA, 278 bp, Glycine max
  unsure (1)..(278): unsure at all n locations
ttcaaaagaaccgagagtatcgacctttcaaaggacaggcttgcactgcaaangcttcgtgaagctgctgagaaagctaagatcgagctgtcttcaacatctcaaactgagatcaacctgcctttcatcactgctgatgcattggtgctaagcatctgaacataacattgactagatcgaagtttgaggcttggtgaatcacttgattgaaaggaccaaggtaccatgtaaaagctgctagaaggatgctaacatctctatcaaggatgttgatgagg

SEQ ID NO: 277140 - DNA, 282 bp, Glycine max
ctactaagagttgctgcttcttcagccactgccgcacctcgcagcctctgtgccctcaacaaccatggctgaaatcgaaactaccgttccagatcccacccaaatcgacgtcaaactcttcaatcgctggagcttcgaggatgttgagttaatgatatgtctctggctgattacattggagtgtccccatcaaagcatgctacatatgttcctcacactgctggtaggtactcagtgaagaggttcaggaaagcgcagtgccccatgttgagaggctcacca

SEQ ID NO: 277141 - DNA, 278 bp, Glycine max
agctttagctggtgatattattgcacttgcaggtttgaaagatactattacaggtgaaacattgtgtgaccctgataatccaattgtgcttgagcggatggacttcccagatcctgttattaaggttgctattgaaccaaaaactaagctgatgttgacaagatggcaactggtttaatcaagcttgcacaggaagacccttctttccacttctcccgtgatgaagagataaaccagacagtgattgaaggaatgggagattacatcttgaaatcatg

SEQ ID NO: 277142 - DNA, 282 bp, Glycine max
caagttgggtgggatatgtagccgtttgcgaggacaggagagagataacacgaatgggaagaagagacattgtgatctctctcaggggaacttccacgtgtctagaatgggcagaaaatctcagggctcatatgattgacatgcccgcaacgatagctcagaagaagcccaaggaaagcccaaagtggagtgtgggttcatgagcttgtacaaaacaaaaggagcacaagtgccaagtctagcagaatccgttgtagaagaagtgaggagactgatcgatct

SEQ ID NO: 277143 - DNA, 296 bp, Glycine max
ctctttctctctttctagttcgtgttcttcgtcgcaaatccgaagtaggatctctcttgttttttctctaggtttttcgcgatggcgtcgaagcgaattttgaaggagcttaaggatttgcagaaggatcctccaacatcttgcagtgccggtctgttcatgaagatatgtttcattggcaagctacaattatgggtcctccagacagtccctatgctggaggtgttttcctagtgactattcatttccctccagattatccctttaagccacccaaggttgcattcaggacgaag

SEQ ID NO: 277144 - DNA, 288 bp, Glycine max
  unsure (1)..(288): unsure at all n locations
ctttaaacgccgaagaaagttcatccaanctccgaagcccttcaccgcattgcaaccatgtncgagaagaaaggttagagagccaaaggaagaaaacgtgactctgggcccagctgttagagatggcgaacatgtctttggcgtcgctcgctctttgcctccttcaatgataccttcattcatgtcactgatctgtccgggagggaaacacttgtccgcatcacaggtggaatgaaggttaaggctgacagagatgaatcgtctccctatgctgctatgcttgctgca

SEQ ID NO: 277145 - DNA, 276 bp, Glycine max
  unsure (1)..(276): unsure at all n locations
aaggcagaaagcaagctcatcctanagttttaaaaatggcagcagcctcctccatggctctcctgcttccccatccttggctggcaaggccgtgaagctgggcccatcagcccccgaagtcgggagggtcagcatgaggaagacgtcaccaagcaggcctcctccggaagcccatggtacggcccagaccgcgtcaagtacttgggcccattctctggcgagcccccgtctacctcactggcgagttcccaggtgatacggtgggacatgctgggc

SEQ ID NO: 277146 - DNA, 282 bp, Glycine max
  unsure (1)..(282): unsure at all n locations
tgttgctattatcatccgcagctgccttnnattcgcaccgcaaacngtgagccatggccgtgcggaaagaacaagcgcatctccaaggggaagaagggtggcaagaagaaggcagctgatccctttgccaagaaggattggtatgacataaggctccttctgtttttcaagtgaaaaatgttggcaaaaccctcgtntctcgtactcagggtaccaagattgcttctgaaggactcaagcatagatgtttgaggtctccttggctgatcttcaaggggatga

SEQ ID NO: 277147 - DNA, 273 bp, Glycine max
  unsure (1)..(273): unsure at all n locations
gctattcctcactaggagctnccaanccactggttcttcatctgcatgcacanagttgcatagttttggaaaccaagaattcntgaagaagggnagcatcaacaagcagttctgaaaatggagatcaccaatgtcagtngtatgaggctattgcaaagcagaagttgccaaagatggcgtttgactactacgcatctggtgcagaggaccagtggactctgcaagagaacagaaatgccttttccagaattttgtttcggccacgtattctta

SEQ ID NO: 277148 - DNA, 279 bp, Glycine max
  unsure (1)..(279): unsure at all n locations
ctatgatcagatgaanngacaagttgttnagttggctnngcaaactttccatccagagttcatgaatcgcattgatgaatatattgttttccagcctctggattccgaacagatcagcanaatagtggagctccagatggagcgctgaaaaacaggctcaagcagaagaaaattgatcttcattacacagaaaaagctgttaaacttcttggtgtactgggttttgatccaaattttggagctagaccagttaaaagagtgatacagcattggttgaaa

SEQ ID NO: 277149 - DNA, 277 bp, Glycine max
  unsure (1)..(277): unsure at all n locations
gtatttttcaagtaacttaaggtttcaaacctaggaagttggaagtcatggcagcaacattgatggcagcaacaagttctggcactcttaaagcaactcctttcctaggccaaggcaanggtgccaatgccaatgctcttagggtgttgtttccatgggaactgggaagtacaccatgggcaatgatttgtggtatggaccagacagagtgaaatacttgggacccttttcagctcagaccccttcatacttgaaaggagattcccaggggattatg

SEQ ID NO: 277150 - DNA, 294 bp, Glycine max
ttaaaacctacaaccttgatggcatcgatgtcagctacgaggacatcgccgccaacgaagccgactttgttaattccgttggggggcttgtgaggaacctgaagcagaacaagctcattactgtggcttccttcgcaacaagcgctgatgcgccaacaacaaattctacaatctcttgtacgcagaatatgctactttctttgacactgtggtgtttctgagctgggtagggtttactccttctcgcgccaacccagttgcgagcttggaggagaagatccttgccgtggccaa

SEQ ID NO: 277151 - DNA, 283 bp, Glycine max
  unsure (1)..(283): unsure at all n locations
gccttagccttcccnaccaactccaaacnacngagacatcnncatccatggctgcctccgtctccactgtcggagctgtcaacaganctcttttgaacctgaatggttctggagctggagcttcagctcccagttcagccttctttcggaccagcttgaagaaggttattgcctcaagggtcccnaacagcaaggtttccggtggaagcttcaagattgttgctgtagaagagaagaaagagattgaagagacccagcagaccgacaaggacagatggaaggg

SEQ ID NO: 277152 - DNA, 276 bp, Glycine max
gttcagaatctcaaatgtaggcttttcaacctcaattaacttcagaattcagggtcacaccctaaaattagttgaggttgaaggatcacacactgttcagaacctttacgattcacttgatgtccatgttggccaatcggttctgtgttagtaaccttaaaccagcctccaaaggactactatattgttgcctcaacaagatttacagagacacctctcactacaactgctgtactacactatgcaaactctttttcctctgcattgggacccgtg

SEQ ID NO: 277153 - DNA, 276 bp, Glycine max
  unsure (1)..(276): unsure at all n locations
aaatttattgacgaattggaacaactggagggaaaaaatgaagcagagaattatcaaattcgttctagaaaagccaaacgtgtagtaattttgactaataaatctaaattttttaagaagtacgatacttataatcctacagagatactgataacgctgaaaaaaaaaaaaatgaattggctttaatacgttattcccaacaatcggnttttcggngagacataatcaaaggatctatangtgcncaaaggngtaaaacagttacttggaattttt

SEQ ID NO: 277154 - DNA, 290 bp, Glycine max
  unsure (1)..(290): unsure at all n locations
gcggcgagaagtgtacgaggaggggcgaatcttcgacatcacccacaggtatgtccccgagatgccggtgtgggactcgacggaggggctcgggcagcacttcctgtggctcgaaaagagcatgaagaatggctcgcgcgctaacaactcaacatgaagctcggtgttcacaccggcacccatgtcgacgcgcccggtcacttttacgacaattantacgacgccggcttcgatgttgactcatcgacctaacactcctcaatggccttgcacttttggttgatgttcca

SEQ ID NO: 277155 - DNA, 280 bp, Glycine max
  unsure (1)..(280): unsure at all n locations
caacctcttccataaacgggtggtgcctctcttccanctccccagccaaaacctctctcaggaaggccacattacgcccttccgtcttcgcaacccttaacactccttcttctccttcctcttcatcttccttcccctctctcatnaagacaggcctgtttttgctgcccctgcccccatcatcaccccaactgtgagagaggatatggcaaaggaatacgagaaagctattgaagaattcagaattgttgagggagaagagtgaatcaaagcgacantg

SEQ ID NO: 277156 - DNA, 280 bp, Glycine max
  unsure (1)..(280): unsure at all n locations
cgaganatggcgatggcaatggcgcttcgcaggctttcatcttcaattgacaagcctctgcgccctgctgcttcaatgccggttccctctactacaagtcgtctttgcctgatgaagctgtttacgacaaggagcgacccggagtncatggccgaagcagttgaatgctccacttgaggtcgtggatcctgagattgctgatattattgagcttgagaaagctaggcaatggaaggggctagaatgataccgtcagacaatttcacctctgtgtctgtga

SEQ ID NO: 277157 - DNA, 281 bp, Glycine max
agaatctctaagagtggcatccaaatcaacactaaaggtttcaaagacaaagaatacttcactcgtgaccagatgtgaaattggtgacagtctggaagaattcctcacaaaagcaacaccagataaggggttgatcaggttgttgtgtccatgggagaagcattaagaacaatttccttcaaagtgaagacggcttcttgtggtggaacacaatgtgttaatacttttggggacgagcagcttgcagtggatttgctagctaatcagcttctttttgaggc

SEQ ID NO: 277158 - DNA, 273 bp, Glycine max
  unsure (1)..(273): unsure at all n locations
tttaaggaggcattggttagtttcaagagggcttgtnagttgcagcctgtggatgtgaggcctcattttagaacagggaactgtttgtatgttcttggcaggtacaaggangccaaggaggagttcctcttggctcttgatctgctgaggctggagggaaccaatgggcttacttgctaccccagatttatgtcaacctcggcatcgcactcgagggtgaagggctggttttgagtgcctgtgagtatatagggaggctgcgattctttgtcc

SEQ ID NO: 277159 - DNA, 292 bp, Glycine max
  unsure (1)..(292): unsure at all n locations
aaggtgaaagatattgaacttcaagtgacagaaagattcaggnacagagtggtggaggaaggttataaccctagttatggancnagacctctaagaagagccataatgcgacttttggaggacagcatggctgagaagatgcttgccagagagatcaaggagggcgactctgttatagtggatgttgatnnnnnnggtaatgtgattgtgctcaatggtagcagcggagcccccgaatccttgccagagacgcttcctgtataatgcggttaatttgctaatactatgtact

SEQ ID NO: 277160 - DNA, 291 bp, Glycine max
  unsure (1)..(291): unsure at all n locations
aaggtgaaagatattgaacttcaantgacagaaagattcagggacagagtggtggaggaaggttataaccctagttatggagctagacctctaagaagagccataatgcgacttttggaggacagcatggctgagaagatgcttgccagagagatcaaggagggcgactctgttatagtggatgttgattcnnntngtaatgtgattgtgctcaatggtagcagcggacccccgaatccttgccagagacgcttcctgtataatgcggttaatttgctaatactatgtact

SEQ ID NO: 277161 - DNA, 295 bp, Glycine max
  unsure (1)..(295): unsure at all n locations
atccgttccaaaccacataagcttcaacaaagatggatgtagaaaagttgaagaagatggccagttctgttcgaactggtgggaagggtactatgagaaggaagaagaaagctgtccacaagactactactacagatgacaaaaggcttcaaagcaccctgaagaggataggngtgaatgctatccctgcaattgaagaagtcaacatctttaaggatgaaatagttatccagtttttaaaccccaaagtacaagcatctattgctgccaacnttgggttgttagtggttcacca

SEQ ID NO: 277162 - DNA, 293 bp, Glycine max
aatatagcccaagccctatacaaccaaaccctaacacacacccatttgattcagtttccatggctagcctcaaggttgcatttttggctgcagtgctctgcatggttgtggtgagtgcacccatggcacatgcagctatcacgtgcgggcaggtgacgaatagcctgatcaattgcatcggttacctccagaacggaggaacgccgccgtcgggatgctgcaacggagtgaagagcctcaatgccgccgccaagaccaccgccgaccgccagacggcgtgcaatgcctcaagt

SEQ ID NO: 277163 - DNA, 292 bp, Glycine max
caattaacacacacaaacagaggctacgtacgatcaaattaattaagatggcggaagtgaggaacaaacaagtggttctgagggactatgtgagtggttttcctaaggaatccgacatgaacatagttgaaggaaccacaatattgaagcttccacaaggttccaatgatgtgcttctaaaaaatctctacctttcctgtgacccttacatgagaatgctcatgaccaaggtggaaggcctcgacgtgtttggcacctatacacctggctctccattaacagggtatggagt

SEQ ID NO: 277164 - DNA, 292 bp, Glycine max
  unsure (1)..(292): unsure at all n locations
gttcctaccatagtgctaggaaagtgagtgagaganagagatcacatagcagaatggcttctactcaatgtttcttgcaccaccatgctcttaccacccctgccagatccccatcacaacgcatcatggttagcaccaagcctaaccagcttgtttgcaaggcacagaagcaagaggatattgatgtcagcccaatctctcgccggttagctctaaccgtgctcattggtgctgctgctgttggctccaaagtccaacctgctgatgcagttatggggaagctgccaatgtg

SEQ ID NO: 277165 - DNA, 291 bp, Glycine max
  unsure (1)..(291): unsure at all n locations
tctttccctaattgacaagatccttcctggtctacagggaggtngttgctgaattgaaggcagctggtgctatttggatctagtntgatgaacctaccnttgtgaaggatctcaacacccaccagttacaagcatttacacatgcctatgcaganctagagtcaagtttatctggttttaatgttctgattgagacatactttgctgatgtccctgctgaagcatacaaaacactcacctctttgaaggctgttactgcatatgggtttgatattgttcgtggaacaaaga

SEQ ID NO: 277166 - DNA, 293 bp, Glycine max
  unsure (1)..(293): unsure at all n locations
agaacaagtagttgagaactaagaaggagaagcaaatggcttcctcaatgatctcttccccagctgttaccactgtncaaccgtgccggtgccggcatggttgctccattcactggcctcaagtccatggctggcttccccaccaggaagaccaacaatgacattacctccattgctagcaacggtggaagagtgcaatgcatgcaggtgtggccaccagttggcaagaagaagtntgagactctttcctacctgccagaccttgatgatgcacaattggcaaaggaagtaga

SEQ ID NO: 277167 - DNA, 299 bp, Glycine max
  unsure (1)..(299): unsure at all n locations
aaaagccttagccttccctacaactccanacagggagacatcatcatccatggctacctccgtctccactgtcggancngtcaacagagctcttttgaacctgaatggttctggagctggagcttcagctcccagttcagccttctttgggaccagcttgaagaaggttattgcctcaagggtccccaacagcaaggtttccggtggaagcttcaagattgttgctgtagaagagaagaaagagattgaagagacccagcagaccgacaaggacagatggaagggcttgcctatgatat

SEQ ID NO: 277168 - DNA, 287 bp, Glycine max
cgtttgatgaccgccgcaactgccttccggctaggccggcccagcgctccgccgggcaatgtaagtcgtttttgtcgcaccctgtcgattgtaattcgtttaggtgtaagccttttgttccttcattgccccctcctcctccatatcactactaggttatttctgaagaatataagccaataaaaaacgttgttgatagcaggaagatgcacttcgcaattgcacaaggaaaacaacggaagccaagtttccgcgcattttgtcacataagaaaaacgaatgtcaat

SEQ ID NO: 277169 - DNA, 289 bp, Glycine max
  unsure (1)..(289): unsure at all n locations
atcaangcagctgcggatcatgctggacatncancacaacagnngntcnagnancancctatngcannagcatatgggnanagcatctctcnttcngaggcagcatctngtggattgnnctggccgtttcaacaactttggctgtaatggtgggttgccatcacaagcctttgagtacatcaaatacantggaggacttgagacagaggaagcatacccctacactggaaaagatggtgtatgcaaattctcagctgaaaatgttgccgttcaagtcattgactcggtc

SEQ ID NO: 277170 - DNA, 285 bp, Glycine max
  unsure (1)..(285): unsure at all n locations
aggcattacataacacatcttcattgnctcgatggtgagcctgaccagaactggaatcatttgcatactgatcaacnatatgtgcaccttggtaggactaacacttcagagaatagttcatttatntatcntgctgaaaatatgtccatagatagcatatctttcccctctcattggaattcttcctcaaggtcaaatggatatgcatcctctagtcacaacattgttgtacctcctcaccagtcagatgcatcaggcacttctaatgatcatttngtgcattcg

SEQ ID NO: 277171 - DNA, 300 bp, Glycine max
  unsure (1)..(300): unsure at all n locations
atccactcnangtgggccatgctcggagccttgggctgcgtcttcccggagttgcangtcccgcaacggggtgaagtnccggagaagccgtgtggttcaaggccgggtcccagatcttcagcgagggtgggctcgactacttgggcaacccaagcctgatccacgcccagagcatcctcgccatctgggccacacaagttatcctaatgggtgccgttgaaggttaccgtattgctggtggccccctcggtgaggtcactgacccaatctacccaggtggcagcttcgacccattgggcc

SEQ ID NO: 277172 - DNA, 285 bp, Glycine max
  unsure (1)..(285): unsure at all n locations
ctcactttcatttctacatccctggctcngttccgtcgatgacgatggcntttagggtgcgaaaccctgacctccgctttctcattcttctctctctcttgtccatcacttccnccaaggtcttcttcgaggagcgtttcgatgacggatggggaaatcgttgggttaaatcagattggaaaaaagatgagttctggctggggagtggaaccacacctctggccaatggaatggagacgctaacgacaaaggtattcaaaccagtgaggattacagattctacgc

SEQ ID NO: 277173 - DNA, 296 bp, Glycine max
  unsure (1)..(296): unsure at all n locations
gctaagagagaatatggagagtagtgaggnaattaggtgtaaggtatgcgtgaccggcggtgctagttacataggctcttgccttgtcaagaagcttctgcaaaagggctacaccgtccactccaccctcagaaactttaaggacgagtcaaagataggccttctgagagggttgcctcatgctaatgatgagagactggtgttatttgaagcagacatatataaaccagacgagtacgagccagcaattcaaggctgtgagattgtctttcacgttgctactccctatgaacatc

SEQ ID NO: 277174 - DNA, 287 bp, Glycine max
  unsure (1)..(287): unsure at all n locations
ctcttggtaacattgctattggtaatcttccaaaatacttgccattncatcttggatcagattgataatcagcagaagaaacaatatctcttgcttcattctttgaaagaggtaattgtcagacaatctgtggataaagcagagtttcaagagtccagtgtggagaaaatacttaatttactnnntnaccactgtgaaagtgaggaagagggagtgcgcaatgtagtggcggagtgtttgggcaaaattgctcttattgagcctgtaaaactcatccctgcactcaa

SEQ ID NO: 277175 - DNA, 285 bp, Glycine max
  unsure (1)..(285): unsure at all n locations
atcaaggcagcngnggatcatgctgganatncagcacaantggggctttanaagcagcctatgcacnagcatttgggangagtatctctctntctgagcagcagctngtggattgtgctggccgtttcaacaactntggctgtaatggtgggttgccatcanaagcctttnagtacatcaaatacaatggagnacntgagacagaggnngcatacccctacactggaaaagnnggtgtatgcagttctcagcngnnnatgatgccgttcangacantgactcggt

SEQ ID NO: 277176 - DNA, 290 bp, Glycine max
ttactcctaacaagaaggcaaattcaggaccacttgatcagtatttgaagttaagagctcttcaaaggcaatcctatacacattacttctatgaagcaactgtcggagctggtcttccaattgttagcactttacgtggcctccttgaaactggagacaaaatattacaaatcgaaggcatctttagtgggactttgagttacatatttaataactttaaagatggccgggcttttagtgaggtagtttctgaagcaaaggaagcaggttatactgagccagatccaaga

SEQ ID NO: 277177 - DNA, 192 bp, Glycine max
  unsure (1)..(192): unsure at all n locations
agccattcgtattgtcgcagagaaagaaaaccctagctcaccgtttcaagatgcaaatcttcgttaagaccctcactggtaagaccatcactctcgaagtcgagagttcagataccatagacaatgtaaaggccaaaattcaagacaaggaagggatcccaccagatcagcaacggntcatttttgctggna

SEQ ID NO: 277178 - DNA, 288 bp, Glycine max
  unsure (1)..(288): unsure at all n locations
aagaaagaggagcacaaaggagaacaccatggtgagcacaaaggtgaacacaaaggagaacaccatggtgagcacaaaggtgaacacaaaggagaacaacaccatggggagcacaaggagggacttgtggataagatcaaggacaagatccatggtgatggccatgacaagggtgnnnnnnnnnnnnnnnnnnnnnnnnnnnnnnnnnnnnntggacatgaccatcatggtcatagcagcagcatgacatgattagatcttatatgttaagcaggtgtacggtacgat

SEQ ID NO: 277179 - DNA, 277 bp, Glycine max
  unsure (1)..(277): unsure at all n locations
cgggatcttatcaacatactggaggatgctattagaagtggacaccctatattgattattgctgaggatattgaacaagaggctttagcaactcttgtggtgaacaaacttagaggatcactgaagattgcagcactgaaggcccctgggtttggagagcgcaagagccagtaccttgatgatattgccatcttgactggaggtactgtaatcagagaagaggttggccttactttggacaaanctgggaaagaggttctcggatatgcctccaagg

SEQ ID NO: 277180 - DNA, 284 bp, Glycine max
ttcgttatccttctttttttctccttgaactcgaatattcactatggcagatgaggtggttctgctagatttctggccaagtccatttgggatgagggtcaggattgcacttgctgaaaagggtatcaaatatgagtccaaagaagaggacttgcagaacaagagcccttgctcctcaaaatgaacccggttcacaagaaaatcccggttctcatccacaatggcaaacccatttgtgaatctctcgttgctgttcagtacattgaggagtctggaatgacaga

SEQ ID NO: 277181 - DNA, 188 bp, Glycine max
aggaactggtatgaaggtttctataagacatcttggcccgtccatgattcagcagatgcagcatgcttgcaatgaatgcaagggtactggagaaaccatcaacgacagagatcgctgcccacagtgcaagggagaaaaggttgtgcaggagaaaaaagtccttgaagttattgtggaaaagggaatgc

SEQ ID NO: 277182 - DNA, 293 bp, Glycine max
gcaaatgacacagcacaatttgctgagctcttgacacaaggagaactgacccgtagagcatgggaaaaggatgttcaggtgatgaatgaaggacctggacacatcccaatgcacaagattcctgaaaacatgcagaaacagttagaatggtgtagtgaagcgcctttttacactcttggtcctttaacaactgatattgcccccggctatgatcacatcacctctgcaattggtgctgccaatattggggcattggtactgctcttctctgttatgtgactccaaaggaacat

SEQ ID NO: 277183 - DNA, 284 bp, Glycine max
  unsure (1)..(284): unsure at all n locations
cgtacagctttctatgaaggcattggacttaacacaaaagaatttgacatgcatgtcatcatcgagacaaaccgcacaactgctaggattttcccagctgttcttgatgttgaaaacccagagttcaagcggaagttggaccggatggtggagataaacgagaagattattgctgttggggagaagtgatgacatagcggtggtgaagaacttgaagaggatcccactggttgctgcattggtgtctgaactcttggcaacatatctaatgcctccantgagtc

SEQ ID NO: 277184 - DNA, 289 bp, Glycine max
  unsure (1)..(289): unsure at all n locations
gggcgtacctgagcgagtaactgatgaggtgttcatagcaatgtcgaaggcactaaacttcatcaatcctgatgaactttcaatgcaatgtatattgattgctttaaaccgatttcttcaggagaaacatggttctaagatggcctttttggatggcaatccccctgaaagactttgtatgccgatagtngatcatattcagtccttgggtggtgaagttcatctaaattcgcgcattcaaaaaattgagctaaatgatgatgggaacggtgaagacttcttacttaat

SEQ ID NO: 277185 - DNA, 288 bp, Glycine max
gccatattccacaagaactctccaaggatcctccttcccacgagattctttggtgggaaaaatccaagaggtttgaaatttgaaggcagggaagatggattatttcaatgcaccaggaagaaaccatctctttgttccagggccggttaacattccggaccagatcatccgggccatgaacagaaacaatgaggactaccgttctccagcaattccagctatgacaaaaactttgcttgaggatgtcaagaagattttcaagaccactatggaaccccatttctcatc

SEQ ID NO: 277186 - DNA, 290 bp, Glycine max
cttctctctctttctctctttctagttcgtgttcttcgtcgcaaatccgaagtaggatctctcttgttttttctctaggtttttcgcgatggcgtcgaagcgaattttgaaggagcttaaggatttgcagaaggatcctccaacatcttgcagtgccggtcctgttcatgaagatatgtttcattggcaagctacaattatgggtcctccagacagtccctatgctggaggtgttttcctagtgactattcattccctccagattatccctttaagccacccaaggttgc

SEQ ID NO: 277187 - DNA, 243 bp, Glycine max
gcattacatcacaacaacaacatggctgccactgctgctgcaggcatagcttccttgttttcttcttctattaacagtgtcaaatgtcttcgttcctccaagaactgctccataatagaccctctcataacaacagtgccctcaaaccgtggcatgtttgggtcacacttggtggaacctttgtccattaattcgcacaagttgtggggacctagaatttctgctgctgttgcacaagaagag

SEQ ID NO: 277188 - DNA, 284 bp, Glycine max
  unsure (1)..(284): unsure at all n locations
ctcaggntctgtgacacacacagactcacttcaagttcccagcttttnccatttttcccactgtttattgagaagaactgcagaacatggcacagncttggctccctctacgcaatggcagatgagaatctcaaaatcctctcccaatgcaactcccattacatcaaacatgtggagttctttattgtggaaacaaaataagaaagtttcacctaccagttctgctaaatttagagtgctggcaattaagtctgacnatagcaccatcaacaggctcgagggtc

SEQ ID NO: 277189 - DNA, 287 bp, Glycine max
  unsure (1)..(287): unsure at all n locations
atcgagataactagaaacagtgtgatgaaaatgaaggtccttgttttcttcgttgctacaattttggtagcatggcaatgccatgcgtacgatatgttccctctccgaatgaacactggctatggtgcccgtactccggaggtgaaatgcgcaagttggaggcttgctgtggaagcacacaacatctttggctttgagaccattcctgaagagtgcgttgaagcaacaaaggaatacatccatggcgaacaatatagatcagactcnaaaacagtnaaccaacantt

SEQ ID NO: 277190 - DNA, 285 bp, Glycine max
gtggcttcaagaagagaatctcaatggaggcccaggagctgaagcgcgtgttccagatgttcgaccgcaacggcgacgggagaataacgaagaaggagctgaacgactcgctggagaacctgggcatcttcatctctgacaaggacctgagccaaatgatccagaggatcgacgtcaacggcgacggttgcgtggacatggacgagtttggggagctgtatcagaccataatggacgagcgcgacaatgaggaggacatgagggaggcttcaacgtcttcgacca

SEQ ID NO: 277191 - DNA, 184 bp, Glycine max
atcactatcaccaatgacaagggtagattgtcaaaggaagatattgagaagatggttcaagaggctgagaagtacaagtctgaggatgaagagcacaagaagaaggttgaggccaaaaacgcttggaaaactatgcatacaacatgaggaacaccgtgaaggatgacaagattggtgagaaact

SEQ ID NO: 277192 - DNA, 286 bp, Glycine max
  unsure (1)..(286): unsure at all n locations
gtgacatctcgggtttatccaacaaaggcaatctatggagctgctaggttgttcttgttcaacaatgctactgaggccactgtgacagcctcactcaatgtttggcaaatgaattctgcatttatacgcccattccaccctgatcagaagaattaaaataaataattaaattggatataaaagacttgtagtcacaaaggatcggaaaacatcttggggtggcaatttgtactcatcaattgtttaccttcccataaacacacataaagttatgggttcttgctna

SEQ ID NO: 277193 - DNA, 292 bp, Glycine max
tgctgcattgaagggttcagatcatcgccgtgcaacaaatgtcagtgccagactggatgctcaacaaaagaagctcaaccttccaatccttccaaccaccactattggatccttccctcagactgtagaactgaggagggtacgccgtgagttcaaggctaacaagatctccgaggaagagtatgttaagtcaattaaggaggaaattcgcaaagttgttgaacttcaagaagagcttgatattgatgttcttgttcatggagaaccagagagaaatgatatggttgagtac

SEQ ID NO: 277194 - DNA, 277 bp, Glycine max
caacaagctaggatttgttgttctgttgccccaaatgaagtgcaggtgccagctgtgaaaacctcggatcccaagagtaagcctgagtgctatggtgtcttctgccttacctatgatttgagggctgaagaagagacaagatcctggaagaaattaattaacattgcagtctcaggtgctgctggaatgattgcaaatcatctacttttcaagcttgcatctggtgaagtttttggcccagatcaacctattgctctcaaattattgggatcagaaa

SEQ ID NO: 277195 - DNA, 287 bp, Glycine max
  unsure (1)..(287): unsure at all n locations
gtagttgagaactaagaagaaggaaatggcttcctcaatgatctcctccccagctgttaccaccgtccaaccgtgccggtgccggcatggttgctccattcaccggcctcaaatccatggctggcttccccacgaggaagaccaacaatgacattacctccattgctagcaacggtggaagagtacaatgcatgcangtgtggccaccaattggcaagaagaagttcgagactctttcctacttgccagacctcgatgatgcccattggcaaaggaagtcgaatacc

SEQ ID NO: 277196 - DNA, 294 bp, Glycine max
agaacaagtagttgagaactaagaaggagaagcaaatggcttcctcaatgatctcttccccagctgttaccactgtccaaccgtgccggtgccggcatggttgctccattcactggcctcaagtccatggctggcttccccaccaggaagaccaacaatgacattacctccattgctagcaacggtggaagagtgcaatgcatgcaggtgtggccaccagttggcaagaagaagtttgagactctttcctacctgccagaccttgatgatgcacaattggcaaaggaagtagaa

SEQ ID NO: 277197 - DNA, 291 bp, Glycine max
  unsure (1)..(291): unsure at all n locations
aggattctacccgccgctcgatgggaattgcgcttcaaggcgtctcgtagggctaatccgcctcacgagggtcaccaacggcacgtgcctttggggggccgaggccccctactgctggtcggcaaacggacggcgggcgcacgcgtcgcttctagcccggattctgacttagaggcgttcagtcataatccaacgcacggtagcttcgcgccactggnctttcaaccaagcgcgatgaccaattgtgcgaatcaacggttcctctcgtataggttgaattactattgcgac

SEQ ID NO: 277198 - DNA, 299 bp, Glycine max
caacaactcactcactaagctaaacaatttcatcaagcctgccatggcttcctcgtgtgcttcctctgccattgcagctgttgccatctccacaccaagttcccagaagaatggatcactcttgggaagcacaaaagcttcttttcttagtgggaggaaactgaaggtgaacagttttacagcaccagttggagcacgatccagcactacagtgtgtgcagttgctgagcctgataggcctctgtggttcccaggcagcacccctcctccatggctagatggcagtttgccaggagatt

SEQ ID NO: 277199 - DNA, 301 bp, Glycine max
  unsure (1)..(301): unsure at all n locations
ctgctaagcagcattgtggcaagtggacttgccagaaggtgcattgtgcaagtgtcttatgccattggtgtgcctgagcctttgtctgtgtttgttgacacctatggcactgggaagatccatgataaggagattctcaacattgtgaaggaaaactttgatttcaggcctggtatgatctccatcaaccttgatctcaagaggggtggaaataacaggtttttgaagactgctgcctatggacactttggaagagaagaccctgacttcacatgggaagtggtcaaacccctcaantggg

SEQ ID NO: 277200 - DNA, 277 bp, Glycine max
  unsure (1)..(277): unsure at all n locations
caatattgtaaaactcaaaatctagtttcatactttttttcttcttcttgaaatggctctccaggctgcttctcttgttcctgcttctttctcggttcttaaagagggaaagagtggtgtgtctctcaaggactccaccttgttcggtctttcattttcagaacctatcaaagctaacttcagctcttctgcattgaggtncaagagggaattcgaacaaaagctctntgctgtgagggccgaaacagtggctacagcctctccagcagttaccaag

SEQ ID NO: 277201 - DNA, 284 bp, Glycine max
  unsure (1)..(284): unsure at all n locations
gctgatcttaaagaacacgtgattaagcctgtgattcctgagaagtaccttgatgagaagaccattttccatttgaacccttctggcaggtttgtcattggagggccgcatggcgatgctggtctcaccggccgcaagatcatcatcgacacctatggaggatggggtgcacatggtggtggtgccttctctgggaaggatcctaccaaggttgataggagtggtgcctacattgtgaggcaagctgcaaagagcattgttgcnaatggacttgctagganggc

SEQ ID NO: 277202 - DNA, 297 bp, Glycine max
  unsure (1)..(297): unsure at all n locations
cnagttttaggcttgctgtggaagcacacaacatccgagcctttaaaacncttncctgaagagtgcgttgaaccaanaaaggactacattaatggcgaacaatttagatcagactctaaaacagttaaccaacaagctttcttttatgctagtgaacgcgaagtccatcacaacgacatatttatattcggcatagataacaccgtactctctaatatcccatactatgaaaaacatggatatggggtggaggatttatgaaaccttatatgatgaatgggttacaagggcgacgca

SEQ ID NO: 277203 - DNA, 285 bp, Glycine max
  unsure (1)..(285): unsure at all n locations
aaggattctacccgccgctcgatgggaattgcgcttcaaggcgtctcgtagggctaatccgcctcacgagggtcaccaacggcacgtgcctttggggggccgaggccccctactgctggtcggcaaacggacggcgggcgcacgcgtcgcttctagcccggattctgacttagaggcgttcagtcataatccaacgcacggtagcttcgcgccactggctttancnaccaagcgcgatgaccaattgtgcgaatcaacggttcctctcgtactaggttgaattac

SEQ ID NO: 277204 - DNA, 290 bp, Glycine max
  unsure (1)..(290): unsure at all n locations
acaagttccatggtataataaatggaatcgacccagatatatgggacccgtataatgataaattcattcctgaatcatactcatcaaaaaatgttgttgaaggaaaaagagcttccaaggnagccttgcaacaaaggcttagtttaaaaaaagctgatcttcctttagtgggaattattactcgattgactcatcagaaaggaatccatctcatcaaacatgccatatggcgcaccctagaacgtggtggacaggttgtattacttggttcagctccagatcctcgtatc

SEQ ID NO: 277205 - DNA, 295 bp, Glycine max
  unsure (1)..(295): unsure at all n locations
cnattaacacacacaaacagaggctacgtacgatcanattaattaagatggcggaagtgaggnacaaacaagtggttctgagggactatgtgagtggttttcctaaggaatccgacatgaacatagttgaaggaaccacaatattgaagcttccacaaggttccaatgatgtgcttctaaaaaatctctacctttcctgtgacccttacatgagaatgctcatgaccaaggtggaaggcctcgacgtgtttggcacctatacacctggntctccattaacagggtatggagtgtc

SEQ ID NO: 277206 - DNA, 283 bp, Glycine max
gttgctccggcggggttcttcgacaagtacccggctctggtcaccggatttttcttcttcacgtggtacttcttgaacgtgattttcaacatcctcaacaagaagatctacaattacttcccctatccatacttcgtatcggtaatccatttattcgtgggagtggcgtactgtttggtgagctgggccgtgggccttccaaagcgtgctcctatagactccaacctactgaagttgctcatccagtggctgtgtgtcatgcattaggccatgtgaccagcaa

SEQ ID NO: 277207 - DNA, 278 bp, Glycine max
  unsure (1)..(278): unsure at all n locations
ctgaaatccagaaatcagtaaganaagcagcacatggcctgcgacttactanngaggttgctatgtctattgcaagcaaggcggtaaggaagatttttattaattacataaaacgtgcacgggcagctggaaatcgtaccgagtctgcgaaagaactgaagaagatgatagcctcaacaccttagttgtaactaatttggtggaggacattaaaggggagtcaactgatatttcctctgaagaacctgtgaaagaggacttacacaaactgacgatga

SEQ ID NO: 277208 - DNA, 226 bp, Glycine max
tctcttcgctcttcgatcctcgtccgggggctgctccgaataccaccaccaccacgcgccgatggccacgataggaggcttacgcgactcccaaggctctcagaacagcgtccaaaccgaggccctcgctcggttcgccgtcgatgaacacaacaagaagcagaattcacttctggagttttctagggtggtgaggacacaggaacaggttgttgcgggaaccctg

SEQ ID NO: 277209 - DNA, 292 bp, Glycine max
  unsure (1)..(292): unsure at all n locations
ttctaccgttctacatagcatctccttnaccaccattctagatatcagagaactttgcagctctcttaggtttttaaaaaacaccacgcaaacagcaagatggccacttccgacagtaacatgctactaaattatgttccagtttatgtgatgctcccactcggagttgtcaatgttgacaatgtttttgaagacccagatggccttaaagaacagctcttgcagcttcgagctgcgggtgttgacggggttatggttgatgtgtggtgggggatcatagaactgaaggggc

SEQ ID NO: 277210 - DNA, 285 bp, Glycine max
  unsure (1)..(285): unsure at all n locations
tgagctataagctagtttatcgtgaggagaatatgaagttgtttgttttctttgttgctgcagtagttttggtagcatggccatgccatggcgcaggctaccaaaggttccctctccgaatgaaaactggctatggtgagcgttcttcggaggtaaaatgcgcaagttttaggcttgctgtggaagcacacaacatccgagcctttaaaaccattcctgaagagtgcgntgaaccaacaaaggactacattaatggcgaacaatttagatcagactctaaaacag

SEQ ID NO: 277211 - DNA, 269 bp, Glycine max
ggagattaacgctcttgcacgggaagcacttattaatgctgatggcacaattgagagctcatttgcaccaggaaagtatgccttagagattagctccgctgcttatgctctcgaatggcggtttgacaagcaggcactaccagcagatctaattagaaggggaattgctgttgaagatccattttctccacatggcttaaagcttaccattcaagactatccttttgccaatgatggactccttctgtgggatgctataaagctatggg

SEQ ID NO: 277212 - DNA, 286 bp, Glycine max
gcagaaagcaagctcatcctagagttttaaaaatggcagcagcctcctccatggctctctcttccccatccttggctggcaaggccgtgaagctgggcccatcagcccccgaagtcgggagggtcagcatgaggaagaccgtcaccaagcaggcctcctccggaagcccatggtacggcccagaccgcgtcaagtacttgggcccattctctggcgagcccccgtcctacctcactggcgagttcccaggtgactacggctgggacactgctgggtttcggccgac

SEQ ID NO: 277213 - DNA, 283 bp, Glycine max
ttgctccggcggggttcttcgacaagtacccggctctggtcaccggatttttcttcttcacgtggtacttcttgaacgtgattttcaacatcctcaacaagaagatctacaattacttcccctatccatacttcgtatcggtaatccatttattcgtgggagtggcgtactgtttggtgagctgggccgtgggccttccaaagcgtgctcctatagactccaacctactgaagttgctcatccagtggctgtgtgtcatgcattaggccatgtgaccagcaat

SEQ ID NO: 277214 - DNA, 289 bp, Glycine max
  unsure (1)..(289): unsure at all n locations
gatggcacaacttatcgaaagggatgtaagagacccacgagtgagattggaggaacaccactgaacttaagcgcgtgttcttccattcaggcaagtccacaatcctcgtcatacccgagtcctgtaccatcctaccatgctagcccaacctcttcctcgttcccaagccccacgcgcattgacggaaaccacccttcttcctttctcatcccattcatccgcaacataacttccatccccgccaacctccctcctctcaggatatccaacagcgcccccgtnaccccac

SEQ ID NO: 277215 - DNA, 189 bp, Glycine max
  unsure (1)..(189): unsure at all n locations
ccattcgtattgtcgcagagaaagaaaaccctagctcaccgtttcaagatgcaaatcttcgttaagacnctcactggtaagaccatcactctcgaagtcgagagttcagatacnatagacaatgtaaaggccaaaattcaagacaaggaagggatcccaccagatcagcaacggctcatttttgctggc

SEQ ID NO: 277216 - DNA, 284 bp, Glycine max
  unsure (1)..(284): unsure at all n locations
ggcaagagtggtggcactccaacagaaccaactatctttctctaccttagcttcctctctttctgacttcagtggaaccagacttcaaactcaacttcagttcaagagaaagcaatgccatccaaaagggtctttctacgtctccgcatcgagcaccaagaaaatcctaataatgggaggcaccaggtttattggtgtgtttttgtctaggctccttgtcaaagagggtcaccaggtgactttattcacaagaggtaaagcgcctgtcactcaanagttgccag

SEQ ID NO: 277217 - DNA, 281 bp, Glycine max
  unsure (1)..(281): unsure at all n locations
aaactattgtcctgtctcaatcttatgtacgcactcttgctggattagctcttcgtgtcattcgtgatcctgctccaggtggttctgacttagtagataattccaggagggcatatacagcttatgctgtggttgagatgctccggtatttaatacttgtgntgccagatacttttgctgctctggattgctttcctttaccatcctctgtaatttcacatacaatgaatgatgggagttttgtactaaaatcaactgaagctgcagggaagatatattat

SEQ ID NO: 277218 - DNA, 278 bp, Glycine max
  unsure (1)..(278): unsure at all n locations
ctgaaacatggcttcggctactctctctgtagccaaaccagcccttcaggcaaatgggaaaggctctctgaattctctggcctccgaagctcatcaggcttccttaccttttctagaaaatcttcagaggatttccattctgtcattgccttccagacctatgcagttggaagcagtggaggatacaagaagggtgtgncagaagcaaaactgaaggttgccataaacgggtttggaaggattggaagganttcttgaggtgctggcaggtcgcaaag

SEQ ID NO: 277219 - DNA, 276 bp, Glycine max
atttgaggacaactctgcctctagccagatattttggctattgaaagaaagtgagctaactcctagtaatgccaatatattggatggtcgatatgccgtctttggctatgtaacagaaaatgaggataacttggcagatctcaaagttggtgatgtcatagaatccattaaagtagtttctggcctggataatttggtgaatcccacctacaagattgctggctagttctgtgctttgctatcaaatactgcagagtgtttatttggcacttgctt

SEQ ID NO: 277220 - DNA, 280 bp, Glycine max
ggaagattgttgacgtgctgcttgagcaaaacattgttcctggtattaaagtcgacaagggtttggtgccccttgcaggttccaacgacgagtcatggtgccaaggtttggatggtctagcctctcgctcagctgcatactacgagcaaggtgcccgtttcgccaaatggcgtactgttgtgagcatccccaacggtccctctgctctggcagttaaggaagcagcctggggtctggctcgctatgctgcaattgctcaggacaatgggttggtcccaat

SEQ ID NO: 277221 - DNA, 279 bp, Glycine max
ccggtggccgctatcaggatcatggacgcagtgggactctctgcaacattcaccagattgaaaaaagaaggaaaagtggctttcatcccatatatcactgctggtgatcctgacctttcaaccactgcagaagcactgaaattgcttgattcatgcgggtctgacataattgagctaggcattccatactctgatccttggcagatggtcctgttatccaggctgctgctacaagatctttagcaaaggggaccaattttaatgtgattattgatatgt

SEQ ID NO: 277222 - DNA, 283 bp, Glycine max
  unsure (1)..(283): unsure at all n locations
angnactggtatgaaggtttctataagnccatcttggcccgtccatgattcagcagatgcagcatgcttgcaatgaatgcaagggtactggagaaaccatcaacgacaganatcgctgcccacagtgcaagggagaaaaggttgtgcaggagaaaaaagtccttgaagttattgtggaaaagggaatgcagaacgggcagaagattacattccctggcgaantgntgaagcgccagacacaattactggggatattgtctttgtccttcagcagaaggaacat

SEQ ID NO: 277223 - DNA, 279 bp, Glycine max
gtaatggcagcgtcactacaagcagcagctactttcatgcaacccaccaagttgagcaggagcaacactttgcagcaaaagtctactcagtccatttccaaggcttttggtttggaacctgttggagctaaaaaggtcacatgctcccttcaggctgatcttaaggacttggctcacaagtgtgttgatgctaccaaaattgcaggattcgcccttgccacctctgccctcgttgtctctggggcaagtgctgaaggtgttccaaagaggctaaccttc

SEQ ID NO: 277224 - DNA, 270 bp, Glycine max
  unsure (1)..(270): unsure at all n locations
cgaagatcgagatatctatttagatctcagaaaaacagtgtttcatttcaanttcattcagtcttattattattagggnttggcgattcagagagaaagagaaatgggagaacgaaaaggaatcccaattgctctggggctcttggcgatgctnctcttcttcattgcttcttcctcttcctctcacctcgttcgtgcttccgatgacgccgacgacgcgatcttctacgagtcattcgacgaggattttgacggacggtggattgtgtc

SEQ ID NO: 277225 - DNA, 279 bp, Glycine max
  unsure (1)..(279): unsure at all n locations
ataatctcaagttcaaccttgttctcggtaaccctatgttcaagcctcatggtgttcctcgccaccctctacttcatgacccgtccaaggggggtgtacttagtagattttgcatgctacaagcctgacgtggattgcacgtgcacgcgggagattttcgtggagaggtctggtctcacaggctcattctcggaggagaacttgtcctttcagaagaagatccttgagaggtctggtttggngcagaagacgtatcttccgcccgcaatcttgagtttg

SEQ ID NO: 277226 - DNA, 276 bp, Glycine max
attgggaattgcctgtagaagtgatgacgataaaatggcagaatacattgattcacttaatcatgaagaaacaaggctagcagttgtctgtgaaagggcctttcttcagactttggatgggtcttgccgcactcctattgcagggtatgcttgtagaaacgaggatggcaattgtttgtttagaggattagttgcttcccctgatggaaccagagtgctagagacatccagggttggtccatatgctgttgaagatatgattgagatgggtaagga

SEQ ID NO: 277227 - DNA, 276 bp, Glycine max
  unsure (1)..(276): unsure at all n locations
tccangcgctcgtgcgcttttctatccaaccctgttttacaatgtcgttaggaataagattcaggccgagtttcgatggtgggataaggttgatgagttcatattgttaggtgctgttccatttcctattgatgttccccgcttaaaggagcttggtgtccgtggggtcatcacattgaatgantcatatgagactttggttccaacgacattatattatgctcatggaattgatcatctggtgattcctactagagattactgttttgctccttc

SEQ ID NO: 277228 - DNA, 255 bp, Glycine max
  unsure (1)..(255): unsure at all n locations
caaagagaagcattagcactaggntcagcaacaactagtctcagctgaaatggcctcttcagtgatggcatctgtggccctcaaacctgcccctttcactgttgagaagtcctcagtgagaggccttccctctctctcaaggaactcttcttcattcagagttgtggccagtggcaagaagatcaagactgacaaaccttatggaattaatggtggcatggctttgagggatggaactgatgcatctggcaggaa

SEQ ID NO: 277229 - DNA, 278 bp, Glycine max
  unsure (1)..(278): unsure at all n locations
caattgaagttaaaagccttagccttccctacaactccaaacanaaagacatcatcatccatggctgcctccgtctccactgtgcggagctgtcaacagagctcttttgaacctgaatggttctggagctggagcttcagctcccagttcagccttctttgggaccagcttgaagaaggttattgcctcaagggtccccaacagcaaggtttccggtggaagcttcaagattgttgctgtagaagagaagaaagagattgaagagacccagcagaccg

SEQ ID NO: 277230 - DNA, 280 bp, Glycine max
taaccagctatagttattttttgagtgaaggttagaagtgctacaaacaatggcaactaatcaggaagaggtgtctcttttgggagttgttggaagcccatttgtgtgcagggtgcagattgccctcaagttgaagggaattcaatacaagttttttgaagaaaatttggtcaacaagagtgaactgcttctcaaatacaaccctgttcacaagaaggttccggtgtttgttcacaatgagaagcccatagcagagtctcttgtgattgttgaatacatt

SEQ ID NO: 277231 - DNA, 274 bp, Glycine max
taagaaaccaaagacatccttctcctggatgtggctcccctcactctcggaattgaaactgttggtggagtcatgacaaagttgattcccagaaacactgttatcccaaccaagaaatctcaggtgttcaccacctatcaggaccagcagactacagtctccattcaggttttcgaaggcgagaggagtctcacaaaggattgccgccttcttgggaaatttgatctgtctggaattcctccagccccaaggggtacgcctcaaattgaagtga

SEQ ID NO: 277232 - DNA, 270 bp, Glycine max
  unsure (1)..(270): unsure at all n locations
actccctcctcttcacacattttcttagctctctccaacaatccctctcgttcacactttcagattgtgtgaagatgggggctggtggccgaactgctgttcntcctgccaacaggaagtcagaggctgaccctttgaagcgggtaccatttgaaaaacctcagtttagtctcagccagattaagaaggccattcnacctcactgtttccagcgctctgttctccgctcattctcctatgttgtttatgactcaccatagccttctgcct

SEQ ID NO: 277233 - DNA, 274 bp, Glycine max
  unsure (1)..(274): unsure at all n locations
ctactttctctctttctagttcgtgttcttcgtcgcaaatccgaagtaggatctctcttgttttttctctaggtttttcgcgatggcgtcgaagcgaattttgaaggagcttaaggatttgcagaaggatcctccaacatcttgcagtgccggtcctgttcatgaagatatgtttcattggcaagctacaattatgggtcctccagacagtccctatgctggaggtgttttcctagtgactattcattccctccagattatcccttaagccanc

SEQ ID NO: 277234 - DNA, 273 bp, Glycine max
  unsure (1)..(273): unsure at all n locations
ttcattctctttgcgcagttccctacctctcctttcaagatgcagatcttcgtcaagaccctcaccggaaagaccatgcacccttgaggtggaaagctctgacaccatcgacaacgtcaaggccaagatccaggacaaggaaggaattcccccggatcagcaacgtctcatcttcgccggaaagcagctcgaggacggccgtaccctcgccgactacaacatccagaaggagtcaacccttcaccttgtncttcgtctccgtggtggcatgca

SEQ ID NO: 277235 - DNA, 273 bp, Glycine max
  unsure (1)..(273): unsure at all n locations
cntacagctttctatgaaggcattggacttaacacaaaagaatttgacatgcatgtgcatcatcgagacaaaccgcacaactgctaggattttcccagctgttcttgatgttgaaaacccagagttcaagcggaagttggaccggatggtggagataaacgagaagattattgctgttggggagagtgatgacatagcggtggtgaagaacttgaagaggatcccactggttgctgcattggtgtctgaactcttggcaacatatctaatgcc

SEQ ID NO: 277236 - DNA, 269 bp, Glycine max
  unsure (1)..(269): unsure at all n locations
tctgaattcattagttatcctatttacctttggactgagaagacaaccgagaaagagtcagcgatgatgaagatgatgaacccaagaaggaggaagaaggagacattgaggatgttgacgaggagaaggagaaggattccaagaaaaagaagangatcaaggaggtgtctcatgagtggcaactcatcaacaagcagaaaccatttggctgcgaaanccagaagagatcaccaaggatgaatacgctcttctacaagagcctcaccatg

SEQ ID NO: 277237 - DNA, 302 bp, Glycine max
  unsure (1)..(302): unsure at all n locations
gtggccactgtaagaagcttgctcccgagtatgagaaagctgcttctatcttgagtagtcatgatcctccggttgttttggctaaaattgatgccaatgaggagaagaacaaagaccttgcatctcaatatgatgttaggggatacccaacaattaagattctgagaatgggggaaagaatgttcaggaatacaaaggtccccgtgaagcagatggcatcgttgactatttgaagaaccaaagtggtctgcttcactgaatttaaatctgctgatgaagctangctttncattggtgaaana

SEQ ID NO: 277238 - DNA, 302 bp, Glycine max
caactacaaaggttgctgtaggagataagatattgaagtagtgctaagtgcctaacacctgcagtgaacaatggcctctgcatcagcatctcttctcaagtcttcacttgttcttgacaagtctgagtgggtgaagggacaaacacttcgccaaccttctgctgcatcagttgtgagatgcaaccccaccaccccatccaggcctcaccatcagagctggttcctatgctgatgagctcgttaagaccgcgaaaacagtggcttcaccagggaggggtattttggccatggatgagtccatg

SEQ ID NO: 277239 - DNA, 236 bp, Glycine max
  unsure (1)..(236): unsure at all n locations
ggccattttatgggtacccaatttatctatggacactgcctatcagactaacgttgttgtttaattagtccatgcatctgcatcttgggcaccataagattgtatataaaataaattatggtgtgttgtgtatgttgtgcaagacctggaacttcacctttctacgtacgtgtgctgttaggatgcagtgtgcttgatgatgcttnatgaatatgcagtgtgcttttttaagtcta

SEQ ID NO: 277240 - DNA, 297 bp, Glycine max
  unsure (1)..(297): unsure at all n locations
gttgttgtaactcgttcttcttcttttgttgttctgtgtttgtgtntgttttttctctcacctgaaaatgtcttgctgcggtggtaactgtggttgcggaagctcctgcaagtgcggcaacggctgcggaggctgcaagatgtacccagacttgagctacactgagtcaaccaccaccgagaccttggtcatgggagtggcacctgttaaggctcaatttgagggtgctgaaatgggtgtgcccgctgagaacgatggctgcaaatgtggaccanactgctcctgcaacccctgcat

SEQ ID NO: 277241 - DNA, 300 bp, Glycine max
  unsure (1)..(300): unsure at all n locations
tagccttccctacaactccaaacanaaagacatnnatcatccatggctgcctccgtctccactgtncggagctgtcaacagagctcttttgaacctgaatggttctggagctggagcttcagctcccagttcagccttctttgggaccagcttgaagaaggttattgcctcaagggtcnccaacagcaaggtttccggtggaagcttcangattgttgctgtagaagagagaaagagattgaagagacccagcagaccggcaaggacagatggaagggcttgctatgatatctcagccgc

SEQ ID NO: 277242 - DNA, 301 bp, Glycine max
  unsure (1)..(301): unsure at all n locations
gacttggaggcccatgttgctgattttggccttgccaagttcttgtacgaccctggcgcctctcagtccatgtcctccattgctggctcctacggctacattgctccagagtatgcatacactttgaaagtggacgagaaaagtgatgtgtacagctttggcgttgtgctgctggagctgataatagggaggaagccagtgggagagtttggagacggggtggacatcgttggatgggtcaacaaaacgagattggagctcgctcagccgtcggatgcaacgttggtgttggcagtngtgg

SEQ ID NO: 277243 - DNA, 300 bp, Glycine max
  unsure (1)..(300): unsure at all n locations
gnaggagaagaaaatagtcgttcgagatggcccgtacgaagcaaactgctcgtaagtccacaggaggaaaggctcctaggaagcagcttgcaaccaaggctgcacgtaagtctgcaccaactactggtggtgtgaagaagccacatcgttaccgtcctggtaccgttgctcttcgtgagattaggaaataccagaagagtaccgatcttttgatcaggaagctccccttccagaggctggttcgtgaaattgctcaggncttcaagactgatctgcgtttccagagccacgccgtgcttg

SEQ ID NO: 277244 - DNA, 295 bp, Glycine max
tgccaatgcactcaggcaagcaaaggctctaggagatgaattggttgtgggtctagtgagtgatgaggaaatcgtggcaaataaaggaccacctgttttgtccatggaggagaggctggcccttgtcagtggattgaagtgggtggatgaggtcataactgatgctccttatgcaattaccgagcaattcttgaatcgtctcttcatgaatataaaattgattatgtcatacatggtgatgatcctgcttgcttccagacggaactgatgcatatgctgcagcaaagaaagcggt

SEQ ID NO: 277245 - DNA, 295 bp, Glycine max
  unsure (1)..(295): unsure at all n locations
ttntgatagatgcatttcttggaaggatcgttattgggtcaaggccagtctctggataataatcttcagttatgttgggaattatttctggactcattacttttttacagttcttggtgcatcttatacctttccatcatggaaaatgaacaatgtaccacacacaacattcctgctcactcatgtttgcttcctgtnttatcatgtttcatcgaacatgacactgcgtcgattacggcattttattgctggtttgccagaaaaacttcaatgggctactgaagctgcatggatt

SEQ ID NO: 277246 - DNA, 296 bp, Glycine max
  unsure (1)..(296): unsure at all n locations
ctgggagagcaccttccacttgcgtcacctccctgantcaaacatctcagagatccctganctcattgatgagtacaggaaggtgatgaaggattttgctttgaggttagagaaactagcagagcagctgctggacttgttgtgtgagaatcttggcctagagaaagggtacctcaagaaggctttctatggatcaagaggaccaacttttggcaccaaggttgccaactaccctccatgccccaacccagagctggtgaagggtcttcgtccccacactgatgccggtggaatta

SEQ ID NO: 277247 - DNA, 303 bp, Glycine max
tgcagaagaacaagtagttgagaactaagaaggagaagcaaatggcttcctcaatgatctcttccccagctgttaccactgtcaaccgtgccggtgccggcatggttgctccattcactggcctcaagtccatggctggcttccccaccagaaagaccaacaatgacattacctccattgctagcaacggtggaagagtgcaatgcatgcaggtgtggccaccagttggcaagaagaagtttgagactctttcctacctgccagaccttgatgatgcacaattggcaaaggaagtagaatacc

SEQ ID NO: 277248 - DNA, 297 bp, Glycine max
  unsure (1)..(297): unsure at all n locations
ccatctccacaccaagttcccagaagaatggatcactcttgggaagcacaaaagcttcttttcttagtgggaggaaactgaaggtgaacaactttacagcaccagttggagcacgatccancactacagtttgcgcagttgctgagcctgataggcctctgtggttcccaggcagcacccctcctccatggctagatggcagtttgccaggagattttggctttgatcctctaggtcttgcatctgatcctgagagcctgagatggaatgtccaagcagagttgtgcatgcagatgg

SEQ ID NO: 277249 - DNA, 294 bp, Glycine max
  unsure (1)..(294): unsure at all n locations
cttgcaattgaagttgaagtcttgcccttctctcttcaactccaaacacaagacatcatcatccatggctgcctccgtctccactgtcggagctgtcaacagagctcttttgaacctgaatgggtctggacctggggtttcagctcccagttcatccttctttgggagcagcttgaagaaggttattggctcaagggtccccaacacaaagatttcctctggaagttcaagattgttgctgtagangagaagaaagagattgaagagacccagcagaccgacaaggacagtggg

SEQ ID NO: 277250 - DNA, 295 bp, Glycine max
  unsure (1)..(295): unsure at all n locations
ttagccttccctacaactccaaacataaagacatcatcatccatggctgcctccgtctccactgtccggagctgtcaacagagctcttttgaacctgaatggttctggagctggagcttcagctcccagttcagccttctttgggaccagcttgaagaaggttattgcctcaagggtccccaacagcaaggtttccggtggaagcttcaagattgntgctgtagaagagaagaaagagattgaagagacccagcagaccgacaaggacagatggnagggtcttgcctatgatatc

SEQ ID NO: 277251 - DNA, 295 bp, Glycine max
ccatttcttagatatgtgatatacacaccgacatatcaccacctacaccactctgataaggacactaatttctgcctcttcatgcctctctttgattcacttggcaataccctcaacaaaaattcatggcaatcacacaaactactaagttcaggttcaggaaacggtgacatggtaccccattttgttttcctggcacatatagttgatgtgtcatccagtatgcatgctcaattcgtctatagatcctttgcttcattgccatacacaacaaggttcttcttgctcccaggct

SEQ ID NO: 277252 - DNA, 292 bp, Glycine max
  unsure (1)..(292): unsure at all n locations
aacaaacacaaattttatgtgattagtcgcggtatttaaaataaaanatgaaagtagacanataaaaaagagaaggagaatgtttgangttgattgtggctgataatgaagtgggaagtttaaaacngccttggaaggtanatatgtgganccagggcctggtggtgacccaataagaaatcnacaagtcttgccancaggannagaatattcatgccctggacccncaatctattcctacaactgcagcgattgatagtnccanatagtggtagataggttgattgggagg

SEQ ID NO: 277253 - DNA, 293 bp, Glycine max
  unsure (1)..(293): unsure at all n locations
anaatctctaagagtggcatccaaatcaacactaaaggtttcaaagacaaagaatacttcactcgtgaccagatgtganattngtgacagtctggaagaattcctcacnaaagcancaccagataaggggttgatcaggttgttggtgtccatgggagaagcattaagaacaatttccttcaaagtgaagacngnttcttgnggtggancacaatgngtnaatacttttggggncgngcaagcttgcagtggatttgctagctaatcagcttctttttgangccttaattatc

SEQ ID NO: 277254 - DNA, 288 bp, Glycine max
  unsure (1)..(288): unsure at all n locations
tgaattccgacaatgggggagcaggactcctggacatcctgagaactttgagacagttggaattgaagtgactacaggtcctcttggtcagggcattgccaatgctgttgggttagcactagctgagaaacacttggctgcacgatttaacaagcctgacaatgagattgttgaccattacacatatgttatattgggtgatggttgtcaaatggagggaatttcaaatgaagcatgctcacttgccggtcactggggtctagggaagcttatngctttaatgatgac

SEQ ID NO: 277255 - DNA, 293 bp, Glycine max
atttcttagatatgtgatatacacaccgacatatcaccacctacaccactctgataaggacactaatttctgcctcttcatgcctctctttgattcacttggcaataccctcaacaaaaattcatggcaatcacacaaactactaagttcaggttcaggaaacggtgacatggtaccccattttgttttcctgggcacatatagttgatgtgtcatccagtatgcatgctcaattcgtctatagatcctttgcttcattgccatacacaacaaggttcttcttgctcccaggc

SEQ ID NO: 277256 - DNA, 288 bp, Glycine max
  unsure (1)..(288): unsure at all n locations
ctantttctctctttctagttannggttcttcgtcgcaaatccgaagtaggatctctcttgttttttctctaggtttttcgcgatggcgtcgaagcgaattttgaaggagcttaaggatttgcagaaggatcctccaacatcttgcagtgccggtcctgttcatgaagatatgtttcattggcaagctacaattatgggtcctccagacagtccctatgctggaggtgttttcctagtgactattcattccctccagattatccctttaagccacccaagttgcatca

SEQ ID NO: 277257 - DNA, 291 bp, Glycine max
  unsure (1)..(291): unsure at all n locations
gtctcaacaacccagttgagtaactaagatggcgcaagtnaggnacaagcaagtgcttctaaaggactatgttaccggttttcccaaagaatccgacatgaatattgtcgaaagtaccataacattgaagcttccacaaggttccaatgatgtcttgctcaaaaatttgtacttgtcttgtgatccgtatatgaggaatctcatggaacaagcccgaaggccctccccaatagtcgtgcttacactcctggctctccattaataggatatggtgtgtctaaagtctggatc

SEQ ID NO: 277258 - DNA, 284 bp, Glycine max
  unsure (1)..(284): unsure at all n locations
gatccccctgtnggttgcaccgacgaccgaccctgatcttctgtgaagggttcgagtgagagcatacctgtcgggacccgaaagatggtgaactatgcctgagcggggngaaccagaggaaactctggtggaggncccgcagcgatactgacgtgcaaatcgntcgtctgacttgggtataggggcgaangattaatcganncgtctagtagtggttccctccgaatttccntcaggatagctggacccgcgggnagttcaatcgggtaaagccatgatagagg

SEQ ID NO: 277259 - DNA, 288 bp, Glycine max
cacaaggcagaaagcaagctcatcctagagttttaaaaatggcagcagcctcctccatggctctctcttccccatccttggctggcaaggccgtgaagctgggcccatcagcccccgaagtcgggagggtcagcatgaggaagaccgtcaccaagcaggcctcctccggaagcccatggtacggcccagaccgcgtcaagtacttgggcccattctctggcgagcccccgtcctacctcactggcgattcccaggtgactaggctgggacatagtgggtttcggccgg

SEQ ID NO: 277260 - DNA, 285 bp, Glycine max
  unsure (1)..(285): unsure at all n locations
gaacaagtagttgagaactaagaaggagaagcaaatggcttcctcaatgatctcttccccagctgttaccactgtccaaccgtgccggtgccggcatggttgctccattcactggcctcaagtccatggctggcttccccaccagaaagaccaacaatgacattacctccattgctagcaacggtggaagagtgcaatgcatgcaggtgtggccancagttggcaagaagaagtttgagactctttccgcantgccagacttgtgatgcacattggcaagggant

SEQ ID NO: 277261 - DNA, 264 bp, Glycine max
  unsure (1)..(264): unsure at all n locations
attcctcactaggagctcctctccactggttcttcatctgnntgcacacagttgcatagttntggaaaccaagaattcctgaagaagggtagcatcaacaagcagttctgaaaatggagatcaccaatgtcagtgagtatgaggctattgcaaagcagaagttgccaaagatggcgtttgactactacgcatctggtgcagaggaccagtggactctgcaagagaacagaaatgccttttccagaattttgtttcggccagtat

SEQ ID NO: 277262 - DNA, 287 bp, Glycine max
  unsure (1)..(287): unsure at all n locations
cttggtgtgaaacagatgatttgctgctgtaacaaaatggatgctactacacccaagtattccaaggccaggtatgatgaaattgtgaaggaagtctcttcctacttgaagaaagtaggatacaaccctgacaagattccttttgttcctatctctggttttgagggagacaacatgattgagaggtccacaaaccttgactggtacaagggtccaactctgcttgatgcacttgaccagattagtgagcccaagaggccctctgacangcccctcaggnttccctt

SEQ ID NO: 277263 - DNA, 282 bp, Glycine max
caaaatacaacaagttcttacaggcaagtggatcactggatctggatgtgacttctcctaaacaactcaaccgaaggctctttctgaaacagctagctgtggacttgtgtactagtgagcgaaggatattatttcgtgctcaatacatactgcgaagaaaactgagggacatgagggctggtgaattaagggccctaaaaatattcaacggtttccggaatcttttccaatgaggccattcactggtgcattattttctgccctggtttgcccttggttgtt

SEQ ID NO: 277264 - DNA, 282 bp, Glycine max
atttcctctcaaaccctaaccctaactctaaccctccccgtcacaaaagaaaaccctctttgtccgatcatcgtcgtcaagatgttggaactccgtctcgtgcaaggctccctcctgaagaaggttttggaatccgtcaaggagctcgtgaacgacgcgaacttcgactgctcctccaccgggttctccctccaggccatggactccagccacgtcgccctcgtcgctctcctcctccgatccgagggcttcgagcactaccgctgcgaccgcaacatctcc

SEQ ID NO: 277265 - DNA, 279 bp, Glycine max
  unsure (1)..(279): unsure at all n locations
cacaaggcagaaagcaagctcatcctagagttttaaaaatggcagcagcctcctccatggctctctcttccccatccttggctggcaaggccgtgaagctgggcccatcagcccccgaagtcgggagggtcagcatgaggaagaccgtcaccaagcaggcctcctccggaagcccatggtacggcccagaccgcgtcaagtacttgggcccattctctggcgagcccccgtcctacctcactggcgagttcccaggtgactacggctgggacatngctg

SEQ ID NO: 277266 - DNA, 278 bp, Glycine max
gaaattgtgaaggaagtttcttcctatttgaagaaagtaggatacaaccctgacaagattccttttgttcctatatctggttttgagggagacaacatgattgagaggtccacaaaccttgactggtacaagggtcctactctgctagatgcacttgaccagatctctgagcccaagaggccttctgacaagcccctcaggctaccccttcaggatgtgtacaagattggaggaattggaactgtgcctgtgggacgggttgagactggtgtctgaag

SEQ ID NO: 277267 - DNA, 230 bp, Glycine max
  unsure (1)..(230): unsure at all n locations
anaaaaacaagtagttgagaactaagaagaaggaaatggcttcctcaatgatctcctccccagctgttaccaccgtacaaccgtgccggtgccggcatggttgctccattcaccggcctcaaatccatggctggcttccccacgaggaagaccaacaatgacattacctccattgctagcaacggtggaagagtacaatgcatgcaggtgangncaccaattggnnnnac

SEQ ID NO: 277268 - DNA, 278 bp, Glycine max
atttctatagttaaagagttgcccaaagagttcgcctggagcacaagggagtattatggcttggctattcgagaaaccagaatcaaggctgcacctgtgcatgcatcagcctactggtatctggagaatgttttgcctgtcctacagagttatggtattgctgcaatctctccattttctcaccgactgagttttgacaacttgcctgtggatattcaacacctacgttgtaaagtaaacttccaagctttaaccttgtttctcatatcagaacactt

SEQ ID NO: 277269 - DNA, 278 bp, Glycine max
ggcttatttgagaacaattacaggaaagactgaggcccttgtggacctaacagtgatagagatattgtcaaggcatgcttctgatgaggtctaccttggacagagggacaatccaaattggactgatgacacaaaggcaattcaagcctttaagaagtttggaaacaagctgaaggaaattgaggacaaaatctcagggaggaacaagaattcaagcctaggaaccgtaatggaccggcgcagatgccctacactgtgcttcttcctaccagtgggga

SEQ ID NO: 277270 - DNA, 284 bp, Glycine max
gcgagaaatggcgatggcaatggcgcttcgcaggctttcatcttcaattgacaagcctctgcgccctctcttcaatgccggttccctctactacaagtcgtctttgcctgatgaagctgtttacgacaaggagcgacccggagttacatggccgaagcagttgaatgctccacttgaggtcgtggatcctgagattgctgatattattgagcttgagaaagctaggcaatggaaggggctagaatgataccgtcagagaatttcactcgtgtctgtgatgcagg

SEQ ID NO: 277271 - DNA, 272 bp, Glycine max
  unsure (1)..(272): unsure at all n locations
aaacagtttcctggtggatgagacgccaataagggtgcacacgaacctggaacacaagggcattcccttcccgaaggaccaagccatgggcgtgtacagctctatctggaacgcggacgattgggccacgcagggtggtcgtgtgaagacagattggagccacgcacccttcgttgccacctacaaggacttccaaatcgacgcgtgcgcgtgccccgtgccggtgacgtcagcagatagtgctaanaactgtagcagcagcgaggataaga

SEQ ID NO: 277272 - DNA, 279 bp, Glycine max
ctcttttgctgcatcagaggagttgtaaattaagagcatggctgcacaagctgcttgtatcatgcatcttctcttaccttctcagcggaggctgcaagacaaagtcttggaccaagatcactccaatctccatttggcttctccagaaaagcctcctttcttgttaaggcagctgctaccccccctgtcaagcaaggatcagacagacctttgtggtttgcatcaaagcaaagtctttcttacttggatggcagccttccgggtgactatggattgacc

SEQ ID NO: 277273 - DNA, 278 bp, Glycine max
ttcaactctgcttcccctggcaaccttcttcttagttctctccgcttcttatctccagattgctggggcgaaagcacaaccgttgactagtctcaagcttaactctccgatccttcaggagtctattgctaaagagatcaatgaaaatcctgaggcaggatgggaggctgctataaatcctcatttctccaattatacagttgaacaatttaagcgccttcttggagtcaaaccaacgcctaagaaggaactgagaagtacacctgctatatctcacc

SEQ ID NO: 277274 - DNA, 266 bp, Glycine max
tgcaggagtacttgcagtatgctatggccttttccgtcttgccatggcaaaaggacttgcctgggtggtgtgtgtttatggagttccattgctagtggtcaatggatttttggtgttgattacattcttgcagcatactcaccctgcattgccacattacacttcctctgagtgggactggttgagaggagctttgcaacagtggatagagatatggaatcctgaacaaggtctccataatatacagacactcatgtagcacatca

SEQ ID NO: 277275 - DNA, 274 bp, Glycine max
  unsure (1)..(274): unsure at all n locations
tagaagaataccccctcttttgctgcatcagaggagttgtaaattaagagcatggctgcacaagctcttgtatcatccatcttctcttaccttctcagcggaggctgcaagacaaagtcttggaccaagatcactccaatctccatttggcttcnccagaaaagcctcctttcttgttaaggcagctgctaccccccctgtcaagcaaggatcagacagacctttgtggtttgcatcaaagcaaagtctttcttacttggatggcagccttccg

SEQ ID NO: 277276 - DNA, 277 bp, Glycine max
ccttgatcagaaattcggtatcatcaagggtaccatgaccaccacttcactcctacaccggtgaccaaaggcttcttgatgcgagccaccgtgacctgaggcgtgcaagggcagcagcactcaacattgtccccacttcaacaggagcagcaaaggcagtggcccttgtcctcccaaccctcaaaggcaaactcaatggcattgcactccgtgtgccaacaccgaacgtctcagtggtggactcgtcgttcaggtctcaaagaagactttgcagaag

SEQ ID NO: 277277 - DNA, 274 bp, Glycine max
  unsure (1)..(274): unsure at all n locations
ggaagttgagagggttcgtggtgaaagaaatgcagtggctaacaagatgaaagggaaactagaacagtctgagcgtcaaagattgattgaggaaggtaagaatttgaaggagggacttgctgctttggaagaagacttggcgaanttaatgatgagcttcaacaggaagcgcagtgtataccaaacatgactcatccagatgttccaataggaggggaggatgttccaccataaggaagatggttggtagctctcccaaatttagcttcctgtc

SEQ ID NO: 277278 - DNA, 276 bp, Glycine max
  unsure (1)..(276): unsure at all n locations
aaaagccttagccttccatacaacntaanacaaaaagacatcntcatccatggctgcctccgtctccactgtacggaganntcaacaganctcttttgaacctgaatggttctggagctggagcttcagctcccagttcagccttctttgggaccagcttgaagaaggttattgcctcaagggtcnccaacagcaaggtttccggtggaagcttcaagattgttgctgtagaagagaaganagagattgaagagacccagnagaccganaaggaca

SEQ ID NO: 277279 - DNA, 271 bp, Glycine max
  unsure (1)..(271): unsure at all n locations
cagatatatgatatttacccagagaaaatntctccttgttatggttgaatccaattgggccaagttaaggagtctgattctgatattttccaggccccactgattgctttttattttttataggtactttcactctgtccaatctgggaatgtttggtgttgatcgctttgatgctatnctgccacctggaactggagcaataatggctgttggagcatcggagcccactgttgtggctacaaaggatggtcgcattggaatgaagaacca

SEQ ID NO: 277280 - DNA, 275 bp, Glycine max
  unsure (1)..(275): unsure at all n locations
actagttttgtttttggaacatatcgcattacatnacattagattggtggnanagcaatggcatcgtcactacaagcagcagctactttcatgcaacccaccaagtttttgcagctaaagtctactcaggccatatctaaggcttttggtttggaacctgntggagttantaaggtcacatgctcccttcaggctgatctaaggacttggctcacaagtgtgttgatgctaccaaaattgcaggctttgcccttgccanctctgctctcgttgtt

SEQ ID NO: 277281 - DNA, 245 bp, Glycine max
  unsure (1)..(245): unsure at all n locations
gntcaggagcttgtaaagaannttgactggcaaggacncaaatgtcactgtacancccagatgaagtggttgcccttggagctgcagttcaggctggtgtcttggctggagatgtcagtgatattgtgctgttggatgtcactccattatctttgggtctggaaactctaggtggtgtgatgacaaaaatattccaagaaacactactcttcccacctcaaagtccgaggttttctcaaccgctg

SEQ ID NO: 277282 - DNA, 269 bp, Glycine max
gttgtagtccctgctagcgcccaaatgtggaggaggcttgtcatctcccctgaatctcttccaaagctgaataagattgagcgaagtggattctcctccgtaatagtcgttcctatccatatgcagaaccttgaggccatcgacggagagaagaccgctgagaatgcactccttgagacccgtgcccaacacgatcacatcgtactcctcatccatgttcgatcgatctcgatctcaccgaaaacggggtttagggtttcccaacacaa

SEQ ID NO: 277283 - DNA, 269 bp, Glycine max
  unsure (1)..(269): unsure at all n locations
aganaatgcaaagccatatttgagcagtttgatgaggattctaatggggcaatagatcaagaggagttgaaaaagtgtttcagtaagctggaaatttctttttccgaggaggaaataaatgatctttttgaagcatgtgatattaacgaggatatgggaatgaagttcaatgagtttattgtacttctttgtgttgtctaccttctcaagaatgaccctgcagctctcatgctaaatcacgaattgggatgccaaagctggagggcaca

SEQ ID NO: 277284 - DNA, 268 bp, Glycine max
  unsure (1)..(268): unsure at all n locations
gctggaacttacgacgtgagctcggcgaccggtggtcccttcggaaccataaagcacccctccgaactcgctncacggcgctaacaacggtcttgacatcgctgttaggcttttggagccactcaaagcggagtttcctattttgagctacgccganttctaccagttggctggcgttgttgccgttgaggtcaccggtggacctgaagttccctccatcctggaagagaggacaaacctgagccaccaccagagggtcgcttgcccg

SEQ ID NO: 277285 - DNA, 269 bp, Glycine max
  unsure (1)..(269): unsure at all n locations
ctagaaacagtgtgatgaaaatgaaggtccttgttttcttcgttgctacaattttngtagcatggcaatgccatgcgtaacgatatgttccctctccgaatgaacactggctatggtgcccgtactccggaggtgaaatgcgcaagttggaggcttgctgtggaagcacacaacatctttggctttgagaccattcctgaagagtgcgttgaagcaacaaaggaatacatccatggcgaacaatatagatcagactccaaaacagttaa

SEQ ID NO: 277286 - DNA, 266 bp, Glycine max
cacagaattagggtcacgagggtttcatcctgcggcatcagacatgggaggaggcaatgggcaaaaggcaaagatggctcgcgagaagaacatcgagaagcagaaggccgcctcaaagggaagccagctggattcaaacaagaaagcaatgtcgatccagtgcaaggtgtgcatgcaaacatttatgtgcaccacatcggaagtgaagtgtagggagcatgctgaagccaaacaccctaaatctgatgtttatgcttgttttcctc

SEQ ID NO: 277287 - DNA, 263 bp, Glycine max
  unsure (1)..(263): unsure at all n locations
gaaagtagcaaagatgacaggtgggatgtttggaaggaaggggcaaaagataaaggggacagtggtgttgatgccaaagaatgtgttggacttcaacgccataacctccgtcggaaaaggcagtgctaaggacaccgccaccgatttcttgggcaaaggcttggacgcattaggtcatgcagttgatnctctcactgccttcgctggccatagcatctccttgcagcttatcatgctactcagactgatggtagtggaaaagg

SEQ ID NO: 277288 - DNA, 264 bp, Glycine max
  unsure (1)..(264): unsure at all n locations
tctaaccttatggtgcattttgttgtctttgttgcaactatcactaggagctgtaaggcaccgtattaggtttaacgtagagtacatgtatcgtgagccagattgccatgagcacgttgtgatgggaatcaatggccagtttcctggcccaaccatcacagctgaagctggagacacccttgagattttactcaccaataagctctccacagagggaacagttattcactgnccatggattagacagtatggaacaccttgggc

SEQ ID NO: 277289 - DNA, 295 bp, Glycine max
  unsure (1)..(295): unsure at all n locations
tggagaccctctgctctgcattggtgttcccatctttcagaatcagaacttcagctttctccaaatgtggcatcagggcttccattgccgttgagcaacaaacttcccagactaaggttgctctcctcagaattggtaccagaggaagtccactagctctggctcaggcatatgagaccagagacaagctcatggcatcacatgcagagctagcagaagaaggggctattcagattgtataataanaacaactggtgacaaaatatatcacagccattgcagacattggtgggag

SEQ ID NO: 277290 - DNA, 296 bp, Glycine max
cagaaaacagcatcgaacccgtcgtagcagaaaaacttgtcaccatggtttcttccgacaaggatccacgagaggatgtccttcaagcctggtacatggatgatagtgatgaagatcaaagactcccccaccacaaagaacccaaggagtttgtctcgttggaccaacttgctgaacttggagtccttagctggaaactagatgctgataaccatgaaaatgatccagagctgaagaagattcgtgaagagcgtggttacacctacatggatgtttgtgaggtctgcccagaaaag

SEQ ID NO: 277291 - DNA, 292 bp, Glycine max
  unsure (1)..(292): unsure at all n locations
ggcagactttcttaaatactgctaagtggattgaagaggtgcgaacagaaagaggcagtgatgtcntattgttcttgttgggaacaaaactgatcttgttgagaaaagacaagtctctatagaggaaggagaagcaaaagcacgtgagctcaatgtcatgtttattgaaactagtgctaaggctgggtttaatataaaggccctatttcgaaaaattgctgcagcattacctggaatggaaacactatcttctgcaaaacaagaagactggttgatgtaaacttaaagtcta

SEQ ID NO: 277292 - DNA, 294 bp, Glycine max
  unsure (1)..(294): unsure at all n locations
tttcattgatgtattgaaggatgatatttctatagttaaagagctgcctaaagagttcagctggagcacaagagagtactatggcttggctattcgagaaacccgaatcaaggctgcgcctgtgcatgcatcagcccattggtatctggagaatgttttgcctgttctacagagttatggtattgctgcaatctctccattttcnccacagactgagttttgacaacttgcctatggatattcaacacctacgctgtaangtcaacttccaagctttaacctttgttcctcata

SEQ ID NO: 277293 - DNA, 292 bp, Glycine max
gtcctgctgaattgttggaacaggtcagaggtctcactaagtgggttcctccgccagttaagatgactagtagctatgtaagagacagcatcaatgtttcaaggaagagaatggatgtggaatccttggacatgcttcagtttcattggtgggattactcgaatccaggctacctggatgcactaaaacacctaacagatttgaaagaagaaggtaaaatcaagactgtggctctgacaaattttgatacggagagattacaaattattctgaaaatgaggttcctgttgta

SEQ ID NO: 277294 - DNA, 290 bp, Glycine max
  unsure (1)..(290): unsure at all n locations
gtcgcgggtttgggtttttgacgatgagtactgttgaagaagctgaaagcgctgtggagaaattcaaccgctatgatatcgatggaagactgctgactgttaataaggcttctccaagaggaactcggcccgaacgcccaccacctcgtcgttccttgagtcttcctatcaatctatgttggtatttgccatgggatgttgacaatacccggctnaagcaattttcataaancacggtaatgttgtnaatgctcgggtagtctatgacagggagtcaggtcgatcacgtg

SEQ ID NO: 277295 - DNA, 296 bp, Glycine max
  unsure (1)..(296): unsure at all n locations
tgaagtngaagtcttgcccttctctcttcaactccaaacacaagacatcatcatccatggctgcctccgtctccactgtncggagctgtacaacagagctcttttgaacctgaatgggtctggacctggggtttcagctcccagttcatccttctttgggagcagcttgaagaaggttattggctcaagggtccccaacacaaagatttcctctggaagcttcaagattgttgctgtagaagagaagaangagattgaagagacccagcagaccgacaaggacagatggaagggtc

SEQ ID NO: 277296 - DNA, 301 bp, Glycine max
  unsure (1)..(301): unsure at all n locations
ctgagacatctgantttgctaggagatgggttccattttgtaaganatacaanattgagccccgggcaccagaatggtactttggtcagaagatggactatctganngcntaaagtacacccagcanttgtcagggaaaggagagcnatgaagagggattatgaagaatttaaggtgaggattaacagnttaatggccaacagcacaaaaggttcccngaggatgganggccatgcaanangggacncctnggccnggaaataatgggaggnntcancctggcatgatncaggncttcctg

SEQ ID NO: 277297 - DNA, 291 bp, Glycine max
  unsure (1)..(291): unsure at all n locations
gcgtgtactttcttgcgaaacagaagggcgaaggggcaaacacaacttttttgtttttttgtagagcgagagagaaaaaaaatgttggggatcttcagcagttccgtggtgtcgccgccggaggagctggtggctgccggcagcagaacgccgtcgccgaagacgacggcggggaagctgctgaaccggttcgtggagaacaaggcgtcggcggtgtcgctncaggtggnagaacacgtgcattggcttacacgcaccacaacgagtnaccgtggcatcccagatctttgc

SEQ ID NO: 277298 - DNA, 284 bp, Glycine max
cccaaactggtattggaacagccattgcaattgctggtgtggcactctactcgttcatcaaagccagaatggaggaagaaaagcgacaagcaaaagcagcataagaggaaagtcgtcaacctggaggatgtcttgcactgtaaatcaccacaaatttccttcaaaataattgagtgactggttcagtgttgtactatcctgtgatagcgcccttttatttttcctctatttttgtcaaatattttcttttccttttttccttttctctcttcatcagaaaacaa

SEQ ID NO: 277299 - DNA, 290 bp, Glycine max
  unsure (1)..(290): unsure at all n locations
ctctcttcgacctcgcatcgcaccttcaacttaacctattccacttgtaatcgtaaatcnctttgctagaagaagagacaaagtgtgtctgtgtgtgtgagagagagagcaatggctggctcgtgggcacgccgttctctgattgttctagccatcatttccttcggatgtactatttgcgatttccattgctaaggaggaagccaccaagttagggacggtcatcggcatgatcttggaacaacctattcatgtgtcggtgtttacaagaatggccatgttgaatcata

SEQ ID NO: 277300 - DNA, 292 bp, Glycine max
gcgtgtactttcttgcgaaacagaagggcgaaggggcaaacacaacttttttgtttttttgtagagcgagagagaaaaaaaatgttggggatcttcagcagttccgtggtgtcgccgccggaggagctggtggctgccggcagcagaacgccgtcgccgaagacgacggcggggaagctgctgaaccggttcgtggagaacaaggcgtcggcggtgtcgctgcaggtgggagaacacgtgcagttggcttacacgcaccacaacgagtcaccgtggcatcccagatctttgc

SEQ ID NO: 277301 - DNA, 288 bp, Glycine max
  unsure (1)..(288): unsure at all n locations
gaagttaaaagccttagccttccctacaactccaaacancaagacatcatcatccatggctgcctccgtctccactgtncggagctgtcaacagagctcttttgaacctgaatggttctggagctggagcttcagctcccagttcagccttctttgggaccagcttgaagaaggttattgcctcaagggtcccccacagcaaggtttccggtggaagcttcaagattgttgctgtagaagagaagaaagagattgaagagacccagcagaccgacaaggacagatgga

SEQ ID NO: 277302 - DNA, 285 bp, Glycine max
gcagaaagcaagctcatcctagagttttaaaaatggcagcagcctcctccatggctctctcttccccatccttggctggcaaggccgtgaagctgggcccatcagcccccgaagtcgggagggtcagcatgaggaagaccgtcaccaagcaggcctcctccggaagcccatggtacggcccagaccgcgtcaagtacttgggcccattctctggcgagcccccgtcctacctcactggcgagttcccaggtgactacggctgggacatgctgggctttcggccga

SEQ ID NO: 277303 - DNA, 285 bp, Glycine max
gttgcatcaccgcaagtccacaacatggctgccactgccgctgcaggcatagcttccttgttttcttcttctattaacagtgtcaaatgtcttcgttcctccaagaactgctccattatagacccccttataaccacagtgccctcaaaccgtggcatgtttgtgtcacacttggtggaacctttgtccattgggggtgccattaattcgcacaagttgtgggggcctagaatttctgctgctgttgcacaagaagaggctgttgttgtggctgatgatgaggta

SEQ ID NO: 277304 - DNA, 278 bp, Glycine max
  unsure (1)..(278): unsure at all n locations
aatttgttgactggtgccccactggtttcaagtgtggaatcaattaccagcctcnaactgttgttcctggcggtgatcttgccaaggttcagagggctgtgtgcatgatctccaattccaccagtgttgttgaggtcttctctcgcatcgaccacaaatttgacctcatgtatgccaagagggcttttgttcattggtatgttggtgagggtatggaagagggagagttctctgaggctcgtgaagatcttgctgccctggagaaagattatgaggaa

SEQ ID NO: 277305 - DNA, 287 bp, Glycine max
  unsure (1)..(287): unsure at all n locations
gtccaagcagcctccaattcgtgccactctcttcaaaatggccgttaccttctcaaatctccacacagaatcaggtctcaagtccctcgacgacttcctctctgggaaggtctacgtttctggggatcagttcacaaaggacgacatcaaagtgtatggtgctgttttggagaagccaggtgactctttncccaatgctgccaagtggtacgaggttgtctcatctcagcttgctgcaagcttccccggcaatgctcaaggggtgagattcagtggcaaagcttctg

SEQ ID NO: 277306 - DNA, 282 bp, Glycine max
agggtaccagattttattaaggcaggagctgatatagtcagtgttcattgtgaacaatcttccaccatccatttgcatcgtactgttaatcaagtgaaaagtctgggagctaaagctggagttgtcttaaaccctgctacccccttaagtgcaatagaatatgtcctgatgtggtggatttggtcttaattatgtccgtaaaccctggctttggtggccagagttttattgagagtcaagtaaagaaaatttctgacttgagaagagtgtgcgcggaaaagg

SEQ ID NO: 277307 - DNA, 282 bp, Glycine max
  unsure (1)..(282): unsure at all n locations
ctcactcactgcagatctcaattgcatcgctgtccatggctaccatcgttagcatcaaggcccgccagatcttcgacagtcgtggcaatccaactgtcgaggtggatttgacttgctccgatggtacttttgccagagctgctgttccaagtggtgcatccactgggatttatgaggcccttgaattgagagatggaggatctgactaccttggaaagggtgtatcaaaggctgttgncaatgtgaacaccgtcattggccctgctttgattggcaaggacc

SEQ ID NO: 277308 - DNA, 291 bp, Glycine max
  unsure (1)..(291): unsure at all n locations
gcaagccaagtgcacccgaagaattggtatccaattccactggtattttgncgaccctggggcaaactgccagaaaatgttccctgtcatcccaaacttgcagattttgctaactgtatgaagaagaaaggtcggggaatgtccatatttgtctctatactagatggggattaccatgaatgtgctgaagatgccaagactgcttgcaaacaacttagnacctacatcgattacaaaatngtgaaggtgtggctganattgttgttgcccctaacatgtctnaaggcttcc

SEQ ID NO: 277309 - DNA, 215 bp, Glycine max
  unsure (1)..(215): unsure at all n locations
cgctcgtgggtcccaccctcaaggacgaggtgatgaagatcacgccggtccagaagcagacccgggccgggcagaggacccggttcaaggccttcgtcgtcgtcggagacaacaacggccacgtcgggctgggcgtgaagtgcagcaaggaagtggcgacagctattcgtggcgcgattattctggcgaantgtctnttatccccgtgaggaggg

SEQ ID NO: 277310 - DNA, 285 bp, Glycine max
ggcaagagtggtggcactccaacagaaccaactatctttctctaccttagcttcctctctttctgacttcagtggaaccagacttcaaactcaacttcagttcaagagaaagcaatgccatccaaaagggtctttctacgtctccgcatcgagcaccaagaaaatcctaataatgggaggcaccaggtttattggtgtgtttttgtctaggctcctgtcaaagagggtcaccaggtgactttattcacaagaggtaaagcgcctgtcatcaacagttgccaggtg

SEQ ID NO: 277311 - DNA, 282 bp, Glycine max
  unsure (1)..(282): unsure at all n locations
ccgctattctactcgcaagcaaatcagaacaagagaagagaatggcaggagcagaggggctaaacagagaacagtacgtgtaccttgcganntgtcggagcaggcggagggtacgaagagatggtggngttcatgcagaaggtggtggtggggtggacgccggcgtcggagctcacggtggaggagcgcnacctcctcttcggtggcctacaagaacgtgatcgggnctctgcgtnccnctggcgcatcgtgtcctccatcgaacagaaggaggaanggcgc

SEQ ID NO: 277312 - DNA, 281 bp, Glycine max
  unsure (1)..(281): unsure at all n locations
agaaagcctccaggggatcgggccgagacaccgacagacccctttngtatccgggcgccaaagcgcccgaatacctcgatgggagtcttgtcggagactacgggttcgatccgtttgggctagggaagcccgcggagtacctgcagttcgagctggactcgctggaccagaaccttgcgaagaacgtggctggggacatcattggaaccaggaccgagctcgcggacgtgaagtccacgccgtttcagccctacagcgaggtgtttgggctccagaggttc

SEQ ID NO: 277313 - DNA, 279 bp, Glycine max
atcttgactgggttcaagatgcatgctcgtggttggatttccatctattgcatgccacctccgcccagcatttaagggttctgcccctatcaatctttctgatcgtctcaatcaggtgcttcggtgggccttaggttcaattgagatctttcttagcaggcattgtcccttgtggtatggctacaatgggaagttgaagcctctgatgaggctgcttatatcaacaccatgtctacccattacctcaatcccattgattgcttactgtacgcttcctgc

SEQ ID NO: 277314 - DNA, 290 bp, Glycine max
  unsure (1)..(290): unsure at all n locations
cacagaattagggtcacgagggtttcatcctgcggcatcagacatgggagncggcaatgggcaaaaggcaaagatggctcgcgagaagaacatcgagaagcagaaggccgcctcaaagggaagccagctggattcaaacaagaaagcaatgtcgatccagtgcaaggtgtgcatgcaaacatttatgtgcaccacatcggaagtgaatgtagggagcatgctgaagccaaacaccctaaaatctgatgtttatgcttgttttcctcatctcaaaaagtgaacatattgga

SEQ ID NO: 277315 - DNA, 279 bp, Glycine max
ctcattctgtgactctgtgcttagttaacgttaacagtgacttaagatggcggattctgcagatgtcacccacgatgttgtgtccctcctctcttctcctcaaagggactttcttcttcgaaacaacggcgatcaggttaaaattgacagcttgaagggtaagaaacttggtttgtatttttcggcatcctggtgtggtccatgtcaaacatttacgccaactttggtggatgtgtacaatgaggttgcaaaaaaaggtgacttccagatcgttttcat

SEQ ID NO: 277316 - DNA, 279 bp, Glycine max
  unsure (1)..(279): unsure at all n locations
gttaaatcattcagtgaagcattggatactacccaaaccatcatatggaatggaccaatgggagtgtttgagtttgacaagtttgctgttggtacagaggctantgcaaagaagctggctgatctcagtggaaagggggtgaccacaattatcggaggaggagattctgttgcagctgtggagaaagtaggagttgctagtgtcatgagccacatatctactggtggtggtgccagtttggagttattggaaggcaaagagctccaggagtcctgctct

SEQ ID NO: 277317 - DNA, 275 bp, Glycine max
  unsure (1)..(275): unsure at all n locations
gcattncaagcgctctctttctttgcttttccttccccctttcantttctnnnaacgctgcaactatccatggcaaaccgctggctcagacccgaggtgtatccactgttcgctgcggttggtgccgctgttnggatctgtggattccaattggttcgtaatatctgcatcaaccctgaagtcagggtgaacaaggagggaagaaaggcaggagtgttggagaatttgctnngggagagaatatgctgagcattcctgaggaagtatgtgcgcca

SEQ ID NO: 277318 - DNA, 295 bp, Glycine max
  unsure (1)..(295): unsure at all n locations
angntggaaccattgaaggttgtttcctcaggccaagatcttggatagtaattaacctcactcaaactcgggatcacagaaaccaacaacagttcttgcactgangtttcacgatgttgctggaacttgcacttggtttgtttgtgttagctttgtttctgcacttgctcccacaccaagtncaaaatcaaaagcacttcgccacctcccanaccctccaagcccaaagcctcgtcttcccttcattggccaccttcacctcttaaaagataaacttctccatatgcactcatcg

SEQ ID NO: 277319 - DNA, 297 bp, Glycine max
  unsure (1)..(297): unsure at all n locations
gnganatctgcgatggcnatggcgcttcacaggctttcatcttcaattgataagcctcnncgccctctcntcaagtnncgggtncactctactacaagtcgtntttgcctgntgaanctgtttacgacaagganngncccggagttncatggccgaancagttgaatgcncacttgaggtcgttgatcctgagattgctgatattattgagcttgngaaagctaggcaatggaaggggctggaactgntnancgtcagaganttcacttctntgtctgtgatgcaagcagttggatc

SEQ ID NO: 277320 - DNA, 300 bp, Glycine max
gggaggatacaagaagggtgtgacagaagcaaaactgaaggttgccataaacgggtttggaaggattggaaggaacttcttgaggtgctggcacggtcgcaaagactcccctcttgatgtcattgccatcaacgacaccggcggcgtgaaacaagcctctcaccttctcaatacgattccatcctcggaaccttcgatgctgatgtcaagcctgttggcagcaatgtcatctccgtggatggaaaggaaatcaaagttgtttctgaccgcaaccctgccaaccttccttggaaggacttg

SEQ ID NO: 277321 - DNA, 295 bp, Glycine max
cactcataacacaaagcacaaagcaaagctcatccttgagttaaaaaatggcagcagcttcttccatggctctctcatccccatccttggctggcaaggccgtgaagctgggcccatcagccccagaagtgggaagggtgagcatgaggaagaccgtcaccaagcaggttcctcaggaagcccatggtacggcccagaccgagtcaagtacttgggcccattctctggcgagcccccgtcctacctaaccggtgagttcccaggcgactacggctgggacactgctgggtttccg

SEQ ID NO: 277322 - DNA, 293 bp, Glycine max
  unsure (1)..(293): unsure at all n locations
ggcggattacaatattcnncnatgntangcccatcttccagcagaggcttatctttgccgggaagcagcttgaagatggaanancccttgctgattataacatccagaaggantctactttgcacttggtgttgcgacttcgtggtggcatgcaaatcttcgtgaaactttgacgggaaagaccataactttggaggttgaaagctctgacaccattgataatgtgaaggcaaagatacaggacaaggaaggtattccaccagaccagcagaggcttatttttgcagggaagc

SEQ ID NO: 277323 - DNA, 291 bp, Glycine max
  unsure (1)..(291): unsure at all n locations
tgctcttgacaagtacgacttcgattctgaagttggcggcaagattaaaggcactgtgttctacacagataacaatggngcagttgttgatatcactgcaaagtcttcggcatatttgccactgcaagaggcgtgcatccacagggttaagcatgttgaagaagaggcttagttcctgggttcaaagaggagtttttgatcattggtgagaactcaatagatgatagcttggtcttgagtttaaggtctcttcagtttgaccttgcatgggaacgttgtagacagcttcaa

SEQ ID NO: 277324 - DNA, 293 bp, Glycine max
gtgcctctagggttatcatatctccatttccatttcctctctctcagtttccaagaatcttaagctatgggaaagtcttacccaaccgtgagcgctgattaccagaaggccgttgagaaggcgaagaagaagctcagaggcttcatcgctgagaagagatgcgctctctaatgctccgtttggcatggcactctgctggaacttacgacgtgagctcgaagaccggtggtcccttcggaaccataaagcacccctccgaactcgctcacggcgctaacaacggtcttgacatc

SEQ ID NO: 277325 - DNA, 292 bp, Glycine max
aaaatttagatgatagcattggtgatgaaaaacttaaggagctgttctccccttttggtaccattacctcttgcaaggttatgagagacccaaatggcttaagtcgtggatcgggttttgttgcattctcgactcccgaggaggcatctagagcactcctggagagaatggcaaaatggtggtaagcaaacctctgtatgtgactctagcccaaaggaaagaagataggagagctagactgcaggctcagtttgctcaaatgcgacctgttggaatgccaccatctgttggt

SEQ ID NO: 277326 - DNA, 282 bp, Glycine max
  unsure (1)..(282): unsure at all n locations
gtttgttgttgtaactcgttcttcttcttttgttgttctgtgtttgtgtttgtnttttctctcacctgaaaatgtcttgctgcggtggtaactgtggttgcggaagctcctgcaagtgcggcaacggctgcggaggctgcaagatgtacccagactgagctacactgagtcaaccaccaccgagaccttggtcatgggagtggcacctgttaaggctcaatttgagggtgctgaaatgggtgtgcccgctgagaacgatggctgcaaatgtggaccanactg

SEQ ID NO: 277327 - DNA, 294 bp, Glycine max
  unsure (1)..(294): unsure at all n locations
ggacatgttctcgataattgcaaggaagacatggagtttttcgatacatggattaataaaggaatcattgatcgcttgagtgatgtagcagataaagatgttgtgcaaataacctacactgaagcgatagatctgctgtcaggagcaaataaganatttgaattcccgtgaaatggggtagtgatcttcagagtgaacatgagcgttatataactgaagaggcattcagtggatgcccagtgataattagagactatccaaaggatattaaagcattctatatgcgacagaatg

SEQ ID NO: 277328 - DNA, 290 bp, Glycine max
gcggctcttgcttctacaaggatcccttcaaacacaaggttcccatccaaggcctcttcactctttcccaacccaatgcgccttaaagagacttgaggtgacagaattctctgggcttagatccacttcatgtgtcacatatgctaacagtgctagagaatctccttttttgatcttgtagcttcccaactcactcccaacaccaatggatcaactcctgtgaggggagagacagtggccaagttgaaggtggcaatcaatggtttcggacgcattggtagaaacttcct

SEQ ID NO: 277329 - DNA, 255 bp, Glycine max
cattgtcactaaaaggaggatactatgactttgttaagggatcttttgagctctggggccttcagtttggccttgcatcctctttctccgtatgaacatcaaccattatcaatgacctcatcttggttccctaagtattctcctatctaaaatgttaaagagtggccaccattctgcattggaagctataggggccatgcttagaggtcgtgtgtatctgcaatgaagaggcctagccaccttcatcaccatatg

SEQ ID NO: 277330 - DNA, 285 bp, Glycine max
  unsure (1)..(285): unsure at all n locations
catcttcctctttttctcaaccaaaaggggttcaattctagctagttctattacatcgtccgcnaccatgaacatggcgatcgtgcttctgttcatggttttcgcagtttcatcagctttagacatgtcaataatatcacatgacaacgctcatgcggatgggccacgaggcgcaccgacgacgaggtgatgtcaatgttcgaggagtggctggtgaaacacgacaaggtgtacaacgcgctcggtgagaaggagaagaggtttcaaatcttcaagaacaatctg

SEQ ID NO: 277331 - DNA, 286 bp, Glycine max
  unsure (1)..(286): unsure at all n locations
gnagaacaagtagttgagaactaagaaggagaaacaaatggcttcctcaatgatctcttcccccagctgttaccactgttcaaccgtgccggtgccggcatggttgctccattcactggcctcaagtccatggctggcttccccaccaggaagaccaacnatncntacctccattgctagcaacggtggaagagtgcaatgcatgcaggtgtggccaccagttgggcaagaagaagnttgaggatctttcctacctgccagacctgatggtgcccaattggnnagg

SEQ ID NO: 277332 - DNA, 284 bp, Glycine max
  unsure (1)..(284): unsure at all n locations
ctgagncnnatngcntantcatntacatttactaatcaatgttntgnncnccnngngctngaaaggttntgtgtgtcaccggcgcgtccggttacattgcttcctggatagtcaaattcctcctccttcgccggctacaccgtnaaggccaccgttcgcgcacaagtgatccgaaaaaaacaaaccacttgattggcctcgacggtgctaaggagagatgcacctctacgaggcgaatcttctcgaagaaggttcctttaactctgtcgttcagcannaagcgc

SEQ ID NO: 277333 - DNA, 285 bp, Glycine max
agaagaacaagtagttgagaactaagaaggagaagcaaatggcttcctcaatgatctcttccccagctgttaccactgttcaaccgtgccggtgccggcatggttgctccattcactggcctcaagtccatggctggcttccccaccaggaagaccaacatgacattacctccattgctagcaacggtggaagagtgcaatgcatgcaggtgtggccaccagttggcaagaagaagtttgagactctttcctacctgccagaccttgatgatgcacaattggcaa

SEQ ID NO: 277334 - DNA, 285 bp, Glycine max
  unsure (1)..(285): unsure at all n locations
ctgcttcaacattgcggaagcagaagaagcgccgcagctatggtgnagtactccagagaacccgacaatcccaccaagtcctgcaaggccagaggcgctgacctcagagttcattttaagaacactagggagactgcctttgccatcaggaagttgcccttgttaaagctaaacgatacttagaggatgttttggcccacaaacaggctattcctttccgacgcttttgtggtggtgttgggaggacggcccaggctaagaacagacactccaatgggcaaggac

SEQ ID NO: 277335 - DNA, 255 bp, Glycine max
  unsure (1)..(255): unsure at all n locations
tcttagatctcttctttctctacgccgcacgccgaaaccatggccgganaaggagagggtcctgctatcggaatcgatctcggaaccacctactcttgcgtcnntgtgtggcaacatgaccgcgttnantcatcgccaacgaccaagggaacagaacnncgccgtcttacgtcggattcactgacaccgagcgtctcatcggtgatgcggccaagaatcaagtcgccatgaaccccatcaacaccgtcttcgatg

SEQ ID NO: 277336 - DNA, 283 bp, Glycine max
  unsure (1)..(283): unsure at all n locations
ccctactcattctccatacctcaacgaagaggttaaagagacggcaacactttgctgtccgccttgaccgagcagagcttcgtcttggccctcgattttgccctaaagtactctcagtcacaacagacacnnnnnnnnnnnnnnnnnnnnnnaatggcccgaagcagaccaaggctgagaagaagatcgcttacgatgcgaantgtgcgacctaatggaggagtacggccagatcctcgttgtgaactccgataacgtgggatcgaaccagctccagaacatt

SEQ ID NO: 277337 - DNA, 282 bp, Glycine max
  unsure (1)..(282): unsure at all n locations
tctgtaacgacgctggcgtggattttatccatgctaaagcaaaacacctgactctgaacgccgtcgtttcaccgtctctcgttgatgttcacccttgctttaaggaggagtttttcgcttacgacatgacaatctcctacgccggccacaacaccccctcgcngccgtccaggtgacggaactcgccgacggntcttcgtcggctgcaccgtcaaccactccgtcaccgacggcacctcgttctggcacttcttcaacacgttcgccgccgtcaccaaaggc

SEQ ID NO: 277338 - DNA, 284 bp, Glycine max
  unsure (1)..(284): unsure at all n locations
atactcattaaagtccacacacacagagcaanactgcactgtgtggaaacgaaacatggcaagagtggtggcactccaacagaaccaactatctttctctaccttagcttcctctctttctgacttcagtggaaccagacttcaaactcaacttcagtcaagagaaagcaatgccatccaaaagggtctttctacgtctccgcatcgagcaccaagaaaatcctaataatgggaggcaccaggtttattggtgtgtttttgtctaggctccttgtcaaagaggg

SEQ ID NO: 277339 - DNA, 283 bp, Glycine max
  unsure (1)..(283): unsure at all n locations
tggtggnaagtttaaattgggaaggaaaattggtagtgggtcttttggggagctctatttagctgtccaatgtacaaactggagaggaggtggctgttaagctggaacctgtgaagaccaggcatccacagcttcactatgagtcaaaactgtatatgcttcttcaaggaggaacggggattccccacctcaagtggtttggagttgagggagactacaatgtcatggttatcgaccttcttggaccaagtctggaagatttattcaattattgtaatcggaa

SEQ ID NO: 277340 - DNA, 279 bp, Glycine max
accacctctgctgagcgagaaattgtccgtgacatgaaggaaaaacttgcatatgttgccctagattatgagcaagaactcgagactgcaaaaagcagttcatcagttgagaaaagctatgagcttcctgatggacaagttatcacaattggggcgagagattccgttgcccagaagttcttttccagccatctatgattggaatggaagctgctggaattcatgagaccacctacaattctatcatgaagtgtgatgtggatatcagaaaggatctat

SEQ ID NO: 277341 - DNA, 281 bp, Glycine max
gcatgcacacacttgcatagttttggaaaccaagaatttttgaagggtagcatcaacaagaagttctggaaatggagatcaccaatgtcagcgagtatgaagctattgcaaagcagaagttgccaaagatggtgtttgactactacgcatctggtgcagaggaccagtggactctgcaggagaacagaaatgccttttccagaattttgtttcggccacgtattcttattgatgtgagcaagatagacatcacaactactgtcctgggcttcaaaatatcc

SEQ ID NO: 277342 - DNA, 279 bp, Glycine max
  unsure (1)..(279): unsure at all n locations
atcttgactgggttcaagatgcatgctcgtggttggatttccatctattgcatgccacctncgcccagcatttaagggttctgcccctatcaatctttctgatcgtctcaatcaggtgcttcggtgggccttaggttcaattgagatctttcttagcaggcattgtcccttgtggtatggctacaatgggaagttgaagcctctgatgaggcttgcttatatcaacaccattgtctacccatttacctcaatcccattgattgcntactgtacgcttct

SEQ ID NO: 277343 - DNA, 278 bp, Glycine max
gtctgcagagtgcagagccttctctcctctattttggcttccaacctttttgctccattcattctcaacaacaaaccaatctctatattttgcttagacaatgagggggagcttgtggcaacttgggcaatcgatcactcgccgtcttgcccaggagataagaaggctgttgctcgccgatgttttgcctcagaagctgagctgaaaaagacagtgtttcatgacttccatgttgctcatggtgggaagatggttccattgctggatggagcatgcca

SEQ ID NO: 277344 - DNA, 279 bp, Glycine max
acatgggccattggtagggatccaaattactgggatgacgcactcgagtacaagccggagaggttcttgttctccgacgacccgggcaagagcaagattgacgtgagggggcagtactatcagctcctgccctttgggagcgggagaagaagcgccccggagcctcgctagcgttgcttgtcatgcaagcaacgctagcgagtttgatccagtgcttcgactggatcgttaatgatggtaaaaaccatcatgttgacatgtctgaggaagggagggtga

SEQ ID NO: 277345 - DNA, 277 bp, Glycine max
ccagagagcgcgtcttaataaacgctcttctctgaaaacccccatttcttttcttctttcttcttctctttcgcttcttcgatcttcgatcttcgtcgctgaaaatgagagagtgcatttcaatccacatcggccaggccgggattcaggttgaaacgcctgctgggagctttactgcctcgaacacggcattcagcctgatgggcagatgccaagtgacaagaccgttggtggaggtgatgatgctttcaacaccttcttcagtgaaatggggcag

SEQ ID NO: 277346 - DNA, 279 bp, Glycine max
atcgatgtcagctacgaggacatcgccgccaacgaagccgactttgttaattccgttggggggcttgtgaggaacctgaagcagaacaagctcattactgtggcttccttcgcaacaagcgctgatgccgccaacaacaaattctacaatctctgtacgcagaatatgctactttctttgacactgtggtgtttctgagctgggtagggtttactccttctcgcgccaacccagttgcgagcttggaggagaagatccttgccgtggccaacgagtata

SEQ ID NO: 277347 - DNA, 274 bp, Glycine max
  unsure (1)..(274): unsure at all n locations
gcattgcaagcgctctctttctttgcttttccttccccctttcagtttcttcaacgctgcaactatccatggcaaaccgctggctcagacccgaggtgtatccactgttcgctgcggttggtgccgctgttgggatctgtggattccaattgttcgtaatatctgcatcaaccctgaagtcagggtgaacaaggagggaagaaaggcaggagtgttggagaatttgctnngggagagaagtatgctgagcatttcctgaggaagtatgtgcgca

SEQ ID NO: 277348 - DNA, 279 bp, Glycine max
  unsure (1)..(279): unsure at all n locations
gcattgcangcgctctctttnttngcttntccttcncccttncagtttcttcancgctgnaactatnccatngcaaaccgctggctcagacccnaggtgtatccactgttcgctgcggttggtncccgctgttgggatctgtggantccaattggntcgtaatntctgcatcaaccctgaagtcagggtgaacaangagggaagaaangcaggagtgttggagaactttgctgnagnnagannagtatgctgagcatttcctgaggnantatgtncgca

SEQ ID NO: 277349 - DNA, 275 bp, Glycine max
ggcattgcaagcgctctctttctttgcttttccttccccctttcagtttcttcaacgctgcaactatccatggcaaaccgctggctcagacccgaggtgtatccactgttcgctgcggttggtgccgctgttgggatctgtggattccaattgttcgtaatatctgcatcaaccctgaagtcagggtgaacaaggagggaagaaaggcaggagtgttggagaatttgctgagggagagaagtatgctgagcatttcctgaggaagtatgtgcgca

SEQ ID NO: 277350 - DNA, 274 bp, Glycine max
  unsure (1)..(274): unsure at all n locations
ggcattgcaagcgctctctttctttgcttttccttccccctttcagtntcttcaacgctgcaactatccatggcaaaccgctggctcagacccgaggtgtatccactgttcgctgcggttggtgccgngttgggatctgtggattccaattgttcgtaatatctgcatcaaccctgaagtcagggtgaacaaggagggaagaaangcaggagtgntggagaactttgctgaagggagagaatatgctgagcatttcctgaggaatatgtgcgca

SEQ ID NO: 277351 - DNA, 289 bp, Glycine max
  unsure (1)..(289): unsure at all n locations
cacccacgcggctcttgcttctacaaggatcccttcanacacaaggttcccatccaaggcctctcactctttcccaacccaatgcgccttaaagagacttgaggtgacagaattctctgggcttagatccacttcatgtgtcacatatgctaacagtgctagagaatcttccttttttgatcntgtagcttcccaactcactcccaagaccaatggatcaactcctgtgaggggagagacagtggccaagttgaaggtggcaatcaatggtttcggacgcattggtaga

SEQ ID NO: 277352 - DNA, 288 bp, Glycine max
aaagatctttgcaaaaaccccgtcgatggcttttctgccggtttggtcgacgaaaccaacatttttgaatggagtgtaactataattggacctcccgatactctttatgaggggggatttttcaatgccattatgagctttccacccaactacccaaatagtccgccatcagtgaaatttacctcagagttatggcatcccaatgtgtaccccgatgggcgagtttgcatatcaattcttcatccacccggtgatgacccaaatggttatgagcttgcaagtgagcgc

SEQ ID NO: 277353 - DNA, 279 bp, Glycine max
  unsure (1)..(279): unsure at all n locations
aaaagagggagaagaacggttgttgactctgaaggacacgtgtaagccgctacttgtcccttgctttgacctcaagagctctgcgccgttcgtgttctcccgagccgacgcgtccgagtcaccgagtttcaacttcgagctttggaaggcgtgccgcgccacgtcagcgactcctggcgttttcgcgccctttcacttctcctccgtcgacggaaaaacctcgtgcnccgccgtcgacggcggcttagtgatgaacaatccggccgcggcggcggtcag

SEQ ID NO: 277354 - DNA, 286 bp, Glycine max
  unsure (1)..(286): unsure at all n locations
aatccctaatgcgccttctgcgttcaattctcagagctacgttggtctcagagcgccactgaggaccttcaacttttcttctcctcaagctgccaaaattcctcgctcccaacgccttttcgtcgtcagagcctccgattcggagttcgaagccgncgttgtcgccggtaaggttccgccggngcctcccgtnccgcccagaccggcggctccggttggaacaccggtggttccttcacttccacttcaccggcgtcctcgtcggaaccggaagtcgcggcgcttt

SEQ ID NO: 277355 - DNA, 287 bp, Glycine max
  unsure (1)..(287): unsure at all n locations
aaacagagcagagcgaccttgaagagctatggctgtcggaaagaataagaggatttccaagggaaagaagggtggcaagaagaaagccgctgatccctttgccaagaaagactggtacgatatcaaggccccttccctcttccaggtcaagaatattggcaaaaccctcgtctctcgtacccagggaaccaagattgcatccgaaggactcaaacatcgggtttttgaggtctcattggctgatctccaaggggatgaagaccantccttcaagaagattcgtttga

SEQ ID NO: 277356 - DNA, 285 bp, Glycine max
tgatctcaagacaaggagttggcggaaaatagaggggatgtatccatatgttaacgtgggtgttcaggcacctccacttgtggctgttgtggataatcagctatatgcagttgagcatctgactaacatggtgaaaaaatatgacaaggaaaagaacacctggaatgaattggggaggcttccagtcagggcggattcttctaatggttgggggttggctttcaaggtttgtggagagcaacttttggttgtgggtggacaaagggtccagaggtgaatctattg

SEQ ID NO: 277357 - DNA, 226 bp, Glycine max
  unsure (1)..(226): unsure at all n locations
gctntnggnaagnntaanaggatttccaagggaaanangggtggcaaganganagccgntnatccctttgccaagaaagactggtacgatatcaaggcnccttccctcntccaggtcnngantattcgnagaancctcgtctctcgtacccagggannnaagattncatccgaagnctcanacatcgggtttttgaggtctcattggctgatctccaaggggatga

SEQ ID NO: 277358 - DNA, 288 bp, Glycine max
  unsure (1)..(288): unsure at all n locations
gagaatgttgaatccaacaggcgtgctcttagggagctgcttttcaccgctcccggtgctcttaaatatctcagtggtgtcatcctctttgaggaaactctctaccagagcacagctgcaggcaagccctttgtggaagtcttgaaggaggctggtgtgcttcctggcatcaaggttgacaagggcanagttgagcttgctggcactaatggagaaaccaccactcagggtctagatggccttggtcagcgttgcgccaagtactatgaagccggtgcacgttttgcc

SEQ ID NO: 277359 - DNA, 288 bp, Glycine max
  unsure (1)..(288): unsure at all n locations
ggnagtttcttctgcntctgcttcctccaaacttatactattcccccatgcttcatcttcttcncttatctccacanccttccgttccnccaccaacacccacnaantatcccctctctcctccnccttcctccaccccaccaccgtcctccgccgcncnccctnctcnaccactnncaccacctccccgcgcnntgccctcaccgtccgngcngncngnggcaagttcgagcgcaagaagccccacgtgaacatcggcaccatcggccacgtggaccacggcaagac

SEQ ID NO: 277360 - DNA, 284 bp, Glycine max
  unsure (1)..(284): unsure at all n locations
cttctttccctaattgacaagatccttcctgtctacagggaggntgttgctgaattgaaggcagctggtgctacttggatccagtttgatgaacctacccttgtgaaggatctcaanacccaccagttacaagcatttacacatgnctatgcagagctagagtcaagtttatctggttttaatgttctgattgaganatactttgctgatgtccctgctgaagcatacaaaacactcacctctttgaaggctgttactgcatatgggtttgatattgttcgtgg

SEQ ID NO: 277361 - DNA, 285 bp, Glycine max
  unsure (1)..(285): unsure at all n locations
ggggcttctgtctttcccatatgatggaacctactctactgattttattgaggagtgggtcaaaattggcttgcctgcaaaggcaaaggtgaagacacaacatggggatgcaccttttgctgagttgtgctcacactgtgagaaggaagctgtgaatgtttcccttggaaaccttctaacatacccatttgttagagatggcttggtgaacaagacattgtcactaaaaggaggatactatgactttgttaaggatcttntgagctctggggccttcagtttggc

SEQ ID NO: 277362 - DNA, 292 bp, Glycine max
ggagctagtagaagggtcatcataccttgggcaaccacttccattctcaatcaccacactgatctggatcgaggtactcgtaattggctacatagagttccagaggaatgcagagctcgacccagagaagaggttgtacccaggtggcagttacttcgacccattgggcctggcctcagacccagagaagaaagccacccttcaattgggcggagatcaagcacgcccgtcttggccatggtgggcttcttgggctttgcagtccaagccgccgccaccggcaagggcccgc

SEQ ID NO: 277363 - DNA, 285 bp, Glycine max
ctttggtgaccacaacaacaataacaatggctgcctcactacaagctgcagctaccttcatgcaacccaccaaggttggcatagcctctcgcaacctcaaatctacacaatgcatttctaaggcttttggcttggaacctgctgcagctaaactcacttgctcccttcagcctgatctcaaagaatttgctcaaaaatgtgtcgacgctaccaaaattgcaggattcgcccttgccacctctgctctcgttgtttctggagcaagtgcagaaggtgttccaaaaa

SEQ ID NO: 277364 - DNA, 283 bp, Glycine max
gcactcttcatcaagctccgctccaacacagaggaaaatgagggagatccttcacgtgcagggagggcaatgcgggaaccagatcggttccaagttctgggaagtggtgtgcgacgagcacggcatagatccgacggggaagtacgtcggaaactcagatctgcaactcgagcgcgtgaacgtctactacaatgaagcctcgtgcgggcgcttcgtgccacgcgcggtgctgatggacctggagcccggaaccatggacagcgtgcggaccgggccgtacggg

SEQ ID NO: 277365 - DNA, 284 bp, Glycine max
  unsure (1)..(284): unsure at all n locations
ggctgtcggaaagaataagaggatttccaagggaaagaagggtggcaagaagaaagccgctgatccctttgccaagaaagactggtacgatatcaaggccccttccctcttccaggtcaagaatattggcaaaaccctcgtctctcgtacccagggnaccaagattgcatccgaangactcaaacatcgggtttttgaggtctcattggctgatctccaaggggatgaagaccactccttcaagaagattcgtttgagagctgagggacgttcnagggaagaat

SEQ ID NO: 277366 - DNA, 285 bp, Glycine max
  unsure (1)..(285): unsure at all n locations
ggctgtcggaaagaataagaggatttccaagggaaagaagggtggcaagnagaaagccgctgatccctttgccaagaaagactggtacgatatcaaggccccttccctcttccaggtcaagaatattggcaaaaccctcgtctctcgtacccagggaaccaagattgcatccgaaggactcaaacatcgggtttttgaggtctcattggctgatctccaaggggatgaagaccactccttcaagaagattcgtttgagagctgaggacgttcaagggaagaatgt

SEQ ID NO: 277367 - DNA, 286 bp, Glycine max
ctctcaccctcctcttcacacattttctgtgcgctctaacaaacattctcgttcacactttcagattgtgtgaagatgggggcgggtggccgaactgatgttcctcctgccaacaggaagtcagaggttgaccctttgaagcgggtgccatttgaaaaacctccatttagtctcagccaaatcaagaaggtcattccacctcactgtttccagcgttctgttttccgctcattctcctatgttgtttacgacctcaccatagccttctgcctctattatgttgcca

SEQ ID NO: 277368 - DNA, 281 bp, Glycine max
  unsure (1)..(281): unsure at all n locations
gacttgttcaaccaattggggcaagtcgtgtccgttagggtttgcagggatttgaccagccggagatcgctcggttatggttatgtcaactttagcaacccgcaagacgctgctagagcattggatgttctgaacttcactcctctcaataacaggcccatccgtattatntattcgcatcgtgatcccagtatccgtaaangtggacaagganatatatttattaagnntttggatngggcaattgaccacaaggcattgcangataccttttctacatt

SEQ ID NO: 277369 - DNA, 282 bp, Glycine max
  unsure (1)..(282): unsure at all n locations
ccgctattctactcgcaagcaaatcagaacaagagaagagaatggcaggagcagaggggctaaacagagaacagtacgtgtaccttgcganctgttcggagcaggcggagggtacgaagagatggtggagttcatgcagaaggtggtggtggggtggacgccggcgtcggagctcacggtggaggagcgcaacctcctctcggtggcctacaagaacgtgatcgggtctctgcgtgccgcgtggcgcatcgtgtcctccatcgaacagaaggaggaagggcg

SEQ ID NO: 277370 - DNA, 281 bp, Glycine max
ggggaataagatcaacagtgtaggatggtggtttaaaccctggttctatcagcatgcacagacggcactgaagaaaggagagtttgtagaatacattcctaccagagaatattatcacaggcacacgagatgcttgtactgggagggaaagcttatcctcccatttgctgatcaattttggtttaggtatctgtttggctggttgatgccacccaaggtttctctcctcaaggcaactcaaggtgatgctataagaaactattaccatgaaatgcatgtca

SEQ ID NO: 277371 - DNA, 280 bp, Glycine max; identical to SEQ ID NO: 276939

SEQ ID NO: 277372 - DNA, 284 bp, Glycine max
  unsure (1)..(284): unsure at all n locations
gtccgtntggtggctggcaacatggctactggacaactttacagtcatctaatacccctcacactacttcttgttgatggtagcagtccaattgatgttaccgattcacagtgggagctgtatattgtgtgtcagaagaaaactgatcagcagggagagatccaatataggttgactggttttactgctgtttatcgattttatcactatcctgatggattcccgaatgcnactaagccagatactggtattacctccttaccagcacaagggttatggtcgat

SEQ ID NO: 277373 - DNA, 271 bp, Glycine max
  unsure (1)..(271): unsure at all n locations
gataactagaaacagtgtgatgaaaatgaaggtccttgttttcttcgttgctacaattttggtagcatggcaatgccatgcgtacgatatgttccctctccgaatgaacactggctatggtgcccgtactccggaggtcaaatgcgcaagttggaggcttgctgtggaagcacacaacatctttggctttgagaccattcctgaagagtgcgttgaagcaacanaggaatacatccatggcgaacaatatagatcagactccaaaacagtt

SEQ ID NO: 277374 - DNA, 282 bp, Glycine max
cgttgccattctcatcctcttctttctctctctaccattgccatgggatccctacaagcaccggccatccagcgccttcaattctcccttctggactacaaattctggtgctcctatttggaacaacaactcctctttaaccgttggagctagaggtccaattctgctggaggattatcatcttgtggagaagcttgcaaattttgatagggaacgtatcccagaacgtgttgtccatgccaggggcgctagtgcaaagggtttctttgaggtcacccatga

SEQ ID NO: 277375 - DNA, 282 bp, Glycine max
ctgctcttgacaagtacgacttcgattctgaagttggcggcaagattaaaggcactgtgttctacacagataacaatggagcagttgttgatatcactgcaaagtcttcggcatatttgccactgcaagaggcgtgcatccacagggttaagcatgttgaagaagcaggcttagttcctgggttcaaagaggagtttttgatcattggtgagaactcaatagatgatagcttggtcttgagtttaaggtctcttcagtttgaccttgcagggaacgttgtag

SEQ ID NO: 277376 - DNA, 284 bp, Glycine max
gttcaatttgcacaggcctagtgcggttggcgaggaggaaacagagaaaaagaaggacaagttctcaagcaagattcacctccgagtgtgtcttgaggccgggtaccacgtccttgatgagtccacgcatttcagcagtgatcttcagccatcctccaaacatttgaggaagaaaaacattggaattctcgaacttgggatactgagtgcccgcaacttgctgcccatgaaggccagggaagggaggactaccgatgcctactgcgtggccaagtatggcaaca

SEQ ID NO: 277377 - DNA, 278 bp, Glycine max
  unsure (1)..(278): unsure at all n locations
gntttctggtgttggtgttgacggcattgggaagaagcttgtgaactcaaaagatggacctccaacctttgagcagcccaanatgactctggagaagctcttgacgtatggtaacatgcttgtccaagaacaagagaatgtcaagagagtccaattggctgacaagtacttgaacgaggctgcacttggaaatgctaacgaggntgctattagtaggggttctttnttccantctnnnnttgnaggcanagcaaacttggcaagtaaatatttctgtt

SEQ ID NO: 277378 - DNA, 279 bp, Glycine max
  unsure (1)..(279): unsure at all n locations
aggactcaccgatgcatcaaagatagccattttgaatgcaaactacatggcaaaacgattggagaattattacccggttcttttccgtggagtcaatggaacagttgctcatgaattcatcattgacttganaggctttangaatactgctggaattgagcctgaagatgttgcaaagcgcctcatggactacggttttcatgcaccaacaatgtcatggcctgtgcctggcacactcatgattgagcctactgagagtgaaagcaaggccgagttaga

SEQ ID NO: 277379 - DNA, 280 bp, Glycine max
  unsure (1)..(280): unsure at all n locations
aagaaacagtcagaatcagaatcagaagaagcgagcaaagatgtcgggtcgtggaaagggaggcaagggtttgggtaagggaggagccaagaggcacaggaaggtgctccgcgataacatccagggaatcacaaaacccgccattcgccgtttggctcgcagagggcggcgtcaagagaatcagtggcctcatctatgaaganacccgcggcgtccttaagatcttcctcgagaacgttattcgcgacgctgttacctacaccgagcatgctaggaggaa

SEQ ID NO: 277380 - DNA, 279 bp, Glycine max
  unsure (1)..(279): unsure at all n locations
gcagaagaacaagtagttgagaactangangganaagcaaatggcttcctcaatgatctcttccccagctgttaccactgtcaaccgtgccggtgccggcatggttgctccattcactggcctcaagtccatggctggcttccccaccagaaagaccaacaatgacattacctccattgctagcaacggtggaagagtgcaatgcatgcaggtgtggccaccanttggcaagaagaagtttnngactctttcctacctgccagaccttgatgatgcaca

SEQ ID NO: 277381 - DNA, 279 bp, Glycine max
  unsure (1)..(279): unsure at all n locations
gcaattgaagttgaagtcttgcccttctctcttcaactccaaacacaagacatcatcatccatggctgnctccgtctccactgtcngagctgtcaacagagctcttttgaacctgaatgggtctggacctggggtttcagctcncagttcatcctnctttgggancagcttgaagaaggttattggctcaagggtccccaacacaaagatttcctctggaagcttcaagattgttgctgtagaaganaagaaagagnttnangagacccagcagaccgt

SEQ ID NO: 277382 - DNA, 278 bp, Glycine max
  unsure (1)..(278): unsure at all n locations
ggcncnaggcgnagagaatggctcccaagggtttaatcnttttggctgtgttangcttctcagcactgtcactgagtcgttgtcttgcngaggataatggncttgttatgaacttctacaaggaatcatgccctcaggctgaagacatcatcanagaacaagtcnagcttctctacaagcgncannngaacactgctttctcctggctcagaaacatctgtccatgactgtgctgttcagagttnngatgcntcactgtngctggactccacaaggag

SEQ ID NO: 277383 - DNA, 278 bp, Glycine max
  unsure (1)..(278): unsure at all n locations
cgcatcgcaccttcaacttannctattccacttntaatcgnanatancnntgctagaagaagagacaaagtgtgtctntgtgtntgagananagagcaatggctggctcntgggcacgccgttctctgattgttctagncancanttcctgcggatgtctatntgcgatnnccattgctanggangaagccancaagttatggacggtcatcggcattgatcttggaacaacctattcatgtgtcggngtttacaagnatngncnnnnttgaaatcat

SEQ ID NO: 277384 - DNA, 227 bp, Glycine max
  unsure (1)..(227): unsure at all n locations
ggccaagccagtgtccattgangtatggancccaagtggcaaatacagagttgtcagcaccaaaccaatgcctggaactcgntngatcnatcttctcattcanaatgatgttcgccntgaaatatgtaccgagaagaanacgnttntgncagttgaanacatcattgctntgattggtgataagtgcgatggagttattggacagttgactgangactggggagant

SEQ ID NO: 277385 - DNA, 277 bp, Glycine max
  unsure (1)..(277): unsure at all n locations
cacagaattagggtcacgagggtttcatcctgcggcatcagacatgggaggaggcaatgggcaaaaggcaaagatggctcgcgagaagaacatcgagaagcagaaggccgcctcaaagggaagccagctggattcaaacaagaaagcaatgtcgatccagtgcaaggtgtgcatgcaaacatttatgtgcaccacatcggaagtgaagtgtagggagcatgctgaagccaaacaccctaaatctgatgtntatgcttgttttcctcatctcaaaaag

SEQ ID NO: 277386 - DNA, 274 bp, Glycine max
  unsure (1)..(274): unsure at all n locations
aaacagagcagagcgaccttgaagagctatggctgtcggaaagaataagaggatttccaagggaaagaagggtggcaagaagaaanccgctgatccctttgccaagaaagactggtacgatatcaaggccccttccctcttccaggtcaagaatattggcaaaaccctcgtctctcgtacccagggaaccaagattgcatccgaaggactcaaacatcgggtttttgaggtctcattggctgatctccaaggggatgaagaccactccttcaag

SEQ ID NO: 277387 - DNA, 301 bp, Glycine max
ctgaagatgagctaaaattgatgctaagaggtgcagaattaagtggggcaatagaggaggaagaacaggatatgattgaaaatgtgttagagataaaagacacacatgtcagagaggttatgacacctcttgttgatgttgttgcaattgatgcaagttcaagcctggtagactttcatcacttgtgggtcacacatcagtactcaagggtacctgtttttgagcaacgtgttgataatataatgggtatagcatatgcaatggatctgctggattatgttcaaaagggtgagttgctaga

SEQ ID NO: 277388 - DNA, 300 bp, Glycine max
  unsure (1)..(300): unsure at all n locations
tncactcttcatcaagctccgctccaacacaggggaaaatgagggagntccttcacgtgcagggagggcaatgcggnaaccagatcggttccaagttctgggaagtggtgtgcgacgagcacggcatagatccgacggggaagtacgtcggnaactcagatctgcaactcnagcgcgtgaacgtctactacaatgaagcctcgtgcgggcgcttcgtgccacgcgcggtgctgatggacctggagcccggaaccatggacagcgtgcggaccgggccgtacgggcagatcttccgccccg

SEQ ID NO: 277389 - DNA, 302 bp, Glycine max
  unsure (1)..(302): unsure at all n locations
cgagataactagaaacagtgtgatgaaaatgaaggtccttgttttcttcgttgctacaattttngtagcatggcaatgccatgcgtacgatatgttccctctccgaatgaacactggctatggtgcccgtactccggaggtgaaatgcgcaagttggaggcttgctgtggaagcacacaacatctttggctttgagaccattcctgaagagtgcgttgaagcaacaaaggaatacatccatggcgaacaatatagatcagactccaaaacagttaaccaacaagcttacttttatgccagag

SEQ ID NO: 277390 - DNA, 305 bp, Glycine max
  unsure (1)..(305): unsure at all n locations
gtgtttttnngtcctggctacatcccgcccaataccggacaaggctttgcaaggatgagacgggctgtgctaganaagtatgcttctttgctcacaancctgaaganctacgccctgtgtatgcttccactgggtcggctatgccatcaccaaaatcctattcagctagtggacttgacatgacagcgntgagtccattggctcttagttccacatctttgccgatgnccaactgtttcaacccnacccatgtctcccttggcagcagcttcatntcccaagagtggaagcatgtggcagaacaa

SEQ ID NO: 277391 - DNA, 309 bp, Glycine max
  unsure (1)..(309): unsure at all n locations
gtgagtttgttgatcgagataactagaaacagtgtgatgaaaatgaaggtccttgttttcttcgttgctacaattttggtagcatggcaatgccatgcgtacgatatgttccctctccgaatgaacactggctatggtgcccgtactccggaggtgaaatgcgcaagttggaggcttgctgtggaagcacacaacatctttggctttgagaccattcctgaagagtgcgttgaagcaacaaaggaatacatccatggcgaacaatatagatcagactccaaaacagttaancaacaagcttacttttat

SEQ ID NO: 277392 - DNA, 303 bp, Glycine max
gcaaaaagaaagaatcccaggcgaggagaaagatggaggggaaggagcaggatgtgtcgttgggagcgaacaagttccccgagagacagccgattgggacggcggcgcagagccaagacgacggcaaggactaccaggagccggcgccggcgccgctggttgacccgacggagtttacgtcatggtcgttttacagagcagggatagcagagtttgtggccacttttctgtttctctacatcaccgtcttaaccgttatgggagtcgccggggctaatctaagtggagtaccgttgggattca

SEQ ID NO: 277393 - DNA, 301 bp, Glycine max
cggagaagccgtgtggttcaaggccgggtcccagatcttcagcgagggtgggctcgactacttgggcaacccaagcctgatccacgcccagagcatcctcgccatctgggccacacaagttatcctaatgggtgccgttgaaggttaccgtattgctggtggccccctcggtgaggtcactgacccaatctacccaggtggcagcttcgacccattgggccttgctgatgacccagaggcttttgctgagcttaaggtgaaggaatcaagaacggacgattggccatgttctctatgtttg

SEQ ID NO: 277394 - DNA, 302 bp, Glycine max
cccttctccttctctctctctttttcgcctcattccattttcatctatcaatggctccagtagcagcagcatcttcagattcaatcaagccaagagatgtttgcatcgttggtgttgcacgtacaccaatgggtggatttcttggtactctgtcatctctatctgccaccaagctaggctctatagctattgaagctgctcttaaaagggccaatgttgatccatcccttgtggaagaagtattttttgggaatgttcttagtgctaatttggggcaagctcctgcaagacaagctgctctt

SEQ ID NO: 277395 - DNA, 300 bp, Glycine max
attccaatatattccattctctctgtgtatttgcctacctctcccttcaagatgcagatcttcgtcaagaccctcaccggcaagaccatcacccttgaggtggaaagctctgacaccatcgacaacgtcaaggccaagatccaggacaaggaaggaatccccccggaccagcaacgtctcattttcgccggaaagcaacttgaggacggccgtacccttgctgactacaacattcagaaggagagtatcttcacctcgtcctccgtctccgtggtggcatgcagatcttcgttaagacat

SEQ ID NO: 277396 - DNA, 299 bp, Glycine max
ttgcaaactagttttgttttgggaacatcatcacattacattagattggtggtaatggcagcgtcactacaagcagcagctactttcatgcaacccaccaagttgagcaggagcaacactttgcagcaaaagtctactcagtccatttccaaggcttttggtttggaacctgttggagctaaaaaggtcacatgctcccttcaggctgatcttaaggacttggctcacaagtgtgttgatgctaccaaaattgcaggattcgcccttgccacctctgccctcgttgtctctggggcaag

SEQ ID NO: 277397 - DNA, 303 bp, Glycine max
  unsure (1)..(303): unsure at all n locations
cgccgccatctccgccgtccttcccgagggagcgccggaggtcgatccccgtactcaccgcctcaagaagcccgctcccgttcccgccggcgcgcctccggtcctcccnatctacgacgncatggcaccaggcncatccctcgcnccggcgccggcgccgggaaccgggaggcccgaagcaccacttcaacggcgagcgccaggtcaaggacttcatccacacactcttacattncggaggttacaacgaaatggctgatattctcgtaaacctaacgtctctggccaccgaaatgggaaggc

SEQ ID NO: 277398 - DNA, 303 bp, Glycine max
ggaacagctagcagagaaacaaagttacaagtaaagtaaattaagaagatcattaatggcttctcttgcaaccttagctgctgttcaaccagctgcgctcaatggccttgctggaagttccctctctggaactaagctctctttcaagccctctcgccacactgtcaaatccaagaacttcaggagtggtgccgtggtagcaaagtatggtgacaagagtgtgtactttgatttggaggatctgggcaacactacggggcggtgggacttgtatggctcagatgcaccttcaccctacaacct

SEQ ID NO: 277399 - DNA, 303 bp, Glycine max
  unsure (1)..(303): unsure at all n locations
cttccaacacttattcctttttttttttccctcttgtcattactnaaattggaaacattatttgangctatcaaacaacaatnctttcttctatcaaccctcagccatggtgttttctttcaaccaaagcttctgcctttcttcttcgcttctccttctcctcatggccctctgtgtttcttctctttctganaccgttttcaactctcaagcagcgcataccgctcggaaccttnttcaggctaaaaaaagttgtncngtgaatttcgngtttttaaactacacagtaatcacaagcaaatg

SEQ ID NO: 277400 - DNA, 299 bp, Glycine max
ccaaagtctgtctatgtcgggggtgattttcgtcgtcatggtgaagggggtacacatgttgctattgcttttgaagtgcctggtggctggcaaaaggagaaagatgctattgttttgactgttttacagatgcttatgggaggaggtgggtcattctcagcaggggggcctggaaaagggatgcactcaaggctatatcttaatgtgctgaatgaatatcagcagattcaatctttttctgcattcaacagtatcttcaataatacaggactgtttggcatttatgcaagcactagccc

SEQ ID NO: 277401 - DNA, 300 bp, Glycine max
  unsure (1)..(300): unsure at all n locations
cttcatttggcaaaagcgaatgatggagagggtccagatatattacgcagtgcacaggaaggtgattcaagtggccatgctgagtctttagcancaacccttgcagagcatcagcagcatttggctagcttccaggtgcttattaaccaactcaaggatgttgctccaaccatacagaagtccatatctgagtgtacagaaaaggttaactgtataacctccaatttacctccaacgaacagacctaatggtcggtcaacgtcacctatccagacacagagtagtgggaggatggacaat

SEQ ID NO: 277402 - DNA, 234 bp, Glycine max
caaaagaataccatatccacaagatatatgttattcttttggggtgagaaactgtttccgtactgactacaagcttgcagcattaaaagtagctatagggatttcgatgctatgcctctgcagctatatcacccttccattatatgctcttgtaactcagatgggttcaaggatgaaaacagcagtatttgaagagcaaacaaacaaggctctgaagaaatggcacatggatgc

SEQ ID NO: 277403 - DNA, 297 bp, Glycine max
gcaacctatggtgatcaaactagtaccataacaaaacaacagttggagattaacttgggtggggtcacagtagaagaggcaattagtgctcacagattattcatattagattaccatgatgcattcttcccgtatttgacgaagataaacagcctacctattgcaaaagcttatgccacaaggacaatcctgttcttgaaagacgatggatctttaaagccacttgctatcgaattaagcaagcctgcaacagtgagtaaagtggtgttgcctgcaacagaaggtgttgagagtaca

SEQ ID NO: 277404 - DNA, 298 bp, Glycine max
gcgacccatacatccttcacaccaacgtgtttagccaaggcaagggaaatagggagcaacaattctacctctggtttgacccaactgcagattttcacacctattccatcctatggaaccctcaacgtattgtcttctcagtggatggaagtccaattagggagttcaagaacatggagtcaaagggtgttccattccccaagaaccaggcaatgaggatatactcaagcctgtggaatgcagatgattgggccacaaggggaggtcttgttaagacagattggacacaggctccttt

SEQ ID NO: 277405 - DNA, 297 bp, Glycine max
cgagcccccgtcctacctcactggcgagttcccaggtgactacggctgggacactgctgggctttcggccgacccagaaaccttcgccagaaaccgtgagctcgaagtgatccactccaggtgggccatgctcggggccttgggctgcgtcttccccgaactgttgtcccgcaacggggtcaagtttggagaagctgtgtggttcaaggccgggtcccagatcttcagcgagggtgggctggactacttgggcaacccaagccttgtccacgcccagagcatcctcgccatctgggc

SEQ ID NO: 277406 - DNA, 301 bp, Glycine max
ggaacagctagcagagaaacaaagttacaagtaaagtaaattaagaagatcattaatggcttctcttgcaaccttagctgctgttcaaccagctgcgctcaatggccttgctggaagttccctctctggaactaagctctctttcaagccctctcgccacactgtcaaatccaagaacttcaggagtggtgccgtggtagcaaagtatggtgacaagagtgtgtactttgatttggaggatctgggcaacactacggggcagtgggacttgtatggctcagatgcaccttcaccctacaac

SEQ ID NO: 277407 - DNA, 299 bp, Glycine max
attgctacatagggctatatagcataaacatttgagtcttcattgcacaatgtcaacctcttccataaacgggtggtgcctctccttccatctccccagccaaaacctctctcaggaaggccacattacgcccttccgtcttcgcaacccttaacactccttcttctccttcctcttcatcttccttcccctctctcattcaagacaggcctgtttttgctgcccctgcccccatcatcaccccaactgtgagagaggatatggcaaaggaatacgagaaagctattgaagaattcaga

SEQ ID NO: 277408 - DNA, 297 bp, Glycine max
gttcgctttagcaacaaggacattgttgcacaaataatatctgctagcattgccggcgatttagttcttgctacagcatattcacatgagctgccacgatatggtcttgaagtaggacttacaaattatgcagcagcttattgcactggtctcctgttggcccgaagagtcctcaaaacacttgaaatggatgaggagtatgaaggaaatgttgaggctactggagaggattattcagtggaacctgccgagagcaggaggccattccgtgcactccttgatgttggtcttgttagg

SEQ ID NO: 277409 - DNA, 299 bp, Glycine max
  unsure (1)..(299): unsure at all n locations
aagttagagggggaacacgaacttccacctctgagccaccttctcnntttgacggaaccaccaggttgtacatcagttatatttgtccctatgcgcaggtgtttggatcactcggaactataagggactacaagacaagatcaaactggttcctattgacctacaaaacaggcctgcttggtataaggagaaagtctaccctgaaaacaaggtgccatcattggagcacaatggaaaggtcttgggtgaaagtctcgatttggtcaaatacatagatgacaatttgaagggccgtctct

SEQ ID NO: 277410 - DNA, 297 bp, Glycine max
ttcaaacctaacgcagcatcgttattctcttcattccatggctttgcccaaccagcaaaccgtggattaccctagtttcaaactcgttatcgtcggcgatggtggcacaggaaagacaacctttgtgaaaaggcatctcaccggagaattcgagaagaaatatgagccaaccatcggtgtggaggttcacccattggattttttcacaaactgtggaaagattcgattttactgctgggatactgctggacaggagaaatttggtggcctcagagatggatactatatccatggaca

SEQ ID NO: 277411 - DNA, 295 bp, Glycine max
tttgggagttaggttctgcacgctctgcttccagcgagtgttctttcttcgtttcaacaccttaatttgcacacgctgcttcttcagcttgagaaatggcacaagaaacctttctattcacatctgaatctgtaaacgagggtcaccccgacaagctgtgcgaccagatctctgatgcagtgctcgatgcgtgccttgaacaggaccctgacagcaaggttgcctgtgagacatgcaccaagaccaacatggtcatggtctttggagagatcacaaccaaggccaacgtagatat

SEQ ID NO: 277412 - DNA, 295 bp, Glycine max
ggaaggtcacttccgtggcctatgttgcatgctctggctacaagttgccattgatcaaagctgaggccagagttcctaaagccaaagaatctgaaggaggcaggagaggtgcccttgttctcttggcagctacccttttcacctctgcagcttccaattcttctgccaatgctgggatcattgaagattaccttgagaggagcaaggccaacaaggaattgaatgacaagaagaggttagctactactggagcaaactttgcaagagcatacaccgtggaattcggtagttgcaa

SEQ ID NO: 277413 - DNA, 295 bp, Glycine max
ggctgcacaagctcttgtatcatcatcatctcttaccttctcagccgaggctacaagacaaagtcttggaccaagatcactccaatctccatttggcttctcaagaaaagcctcctttcttgttaaggcagctgctactccccctgtcaagcaaggatcagacagacctttgtggtttgcatcaaagcaaagtctttcctacttggatggcagccttccgggtgactatggatttgaccctctgggactttcggaccctgaaggaacaggagggttcattgagccgaaatggcta

SEQ ID NO: 277414 - DNA, 294 bp, Glycine max
ggagatggagttttagaacgtgcggctggtgcattggctaatttggcagctgatgacaagtgtagtacagaggttgcactagcaggaggtgtacatgctctagtgatgcttgctcgtaactgcaaatttgagggagtgcaagagcaggctgctcgggcattggctaacttagctgcccatggagatagtaacagtaacaatgctgccgttggacaagaagcaggtgcccttgaggctcttgttcaacttacttgctctccccacgagggtgtcaggcaagaggctgctggtgca

SEQ ID NO: 277415 - DNA, 293 bp, Glycine max
  unsure (1)..(293): unsure at all n locations
tacaaaggntgctgtaggagataagattncagtagtgctaagtgctaacacctgcagtgaacantggcctctgcatcagcatctctgctcaagtcttcacttgttcttgacaagtctgagtgggtgaagggncaaacccttcgccaaccttctgcatcagttgtgagntgcaaccccaccaccccatcaggcctcaccatcagagctggttcctatgctgatgagctcgttaagaccgcgaaaacagtggcttcaccaaggaggggtattttggccatggntgagtccaatgc

SEQ ID NO: 277416 - DNA, 291 bp, Glycine max
  unsure (1)..(291): unsure at all n locations
cctttgttcactcttcttctcttgcggctagggttttancgcagttcttctagatttaaggaagatgggtaaggaaaaggttcacatcagtattgtggtcattggccatgtcgactctgggaaatccactaccactggtcacctgatttacaagcttggaggcattgacaagcgtgttattgagaggtttgagaaggaagctgctgagatgaacaagaggtctttcaagtatgcctgggtgctggacaaacttaaggctgagcgtgaaagaggaatcaccattgatattgc

SEQ ID NO: 277417 - DNA, 293 bp, Glycine max
  unsure (1)..(293): unsure at all n locations
gttaaaagccttagccttccctacaactccaaacaggnaagacatcatcatccatggctgcctccgtctccactgtcggagctgtcaacagagctcttttgaacctgaatggttctggagctggagcttcagctcccagttcagccttctttgggaccagcttgaagaaggttattgcctcaagggtccccaacagcaaggtttccggtggaagcttcaagattgttgctgtagaagagaagaaagagattgaagagacccagcagaccgacaaggacagatggaagggtctt

SEQ ID NO: 277418 - DNA, 295 bp, Glycine max
  unsure (1)..(295): unsure at all n locations
cttttgagcttgttatagtacagangantcacgtataattnanccaatgaatncncacancatccaaaccagacagactacactaaaggatggagtgcaagggtgacactttttaactggggtgacactaattttgcagactggtttgccgcagtacaaatggacaaagcagcttcgggttttgagaaaatgtattcattcaatgcaactcttctagatggtgtaaacaatacantaatcatgcaaggtttgccaggattganctaccttgtagcagaagcagatggagctgacc

SEQ ID NO: 277419 - DNA, 285 bp, Glycine max
cttacatagccatgatgggttctaaaggactcaccgatgcatcaaagatagccattttgaatgcaaactacatggcaaaacgattggagaattattacccggttcttttccgtggagtcaatggaacagttgctcatgaattcatcattgacttgagaggctttaagaatactgctggaattgagcctgaagatgttgcaaagcgcctcatggactacggttttcatgcaccaacaatgtcatggcctgtgcctggcacactcatgattgagcctatgagagtga

SEQ ID NO: 277420 - DNA, 296 bp, Glycine max
cgcccattgttaccacgagtgattgtgagggtgctggtgagatgtttcaggtgacaactttgctgagtgaggctgagagattggagaaggagttcttgcagaatccgcctccgtcggaggcagatgtggaggtggctaggtttgttgttcaggagaaaggggaggttgtgtctcagttgaaagctgccaaggcgagtaagcaggagatcggtgctgctgtggatcagcttaagaaggcaaaggagagttttgctaaggtggaggagaggtctaagcttaagcctgggattcccaga

SEQ ID NO: 277421 - DNA, 288 bp, Glycine max
ctcagtgtaccaggagaatttacaacaatggctgggaggcgtcttcgtgacgctgtgaagacagtgctaagtggtagcaaaggctttggtagcaacattcatgttgttattgcggggttgactaatacttattcacagtatgtgactacatacgagagtaccaggtgcagagatatgagggtgcttccacgctgtacggtccacacacactgagtgcttacattcaggagtttacgaagcttgcgcgtgctctcatcatggccagcctgtagaaccaggtcccaaccc

SEQ ID NO: 277422 - DNA, 293 bp, Glycine max
  unsure (1)..(293): unsure at all n locations
gcccagaacaacaaaaattgcnccctcaacgccctaagtcgtcgtttcggttcggtgagatgctcctacgcttacgtagataacgccaaaattaaggttgtcggcatcggcggtggcggcaacaatgccgttaatcgcatgatcggaagtggtttgcaggtgtagacttctatgcgataaataccgatgctcaggcactattaaattctgctgctgagaaccctattaaaattggagaagttctgactcgtggattaggtacaggtgggaatccacttttgggggacaagctg

SEQ ID NO: 277423 - DNA, 292 bp, Glycine max
caaagattttgctcaaaaatgtgtcgacgccaccaaaattgcaggattcgcccttgccacctcagctctacgttgtttctggagcgagtgcagaaggtgttccaaagaggctaaccttcgacgaaatccagagcaagacatacttggaagtgaagggactggaactgctaatcagtgcccaaccattgaaggtggagtggactcatttgccttcaaggcagggaaatacaaggcccagaagttgtgcctggaaccaacttcctcacggtgaaggcagagggtgtggccaaga

SEQ ID NO: 277424 - DNA, 293 bp, Glycine max
  unsure (1)..(293): unsure at all n locations
gaaaacagcatcgaacccgtcgtagcaganaaacttgtcaccatggtttcttccgacaaggatccacgagaggatgtccttcaagcctggtacatggatgatagtgatgaagatcaaagactcccccaccacaaagaacccaaggagtttgtctcgtggaccaacttgctgaacttggagtccttagctggaaactagatgctgataaccatgaaaatgatccagagctgaagaagattcgtgaagagcgtggttacacctacatggatgtttgtgaggtctgcccaaaagtt

SEQ ID NO: 277425 - DNA, 296 bp, Glycine max
gctaacgcgtgcatagcagagtcagagacagagacgcagccatggggcggagacctgcgaggtgttataggcaaattaagaacaagccataccccaagtcacgtttctgccgtggtgttcctgatcccaagatcaggatttatgatgttggtatgaagagaagggtgttgatgagtttcctttctgtgtccatctggttagttgggagaaggaaaatgtttcaagtgaggccctggaagctgctcgcattgcttgcaacaagtacatggccaaatttgctggaaaggatctttcca

SEQ ID NO: 277426 - DNA, 207 bp, Glycine max
  unsure (1)..(207): unsure at all n locations
atcagattgatgcaaatgttcaacgggagatagttaatcatcgatctttaaggcatccaaatatnatcaggttcaaagaggtatttctgacccctactcatttagctatcgtcctagagtatgctgctggtggtgaactcttcgagaggatatcaatgctggtcgattgagtgaagatgaggcaagatttttctttgcaacaactaa

SEQ ID NO: 277427 - DNA, 290 bp, Glycine max
atatagcccaagccctatacaaccaaaccctaacacacacccatttgattcagtttccatgggctagcctcaaggttgcatttttggctgcagtgctctgcatggttgtggtgagtgcacccatggcacatgcagctatcacgtgcgggcaggtgcgaatagcctgatcaattgcatcggttacctccagaacggaggaacgccgccgtcgggatgctgcaacggagtgaagagcctcaatgccgccgccaagaccaccgccgaccgccagacggcgtgcaatgcctcaa

SEQ ID NO: 277428 - DNA, 292 bp, Glycine max
  unsure (1)..(292): unsure at all n locations
tgataaattggttgaagatggnangatcacaccantcaaggaaatcacacctcnaccaatncnctgaggaccttantactgcaattaagagtggaaaagtccgtgctccaactcatattatttccaccatttctgatgacagaggagaggagccagctatgctggtgtacccatgtcttccattattgaaaaaggttatggtgttggtgatgttatctctgcttttgtggtttaaacgaagccttccccgttactgtactcaatttattgagatatgcatcatgcttgtgcc

SEQ ID NO: 277429 - DNA, 292 bp, Glycine max
  unsure (1)..(292): unsure at all n locations
ggccatttattcccactgtttattgaacatggnacagattttggctccctctacgcaatggcagatgngaatcctncaaaatcctctcccaatgcaagtcccattacatcanacatgtggagtnctttattgtggaaacaaaataagaaagtttcaccacaagttctgctaaatttagagtgatggcnattaagtctgacaatagcatcatcaacaggctagagggtctacttagtttggatatcactccattcacggacaagataattgctgagtacattggattggggga

SEQ ID NO: 277430 - DNA, 283 bp, Glycine max
  unsure (1)..(283): unsure at all n locations
ctgatttagttagcatggactggaagaaaatgaagattccggcagttcttccttcttcagagcatgcatggttgttcaagttgatgcaaccaatgaaggcactcctacaagcaaaagaagatttacagtcagtggggaaagaaattcagatggtgaactagctgatgcaacaaacatgagcattattcaagtaaggaaagctatagaggttggccgagctgcaagaaacaagctncataaagcacaatctccggcttgtgttgttcgtgattagcaatatttt

SEQ ID NO: 277431 - DNA, 282 bp, Glycine max
ctcagagatccctgatctcattgatgagtacaggaaggtgatgaaggattttgctttgaggttagagaaactagcagagcagctgctggacttgttgtgtgagaatcttggcctagagaaagggtacctcaagaaggctttctatggtcaagaggaccaacttttggcaccaaggttgccaactaccctccatgccccaacccagagctggtgaagggtcttcgtccccacactgatgccggtggaattatccttctcttccaggatgacaaggtcagtgga

SEQ ID NO: 277432 - DNA, 283 bp, Glycine max
caaaaaggtaaactttttgcaacaaccatggttgcaatggcagcagcaacagcatccacccagttgattttctcaaagccttgttccccttcacgtctatgccccttccaactatgtgtctttgacactaaacaagtgctatcaagtggaggagaaggcatgtggggggttctggagttaggtgcatggctgtgggggaagcagcaaccactgggacaaagaagagaagtggatatgagcttcaaacactcactagctggttgctgaagcaggagcagctggg

SEQ ID NO: 277433 - DNA, 284 bp, Glycine max
cgaaatatggcttcaactcatctgcttcccctagcaaccttcttcttacttctctccgcttcttatctccagattgctggggcggaagcacaaccgttgactagtctcaagcttaactctcatattcttcaggagtctactgctaaagagttaatgaaaatcccgaggcaggatgggaggctgctataaatcctcgtttctccaattatacagttgaacaatttaagcgccttcttggagtcaaaccaatgcctaagaaggaattagaagtacacctgtatatc

SEQ ID NO: 277434 - DNA, 284 bp, Glycine max
gggagatatcaacatggccaagtgccagtaatgtcattccaggccaggttacatataccgtggatatacgagcgatagatgaccttggacgtgaagctgttatctatgatttatcgaaacaaatttaccaaatatgtgacaagcgttcgtttcctgcattattgagcacaagcatgatgcaggtgctgtgatttgtgattcggatctaagttcacagctcaagtcagcagcttattctgcactcaagaagatggagggtgacattcaggatgaagtgccaacat

SEQ ID NO: 277435 - DNA, 280 bp, Glycine max
gctaatgccttgaagacatcagcactaggtgcctctggcatatttattggacgccctgtggtgttctccttggctgctgaaggagaggctggtgtaagaaacgtgctgcggatgctacgtgaggagtttgagctaaccatggccttgatggttgcacctcactcaaggatatcactcgtgatcacattgtcactgattgggaccaacctcgcattcttccccgcgcatgccaagatatgaaaaatttgctcctcattgagccaagtttgtataagtggtg

SEQ ID NO: 277436 - DNA, 287 bp, Glycine max
  unsure (1)..(287): unsure at all n locations
gctctatttctcagtctctgtgtttgcggctgaggattccgaacgagtgaccttcttgcgtttctcgcaaagtttaagtaatcatgggtaaggaaaaggttcacatcaacattgtcgtcattggacatgtcgactctgggaagtcaactacactggtcacttgatctacaagcttggaggtattgacaagcgtgtgattgagaggttcgagaaggangctgccgagatgaacaagaggtcattcaagtatgcctgggtgctcgacaagctccaaagctgacgtgaaa

SEQ ID NO: 277437 - DNA, 284 bp, Glycine max
  unsure (1)..(284): unsure at all n locations
cctcggtgaggtcactgacccaatctacccagntggcagcttcnncccattgggccgntgctgatgacccagaggcttttgctgagcttaaggtgaaggaactcaagaacggacgattggccatgttctctatgtttggcttctttgtcaggccattgtcaccggaaagggtccattggagaacctcgccgatcaccttgctgaccctgtcaacaacaacgcctgggcctatgccaccaacttcgtccccggaaagtgagcgtcaaagaacgaaatgacttttg

SEQ ID NO: 277438 - DNA, 284 bp, Glycine max
gcccaagccctatacaaccaaaccctaacacacacccatttgattcagtttccatgggctagcctcaaggttgcatttttggctgcagtgctctgcatggttgtggtgagtgcacccatggcacatgcagctatcacgtgcgggcaggtacgaatagcctgatcaattgcatcggttacctccagaacggaggaacgccgccgtcgggatgctgcaacggagtgaatcgcctcaatgccgccgccaagaccaccgccgaccgccagacggcgtgcaatgcctca

SEQ ID NO: 277439 - DNA, 280 bp, Glycine max
ctctttgcgcagttccctacctctcctttcaagatgcagatccttcgtcaagaccctcaccggaaagaccattcacccttgaggtggaaagctctgacaccatcgacaacgtcaaggccaagatccaggacaaggaaggaattccccggatcagcaacgtctcatcttcgccggaaagcagctcgaggacggccgtaccctcgccgactacaacatccagaaggagtcaacccttcaccttgtccttcgtctccgtggtggcatgcagatcttctcaaga

SEQ ID NO: 277440 - DNA, 278 bp, Glycine max
atgatgttaaagtttctgtgaatgacattattgtcaaagttgtagctgctgctctcagaaatgtaccagaagcaaacgcatactggaatgttgagacgggtgaggtggttttaaatgattctattgacatatgcatagcagttccactgagaagggcttgatgactccaataataaaaaatgctgatcagaagacaatatctgctatctcctcagaggtcaaggaactagctgcaaaggcacgtgctggcaaattgaagccacatgaattccaagggg

SEQ ID NO: 277441 - DNA, 282 bp, Glycine max
ccaatatattccattctctctgtgtatttccctacctctcccttcaagatgcagatcttcgtcaagaccctcaccggcaagaccatcacccttgaggtggaaagctctgacaccatcgacaacgtcaaggccaagatccaggacaagaaggaatccccccggaccagcaacgtctcattttcgccggaaagcaacttgaggacggccgtacccttgctgactacaacattcagaaggagagtactcttcacctcgtcctccgtctccgtggtggcatgcaga

SEQ ID NO: 277442 - DNA, 280 bp, Glycine max
ggcatccccgtggcttcaagaagagaatctcaatggaggcccaggagctgaagcgcgtgttccagatgttcgaccgcaacggcgacgggagaataacgaagaaggagctgaacgactcgctggagaacctgggcatcttcatctctacaaggacctgagccaaatgatccagaggatcgacgtcaacggcgacggttgcgtggacatggacgagtttggggagctgtatcagaccataatggacgagcgcgacaatgaggaggacatgagggagccttca

SEQ ID NO: 277443 - DNA, 281 bp, Glycine max
actccacggcgcagatccgaggagtttgggaaaccctaattcattcctctttgcttctatctctattaccctaacaccagtgatggcaggtttggctccagaaggatcgcagtttgatgctcggcaatatgactctaagatgaataattgctttccgctgatggacaagaatttttcacttcatatgatgaagtctatgatagttttgatgcaatgggccttcaagaaaatcttctcagaggcatatatgcttatggttttgcagaggccttctgcaatac

SEQ ID NO: 277444 - DNA, 280 bp, Glycine max
  unsure (1)..(280): unsure at all n locations
ggaagcccgagaatcaaaatcatgcaattatatttacgcgtggaaatgcagtccagacaattgacatgnntcaggatnactattttgaggaggctttgaagatgaggaaccttcttgaagaatttcattcagatcatgggcttcgcctcctactatacttggtgttagagaacatgtcttcactggcantgtctcatctttagcatcatttatgtccaatcaagaaactagttttgtgacttnggggcagcgagttttagcaaatccattgaagtccgca

SEQ ID NO: 277445 - DNA, 281 bp, Glycine max
  unsure (1)..(281): unsure at all n locations
gagacagtggccaagttgaaggtggcaatcaatggtttcggacgcattggtagaaacttccttcgctnctggcacggccgaaaagactcaccccttgangtcgttgttgtcaacgacagtggtggtgtcaagaatgcttcgcacctcttaaatatgattccatgctgggaacttttaaagcagatgtgaaaatactggacaatgaaaccatcactgttgatggtaagcccatcaaggttgtttcaagcagggaccctcttaagcttcctgggctgacttgg

SEQ ID NO: 277446 - DNA, 282 bp, Glycine max
  unsure (1)..(282): unsure at all n locations
cacgggttttgagcaaaatgggtgttgtgganggtctcttggcattgggtttgattctgaatgtgtgtgttgtgtgcaatggaggcacaagcagccccttcgtcaggaaagttgagaaggctgtagatatgccacttgacagcgagtctttgctattcctcctggttataatgccccccagcaggttcatataacgcaaggtgacctagtggggaaagcagtgatcgtgtcatgggtgactgtggatgagccggggtcgagcgaatgcgttactggagtgag

SEQ ID NO: 277447 - DNA, 296 bp, Glycine max
  unsure (1)..(296): unsure at all n locations
ctctcccttagtcaaaagggactcgttgttcttctccnangttntttagagaagcangaatggtgaagatttngctgcattggtagctggatatgtggggggtcctactatggcagncattgcacttaagtgcccatncattgaagttgctgttgttgatatctctaaatnccggcattgcagcctggaacagtgaccagcttcctatctatgaacctggccttgatggtgttgtgaagcaatgccgtggcaagancctcttcttcagcactgatgttgaaaagcntgtcttgagg

SEQ ID NO: 277448 - DNA, 294 bp, Glycine max
  unsure (1)..(294): unsure at all n locations
ggaagttggaagtcatgggcagcaacattgatggcagcaacaacaagttctggtactcttaaagcaactcctttnccttggccaaggcaagggtgccaatgccaatgctcttagggatgttgtctccatgggaactgggaagtacaccatgggcaatgatttgtggtatggaccagacagagtgaaatacttgggacccttctcagctcagaccccttcatacttgaaaggagaattccctggggattatggatgggacactgctggcttatctgctgacccagaagcatttgc

SEQ ID NO: 277449 - DNA, 296 bp, Glycine max
ggctgatttcatcaaggaagacacatgaggctattgagatcctcaagctcatgtcctccactttccctcattggcactttgccaagccattgacttgaggcatttggaggagaatttgaagaacacggtgaagaacgttgtgagccaagttgctaagcggactctcaccacaggtgtcaatggagagcttcacccttcaaggttttgtgagaaggacttgctcaaggttgttgatagggagtacacatttgcatacattgatgacccctgcagtgggcacatacccttgatgcaaa

SEQ ID NO: 277450 - DNA, 297 bp, Glycine max
agaagaacaagtagttgagaactaagaaggagaagcaaatggcttcctcaatgatctcttccccagctgttaccactgtcaaccgtgccggtgccggcatggttgctccattcactggcctcaagtccatggctggcttccccaccagaaagaccaacaatgacattacctccattgctagcaacggtggaagagtgcaatgcatgcaggtgtggccaccagttggcaagaagaagtttgagactctttcctacctgccagaccttgatgatgcacaattggcaaaggaagtagaat

SEQ ID NO: 277451 - DNA, 288 bp, Glycine max
gttgttttggcctacgagccagtttgggccattggaacaggaaaggttgctactcctgctcaggctcaagaggtccatgctgatttgaggaaatgggttcatgacaatgtgagtgccgaagttgctgcatctgtaagaattatctatggaggttctgtaaatggaggaaactgcaaagaattggccgcacagcccgatgttgatggatttttggttggtggtgcctccctggaagccggagttctggacatcataaatgctgccactgtgaagaagaatgaaattcgt

SEQ ID NO: 277452 - DNA, 293 bp, Glycine max
  unsure (1)..(293): unsure at all n locations
cgatgagtcatggtgccaaggtcttgatggtcttgcgtctcgctcagctgccatactaccaggcaaggtgcccgtttcgccaaatggcgtactgttgtgagcatccccaacggtccctctgctctggcagtgaaggaagctgcctggggtctagctcgctatnctgcaatttcacaggagaacgggttggtcccaattgtggagccagagatcttgcttgatggtgaacatgggattgacaggacattcgaagtagcccaaaaggtgtggtcagaggtattcttctaactggc

SEQ ID NO: 277453 - DNA, 291 bp, Glycine max
  unsure (1)..(291): unsure at all n locations
gcaaaggattctacccgccgctcgatgggaattgcgcttcaaggcgtctcgtagggctaatccgccttcacgagggtcaccaacggcacgtgcctttngggggccgaggccccctcactgctggtcggcaaacggacggcgggcgcacgcgtcgcttctagcccggattctgacttagaggcgttcagtcataatccaacgcacggtagcttcgcgccactggcttttcaaccaagcgcgatgaccaattgtgcgaatcaacggttcctctcgtactaggttgaattacta

SEQ ID NO: 277454 - DNA, 282 bp, Glycine max
  unsure (1)..(282): unsure at all n locations
tggagattggtacaagtccaaccacacggacaaaccttacagcaagtngaacgaggccaaacccgcaaggatcgtaccattacggtatgataaacacgacaaagacgatcatattggcgagttcggctggtcaagtaaatgggaagcaaagatacgcaattaacagcgtgtcttatgttgccccagacacccctcttaagctcgccgattacttcaaaatctccggtgttttccgccccggaagcatatctgacagacccactggtggcggcatttaccttg

SEQ ID NO: 277455 - DNA, 287 bp, Glycine max
agggtttgcaactgaatgaggctctcacctcgccacgtaatcttttaagcaattaaagaaggaataggataatgattagtgaaaaaagaaaaggctaagcgataattattttgggtaaaagaccaaatgcactagcctatgctttctacacatgttgaggttgtgtaatttgtaatgtacgtaggtcaatgcctctatgaatattgactattaaaacctgtttaatttccactgcagccactgccataagtcccaaacaatgcttcaaaccctaccaacactgcagc

SEQ ID NO: 277456 - DNA, 294 bp, Glycine max
  unsure (1)..(294): unsure at all n locations
gccatggccacccacgcggtctctagcttctacaaggancgccactaacagcnaangtnancatgccaagngcttgcacantcttncccaacccaatgcgcctcaaagagacttgaggtgacagaattctctgggctaagatccacttcatgtgtgacatatgctaacgatgctagagaatctncctttnttgntcttgtagcttcccaactcactcccaagancaatggatcatcaactcctgtgaggggaganacagtggccaagttgaangtggcaatcaatggtttcgga

SEQ ID NO: 277457 - DNA, 277 bp, Glycine max
  unsure (1)..(277): unsure at all n locations
cacacctctcctcgttcacgctacccctttctgctctncttctacctttcaagttttnaangtntaaaggtggcagagacattcctatttacctcagagtcgntgaacgagggacaccctgnnaagctctgcgaccaaatctccgatgctgtcctcgacgcttgcctcgagcaggacccagacagnaaagttgcntgcgaaacatncaccaaaaccaattggtcatggtcttcggagaaatcacgaccaaggccaacgttgatacgagaagatatgc

SEQ ID NO: 277458 - DNA, 291 bp, Glycine max
atatagcccaagccctatacaaccaaaccctaacacacacccatttgattcagtttccatgggctagcctcaaggttgcatttttggctgcagtgctctgcatggttgtggtgagtgcacccatggcacatgcagctatcacgtgcgggcaggtgacgaatagcctgatcaattgcatcggttacctccagaacggaggaacgccgccgtcgggatgctgcaacggagtgaagagcctcaatgccgccgccaagaccaccgccgaccgccagacggcgtgcaattgcctca

SEQ ID NO: 277459 - DNA, 285 bp, Glycine max
cttgagaataaccaacaagagggaagatgggtatcatgatttggcatccctttttcatgtgataagtctaggtgacataattaagttctctttgtcaccttcaaaaaccaaggatagcctgtcaaccaacgtgtctggggtgccccttgatgatagaaatttgattattaaggcgcttaatctttacaggaagaagactggcagtgacaagtacttttggattcatcttgataaacgggtgcctactggggcagggcttggcggtggaagtagcaacgctgcaac

SEQ ID NO: 277460 - DNA, 286 bp, Glycine max
ggcttccctggcggcttccaccgcggctatgtcagaaatccttggaaaccccgttaacctcagatgcgcaatcaggtctgctccatcaccaactacacctgccaccttcaagaccgtcgcacttttctccaagaagaagccagctccacctccaaagaaaaagcctgccgctgtatcccccgccaatgaggaactcgccaagtggtatggtcctgacagaaggatcttcttgcctgagggtctcttggaccgatctgagatccccgagtacttgaccggagaagtg

SEQ ID NO: 277461 - DNA, 285 bp, Glycine max
  unsure (1)..(285): unsure at all n locations
aaagccactagttctatggttaaatggagggcctggttgttcttctgttggagctggagctttctgttgagcatggccctttcaaaccaagtgaaaatggtcttttgaagantgaacatagttggaacaaagaggcaaatatgttgtacttggaatcaccagctggtgttggtttctcctactctgccaataaatctttctatgactttgtgaatgatgaaatgacagcaagggacaatcttgttttcctacagcgttggttcactaaattcccagagttaaaaa

SEQ ID NO: 277462 - DNA, 290 bp, Glycine max
  unsure (1)..(290): unsure at all n locations
ggcttccctgngcggcttccaccgcggctatgtcagaaatccttggaaaccccgttaaacctcagatgcgcaatcaggtctgctccatcaccaactacacctgccaccttcaagaccgtcgcacttttctccaagaagaagccagctccacctccaaagaaaaagcctgccgctgtatcccccgccaatgaggaactcgccaagtggtatggtcctgacagaaggatcttcttgcctgagggtctcttggaccgatctgagatccccgagtacttgaccggagaagtgcc

SEQ ID NO: 277463 - DNA, 283 bp, Glycine max
  unsure (1)..(283): unsure at all n locations
cacagctcttactttcttccgccatattccacaagaactctccaangatcctcctgtcccangagattctttggtgggaaaaatccaagaggtttnaaatttgaaggcagggaagatggattatttcaatgcaccaggaagaaaccatctctttgttccagggccggttaacattccggaccagatcatccgggccatgaacagaaacaatgaggactaccgttctccagcaattccagctatgacaaaaatttgcttgaggatgtcaagaagattttcaaga

SEQ ID NO: 277464 - DNA, 284 bp, Glycine max
  unsure (1)..(284): unsure at all n locations
ggaacagcatccgtggttcttgctggacttgttgcagctctgaagttggttgggggtaacttaggctgattcacagattcttatnccttggtgctggagaggctggcactggcatagcagaactcatagcacttgaaacatcaaaacagacaaatgctccactggaggaagtgcgcaagaatatttggttggtggactcaaagggattgattgtcagttcccgcaaagattcgctccaacattttaagaagccctgggctcatgagcatgaacctgttagaaat

SEQ ID NO: 277465 - DNA, 282 bp, Glycine max
gagagattctctatccctcgaattccagcagtggttgagctctgcattcaagccggtgttgaaattccagagtttcccaccaaaaggagaagaaagcctatcatccgtattgggaggaaggaattcatcgatgctgatgaaagtgacctaccagataaaatctcagagggtcctttaaaaccattactagctgaaatacatgattcagaaatagtagctccattagacaatgaagtagcccctcttgccgaggaaactctccaagcatgggaacggatgagg

SEQ ID NO: 277466 - DNA, 282 bp, Glycine max
  unsure (1)..(282): unsure at all n locations
gtttctattcctcactaggagctcctntccactggttcttcatctgcatgcacacagttgcntagttttggaaaccaagaattcctgaagaagggtagcatcaacaagcagttctgaaaatggagatcaccaatgtcagtgagtatgaggctattgcaaagcagaagttgccaaagatggcgtttgactactacgcatctggtgcagaggaccagtggactctgcaagagaacagaaatgccttttccagaattttgtttcggncacgtattcttattgatg

SEQ ID NO: 277467 - DNA, 212 bp, Glycine max
  unsure (1)..(212): unsure at all n locations
tgattnaagaagatgccgatcagaaacatcgccatcggaaggcctgaagaggctactcaccccgacacgttgaaggcggggttggctgagttcatctccaccttgatcttcgtgttcgccggttcaggttccggcatcgcctacaacaagctcaccgacaacggcgccgccactcccgccggcctcatctccgcttccatcgcccatgcttt

SEQ ID NO: 277468 - DNA, 280 bp, Glycine max
gcaagctagggagtaagagatggatttggaccagtggatctccaaggtgaaggatggccagcaccttctcgaagaggagcttcaacttctttgcgaatatgttaaagagatccttattgaggagtcaaatgtgcagcctgtcaacagtccagtgacggtttgtggtgatattcatggtcagtttcatgatctaatgaaacttttccagactgggggtcatgtgccggagacaattacatttttatgggagactttgttgatcggggttacaatagtcttg

SEQ ID NO: 277469 - DNA, 281 bp, Glycine max
gaatgagtggcggaggagaagagggagcaactctggagttcactccgacgtgggttgtggccgccttttgcacagtgcatcgtcgccatttccctcgccgctgagcgcctccttcattatggcggaaagtttctcaaagccaaggaccagaagccgctctacgaagctctccagaagatcaaagaagagctgatgcttttggggttcatttccctgcttttgacggttacacaaaacggcattaccaaaatctgcgttcgaccctctttgacgctccacat

SEQ ID NO: 277470 - DNA, 281 bp, Glycine max
  unsure (1)..(281): unsure at all n locations
agaagaacaagtagttgagaactaagaaggagaagcaaatggcttcctcaatgatctcttccccagctgttaccactgtcaaccgtgccggtgccggcatggttgctccattcactggcctcaagtccatggctggncttccccaccagaaagaccaacaatgacattacctccattgctagcaacggtggaagagtgcaatgcatgcaggtgtggccaccagttggcaagaagaagtttgagactctttcctacctgccagaccttgatgtgcacantgg

SEQ ID NO: 277471 - DNA, 285 bp, Glycine max
  unsure (1)..(285): unsure at all n locations
ccgcactagaagaaaccttgcagattgtgctgttgtggtggaagaactctggtggaaggcattagactttgcttctncttaaacggagctctgtttcattcnttgatgtggagaaacacgaaaccgccgtgtcacggtggacaagagcaaagacaagagcagctaaggttggaaaaggtttgtctaaggatgataaggcacaaaaattggccntatcaacattggctcgaagctattgacccacgtcatcgctattggnacaatttgcacatgattacgatactt

SEQ ID NO: 277472 - DNA, 283 bp, Glycine max
gttggaaagtggaaatgcaggagagccagcaaaactgatcaggcagagataccgtgaagccgcagacttgatcaagaagggaaagatgtgtgctctcttcatcaacgatcttgatgcaggagctggtacgtcttggtggaaccacccaatacactgtcaacaaccagatggtgaatgccaccctgcatgaacattgctgataaccccaccaatgtgcagcttcctggtatgtataacaaggaagagaatccccgtgtgcccatcatcgtcacggtaagatttc

SEQ ID NO: 277473 - DNA, 254 bp, Glycine max
  unsure (1)..(254): unsure at all n locations
ttctattcattcaagattcancaagtgcgttttggaagcagagaccgaaatacttcgagatggcccgtacaaagcaaactgctcgtaagtcaactggaggaaaagctcccaggaagcagcttgcaaccaaggctgcacgtaagtctgcaccaacaactggtggtgtgaagaagcctcatcgttatcgccctggaactgttgctcttcgtgagattaggaaataccagaagagcactgagctccaatcaggaagc

SEQ ID NO: 277474 - DNA, 278 bp, Glycine max
  unsure (1)..(278): unsure at all n locations
gcttatccttattgagagaaaaatggccaaatcaatcnnattctttgagttgaacacaggggccaanattccttctcttgggttagggacttggcaagctgaacctggtgttgtagctgaagctctcaccacagccattcaggttggatacaggcatattgactgtgctagtgcgtataagaatcaagcagagattggttctgctcttaagaagctttttgatgatggtgtggtgaagcgtgaggacttatggatcacttccaaactcggtgttcaga

SEQ ID NO: 277475 - DNA, 280 bp, Glycine max
  unsure (1)..(280): unsure at all n locations
ttcactgcacttcaggtgcgttccaatcaaagccatggctgaagttgatactatagcattgtcaaaaactgnttcttcttctgctccgggcagcaagcaagcnttgatatcattgtcagacaagaaggatcttgcatttgttgggaatgggctccaggaattaggatactattgtttcaactggaggaacagcttgacgcattggagagtgctggagtagctgttactaaagttgaaaagctcactaagttccctgaaatncttgatggcgtgtcaaaac

SEQ ID NO: 277476 - DNA, 282 bp, Glycine max
tggcaagagtggtggcactccaacagaaccaactatgctttctctaccttagcttcctctgctttctgacttcagtggaaccagacttcaaactcaacttcagttcaagagaaagcaatgccatccaaaagggtctttctacgtctccgcatcgagcaccaagaaaatcctaataatgggaggcaccaggtttattggtgtgtttttgtctaggctccttgtcaaagagggtcaccaggtgactttattcacaagaggtaaagcgcctgtcctcaacagttg

SEQ ID NO: 277477 - DNA, 274 bp, Glycine max
  unsure (1)..(274): unsure at all n locations
gattctaccaatgtcacttncgggcgtcgctttgatgtctacctggaccatcctttctttgagcatcagattcattggttctccatntttaactctttcatgatggtcatcttccttactggtttggtgtcaatgatattgatgcgaactctgagaaatgactatgcaaagtatgctcgggaagatgatgatttggaaagtctggagagagatgttagtgaagnatctggctggaaacttgtgcatggtgatgtttntcggcccctcgcaactt

SEQ ID NO: 277478 - DNA, 277 bp, Glycine max
  unsure (1)..(277): unsure at all n locations
cccgngatttcattgctgcgaaccaaggagaccgtgccactaacgtaatcaggggcacaaagaaagaacaagttcaacaaatgcatcaaagacattaaggagttcaaaganagcactaaggttgacaaggtggttgtcctgtggacagccaacacagagaggtacagcaacgtagttgtgggactaaacgacaccatggaaaacctctttgnttccttggacaggaatgaggctgagatttccccttccaccttgtatgcnattgctgtgttatgga

SEQ ID NO: 277479 - DNA, 277 bp, Glycine max
gtcttcattctgaattgtctggtgattttagaaatgctgtaattctctggacctacgatcctccagaaaggcatgcgagactagcaaaggatgcattgaaggctaagaaggggattaaacaccttcaggttctggttgaaatagcatgtgcatcaactcctaaccatttggtggctgtgaggcaggcttactgctctctctttgattgctcacttgaggaggacatcatagcctctgttgctccagccctcagaaagcttttagtggcctagtaagc

SEQ ID NO: 277480 - DNA, 276 bp, Glycine max
cttaacgagaggattctttcatccatttccaggagacacgttgctgcacacccgtggcacgatcttgagataggacccgaagctccaaagatcttcaactgtgtggtcgaaatagggaaaggaagcaaggtgaaatatgaacttgacaaaagaactggacttattatggttgatcgtatactttactcatcagttgtttatcctcacaactatgggtttattccacgtactatttgtgaggacggtgatcccatggatgtcttggtattatgcagg

SEQ ID NO: 277481 - DNA, 277 bp, Glycine max
cctcggtgaggtcactgacccaatctacccaggtggcagcttcgacccattgggccttgctgatgacccagaggcttttgctgagcttaaggtgaaggaactcaagaacggacgattggccatgttctctatgtttggcttctttgttcaggccattgtcaccggaaagggtccattggagaacctcgccgatcaccttgctgaccctgtcaacaacaacgcctgggcctatgccaccaacttcgtccccggaaagtgagcgtcaagaacgaaatga

SEQ ID NO: 277482 - DNA, 279 bp, Glycine max
  unsure (1)..(279): unsure at all n locations
gtaatggcagcgtcactacaagcagcagctactttcatggcaacccaccaagttgagcaggagcaacactttggcagcaaaagtctantcagtccatttccaaggcttttggtttggaacctgttggagctaaaaaggtcacatgctcccttcaggctgatcttaagganttggctcacaagtgtgttgatgctaccaaaattgcaggattcgcccttgccacctctgccctcgttgtctctggggcaagtgctgaaggtgttccaaaaggctaanctt

SEQ ID NO: 277483 - DNA, 273 bp, Glycine max
  unsure (1)..(273): unsure at all n locations
gttcatttctacacatncctagctctgtcgttccgtcgttgacgatggcgtttcgggtgcgaancctgacctccgctctctctttcttctctctctcttgtccatcgcttccgccaatgtcttcttcgaagagcgtttcgatgacggctgggaaaatcgatgggttaaatcagattggaaaaaagatgagaacgtggctggggagtggaaccanacctctggtcaatggaaggagacgctaatgacaaaggtattcaaaccatgaggattaca

SEQ ID NO: 277484 - DNA, 274 bp, Glycine max
  unsure (1)..(274): unsure at all n locations
atcacttttctactttgagtcttcttgatccttctttttctccttgaactcaaacatggcagatgaggtggttctgctagatttctggccaagtccatttgggatgagggtcaggattgcacttgctgaaaagggtatcaaatatgagtacaaagaagaggacttgaggaacaagagtcctcttctcctccaaatgaacccggttcacaagaagattccggttctcatccacaatggcaaacccatttgtgaatccctcattntgttcagtaca

SEQ ID NO: 277485 - DNA, 272 bp, Glycine max
  unsure (1)..(272): unsure at all n locations
gttctggaagccgcctctcctctcaggccttccgccactctgtnttctgatccctacagtgagacgattgaattagctgatatagaatgggacaaccttgggtttgggcttcaacccactgattatatgtatatcatgaaatgcacacgaggtggaaccttttccaaaggtgaattgcagcgttttgggaacatcgagttgaacccctccgctggagttttaaactatgggccagggattatttgagggtttgaaagcatacgcaaacaaga

SEQ ID NO: 277486 - DNA, 278 bp, Glycine max
  unsure (1)..(278): unsure at all n locations
gtcaaatccccaatgtgtgcatggcattgaggttgttccgtcacccaatctaatgggtctcgataaggatgagcagaagaggtggatggaactcactggccgagacttgaatttcacaatccctcctgaagcaagcgatttcagttcgtggagaaaccttcctaacaccgactttgagcttgaaaggccgcctacnccaatcaagagtgctcctaattctcatcctaaaaaactgcttaatggaactgtgctgaatctgtctaaccaagcaatggtga

SEQ ID NO: 277487 - DNA, 278 bp, Glycine max
  unsure (1)..(278): unsure at all n locations
aganagcgcaaaattagagtcaatactatatctgctggtccactgagaagtagggctgcaaaggctattggatncattgatatgatgatcgattactcatcagccaatgcacctctacagaaagaactatcagcagaggaggtgggcaacacagctgccttcttagcatcacctttggcatctgctatcactggtactgttctatacgttgacaatggtctgaatgctatgggtgttggagttgacagtccaatatttaaagatctgacattcccaag

SEQ ID NO: 277488 - DNA, 275 bp, Glycine max
ctctttcacagcacactcctcccagggtttctccaccaagagggaaatggctcccaaaccgcctagtacgggtctgtttgttggactgaacaagggacatgtcgtcaccaagaaggaattgcccccacgcccctcggatcgtaaggggaaaacaagcaagagggtgcactttgtgaggaacctcataagagaggttgctggttttgcaccctatgaaaagcgtataactgagttgctgaaggttgggaaggataagagggcattaaggttgcaaa

SEQ ID NO: 277489 - DNA, 273 bp, Glycine max
gttgagaacaataaatttgtgtatctgtgcactaccggaatgtagatgaaaagtattggaattgggtggggcaacgtgttcatgatgttctgaagggctatccacgtttgcgcttaactcatgggcggaaggttttagagatccgacctgtgattaactgggataagggcaaagctgtcacgtttctacttgagtcacttgggctaaacaattgtgatgatgtgcttcctatatatattggagatgatcggacagacgaagagcatttaaggt

SEQ ID NO: 277490 - DNA, 272 bp, Glycine max
  unsure (1)..(272): unsure at all n locations
aagacaagcagatgtgnactcanttatgctgttgttgggattgttgtgctacttnnttccaatgctgttcanatacagtggtgcctcagctgctctcactgtagacccttcactacacttgtcaagagcttctagcattgtnatgttgattgcatatgttgtctacattgtctttcaactgtggacacacagggagttatttgaagaagaagatgacggtaaagatggcgaggatggttcagaagaacaagctgtgattggatatggagtgg

SEQ ID NO: 277491 - DNA, 272 bp, Glycine max
  unsure (1)..(272): unsure at all n locations
gtcttcataaangcctctcttctccgtttccgtttcntcgttcgnattcgctntttgatctgcgaaaatgagagantgcatctcgntccacattggtcaggctggtatccaggncggaaatncttgctgggagctctactgcctcgagcacggcatcgngcccgatgggcaaatgccaagtgacaagacagttggcggtggtgatgatgctttcaatactttcttcaccgagactggtgctggaaagcacgtgccacgtgcatgtntgtnga

SEQ ID NO: 277492 - DNA, 281 bp, Glycine max
gcttaaagagacttgggcatcgattgcatagatctctattaccaacatccgtattgatactcgtgtgcctattggaaatcacgattggggaacttaaaaaactcgttgaggagggaaaaataaaatacattggtctgtctgaggcctcggcttcaacaatcagaagagcacatgcagttcatccgataacagctgtgcagttggagtggtccctatggtcaagagatgtggaggaagaaatagttccaacatggcagggaacttggtattggaatgttgca

SEQ ID NO: 277493 - DNA, 289 bp, Glycine max
ctgattcataggcccaagagcaaagaaactaagaagattttgagcacaatggcatccacacaatgcttcttgcaccaccatgccctcaccactccaaccagagcttcatcacagcgcttagttgtgagcaccaaaccaaaccacattgtttgcaaggcacaaaagcaggttgtccaagagggtgaggacactactaacattgtctctcgcaggttggccctcactgttctcattggtgctgctgctgttggctctaaggttgcacctgctgatgctgcctatggagaag

SEQ ID NO: 277494 - DNA, 289 bp, Glycine max
  unsure (1)..(289): unsure at all n locations
ggagaccctctgnctctgcattggtgttcccatctttcagaatcagnacttcagctttctccaaatgtggcatcagggcntccattgccgttgagcaacaaanttcccagactaaggttgctctcctcagaattggtaccagaggaagtccactagctctggctcaggcatatgagaccagagacaagctcatggcatcacatgcagagctagcagaagaaggggctattcagnttgtaataataanaacnactggtgacaanatactatcacagccacttgcagacat

SEQ ID NO: 277495 - DNA, 283 bp, Glycine max
gaaaattcagtgctgaaacatggcttcggctactctctctgtagccaaaccagcccttcaggcaaatgggaaaggcttctctgaattctctggcctccgaagctcatcaggcttccttcccttttctagaaaatcttcagaggatttccattctgtcattgccttccagacctatgcagttggaagcagtggaggatacaagaagggtgtgacagaagcaaaactgaaggttgccataaacgggtttggaaggattggaaggaattcttgaggtgctggcagg

SEQ ID NO: 277496 - DNA, 288 bp, Glycine max
  unsure (1)..(288): unsure at all n locations
aaaaccctctctttctctctcttccaaaacctaattttcattttttctcttcaaacaaattttcaaaatgcgtgagatccttcacatccagggtggccaatgcggcaaccagatcggcgccaagttctgggaggtggtttgcgcggagcacgggatcgaccccactggaaggtacggtggggactcagagcttcagctcgagaggatcaatgtctactacaacgaagccagctgcggccggttcgtgccgcgcncggttctcatggacctcgaaccgggcaccatgga

SEQ ID NO: 277497 - DNA, 276 bp, Glycine max
  unsure (1)..(276): unsure at all n locations
gtttgttgtgagctataagctagtttatcgtgaggagaatatgaagttgtttgtttnctttgttgctgcagtagttttggtagcatggccatgccatggcgcaggctaccaaaggttccctctccgaatgaaaactggctatggtgagcgttcttcggaggtaaaatgcgcaagttttaggcttgctgtggaagcacacaacatccgagcctttaaaaccattcctgaagagtgcgttgaaccaacaaaggactacattaatggcgaacaatttag

SEQ ID NO: 277498 - DNA, 289 bp, Glycine max
gaaaagcagattaatacttttgcaaagaaggcaaatgatggatctttatcaattgatgagatggctggaggcactcttacaatatccaatggtggtgtttatggaagccttttgagaccccctattatcaaccctcctcagtctgcaatcttgggtatgcattccatagtgagccgtccaacggttgttggaggaaatattgtcccaagaccaatgatgtacgtggctctaacatatgaccacagaattattgatggaagagaggccgtgttctttctgcgacgcatca

SEQ ID NO: 277499 - DNA, 286 bp, Glycine max
cagaaagcaagctcatcctagagttttaaaaatggcagcagcctcctccatggctctctcttccccatccttggctggcaaggccgtgaagctgggcccatcagcccccgaagtcgggagggtcagcatgaggaagaccgtcaccaagcaggcctcctccggaagcccatggtacggcccagaccgcgtcaagtacttgggcccattctctggcgagcccccgtcctacctcactggcgagttcccaggtgactacggctgggacactgctgggctttcggccgac

SEQ ID NO: 277500 - DNA, 283 bp, Glycine max
  unsure (1)..(283): unsure at all n locations
ctataagctagtttatcgtgaggagaatatgaagttgtttgttttctttgttgctgcagtagttttngtagcatggccatgccatggcgcaggctaccaaaggttccctctccgaatgaaaactggctatggtgagcgttcttcggaggtaaaatgcgcaagttttangcttgcgtngaagcacacaacatccgagcctttaaaaccattcctgaagagtgcgttgaaccaacaaaggactacattaatggcgaacaatttagatcagactctaaaacagtta

SEQ ID NO: 277501 - DNA, 285 bp, Glycine max
attcacactgctgataaacttgttattagtgagctgaaaaatctgtctgaactcaagcatttcctacagggagaacaacccaaaaccagtgtgtgtttctccccaagactcacgtttagctgcagaaattcaagaacaacagagccttctgaaaacttatgaggtcatggtgaagaagttccaatctgaaatccagaataaagattcagagatccatcaattacagcagcagattgaggaggctagccagaagcgagcaaaactagagaaaaatctgaagcttag

SEQ ID NO: 277502 - DNA, 298 bp, Glycine max
ggaatgatgagaagcagctccaagacatgtatcttagcagaaagtcttttgcttttgattctgatgcccctggtgctggcatgactgagaaaagaaaagtcttcgagatggctctgagcacagcagatgccacattccaaaatcttgattcatcagaaatttccctcactgacgtcagtcattactttgactcagacccgactaatctggtacaaaatctaaggaaagatgggaagaagcctagtgcatacattgctgatacaaccacagccatgctcaggtacgtacactttctgag

SEQ ID NO: 277503 - DNA, 296 bp, Glycine max
  unsure (1)..(296): unsure at all n locations
agccacccagcccggcaatggtcctctttgtggagctggtccaggtatttctanccataatgagcttcctgggtccccggggagtatgggccatcaaggccgaccacatgggctcctacggaccagccttntaccagtcttacgacgcctctggacagttcacacatgaatttgacggggaacagattttctctgtggatctgaagaagggggaggtcgtgtggcgtctgcccgagtttgcagacttcgcgtactcggactttcagagcgggctgatgagcatctccatgatcaga

SEQ ID NO: 277504 - DNA, 295 bp, Glycine max
agcgcttagttgtgagcaccaaaccaaaccacattgtttgcaaggcacaaaagcaggttgtccaagagggtgaggacactactaacattgtctctcgcaggttggccctcactgttctcattggtgctgctgctgttggctctaaggttgcacctgctgatgctgcctatggagaagctgccaatgtgtttggaaagccaaagacaaacactgacttccttccatacaatggggatggattcaaactctcaattccctcaaagtggaacccaagcaaagaggttgagtacccagg

SEQ ID NO: 277505 - DNA, 295 bp, Glycine max
  unsure (1)..(295): unsure at all n locations
cttgatgacactgcngctgntggacttctgtttgagcatcctnnccctgtgcagctcctatatggaagtggcccacctaccttaacttcaagtccatgaaccacatgaattacctgccgagtcaggagggcatgccacgnagccagttcatcaacatgntgntcatcnttncagtggcctttatnaccgtgctcatcctgaaggtctacatgttcaagtgtgtttngactgctacagattcntgaagcacatggattcggccgtggaggacagcagttncnagctgttcctacag

SEQ ID NO: 277506 - DNA, 292 bp, Glycine max
cggcaacgtctctctccgctacctccccgtctcttttaaccaggccgtcggcgccaccactcccttcttcaccgccgttttcgcttacgtcatgaccttcaagcgcgaggcctggctcacctatctcaccctcgtccccgtcgtcaccggcgtcgtcattgccagcgggggtgagccgagcttccatttatttgggttcatagtatgcattgcagctatgccgcacgtgccttaaaatccgtgttacaaggaattttgctttcttctgaaggagagaagttgaatctatgaa

SEQ ID NO: 277507 - DNA, 293 bp, Glycine max
ctactccaaccgcacttctgctccgcaattatcatgggcaaggtcaagatcggaatcaacggatttggaagaattggccgtttggtagccagagtggctctgcagagagacgatgttgaactcgttgccgttaacgaccctttcatcaccaccgattacatgacatacatgtttaaatacgacagtgttcatggacactggaagcatcacgatgtcaccgttaaggacgagaagacccttctcttcggtgacaagccagtcactatttttggacacagaaaccctgaagagat

SEQ ID NO: 277508 - DNA, 292 bp, Glycine max
  unsure (1)..(292): unsure at all n locations
gtttgttgtgagctataagctagtttatcgtgaggagaatatgaagttgtttgttttctttgttgctgcagtagttttggtagcatggccatgccatggcgcaggctaccaaaggttccctctccgaatgaaaactggctatggtgagcgttcttcggaggtaaaatgcgcaagttttaggcttgctgtggaagcacacaacatccgagcctttaaaaccattcctgaagagtgcgttgaaccaacaaaggactacattaatggcgaacanttagatcagactctaaaacag

SEQ ID NO: 277509 - DNA, 292 bp, Glycine max
  unsure (1)..(292): unsure at all n locations
tgaacacacacatagaaacccaacaacaagaatgaagaagatgattctaaccctcttcttcaatatcattttatctctcctctccctctccccacgcctccgtggtggatttctgcgtanagactacacaggccccaatggccccgcaggtaactcatgcaagagcccagcaaaggtcacggtggacgacttcgtctactccggccttggcaccgccggcaacacctcaaacatcatcaaagccgcggtgacgccggcgttcgacgcgcaattccccggcgtcaagggcttg

SEQ ID NO: 277510 - DNA, 290 bp, Glycine max
  unsure (1)..(290): unsure at all n locations
gccatgggctgggcccatggctaccttctggtgggcccattcgtgaaggccgggcctctgaggaacaccgagatcgncgggcaagcaggctctctcgccgctggtgggcttgtggtgatcctcagcctttgcctcacaatctatgggatttcatcttttaacgaaggagacccatccactgccccgtcactgaccttgacgggccgcaagaaggagcccgatcagctccaaactgctgatgggtgggccaagttcaccggaggcttcttcttcggaggcatttcgggtgt

SEQ ID NO: 277511 - DNA, 299 bp, Glycine max
gctttttgtgaggattccaaagcatgggcttcccttgcagcatccactgctgctgcttcccttggcatgtcagaaatgcttggaaaccccatcaacctcagtggtgccacaaggccagctccatctgcctctagccctgcctccttcaagactgtggctcttttctccaaaaagaaggctgcacctccaaaaaaagctgcagctgctgctcctgccaatgatgagcttgccaagtggtatggtcctgacagaaggatcttcttgcctgagggtctcttggaccgatctgagatcccaga

SEQ ID NO: 277512 - DNA, 290 bp, Glycine max
  unsure (1)..(290): unsure at all n locations
atttttgttagtttcacctttgctgccatgtatggtattgctgttgctngcgcttggcatgctgagtaccattgccaccggattggccattgatgcatatggtccaatcagtgacaatgctggaggttntgctgaaatggctggtatgagtcacagaattagagagagaactgatgcccttgatgctgccggaaacacgactgccgctattgggaagggatttgccattggttctgctgcccttgtatcactggccctctttggtgcctttgtgagccgagctgctatta

SEQ ID NO: 277513 - DNA, 290 bp, Glycine max
ctggagctgagctgagaaaacccccaaccccaacctcaaccttaacctctcctgcactttcttttcaaccagaactatgattaagctttttaaagtaaaggaaaaacagagagaactggcagaaaatgcgagtggcggaccacccgttaagaagcaaagtgccggcgagttgcgtcttcacaaagatataagcgagctgaatctaccaaaatcatgtaccatgcaattccccaatggcaaagatgacctgatgaactttgaagtttcaattcgacctgatgatggatatt

SEQ ID NO: 277514 - DNA, 293 bp, Glycine max
ggccttgctaggcagtccctgattaacgcaggtggcattattgagcaaacatttttgcctggaaagtactccattgaaatgtcatcagttgtttacaagaattgggttttcactgaccaagcattaccagctgatcttgtcaagagaggattggcagttgaggatccctctgccccacatggtcttcgccttgtgatagaggactacccttatgctgttgatggacttgaaatatgggatgctattaagacatgggtccatgagtatgtctctgtgtattacccaacaaatgc

SEQ ID NO: 277515 - DNA, 288 bp, Glycine max
agaaactctaacgaaagagcgagaaagcgaagacagccatggcgtcgtttcttcaatcgtttctggatccgaagaagaactggttcgccgctcagcacatgaaatccctctccaaacgcctccgcaaatatgggctccgatacgacgatttgtacgatccttactacgatctggatgtgaaggaggcgctgaatcggcttccgaaagaggtggtggacgctcgccacgcgcgtcttaaacgcgcccatcgatctttccatgaagcacgagtacctccctgacaatctg

SEQ ID NO: 277516 - DNA, 289 bp, Glycine max
ataacacaaagcacaaagcaaagctcatccttgagttaaaaaatggcagcagcttcttccatggctctctcatccccatccttggctggcaaggccgtgaagctgggcccatcagccccagaagtgggaagggtgagcatgaggaagaccgtcaccaagcaggtctcctcaggaagcccatggtacggcccagaccgagtcaagtacttgggcccattctctggcgagcccccgtcctacctaaccggtgagttcccaggcgactacggctgggacactgctgggtttc

SEQ ID NO: 277517 - DNA, 286 bp, Glycine max
  unsure (1)..(286): unsure at all n locations
gtggctggggacatcattgggaccaggaccgagctcgcggaacgtgaagtccacgccgttccagccctacagcgaggtgttcgggctgcagaggttccgccgagtgcgagctcattcacgggaggtgggccatgctcgccactctcggagctctcactgttgagtggctcactggtgttacatggcaagacgccggaaaggtggagctagtggaaggttcatcntacctagggcaaccacttccattctcaatcaccanactgatctggatcgaggttctcgtaat

SEQ ID NO: 277518 - DNA, 279 bp, Glycine max
  unsure (1)..(279): unsure at all n locations
gggagatgggtcatctctatgctttggactttgatggagttatctgtnatagctgtggtgagacagctatctctgctcttaaggctgccaaattgagatggcctcccttgtttgatggtgtggnatcaaccatagaagattggattgttgaccagatgatacagtacggccagtggtggaaactggatatgaaactctttnacttgtnaggtgtngcttgagactagagtncccatccatcaggaagtcttccgtttcgaaggggctcaaattgaggaa

SEQ ID NO: 277519 - DNA, 286 bp, Glycine max
  unsure (1)..(286): unsure at all n locations
ctaagtttgagcttccctctcctctcctcttctccttccagccacaaccctcaganaccctcttggaacgaccctattttcacttcttcaggtgaagctggatcattcctccgcggaatcgatgtgaaccgtttaccttctgtggttgattgcgaagaggaagcaggtgtttcatctccaaacagcacggtttctagcgtcagtggaaagcgcagntngagggaaaccaatggagaagaaaacgacacagacagagcttgttccagaggcatcatcagcgacgaag

SEQ ID NO: 277520 - DNA, 285 bp, Glycine max
  unsure (1)..(285): unsure at all n locations
ganaaatctcaaagggaaanacgtcctcgcactcgcgtccaagttcaacgaactgaantccatanacggtgcgtattaacggcgaaagacgtcgccgttnagggcttttgcatganccgctgcgggacccacggctctacccgcaacgtcaaaaacgctgcccggacagcttatatttgggttggaaactccgaaactcagtgcnccgggcaatgcgcgtggccattccaccaacccatttacgggccccagacgccgccgttagtcgcgcctaacggcgacgtc

SEQ ID NO: 277521 - DNA, 301 bp, Glycine max
  unsure (1)..(301): unsure at all n locations
ggatcacatnctgganacaaacttgcctatgcaggagtttatggttcttcctgtgggagcttcctcgntcaagaagccangannntgggtgtagnagtgtatcncaatntgaagtctgtgattaagaagaaatatggtcaagatgcaataaatgntggtgacgaaggtggctttgcccctaacatccaggnaaacaaggaaggcttggaantgctgaaaactgccatcgccaaagctggttacacaggcaaagnngtcantggactggatgttgcagctnctganttctacaangaagacc

SEQ ID NO: 277522 - DNA, 303 bp, Glycine max
  unsure (1)..(303): unsure at all n locations
gcgccgagcgatgggcatctctcgggacaactggnacaagcgacgcnagaccgggggnaaganaaaaccctacacaanaagcggaagtatgagntgggacggccggccgncancactaagattngcnctngccgcatanatacantccgagtncgaggaggcnatnagaagtatcgtgctctgagattggatgtgnggaactttncctggggctcagagngtngtnctcgcaaaacaaggatcattgannntgtcnacnatgcatccaataacgagcttgtccgcaccaagaccctggtgnng

SEQ ID NO: 277523 - DNA, 303 bp, Glycine max
  unsure (1)..(303): unsure at all n locations
gttggaaggtagccttggctccacacgcttgaatgtggggagtggaagcagggtggcctcagtcacacgtgagggttcacagttagagcacagcaacaacaagtgaatggtggtgaggtacaaagtagccgtagggcantgctttcacttgttgctgctggtttgaccactggctcttttgttcaagctgtgcttgctgatgccaaacctatcaaagttggancacctcccccancttctggnggattacctggaacattgaactcagatgaaccaagagaccttaagctgccattggaaaga

SEQ ID NO: 277524 - DNA, 297 bp, Glycine max
  unsure (1)..(297): unsure at all n locations
ctcatcttcctctttttctcaaccaaaaggggttcaattctagctagttctattacatcgtccgcnccatgaacatggccgatcgtgcttctgttcatggttttcgcagtttcatcagctttagacatgtcaataatatcacatgacaacgctcatgcggatagggccacgaggcgcaccgacgacgaggtgatgtcaatgttcgaggagtggttggtgaaacacgacaaggtgtacaacgcgctcggtgagaaggagaagaggtttcaaatcttcaagaacaatctgcgctttatc

SEQ ID NO: 277525 - DNA, 295 bp, Glycine max
  unsure (1)..(295): unsure at all n locations
cacaatttctctctttctttttgtgtccaaaatggctcctagttctnctcacaatactgggttctagtgcttatgctagttgggatagtgattagcactatggttgctacctgtgctggtagcttctaccaagactttgatctaacatggggtggtgaccgtgctaagatattcaatggtggccagcttctatctctttcccttgacaaagtctctggctctggcttcaaatcaaagaaagaatacctatttgggaggattgatatgcagctcaagctcgttgctggcaactctg

SEQ ID NO: 277526 - DNA, 297 bp, Glycine max
  unsure (1)..(297): unsure at all n locations
gtcttgcccgcagaccaaggtgctganagtacnatttggcnaattgccaaggcatatgttgtngcnatgactcctgctatcatcaactcatgagccactggntaaatactcatgctgtgattgaaccatttgtcatagcnacaaacaggcatcttagtgtgctccaccctatttataaacttttgttgcctcactatcgtgacaccatgaacatcaatggactcgcaagacaatcactcatcaatgcaggtggcattattgagcaatcatttctgcctgagccatttggctgtggag

SEQ ID NO: 277527 - DNA, 292 bp, Glycine max
  unsure (1)..(292): unsure at all n locations
agcaacaataacaatggcagcctcactacaagctgcagctaccttcatgcaacccaccaaggtggcatggccactcgcaacctcaaatctacacaatgcatttctaaggcttttggcttggaacccgctgcagctaaactcatttgctcccttaagcccgatctcaaagantttnctcaaaaatgtgtcgacgccaccaaaattgcaggattcgcccttgncacctcagntctcgtngtttctggagcgagtncagaagtgttcccaagaggtanccttcgacgaaatccag

SEQ ID NO: 277528 - DNA, 289 bp, Glycine max
aaccatgttattgataggggctgggccttctactggggcactagcgagtggtcggctcagagatcaccgaggcgtgggctgtggctcagagattggaccttgttgggcctattgttgaacagcctgagtataacctcttgtccaggcacaaggttgagtcggagtttcttcctctgtacaccaactatggcacaggcctcactacatggagtcctcttgcctctggagtgctcactgggaaatataagaaaggagttataccaccagatagcagattcgctttggaaaa

SEQ ID NO: 277529 - DNA, 293 bp, Glycine max
  unsure (1)..(293): unsure at all n locations
tttgggttttgtagatggcaagtgggtttggggaatcaacagggagatcacccccaagccctcctacttcaacaacaataataacaatgatgctgccaattttgaatgcaacatttgctttgaattagcgcaagacccgataattactttgtgtggtcatcttttctgctggccctgtctttacaaatggcttcactttcactcacaatcacgagaatgcccggtnnngcaaggccctcgtggaggaggagaagctggttcccttgtatgggagaggaaagtcgtcgactgat

SEQ ID NO: 277530 - DNA, 223 bp, Glycine max
tgttatgtaagggtattaatcttcattatgtatggtctagtctaggtcttagtgtcttctaggtggctgcttactgcaatggagtttttggcaattgcagagccagtcttagttaattactagtattctgtgtataatctctctctaccttgggtcatagctggtttttttcttgcttgaccagggagaattagtccacttaatatgtttctcaagtgcatcg

SEQ ID NO: 277531 - DNA, 287 bp, Glycine max
  unsure (1)..(287): unsure at all n locations
gaaaaggccngtngngaggtctganaanagcatntncacgcccatncctcagantggnctccattccgcagcctcagtgcaagncccaggtcctacacatatggcgtgtggagaagctgaagncggtgcccatagcacganagaaccatggcatctttttttctggggatnctacctagtgnntcacaatngcacngaagaggcctcncatctgcacctgtggataggccagcagtcatcgcgcgatgaccatggggctgcgctgtgctagtgtgcacctcanaacc

SEQ ID NO: 277532 - DNA, 289 bp, Glycine max
  unsure (1)..(289): unsure at all n locations
cgttgctctgcttcaacattggcggaagcagaagaagcgccgcagctatggtgaagtactccagagaacccgacaatcccaccaagttcctgcaaggccanaggcgctgacctcagagttcattttaagaacactagggagactgcctttnccatcaggaagttgccccttgttaaagctaaacgatacttagaggatgttttggcccacaaacaggctattcctttccgncgcttttgtggtggtgttgggaggacggcccaggctaagaacagacactccaatgggc

SEQ ID NO: 277533 - DNA, 290 bp, Glycine max
  unsure (1)..(290): unsure at all n locations
gaaacttaagtatgcagctgacatttcttctggaatcattctcggaagggagcttgtganttcctccggctaatgtgctcacgccaggggtattggctgaagaggcatcaaagatngcttcaacatataatgatgtttttactgccaaaatattagatgctgagcagtgtaaagaattgaaaatggggtcctatcttggtgttgctgcagcctcagcaaatcctcctcattttatccatctgtgttataaaccaccaactggacctgtcaatgtcaagttagcattagtc

SEQ ID NO: 277534 - DNA, 292 bp, Glycine max
ctgtttcccgccatatatccaataagctttaaccatgtctgcctttgttggaaagtacgcagatgagcttatcaagaatgccaagtacataggccacaccagggaaggggatcctggcagcagatgagagcacgggcaccatcgggaagcgcctagcgagcattaacgttgagaacattgaggccaaccgccaagcccttcgcgagcttctcttcaccgctccaaatgccctccaatacctctctggtgtcatcctctttgaggaaactctttaccagaagacctctgatgg

SEQ ID NO: 277535 - DNA, 294 bp, Glycine max
  unsure (1)..(294): unsure at all n locations
ctattctcctcatcttcctctttttctcaaccanaaggggttcaattctagctagttctattacatgcgtaccgcnaccatgaacatggcgatcgtgcttctgttcatggttttcgcagtttcatcagctttagacatgtcaataatatcacatgacaacgctcatgcggatagggccacgaggcgcaccgacgacgaggtgatgtcaatgttcgaggagtggctggtgaaacacgacaaggtgtacaacgcgctcggtgagaaggagaagaggtttcaaatcttcaagaacaa

SEQ ID NO: 277536 - DNA, 272 bp, Glycine max
  unsure (1)..(272): unsure at all n locations
anttgaagttgaagtcttgccctactctcttcaactccaaacacaagacatcatcatccatggctgcctccgtctccactgtcggagctgtcaacagagctcttttgaacctgaatgggtctggacctggggtttcagctcccagttcatccttctttgggagcagcttgaagaaggttattggctcaagggtccccaacacaaagatttcctctggaagcttcaagattgttgctgtagaagagaagaaagagattgaagagacccagcag

SEQ ID NO: 277537 - DNA, 231 bp, Glycine max
aatggcaccgaagcagaccaaggctgagaagaagatcgcttacgatgcgaactgtgcgacctaatggaggagtacggccagatcctcgttgtgaactccgataacgtgggatcgaaccagctccagaacattcgcaagggtctccgtggcgactccgtcgtcctcatggggaagaacaccatgatgaagcgctcagtcaggatgcacgctgagaaaaccggaaacaacgct

SEQ ID NO: 277538 - DNA, 287 bp, Glycine max
  unsure (1)..(287): unsure at all n locations
anagagagagaatggtcagcacttggtggcaatcgtgatgtggcaggaagccagaacagccttgagatcgatggtttagctcgctttgctgttgaagaacacaacaaaaaacagaatgcccttttggagtttgaaaaggtagtaagtgcaaaacagcaagtggtttctggtaccttgtacaccatcactttggaggcaaaagatggtgggcaaaagaaggtttatgaagccaaagtttgggagaaggcatggttgaacttcaaggaggtgcaagagttcaagcttgt

SEQ ID NO: 277539 - DNA, 286 bp, Glycine max
  unsure (1)..(286): unsure at all n locations
ccaaaaccctaggtagagagctcttcctcaactctcattcgcantggccgcagcagcacgtcctctcntcaccgtgcaggccctgcgacagtgacatggccaccgacgcctccgccaccgtccctatccctgacgtcatgaagtcctccatccgcccggacatcgtcaacttcgtacactccaanatctccaagaacagccgacaaccctatgcagtcagccgccgcgctggccaccagacttccgccgagtcctggggaaccggtcgtgccgtctcccgtatccc

SEQ ID NO: 277540 - DNA, 286 bp, Glycine max
  unsure (1)..(286): unsure at all n locations
caacatgccaaacgacagcgttctgagtcttttcttcttcgttaccctcttcacatgccttctnctctgctaattcccacgatgaccatattttcctaccgagtcaactccatgacgatgactcagtgagttgcactgctaccgacccaaaccttaactacaagccggtgatcggaatcctgacctaccccggcgacggtgcctctggccggctcagcaacgccaccggggtttcttacatcgccgcctcctacgttaaattcgtggagtccggtggtgctagagt

SEQ ID NO: 277541 - DNA, 284 bp, Glycine max
caacatcaaggttcctctcattcttggtatctggggaggcaagggacaaggaaaatctttccaatgtgagcttgtctttgccaagatgggaatcaaccccatcatgatgagtgctggagagttggaaagtggaaatgcaggagagccagcaaaactgatcaggcagagataccgtgaagctgcagacatgatcaagaagggaaagatgtgcgctctcttcatcaacgatcttgatgcaggagctggtcgtcttggtggaaccacacaatacactgtgaacaacc

SEQ ID NO: 277542 - DNA, 282 bp, Glycine max
  unsure (1)..(282): unsure at all n locations
cattttccatgcaaacaccaaacncatatcagtaccctataggaaagnaacggatgcaaccattgngganttcttgttttngccnntgttatggcgacacttggactgcagataatcttggagtctacccgcacattaatatcttctgaaantgcantcaacttgaccanggaacaagagcgctgggttgtgggcattatgctttcagtgactttggtgaaattcctgctgatgatttactgtcgttcttttaccaatgagataattaaagcctatgcccag

SEQ ID NO: 277543 - DNA, 280 bp, Glycine max
  unsure (1)..(280): unsure at all n locations
catatttctaaccacactcaaaaggcttcccttcctgacttggatttcattanattgctacactatattatttntattggtgaattgctanactatattctaaggacaattaaacatagactatatggggttgatggatgtggaccaaactcaattgttgtctaagatggtcatcggagatgnacatggtgaagcatcaccatactttgatggatggaaggctnatgatgaaaacccctttcatcccaaaganaatcctaacggggttatcnaaatgggt

SEQ ID NO: 277544 - DNA, 281 bp, Glycine max
  unsure (1)..(281): unsure at all n locations
ggcggctgacggcaacgttagggagtccggagacgtcggcgggggccccggaaagantnatnttttctggttaacagcctncccaccctggaaacggctcagccggaggtagggtccagcggctggaagagcaccgcacgtcgcgtggtgtccggtgcgcccccggcgggcccttgaaaatccggaggaccgagtgcctcccangcccggtcgtactcataaccgcatcaggtctccaaggtnaacagcctctggtcgatggaacaatgtaggcaagggaa

SEQ ID NO: 277545 - DNA, 283 bp, Glycine max
ctttcacttaagattgttagtaagattgaagctggggaaaggttcagtgtgtatgttgtggttccaatgtggccagagggtgtcccagaaagtgcatcagttcaggcaatattggattggcagaggagaacaatggatatgatgtacaaggatgttgttcaggcgctccgggccaagggaatagtggaaaatcctcgtaactatttgacattcttctgccttggtaatagggaggtgaagaaacaaggagagtacgagcctccagaaagaccagatcctgata

SEQ ID NO: 277546 - DNA, 290 bp, Glycine max
gttgctgagcattgactcagacaaaacagacgagtcagagttgcaaaaggggattgagaatgcctcaaagcttttatcagagttcaatacaagcgttgtggagtacacgagttatgcagacacaacaacgattccgggtcactacgtgatttattgggaattgttgaccaaggactcgacgaactcacccagtcacgaggtgttgaatcggtgttgtttggagatggaggagtgcttgaactcggtgtatagacaatgtcgtgttgctgatcattccattggcccattgg

SEQ ID NO: 277547 - DNA, 267 bp, Glycine max
cgcttcttcttttgctcgaatcatggagggtggttatgctcgtcgactccttgcaggtcggtataagatcaataaacaaagaagggcgtgaacaagccaaaaagttcggggtagagcagtttgaaatgcgacatttttcgaaagatcgtccatttttggaaaacctgaatctaggagaaggtgctaaaggagtatacatttcaatcgatgtggattgtcttgatccagggtatgctgtaggagtgtcccactatgaatcaggaggtc

SEQ ID NO: 277548 - DNA, 281 bp, Glycine max
  unsure (1)..(281): unsure at all n locations
cagcagaaagaaattgagcagacaagagacttgataagtagattaggtgctggagcaaattctggccgtngcttcttctgccgagaagaagctggagagacttcaggaagaggaactagtggagaaaccttttgaacggaaacaaatgaaaatcaggttccctgagcgtggaaggagtggaagatctgttgtagcaattaataacttggaatttggctttgaggataagacacttttcaaaaaggcaaatcttacaattgaaaggggagaaaaaattgcca

SEQ ID NO: 277549 - DNA, 282 bp, Glycine max
  unsure (1)..(282): unsure at all n locations
cacactgagaggaagagggagtgagagagagtgttctntcgtttgctaccttctcccagaaatggttacgttcaggtttcaccagtaccaggtggtcgggagggctctcccaacggaagcagatcagcatccgaagatctaccgaatgaagctctgggccaccaacgaggttcgcgccaagtctaagttctggtattttttgaggaagctgaagaaggtgaagaagagcaatggtcaagttcttgctatcaacgagatttttgagaagaacccaaccaagat

SEQ ID NO: 277550 - DNA, 275 bp, Glycine max
  unsure (1)..(275): unsure at all n locations
caacaacactctctcttctcgctcttggcttttcgctcttcactcacttctcattncatttcatttccaccgttcatggatccngtaagcgtgtggggtaacacgcccttggcgacggtggatcccgagatccatgacctcatcgagaaggagaagcgccgtcaatgccgcggaatcgagctcatcgcctccgagaacttcacctccttcgccgtcatcgaggccctcggcagcgctctcacgaacaaatactccganggcatgncgggcaaccg

SEQ ID NO: 277551 - DNA, 271 bp, Glycine max
  unsure (1)..(271): unsure at all n locations
aggggttgcatgcnagttgttgagtggtttgtagcagaggggttgccgagacatggaactatggccttgcccttacagcagccacttctagctgccaagttcacattgnagcttatcttctgccacacgtacctcagcaggtccttgcagctcttagtgttgaaattcttaaggctgctggtgagcgcaggatggatctcttgatggtgtagcatttcttctccaatctganttcttangtgatcctgcagctacttatgctgttgcagat

SEQ ID NO: 277552 - DNA, 271 bp, Glycine max
  unsure (1)..(271): unsure at all n locations
gatgattggagcttggagagacaggatcataatgtgcacagggacatatgggcctactcctgcccttatcaaggcctttctggactccggtgccaaagctattgtttgtncttcaagtgaacctccagagtctcagtcgatcactgttgatggtcacatagagtggaatgtgatggaaaatgggaagtttgaaattggagaagatgaagcagatgatgagaacgtaccggctagtccggtaagcgactgggaagatagtgacgctgagaga

SEQ ID NO: 277553 - DNA, 276 bp, Glycine max
  unsure (1)..(276): unsure at all n locations
cnacanagtcaactatgccaaagcatagttgtttgttgatacattngcatagttgactttgttgaatcgnaccacaacagggtagcgagtgttggggtcangatcaacagcaaccactganccggngcctttgtaccagtaagattccttcctaagaatcttcggccttcataaaaccaagcgcacgcttccgccactcactctcacccctcctatcccccactttcaagccatattcttcttcagcttcggccttagttcccgaacttgatattc

SEQ ID NO: 277554 - DNA, 266 bp, Glycine max
agagaaggtgtagacaaacacaatctctaatggcactcaggatgtgggcttcttccactgccaatgcactcaaagtctcttctacctccagacctcatctcttgcatcctttttctttctccagatgcttgtcttccgtcttggatggacttaagtatgcagattcacacgaatgggtcaagcacgaaggctcagtcgccaccattggtatcactgaccatgcccaggaccatcttggagaggttgtgtatgtggagctgccagaa

SEQ ID NO: 277555 - DNA, 277 bp, Glycine max
gaaacgtcacttcaggtttgaaaaaggttacgaatgatatgaagactaagaatcgcaccgatagaactggagttgttggggctattgaaaaagaaactcctgcaagttcacgtgtgttttctaaagctggacctccaaaatttgaacttcaaatgggccgcaaatgggttgttgagaatcaaattgagaagaaagacttggtcattgaagattgtgattcaaagcagtctgtatatatttatggatgcaaaaactctgttttgcaaattctaggcaa

SEQ ID NO: 277556 - DNA, 280 bp, Glycine max
tacaaaggttgctgtaggagataagattgcagtagtgctaagtgctaacacctgcagtgaacaatggcctctgcatcagcatctctgctcaagtcttcacttgttcttgacaagtctgagtgggtgaagggacaaacccttcgccaaccttctgcatcagttgtgagatgcaaccccaccaccccatcaggcctcaccatcagagctggttcctatgctgatgagctcgttaagaccgcgaaaacagtggcttcaccagggaggggtattttggccatgg

SEQ ID NO: 277557 - DNA, 272 bp, Glycine max
  unsure (1)..(272): unsure at all n locations
gntngttgatcgagataactagaaacagtgtgatgaaaatgaaggtccttgtnntctttcgttgctacaatnttggtagcatggcaatgccatgcgtacgatatgttccctctccgaatgaacactggctatggtgcccgtactccggaggtgaaatgcgcaagttggaggcttgctgtggaagcacacaacatctttggctttgagaccattcctgaagagtgcgttgaagcaacaaaggaatacatccatggcgaacaatatagatcaga

SEQ ID NO: 277558 - DNA, 275 bp, Glycine max
  unsure (1)..(275): unsure at all n locations
aattgttgtaactttttgattcctaaattctctaaaattcgnaattctaatntcgttaggggnaagagattgtttgtgtgtgagtgagtatggctggaaaaggcgagggtcctgctatcggaatcgatttgggaacgacgtactcttgcgtcggcgtgtggcaacacgatcgtgttgaaatcatagccaacgatcagggtaacagaactaccccatcctacgtggctttcaccgacacagaacggttgatcggcgatgcggcgaagaaccaggtt

SEQ ID NO: 277559 - DNA, 296 bp, Glycine max
  unsure (1)..(296): unsure at all n locations
cgagnaaggaaggaaagaaacaaggtgacatcancatggcttgctcgttttctcgcgggtctctgcntcctctncnccatcatcgtttccntaggatgtctatntgcganttccattgcaaaggnggaagccaccaagttggggacggtcattgggattgatcttggaacgacctattcatgtgttngtgtttacaagaacggccatgttgaaatcatagccaatgaccaaggtaacgtatcaccccttcttgggttgctttcaccgacagtgagagactcttggggagctgccaa

SEQ ID NO: 277560 - DNA, 298 bp, Glycine max
  unsure (1)..(298): unsure at all n locations
ttctcacnctcctcttcanacattntctgtgcgcncnaanaaacantcncgttcacnctttcaganngtgtgaagatgggggcgggtggccgaactgatgttccgnctgccaacangaagtcagaggttgacccnttgaagcgggtgccantngaaaaacctccatntagtctcagccaaatcaagaaggtcannccacctcactgntnccagcgttctgttttccgctcatnctccnatgtngtttacgacctcaccatagccntctgcctctatnatgttgccacnattacnncca

SEQ ID NO: 277561 - DNA, 294 bp, Glycine max
  unsure (1)..(294): unsure at all n locations
agggccttccatggcttccgcntgtgcttcctctgcaattacagctgttgccatctctacgccgagttccgggcagaagaatggatcaggaggttgttttcttagtggaaggaaattgagggtgaaaaaggagagagcagcaattggaggacgatcgatgggcactacagtgtgcgcagttgctgagcctgacagacctcnatggttcccaggcagcaccccncctccatggcttgatggcactctacctggagacttcggctttgaccctcttggtcntggatctgacccgga

SEQ ID NO: 277562 - DNA, 292 bp, Glycine max
  unsure (1)..(292): unsure at all n locations
cgcgaagtggaggaagcagtcgataaagaagctggagtcgtcgctgaagctctacgaggcgngcagcgcccccgcactggccattaaggcgagcgtggagaagacgaagaggaggttcgacaactacgcgaacaggggttgctgtgcggcggcgatgggttgccgcacctgatcgtgagcggagaccagaggcactggggtgagttcatcacacccggaatactattcctgtacatctcgggatggatcggctgggtgggtcggagctacctgattgcgatcagggacgaga

SEQ ID NO: 277563 - DNA, 290 bp, Glycine max
  unsure (1)..(290): unsure at all n locations
cgcccccggcggcccttgaaaatccggaggaccgagtgcctcccacgcccggtcgtactcataaccgcatcaggtctccaaggtgaacagcctctggtcgatggaacaatgtaggcaagggaagtcggcaaaatggatccgtaacctcgggaaaaggattggctctgagggctgngcacgggggtcccagtcccgaacccgtcggctgtcggtggactgctcgagctgcttccgcggcgagaggggtcgtcgcgtgccggtcnggggacggattgggaagggnccttcgg

SEQ ID NO: 277564 - DNA, 296 bp, Glycine max
  unsure (1)..(296): unsure at all n locations
gagcacttggcaagctgaggagagangctgagcgtgcaaagagagcnctcagcagccagcaccaggtccgtgtggaaattgaatcactntttgatggtgtngatttttcnganccactcacccgagctcggtttgaggagttgaacaatgacttgntccggaagaccangggtccagtgaagaaggctatggaagatgctngattncagaagagtcagantgatgagattgntcttgttggtggaagcacaaggattccaaaggnacaacaacntttgaaggactactttgatgga

SEQ ID NO: 277565 - DNA, 294 bp, Glycine max
  unsure (1)..(294): unsure at all n locations
cttccttttctcttctctgtctaaggggtgccctgagatcacatngaacaatggtgaaggctgtggccgttcttggcagcagtgagggtgtcactggaactattcacttcgttcaggagggaagtggtccaaccaccgtaactggatctcttgctggtcttaagcctggtctccatggtttccatgtccatgccttgggggacactaccaatggttgcctctcaactggatcacatttcaatcctaataacaaggagcatggtgcccctgaggatgagaatcgtcatgctggtg

SEQ ID NO: 277566 - DNA, 292 bp, Glycine max
gagagagagatggagaagccaggaggaggaggagtgttatcggcgaaggaggcattcgagaagcttgaaaaggtgggagaagggacatatgggaaggtgtacagagcaagagagaaggccacggggaagatcgtggctctgaagaagactcgtctccacgaggacgaagaaggtgtccctcccaccactctccgtgaggtttccattctgcgaatgctactctcgcgatccccatgtcgttaggttaatggatgtcaaacaaggtcagaacaaggaagggaagacatgctct

SEQ ID NO: 277567 - DNA, 291 bp, Glycine max
  unsure (1)..(291): unsure at all n locations
ctgccgtggtgctttcaccactgcttaccactaaccttcctctcactctctgccgctgcaagcttggctttatttccccaatggccgcttgtggctatananctgcngccaacttcaattatctcgttggcgccagaaacatanccaaattcgcttcttcagacgccacaattncgttttcatntggcgggagcgactcaatgggtcttactttgcgacccgctccgatncgtgctcctaagaggaaccatttctctcccttgcgtgtcgtttgcgtcgattatccacgcc

SEQ ID NO: 277568 - DNA, 291 bp, Glycine max
  unsure (1)..(291): unsure at all n locations
atttcatcctctggggtgttacaactcaccaaagttggcagcaacggcgtgcccacctncgggatctctcggtcgtgccctttacgctgccccaatccagatttgggacagcgaaaccggcaaggtagccagctgggctacatcctttaaattcaacattttcgcacccaacaaatcaaactcagctgacgggcttgccttcttcttggcacccgtcgggtctcagccccaatccgacgatggatnncttggtcttttcaacagtcccttaaaggacaagtctctccaaac

SEQ ID NO: 277569 - DNA, 290 bp, Glycine max
  unsure (1)..(290): unsure at all n locations
cttcttctcttgcggctagggtnttagcgcacttgcttctagatnnaaggaagatgggtaaggaaaaggttcacatcagtattgtggtcattggccatgtcgactctgggaaanccactaccactggtcacctgatttacaagcntggaggcattgacaagcgtgttattgagaggtttgagaaggaagctgctgagatgaacaagaggtctttcaagtatgcctgggtgctggacaaacttaaggctgagcgtgaaagaggaatcaccattgatattgcnttgtggaag

SEQ ID NO: 277570 - DNA, 298 bp, Glycine max
cacagttcgtcggaatgggaagggtgattcgcgctcagcgtaagggtgctgggtcggtgttcaagtctcacactcaccaccgcaagggtccggcgaggttccgcagcctcgacttcggcgagcgcaacggctacctcaagggcgtcgtcaccgacatcatccacgaccccggtcgcggcgcccctctcgccaaggtggcattccgccaccccttccgctacaagaagcaaacggagctcttcgtcgccgccgagggcctctacaccgggcagttcgtctactgcggcaagaaggccac

SEQ ID NO: 277571 - DNA, 293 bp, Glycine max
  unsure (1)..(293): unsure at all n locations
agaagcaaaactgaaggttgccataaacggatttggaaggattggaaggaacttcttgaggtgctggcacggtccgcaaagactcccctctngatgtcattgccatcaacgacaccggtggcgtgaaacaagcctcncaccntctcaagnacgattcgatcctcggaaccttcgatgctgatgtcaagcctgttggcagcgacatcatctctgtcgatggaaaggaaatcaaagttgtctctgaccgcnaccctgccaaccttccttggaaggatttggggatagacttggtg

SEQ ID NO: 277572 - DNA, 291 bp, Glycine max
  unsure (1)..(291): unsure at all n locations
gtaaagtcaggcacaggcatttggtggctcttttagggtattgcattaacggcaacgaaagacttttggtgtactagtatatgcctcaagggacattaacgcaacacctgtntgattggggtgaaaatggttgtgctcctttgactnggaaacaaagggtagcaatagcnttggatgtagctcggggagtggaatacttgcacagcttggctcagcaaagcttcattcacagggacttaaagccctcgaacatattgctgggtgatgacatgagagccaaggttgcagatt

SEQ ID NO: 277573 - DNA, 288 bp, Glycine max
aaaggattctacccgccgctcgatgggaattgcgcttcaaggcgtctcgtagggctaatccgcctcacgagggtcaccaacggcacgtgcctttggggggccgaggccccctactgctggtcggcaaacggacggcgggcgcacgcgtcgcttctagcccggattctgacttagaggcgttcagtcataatccaacgcacggtagcttcgcgccactggcttttacaaccaagcgcgatgaccaattgtgcgaatcaacggttcctctcgtactaggttgaattacta

SEQ ID NO: 277574 - DNA, 290 bp, Glycine max
  unsure (1)..(290): unsure at all n locations
cgtcaatcagttgagcaggctcgctttaaaggaataactgttaaagcaatggtgatcataaatcctggaaaccctactggtcaatgccttagtgaagctaatctaagagaggttttgcaattctgtnatcaagaaaatttagccttgcttggagatgaggtttaccagacaaatatatatcaggatgaacgacccttcattagttctagaaaggttttgatggacttggggccacctataagcaaggaagtccagcttatttcttttcactccgtgtcaaaaggttatta

SEQ ID NO: 277575 - DNA, 283 bp, Glycine max
  unsure (1)..(283): unsure at all n locations
ggagtttcaagggttaccggaaggttgcattgctagtatactctctcgcactacgccggcggacgtgtgtaggttttccgtcgtatcaaagattttccgttcggccgctgaatcggacgctgtgtggaaacgttttctcccttccgattaccattccatcatntcccagtctccttcgcctctcaactatccttccaagaaggagctctatctcgctctctcggatcgccctatcatcatcgatcagggtaaaaagagctttcaattggagaaaaagagtggg

SEQ ID NO: 277576 - DNA, 284 bp, Glycine max
  unsure (1)..(284): unsure at all n locations
gtctggttactcaaaggaggatctacctgtcattgctgttggtgttgggctcagtacatatgataaagcatctgacaaatactanatacaatcacacatccaactgaatgaatatagggatcgagtgatcttgccaacagctacaaggaaacatggacgatacattggcacctgtgttaaagtgttggatatgtctggtttaaaattttctgcattgaatcaattgaggttgttgactgctatatctacaatagatgactgaactatccggaaaagacagacac

SEQ ID NO: 277577 - DNA, 281 bp, Glycine max
  unsure (1)..(281): unsure at all n locations
ttcttggattgcggaattcaattttaactgcctcccgagggactgctattctcaacactgtttttgatagctatgggccttgggctggtgaaattagtactcgggatcaaggctcattggttgcttttgaggatggaacaagtacttcttatgcaatctctagttcacaggagaggggacagatgtttattggtcctggagtggatgtttataaaggtcaaattgttggcatccatcagcgacctggggacttgtccttgaatgtntgcaagaagaaagct

SEQ ID NO: 277578 - DNA, 282 bp, Glycine max
  unsure (1)..(282): unsure at all n locations
ctgcnaaggattctacccgccgctcgatgggaattgcgcttcaaggcgtctcgtagggctaatccgcctcacgagggtcaccaacggcacgtgcctntggggggccgaggccccctactgctggtcggcaaacggacggcgggcgcacgcntcgcttctagcccggattctgacttagaggcgttcagtcataatccaacgcacggtagcttcgcgccactggcntntcaaccaagngcgatgaccaattgtgcgaatcaaggttcctctcgtactaggttg

SEQ ID NO: 277579 - DNA, 279 bp, Glycine max
  unsure (1)..(279): unsure at all n locations
ctagtttatcgtgaggagaatatgaagttgtttgtnttctttgttnctgcagtagttttggtagcatggccatgccatggcgcaggctaccaaaggttccctctccgaatgaaaactggctatggtgagcgttcttcggaggtaaaatgcgcaagttttaggcttgctgtggaagcacacaacatccgagcnttaaaaccattcctgaagagtgcgttgaaccaacaaaggactacattaatggcgaacaatttagatcagactctaaaacagttaacc

SEQ ID NO: 277580 - DNA, 285 bp, Glycine max
gaaccataaccatgtcagacgaggagcaccacttcgagtcaaaggctgatgctggagcatcaaagacatttccccagcaagctggaaccatccgcaaaaacggttacattgtcatcaagaacaggccatgcaaggttgtggaggtttcaacttccaaaactggcaagcatggacacgcaaagtgtcactttgttgcaattgacatcttcactgggaaaaagcttgaggatattgtcccatcttcccataactgtgatgttccccatgttaatcgcattgactacc

SEQ ID NO: 277581 - DNA, 293 bp, Glycine max
  unsure (1)..(293): unsure at all n locations
aatggacttgctaggagggcaattgtgcagtttcctatgccattggtgtgcctgagcccttgtctgtgtttgttgacacttatggcactgggaagatccctgacaaggaaatcctcagcattgtgaaggagagttttgacttcaggcctggcatgatctccatnaaccttgatctcaagaggggtggaaatggcaggttcttgaagactgctgcatatggacactttggcagagatgaccctgacttcacatgggaagtggtgaagccatcaagggggagaagacctgcttaa

SEQ ID NO: 277582 - DNA, 287 bp, Glycine max
  unsure (1)..(287): unsure at all n locations
ctaacaaccacttatccctttctccttctaacgagtgaggaaaaatggcgcgtaagaagatcagagagtatgactcaaagaggttgttgaaggagcactttaagagactctctggcaaggagttgccgatcaagtctgcacaaattaccgcatcnactgatttcactgagctacaagagaaggaaccctggctttcatcttctaaattggttgttaaacctgacatgttatttggaaagcgtggcaaaagtggtttggttgccttgaatttggatttgcacaagttg

SEQ ID NO: 277583 - DNA, 287 bp, Glycine max
  unsure (1)..(287): unsure at all n locations
gcgaganatggcgatggcaatggcgcttcgcnggctttcatcttcaattgataagcctctncgccctctgcttcaatgcgggttccctctactacaagtcgtctttgcctgatgaagcngtttacgacaaggagcgacccggagttacatggccgaagcagttgaatgcttcacttgaggtcgttgatcctgagattgctgatattattgagcttgagaaagctaggcaatggaaggggctggaactgataccgtcagagaatttcacttctgtgtcgtgatgcaac

SEQ ID NO: 277584 - DNA, 302 bp, Glycine max
gcagaatcagatatttgaaggttagaacgaaaaagaatcatcgatggcagagacgaaagaaggttcaggttcggagatgtctctgaaggatcagggcaacgagtttttcaagtcaggaaagtatctcaaagctgctgcactctacactcaagccatcaagctagacccttctaaccctaccctctatagtaatcgtgctgcagcactactgcaattggataagcttaataaagctctagatgatgcagagatgacaatcaaattaaaaccccaatgggaaaagggatatttaggaagggaag

SEQ ID NO: 277585 - DNA, 278 bp, Glycine max
  unsure (1)..(278): unsure at all n locations
ggaacagtttgattggaggagangactttaagagtggtcagaccaaaatganatctgngttggtggatttccttgtgggggccggcatcnagccaacatctatngtgagttacaaccatctgggcaacaatgatggcatgaatctctcagcccctcaaaccttccgctctaaggaaatctccaagagcaatgttgttgacgatatggtcaacagcaacgccatcctctatgagcccggtgaacatccagaccatgtggttgtcattagtacgtgcctt

SEQ ID NO: 277586 - DNA, 298 bp, Glycine max
  unsure (1)..(298): unsure at all n locations
gcagtttctatagtgagggatcaactgcgaaaacacggaaacattcagcaagcatgtgaagcacttgcagaagccgctttggatcgacgtacacaggataatgtcagcattataattgctgatttagggaggacagactggaagaatgcgcctctggagcgacaaaatactatacttgagctggtccaagctcttgcaaccattggaattgtgtccattggaatctggttttcatcacagctttctttatagattaanaaaataccagtcatgtacataaaacagattatcattctga

SEQ ID NO: 277587 - DNA, 296 bp, Glycine max
  unsure (1)..(296): unsure at all n locations
ggaacgttccagaccacatacagaggtttctctagtgatcttcgttcttctgtggagatcttgttttttcatctcacttttcttctaattaaggaacaagctttccgcagttgaaaaccctagctagctagcttccaccaatttgaatcaccaatggctcgctctttctctaacgtcaaggttctctctgctcttgtggccgacggattctccaacactctcaccaggcgtgggtacgcagcagcgacacaaagcgcgacaagaggaggagtgcctccatcanagcagatagtccc

SEQ ID NO: 277588 - DNA, 292 bp, Glycine max
cccagggttaatgacatggtcatcatccctcatgtcctcggtccaatggccagggttaatgacatggtcatacacaattgagagatgatgcccttgaacccgctgatctcaatgacaggaacatgattgtggtggatgttggtggcggcacgggtttcaccactcttggtattgtcaagcacgtggatgccaagaatgtcaccattcttgaccagtcaccccaccagctcgccaaggccaagcagaaggagccactcaaggaatgcaaaataatcgaaggggtgccgaggat

SEQ ID NO: 277589 - DNA, 287 bp, Glycine max
  unsure (1)..(287): unsure at all n locations
gaaagatgagtccaacatgngtttttgtgttaggtgttgcagcaatgttggtggttgtgagtggacaatcatcagtgaagcctttggtgaagacagtgaaggggaagaaggtgtgtgacaaagggtgggagtgcaaaggttggtctgcatattgctgcaatgagactatctccgactacttccagacataccagtttgagaacctcttcgcgaanccaattcgccggtggcacatgctgttggtttctgggactaccgttctttcatcaccgctgctcatgtaccag

SEQ ID NO: 277590 - DNA, 296 bp, Glycine max
tgttgatcgagataactagaaacagtgtgatgaaaatgaaggtccttgttttcttcgttgctacaattttggtagcatggcaatgccatgcgtacgatatgttccctctccgaatgaacactggctatggtgcccgtactccggaggtgaaatgcgcaagttggaggcttgctgtggaagcacacaacatctttggctttgagaccattcctgaagagtgcgttgaagcaacaaaggaatacatccatggcgaacaatatagatcagactccaaaacagttaaccacaagcttact

SEQ ID NO: 277591 - DNA, 295 bp, Glycine max
gtggcatcatctagatgcagaccctgattttggttcttgccaagccaaagaattgttggatcacttggaaagtgtgcttgctaatgaaccagcagctgttacgagaggccagcatattgttgaagttaagccacagggaataagcaagggtttggtagctgaacaggttcttatgaccatggttaatggtgccaatccaccagattttgtgctgtgcattggagatgataggtccgacgaggacatgtttgagagcattttgaggacggttacgtgcccgtcataccatcagctc

SEQ ID NO: 277592 - DNA, 294 bp, Glycine max
ctagtttcttacaaggctctactctatgcttcaccttctgctctagaaaattcagtggtgatacatggcttcggctactctctctgtagccaaaccagcccttcaggcaaatgggaaaggcttctctgaattctctggcctccgcagctcatcaggcttccttcccttttctagaaaatcttcagaggatttccattctgtcattgccttccagacctatgcagttggaagcagtggaggatacaagaagggtgtgacagaagcaaaactgaaggttgccataacggatttgga

SEQ ID NO: 277593 - DNA, 299 bp, Glycine max
  unsure (1)..(299): unsure at all n locations
gcaattgaagttaaaagccttagccttccctacaactccaaacanncaagacatcatcatccatggctgcctccgtctccactgtncggagctgtcaacagagctcttttgaacctgaatggttctggagctggagcttcagctcccagttcagccttctttgggaccagcttgaagaaggttattgcctcaagggtccccaacagcaaggtttccggtggaagcttcaagattgttgctgtagaagagaagaaagagattgaagagacccagcagaccgacaaggacgatggaagggt

SEQ ID NO: 277594 - DNA, 290 bp, Glycine max
  unsure (1)..(290): unsure at all n locations
gcaaganactgtagaggatgtccctgtggtaatacagtggctatggttggtcttgaccagttcatcacaaagaatgcaacattgacaaatgaganggaagtcgatgcccaccctatccgagctatgaagttttctgtctcacctgttgttcgtgttgctgttcantgtaaggttgcntcagatcttcccaagcttgttgaaggtcttaagcggttggctaagtcagatcctatggttgtttgtaccattgaggagtctggtgaacacattgttgctggtcaggagagctt

SEQ ID NO: 277595 - DNA, 299 bp, Glycine max
gaaaatgaaggtccttgttttcttcgttgctacaattttggtagcatggcaatgccatgcgtaacgatatgttccctctccgaatgaacactggctatggtgcccgtactccggaggtgaaatgcgcaagttggaggcttgctgtggaagcacacaacatctttggctttgagaccattcctgaagagtgcgttgaagcaacaaaggaatacatccatggcgaacaatatagatcagactccaaaacagttaaccaacaagcttacttttatgccagagacctcgaagccatcccaagg

SEQ ID NO: 277596 - DNA, 297 bp, Glycine max
  unsure (1)..(297): unsure at all n locations
gtgtagtggaagantcactcccttatccatttccacnccacancatcagngnanaaccaacgctctctcttcagcctccattctacgctctcccaacngccagtctctgacccgaagagcgaaccataatggaagagtaaattaccggaaaccgaataaccgtttctccgtgaaagcctccgccaaagagattgcctttgaccagcattcccgctctgctatgcaggccggcattgacaagctcgccgacgctgttgggctcactcttgggcccagagggaggaatgtgtgctggat

SEQ ID NO: 277597 - DNA, 289 bp, Glycine max
  unsure (1)..(289): unsure at all n locations
gcgaaccataatggaagagtanattaccggaaaccgaataaccgtttctccgtgaaagcctccgccaaagagattgcctttgaccagcattcccgctctgctatgcaggccggcattgacaagctcgccgacgctgtngggctcactcttgggcccanagggaggaatgttgtgttggatgagtttggaagtcctaaagtggtcaacgatggtgtcaccattgctcgcgcaatcgagcttcccgatcctatggagantgctggtgcagctcttatcaggangttgctag

SEQ ID NO: 277598 - DNA, 280 bp, Glycine max
  unsure (1)..(280): unsure at all n locations
aatccctattttnttcctcagtagtgtcatttacgcttctcttctctgcancaactatgcctaaccctaaggtcttcttcgacatgaccatcggcggtcaatctgctggccgcatcgtgatggagctctacgccgacgtcactccccgcaccgccgatannttctgcgngcnttgcannggcgacaatngcgtagngcggancgnnantcccctccactanaagggctcgtncttcnaccgcgtgatcccgagtttcatgtgtcagggtgcgacttcacc

SEQ ID NO: 277599 - DNA, 199 bp, Glycine max
gtgcgtttcgctcgtgccggatcagacgcccaacatggatgaggtggtgcacatgatccaggatattagccgaagcgagaccaccgatgacggcttacgccaatcgtccgatgatccttctaaaggatcggacggtcacacacccccgcaggacgctaggactacccctaggtcggacacgtcgtagtagtgaagctgt

SEQ ID NO: 277600 - DNA, 294 bp, Glycine max
caagaatactctaatgaggttgaagttcgtgctagtgtggagccctcagaagatgaacttgctgatctgtcaagagcttgtgcacaaactctgggatctagatttaaatcttttggtaccttgcaaagactatgaaattgactgtggtgaagggaaaaaggaataccaaaaggaagatatggcacaggggagcttgtttacttgggttagtgatgatgtattcaaaaagcctacatttgctcgttttctttcacttttggataactacaatccacatcaaggagtaaggaagta

SEQ ID NO: 277601 - DNA, 280 bp, Glycine max
  unsure (1)..(280): unsure at all n locations
gaaagatggaattgactatgcggccgtcacagtccagctaccgggaggcgaacgtgttccgttcctcttcaccatcaagcagttggtggcatcagggaagccagacagctttagtggagagtttctggtcccatcataccgtggaagctctttcttggaccccaagggaagaggtgcctctacaggttatgacaatgcagttgctttgcctgctggtggaagaggagatgaggaggaattgccaaggaaaacaacaagagtgcctcatcancaaggggaa

SEQ ID NO: 277602 - DNA, 286 bp, Glycine max
ccaccgtcgccagcatcatgcgcacacctgagccttttgtgatggtttcactggaaggatcaacaaccacatgttttggtgggactgaggagccagctgcctatggtgaactggtgtccatgggtgctcttaacccagaattgaacaaaaaactgagtgctggaattgcctgcgttcttgaaaccaagttgttggtgccaaagtcacggttcttcttaaaattctataacacagagggctataattgtgcattgaacgggtctatcatggtagtcggtccaaatga

SEQ ID NO: 277603 - DNA, 294 bp, Glycine max
  unsure (1)..(294): unsure at all n locations
ctcataacacaaagcacaaagcaagctcatccttgagttaaaanatggcagcagcttcttccatggctctctcatccccatccttggctggcaaggccgtgaagctgggcccatcagccccagaagtgggaagggtgagcatgaggaagaccgtcaccaagcaggtctcctcaggaagcccatggtacggcccagaccgagtcaagtacttgggcccattctctggcgagcccccgtcctacctaaccggtgagttcccaggcgactacggctgggacactgctggctttccgc

SEQ ID NO: 277604 - DNA, 280 bp, Glycine max
  unsure (1)..(280): unsure at all n locations
gatgtgtacaagattggaggtattggnactgtgccagtgggacgtgttgagaccggtgtcttgaagcctggaatggtggtgacttttgcaccaactggactgacaactgaagtcaagtctgtggagatgcaccatgaatctcttacagaggcacatcctggtgacaatgtgggattcaatgttaagaatgttgctgttaaggatttgaagcgtggttatgttgcctcaaactcaaaggatgaccctgcaaaggaggctgctaattcacanccaagtcatc

SEQ ID NO: 277605 - DNA, 280 bp, Glycine max
  unsure (1)..(280): unsure at all n locations
tgcaaatcaaacttacagagtcagctttgactgatancagacacaatttgggctaagtagattttccaagcaaaatgaagcancttgcttntattatgtaacttaccttatttgtgctttgcagtggtgttgatgtatatactgctattgctggggctgttggagctctatatggacctcttcatggtggagccaatgaggctgtcctcaanatgttgagtgaaattggaactgttgagaacnttccagcattcattgagggtgttaaaccaggaaacgg

SEQ ID NO: 277606 - DNA, 289 bp, Glycine max
  unsure (1)..(289): unsure at all n locations
catagggctatatagcatanacatttgagtcttcattgcacaatgtcaacctcttccataaacgggtggtgcctctcttccatctccccagccaaaacctctctcaggaaggccacattacgcccttccgtcttcgcaacccttaacactccttcttctccttcctcttcatcttccttcccctctctcattcaagacaggcctgtttttgctgcccctgcccccatcatcaccccaactgtgagagaggatatggcaaaggaatacgagaaagctattaagaattcag

SEQ ID NO: 277607 - DNA, 291 bp, Glycine max
gtggagcaagagcaaaaggtgactgaggatgctcgtaggtttgctgagcaagatgcagccgcacaaagatatgctgcgcaagtcccttcaggaaaagtatgaagaagcaactgctgcacttgctgaaatggagaagagggcagttatggcagaatctatgctggaggctacattgcagtaccaatctggccaagttaaagtgctacaatctccacgatcttcacagtcagattctccggtatcgagaaacaatcaagagccggatatccctgctaggaggtaagtttgctt

SEQ ID NO: 277608 - DNA, 285 bp, Glycine max
  unsure (1)..(285): unsure at all n locations
gcaacctatggtgatcaactagtaccatancaaaacaacagttggagattaacttgggtggggtcacagtagaagaggcaattagtgctcacagattattcntattagattaccatgatgcattcttcccgtatttgacgaagataaacagcctacctattgcnaaagcttatgccacaaggacaatcctgttcttgaaagacgatggatctttaaagccacttgctatcgaattaagcaagcctgcaacagtgagtaaagtggtgttgcctgcacagaaggtgt

SEQ ID NO: 277609 - DNA, 284 bp, Glycine max
ccagatgcgggtaccatcggtgcacatggagagcagactgtcaaaattcctgtcactttgatttatgatgacatcaagcaaacatatgctgatattaaacctggaagcatcattccttatagggtgaaggttagtctcatttttgatgttcccatcttgggaaggctaactctacctttggagaaaactggagaaatccccataccatacaagcctgatattgatcttgagaagattcattttgaaaggttctcttttgaagagacaattgcaagttcatttga

SEQ ID NO: 277610 - DNA, 286 bp, Glycine max
  unsure (1)..(286): unsure at all n locations
gttccagaggaacgcagagctggacccagaaaagaggctgtacccaggtggcagttacttcgacccactgggcctggcctcagatccagagaagaaagccacccttcaattggcggagatcaagcacgcccgtntcgccatggtgggcttcttgggctttgcagtccaagctgccgccactggcaagggcccgctcaacaactgggccacccacttgagtgacccatccacacaaccatcattgnncacttctcatcctcctcttaagaagaagcaaagangaaga

SEQ ID NO: 277611 - DNA, 287 bp, Glycine max
  unsure (1)..(287): unsure at all n locations
agnggttctntccgcgcggtcctgcctcngtggtgtcgctgcnccggcnctgcncgctgaccatanagaacgcgcacaagaagggggcgggcagnaccaagaacggccgcgactcgcagggcaagcgcctcggagtcaagatttaccgcgaccangtngccaancncggctccatcntcgttcgccancgcggaaccaagtttcatgcacgaaagaatgtngggcttngcaaagactataccattttctccttnattgatggngttgtaaatttctganatntcgnc

SEQ ID NO: 277612 - DNA, 285 bp, Glycine max
  unsure (1)..(285): unsure at all n locations
ctccgcctcgcgaaggnactcgccgagaacaacaagggtgcgaggntgctcgttgtctgctccgagataaccgccgtgacgttccgcggcccctcggacacgcacctcgactcgctcgtgggacaggcactgttcggagatggcgccgcagcgttgatcatcggatcagaccccgacccagcagtggagnggccgatattcgagatgatatcggccgcccagacaatcctgcncgacttgacggtgctntagatgggcaccttcgggagtgggatcacgttccac

SEQ ID NO: 277613 - DNA, 289 bp, Glycine max
  unsure (1)..(289): unsure at all n locations
aaacactatagcaatagaaacatttgcttttgaaaaacccctcactcttcatcactacactagctancccacatacaatgtcgaccaaatttaaggtgtttcgtgaattcacaagcgatgactcattcctaaaccaagttatccctgaaaacatcaccgaattccaagtgactctgtccctcgctagagactacgatggcaacaactcaaccaacggaaagttcattccttactgggacactgaaaaggtcactcccgaagtgataaaaaaattcaagaaaaatacgaa

SEQ ID NO: 277614 - DNA, 286 bp, Glycine max
gcagtgaacaatggcctctgcatcagcatctctgctcaagtcttcacttgttcttgacaagtctgagtgggtgaagggacaaacccttcgccaaccttctgcatcagttgtgagatgcaaccccaccaccccatcaggcctcaccatcagagctggttcctatgctgatgagctcgttaagaccgcgaaaacagtggcttcaccagggaggggtattttggccatggatgagtccaatgctacctgtgggaagcgtttggcttcattgggctagagacatgaagct

SEQ ID NO: 277615 - DNA, 296 bp, Glycine max
gcttcaccttctgctctagaaaattcagtgctgaaacatggcttcggctactctctctgtagccaaaccagcccttcaggcaaatgggaaaggcttctctgaattctctggcctccgaagctcatcaggcttccttcccttttctagaaaatcttcagaggatttccattctgtcattgccttccagacctatgcagttggaagcagtggaggatacaagaagggtgtgacagaagcaaaactgaaggttgccataaacgggtttggaaggattggaaggaattcttgaggtgctg

SEQ ID NO: 277616 - DNA, 295 bp, Glycine max
gatcgagataactagaaacagtgtgatgaaaatgaaggtccttgttttcttcgttgctacaattttggtagcatggcaatgccatgcgtacgatatgttccctctccgaatgaacactggctatggtgcccgtactccggaggtgaaatgcgcaagttggaggcttgctgtggaagcacacaacatctttggctttgagaccattcctgaagagtgcgttgaagcaacaaaggaatacatccatggcgaacaatatagatcagactccaaaacagttaaccaacaagcttacttt

SEQ ID NO: 277617 - DNA, 293 bp, Glycine max
  unsure (1)..(293): unsure at all n locations
cttcttcccagagtcaacaatgtcagatcccaaccagatttcgtncgctcaanccttcttttgcagcgctttcgccgcctgtttcgccgagttttgtaccattcctctggacaccgctaaggtcaggcttcaactccaaaagaaggtaggggttgatgagggagtgggtttacctaaatacaagggcttgctgggcacagttaagaccattgctagagaagagggtatatcagccctgtggaaaggcattgttcctggtttacaccgccaatgtttatatgggggcttaagaa

SEQ ID NO: 277618 - DNA, 294 bp, Glycine max
actttgaccttgttggaaacaaccttcccgtcttctttgtacgtgacggcatgaaatttccagatatggttcatgctcttaaacccaatcccaagaaccacatccaagagaattggaggatccttgacttcttctctcactttccagaaagccttcacatgttcacctttttatttgatgatttgggtgttccacaagattacaggcatatggatggttttggagttaacacatatacgctgatcaacaaggctgggaaagcagtgtatgtgaaatttcactggaagaccacta

SEQ ID NO: 277619 - DNA, 294 bp, Glycine max
  unsure (1)..(294): unsure at all n locations
gaaagtagcanagatgacaggtgggatgtttggaaggaaggggcaaaagataaaggggacagtggtgttgatgccaaagaatgtgttggacttcaacgccataacctccgtcggaaaaggcagtgctaaggacaccgccaccgatttcttgggcaaaggcttggacgcattaggtcatgcagttgatgctctcactgccttcgctggccatagcatctccttgcagcttatcagtgctactcagactgatggtagtggaaaaggaaaagttggaaacgaagcctatttggaaaa

SEQ ID NO: 277620 - DNA, 283 bp, Glycine max
tgaaaatgagacgaaacatttggaggaaatggaaggagcaaagagtcatctccatttttttgaaatggatcttcttgacatcgactccattgccgctgccataaagggttgttccggcgtaatccaccttgcatgtcctaacatcattggtcaagtcgaagatcccgagaaacagatattggaaccggcgataaaaggaacggttaatgtgttgaaggcggcgaaggaagcaggggtggagcgcgtggtggcgacttcatcgatttcgtcgattatgccaagt

SEQ ID NO: 277621 - DNA, 291 bp, Glycine max
gtgagaaagagaaagagagaattcgtaaaccctaatttcggaaagatcggcgatgactgcctccaaggatcgcgagaacttcgtctacatcgccaaactcgccgagcaggccgagcgttacgaagagatggtggaatcaatgaagaacgttgcgaatctcgacgttgaactgacggtggaggagcggaatttgctttctgttgggtacaagaatgtgattggtgctcgcagacgtcctggaggatcctgtcttccattgagcagaaggaagaaacaaaagggaacgagttg

SEQ ID NO: 277622 - DNA, 291 bp, Glycine max
gtcttgctggggcatttgctcttggaataaagaaacttggaactgtggaaattcaggaccttcccttctttgacactgtgaaggttaagacttccaatgcacacgcaattgctgatgctgctctcaaaagtggaataaatttgcgagttgttgatggaaacactatcactgttgcttttgatgaaacaaccacattagaggatgttgataatcttttcaaagtttttgctggtggaaagcccgtctccttcacagctgcatctcttgcaccagaagttcagagtgcgattc

SEQ ID NO: 277623 - DNA, 293 bp, Glycine max
ctaaaccctatggccgacgaagccaaagccaaaggcaacgcagccttctcctccggggactatcctgccgccatccaccacttctccgatgccatcgccctggctccctccaaccatgtcctctattccaaccgatccgccgcatacgcctccctcaaaaactacgcagatgcattagcggatgccaaaaagacagttgaactcaagcccgactggtccaagggttacagccgtctcggtgccgcgcatcttggcctttcccaatacgatgatgctattttggcttacaaaag

SEQ ID NO: 277624 - DNA, 289 bp, Glycine max
  unsure (1)..(289): unsure at all n locations
gtgggatgtttggaaggaaggggcaaaagataaaggggacagtggtgttgatgccaaagaatgtgttggacttcaacgccataacctccgtcggaaaangcagtgctaaggacaccgccaccgatttcttgggcaaaggcttggacgcattaggtcatgcagttgatgctctcactgccttcgctggccatagcatctccttgcagcttatcagtgctactcagactgatggtagtggaaaaggaaaagttggaaacgaagcctatttggaaaaacatcttccgacctt

SEQ ID NO: 277625 - DNA, 288 bp, Glycine max
  unsure (1)..(288): unsure at all n locations
gcattttcagaggaacaatggcgggtagggtttcgacgtgcttcttcttcgtgtttgctctttctctccttcttccttttcagatctccgctgaggaatcatcggagaaagagttcgtactcacattggatcactctaactttcacgacactgtcagcaagcacgatttcatcgtcgtcgagttctacgctccatggtgtggccactgtaagaagcttgctcccgagtatgagaangctgcttctatcttgagtagtcatgatcctccggttgttttggctaaaatga

SEQ ID NO: 277626 - DNA, 291 bp, Glycine max
ggggataagattaaagattcaacaatggcctctgcttctgctactcttctcaagtcatctcctgttcttgacaagtgcgagtgggtcaaaggccagacccttcgccaacctctcgtgagatgtaacccttcctcagcatcagctctcaccatcaaagctgcttcctatgctgacgagctcgtcaaaaccgccaaaacagtggcctcaccggggcgtggtattttggcgatggatgagtcaaatgcaacctgcgggaagcgtttggcatctattgggttagagaacacagaa

SEQ ID NO: 277627 - DNA, 295 bp, Glycine max
cttcctctgcgcaggaattaggaatattcgacaggtagagtttcttcaatggctcctaaagttgataagaagaatgatccaaaggcccaggccttgaagactgctaaggcagttaagtcaggtgctacctttaagaagaaggtaaagaagatccgaacttctgtcactttccacaggccgaagaccttgaagaaggacaggaaccccaagtaccctcgcattagcgccccgccgaggaacaagcttgatcattatcagatcctgaaataccccctcaccactgagtctgccatga

SEQ ID NO: 277628 - DNA, 281 bp, Glycine max
tgaaaatgagacgaaacatttggaggaaatggaaggagcaaagagtcatctccatttttttgaaatggatcttcttgacatcgactccattgccgctgccataaagggttgttccggcgtaatccaccttgcatgtcctaacatcattggtcaagtcgaagatcccgagaaacagatattggaaccggcgataaaaggaacggttaatgtgttgaaggcggcgaaggaagcaggggtggagcgcgtggtggcgacttcatcgatttcgtcgattatgccaa

SEQ ID NO: 277629 - DNA, 288 bp, Glycine max
ctttcgcttctgaatcttcaacaatggtgctcgaggcgacgatgatctgtatcgacaattctgaatggatgcgtaacggtgattactctccttctcgatttcaagctcaagcagacgctgtgaatctcatttgcggtgctaaaacgcagtctaatccagaaaatacagtgggagttctcacaatggcagggaaaggcgttcgtgttttggtcacccctaccagtgatctgggcaagatcttagcctgcatgcatggcttgcaacaatgcattcatctgagctgagtta

SEQ ID NO: 277630 - DNA, 290 bp, Glycine max
  unsure (1)..(290): unsure at all n locations
ggaaaaataaagggatcaaatttaagttccttgatctaataagatccttgcttttaattgtactactcatgaagagacttggcagttcggatacactgggtgctctcatgacgatttgtccaccaacagacgaacanagtccgaggaacaaccacgtgtatgggaaggagttccagtccatgctggaaggactcgacgaagaagggtgcgtggaagaagcanggcaccactctgagaagaaacgacgactaaacgtagatcaggtgaaggccttggagaagaacttcgaa

SEQ ID NO: 277631 - DNA, 290 bp, Glycine max
aattgaagttgaagtcttgcccttctctcttcaactccaaacacaagacatcatcatccatggctgcctccgtctccactgtcggagctgtcaacagagctcttttgaacctgaatgggtctggacctggggtttcagctcccagttcatccttctttgggagcagcttgaagaaggttattggctcaagggtccccaacacaaagatttcctctggaagcttcaagattgttgctgtagaagagaagaaagagattgaagagacccagcagaccgacaaggacagatgg

SEQ ID NO: 277632 - DNA, 289 bp, Glycine max
  unsure (1)..(289): unsure at all n locations
gtcgcaggcgcagagtagagcagcacagaagagggaaaacngcaccgccgccgtagaagaaaacaaccatggtgcacgtctccttttacaggaactatgggaagacattcaagaagccgcgtcgtccgtacgagaaggagcgtctcgacgcggagttgaagctggttggtgagtacgggcttcggtgcaagagagagctgtggagggtgcagtacgcgctcagccgcatccgcaacaacgcgcggaacctcctcaccctcgacgagaagaacccgcgccggatcttcga

SEQ ID NO: 277633 - DNA, 287 bp, Glycine max
gctcgcttcttccttctctcatcaacaacatgcagatcttcgtcaagactttgaccggcaagaccatcaccctcgaggtcgagagcagcgacaccatcgacaacgtcaaggccaagatccaggacaaggaaggtatccctcctgaccagcagaggttgatttttgctggtaagcagctggaagatggtcgcactcttgctgattataacatacaaaaggaatcaacacttcacttggtcttgaggctaaggggaggtaccatgattaaagtgaagactttaactggg

SEQ ID NO: 277634 - DNA, 290 bp, Glycine max
  unsure (1)..(290): unsure at all n locations
ccggtatgctgatgaaagtncattctttccagaatgtgaaggaaaaatatatagcttctacatcatgggcatcggnccacttcaaattccggactatgctgtttccttggatgataaagaccacctctttgccaaggttgtgagccagaaagatagtagcttaacacatatagtgtggaatccaggatctgaatttgcattctgtgattgttcttggtcaatgcaaggtaacctttgcaagcatgttgtcaaagtaaacatgatttgtgaaaatcttaaaggttatcaac

SEQ ID NO: 277635 - DNA, 286 bp, Glycine max
gtccctgctattgttggtgttttggggtccataaagttgccttatccttctagagcctttgatatggctcattgttctcgctgtttgattccttggggagcaaataatggaatttatatgatggaagttgatcgagttctaaggcctggtggttattgggtgctttcgggtcctccaatcaattggaaggctaactacaaatcctggctgagacctaaggaagaacttgaggaagagcaaagaaagattgaagagactgctaagcaactttgctgggagaagaggt

SEQ ID NO: 277636 - DNA, 290 bp, Glycine max
ggagttgtaaattaagagcatggctgcacaagctcttgtatcatcatcatctcttaccttctcagccgaggctacaagacaaagtcttggaccaagatcactccaatctccatttggcttctcaagaaaagcctcctttcttgttaaggcagctgctactccccctgtcaagcaaggatcagacagacctttgtggtttgcatcaaagcaaagtctttcctacttggatggcagccttccgggtgactatggatttgaccctctgggactttcggaccctgaaggaacag

SEQ ID NO: 277637 - DNA, 292 bp, Glycine max
ccagtctgcaagaaatttatgcaagatcctatggaaatttatgttgatgatgaggccaagttgacccttcacgggcttgtgcagcactacatcaaattgaaagaggaagaaaaaaaccggaagttgaatgatcttcttgatgcactggactttaatcaagttgtgatctttgtgaaaagtgttagcagagcagctgagctggacaaactacttgtggagtgcaactttccatctatatgcattcattctggcatgtcccaggaagaaaggttaaagcgctataaaggtttca

SEQ ID NO: 277638 - DNA, 288 bp, Glycine max
  unsure (1)..(288): unsure at all n locations
aatttaattacaactctgtatgtgaattcttcttgnagctgatggcgcaaattctgctccatgggactcttcatgccactatctatgangtcgatnagctcaaaattggtggaggcaactttttaaccaagatcgtacaaaacatcgaggagactgttggtattggaaaaggtgtcactaaactatatgcaaccattgatctagagaaggcacgagtggggaggaccagaattattgaacaaagagattaaaaatccaagatggtacgagtcctttcatatttattgt

SEQ ID NO: 277639 - DNA, 286 bp, Glycine max
  unsure (1)..(286): unsure at all n locations
gttggaaagaaaccctagcaagcggaacaatggcagacgttgaggtcgatgtgnnnnnnnnnnnnnnnnnnnggcagccgaagaagagaacgttcaagaagttcagtttcaggggcgtggatctcgatgcgcttctggacatgtccaccgatgaactcgtgaagatgttcagtgctcgcgcacgtagaaggttccagagaggcctcaccagaaagcccatggccttgatcaagaagcttcgcaaagcgaaaagagaagctccaccaggtgagaagccagaacctgt

SEQ ID NO: 277640 - DNA, 285 bp, Glycine max
  unsure (1)..(285): unsure at all n locations
aggaggtgaggcagattattaaggagaaagaagaagctgttcgcaaccaagactttgaaaaggctggagagctacgtgatagngagatggatcttaaggcacagatctcaacacttgtagagaaaggcaaggagatgagcaaggcagagactgaggcaggggatgaaggtcctattgtgactgaagctgacatacagcatattgtctcatcctggactggtattcctgttgagaaagtctcaacagatgaatctgatcgcctcctgaagatggaagagactttac

SEQ ID NO: 277641 - DNA, 234 bp, Glycine max
gagaaagaaaagaatggcaaagttaataaaattctttgagttgaacacaggggccaagattccttctgttgggttaggcacttggcaagctgagcctggtgttgtagccaaagctgtcaccacagccattctggttggatacaggcatattgattgtgctcaagcgtataacaatcaagcagagattggttctgctcttaagaagctttttgatgatggtgtggtgaagcgtga

SEQ ID NO: 277642 - DNA, 285 bp, Glycine max
gtgccacttctttcggacttccaagtggaggaatcgaaattcttgtttgaagcaaagactatacagagaatggaactccttgtgttgtccactctcgaatggaaaatgaaccccgtcaccccaatttctttctttcaacactttctcacaagccttggtttaaagcgccatttgcattcggagtctctccgtaggtgccaacgtcttcttctctctgtcattgcagattcaagggttatgagttatcttccttctacagtggctgctgctataatgatccacgtt

SEQ ID NO: 277643 - DNA, 288 bp, Glycine max
gtgccgcgttaaccgcgccggagactcggcgtactcaccgctgaactcggggtcgtcgtcttcgtcgttcagcgaccgcccccccacggagatggcgccgctcttccccggctgcgactacaaccactggctcatcgtcatggagaatcccggtggtgagggcgccaacaagcagcagatgatcgattgctacatccaaaccctagccaaggttctcggcagtgaggaggaagctaagaagaagatttacaatgtttcctgtgagaggtactttggattcggctgcga

SEQ ID NO: 277644 - DNA, 282 bp, Glycine max
  unsure (1)..(282): unsure at all n locations
gccgccatcactaaaaaggactccatcatcaccgcctaccgcgaccattgcatcttcgtcggccgcggtggcacgctcctggaggtcttcgccgagctcatgncccgcaaggaaggatgctcgaaggggaagggcgggtccatgcatttttataagaaggagaganggttttatggtgggcatgggattgttggggcgcaggttccgttggggtgtgggttggcgtttgctcagaagtattctaaggacgagagtgtcacttttgctatgtatggagatggc

SEQ ID NO: 277645 - DNA, 285 bp, Glycine max
  unsure (1)..(285): unsure at all n locations
gccgccatcactaaaaaggactccatcatcaccgcctaccgcgaccattgcatcttcgtccggccgcggtggcacgctcctggaggtcttcgccgagctcatgggccgcaaggaaggatgctcgaaggggaanggcgggtccatgcatttttataagaaggagagtnnggttttatggtgggcatgggattgttggggcgcaggttccgttggggtgtgggttggcgtttgctcagaagtattctaaggacgagagtgtcacttttgctatgtatggagatggcg

SEQ ID NO: 277646 - DNA, 282 bp, Glycine max
gacctgaggagcaaagcaaggactctcccaggaccagttagcgacccttcagagcttcccaagtggaactatgatggttccagcacaggtcaagctcctggtgaagacagtgaagtgattttatacccacaagccattttcagggatccattcagaaggggtaacaatatcttggttatctgtgatgcctacactcctgctggagaacctattcccactaacaagaggcacgctgctgccaaggttttcagccatcctgatgttgttgctgaagtgccatgg

SEQ ID NO: 277647 - DNA, 283 bp, Glycine max
gccactttctgagtacaatacaacactgccatggctgcctcagtctccactattggagctgtcaacagagctccactgagcttgaacagctctgaagctggagattcggttcccagttcagccttctttggcacaagcttgaagaaggttactgcctcaagggtccctaacgtcaagatttcttctggaagtttcaaaatcgttgcggcggagaaagagattgatgagcaacaacagacaaacaaggacagatggaaaggtcttgcctatgatatttcagatg

SEQ ID NO: 277648 - DNA, 282 bp, Glycine max
accctgacaagattccttttgttcctatctctggttttgagggagacaacatgattgagaggtccacaaaccttgactggtacaagggtccaactctgcttgatgcacttgaccagattagtgagcccaagaggccctctgacaagcccctcaggcttccccttcaggatgtgtacaagattggaggtattggaactgtgccagtgggacgtgttgagaccggtgtcttgaagcctggaatggtggtgacttttgcaccaactggactgacaactgaagtca

SEQ ID NO: 277649 - DNA, 280 bp, Glycine max
aagaaaatcttctcagaggcatatatgcttatggttttgagaggccttctgcaatacagcaaaggggaattgttcctttctgcaagggtctggatgtgattcagcaggctcagtctggaactggaaagacagcaacattctgttcggggattttgcaacagcttgactatggattggtacagtgtcaggctttggttttggcaccaacaagggagcttgcacaacagattgagaaggttatgcgagctctaggtgattaccttggtgtcaaggttcatgc

SEQ ID NO: 277650 - DNA, 282 bp, Glycine max
  unsure (1)..(282): unsure at all n locations
agcaatcaaggggtgcatgcatttattgcccaaatcagggattcagatggaaacatatgtccaaacatccgaatagctgattgtggtcacaaaattggtttaaatggagntgataatggccgtatctggtttgataatgtgaggatacccagagagaatttgttgaattctgtggctgatgtttcaccaagtggtgaatatttgagtgcaataaaaaatgcagatcagaggtttgctgcattcttagcccctttgacttctggtcgtgttaccatgctgtta

SEQ ID NO: 277651 - DNA, 134 bp, Glycine max
  unsure (1)..(134): unsure at all n locations
cttgacgtatggtaacatgcttgtccaagaacaagagaatgtcaagngagtccaattggctgacaagtacttgaacgaggctgcacttggaaatgctaacgaggatncnattancaggggaacttncttccaat

SEQ ID NO: 277652 - DNA, 312 bp, Glycine max
  unsure (1)..(312): unsure at all n locations
ttcttctctttatcagaaacgcgcgttgctcggataaggttgtgctgcgccgactcactggtactttgcttaancatggcggctgagaagtcaaacattgcaaaagatgtgactgaattaattggcaaaactccattggtatatctcaaccacatcgtggatggttgtgttgcncaagttgctgccaagcttgaaatgatggaaccttgctccagtgtcaaagacaggataggatatagcatgattgtgacgctgaggagaaaggactcatcacaccgggtgaaagtgtcctcatgaacctaccagtggaaa

SEQ ID NO: 277653 - DNA, 311 bp, Glycine max
ctcaaccatctgatttctgcaaccatgagtggggttacctgttgtctgaggtttcctggacaactgaactctgacctcaggaagctggctgtcaatctgattccatttccccgtcttcacttctttatggtggggtttgcacctctcacttctcgtgggtctcagcaatatgtctcccttactgtcccagagctgactcagcaaatgtgggatgccaaaaatatgatgtgtgctgctgatccccgcacggccgatacttgactgcatctgctatgttcaggggaaagatgagcaccaaagaggttgatgaa

SEQ ID NO: 277654 - DNA, 316 bp, Glycine max
  unsure (1)..(316): unsure at all n locations
gcaganttcaagcagggaaaagttgaatacagggcagacaaaactggaatcgtgcacttaccttttggaaaagctgactttccagaagaggatcttcttgtaaacttgcttgctgcagtgaaatcagtagaggcaaacaaaccttcaggtgctaaaggtgtgtactggaaaagtgctcacatatgctcagccatgggaccttcaatcaggttaaatatcagggagatgctgattacagacctccatcagaagaaccctcacatgtaaatgttcgtttggcctcagtcagctatcccgggtgccatgtgagatcttg

SEQ ID NO: 277655 - DNA, 307 bp, Glycine max
ataccacacaagacaaagcgtggggaagctgctcttgctcgtttgaaggtttatgaaggaatccctcctccatatgacaagaccaagagaatggttgttcctgatgctctcaaggtgttgaggcttcagaaaggacacaagtactgtgtattgggcaggttgtcacctgaagttggatggagctactatgataccattagggagctggagaagaagagaaaggagaaggcagagttggtttatcgagaaagaaacaactcaacaattaagggtgaaagctgaaaaggttgctgaagagaagctcggt

SEQ ID NO: 277656 - DNA, 307 bp, Glycine max
  unsure (1)..(307): unsure at all n locations
ctccaccaacacaaaagcacttgcaaactagttttgttttgggaacatcatcacattacattagattggtggtaatggcagcgtcactacaagcagcagctactttcatgcaacccaccaagttgagcaggagcaacactttgcagcaaaagtctactcagtccatttccaaggcttttggtttggaacctgttggagctaaaaaggtcacatgctcccttcaggctgatcttaaggacttgctcacaagtgtgttgatgctaccaaaattgcaggattcgcncttgccacctctgccctcgttgtc

SEQ ID NO: 277657 - DNA, 286 bp, Glycine max
  unsure (1)..(286): unsure at all n locations
gctcnnnccatcaccctttctntcattctgttgggaaatggnagtcacactttcagcgtgcaagtccattagctcgccttctgttcccgnccgcagctttatttgcggggaaagcaggaactaagagtncgcaatgcagttttttagctggagcaaacaangtgaggtttcctaggcaagtcggtcaagttagccacgttcgcaaacagcgccaaacgcgnactgtggtgctctccacgcgacttgcagcggtgacaagatcctgatcgcgnatagaggcgagatt

SEQ ID NO: 277658 - DNA, 306 bp, Glycine max
cgcgagttcaaggccaagttcgccaagacctacgccaccaaggaggagcacgatcatcgcttcggcgtcttcaagtccaacctgccgcagagccaggctgcacgccaagctcgacccctccgccgtccacggcgtcaccaaattctccgatctaactccggccgagttccgccgccagttcctcggcctcaagccgctccgcttcccggcgtacgcccagaaggcgcccatcctccccaccaagatctccccaaggatttcgattggcgagacaaaggagccgtcactaagtcaaggaccaagggc

SEQ ID NO: 277659 - DNA, 302 bp, Glycine max
  unsure (1)..(302): unsure at all n locations
attttggcacctttgcctattgggttcgcggtgttcttggttcacttggcaaccatccctatcaccggcactggtatcaaccctgctcgtagtcttggtgctgctatcatcttcaacaaggaccttggttgggatgatcactggatcttctgggtgggaccttcattggtgctgcacttgcagcactctaccaacaggtcgtaatcagggccattcccttcaagtccaagtgattcaanaaaccgttcatgcttaatcaagttgggaacaacaaaaaanatcgaaacccagnnncattgttc

SEQ ID NO: 277660 - DNA, 306 bp, Glycine max
  unsure (1)..(306): unsure at all n locations
aaggatttgaagcgtggttatgttgcctcaaactcaaaggatgaccctgcaaaggaggctgctaacttcacagcccaagtcatcatcatgaaccaccctggtcagattggaaatggctatgcccctgtcctcgactgccacacttctcacattgctgtcaagtttgctgaactcatgaccaagattgacaggcgatccggcaaagagcttgagaaggagcccaagtttttgaagaacggtgtgctggttttgttaagatgattccaaccaaacccatggttgttganactttctccgagtatcctc

SEQ ID NO: 277661 - DNA, 302 bp, Glycine max
  unsure (1)..(302): unsure at all n locations
gagacagaggcacagagagaaaatggtttcggggtcagggatctgtgccaagagggtaattgtggacgcacgacaccacatgctggggaggctggcatcgatcgtggcgnaagaacttctgaatgggcagaaggtggtggtggtacgctgcgaggagatttgcatctccggtgggctcgtcangcanaagatgaagtacttgcgtntcctccgcaagcgcatgaacaccaagccctccacggccccatccatttccgtgcacccggcaagatcttctggcgcaccgttcgtgggatgatacc

SEQ ID NO: 277662 - DNA, 300 bp, Glycine max
  unsure (1)..(300): unsure at all n locations
caaggcagaaagcaagctcatcctagagttttaaaaatggcagcagcctcctccatggctctctcttccccatgccttggctggcaaggccgtgaagctgggcccatcagcccccgaagtcgggagggtcagcatgaggaagaccgtcaccaagcaggcctcctccggaagcccatggtacggcccagaccgcgtcaagtacttgggcccattctctggcgagcccccgtcctacctctggcgagttcccaggtgactacggctggganatgctgggtttcggccgacccagaaaccttc

SEQ ID NO: 277663 - DNA, 305 bp, Glycine max
  unsure (1)..(305): unsure at all n locations
ctcttcttctcttgcggctagggttttagcgcanttcttctagatttaaggaagatgggtaaggaaaaggttcacatcagtattgtggtcattggccatgtcgactctgggaaatccactaccactggtcacctgatttacaagcttggaggcattgacaagcgtgttattgagaggtttgagaaggaagctgctgagatgaacaagaggtctttcaagtatgcctgggtgctggacaaactaggctgagcgtgaaagaggaatcaccatgatatgctttgtggaagtttgaaacaacaaatatt

SEQ ID NO: 277664 - DNA, 291 bp, Glycine max
ctcggtgggtattatgatgcattttgtggggtagttcagtactcaaatctttacggaaccgccgtaggatacacaattgcagcttctattagcatgatggcaataaaaaggtccaactgtttccattcttcaggcggaaaaagtccatgtcaggtttcaagcaacccatacatgatcggttttggcataatccaaattttattttctcaaattccagattttcatgaaatggtggctctccatagttgcagcaatcatgtctttgtctatccacaatgggctcgctcttgg

SEQ ID NO: 277665 - DNA, 299 bp, Glycine max
gtcggcttcataagtgctatgatttcaaacatttccttcacgtaccgaagcatctattcaaagaaagccatgactgatatggacagtaccaatatctatgcctacatttccatcattgctctaattgtgtgtataccacctgccgtaattttggaagggcccacactgttgaagcacggcttcaatgatgctattgctaaagtaggtttggtcaagttcgtctcagatctcttctggttggtatgttttaccatctctacaaccaggtggctaccaacacactggagagagtggctcct

SEQ ID NO: 277666 - DNA, 301 bp, Glycine max
  unsure (1)..(301): unsure at all n locations
gtgccttatcgctgtggttttcatcgtcttccttctcttatatttctnttttnttttngttcttcgccgcacgccgaaacaatggccggaaaagganagggtcctgcnatcggaatcgatctcggaaccacctactcttgtgtcggtgtgtggcaacatgacnganttnaaatcatcgccaacgacnaagggaacagaacgacgccgtcttacgtcgggttcactgataccgngcgttcatcggtnntgcggcnaataaccaatcgccntgaaccccatcaanaccgtcttcgatgccaag

SEQ ID NO: 277667 - DNA, 299 bp, Glycine max
aattgaagttgaagtcttgcccttctctcttcaactccaaacacaagacatcatcatccatggctgcctccgtctccactgtcggagctgtcaacagagctcttttgaacctgaatgggtctggacctggggtttcagctcccagttcatccttctttgggagcagcttgaagaaggttattggctcaagggtccccaacacaaagatttcctctggaagcttcaagattgttgctagaagagaagaaagagattgaagagacccagcagaccgacaaggacagatggaaggtcttgcc

SEQ ID NO: 277668 - DNA, 286 bp, Glycine max
aatggcttgatggatcgctaccaggtgactatggttttgatccactaggccttgggaaggacccagcattcctcaaatggtacagagaagctgagctcattcatgggaggtgggcaatggctgcagttctaggaatctttgtggggcaggcatggagtggagtgccatggtttgaggctggagctgacccaaatgcaattgctcctttctcctttggtactcttctgggaacccagttgatcctcatggggtgggttgagagcaagagatgggtggatttcttcaa

SEQ ID NO: 277669 - DNA, 170 bp, Glycine max
  unsure (1)..(170): unsure at all n locations
gtggaatccttgtttaggaggtacactgaacatggaatgagtgaagatttggcctataacaacactgtncgagtccattacaggaactatatctaaaataatctcgactaagggtatgttggctgtatacaatgctttatctgaagatgaaaagagggaatttgagaaac

SEQ ID NO: 277670 - DNA, 149 bp, Glycine max
  unsure (1)..(149): unsure at all n locations
gtgagtttgttgatcgagataactagaaacagtgtgatgaaaatgaaggtccttgttttcttcgttgctacaattttggtagcatggcaatgccatgcgtacgatatgttccctctccgaatgaacactggctatggtncccgtcnccc

SEQ ID NO: 277671 - DNA, 215 bp, Glycine max
  unsure (1)..(215): unsure at all n locations
ctctcancctcctcttcacacattttctgtgcgctctaacaaacattctcgttcacactttcagattgtgtgaagatggtggcgggtggccgaactgatgttcctcctgccaacaggaagtcagaggttgaccctttnaagcgggtgccatttgaaaaacctccatttagtctcagccaaatcaagaaggtcattccacctnactgttcncaggg

SEQ ID NO: 277672 - DNA, 172 bp, Glycine max
  unsure (1)..(172): unsure at all n locations
gatcttgccaagaaaatctggtgctttngccctgagacccttggacccaacatggtggttgatatgtgcaagggagtccagtatttgaatgaaatnntcgattctgtggttgctggattccagtgggcatcaaaagaaggngctttggctgaagaaaacatgagagccatct

SEQ ID NO: 277673 - DNA, 175 bp, Glycine max
cccagagggccaaaaagctattcaaacattgaaggatgtttatgctcaatgggtccccgaagaaagaatactgaccacaaatctttggtcggcagaactgtctaagcttgctgctaatgccttcttagcacaaaggatttcatctgtcaatgccatgtccagcatttgtgaggct

SEQ ID NO: 277674 - DNA, 169 bp, Glycine max
  unsure (1)..(169): unsure at all n locations
ctaggcctctaagaagagctataatgcgacttttggaggacagcatggctgagaagatgcttgctagagagttaaagagggtgactcagttatagttgatgctgactccgatggtaatgtgattgtgctcaacggtagtagtggtgccccagattcattagaagaanct

SEQ ID NO: 277675 - DNA, 269 bp, Glycine max
  unsure (1)..(269): unsure at all n locations
tgtttgttgtaggaagaggaatcttgagaaatggcaggggacagcaagagcangattctgttcatcggagggactggttacatcggaaaattcatcgtggaagccagcgccaaagctggccacccaactttccttttggtgagggagtccactctctccaaccccgcaaaatcacccctcatcgacaatttcaaaggcctcggtgtcaatcttgttttaggagatctatacgatcaccaaagtttggtgagtgctataaagcaggtcga

SEQ ID NO: 277676 - DNA, 305 bp, Glycine max
  unsure (1)..(305): unsure at all n locations
ggcgaacaatatagatcagnaccaangcaacagttaaccaacaagcttantttnatgccagagacctcncaagtccatcccaaggacacatttgtgttcagtatagatggcaccgtactctctaatattccatactacaaaaaacatggatatggggtggagaaattnactcgaccttgtatgatgaatgggttaacaagggcaatgcaccggcactgcccgagactcttaagaattacaacaagctggtgtctcttggcttcaagattatattcttgtcaggaagaacactggacaaacaggcc

SEQ ID NO: 277677 - DNA, 308 bp, Glycine max
  unsure (1)..(308): unsure at all n locations
gtgatancaattgagtcatttatacgagctgatnatggtacacaatttttagatggntagccgtgntgcctgaangatggccaatgcnttaccatgnacttggtgaaatacttgctantggtaagagggaaagcaaaagaacccaaggtcgacagtgagctcatttatgcattgcaaaaatagataggctgagtgacattgaggagttcattcttatgcctaatgttgctaatcttcaaaatgttggtgaccggttgtacgatgaagcattatatgaagctgcaanaatcatattgcttttatatcta

SEQ ID NO: 277678 - DNA, 301 bp, Glycine max
  unsure (1)..(301): unsure at all n locations
gctgaaagtggaggacagcatgtgggtaaaaaactcaacaggnaatgatggaaacagtcgtgctncngaaactgcaaagcaggggactcaagctgttaaaattcagcccattgaagttcctgaattacaagtggatgaactcaaagaaatcaccgatggctttggaaaagttctttgattggagagggatcctatggaagagtatattatggtgttcttaaaagtgggcaggctgcggcaatcaagaattagatgccagtaaacagcctgatgacgatttttagcccaggtttcaatggtt

SEQ ID NO: 277679 - DNA, 305 bp, Glycine max
  unsure (1)..(305): unsure at all n locations
gtgagtttgttgatcgngataactagaaacagtgtgatnnaaaatcnaggtgctngggnancntcgnnggttacaattttngtagcntggcnatgcgatacgtaangatatgttccctctccgaatgaacactgggctatggtncccgtactccggaggtgaaatgcgaagttggaggcttgctgtggnagcacacaacatctttanctttgagaccattcctgaagagtgcattgaagcaacaaaggaatacatccatgggcgaacaatatagatcagatccaaaacagttaaccaacaagctt

SEQ ID NO: 277680 - DNA, 302 bp, Glycine max
  unsure (1)..(302): unsure at all n locations
ctcttcttctcttggcggctagggttttagcgcagttcttctagatttaaggnagatgggtaaggaacaaggttcacatgcagtattgtngttattggccatgttgactctgggaagtccactaccactggccacctgatctacaagcttggaggcattgacaaggtgttattgagagatttgagaaggaagctgctgagatgaacaagaggtctttcaagtatgcctgggtgcttgataagcttaaggctgagcgtgaaagaggaatcacaattgatattgccttgtggaagtttgaaacc

SEQ ID NO: 277681 - DNA, 296 bp, Glycine max
  unsure (1)..(296): unsure at all n locations
ggagaangggaanaggtataccaanaggaagatatggcanagggngagttgnttactggggtnnncgtgatgtattcagaaagcctacatttgcccgtnttctttcacttgtagtnattacaatccacatcaaggntgtaaggaagtagtcacatctgagngaggnaagagcaagcttctttcatagaagnaatcagtagaacagcaccaattaagtatctncacaagtatcttgcatncaagcaaattgtatcagggaattaccnagatttcaaaagaatgttaccagtctgtgg

SEQ ID NO: 277682 - DNA, 298 bp, Glycine max
  unsure (1)..(298): unsure at all n locations
tctcacnctnntcttcananatttntctgtgcggtctaacaaacattctagttcacacgntcaagnntgtgtgaagatgggggcgggtggccgaactgatgttcctcctgccaacaggaagtcagaggttgaccctttgaagcgggtgccatttgaaaaacctcatttagtctcagccaaatcaagaaggtcattccacctcactgtttccagcgttctgttttncgctcattctcctatgttgtttacgactcaccatagccttctggctctattatgttgccaaccatattccacc

SEQ ID NO: 277683 - DNA, 297 bp, Glycine max
  unsure (1)..(297): unsure at all n locations
agaacatggggtttgaggaaactgagttaaggcttggactgcctggaaacggggcactgaagaagtgctcatcaggaagaggggtttctctgagactgaaactggtcatgaagatgagtctgccaccactgtggatttgatgcttaatctttcttctaagagnnnnnnnnnnnnnnnnnnnnnnnnnnnnnnnnnnnngataagcacaagactttgcctaaggagaagacccttctgccagcagatcctgctaagcctccagccaagacgcaggtggtgggttggccacctgtgcgg

SEQ ID NO: 277684 - DNA, 272 bp, Glycine max
  unsure (1)..(272): unsure at all n locations
ccggagggtntttgggtgacganantactttgcntggtgccatcnncggccgtttancgacagacttccgacctactccgccacatttgtatgtcttgaatcagcagaagcctttggcctngatgccaataacttnagtacatcactgatcacttccggtacaaatttgcaaatgagaggctganaagaacagcaagatattactcatccaattggagaacttgggctgctgtcaacatcaatttgcttggagagttacaggcagaggataa

SEQ ID NO: 277685 - DNA, 294 bp, Glycine max
  unsure (1)..(294): unsure at all n locations
ggaccctaaatngttcgggatcgtcaccaaggaggcgccctacntccgggcccacacggtccgttaccngacacagctccgagaagccgacagcctcatgtcctcgtaccgatccgaacccgcgtgttttccggccaccgccacgctccgcggcaacgagggtgcaaacttgccctacataacctccctgacgaggtttatgagaaggagtgggatttgatcatgatcgacgcgccgaagggtactttgcggaggcgccggggcgcatggcggcgatattctcggcggggtgat

SEQ ID NO: 277686 - DNA, 294 bp, Glycine max
  unsure (1)..(294): unsure at all n locations
ancctccagcttcctntnattgcncgcttccctgacgttctgaagaaccggttggagtcctccagtcggcgttcgattatgncaatccaatctggagggtacgagtctcattaccaaggagtttaccccntgaaatgcaaccaggaccggttcgtggtgaggatatcgtgaaattcggttcacccttccggttcggtctggaggccgggtctaagccggaatccttctggccatgagctgtctttgcaaaggcaaccccgacgcgcttttgatttgcaaggcttcaaggacgcg

SEQ ID NO: 277687 - DNA, 292 bp, Glycine max
  unsure (1)..(292): unsure at all n locations
cttnacctgggacagatttccaagaagaaaagcttactagatggattgtcaaatctgccctcantggataaagaacttcaagaaaaggattttgagcaacgtgctctagataaacttgttgtgatggcttatgagaaatacatggcttgttggggcctagtccttctggtgggaaaaatacaagcaacaaaatggccaagcaagctgcactgggatttgtcaaacggacattggagcgatgccatcaatttaaagatactggcaagagctgcttcagtgatcccttattcaa

SEQ ID NO: 277688 - DNA, 295 bp, Glycine max
  unsure (1)..(295): unsure at all n locations
ccgntgcagtttaancatatcaataagcggnggaaaagnaactaacnaggattcccttaagtaacgggcgagcggnncgggaaaagcccaccatgaaaatcngtcgccctcggcgtgccgaattgtagtctggagangcgtcctcagtggcggaccgggccaagtcccctggaanggggcgccaganagggtgaganccccgtcgtncccgnacnctgtcgcaccacgaagcgctgtcggcgagtcgggttgtttgggaatgcagcnccaatcgggcngtaattccgtccaaggc

SEQ ID NO: 277689 - DNA, 296 bp, Glycine max
  unsure (1)..(296): unsure at all n locations
tgtagactnatttgcaatcaatnactataaggcttgagggantggaggcttaagcgacnagncacaanaggcagtggaatgaggcatcgccaaactccctgaagatttgagaagtcgtgttagacgatttgttcaatataaatggctgctactcgtggagtgatgaggaaaccattctacgtgccttacctgctgatcttcgccgtgatatacagcggcatttgtgcttagaccttgttagaagagttcncttcttctcacagatggatgatcagcttctggatgcaatatgtgag

SEQ ID NO: 277690 - DNA, 291 bp, Glycine max
  unsure (1)..(291): unsure at all n locations
agagtatatgatgatgaagtgaggaagtggatttctggtgttggtgttgacagtgttgggaagaagcntgtgaactcaaaagatggacctccaacctttgagcagcccaagatgactctggagaagctcttgctgtatggtaacatgcttgtccaaaacaagagaatgtcaagagagtccaattggctgacaagtacttgaacgaggctgctcttggaaatgctaacgaggatgctattcagaggggaactttcttccagtcttgaattggaggcaaagcaaacttggcaa

SEQ ID NO: 277691 - DNA, 297 bp, Glycine max
  unsure (1)..(297): unsure at all n locations
gggnaccttcatatnttggtacaggcacttttgcattnttcccacatgnancatgaggctanacatgcatttggccaaccatgggggtcaaagttttcatcctgtcgaggttgatttgccagccatgatggcccaaaaagataaagcagtttctaatcttacaagggtattgaaggtctattcaagaaaaacaaggtaaactatgtcaaaggttatggcaaattagtttcaccatctgaggtctctgtggacaccactgaaggtggaaatactgttgtgaaaggcaagcanattata

SEQ ID NO: 277692 - DNA, 289 bp, Glycine max
  unsure (1)..(289): unsure at all n locations
tgcttacgtgatagcatttacagccctanccagtggaanctcntggcangatcnagtggcaagcagaattgctgcagaacgtcaaaaaactgctgattctgcaattgcaaacatcacttgcagcaattcagtgaatatatatgttggtattgtgttccatggcttattgatactttgtacaacttcatagcatatagagaacctctccgaatccaaaatgcagggggactaagcttttcgttgattgttttcttctccacttctgtcgggtgtatctcagttttggttt

SEQ ID NO: 277693 - DNA, 295 bp, Glycine max
  unsure (1)..(295): unsure at all n locations
cactcactaagctaaacaatttcatcaagcctgccatggcttctcgtgtggtntnctctggccattngcagctgttgnccatctnccacaccaagttcccagaagaatggatcactcttgggaagcacaaaagcttcttttcttagtgggaggaaactgaggtgaacagttttacagcaccagttggagcacgatccagcactacagtgtgtgcagttgctgagcctgataggcctctgtggttcccaggcagcacccctcctccatggctagatggcagtttgccaggagattt

SEQ ID NO: 277694 - DNA, 287 bp, Glycine max
  unsure (1)..(287): unsure at all n locations
ggcagcgtcactacaagcagcagctactttnatgcaacccaccaagttgagcaggagcaacaactttgcagcnaaantctactcagtccatttccaaggcttttggtttggaacctgttggagctaaaaaggtcacatgctcccttcaggctatcttaaggacttggctcacaagtgtgttgatgctaccaaaattgcaggattcgcccttgccacctctgccctcgttgtctctggggcaagtgctgaaggtgttccaaagaggctaaccttcgacgaaatccaga

SEQ ID NO: 277695 - DNA, 297 bp, Glycine max
gcagaatcagatatttgaaggttagaacgaaaaagaatcatcgatggcagagacgaaagaaggttcaggttcggagatgtctctgaaggatcagggcaacgagtttttcaagtcaggaaagtatctcaaagctgctgcactctacactcaagccatcaagctagacccttctaaccctaccctctatagtaatcgtgctgcagcactactgcaattggataagcttaataaagctctagatgatgcagagatgacaatcaaattaaaaccccaatgggaaaagggatatttcaggaa

SEQ ID NO: 277696 - DNA, 293 bp, Glycine max
aaaagccttagccttccctacaactccaaacaggtaagacatcatcatccatggctgcctccgtctccactgtcggagctgtcaacagagctcttttgaacctgaatggttctggagctggagcttcagctcccagttcagccttctttgggaccagcttgaagaaggttattgcctcaagggtccccaacagcaaggtttccggtggaagcttcaagattgttgctgtagaagagaagaaagagattgaagagacccagcagaccgacaaggacagatggaagggtcttgcc

SEQ ID NO: 277697 - DNA, 287 bp, Glycine max
  unsure (1)..(287): unsure at all n locations
ctcttcttctcttgcggctagggttttagcgcanttcttctagatttaaggaagatgggtaaggaaaaggttcacatcagtattgtggttattggccatgttgactctgggaagtccactaccactggccacctgatctacaagcttggaggcattgacaagcgtgttattgagagatttgagaaggaagctgctgagatgaacaagaggtctttcaagtatgcctgggtgcttgataagcttaaggctgagcgtgaaagaggaatcacaattgatattgccttgtg

SEQ ID NO: 277698 - DNA, 287 bp, Glycine max
gagataactagaaacagtgtgatgaaaatgaaggtccttgttttcttcgttgctacaattttggtagcatggcaatgccatgcgtacgatatgttccctctccgaatgaacactggctatggtgcccgtactccggaggtgaaatgcgcaagttggaggcttgctgtggaagcacacaacatctttggctttgagaccattcctgaagagtgcgttgaagcaacaaaggaatacatccatggcgaacaatatagatcagactccaaaacagttaaccaacaagctta

SEQ ID NO: 277699 - DNA, 285 bp, Glycine max
tgctcctctcatccgtgatgggcgtatggagaagttctactggggcacctacaagggacgatcgtgttggcgtctgcaatggaattttccgcactgacaatgttcctaaggatgacattgtcaagcttgttgacaccttccccggccaatctattgatttctttggtgcactcagggctagagtatatgatgatgaggtgaggaagtggatttctgttgttggtgttgacttcattgggaagaagcttgtgaactccaaggaaggacctccaacctttgaccaac

SEQ ID NO: 277700 - DNA, 285 bp, Glycine max
  unsure (1)..(285): unsure at all n locations
gccaacaatattgatgatcatgtctaaatttgaaggctttgggatctatatcttctctggagagaagatcagcttctagatattatcttttcaantttgncaatatattccttgggaacatacttactggaacagcatttcaacagctgagctctttcattcaccaaccagccgaccaatatcctgtaacaattggcactgctattcctttaaaagcaagttttttcattacttatataatggttgatggatgggccagtatagctgcagaggttttgatgttga

SEQ ID NO: 277701 - DNA, 287 bp, Glycine max
atttttcttcctcagtagtgtcatttacgcttctcttctctgcagcaactatgcctaaccctaaggtcttcttcgacatgaccatcggcggtcaatctgctggccgcatcgtgatggagctctacgccgacgtcactccccgcaccgccgagaacttccgcgcgctttgcaccggcgagaagggcgtagggcggagggcaagcccctccactacaagggctcgtccttccaccgcgtgatcccgagtttcatgtgtcagggtggcgacttcaccgccggaaacggaa

SEQ ID NO: 277702 - DNA, 289 bp, Glycine max
gagataactagaaacagtgtgatgaaaatgaaggtccttgttttcttcgttgctacaattttggtagcatggcaatgccatgcgtacgatatgttccctctccgaatgaacactggctatggtgcccgtactccggaggtgaaatgcgcaagttggaggcttgctgtggaagcacacaacatctttggctttgagaccattcctgaagagtgcgttgaagcaacaaaggaatacatccatggcgaacaatatagatcagactccaaaacagttaaccaacaagcttact

SEQ ID NO: 277703 - DNA, 287 bp, Glycine max
aattaagatggctcagcctgatacctctctttggattaaaagctctgatggcaggaatgaagtactgaaccatgatgagtatgcaagactgttttctccttatattggatcaaaacctgctgctggttatgtgactgaagctacaagaggaactggagtagtatcagccagcagtttgggccttgttgaaatattgatggatgcggatcaatggtcggagatgttttcatctatgattgctagtgctgccactgtggaagtactatctagtggcacgggtggaacca

SEQ ID NO: 277704 - DNA, 287 bp, Glycine max
  unsure (1)..(287): unsure at all n locations
ctccacccacccagcatatctctctattcctatttattagcacccctcacattaccttgtgtcaccaactactttgactcctttaccataccattacaataattatcaaacctaaccagtaaaaatggtgaccgtggaggaaatccgcaacgctcagcgttcccatggacccgccaccatcttggccttcggcaccgccacgccgtccaactgcgtctcccaagccgattaccctgactactacttccgcattaccaacagcgnacacatgactgatctcaaagnnc

SEQ ID NO: 277705 - DNA, 286 bp, Glycine max
gccacactacaccgagattccccctaaacccgtttgcgttgttgtttgcgaagaaatggcgactaagaggagcgtgggaacgttgaaggagggtgatttgaaagggaagagggtgttcgtgagggtcgatctgaacgtgcctttggatgacaaccttaacatcaccgatgacactagagtccgtgctgctgttcccaccatcaagtacttaactggtcatggagccaaagtgatccttctagccacttgggacgtcctaaaggtgtaacacctaaatacagtttgt

SEQ ID NO: 277706 - DNA, 284 bp, Glycine max
gttcggagagacctagtacctaatgggacctggcagcgttaagatggtggcagtggattcggatgatctctggtttgcgtataacttgatagctcccggagactctgtcatggccgttactgtcaggaaggttctaagagaagctgctaatggcggacgggaagcagaacgcgtcaagctcaaattggaaattaaagtcgaagagctttctgattatgacaaagaaggttctattttgcgtgttcgtggaaagaacattttggagaatgaatatgtcaagattg

SEQ ID NO: 277707 - DNA, 282 bp, Glycine max
  unsure (1)..(282): unsure at all n locations
cctttgttcactcttcttctcttgcggctagggttttagcgcanttcttctagatttaaggaagatgggtaaggaaaaggttcacatcagtattgtggtcattggccatgtcgactctgggaaatccactaccactggtcacctgatttacaagcttggaggcattgacaagcgtgttattgagaggtttgagaaggaagctgctgagatgaacaagaggtctttcaagtatgcctgggtgctggacaaacttaaggctgagcgtgaaagaggaatcaccat

SEQ ID NO: 277708 - DNA, 284 bp, Glycine max
gagcaatttgagatgacgggtttggatcctgagtataataggttgttcaatgagggcatggtgtgcactgctagggttgtgtccaaggctgtgatcactggctacaaagatgggttcaaccagattaagtccttggttgatgttggaggtggcattggagggtctctttcggagattgttagggcttatcctcatatcaatgccatcaactttgacttgcctcatgtggttgccactgctcctaagttcgatgggatcacccatgttggaggtgacatgttcgt

SEQ ID NO: 277709 - DNA, 287 bp, Glycine max
gcaagggcaagtggacaaagacaatgcctttgtgaacgagctggaatcactctcaagactccaccacaagaacctggtccggttgttggggttctatgaagacagcaaagaacgcattttggtgtacgattacatggacaatgggagcctgagtgatcatctccacaagctccaaagttcagctctcatgtcatgggcagtgagaatcaaggtggctctagatgctgcaaggggcatagagtacttgcaccaatacgccactccaccaatcattcaccgtgacatta

SEQ ID NO: 277710 - DNA, 291 bp, Glycine max
tcgttatccttctttttttctccttgaactcgaatattcactatggcagatgaggtggttctgctagatttctggccaagtccatttgggatgagggtcaggattgcacttgctgaaaagggtatcaaatatgagtccaaagaagaggacttgcagaacaagagccctttgctcctcaaaatgaacccggttcacaagaaaatcccggttctcatccacaatggcaaacccatttgtgaatctctcgttgctgttcagtacattgaggaggtctggaatgacagaaatccc

SEQ ID NO: 277711 - DNA, 291 bp, Glycine max
  unsure (1)..(291): unsure at all n locations
gtggttttcatcgtcttccttctcttatatttcttttttttttngtcttcgccgcacgccgaaacaatggccggaaaaggagagggtccngctatcggaatcgatctcggaaccacctactctntgtcggtgtgtggcaacatgnccganttgaaatcatcgccaacgaccaagggaacagaacgacgccgtcttacgtcggnttcactgataccgagcgtctcatcggtgatgcggctaagaaccaagtcgccatgaaccccatcaacaccgtcttcgatgccaagaggt

SEQ ID NO: 277712 - DNA, 287 bp, Glycine max
  unsure (1)..(287): unsure at all n locations
ggagaattatgaattgggtttgcctgtaattaaaaaagctggtgttgaccacaaaattgaattcagagaaggtcctgctctaccagttcttgatgaaatgattaaagatgagaagaaccatggaagctatgacttcatctttgttgatgcggacaaggacaactacctcaacnnccacaagaggttgatagagcttgtaaaagttgggggcgtgatcgggtacgacaacaccctatggaacggatctgtggtggcaccccctgatgctcctcttaggaagtatgtta

SEQ ID NO: 277713 - DNA, 286 bp, Glycine max
gccgcagcagcctcaggaggagaataaggatgtctcacaggaagttcgagcacccaaggcacgggtcactgggatttctccccaggaagcgtgctgctcgtcacaggggaaaagtgaaggcattccccaaggatgacccatccaaggcacccaagctcactgcattcttgggttacaaggctggtatgactcacattgttagagaggtcgagaagccaggatcaaagcttcacaagaaggaaacatgtgagcctgttacaattattgagacccctccaatggttat

SEQ ID NO: 277714 - DNA, 285 bp, Glycine max
gtttcgttccaaacaaaacccatcaaagtctttctccctcagtgatcatatattcattcagttctatacaaaatcctcaaaaactcttcctctctgccatgaccatggaatacagaaccttagaactcaacatcatatccgcaaaggacatcaagaatgttaatctcttctccaagatggacgtatacgccgccgtttcgctctccggtgaccctctccaccctcagggcgccaccacccacgtccacaaagacgccggcagcaaccccacgtggaataccccgt

SEQ ID NO: 277715 - DNA, 272 bp, Glycine max
tggatacttcggctaagagtaccgggtcgggtgggaagaagcgtggacccgctccgtatagaatatttaacctggggaatacttcgccggttactgttcctactcttgtgagtatattggagcggcatttgaaggtgaaggcgaagaggaatattgtggacatgcctggaaacggtgacgttccttttactcacgcgaatattagttcggcccggagagagctcgggtacaagcccacgaccgatttgcaaaccgggttgaagaagttcgtc

SEQ ID NO: 277716 - DNA, 286 bp, Glycine max
ttgagaactaagaagaaggaaatggcttcctcaatgatctcctccccagctgttaccaccgtcaaccgtgccggtgccggcatggttgctccattcaccggcctcaaatccatggctggcttccccacgaggaagaccaacaatgacattacctccattgctagcaacggtggaagagtacaatgcatgcaggtgtggccaccaattggcaagaagaagttcgagactctttcctacttgccagacctcgatgatgcccaattggcaaaggaagtcgaataccttc

SEQ ID NO: 277717 - DNA, 289 bp, Glycine max
  unsure (1)..(289): unsure at all n locations
ggagaggataaggctttgcatttcatttgagaganagagcgtcttacctttccattatcaaaatggctgtttcggctatcacaggagcgaggctaaccctagggatagggttggcgatacctctttcctctcccacgcgctctcgaaccgtcgcaatggccgtatccgtcgaccccaagaccgacaacaaactcactcttaccaagtccgaggaagctttcgctgctgccaaggagctgatgcctggaggtgtcaactccccagttcgtgccttcaaatccgtgggtgg

SEQ ID NO: 277718 - DNA, 284 bp, Glycine max
ggctttggaagaccttggatttttatattgagcttacttggacttacaccacttgctgaacgtgtgagcttcatcacagaacaagttgccttttacactggtcccacagtcggaggacttctgaatgctacatgtgggaatgttactgagctcataatagcaatatttgcccttagcagtaacaaaattgctgtggtcaagtattctctgttgggttctattctttcaaaccttcttctggttcttgggacctctctattatgtggtggcattgcaaaccttaa

SEQ ID NO: 277719 - DNA, 282 bp, Glycine max
ggtttttgtgactgtgctccacaaccgagtcgccatggcgtcgcaggagagtatcgaaaagatgcaggcacggcagaattaccggaatttatggcacaccgatctcatgagatccattcaggccgatactccttattgttgcctcgcgttgtggtgtgcaccatgtgtgtcttaccttcttcgcaaacgagctctctatgatgatatgtcaaggtacacatgttgtgctggctacatgccttgcagtggtaggtgtggagaaagtaaatgtcctgaattttg

SEQ ID NO: 277720 - DNA, 281 bp, Glycine max
aggatttcaagctcgccgataccgtgattaggggtttgttgaagtattggccggttaccaattgccagaaggaggttctcttccttggagaacttgaggaggtgctggaggccacgcaagccgcggagtttcaacgatgcatgattccgctttttagacagatttcacgctgcctcaatagctctcactttcaggttgcagaacgagccctcttcttgtggaataacgagcatattgtgagcttaattgcccaaaacaggactgtgatactaccaataata

SEQ ID NO: 277721 - DNA, 288 bp, Glycine max
tggattgtatctgtcgaatctgcaactctgctggaagaggaagaaattgaggttccagtttccaaagaaccagcaggagaaaataccaagatggaaactgatgaagctcctgccaatgttgctgcacctcctagcaccaatgacaatgatgttaacatgcaagatgctaattccaaggcaactgctgatgcccctgggtccgaaaatgggacccctgaggcaggagataagcctgtgcaaatggatactgataccaaggttgaggctccaaagaaaaaagttaagaaa

SEQ ID NO: 277722 - DNA, 283 bp, Glycine max
aacgaatcgaaaaaagaaagatcatggcgatggcaaacttggctcgacggaagggttacgccgtcgttttgtcgtcgaggtcgtcgctttgtctgacaaggtggagggggttcgcgtccggatctgacgaaaacgacgtcgtggtcatcggcggcggtcccggcggctacgtggcggccattaaagcggcgcactgggtctgaaaaccacttgcatcgaaaaacgtggcatctcggcggtacctgcctcaacgtcggatgcatcccttccaaggcattttgca

SEQ ID NO: 277723 - DNA, 281 bp, Glycine max
ctccttctcccgccgcaactcacactgtcttccttctctagggtttttagctcctccaaattcttcgcccaacatggttcttcaaaatgatattgatttgctaaatcccccggctgagcttgagaagaggaaacacaagctcaagcgtcttgttcagtcaccaaactctttcttcatggatgttaagtgccagggttgcttcaacataaccactgtctttagccactctcagactgttgttgtatgcggaaatgccagaccgtcttgtgccagccgacagg

SEQ ID NO: 277724 - DNA, 287 bp, Glycine max
  unsure (1)..(287): unsure at all n locations
ggaagatattgcgcagatggttcaagaggctnagaagtacaagtntgnggatgangagnacnagnagaaggttgaggccannaacgctttggaanactatgcataccaacatgaggaacaccgtgaaggatgacaagattggtgagaaacttgacccggctgacaagaagaggantgaggatgcaattgagcaagcaatccagtggttagacagcaaccagcttgnanangcagatgantttgaggacanaatgaaggaattgganagcatctgcaatccaatcatt

SEQ ID NO: 277725 - DNA, 280 bp, Glycine max
cggaaacttcgcttgatagattggggtcttgctgaattttatcatcctggaaaggaatacaatgttcgtgtggcttcaagatactttaagggccctgaacttctagttgatttacaagactatgactactcattagacatgtggagtcttggctgcatgtttgctggaatgatatttcgcaaggaaccttttttttatggtcacgacaaccatgatcagcttgtcaaaatagctaaggtgcttgggacagatgaactgaatgcatatctgaataagtatc

SEQ ID NO: 277726 - DNA, 280 bp, Glycine max
  unsure (1)..(280): unsure at all n locations
ggcagcgtcactacaagcagcagctactttcatgcaacccaccaagttgagcnggancaacactttgcagcncaagtctactcagtccatttccaaggctttggttnggaacctgttggagcnaaaaaggtcacatgctcccttcaggctgatctnaangacttggctcacaagtgtgttgatgctaccaaaattgnaggattcgcccttgccanctctgncctcgttgtctctggggcaagtgctgaaggtgttccagagangctaaccttcgacgaga

SEQ ID NO: 277727 - DNA, 235 bp, Glycine max
  unsure (1)..(235): unsure at all n locations
acccttctcttctccttcttctccttcctcgtcttcatctccaggatgaagccctggtgtaactgcgatctttgcaagagctacttgacggtgagttggctgaaaaagttccccaatctctgcgactggtacactcatctcttgcgtaaatccccaaccggcaccatccacgttcacgtgctggggaacaccatcacctcgaatccccacaacgtggagcanattctcaagacga

SEQ ID NO: 277728 - DNA, 285 bp, Glycine max
gttgtaactcgttcttcttcttttgttgttctgtgtttgtgtttgttttttctctcacctgaaaatgtcttgctgcggtggtaactgtggttgcggaagctcctgcaagtgcggcaacggctgcggaggctgcaagatgtacccagacttgagctacactgagtcaaccaccaccgagaccttggtcatgggagtggcacctgttaaggctcaatttgagggtgctgaaatgggtgtgcccgctgagaacgatggctgcaaatgtggaccaaactgctcctgcaa

SEQ ID NO: 277729 - DNA, 285 bp, Glycine max
aaaacactatagcaatagaaacatttgcttttgaaaaacccctcactcttcatcactacactagctagccacatacaatgtcgaccaaatttaaggtgtttcgtgaattcacaagcgatgactcattcctaaaccaagttatccctgaaaacatcaccgaattccaagtgtctctgtccctcgctagagactacgatggcaacaactcaaccaacggaaagttcattccttactgggacactgaaaaggtcactcccgaagtgataaaaaaattcaagaaaaaat

SEQ ID NO: 277730 - DNA, 282 bp, Glycine max
gagtgattgagtcacttttggaaaaagttgacattcttcttcttggtggaggaatgatcttcacattttacaaggcacaaggtctttcagtgggttcatcccttgtagaagaagataagttggatcttgctacatcactacttgcaaaagccaaggaaaagggggtgtctctcttgttaccaagtgatgtggtgattgcagacaaatttgcccccgatgcaaacagcaaggtcgtgccagcatctgccatccctgatggctggatgggattggatattggtc

SEQ ID NO: 277731 - DNA, 283 bp, Glycine max
  unsure (1)..(283): unsure at all n locations
ggccatcgcaacagagactcagcctcaacaacacaaggattcttcggaggtttcgggttcagctgcgganaaagaaggtggacgcttaacgatttcgatatcggaaagcctcttggaaggggaaaattcggtcacgtctatttggccagagagaagactagtaatcatattgttgctttgaaagtactcttcaagagtcaattgcaacaatcccaagttgtgcatcaacttcgacgtgaagttgaaatacagagtcatctccgacatccccacattttgcgcc

SEQ ID NO: 277732 - DNA, 280 bp, Glycine max
gggaactcgggaactctaattaccccgtcgtgcttgtgcagattccaatgttcaatgaaaaagaggtgtacaaggtgtcgattggagcagcttgcaatctttcatggcctgtggatcgtctcgtgatccaagtgctcgatgattctactgaccctaccatcaagcaaatggtggagatggaatgcaatagatgggcaagtaagggcataaacatagtgtaccaaatcagagaaacaagaggagggtacaaagcgggtgctctaaaagaaggcctaaaacg

SEQ ID NO: 277733 - DNA, 279 bp, Glycine max
ccactctctttctctagtcctgttatttctcagcgcgtaaagcatggctttgttggtggagaaaaccacgagtggtcgcgagtacaaggtcaaggacctttcccaggccgacttcggccgcctcgagatcgagctggccgaggttgagatgcccggcctcatggcctgtcggaccgagttcggcccctcccagcccttcaagggggcccgcatcaccggctccctccacatgaccatccagaccgccgttctcattgagaccctcaccccttggcgccg

SEQ ID NO: 277734 - DNA, 280 bp, Glycine max
gggcagcgtcactacaagcagcagctactttcatgcaacccaccaagttgagcaggagcaacactttgcagcaaaagtctactcagtccatttccaaggcttttggtttggaacctgttggagctaaaaaggtcacatgctcccttcaggctgatcttaaggacttggctcacaagtgtgttgatgctaccaaaattgcaggattcgcccttgccacctctgccctcgttgtctctggggcaagtgctgaaggtgttccaaagaggctaaccttcgacga

SEQ ID NO: 277735 - DNA, 283 bp, Glycine max
ttcaaggccgggtcccagatcttcagcgagggtgggctcgactacttgggcaacccaagcctgatccacgcccagagcatcctcgccatctgggccacacaagttatcctaatgggtgccgttgaaggttaccgtattgctggtggccccctcggtgaggtcactgacccaatctacccaggtggcagcttcgacccattgggccttgctgatgacccagaggcttttgctgagcttaaggtgaaggaactcaagaacggacgattggccatgttctctatgt

SEQ ID NO: 277736 - DNA, 291 bp, Glycine max
gcaaacttgggagaggtgggtttcgacgattacctctttgacatcaacaacagacacagagttctcagttacgtttgagtgggatgagagcatgggtgttcctggggcattcataatccgaaacaatcaccatagccagttctacctcaagacactgaccattgaagacattccagggcatgatggtcctgttaattttgtctgcaattcttgggtctaccctgctcatcgttacgcccatgatcgtgtcttcttcgccaacaaggcttatcttccatgtcatacacctga

SEQ ID NO: 277737 - DNA, 286 bp, Glycine max
gaggcacgggtcaatgtacccgatgaacggttcgagtggctttgccaattattcaagccaaaaagtgaggtcctcggctttcttagaaatccatgacatagctggattggtccgaggtgctcatcaggggcaaggattggggaatagttttttatctcacatccgtgctgtagatggcattttccatgttttacgtgcatttgaggatccggacattattcacgttgatgatactgttgacccagtcagggatttagaggtcattactgaagaatgcggctgaagg

SEQ ID NO: 277738 - DNA, 285 bp, Glycine max
actatccataacatagccacttcacactcactcactcttgttgccttcatggccaagccagtgtccattgaggtatggaacccaagtggcaaatacagagttgtcagcaccaaaccaatgcctggaactcgttggatcaatcttctcattcaaaatgatgttcgccttgaaatatgtaccgagaagaaaacgattttgtcagttgaagacatcattgctttgattggtgataagtgcgatggagttattggacagttgactgaagactggggagaagagttgttc

SEQ ID NO: 277739 - DNA, 293 bp, Glycine max
  unsure (1)..(293): unsure at all n locations
caaacgacttcatgcaagttttcacgagtgggcaagggcagatggntgagagattttggattcagcaaaaanattggncaagttgccattggtggacctggtgganatccattcttgggtcaacagatgtcatcgcaaaaggattactccatggcaactgcggatgtagtggatgcggaagtgagggaactggtagagagagctattctagggcaacacatattatctcaactcacattgatatcctcacaagcttgctcaacttctcataganaaagaaactgtggatggtg

SEQ ID NO: 277740 - DNA, 293 bp, Glycine max
ttgaaacaggggcattgcaaatcagccagtggccgtacctattccagcagacgactatgaatttcaatattatacatcaggtgtattcaaagggaaatgcggtacagaattaaatcatgctctcctgcttgtggggtatggtacagaaaaagatggagattattggatagcaaagaattcatatagtgataaatggggagagaatggctatatcagaatacaaagaaaactgagcacttgtaaatttggaaacgggggttactatcccattataaaagtcaccgatcaacaag

SEQ ID NO: 277741 - DNA, 299 bp, Glycine max
  unsure (1)..(299): unsure at all n locations
cttctttccaaatcccaactactantcanactcactgcagatcacaatccatggctaccattgttagcatcaaggcccgccaaatctttgacagtcgtggnaatccaaccgtcgaggtggatttgacatgctccgatggtacttttgctagagctgctgtnccaagtggtgcatccactgggatttatgaggcccttgaattgagagatggaggatctgactaccttggaaagggtgtatcaanngctgttgacaatgtgaacaccattantgcccctgctttggttggcaaggacnca

SEQ ID NO: 277742 - DNA, 286 bp, Glycine max
tcttcatccaatgactatacattcattatatttttgtgtaaatagaggaaaaactcgatggaaaaatggtggtttaattctatgttgtttaataggaagttagaatacaggtgtgaattaagtaaatcaatggatagtcttggtcctattgaaaataccagtctaagggaagaccctaaaattttaaccgatatagaaaaaaaaattcacagggatttggattatttagaaatggaaggttttttttctagcgatctgaatactgtttctaagaatgatgatgatc

SEQ ID NO: 277743 - DNA, 285 bp, Glycine max
  unsure (1)..(285): unsure at all n locations
gggaataggaaaacctgtgactgtggaagngatacaagtagaccctcccaaagccaccgaagttcgagttaagatgctttgtgccagtatatgctccacagacatctctagcacaaaaggattcccacataccaattttcctatagcacttggacacgaaggagttggtattatagagagtgtcggtgatcaagtaacgaatctgaaagaaggggatgtggtaattccaacatacataggcgagtgccaagaatgtgagaattgtgtttcagaaaaaaccatttg

SEQ ID NO: 277744 - DNA, 289 bp, Glycine max
cattagcaaaagcaagaagaactagtctaagcagaaatggcctcttcagtgatggcatctgtggccctcaaacctgcccctttcactgttgagaagtcctcagttagaggccttccctccctctcaaggaactcctcttcattcagagttgtggccagtggtggcaagaagatcaagactgacaagcctatggaattaatggtggcatggcttgagggaaggagttgatgcatctggcaggaaaggaaagggaaaggcgtttaccatttgtagacaaatacggtgctaa

SEQ ID NO: 277745 - DNA, 301 bp, Glycine max
aacaaatcaaagccatggccacctccaacttctctattgttctctccgtctccctagccttctttttggtgctacttaccaaggcacactcgaccgataccgtttctttcaccttcaacaagttcaacccagtccaaccaaacattatgctccaaaaagatgctagtatttcatcctctggggtgttacaactcaccaaagttggcagcaacggcgtgcccacctcgggatctctcggtcgtgccctttacgctgccccaatccagatttgggacagcgaaaccggcaaggtagccagctg

SEQ ID NO: 277746 - DNA, 283 bp, Glycine max
ccttcctcttcatcttccttcccctctctcattcaagacaggcctgtttttgctgcccctgcccccatcatcaccccaactgtgagagaggatatggcaaaggaatacgagaaagctattgaagaacttcagaaattgttgagggagaagagtgaactcaaagcgacagctgctgaaaaagtggagcagataacagcttctctagggacatcatcatctgatggcatcccatcatcagaagcctcagacaggatcaaagctggtttcattcacttcaagaagg

SEQ ID NO: 277747 - DNA, 281 bp, Glycine max
acacaacgcaacacaacgcgcactctctcttttctctcttaacacaaaaaccctatcgttcttccgcggtttcgccgattctcgccatgccgaaagccaaatccgacgccaaagccgccgatagccggttgaagcgcaagggcgctggtgctggaaggaagcaatcgaagaaagctgctaaggatcctaacaagccaaagagacctccaagcgctttcttcgttttcatgtccgagttcagagagcagtttaagaaggagcatcctaacaacaaatccgtc

SEQ ID NO: 277748 - DNA, 282 bp, Glycine max
  unsure (1)..(282): unsure at all n locations
gttccagaggaacgcagagctggacccagaaaagaggctgtacccaggtggcagttacttcgacccactgggcctggcctcagatccagagaagaaagccacccttcaattggcggagatcaagcacgcccgttctcgccatggtgggcttcttgggctttgcagtccaagctgccgccactggcaagggcccgctcaacaactgggccacccacttgagtgacccactccacacaaccatcatgnccaccttctcatcctcctcttaagaagaagcaaaag

SEQ ID NO: 277749 - DNA, 284 bp, Glycine max
  unsure (1)..(284): unsure at all n locations
aaggtgcaanaatattaagatgataaacattggagcacttgttgtactctttgcatttctcttcctcagttgtgcctatgcacaagacacaacaacccttgtgcctgcaatcataacttttggtgactcagccgtggatgtagggaataatgactatcttcccacccttttcaaggctgattaccctccttatgggagggactttgctaaccaccaacctactgggaggttttgcaatggcaaattagctactgattttactgctgacactttgggttttaaga

SEQ ID NO: 277750 - DNA, 293 bp, Glycine max
  unsure (1)..(293): unsure at all n locations
gcttacgtgatagcatttacagccctagccagtggaacctcatggnctgatctagtggcaagcaaaattgctgcagaacgtcaaaaaactgntgattctgcaattgcaaacatcacttgcagcaattcagtgaatatatatgttggtattggtgttccatggcttattgatactttgtacaacttcatagcatatagagaacctctccgaatccaaaatgcagggggactaagctttcgttgattgttttctctccacttctgtcgggtgtatctcagttttggttttaaggc

SEQ ID NO: 277751 - DNA, 291 bp, Glycine max
  unsure (1)..(291): unsure at all n locations
gnacaatgggcctctgcatcagcatctctgctcaagtcttcacttgntcttgacaagtctgagtgggtgaagggacaaaccttcggccaacttctgcatcagttgtgagatgcaaccccaccaccccatcaggcctcaccatcagagctggttcctatgctgatgagctcgttaagaccgcgaaaacagtggcttcaccagggaggggtattttggccatggatgagtccaatgctacctgtgggaagcgtttggctcaatgggctagagaacatgaagctaacgccagca

SEQ ID NO: 277752 - DNA, 287 bp, Glycine max
  unsure (1)..(287): unsure at all n locations
cacactctctctttctctctcttcaaatcaaaacccatcacaattcacaacaacatacaaatncccaaatcctatcttttctcttctcatataaaagaacccttctttcgaatccttcccgctcttttccctctgatttaattcatgcgcagatccaaaccctaatccatctctccgagggtttgatggctgaccaaggattggaagggagccagccggtggatctacagaagcatccttctgggatcgtgcctacccttcaaaatattgtgtccacagtcaattgg

SEQ ID NO: 277753 - DNA, 286 bp, Glycine max
cctgctcttctgcgtcctggaagattagatagaaaaatagaaattccattgccaaatgaacaatcaaggatggaaattctcaagattcatgctgctgggattgctaagcacggtgaaatagattatgaagctgttgtgaagcttgcggagggctttaatggagctgatcttcgaaatgtgtgcacggaagctggaatggcagcaattcgtgcagaacgtgattatgtgatccatgaagatttatgaaggctgttagaaaactgatgatgcaaagaaactcgaatcc

SEQ ID NO: 277754 - DNA, 294 bp, Glycine max
  unsure (1)..(294): unsure at all n locations
ggagatgggcgnangaaaacgctgtcgttgcggcactcgcgggcgttggtnctactcgcggcgagtgtggcggtggatgctcaggagaactcggacgtgaagacgctggtgaagtacaagcacgggaagaagtactgcgacaaaggatgggaatgtaagggctggtcaatttactgttgtaacctcaccattaccgattatttccagacctaccagttcgagaatctgttctccaagcggaactcgccggtggcgcacgcggtcggatttgggataccatcctcatcgccgcgc

SEQ ID NO: 277755 - DNA, 271 bp, Glycine max
  unsure (1)..(271): unsure at all n locations
tttgaaattaacaagtagcaaagatgtttggnatcatcggaggaaacaagggtcacaagataaaggggaacttggtgattatgcgaaagaatntgttggatatcaacagcattaccagtgttaagggtgtcatcggaaccggcattaacatcattggaggngtcgtcgacaccgttactgctttngcgtcccacatctccatccagctcattagtgccaccanggctgatggactgggaanggaaagttnccaaggctacaatttaagagg

SEQ ID NO: 277756 - DNA, 273 bp, Glycine max
  unsure (1)..(273): unsure at all n locations
gcgaganatggcgatggcaatggcgcttcgcaggctttcatcttcaattgacaagccttctgcgccctctcttcaatgccggttccctctactacaagtcgtctttgcctgatgaagctgtttacgacaaggagcgacccggagttacatggccgaagcagttgaatgctccacttgaggtcgtggatcctgagattgctgatatattgagctgagaaagctaggcaatggaagggctagaatgataccgtcagagatttcactcgtgtcgtg

SEQ ID NO: 277757 - DNA, 278 bp, Glycine max
  unsure (1)..(278): unsure at all n locations
gtctcgaagatcgagatatctatttagatctcananaaacagtgtttcatttcaattcattcagtcttatnattattagggtttggcgattcagagaganagagaaatgggagaacgaaaaggaatcccaattgctctggggctcttggcgatgctcctcttcttcattgcttcttcctcttcctctcacctcgttcgtgcttccgatgacgccgacgacgcgatcttctacgagtcatcgacgaggattttgacggacggtggattgtgtccgacaa

SEQ ID NO: 277758 - DNA, 292 bp, Glycine max
  unsure (1)..(292): unsure at all n locations
aaagctatagatttaattgatgaagcaggttctcgagtccggcttcaacatgcacagttacctgaagaagcaagagagctgacaaggaggctagacagattgtaaaggagaaagaagaatctgttcgcaatcaagactttgagaaggccggagagctaagagataaagaaatggatcttaaggcgcagatatctgcactatagaaaaaggcaaggagatgagtaaggcagaaagtgaggcaggagatgaaggtcccatggtcatgaattgacatacaacatattgtctccnc

SEQ ID NO: 277759 - DNA, 306 bp, Glycine max
tgactgatgagctgagaacggttttggagactaacttacctaaagttaaggaaggtaagaagtccaagttcagtttaggtgtatcggatccaaagattggttcccagatatctgaacttactaaaattccttgccaaagtaatgagtttgtcgccgagctgcttcgcggtgtgcgcctccattttgataggtttgtcagtgatctcaagtccggggatttggaaaaggcacaacttggtctggggcatagttacagcagagcaaaggtgaaattcaatgttaaccgtgttgacaacatggtcatca

SEQ ID NO: 277760 - DNA, 300 bp, Glycine max
cttaggagaagaagattgctttggagggaaaatggaaggttcgcggctcaaatatgttgaccatcatcttcggcaacagcgagcacttcaacaattgggaatgatccagcacaatgcttggagaccccagagaggattgcctgaaagatccgtttctgttcttcgtgcttggctcttcgaacacttcctccatccttatcctaaggattcggacaagcacatgctagcaaaacaaacagggctaactaggagccaggtttcaaattggtttataaatgctcgagttcggctttggaagcc

SEQ ID NO: 277761 - DNA, 254 bp, Glycine max
  unsure (1)..(254): unsure at all n locations
tcttccaattcttctggagctnnttctctgcttcactcactaggaagaaaccctggagggtggagaaacattaacagatttagcacggctgcagcagttgaggaactaatcactccacaagtttcaatacgttacacacagaacctgataaatgggcaatttgtggatgctgcatcagggaaaacatttccaacatatgatccgcgctcaggagaagtgattgctaatgttgctgaaggggatgttgaagatat

SEQ ID NO: 277762 - DNA, 295 bp, Glycine max
agatattgaagtttatctcaaatgctaagagtgagggtgcaaccattttgactggtgggtctcgcccagagcatctaaagaagggattctttgttgaaccaactgtcataactgatgtaactacctccatgcaaatttggagagaagaagtatttggaccagttctctgtgtaaaaacatttagcactgaggaagaagctattgatctagcaaatgacactgtataggctgggttctgctgtaatatcaaatgatctagaaagatgtgagcgcattactaaggctttaaggctgg

SEQ ID NO: 277763 - DNA, 298 bp, Glycine max
ggctgtacttacaagacgtaatagcatcactggagttgcttacaaagacgacccaactataatggcttgggaacttatgaatgagattaggtgcccttctgatcaatcaggaaggacagttcaggcttggatcactgagatggcatcttacctgaaatccatagatggaaaccacttgctggaagctggtctggagggtttctacggccagtcaaagcctcagtctaacccaaacttcaatgtaggaaccgatttcattgccaacaaccaaatcccaggcattgatttcgcaacagtg

SEQ ID NO: 277764 - DNA, 301 bp, Glycine max
ttcatactgatcacttccttgcctattgcacattcttcatcacttcattcaacatttctctctcccttagctagtttttaccaatgggctgctgcggttagtgctgcagtctcttttccatccaccaagtctacctctctcccaagcaggacctccatcattaccccagagagagttgtattcaagaaggcttcattgcaatacagagatgtttgtagcagtggaagggtagtttccatcagagctcaagtcaccactgaggctccagccaaggttgaaaaagagtccaagaaacaggatg

SEQ ID NO: 277765 - DNA, 299 bp, Glycine max
gatgactcaggtttattcaaaggtaagtggagaagcacctctggaaaaacctactattgatgtgagctccaaagaattttatggtgagggatatgatgatagtgacaagagaattcctgacatgaccataattaataggcagcttggctggaatcctaaaacctcactttgggacctgcttgaatcaactctcacctatcagcacaggacttatgctgaagccgttaagaaagtcattgcaaagcccgtggcaagttaaacttgtatggtattgaattgcattgagaagagtgtttctg

SEQ ID NO: 277766 - DNA, 301 bp, Glycine max
  unsure (1)..(301): unsure at all n locations
ttccttttctcttctctgtctaaggggtgccctgagatcacatttaacaatggtgaaggctgtggccgttcttgggcagcagtnagggtgtcactggaatttttcacttcgttcaggagggaagtggtccaaccaccgtaactggatctcttgctggtcttaagcctggtctccatggtttccatgtccatgccttgggggacactaccaatggttgcctctcaactggatcacatttcaatcctaataacaaggagcatggtgcccctgaggatgagaatcgncatgctggtgatcttgg

SEQ ID NO: 277767 - DNA, 294 bp, Glycine max
  unsure (1)..(294): unsure at all n locations
cgaataccttctaaggnaaggatggattccttgcttggaattcgagttggagcacggtttcgtgtaccgtgagcacaacaggtcacctggatactatgatggacgctactggaccatgtggaagctgcctatgtttggctgcactgatgcttctcaggtgttgaaggagcttcaagaggctaagactgcanaccccaatggcttcatccgtatcattggatttgacaacgttcgccaagtgcagtgcatcagcttcatcgcctacaagcccccaggcttctaagtcatgaaaaa

SEQ ID NO: 277768 - DNA, 298 bp, Glycine max
  unsure (1)..(298): unsure at all n locations
cnngctcgagggacaaacactttcgccaaccttctgctgcatcagttgtgagatgcaaccccaccaccccatcagggcctcaccatcagagctggttctatgctgatgagctcgttaagaccgcgaaaacagtggcttcaccagggaggggtattttggccatggatgagtccaatgctacctgtgggaagcgtttggcttcaattgggctagagaacactgaagctaaccgccaggcataccgtaccctccttgtgacagttccaggattggtcagtacatctctggtgccatctct

SEQ ID NO: 277769 - DNA, 294 bp, Glycine max
gggagcaacatggatttgcgaggaacaaaatctggtttattgagaaagatcctccatcgcttgctggagatttcaatggaaaagtttatattgacttgcttctcaaaccatcagaagacgatatgaaaatatggccacatagattcgagtttcgcctaagggtctctttggccgcagatggaaatttgactttgacatctcgcatcaggaatgtcaatggcaagaatttagtttctccattgcatatcatacatatttttccgtctcagatatcagtgaagtgagggtagaagg

SEQ ID NO: 277770 - DNA, 295 bp, Glycine max
  unsure (1)..(295): unsure at all n locations
ggcatcccatcatcagaagcctcagacaggatcaaagctggnttcattcacttcnagaaggngaaatatgacaagaatccagctttgtatggtgaacttgccaaaggccagagccccaagtttatggtgtttgcttgctcagactcaagggtgtgcccatctcatgtgctagatttccaaccaggagaggcctttgtggtcagaaatgttgctaacattgtcccaccatatgaccagtcaaaatacgctggaactggggnccgcagttgagtatgctgttttgcatcttaaggtg

SEQ ID NO: 277771 - DNA, 291 bp, Glycine max
cccagcttttgttgctcaattcccaggtctcaatggccttgacctctctgcagcaagattagaccttggtcctggtggtgttatcccactccacactcaccctggtgccaatgaactactcattgttctccaaggtcacatccttgctggattcatatcttcaggtaacatagtttatcagaaggtgctaaaaaagggagagctcatggttttcccacaagggttgttgcacttccaaattgctgttggtaagagaaaggccctgcttttcctgtcttcagcagtgctttt

SEQ ID NO: 277772 - DNA, 292 bp, Glycine max
ctcttcctcaccgattgctagaatggaatttcgatgctcagtcatctcttttaccattctcttctctcttgctcttgcaggagagagccatgtccatgcatcgctacctgaggaagattattgggaagctgtttggccaaacactcccattcccactgcactgcgagagcttctaaagcctctccctgcaggtgttgaaatcgatgaactccctaagcaaattgatgatacacagtacccaaaaacattcttctataaagaagaccttcatccaggcaaaacaatgaaagta

SEQ ID NO: 277773 - DNA, 290 bp, Glycine max
  unsure (1)..(290): unsure at all n locations
ccgaacattgatatcatgcctcgttcatgggaatgncaaatttgcacgcaagcaatattatgatggctgcagttgactatcgtgtattttaatggaaaaatagtcgaatgtagtgtcaagagctccttgtgttagtttggatttaactctacccctacgttcgtcctganaattatcatattctgcgtgttattagttgttgtattcacggataaagttggaataccagatgagttataccagtggtgcccctcccctttttccaaaaaanncnanaaaaaaaaaanngg

SEQ ID NO: 277774 - DNA, 294 bp, Glycine max
caaaggattctacccgccgctcgatgggaattgcgcttcaaggcgtcttcgtagggctaatccgccttcacgagggtcaccaacggcacgtgcctttggggggccgaggccccctactgctggtcggcaaacggacggcgggcgcacgcgtcgcttctagcccggattctgacttagaggcgttcagttcataatccaacgcacggtagcttcgcgccactggcttttcaaccaagcgcgatgaccaattgtgcgaatcaacggttcctctcgtactaggttgaatatattgcg

SEQ ID NO: 277775 - DNA, 291 bp, Glycine max
  unsure (1)..(291): unsure at all n locations
aaggcaagcgcttctcctctttgtgttnctgggctatgcttcttgggcaagagttagtnccggacgaggattgcgtgtacacggtgtacgttcggacgggttcgatcatcaagggaggcaccgattcagtaattggtctgaagctatacgacaagtccggctacggcatatacatcaccaacctcgaggcatggggcgggttaatggatccgggtcacaactactacgagcggggcaacctcgacatattcagtggtagaggccctgcttggaagcacccgtttgcgaggc

SEQ ID NO: 277776 - DNA, 286 bp, Glycine max
  unsure (1)..(286): unsure at all n locations
gcgccagaccgacctcccattcctcctcgccgtcgaaganttttctccatcnccggccgtgggaccgtcgccaccggccgcgtagagcgtggcaccgtcaaagtaggggaaactgttgaccttgtaggattgagagagacaagaaacacaacggtcacaggtgtggaaatgttccagaagattctagacgaagccctncgccggggacaacgtggggctgttgctgagaggggttcaaaagacggacatccagagagggatggtgttggcgaactgggcacgatta

SEQ ID NO: 277777 - DNA, 325 bp, Glycine max
atcctgcaagaaacaaaaggaagacatcaagactaaaatttcaagagtttatatgaggacagaagcatctgataaaagcctattgtgaaagatggatatcaatggaggaaatatggacaaaaggtgaccagggataacccttctccaagagcatatttcaagtgctcttttgctccaagctgcccggtcaaaaagaaggtgcaaagaagtgtggatgatcaatctgttctggttgcaacttatgaaggagagcacaatcatcctcacccttctcaaatggaggtaacaacaggctccaaccgttgtagactcttggttcagtacc

SEQ ID NO: 277778 - DNA, 320 bp, Glycine max
aaaaatcacggggagggatcgaagcccaagaaaatgggtctgccattagtacatgctctgttcttaactctgtttctgctctgcctccaaacaaaagcagaggattttggtgcaacagggaagctcgcaggaacatgcaacttgttcagtggaaaatgggtctatgatgcttcataccctctctatgacccttcaacttgccccttcgtagatccacagttcaattgccaaaagcatggtcgctcagataaactgtaccaaaaatataggtggatgccattttcttgtcccttgccaagttcaaggatgaactttttgga

SEQ ID NO: 277779 - DNA, 320 bp, Glycine max
  unsure (1)..(320): unsure at all n locations
anattaacgaaaaaggagaagaggtgatgtatgactatgaagacaaaatcaatagagctgtgtttcctggactgcaaagtggtcctcacttccactctattactggtttagctgttgcattgaagcaggctacaactccaaactatagagcataccaagagcaggttctccgtaattgctcaaaatttgcacaggcactgagtgagaagggctatgagcttgtttctggtggaatgagaatcatctacttttggtgaatctgaagagcaagggtatgatggctccagagttcagaaggtgttgaatcagttcacattgcc

SEQ ID NO: 277780 - DNA, 313 bp, Glycine max
  unsure (1)..(313): unsure at all n locations
atgcacccaaaaggaagagtggtacagtgacactgtgactgctgttcntgttcctgcttacattgatagtactgaaatagttaggagggcatggaagagatacaatttgagcttaggtctggactgaacaaagttgctgggaaggttttcagaattggacatcttggccacttgaatgagttgcaactgttgggatgtctagctggtgtagagatgatactcaaagatgtgggttatcctgtaaagcttggaagtggagttgctgctgccagtgcatacttacagaacactattccatgatcccttccaggat

SEQ ID NO: 277781 - DNA, 322 bp, Glycine max
  unsure (1)..(322): unsure at all n locations
ggaaaaacaagtagttgagaactaagaagaagggaatggcttcctcaatgatctcctccccagctgtttaccaacgtcaaaccgtggncggtggccggcatggttgctccattcaccggcctcaaatccatgggctggcttccccacgaggaagaccaacaatgacattacctccattgctagcaacggtggaagagtacaatgcatgcaggtgtggccaccaattggcaagaagaagttcgagactctttcctacttgccagacctcgatgatgcccaattggcaaaggaagtcgaataccttcaaggaaaggatggattc

SEQ ID NO: 277782 - DNA, 319 bp, Glycine max
ggccaccacagcagctctatccggaaccatggtgagcacctccttcatgaggaagcaacctatgacgaccaagagcctaaagacattccccaacgctctttttggtctgaaaggtggacgaggtggtcgtgtaacttgcatggcctcgtacaaggtgaagctcataaccccagaaggagaagtggagtttgaatgcccagatgatgttttcattgttgacaaggctgaggaagaaggcattgaacttccctactcgtgcagggctggttcttgcgtttcatgtgttgggaaaattgtgaaagtgacgtggaccatcaga

SEQ ID NO: 277783 - DNA, 320 bp, Glycine max
  unsure (1)..(320): unsure at all n locations
agagagagagggagacacaacacaagggaaggaaaaccaagtggaatcaatagccatgaagatcgttcggaaagacctcgtacccaatggacctggcagcgttaagatggttgcagtggattcggatgatctctggtttgcgtatnacctgatagctcccggagactctgtcatggccgtnactgtcaggaaggttctaaganaagctgctantggcggacgggaagcagaacgcgtcaagctcaaattggaaattaaagtccaagagcttgctgattatgacaaagaaggttctattntactgttcgcggnaagaacat

SEQ ID NO: 277784 - DNA, 318 bp, Glycine max
gacgacggtggtgacgctacccttctcatccacgaaggcgtcaaggccgaggagctctatgagaagaccggcgaactccccgaccccaactccaccgacaacgccgagtttcagatcgtgcttaccatcatcagagatgggttgaagaccgatcccaccaggtaccgcaagatgaaggagcgtctcgttggggtttctgaggaaaccaccactggagttaagaggctctatcagatgcaggcgaatgggactcttctcttccctgctattaatgtcaatgactctgtcaccaagagcgagttgacaattgtatgggtg

SEQ ID NO: 277785 - DNA, 312 bp, Glycine max
  unsure (1)..(312): unsure at all n locations
tgagggtggggagangaaaagaggcgcacgtttatgctgcgtgtgcaaganatcaagagcttcggtgaagaggccgaaaaccctagagcagatatgcagggagtgcttctacgatgcttttgagtctgagatccatcaggtaattcttgagaatcagctcttcagccctggtgaangcgtcgcaatcggcgcttctggcggaaaggattccaccgtccttgcctacgtcctctccaagctcaaccgcctccacaattacggcctccatctcttcctcctctccgtcgacgagggatcaccggctaccgcgac

SEQ ID NO: 277786 - DNA, 314 bp, Glycine max
  unsure (1)..(314): unsure at all n locations
gccttagccttccctacaactccaaacatnaagacatcatcatccatggctgcctccgtctccactgtcggagctgtcaacagagctcttttgaacctgaatggttctggagctggagcttcagctcccagttcagccttctttgggaccagcttgaagaaggttattgcctcaagggtccccaacagcaaggtttccggtggaagcttcaagattgttgctgtagaagagaagaaagagattgaagagacccagcagaccgacaaggacagatggaagggtcttgcctatgatatccagacgaccaacaagac

SEQ ID NO: 277787 - DNA, 316 bp, Glycine max
tctccccttccctgatggccttcttatcaatggacgtggttggaatggaaacaccttcactgttgatcaaggtaagacttatagattcaggatatcaaatgtggggctcacaacatcaatcaacttcagaatccaggggcacagtttgaaacttgtggaggtagaaggatctcataccctccaaaacacctattcttcccttgatgtccatctcggacagtcctattccgtgctggtcacagctgatcaacctgtcaaggattactatatggttgtctctacaagatttaccagacggtacttacaacaacttccg

SEQ ID NO: 277788 - DNA, 312 bp, Glycine max
  unsure (1)..(312): unsure at all n locations
atggcaggtgatacaagagaatagcagcagtgaaatagagcaagtgaaattganctttccttgtctatgtttcccgtgagaaaaagccttctcatccccaccatttcaaagctggggccctcaatgtcctttaccgtgtctctgctgtgataagcaatgcnccatatattctagtgctggattgtgacatgttctgcaatgccccagcttcagcacgccaagcattgtgtnnccaccttgatcccnaganatcantttcacttgcgnntgtncaatttcctcaganatatcacatatnagcnagnatgacat

SEQ ID NO: 277789 - DNA, 316 bp, Glycine max
agataactagaaacagtgtgatgaaaatgaaggtccttgttttcttcgttgctacaattttggtagcatggcaatgccatgcgtacgatatgttccctctccgaatgaacactggctatggtgcccgtactccggaggtgaaatgcgcaagttggaggcttgctgtggaagcacacaacatctttggctttgagaccattcctgaagagtgcgttgaagcaacaaaggaatacatccatggcgaacaatatagatcagactccaaaacagttaaccaacaagcttacttttatgccaggacctcgaagtccatccc

SEQ ID NO: 277790 - DNA, 305 bp, Glycine max
  unsure (1)..(305): unsure at all n locations
ctcccggtcctggacgcacaaaaaagatttttgttggtggtttaccatcaacnntcactgaaagtgattttaagacgtattttgatcagtttggtacaattactgatgttgtagttatgtatgatcataatacacagaggccaagaggtnttggcttcatcacttatgattctgaagaagctgtggatagagttcttacaaaacttttcatgaactcaatggaaagatggttgaggtgaagagggcagttcccaaagaactttcccctggtcccagccgaagcccattgtaggatatactaggtt

SEQ ID NO: 277791 - DNA, 315 bp, Glycine max
ccaggcgcacgttagcacaaactatcatggccacggcaacagcagctgccacctcgtcctttatggggacgcgtcttcctggaggctcactccggagcggggcgagtgcacgcccgattcggcttcggcaagaaaaaggctcccgccccaaagaaagcctccaggggatcgggccgagacaccgacagacccctttggtatccgggcgccaaagcgcccgaatacctcgatgggagtcttgtcggagatacgggttcgatccgtttgggctagggaagcccgcggagtacctgcagttcgagtggatcgctggac

SEQ ID NO: 277792 - DNA, 307 bp, Glycine max
  unsure (1)..(307): unsure at all n locations
ttttggtancatggcaatgccatgcgtacgatatgttccctctccgaatgaanactggctatggtgcccgtactccggaggtgaaatgcgcaagttggaggcttgctgtggaagcacacaacatctttggctttgagaccattcctgaagagtgcgttgaagcnacaaaggaatacatccatggcgaacaatatagatcagactccaaaacagttaaccancaagcttacttttatgccagagacctcgaagtccatcccnaggacacatttgtgttcagtatagatgnaccgtactctctaatatt

SEQ ID NO: 277793 - DNA, 293 bp, Glycine max
  unsure (1)..(293): unsure at all n locations
aatagcacaaagcaaagcttcatccnngagttaaaaaatggcagcagcttcttncatggctctctcatccccatccttggctggcnangncgtgaagctgggcccatcagcnccagaagtgggaagggtgagcatgaggnagaccgtcancaagcaggtctcctcagganngngcatggtacggnccagaccgngtcaagtacttggggccattctctggcgagcncncgtcctantaaccggtgagttcccaggcgactacggctgggacatgtggtttccgcagacccaga

SEQ ID NO: 277794 - DNA, 311 bp, Glycine max
aaataaccaaaacagcagagagaagagaaggtgtagacaaacacaatctctaatggcactcaggatgtgggcttcttccactgccaatgcactcaaagtctcttctacctccagacctcatctcttgcatcctttttctttctccagatgcttgtcttccgtcttggatggacttaagtatgcagattcacacgaatgggtcaagcacgaaggctcagtcgccaccattggtatcactgaccatgcccaggaccatcttggagaggttgtgtatgtggagtgccagaatcaggggcacagttacccagaag

SEQ ID NO: 277795 - DNA, 308 bp, Glycine max
  unsure (1)..(308): unsure at all n locations
tttgcntggactaagttttggtctgtgatccatagctttggtgagagcancggatatggaacgaacggtacgagactttgaaggagcttggttcanggaacttcggagtggcaaggttggccaaagacaaggagacaggagaacttgttgccatcaaatacatagaaaggggaaaaaagattgatgcgaatgttcaaagggagatagttaaccaccgatctttaaggcatccaaatattatcaggttcaaagaggtgnngagtttgtntctatactaaactgttcntgagttgatttttctagatatg

SEQ ID NO: 277796 - DNA, 316 bp, Glycine max
gcagcccaagatgactctggagaagctcttgctgtatggtaacatgcttgtccaagaacaagagaatgtcaagagagtccaattggctgacaagtacttgaacgaggctgctcttggaaatgctaacgaggatgctattcagaggggaactttcttccagtcttgaattggaggcaaagcaaacttggcaagtaaatatttctgttcgtgaaggttgttgtactaatccaagtgctagaagttgtgatggaactgcgtgtaacattcttagcatctcaatgtcttaggtgcaaagagagatgctaagttgagatga

SEQ ID NO: 277797 - DNA, 311 bp, Glycine max
  unsure (1)..(311): unsure at all n locations
gcttttccctttgatatggagtgttcctgaagctttgatcactgctgagatgggtaccatgttccctgaaaacagtggttatgtggtttgggtttcatctgctttgggtcccttttgggggtttcagcaaggttggatgaaatggcttagtggggtgatagacaacgcattataccccgttttatntcttgactatctgaagtcaggaatcccggctttaggtggtgggtttcctagagttgttgcaacatggggtctgactatagttctcacttacttgaactataggggtataccattgtgggatgggt

SEQ ID NO: 277798 - DNA, 311 bp, Glycine max
  unsure (1)..(311): unsure at all n locations
ttttccttctctctggctttcctttgacgcttctgacactgctccttttctttctctccgtgtcctaatggctctccccgactcttcttcctgccgcaactccctgatcccctccttcatctactcctcttcctccaaaacgctccctctacaccacatgntcaantnnnnnnnnnnnnnnnnnnnnnnncagccgccggaaaacctccacgccggatcgcgcggcctcatgattccctctcccagcgagtcacgcaagatcgagatgtactcccctgccttctacgccgcctgaccgtggtggaatcctc

SEQ ID NO: 277799 - DNA, 311 bp, Glycine max
  unsure (1)..(311): unsure at all n locations
cactttcttttttcccgcagtcatggggcaaggtcaagatcggaatcaacggatttggaagaattggccgtttggtggccagggtggctctgcagagagacgatgttgaactcgttgccgttaacgatcctttcattaccaccgattacatgacatacatgtttaaatacgacagtgttcacgggcactggaagcatcacgatgtcaccgttaaggntgagaagacccttctcttcggtgacaagccagtcactgtttttggacacaggaaccctgaagagatcccatggaagngactggagctgacatca

SEQ ID NO: 277800 - DNA, 307 bp, Glycine max
  unsure (1)..(307): unsure at all n locations
gcagaagaacaantagttgagnactaagaaggngangcaaatgggcttcctcaatgatctcttccccagctgttaccactgtcaancgtgccggtgccggcatggttgcnccattcactggcctcaagtccatggctggcttccccaccaggaagaccaacaatgacattacctccattgctagcaacggtggaagagtgcaatgcatgcaggtgtggccaccagttggcaagaagaagttnagactctttcctactgccagaccttgatgatgcacaattggnaaaggtagagatacttcttaggg

SEQ ID NO: 277801 - DNA, 304 bp, Glycine max
  unsure (1)..(304): unsure at all n locations
taggtcctgtgctatcactcacttgccctcatgataaccaagtcatctcttccattaaatttgctagctatggaacaccccttggaacctgtggtaacttctaccacggacgctgcagcagcaacaaggctctttctattgtgcagaaggcctgcattggatcaagcagttgtagtgttngagtatcaagtgagacattcggaaacccttgtagaggagtggcaaaaagtttagcagttgaagctacttgtgcgtagacagacatgtttcttcaataacactcccaatttctgaagatgatccc

SEQ ID NO: 277802 - DNA, 305 bp, Glycine max
  unsure (1)..(305): unsure at all n locations
acaagatcgggaagccccanaccgtcccgtgcaaggntacggggaagtgcggcnccgttaccgttangatggttcccgcgccgagaggttcggggatcgtggnggctanggttcccaagaaggtgctgcanttcgcggggattgatgatgttttcacctcctccagaggatccancaagacnctcggcaacttcgtnaangctacttttgattgcntgatgnaaacctatggattcctgacaccagaattctngaangagatcgcttctccnaatctncattcnnagatacacagatctannggc

SEQ ID NO: 277803 - DNA, 302 bp, Glycine max
  unsure (1)..(302): unsure at all n locations
ccttggctggcaaggccgtgaagctgggcccatcagccccagaagtgggaagggtgagcatgangnagaccgtcaccaagcaggtctcctcaggaagcccatggtacggcccagaccgagtcaagtacttgggcccattctctggcgagcccccgtcctacctaaccggtgagttcccaggcgactacggctgggacactgctgggctttccgcagacncagaaaccttcgccaagaaccgtgaactcgaagtgatccactccaggtgggccatgctcggagccttggtgcgtttcccgntt

SEQ ID NO: 277804 - DNA, 304 bp, Glycine max
  unsure (1)..(304): unsure at all n locations
cttctttccaaatcccaactantactcacactcnctgcaagncntaatcccatggnaaccattgttagcatccaaggcccgcccagatctttgacagtcgtgggcaatccaaccgtcgaggtggattgacatgctccgatggtacttttgctagagtgctgttccaagtggtgcntccactgggattatgaggccctgaattgagagatggaggatctgactaccttggaaagggtgtatcaaaggctgttgacaatgtgaacaccattattgcccctgctttggttggcaaggacccaactca

SEQ ID NO: 277805 - DNA, 282 bp, Glycine max
  unsure (1)..(282): unsure at all n locations
ccgggagggtttttgggtgacgagacactttccatggtgcantcgtcggccgttatcgacagacttccggcctcctccgccacatttgtatgtcttgaatcagcagaagccttggccttgatgccaataacttgaggtacatcactgatcacttccggtacaaattgcaatgagaggngaaagnnnncngcaagatattactcatccaattggagaacttgggctgctgtcaacattcaatttgcttggagacgttacaggcagaggataaaggtcctgtga

SEQ ID NO: 277806 - DNA, 292 bp, Glycine max
  unsure (1)..(292): unsure at all n locations
actaagnnttggtntgtgatttgnagctttggtganagagtggatatggncgnacggtacganacttnnaggagcttggttcagggaacttcggagtggcaaggttggccaaagacaaggagacaggagaacttgttgccatcaaatacatagaaaggggaaaaaagattgatgcgaatgttcaaanggagatagttaaccaccgatctttaaggcatccaaatattatcaggttcaaagaggtgaagagtttgtntctatacttaaactgttctttgagtgtgattttttc

SEQ ID NO: 277807 - DNA, 300 bp, Glycine max
tctctctcaccaaagccttcctagaacgaaaaaaaaaaagaagagcaattttccctcaccaaagaagaagaagcaaacaatggccgatcaacttaccgatgaacagatctccgagttcaaggaagccttcagcttgttcgacaaggacggcgatggttgcatcacaaccaaggagcttggaactgttatgcgttcattggggcaaaacccaactgaggcagagctccaggacatgatcatgaagtggatgctgatgggaatggtaccattgacttccctgagttcctaaatctcatggcc

SEQ ID NO: 277808 - DNA, 300 bp, Glycine max
  unsure (1)..(300): unsure at all n locations
accacattcacctgagctttttgtgaggattccaaagcatggcttcccttgnagcatccactgctgctgcttcccttggcatgtcagaaatgcttggaaaccccatcaacctcagtggtgccacaaggccagctccatctgcctctagccctgcctccttcaagactgtggctcttttctccaaaaagaaggctgcacctccaaaaaaagctgcagctgctgctcctgccaatgatgagcttgccaagtggtatggtcctgacagaaggatcttcttgcctnagggtctcttggaccgat

SEQ ID NO: 277809 - DNA, 298 bp, Glycine max
  unsure (1)..(298): unsure at all n locations
gacagcctatctggncgccatatacatggctgcaccgtttttctcaacgccctttcagccttatgtttatcagagtccgcaagatgcaattataccttttcagattttagggggtgaagctcaagtggttcagataatgttgaagccacaagaaaaaatcatcgcaaagcctggttctatgtgctttatgtctggatccgttgaaatggaaaatgcctaccttccagaaaatgaagtaggcatatggcagtggttatttggcaaaactataactagcattgtacttcgcaattctgga

SEQ ID NO: 277810 - DNA, 293 bp, Glycine max
  unsure (1)..(293): unsure at all n locations
atttctctctgtgtatttccctacctctcccttcaagatgcagatcttcgtcangaccctcaccggcaagaccatcacccttgaggtggaaagctctgacaccatcgacaacgtcaaggccaagatccaggacaaggaaggaatccccccggaccagcaacgtctcattttcgcnggaaagcaacttgaggacggccgtacccttgctgactacaacattcagaaggagagtatcttcacctcgtcctccgtctccgtggtggcatgcagatcttcgttaagacactcaccgg

SEQ ID NO: 277811 - DNA, 288 bp, Glycine max
gtccaaggctgtgatcactggctacaaagatgggttcaaccagattaagtccttggttgatgttggaggtggcattggagggtctctttcggagattgttagggcttatcctcatatcaatgccatcaactttgacttgcctcatgtggttgccactgctcctaagttcgatgggatcacccatgttggaggtgacatgttcgtgtccattcctagtgctgatgctatttacatgaagtggattctgcatgactggagcgacgagcactgcatcaagatcttgaagaa

SEQ ID NO: 277812 - DNA, 238 bp, Glycine max
  unsure (1)..(238): unsure at all n locations
cgagaacagaaatctcgtgtggaacaaaagggtaaaagntcgtttgagctcattttagggacacctgcgttatcttttnnncgatgtgccggcccagtnaaactccncatctgnccaatgtcttccgcccggatcgaccggnngnagccgaccttgggtcnaaaaagangggcagtgcccgacttccgattcacggaataagtaaaataacgttanaagtagtggtatttcactttcg

SEQ ID NO: 277813 - DNA, 298 bp, Glycine max
  unsure (1)..(298): unsure at all n locations
tttgggtgttccacaagattacaaggcatatggntggtttggagttaacacatatacgctgatcaacaaggctgggaaagcagtgtatgtgaaatttcactggaagaccactagtggtataaagtgtctattggaggaagaggccattaaggtgggaggagccaaccacagccatgccactcaagacctcccatgattccattgctgctggtaactatcctgagtggaaactgtttgttcagacaatagatcctgagcacgaagacaaatttgactttgaccctcttgatgttactaa

SEQ ID NO: 277814 - DNA, 287 bp, Glycine max
  unsure (1)..(287): unsure at all n locations
aaagtttcttcctttctctgctctttgtcttctctgacacatttggggccttgttgagtgtgtttttgcaagagggtatggcgaaggacgttgaggttgctgagcgtggctccttctctgggaaggactaccaggaccctccaccagcaccactcattgatgctgaggagctcacaaagtggtccttttacagggctcttattgctgagttcattgccactttgctcttcctctacattactgtgctcacagttatagggtacaagcaccagacggatcatgctgnt

SEQ ID NO: 277815 - DNA, 292 bp, Glycine max
aaaagagcactgaccaaaccattttattttatttttgaatcaagggtgagggccttccatggcttccgcttgtgcttcctctgcaattacagctgttgccatctctacgccgagttccgggcagaagaatggatcaggaggttgttttcttagtggaaggaaattgagggtgaaaaaggagagagcagcaattggaggacgatcgatgggcactacagtgtgcgcagttgctgagcctgacagacctctatggttcccaggcagcacccctcctccatggcttgatggcatc

SEQ ID NO: 277816 - DNA, 295 bp, Glycine max
cctcaagggtccctaacggcaagattttcttctggaagttttcaaaatcgttgccgcggaaaaagagattgatgagaaacaacagacagacaaggacagatggaaaggtcttgcctatgatgtttcagacgaccagcaagacatcacaagagggaagggtttggttgattccctcttccaagctccacaggatactggaactcactatgcaatcatgagctcttatgagtacctagcactggacttaaacagtacaacttggataacaacatggacggtttttacattgctcctg

SEQ ID NO: 277817 - DNA, 280 bp, Glycine max
  unsure (1)..(280): unsure at all n locations
gtgagtttgttgatcgagataactagaaacagtgtgatgaaaatgnaggnccatgttttcttcgntgctacnattttggnagcntngnaatgncangcgnacganangntccctcnccgnatgnacannnggnanggnggccgnaattcggaagtgaaatgcnncangtggaagnntgcngtgggagcncaccacatcttggcttgagacnatctgaagatggttgaacaacaagggatacatcatggcgaacaatatagatcagatccaaaacagttaa

SEQ ID NO: 277818 - DNA, 294 bp, Glycine max
  unsure (1)..(294): unsure at all n locations
cttgatttgaggccaggcaagccccactcaacnaccacacctctcctcgttcacgctacccctttctgctcttcttctaccttcaagttttaaaagtataaagatggcagagacattcctatttacctcagagtcggtgaacgagggacaccctgacaagctctgcgaccaaatctccgatgctgtcctcgacgcttgcctcgagcaggacccagacagcaaagttgcctgcgaaacatgcaccaaaaccaattggtcatggtcttcggagaaatcacgaccaaggccaacgtt

SEQ ID NO: 277819 - DNA, 288 bp, Glycine max
  unsure (1)..(288): unsure at all n locations
atgggagtcttgtcggagactacgggttcgatccgtttgggctagggaagcccgcggagtacctgcagttcgagctggactcgctggaccagaaccttgcgaagaacgtggctggggacatcattggaaccaggaccgagctcgcggacgtgaagtccacgccgtttcagccctacagcgaggtgtttgggctccagangttccgtgagtgcgaactcatccatggaaagtgggccatgctcgccatctcgnagctctcactgttgagtggctcatggtnttacatgg

SEQ ID NO: 277820 - DNA, 289 bp, Glycine max
ctttctctctcccttagtcaaagggactcgttgttcttctcccaggttatttagaaaagcaaaatggtgaagatttgctgcattggtgctggatatgtggggggtcctactatggcagtcattgcacttaagtgcccatccattgaagttgctgttgttgatatctctaaatcccgcattgcagcctggaacagtgaccagcttcctatctatgaacctggccttgatggtgttgtgaagcaatgccgtggcaagaacctcttcttcagcactgatgttgaaaagcatg

SEQ ID NO: 277821 - DNA, 287 bp, Glycine max
  unsure (1)..(287): unsure at all n locations
gacgcaccaaaagacaaactcaggcctatacctattggggtctctgctgacctgcttgttggtcagaangnttatgctattgggaacccgtttggacttgaccacacactcacaactggtgtcatcagtgggcttcggcgagaaattagttctgctgcaactggtcgtccaattcaagatgttatacagacagatgcagcaattaatcctggtaacatgggaggtcctcnctaaganagtctggaaacctcattggggtaatacagccatatattccccatcngggg

SEQ ID NO: 277822 - DNA, 287 bp, Glycine max
  unsure (1)..(287): unsure at all n locations
ctcttcttcncttgcggccagggttttagcgcagnttcttctangattnnggaagatgggtaaggcaaaggntcacatcagtattgtggtcatngccatgtcgactctgggaatccactaaccactggtcacctgatttacaagcttggaggcattgacaagcgtgttattgagaggtttgagaaggaagctgctgagatgancaagangtctntcaagtatgcctnggtgctggacaaacttaaggctgancgtgaaaganggatcaccattgatattgcttgtgg

SEQ ID NO: 277823 - DNA, 296 bp, Glycine max
gttgcttggcgggggataagattaaaagattcaacaatgggcctctgcttctgctactctttctcaagtcatctcctgttcttgacaagtgcgagtgggtcaaaggccagacccttcgccaacctctcgtgagatgtaacccttcctcagcatcagctctcaccatcaaagctgcttcctatgctgacgagctcgtcaaaaccgccaaaacagtggcctcaccggggcgtggtattttggcgatggatgagtcaaatgcaacctgcgggaagcgtttgggcatctattggggtaga

SEQ ID NO: 277824 - DNA, 298 bp, Glycine max
  unsure (1)..(298): unsure at all n locations
aagctatagatttaattgatgaagcaggttctcgagtccgggctttcaacatgcacagtttacctgaagaagcaagagagcttgacaaggaggttagaccagattgtaaaggagaaagaagaatctgttcgcaatcaagactttgagaaggccggagagctaagagataaaganatggatcttaaggcgcagatatntgcccttatagaaaaaggcaaggagatgagtaaggcagaaagtgaggcaggagatgaaggtcccatggtcactgaagttgacatacaacatattgtctcct

SEQ ID NO: 277825 - DNA, 328 bp, Glycine max
  unsure (1)..(328): unsure at all n locations
gncatggccacccacgcggctcttgcttctacaaggatcccttcaaacacaaggttcccatccaaggcctctcactctttcccaacccaatgcgccttaaagagacttgaggtgacagaattctctgggcttagatccacttcatgtgtcacatatgctaacagtgctagtncatcttccttttttgatcttgtagcttcccaactcactcccaagaccaatggatcaactcctgtgaggggagagacagtggccaagttgaaggtggcaatcaatggtttcggacgcattggtagaaattccttcgctgctggcaggccgaaaagat

SEQ ID NO: 277826 - DNA, 326 bp, Glycine max
  unsure (1)..(326): unsure at all n locations
acaaaacccgcgttcnactcacacaccattanccgaacancatcaccgtcattcgccactctctgacacagacatgaccgaagaaggggttgttgtctcgttgcaggaatggcagggttggggcaccacctccccactccccaccatggtttcccaaatcgttgaggatttgaaggttctggaagaagatttggatgcccacatgaattttggaggcaatggtggaaaattacaggggaattttagagtacaagaagataagaagcaccgtgccacgtatcaggcttgggtgattcagaaaagaagctccagttttattcggctag

SEQ ID NO: 277827 - DNA, 317 bp, Glycine max
  unsure (1)..(317): unsure at all n locations
ctgcgatcngtgttgtggcaattntncttggttttcngtatgtgtatggcggatccatctttggttctcagaatagtggttcanctgctcttgaatatggcagatcattgaaaagacttggctcgtcatatttgggtgnagaggatgacactgatggcaagcaagatgaatcttcatcaagtttcagacagggagatggggaggataatattgttcctaagagtttccctgtntgtgatgatcgtcattcagagttgattccctgcttagatagacaccttatctatcaaatgaggatgaagctggacctgtctgtg

SEQ ID NO: 277828 - DNA, 323 bp, Glycine max
  unsure (1)..(323): unsure at all n locations
agngagagagggagacacaacacaagggaaggaaaaccaagtggaatcaatagccatgaagatcgttccggaaagacctcgtacccaatggacctggcagcgttaagatggttgcagtggattcggatgatctctggtttgcgtataacctgatagctcccggagactctgtcatggccgttactgtcaggaaggttctaagagaagctgctagtggcggacgggaagcagaacgcgtcaagctcaaattggaaattaaagtccaagagcttgctgattatgacaaagaaggttctattttacgtgttcgcggaaagaacatt

SEQ ID NO: 277829 - DNA, 315 bp, Glycine max
  unsure (1)..(315): unsure at all n locations
gcttttgactgggncttcacnantagtcatgtanatcangtacttcatcgngatatcnnaggctcaaatcntcttatagacaatgaaggnaatcttaagcttgcagatcttggactgtcacgatcattttctaatgaccanaatgcnaatcntactaatcgtgtcattacgttatggtacagaccacctgagttgntgntaggnacaacaaagtatgggccagctgtggatatgtngtctgttgggtgcatttttgctgagcttcttcaagggaagcctatattgcctggaaaagatganccngaacaattaant

SEQ ID NO: 277830 - DNA, 310 bp, Glycine max
atgatgcctggttgaatggggaattcattactactgttcaacaacgtggcgctgcaattatcaaagctagaaagctttcaagtgcactatcagctgctagtgctgcttgtgaccatattagagactgggttcttggaactcctcagggcacttgggtatcaatgggagtatattctgatggttcctacaatgttccagctggacttatatattcattccccgtcacttgtgccaatggggaatgggcaatagttcaaggactttccattgatgagttctcaaggaagaagttggattgactgcagaagag

SEQ ID NO: 277831 - DNA, 310 bp, Glycine max
  unsure (1)..(310): unsure at all n locations
cctacacnccaacaagtagtgtggacgaagtagggttcttcgatcttgccataaaggtttactttcaaaggcgtgcaccccaagttcccaaagggaggactcatgtctcagcatttggactccctctccattgggtctgtgttggacgtgaaaggcccattgggccacatagagtacaccggaagaggcaacttcttggttcatggaaagcaaagattcgcaaagaggctagccatgttggctggtggaatgggatcacacccatttaccaagtggcacaagcgatctgaaggacccagaggaccccaca

SEQ ID NO: 277832 - DNA, 320 bp, Glycine max
  unsure (1)..(320): unsure at all n locations
cacgcgccgtcctcatggatctagannccnncaccatggaactccgtcagatccggcccctacggccagatcttccgccccgnacaacttcgtcttcggccagtccggcgccggaaacaactgggccaaaggtcactacaccgaaggcgctgagctcattgactccgttctcgacgncgttcgcaaagaagccgagaattgcgactgcttgcaagggtttcaagtgtgccatnctcttggtggaggaacgggttctggcatggggacgcttctgatctncaagatcgggangagtatccggatcggntgangttgacttt

SEQ ID NO: 277833 - DNA, 316 bp, Glycine max
  unsure (1)..(316): unsure at all n locations
ctntggggtttctctcttcaaactagggttttacagnatataagcnctctctatctttggttttcgtcattcaaatccaatccaatatcaaatatgagtcgtcatcccgaggttaagtgggctcagagacttgncaaggtctatatcacggtgcaattggctgattcaaaaaatgccaaggtggatcttacaccagatggtatttttaccttctctggtagtgctggtgctgaagaccatcagtatgagctaaaactggagctctttgacaaggttaatgtagaggagagcaaaattnatgtaggagtgcgaacat

SEQ ID NO: 277834 - DNA, 309 bp, Glycine max
  unsure (1)..(309): unsure at all n locations
ctgggcaatcaanaggctatggctttgttcaatttgataatgaggaatctgcccaaaaagctatagagaagctgaatggtatgctgttgaatgataaacaagtgtaccgtnggaaccttccttcgcaagcnagagagcgaaagtgctgctgacaaggcaaaattcaacaatgtttttgtgaagaatctatcagaatcaaccaccgatgatgagttgaagaacactttggtgaattggaactattactagtgctgtagtaatgagggntggggntgggaaatccaagtgttttggattgtgnattttgag

SEQ ID NO: 277835 - DNA, 308 bp, Glycine max
  unsure (1)..(308): unsure at all n locations
gggtgagggccttccatgggcttccgcttgtgcttcctctgcaattacagctgttgccatctcngacgccgagttccgggcagaagaatggatcaggaggttgttttcttagtggaaggaaattgagggtgaaaaaggagagagcagcaattggaggacgatcgatgggcactacagtgtgcgcagttgctgagcctgacagacctctatggttcccaggcagcacccctcctccatggcttgatggcatctacctggagattcggctttgaccctcttggtcttggatctgacccggagatctgaga

SEQ ID NO: 277836 - DNA, 308 bp, Glycine max
  unsure (1)..(308): unsure at all n locations
gggctgagcgtgcaaagagggctctcagcagccagcaccaggtccgcgtggaaattgaatcactttttgatggtgttgatttttctgagccactcacccgagctcgttttgaggagttgaacaanngatttgttccggaagaccatggggccagtgaagaaggctatggaagatgcaggattacagaagagtcagattgatgagattgttcttgttggtggaagcacaaggattccaaaggtacaacagcttttgaaggactactttgatggaaaggagccaaacaagggtgtcaaccctgatgaagc

SEQ ID NO: 277837 - DNA, 310 bp, Glycine max
  unsure (1)..(310): unsure at all n locations
gtatagagtganagaatgggtgagaaaagcaagattttgatcataggaggcaccggctacatcgggcaaacatatagtggaagcaagcgcaaaggctggaaatcccacttttgctttggtgagggaatccacactctctgacccctccaaggcacaactcatccacaattttgaggctttgggcgttaatttggtccgcggggatctgtacgatcatgagaagttggtgaaagctatcaagcaagtagatgtcgtcatatccacgctgggtcacctgcagcttgccgatcagctcaagatcatcgctgcc

SEQ ID NO: 277838 - DNA, 311 bp, Glycine max
  unsure (1)..(311): unsure at all n locations
ctncactgccgaaggtggctgaatctttcaaatcaaaataccgtgaagcttgctgagcaacataaacaacagggtgtaagctttttggtgggagatgttgagtctagtcaaggtgctttccagtattttggactgcaagaagaacaagtacctctaattatcattcaacacaatgacgggaancagttttttaaacccaatttggaagctgatcacattccaacttggttgaaggcgtacaaggatggtaatgttgcaccattgtgaagtctgaacccattcctgaagctaacgatgaacctgttaaagtg

SEQ ID NO: 277839 - DNA, 301 bp, Glycine max
  unsure (1)..(301): unsure at all n locations
tgaacaggctgtgaaggccatcaaggcagngaggaaggaagaacagttgaggagtatgattacctnccatacttctattcccgttcatttgatctgtcttggcaattctatggcgacaatgtcggcgacacagtatttcggagacaacaatcctgcgtcgtcaaagcctaagnctgggacatactggattaaagatgggaaagttgttggggtcttctggaagtggaactcctgaagagaaccaggctattgctaaagttgctaaggtccagcctccggttgcagatgtagatcacttgct

SEQ ID NO: 277840 - DNA, 307 bp, Glycine max
  unsure (1)..(307): unsure at all n locations
tctcactntcattnctacatcccgggntctgngccgtcgatgacgatggcggttagggtgcgaaatcctgacctncngcnttctcattcttctctctctcttgnccatnancttccgccaaggtcttcttcgaggngcttttacgatganggatggggaaatcgttgggttaaatcagattggnaaanngatgagaacctgnctggggagtgganccacacctctggccaatggaatngagacnctaacgncaaaggtattcacaccagtgaggattacagattctacgctatttcagcncantacc

SEQ ID NO: 277841 - DNA, 302 bp, Glycine max
  unsure (1)..(302): unsure at all n locations
ccaaggtcttctacctcaagatgnagggagactaccacaggtacctcgccgagttcaagaccggcgctgaccgcaaggnggccgccgagagcacgctctccgcctacaaagccgctcaggacattgctaataccgagttgcctccaactncaccctatcaggctgggtcttgctctgaacttctccgtgttttactatgagattcttaactctcctgatcgggcttgcagccttgcaaaacaggcttttgatgaggctattgctgaattggatacattgggagaggatcatacaaggatagc

SEQ ID NO: 277842 - DNA, 310 bp, Glycine max
  unsure (1)..(310): unsure at all n locations
acttggcatcgctttctcctctctcccaagaaagaatcatcaatggcgattgaacacgaagacgattctcaaagacgagaagaaccctcgacctnctcgacgaggatgacatcgccctcctcaagacctacggtttgggaccttactccacaagcataaaaaaggccggagnnggaaatcaaagatatggccaagaaagtgaatgactatgtggtataaaggagtctgatactggtttanctgcaccaagccatgggatcttgtttctgataagcaaatggtgccggaggagcaactcttcagtggcaag

SEQ ID NO: 277843 - DNA, 291 bp, Glycine max
  unsure (1)..(291): unsure at all n locations
gcagcgtcactacaagcagcagctactttcatgncaacccaccaagnggagcaggagcaacactttgcagcaaaagtctactcagtcnatttccaaggcttttggtttggaacctgttggagctaaaaaggtcacatgctcccttcaggctgatctaaggacttggctcacaagtgtgttgatgctaccaaaattgcaggattcgcccttgccacctctgccctcgttgtctctggggcaagtgctgaaggtgtgccaaagaggctaacctcgacgaaatccagagnanga

SEQ ID NO: 277844 - DNA, 302 bp, Glycine max
  unsure (1)..(302): unsure at all n locations
acccagttcgcgttctcgtcactggagccgcagggcaaattggatatgctcttgtccctatgattgctaggggagtgatgctgggtctgaccagcccgtgatcctccacatgcttgacattcnnnccagcagcagagtcncngaatggggttaaaatgaattggtggatgctgcattccctcttcttaaaggtgttgttgctacaaccgatgtggttgaggcatgcactggggtcaatattgcagtgatggttggtggattccctagaaaagaaggtatggagaggaaggatgtgatgacta

SEQ ID NO: 277845 - DNA, 296 bp, Glycine max
  unsure (1)..(296): unsure at all n locations
caagagcctgcgcaactccaagaatgcggtaaagttccacgactacgccttgcacntcaagaagcacgccgagaaggggaagcttccgaactacgtggtggtggagcagaggtacttcgatgtggaggtttttccggcgaacgatgaccacccctgcatgacgtggcggccgggcagatgttcgtgaaggaggtgtacgaggttttgaggaagagttcgcagtgggaggagatggcggtgctgattacttacgatgagcatggtgggttttatgatcatgtggcgacgccggtaga

SEQ ID NO: 277846 - DNA, 297 bp, Glycine max
tacaaaggttgctgtaggagataagatattgaagtagtgctaagtgcctaacacctgcagtgaacaatggcctctgcatcagcatctcttctcaagtcttcacttgttcttgacaagtctgagtgggtgaagggacaaacacttcgccaacctttgctgcatcagttgtgagatgcaaccccaccaccccatcaggcctcaccatcagagctggttcctatgctgatgagctcgttaagaccgcgaaaacagtggcttcaccagggaggggtattttggccatggatgagtccaatg

SEQ ID NO: 277847 - DNA, 300 bp, Glycine max
  unsure (1)..(300): unsure at all n locations
ttctgataaagtttacagtgatcagggagtgcctgcntcttttcgagttccttctggggcagttttaccatttggatccatggaattggagctagagaagagcaattcgactgaagcattcaggtctatcctggaaaagatagaaacagccaagctgagggtggtgaacttgatgttctatgccatcaactccaggaattaatttcttccctgaagccatcaaaagacataattcaaagcattgggagaatattcccaagcaatgcacgtttaattgttcgatccagtgccaatgttgag

SEQ ID NO: 277848 - DNA, 302 bp, Glycine max
  unsure (1)..(302): unsure at all n locations
gaaggttattgcctcaagggtccccaacagcaaggtttncggtggaagcttcaagattgttgctgtagaagagaagaaanagattgaagagacccagcagaccgacaaggacagatggaagggtcttgcctatgatatctcagacgaccaacaagaatcacaagaggaaagggtttggttgactcccttttccaagctccacaggatgctggaacnncactatgcagtcatgagctcctacgagtncctcagcactggacttcgccagtncttggacaacaaaatggatggattctacattg

SEQ ID NO: 277849 - DNA, 298 bp, Glycine max
ctctcccttagtcaaagggattcatcgttcttcttcccaggttatttagaaaagcaaaatggtgaagatttgctgcattggtgctggatatgtggggggtcctactatggcagtcattgcacttaagtgcccatccattgaagtcgctgttgttgtatctctaaatcccgcattgcagcctggaacagcgaccagcttcctatctatgaacctggccttgatggtgttgtgaagcaatgccgtggcaagaacctcttcttcagcactgatgttgaaaagcatgtctttgaggctgaca

SEQ ID NO: 277850 - DNA, 287 bp, Glycine max
  unsure (1)..(287): unsure at all n locations
gtnaccatggcatccaccactctatcccctacnacaccttctnngctatgctcangaaagngtgggattttcagtccctcacaggcactntcttgtgangccagtgaagaggcagatgatggggaagagcaagggaatgagaattnatgccaagccaccagcattcctggtgatagagtccctgacatgggcaaaagacagctcatgantctgcttcttcttggtgncatttcanncccctctgctggnatgcttattccctacacctacttttttgtccctccagt

SEQ ID NO: 277851 - DNA, 300 bp, Glycine max
  unsure (1)..(300): unsure at all n locations
atcctgctcataacttcttcatcacatctgcacacggnctgtgattcaacaagctcgcacgatggaccgtcaccttctctccctcgttccaaattttccccagccagcatgtccattttcagcgtgctaaccatgatgtcaggagttgttctatatgacgcctctttgttccctttgcgcgcagattcacagggaacccttctggaatcacatgtttgcaaagaatgggaataggcttcataatcaatatcatagccactgtgattgctggcctaatggaaatgaaaaggaaatctgttg

SEQ ID NO: 277852 - DNA, 297 bp, Glycine max
  unsure (1)..(297): unsure at all n locations
ctcaaatggctttgggtatgaaggagactggggtnctcatccagctgagatcgaacctagtggaattgaactttttgagtaccatgatgatgacgaaccctctgaagatgtcgacataagcatcaagggcaagaggaaagatgatggtggcattttttgagactaagaattgctgataaagaaggtcgcatccgaaatatttatttcccatttgacatagagctggacacggcaataagtgtggcaactgaaatggttgcagagctggacatgactgatcaggatgttaccagaata

SEQ ID NO: 277853 - DNA, 297 bp, Glycine max
  unsure (1)..(297): unsure at all n locations
gccgattcaacctcaagcgattcactctcactcgacatggattcnttttctccttcacctcaggaacatatcatcagancacgtcatggttctgtatctgttgctgtatatggagaccaggataagccagctctaatcacatatccggatttgntttaaattatgtctcctgctttcaggggttattattttgtcccgaggcatattaccttctgctccacaatttctgcatttatcatattagtccacctgggcatgagttgggagctgctgcaatcgatcaagatcacccaattc

SEQ ID NO: 277854 - DNA, 295 bp, Glycine max
  unsure (1)..(295): unsure at all n locations
cggctgagaccagcttctganccttctttgcgacgcggcggcgaacaccgcgatgtggaggagaggatccgaaaggcggcggatggagatccggtgcaccggaagatatttgtccacggattgggctgggacactaccgccggaaccctaatagcgcgttccggcagtacggagagatcgaggactgcaaggccgtcaccgacaaggtctccggcaagtccaagggctacggcttcatcctcttcaagacgcgccgcggcgccaaaacgcgctcaaggagccgcagaagaagatc

SEQ ID NO: 277855 - DNA, 291 bp, Glycine max
  unsure (1)..(291): unsure at all n locations
gtgngatacaattgaggatgcatcanantcanacancacancaatgnncacanncatcnctancaaacaagctgtaattggattatggagtggcattgcttggactngtagggatnactgtgttcattgctgtgttgtctgaatatgtgtngananaattnaggatncatcagattcntngggtntgtctgtnagctttctcagcanaatcttgctaccaatagttggnaatncagctgaacatgcaggancaatcatatttgctttcaagaacaagctggacntttcatt

SEQ ID NO: 277856 - DNA, 299 bp, Glycine max
  unsure (1)..(299): unsure at all n locations
ggctaacggtaacggtaacagcggggtgaaggaggtgcattttcgtggagtgagaaagaggccgtgggggagatacgccgcggagatcagagatcccggcaagaagagccgcgtctggctcggnaccttcgacanggcggaggaggcagcgcgtcctacgacgccgcagcacgagagtttcgcggccctaaggccaagacaaacttccctctccctttggaaaatgttaagaactcgagccccagccagagcagcaccgtcgagtcctccagccgcgaccgcgacgtcgccgccgattc

SEQ ID NO: 277857 - DNA, 294 bp, Glycine max
  unsure (1)..(294): unsure at all n locations
caatggcatccacacaatgcttctncacnccaccatgccctcaccactccaaccanagccncatcacagcgcttagttgtgagcaccaaaccaaaccacattgtttgcaaggcacaaaagcaggttgtccaagagggtgaggacactactaacttgtctctcgcaggttggccctcactgttctcattggtgctgctgctgttggctctaaggttgcacctgctgatgctgcctatggagaagctgccaatgtgtttggaaagccaaagacaaacactgacttccttccataca

SEQ ID NO: 277858 - DNA, 291 bp, Glycine max
  unsure (1)..(291): unsure at all n locations
agctggtggcgccggcnacagtgggggcggacggggagtttatggtgggggctgcggtggggacganggaggacgataaggagaggttggagcatttggtgaangctgggttgaatgttgtggtgttggatagttctcaagggaactcaattatcagttggagatggtgaagtatgtgnagacggtgtaccctgagcttgatgtgattggggggaatgttgtgactatgtaccaggctgagaatctgattcaggctggggttgatgggttgagggttggaatggggtctgg

SEQ ID NO: 277859 - DNA, 298 bp, Glycine max
  unsure (1)..(298): unsure at all n locations
tgcaattgaagttgaagtcttgcccttctctcttcaactccaaacacaagacatcatncatccatggctgcctccgtctccactgtcggagctgtcaacagagctcttttgaacctgaatgggtctggacctggggtttcagctcccagttcancttctttgggagcagcttgaagaaggttattggctcaagggtccccaacacaaagatttcctctggaagcttcaagattgttgctgtagaagagaagaaagagattgaagagacccagcagaccgacaaggacagatggaaggg

SEQ ID NO: 277860 - DNA, 294 bp, Glycine max
gtttccctttcattttccctcactttctcgctcgccaaacgcccctctctctccttcaatggccgaccagctcaccgacgaccagatcgccgagttcaaggaggccttcagcctcttcgacaaggacggcgatggttgtattactactaaggacttgggactgtgatgcggtcactagggcaaaacccaactgaggcagaactgcaggatatgattaatgaggttgatgctgatggcaatggaaccatcgacttcccagagttcctcaacctgatggctcgcaagatgaaagac

SEQ ID NO: 277861 - DNA, 283 bp, Glycine max
  unsure (1)..(283): unsure at all n locations
gctcttcgagcctaggcctccgttggagtacaagccgcctccggacgaaacgnanntgtccaccgttatcagggatngctcaatttgtgagcnagtttgcccagcctggcgatccagaatatgctccacctgtcccagaaacgagactcctgcacaanaaagagcnagantacacaagctaaggctagagaaaggagctgcaaaggctgctgaggagcttgagaaatatgatccacataatgacccaanctgtcgggagatccatacaagacttgttngtggc

SEQ ID NO: 277862 - DNA, 293 bp, Glycine max
gggaacgggagtgtttgtggatggccctggggctggcaaacacatccaagcaggtgctaagaaggttatcatcactgctccagcaaagggtgctgatattccaacttatgttgtcggagtaaatgaaggggactacactcatgagatctcaacattataagcaacgcttcctgcaccacaaactgtcttgctccctttgtgaagatcctggatgcagagtttggaattgtgaagggaaccatgacaaccacgcattcctacactggagaccagaggcttttggatgcttcaca

SEQ ID NO: 277863 - DNA, 292 bp, Glycine max
  unsure (1)..(292): unsure at all n locations
aacctaggaagttggaagtcatggcagcaacattgatggcancaacaacaagttctggtactcttaaagcaactccttttccttggccaaggcaagggtnccaatgccaatgctcttagggatgttgtctccatgggaactgggaagtaaccatgggcaatgatttgtggtatggaccagacagagtgaaatacttgggacccttctcagctcagaccccttcatacttgaaaggagaattccctggggattatggatgggacactgctggcttatctgctgacccagaanc

SEQ ID NO: 277864 - DNA, 293 bp, Glycine max
atcctaagagcagacacaagggaaagcttgagacagagagtttgctacaagcaaggggtgttaattggacatctataaggccagtctacatctatggacccttgaactacaaccctgttgaagagtggttcttccatagattgaaagcggacgcccaattcctatccccggctcaggaatacagataacccaacttggtcatgttaaggatttggcaaaagcttttatccaggttcttggtaatgagaaggccagcaaggaagtattcaacatctcgggagataagtatgtca

SEQ ID NO: 277865 - DNA, 249 bp, Glycine max
  unsure (1)..(249): unsure at all n locations
ttcgcaaaccctaatttcggaaagatcggcgatggctgcctccaaggatcgcgagaacttcgtctanatcgccaagctcgccgaacaggccgagcgatacgaaganatggggnatcaatgaagaacgttgcgaatctcgacgttgaactgactgtggaggagcggaatttactttctgttgggtacaagaatgtgattggtgctcggagacatcgtggaggatcctgtcttccatgagcaaaaggaaga

SEQ ID NO: 277866 - DNA, 261 bp, Glycine max
  unsure (1)..(261): unsure at all n locations
angtcatntttgccatctgaaacaccacngangagtgaagaggtnangagaagaggagctaganacagttacgtggcaatgggcaaggtgaacgcaagagctttgagagaatatacgattagatgtgtacaatgatcttggagatcctgatagcagcgacgactcaagagacccgttcttggtggcaatcaacatccatacccaaggcgttgnagaacaggaaggcctcgttgcgacaaagatccttatcggagaaaagaa

SEQ ID NO: 277867 - DNA, 294 bp, Glycine max
  unsure (1)..(294): unsure at all n locations
tcttaacatgcacaatgaggcggttcgagctcttcgttttccaccaaacacacacaaagagaaggaangtgctgaaaagagaagagagagacaacagcaagagcaagagctggctaagcatattgcagaggaggatgacgatgatttttganattgtcttatttcaccctatgaattgctatgaggataccttcgtttccaacctttgctcatcttttccttttgaagaatttccattattatttccttttcaaaaggtgaatttttcatttctaagtggaagatctctgaaag

SEQ ID NO: 277868 - DNA, 287 bp, Glycine max
  unsure (1)..(287): unsure at all n locations
gttttgcactctggtgnaagttcaatacatgctnngaaatnggagagcaagtcntgttncttgggctaatgatgcaggagngaaggtttatgatantgccnatgaccagcgtattacatttattnnaaaaccacgaggnagcccagccctgagcttttgcttcctcaccnggtttngctcgatgacaccctcttgnttattggctggggaacatctgtccnaaattgcttcaattagnacaaatcaccanaaagcagccaatgggtcattcaggcaattcctttgtc

SEQ ID NO: 277869 - DNA, 289 bp, Glycine max
  unsure (1)..(289): unsure at all n locations
gcagaagaacaagtagttgagaactaagaaggagaagcaaatggcttcctcaatgatctcttccccagctgttaccactgtcaaccgtgccggtgccggcatggttgctccattcactggcctcaagtccatggctggcttccccacaggaagaccaacaatgacattacctccattgctagcaacggtggaagagtgcaatgcatgcaggtgtggccaccagttggcaagaagaagtttgagactcnttcctacctgccagaccttgatgatgcacaattggcaaagg

SEQ ID NO: 277870 - DNA, 294 bp, Glycine max
  unsure (1)..(294): unsure at all n locations
tagaactatccatacatagccacttcncactcactcactcttgttgccttcatggccaagccagtgtccattgaggtatggaacccaagtggcaaatacagagttgtcagcaccaaaccaatgcctggaactcgttggatcaatcttctcattcaaaatgatgttcgccttgaaatatgtaccgagaagaaaacgattttgtcagttgaagacatcattgctttgattggtgataagtgcgatggagttattggacagttgactgaagactggggagaagagttgttctctgct

SEQ ID NO: 277871 - DNA, 248 bp, Glycine max
  unsure (1)..(248): unsure at all n locations
accaccctgtgatngcagactcaacactctcgctagacacttccttccgcaaatngcttctcangacagcatctccgcttctncaacctccgcntctgattccgtcttcaatcacctcgtnngnnctcncnaanatcctatnctcggggtaactnnagcttataacaaagatccaagtncagttaagctcaacttgggagttggtgcttaccgaactgaggaaggaaaacctcttgttttgaatgtag

SEQ ID NO: 277872 - DNA, 292 bp, Glycine max
  unsure (1)..(292): unsure at all n locations
agaacagggactcactctggcagcggcactctcggtggctataatctttctgtggtgagttgtcaagatgtacacatcaaggaagaaaatccacaaggataaggatgctgagccaactgaatttgaggaatcagtcggacaggcattgtttgatctggncaataccaacaatgagctgaaaagtgatctgaaagatttatacataaactcagctgtccaaattgatgtttctgggaaccgcaaggctgtggttatccatgtcccctacagattaaggaaaggattccggaag

SEQ ID NO: 277873 - DNA, 184 bp, Glycine max
gcacaggctctgggaaatcggtattttgactttgataaactagcagagattactgcactggtcacaacaaacctgaacaaagtaattgatgttaattactacccagttgaaaatgcaaaacggtcaaacttacggcacagaccaattggtataggagtacagggtcttgtctgatacttcatac

SEQ ID NO: 277874 - DNA, 284 bp, Glycine max
gcgacgtgtgcggcgtatcgtgcacgggtgaaggcgaggccatcatacgtggcacgctggcgcgtgaggtggcagcggtgatggaatacaaaggcttgaagcttcaagaagccgtggattttgtgatcaagcaccgtctcgatgaagggatggctggtctcattgctgtgtccaacgctggggaagtggcttatggtttcaattgcaatggcatgtttaggggctgtgccactgaaaatggcttcatggaggtcggaatctgggaatagcttcattattttcct

SEQ ID NO: 277875 - DNA, 285 bp, Glycine max
  unsure (1)..(285): unsure at all n locations
gccgattcaacctcaagcgattcactctcactcgacatcgattccttttctccttcacctcaggaacatatcatcagaacacgtcatggttctgtatctgttgctgtatatggagaccaggataagccagctctaatcacatatccggatttggctttaaattatgtctcctgctttcaggggttattattttgtcccgaggcatattaccttctgctccacaatttctgcatttatcatattagtccacctgggcatgagttgggagncgctgcaatcgatcaa

SEQ ID NO: 277876 - DNA, 284 bp, Glycine max
gttctttcgcctttggttccggttcgtgaggtgaatttcctacggttttgcaagcagcacgcagaagggttgtgggctgtggtggatgtgtccatagatagcatcagagaaagttcaggagcacccacttttgtgaacggtaggaggcttccttctggttgcgtggtgcaagatatgcccaatggttattccaaggtgacatgggtggagcatgcagaatacgaagaaagccaagttcaccagctctataggcctttgttgagctcaggcatggggtttggtgc

SEQ ID NO: 277877 - DNA, 281 bp, Glycine max
  unsure (1)..(281): unsure at all n locations
cgatcaccatgttgcgacaaggtaggtttaaagaaaggaccatggactcctgaggaagatcagaagctcttagcttatattgaagaacatggccatggaagctggcgtgccttgccancaaaagctggacttcagaggtgtggcaagagttgcagactaagatggaccaattatctcaggcctgacattaagaggggaaagttcagtttgcaagaagaacaaaccatcattcaactccatgccctcttaggaaacaggtggtcggcaatagccacacactt

SEQ ID NO: 277878 - DNA, 284 bp, Glycine max
  unsure (1)..(284): unsure at all n locations
agcctctactatactgcttcaccttctgctctaganaattcagtgcntccaacatggcttcggctactctctctgtagccaaaccagcccttcaggcaaatgggaaaggcttctctgaattctctggcctccgaagctcatcaggcttccttcccttttctagaaaatcttcagaggatttccattctgtcattgccttccagacctatgcagttggaagcagtggaggatatcagaagggtgtgacagaagcaaaactgaaggttgccatncagggtttggaa

SEQ ID NO: 277879 - DNA, 291 bp, Glycine max
  unsure (1)..(291): unsure at all n locations
gaacagggactcactctggcagcggcacncctcggtggctataatctttctgtggtgagttgtcaagatgtacacntcaaggaagaaaatccacaaggataaggatnctgagccnactgaatttgaggaatcagtcggacaggcattgtttgatctggncaataccaacaatgagctgaaaagtgatctgaaagatttatacataaactcagctgtccaaattgatgtttctgggaaccgcaaggctgtggttatccatgtcccctacagattaaggaaaggattccggaa

SEQ ID NO: 277880 - DNA, 292 bp, Glycine max
  unsure (1)..(292): unsure at all n locations
attttagaagaataccccctcttttgctgcatcagaggagttgtaaattaagagcatggctgcacaagctcttgtatcatcatcttctcttaccttctcagcggaggctgcaagacaaagtcttggaccaagatcactccaatctccatttggcttctccagaaaagcctcctttcttgtcaaggcagctgctaccccccctgtcagncaaggntcagacagacctttgtggtttgcatcaaagcaaagtctttcttacttggatggcagccttccgggtgactatggattt

SEQ ID NO: 277881 - DNA, 283 bp, Glycine max
  unsure (1)..(283): unsure at all n locations
atggantctacattgctccagcttttatggncaagcttgtngtncncatnttccaagaacttcatgaccctgcccaacatcaaggtncctctcatncttggtatctggggaggcaagggannangaaaatctttccaatgtgancttgtctttgccaagatgggaatcaaccccatcatgatgagtgctggagagttggaaantggaaatgcagganagccagcaaaactgntcaagcagagataccgtgaagctgcagacatgatcaagnatggaaagatgt

SEQ ID NO: 277882 - DNA, 279 bp, Glycine max
aattagcacactgattaacccctagtgtatgatagttcaattcacgcttacttgccgcatgatcgactgtggatcaagcaacgaacattccaacatttgaagaaattagcacactgattaacccctaaactattggcaatttaatgtaaagaaaatcgcaaaggctcgacctttctgttatgtgggctatgctccgttggctacgtaatatgaatactgcaaatgctggcacgtaattataatatcaacagctggtactgctttagtttcataaacaaa

SEQ ID NO: 277883 - DNA, 278 bp, Glycine max
ggaggaagaagaaggactattaaagaaattgaagagtaacgaggtgtttgagcaagaagaaggcgtaatcgcgctgagaaagatcacgaggaacaaagaggatgctagggtttcgctctgcacgccgcgggtgttactagcgctgcgtggtttgatcgcctcgcgatacggcgttgtccaggtcaacgcggtggcgtctctggtcaacctttcgctagagaagcagaacaaggtgaagattgttaggtcagggtttgttccgttcttgattgatgttt

SEQ ID NO: 277884 - DNA, 276 bp, Glycine max
aattagcacactgattaacccctagtgtatgatagttcaattcacgcttacttgccgcatgatcgactgtggatcaagcaacgaacattccaacatttgaagaaattagcacactgattaacccctaaactattggcaatttaatgtaaagaaaatcgcaaaggctcgacctttctgttatgtgggctatgctccgttggctacgtaatatgaatactgcaaatgctggcacgtaattataatatcaacagctggtactgctttagtttcataaac

SEQ ID NO: 277885 - DNA, 279 bp, Glycine max
  unsure (1)..(279): unsure at all n locations
gtttctattcctcactaggagctccttcnccactggttcttcatctgcatgcacacagttgcatagttttggaaaccaagaattcctgaagaagggtagcatcaacaagcagttctgaaaatggagatcaccaatgtcagtgagtatgaggctattgcaaagcagaagttgccaaagatggcgtttgactactacgcatctggtgcagaggaccagtggactctgcaagagaacagaaatgccttttccagaattttgtttcggccagtattcttattg

SEQ ID NO: 277886 - DNA, 285 bp, Glycine max
  unsure (1)..(285): unsure at all n locations
aaatacctgaagccatctgttgctggttttcttttgcaaaaggaacttgattaccttgttggggcagtatcaaaccccaaaaggccatttgctgccattgttggtggttccaaagtctcatctaaaattggagtgattgagtcacttttagaaaaagttgacatccttcttcttggtggaggaatgatcttcacattttanaaggcacaaggtctttcagtgggttcatcccttgtagaagaagataagttggatcttgctacatcactacttgcaaaagccaag

SEQ ID NO: 277887 - DNA, 277 bp, Glycine max
ggaatttggatagtattagcttttcagattggtttttatccaaaggtggcacacgcatgagtattacaaaaatgtgggatccagttgcctatgcccttgggtttatcgactgtgataatatcagtgctcgctgcatgctcaccatatttgcattgtttgccacaaagaccgaggcttcccttttgcgaatgctgaagggttcaccggatgtttatctgagtggccccatccgaaagtacatcatggacagagggggcaggttccatcttaggtgggg

SEQ ID NO: 277888 - DNA, 274 bp, Glycine max
ggtcattggccatgttgactctgggaagtcaaccaccactggccacttgatttacaagcttggaggtattgacaagcgtgttattgagaggtttgagaaagaagctgctgagatgaacaagaggtcattcaaatacgcctgggtgcttgacaagcttaaggctgagcgtgagagaggaattaccattgatattgcattatggaagtttgagaccaccaaatactactgcactgttattgatgctccaggacatcgtgatttcatcaagaacatg

SEQ ID NO: 277889 - DNA, 273 bp, Glycine max
gcaaagctcatccttgagttaaaaaatggcagcagcttcttccatggctctctcatccccatccttggctggcaaggccgtgaagctgggcccatcagccccagaagtgggaagggtgagcatgaggaagaccgtcaccaagcaggtctcctcaggaagcccatggtacggcccagaccgagtcaagtacttgggcccattctctggcgagcccccgtcctacctaaccggtgagttcccaggcgactacggctgggacactgctgggctttc

SEQ ID NO: 277890 - DNA, 274 bp, Glycine max
  unsure (1)..(274): unsure at all n locations
caccattctcacaaaacaactttcaaactctganaaagaatggctgccaacacattgatgagtactgctatctcagccttcccatctctcctttcttcctcaaaatccagatttgccaccgcagttcctctttctagctttggtgtcaccaatgcctcttcttctcgcttttctatgagtgctgactggatgccaggccagcctagacctccttaccttgatggttcagcacctggtgactttggattcgaccctcttcgtcttggtgaagtac

SEQ ID NO: 277891 - DNA, 281 bp, Glycine max
tgttgatcgagataactagaaacagtgtgatgaaaatgaaggtccttgttttcttcgttgctacaattttggtagcatggcaatgccatgcgtacgatatgttccctctccgaatgaacactggctatggtgcccgtactccggaggtgaaatgcgcaagttggaggcttgctgtggaagcacacaacatctttggctttgagaccattcctgaagagtgcgttgaagcaacaaaggaatacatccatggcgaacaatatagatcagactccaaaacagtt

SEQ ID NO: 277892 - DNA, 276 bp, Glycine max
ctggcagcaacttgcttcagtggcctgttgctgaggtggagagtttgagattgagaagtgatgaattcaaaaatttgaaggctaaaccagggtcagtcgtgtcaatagatattgaaacagccacacagttggacatttgccgagtttgagatagacaaggaaacccttgagaaaacacctgaatccaacgaggagtacacgtgtggcaacagtggtggatctaaacaacgtggtgccttaggaccttttggtcttttggttttggcagatgagggc

SEQ ID NO: 277893 - DNA, 277 bp, Glycine max
  unsure (1)..(277): unsure at all n locations
gtttctattcctcactaggagctcctntccactggttcttcatctgcatgcacacagttgcatagttttggaaaccaagaattcctgaagaagggtagcatcaacaagcagttctgaaaatggagatcaccaatgtcagtgagtatgaggctattgcaaagcagaagttgccaaagatggcgtttgactactacgcatctggtgcagaggaccagtggactctgcaagagaacagaaatgcctttnccagaattttgtttcggccacgtattcttat

SEQ ID NO: 277894 - DNA, 275 bp, Glycine max
gagataactagaaacagtgtgatgaaaatgaaggtccttgttttcttcgttgctacaattttggtagcatggcaatgccatgcgtaacgatatgttccctctccgaatgaacactggctatggtgcccgtactccggaggtgaaatgcgcaagttggaggcttgctgtggaagcacacaacatctttggctttgagaccattcctgaagagtgcgttgaagcaacaaaggaatacatccatggcgaacaatatagatcagactccaaaacagtta

SEQ ID NO: 277895 - DNA, 173 bp, Glycine max
gtgagtttgttgatcgagataactagaaacagtgtgatgaaaatgaaggtccttgttttcttcgttgctacaattttggtagcatggcaatgccatgcgtacgatatgttccctctccgaatgaacactggctatggtgcccgtactccggaggtgaaatgcgcaagttggag

SEQ ID NO: 277896 - DNA, 273 bp, Glycine max
  unsure (1)..(273): unsure at all n locations
gacttgctctgcctctgccactctctgagtaggactacactgccatngctgcctcagtctccactgttggagctgtcaacggagctccactgagcttgancagctctggagctggagcttcagttcccagttcagccttctttggcaccagcttgaagaaggttattgcctcaagggtccctaacgtcaagatttcttctggaagtttcanaatcgttgccgcggaaaaagagattgatgaganacaacagacagacaaggacagatggnang

SEQ ID NO: 277897 - DNA, 271 bp, Glycine max
  unsure (1)..(271): unsure at all n locations
cacaccaaaaaattcttgcttagctctcacaaacaatctttaacaacaatgaagaaagtagtattaaaggtggacttaaataatgatagaatcaaganaaaagctatgaagacagcatctggcctttcaggggttgaatcgatttctgttgacgttaaggacatgaaactagtcttattgggtgagattgatccagtgagtgcagtgtcaaagctacgaaagtggtgtcacactgaactaatttcatttggaccagcaaaagaggagaagg

SEQ ID NO: 277898 - DNA, 282 bp, Glycine max
  unsure (1)..(282): unsure at all n locations
gagaactagaggcnagggtctcggagtgtntgggtttgtttatcttaaacaccacaaacacagaaacagaggtgtagagaagaaagctaaaaaatatggcggcagagtcatcactgagggtggcgactcccactctttgcaacctcaatgggtctcagagacgaccaaccaccaccactctctctccgcttcgcttcatgggttttcgtcctcgacnctcctctcactctctcacctcctcttccctttcacactgctnggggnccncagaantcantccgt

SEQ ID NO: 277899 - DNA, 275 bp, Glycine max
  unsure (1)..(275): unsure at all n locations
gcaaaagagcgtcgtagtcgcaaccctaatcagaagaagcgcanttcaagcgagtgacagccaccagccatgggtcgtatgcacagccgcggtaagggtatatcctcttctgctttgccctacaaaaggacacctcctagctggctcaagatctcttcgcaagatgtcgaagaaaatatctgcaagtttgcgaagaaaggtttgaccccgtctcagattggtgtcattctcagagattctcacggtattgctcaggtcaatagcgtcactggcag

SEQ ID NO: 277900 - DNA, 276 bp, Glycine max
  unsure (1)..(276): unsure at all n locations
ctcataacacaaagcacaaagcaaagcnccatccttgagttaaaaaatggcagcagcttcttccatggctctctcatccccatccttggctggcaaggccgtgaagctgggcccatcagccccagaagtgggaagggtgagcatgaggaagaccgtcaccaagcaggtctcctcaggaagcccatggtacggcccagaccgagtcaagtacttgggcccattctctggcgagcccccgtcctacctaaccggtgagttcccaggcgactacggctg

SEQ ID NO: 277901 - DNA, 274 bp, Glycine max
ggccaatccattgatttctttggtgcactgagggccagagtatatgatgatgaagtgaggaagtggatttcctggtgttggtgttgacagtgttgggaagaagcttgtgaactcaaaagatggacctccaacctttgagcagcccaagatgactctggagaagctcttgctgtatggtaacatgcttgtccaagaacaagagaatgtcaagagagtccaattggctgacaagtacttgaacgaggctgctcttggaaatgctaacgaggatgct

SEQ ID NO: 277902 - DNA, 270 bp, Glycine max
gcaaacgctgccgaattcgttatcgctttgcactagcagctttgaaacccggttcatccgaagcccttcaccgaaccatgtcgaggagaaaggttagagagccaaaggaggaaaatgtgactctgggtccagctgttagagatggtgaacacgtttttggcgttgctcgcatctttgcctccttcaacgacaccttcatccatgtcactgatttgtctggcagggaaacccttgtccgaatcactggtggtatgaaagttaaagctgaca

SEQ ID NO: 277903 - DNA, 272 bp, Glycine max
aagtagaataccttcttaggaagggatggattccttgcttggaattcgagttggagcacggtttcgtgtaccgtgagcacaacaggtcaccaggatactacgatggacgctactggaccatgtggaagctgcctatgtttggttgcactgatgcttctcaggtgttgaaggagcttcaagaggctaagactgcataccccaacggcttcatccgtatcatcggattcgacaacgttcgccaagtgcagtgcatcagcttcatcgcctacaag

SEQ ID NO: 277904 - DNA, 285 bp, Glycine max
aaacactcataacacaaagcacaaagcaaagctcatccttgagttaaaaaatggcagcagcttcttccatggctctctcatccccatccttggctggcaaggccgtgaagctgggcccatcagccccagaagtgggaagggtgagcatgaggaagaccgtcaccaagcaggtctcctcaggaagcccatggtacggcccagaccgagtcaagtacttgggcccattctctggcgagcccccgtcctacctaaccggtgagttcccaggcgactacggctgggaca

SEQ ID NO: 277905 - DNA, 242 bp, Glycine max
tttggttttgtagtaagtgaggtgaggtgccaaaatggtgaagataactcttggtactttcgatgactcttttggtgttgcctctcttaaggcttatttggcagagttccatgcaactctgattttcgtgttcgctggtgttggttcagccatcgcttacaacgagcttacaaaagatgcagccttggatccaacggggctggtggcagtagctgtggcccatgcattgcactgtttgtagg

SEQ ID NO: 277906 - DNA, 180 bp, Glycine max
  unsure (1)..(180): unsure at all n locations
gtttttgtctggtggacaatccgaagtggaagcaacactaaatctaaatgccatgaaccaaagtcccaacccatggcatgtttctttctcatatgcacgggctcttcagaacactgtgcttaagacatggcaaggacaccctgagaatgtggaagctgctcaaaagtcccttttggtgng

SEQ ID NO: 277907 - DNA, 164 bp, Glycine max
  unsure (1)..(164): unsure at all n locations
ggggcgtgtggttcgtgttggtctttcagtacgacgggagcgttggaaggagctcattatctggccactggtgtcctcgtgagccttagcgagcaacagcttgtggattgcnatcacgtgtgtgatccagaagaatatggagcgtgtgactcaggctgtaatgg

SEQ ID NO: 277908 - DNA, 200 bp, Glycine max
  unsure (1)..(200): unsure at all n locations
ggaaaaatcatgggaaggaagagcatcgtgctcgagatctgttttatgctctctgggtgcctganctctttatggaaagagttcagagcaatggccaatggtctntgttttgtcccagtgaagcaccgggtttgacagattgttggggtgnnnaatttgaggagcnttatcttcaatatnnnaganaagganaagcaatg

SEQ ID NO: 277909 - DNA, 287 bp, Glycine max
gtggctataacactacttgcattgagttagactttgatagtttgattagctctaataaggttaaggaccagagaaagagagaaagaaacagaatttggaagaaaaaaagcacaagatgggttattggaagtctaaggttcttcccaagatcaagaaggtttttgagaagaatagcaccaagaaagctgctgctgctgaggccaccaagttccttgatgagtcaaaggaggaatacaacaaagcctttgaagaaaagaagactgaacttcaaactaaagtagttgaat

SEQ ID NO: 277910 - DNA, 288 bp, Glycine max
  unsure (1)..(288): unsure at all n locations
gtgaagggcatgatatgattatcttggctggtgctgagtatgggagtggaagctctcgtgattgggctgcaaaggggccaatgctactgggcgtgaaagctgtncatagcaaaaagttttgaaaggattcaccgaagtaatttggtgggaatgggtatcattccttgtgttttaagcccggggaggatgctgattctcttggattaactggtcaagaacgttacaccatgatctaccaagcaatgtgaatgaaatacgacccggtcaagatgtcacatggtgacagac

SEQ ID NO: 277911 - DNA, 215 bp, Glycine max
ttcggatcaaggcaagcttttcatcggtgggatttcatgggatacgacggaggacaagcttcaaggagcatttcggtaactacggcgacgttttgagcacttccgtcatgcgggagaagaacactgggaagccaaggggctttggtttcgtcgtttttgcggatcctaacattctagatagggttttggaagacaaacatgttcatagacggcac

SEQ ID NO: 277912 - DNA, 165 bp, Glycine max
gttactttgtttttcaggacattgcaaatgccgaactgcctccaactcatccaattaggcttggccttgcacttaacttctctgtattttactacgaaatccttaactctcccgatcgtgcctgcaaccttgcaaaacaggttagattcagatatagtgaatatc

SEQ ID NO: 277913 - DNA, 284 bp, Glycine max
gcacactcatcttttctacgtgctacggtctatggtgctcttctaattcggccacgactaggacactcgtacccgtttcctaaagtttatcaagaaatccctatactagttggagaatggtggaatgctaatgttgtagaggttgagcaaaatgcaacagaaactcaacagccgccaattgaatcagatgcatatacaattaatggtttacccagcgatctctataactgctctcaggatggaacataccaggtcaaagtaaagcaaggaaaaacctacttgtt

SEQ ID NO: 277914 - DNA, 281 bp, Glycine max
  unsure (1)..(281): unsure at all n locations
ggcggaacggagaaccatcttgttttgtgggatctgagacctnctgattgactgggaataaggtggagaaactctgtgatctctgtaacattactgttaacaagaacgctgtttttggtgatagcagtgccttggcccctggtggagtgcgaattggtgcccctgccatgacttctaggggtttggttgaaaaagactttgagcagattggtgagttcctcaccgtgctgtgactctcacactggagatccagaaggagcatggcaaacttctcaaggatt

SEQ ID NO: 277915 - DNA, 177 bp, Glycine max
gcttgttgaaaatgcagacgagtgcatggtgcttgacaatgaagctttgtatgacatctgcttccgtaccctcaagctaaccacccctagctttggtgacttgaaccatttgatctcagcgacaatgtctggtgtcacttgttgtttgaggttccctggtcagttaaactctgatct

SEQ ID NO: 277916 - DNA, 282 bp, Glycine max
  unsure (1)..(282): unsure at all n locations
gaacgaccggttctattcccacgggcaaatcactgacccggttatcaatacagtctgtgataaagagcgcncatcacaggcaagacgagacccttgccgatcaaccctagaagcgggttatacctcttgctcacggccgatgacgtgtacgttcaggatttctgcacgtcggtgtgtgggntccactacttcacgtttccctcgttggttgggtatactcttccgtacgcttgggtgggtaactcggcaaagttctgccctgggacatgtgctatccgtttt

SEQ ID NO: 277917 - DNA, 282 bp, Glycine max
  unsure (1)..(282): unsure at all n locations
cgctctctaataacatttctaatctcattctccttctgttcaaacactctctctcatggnatcagataagaagattaggatcggcatcaacgggtttggaaggattggccgtttggtggccagggttgcccttcaaaggaatgatgttgaacttgttgctgtcaacgatcctttcatcaccactgattacatgacatacatgttcaagtacgacaccgttcatggccagtggaagcattttgatgtgaaggtgaaggactctaagacccttctctttggtga

SEQ ID NO: 277918 - DNA, 280 bp, Glycine max
  unsure (1)..(280): unsure at all n locations
cgcatctcaatacccttttgatttgtgaaaggaaagcaaacatgcttgatncaggtccaacaccctacaatcatggacaaggttgctggccagctccatctccgttctggtgtttctggtattaggagttatgaaggagcctactgccaccccacaatgtaccaaagaccctcttttgggaattactcgaatgctgcattgcagtatcctgtgatgccctcatgcaaagctactatggattgtctgctgctgcaacaactgcctcccccgtctttgttgc

SEQ ID NO: 277919 - DNA, 220 bp, Glycine max
tagtgcctccttgccagaagttaaaatggcccaagaaactttcctattcacatctgaatcagtgaacgaggggcaccctgacaagctctgtgaccagatctccgatgctgtgctcgatgcatgcttggagcaggaccctgacagcaaggttgcctgtgaaacctgcaccaagaccaacatggtgatggttttcggagagatcacaaccaggccaagtgga

SEQ ID NO: 277920 - DNA, 288 bp, Glycine max
  unsure (1)..(288): unsure at all n locations
ccttagccgttgctctgcttcaacattgcggaagcagaagaagcgccgcagctatggtgaagtactccagagaacccgacaatcccaccaagtcctgcaaggccagaggcgntgacctcagagttcattttaagaacactagggagactgcctttgccatcaggaagttgccccttgttaaagctaaacgatacttagaggatgttttggcccacaaacaggctatcctttccgacgcttttgtggtggtgttgggaggacggcccaggctaagaacagacatccaat

SEQ ID NO: 277921 - DNA, 285 bp, Glycine max
  unsure (1)..(285): unsure at all n locations
tttttcttcctcagtagtgtcatttacgcttctcttctctgcagcaactatgcctaaccctaaggtcttcttcgacatgaccatcggcggtcaatctgctggccgcatcgtgatggagctctacgccgacgtcactccccgcaccgccgagaacttccgcgcgctttgcaccggcgagaagggcgtagggcgganggcaagcccctccactacaagggctcgtccttccaccgcgtgatcccgagtttcatgtgtcagggtggcgacttcaccgccggaaacgga

SEQ ID NO: 277922 - DNA, 290 bp, Glycine max
  unsure (1)..(290): unsure at all n locations
gggaagacccaagtgaccgttgagtattacaatgacaatggtgccagggttcctattcgtgtacacaccgtgctaatctccacccaacacgacgagncctgtcaccaatgacgaaattgctgctgacctcaaagagcatgtgatcaagcctgtgatcccagagaagtaccttgatgagaagaccattttccacttgaacccttcaggccgttttgtcattggtggccctcatggcgatgctggtctcaccggccgcaagatcatatcgatacttatggaggatggggtgc

SEQ ID NO: 277923 - DNA, 288 bp, Glycine max
  unsure (1)..(288): unsure at all n locations
ctctgatctcactcaccattcaccaacctgcttctctaantctcttnctttcccttcccnnnnnnnnnnnnnnnnnnnnnccttcttcagaatcatcaacaggcttctccgaaaccatttgtgtgaccggcgctggtggcttcatcgcctcttggatgnccaaactcctcttggagaaaggctacactgnccgaggaaccctcagaaacccagatgatcccaagaacgggcactaaaagagtttgaaggagcttcccagagactantcnggctaaggttgacctcctt

SEQ ID NO: 277924 - DNA, 287 bp, Glycine max
acacttctcacattgctgtcaagtttgctgaactcatgaccaagattgacaggcgatccggcaaagagcttgagaaggagcccaagtttttgaagaacggtgatgctggttttgttaagatgattccaaccaaacccatggttgttgaaactttctccgagtatcctccacttggtaggtttgctgttagggacatgcgtcaaactgttgctgtgggagtcatcaagaacgttgagaagaaggatcctaccggagccaaggtcaccaaggctgcccagaagaagaag

SEQ ID NO: 277925 - DNA, 288 bp, Glycine max
  unsure (1)..(288): unsure at all n locations
gaggaatcttgagaaatggcaggggacagcaagagcaagattctgntcatcggagggactggttacatcggaaaattcatcgtggaagccagcgccaaagctggccacccaactttccttttggtgagggagtccactctctccaaccccgcaaaatcacccctcatcgacaatttcaaaggcctcggtgtcaatcttgttttaggagatctatacgatcaccaaagtttggtgagtgctataaagcaggtcgatgtggtaattctactgtaggacacctgcagctag

SEQ ID NO: 277926 - DNA, 293 bp, Glycine max
  unsure (1)..(293): unsure at all n locations
cttctacctctcaagtttttgaagtatagagatggcagagacattcctatttaccttcagagtcagtgaacgagggacaccctgacaagctctgtgaccaaatctctgatgctgtcctcgacgcttgcctcgaacaggacccagacagcaaggttgcctgcgaaacntgcaccaaaaccaacttggtcatggtcttcggagaaatcacgaccaaggccaatgttgactacgagaagatagtgcgtgacacctgcaggaacatcggctttgtctcaaacgatgtgggactggat

SEQ ID NO: 277927 - DNA, 285 bp, Glycine max
  unsure (1)..(285): unsure at all n locations
aaggacagtgccttcaatgctgtaaagaaaactgtcctatccaacctcacctctgaccagctaaagcaagtgatcctcttccatgccttgccacatttctattctcttgctgagttcacaagccttagccaaacnngtntaattccnaatttgccggaggggataacactttgaatttcactgatgattctgggacagtgcacattagttcaggatggtctaagaccaaggtgagcagtgctgttcatgccacagatcctgttgcaatatatcaagttgacaagg

SEQ ID NO: 277928 - DNA, 288 bp, Glycine max
  unsure (1)..(288): unsure at all n locations
ancgaatgagagcatcaaactcttcttcttcgatttccattgcgaaggttaactttttcttcttctttctncttcattttcttcgctcttcgatcttcgtccggggactgctccgaataccaccaccaccactcgccgatggccacgatcggaggcttacacgactcccaaggctctcaaaacancgtcgaaaccgaagccctcgctcgattcgccgtagacgaacacaacaagaagcagaattcgcttctggagtttgctagggtggttagggcacaggaacaggtt

SEQ ID NO: 277929 - DNA, 286 bp, Glycine max
  unsure (1)..(286): unsure at all n locations
tnggagctgctgtttttagactggactacaaaggtcaacctgcatgcctggcccagtcacctcagcttcacaagcaaatgtctatctgtggagattttggccgtgtttttgagattggtcctgtgtttagagcagaagactcctacactcacaggcatctgtgtgagtttacgggcctgacgttgaaatggagatcaagaagcattactttgaggttatggatttagtcgatagattgtttgttgcaatgtttgacagtttgaaccagaatgtaagaaggatctgg

SEQ ID NO: 277930 - DNA, 282 bp, Glycine max
  unsure (1)..(282): unsure at all n locations
gtcccaacaagatgcacacacatggntaantagcgtgnttactaaccatgcaacttgnntggatgggttagaggggtcagctccgngcctttatgaaggacganntcgagganttgatatcnagagcaagaanttntctggccatgnttgttgctgttttgcccccaaaggttgaacaaattattgatacaacctntaagtggagactttccctcatgggtgagcagcaaggatcggagacttttggagtctactgttggcgacatcaaggccnatgttgtg

SEQ ID NO: 277931 - DNA, 279 bp, Glycine max
  unsure (1)..(279): unsure at all n locations
atcaactttcgatggtaggatagtggcctaccatggtggtgacgggtgacggagaattagggttcgattccggagagggagcctgagaaacggcnaccacatccaaggaaggcagcaggcgcgcaaattacccaatcctgacacggggaggtagngacaataaataacaataccgggctcattgagtctggtaattggaatgagtacaatctaaatcccttaacgaggatccattggagggcaagtctggtgccagcagccgcggtaattccagctcca

SEQ ID NO: 277932 - DNA, 282 bp, Glycine max
  unsure (1)..(282): unsure at all n locations
ctcacaggnagctcaagggcagtcataagggtgattgggaggacaaatggattgatgtgtacttggacataagttcaaagttgctagacatttgcantgcattcagctctgagctttcacgtctgaaccagggaaaccttcctcttaagtgtgcactgcacaatttagactctgcctcttcaaagcagtatcttcgggcatgttccctacttgatgattggaggcagcatgttagttctaggaaccctagaattgagaaatgtagttctatgttagataatc

SEQ ID NO: 277933 - DNA, 275 bp, Glycine max
  unsure (1)..(275): unsure at all n locations
cnaatatcttgttgtttggagcgatccgagaaaaactctgtaaacatgttggtttaccaggacctccttacaggtgatgagcttctctctgantccttccgttacaaggaaattgagaatggaatgctgtgggaagttgaggggaagtgggncngttaaaggagcagttgatgtagacattggtgcaaacccttctgctgagggtggaggagaagatgagggagttgatgatgcagctgttaaggttgttgacattgtgacacattcagacttca

SEQ ID NO: 277934 - DNA, 273 bp, Glycine max
  unsure (1)..(273): unsure at all n locations
aatatcttgttgtttggagcgatccgagaaaaactctgtaaacatgttggtttaccaggacctccttacaggtgatgagcttctctctgactccttccgttacncggaaattgagaatggaatgctgtgggaagttgaggggaagtgggttgntaaaggagcagttgatgtagacattggtgnnaacccttctgctgagggtggaggagaagatgagggagttgatgatgcagctgttaaggttgttgacattgttgacacattcagacttca

SEQ ID NO: 277935 - DNA, 278 bp, Glycine max
  unsure (1)..(278): unsure at all n locations
ctaaaatacaccctcagtggcagccagagtacttcggcgacgccattcattgtcaacggcaaggcgtggccgcgcctcacggtgcgacgtcgtaagtatcgattccgcataatcaacgccancaacgccaggttctttagattcttcttcaccaacggcttgagattcacccacgtggcatccgattcggcttacatcgagaagcccgtaacgaccaatgagacgctggtggggccatctgagatcacagacatcgttgttgacttttctcaatccaa

SEQ ID NO: 277936 - DNA, 274 bp, Glycine max
  unsure (1)..(274): unsure at all n locations
agctgctgcagtaatagttttagagcaagaacaagtagttccattaaacaaagggatgcagggacttgctacaccacttgtggaaaacagacttgctgatgggactgaagttgaaatggaagtgataccaatgggtgtcaatagnncgggacatctcaagcacgtttaggattgcctctccattggttgttgacgaaactatgcttgaaaaagtgctgggcccccaagatttgatggcagagaagctgcagaacgtgtggctacccctggggtc

SEQ ID NO: 277937 - DNA, 280 bp, Glycine max
  unsure (1)..(280): unsure at all n locations
ctttgcttcccaaagaaagagaaaataaaaagcaatgngtagcctngaagcggaaagaacaacagtaggattggcagcaagagacccttcagggattctctccccatacacctacaatctaagaaacacaggccctgatgatgtttacataaaagttcactactgtggaatttgccattctgatctccaccagattaaaaatgatcttggcatgtccaactatcccaggtcccaggacatgaagtggttggtgaggtactggaggtggggtcagacgtta

SEQ ID NO: 277938 - DNA, 284 bp, Glycine max
  unsure (1)..(284): unsure at all n locations
ttttgcatttagtttggggaattgcaatattggtcagctagctaggaagtggtgttgtttttgtgttagtgctatgggaaggcaaccctgctgtgacaaacttggggtgaagaagggtccatggactgctgaggaagacaagaagctcatcaacttcattctcaccaatggccaatgctgttggcgcgccgtgccaaagctccgctggcctcaagcgctgtggcaaganttgtcgccttcgttggacgaattatcttcgtccagacttgaagagagggctactc

SEQ ID NO: 277939 - DNA, 277 bp, Glycine max
tgctatcacctagaccttctggagctcaaccttctgctatgaaagaaacaccaagcaaattgtcagaacgtaccttgctcaactaataatggaaccggtcataaccatacaggtgcttctatcagtggcagcgcaccggcttctaaggcacaggttgttggttggcctcctattagatcatttaggaaaaactcaatggctaccaccactaacaagaacaatgatgaagttcgatggaaaaccaggtgttggcgcactctttgtgaagtcagcatgg

SEQ ID NO: 277940 - DNA, 128 bp, Glycine max
  unsure (1)..(128): unsure at all n locations
gttttgtgtttcacatttaaagcaacactgaaaagaaaggaaagtgaagttgagagtttgtttaggaagaacaagaaatgggggttggttnccaggatgccatcaagcagttccaggcattcattgac

SEQ ID NO: 277941 - DNA, 276 bp, Glycine max
  unsure (1)..(276): unsure at all n locations
gtggagttgattggaggtgccaccagagtgccaaaattacaggctaagcttcaaganttcctcaggagaaaagaacttgatagtcatcttgatgctgatgaagcaatagttcttggcgcagtgctgcatgctgcaaatttaagtgatggaatcaaattgaaccgcaaactaggaatgattgatggttcctatatggatttgtggttgagttgaatggtcctgatcttttaaaagatgaaagctctaggcagctacttgtgccacgaatgaagaagg

SEQ ID NO: 277942 - DNA, 231 bp, Glycine max
  unsure (1)..(231): unsure at all n locations
tctaaaagagatctttttctgctctttanagaaagaagggtctttgcttgattttggagatgtctctgctctcagatctcatcaaccttaacctctccgataccaccgagaaggtgatcgcagagtacatatggatcggtggatcaggaatggacctgaggagcaaagcaaggactctcccaggaccagttagcgacccttcagagcttcccaagtggaatatgatggttc

SEQ ID NO: 277943 - DNA, 278 bp, Glycine max
caactcacaagctcacagagcaagaacactgttccaatacggaatctaaggcaaagcaaaccaaacatcttgaatcatgggttcaacaggtgagactcagattaccccaacccacgtatctgatgaagaagcaaaccttttcgccatgcaactagccagtgcttctgtccttccaatgatcctcaaatcagcacttgagcttgatctgttggaaatcatagccaaggctggccctggtgttcatcttcccccactgacatttcttctcagctcccaac

SEQ ID NO: 277944 - DNA, 277 bp, Glycine max
gtgaagatgagtctgcacagctccagtttcgaggacaaaaaatatggctagctgcaatggaggaattaatgtccaaaggaatgcagaaagccgatcaggcacttctctctggatgctctgcgggtggtctggcatccataatacactgtgatgagttcgggagcttgtttggaaaatcttccaaagttaaatgtttgagcgatggaggtttttttcttgatgcaatggatgtatctgggggacgcacactgaggactctttcggaggtgtggttcag

SEQ ID NO: 277945 - DNA, 308 bp, Glycine max
ccttagccgttgctctgcttcaacattgcggaagcagaagaagcgccgcagctatggtgaagtactccagagaacccgacaatcccaccaagtcctgcaaggccagaggcgctgacctcagagttcattttaagaacactagggagactgcctttgccatcaggaagttgccccttgttaaagctaaacgatacttagaggatgttttggcccacaaacaggctattcctttccgacgcttttgtggtggtgttgggaggacggcccaggctaagaacagacactccatgggcaaggacgctggccgt

SEQ ID NO: 277946 - DNA, 306 bp, Glycine max
  unsure (1)..(306): unsure at all n locations
gaagatggagatgtatcagatctgcgagcaggagaatagcnttgggagcgttcgcgtttgnnccngcttttcctatcggcctcagcagacgacgtcgttgtgctctctgaagataacttcgagaaggaagttggtcaggacagaggagctctcgttgagttctatgctcctggtgtggacactgcaaaaagcttgctccagaatatgaaaagcttggtagcagcttcaagaaagccaatctgttttaatccggcaaggtngactgttatgagcacaagattttgtgcancaaatatggagtctctg

SEQ ID NO: 277947 - DNA, 311 bp, Glycine max
  unsure (1)..(311): unsure at all n locations
accgaatgagagcatcaaactcttcttcttcgatttccattgcgaacgttaannnnnnnnnnnnnnnnnnnnnnnnnnncttcgctcttcgatcttcgtccggggactgctncgaataccaccaccaccactcgccgatggccacgatcggaggcttacacgactcccaagggctctcaaaacagcgtcgaaaccgaagccctcgcttcgattcgccgtagacgaacacaacaagaagcagaattcgcttctggagtttgctagggtggttagggcacaggaacaggttgttgctggtaccctgcatcacc

SEQ ID NO: 277948 - DNA, 313 bp, Glycine max
ctcaacaaccctaacgcgtgcagagcagagagagacgcagccatggggcgaagacccgcgaggtgttataggcaaattaagaacaaaccataccccaagtcacggttttgccgtggtgttcctgatcccaagatcaggatttacgatgttggtatgaagaagaagggtgttgatgagtttcctttctgtgtccatctggttagttgggagaaggaaaacgtttctagtgaggccctggaagctgctcgtattgcttgcaacaagtacatggccaaatttgctggaaaggatgctttccacttgagagtcaggg

SEQ ID NO: 277949 - DNA, 297 bp, Glycine max
  unsure (1)..(297): unsure at all n locations
ggcgaagagaagagaaaaattaagatggaggggaaggagcaggatgtgtcgctgggagcgaacaagtncccggagagacagccgattgggacngcggcgcaganccaagacgacggcaaggactaccaggagccggcgccggcgccactggttgacccgacggagtttacgtcatggtccttntacagagcanggatagcagagtntgtggccattntctgtntctatacatcactgtcnaancgtcangggagttcgccggggctaagtctnantgnagtancgttnggattcang

SEQ ID NO: 277950 - DNA, 279 bp, Glycine max
  unsure (1)..(279): unsure at all n locations
gctgagtcatatcttggaaagtcagtttcaaaagcngtaattactgtaccagcttacttcaatgntgctcagagacaggcaacaaaagatgccggtagaattgctggtcttgatgttcaaagaatcatcaatgagcccactgctgctgcactttcatatgggatgaacaacaaggagggtctcattgcagtttttgatcttggaggtggaacatttgatgtgtcnatctagagatttctaatggtgtntttgaggtgaaagccacaatggtgacacgtt

SEQ ID NO: 277951 - DNA, 299 bp, Glycine max
tcttgatcggtgacagcggtgttgggaaaagttgcctccttctgcgtttctccgatggttctttcaccactagtttcatcacaactataggcattgattttaagataagaaccattgagcttgatggcaaacggatcaagctccaaatttgggatactgcagggcagcggtttcggacaattacaactgcttactaccgtggtgctatgggcatattgctagtctatgatgttacagatgaagcatcatttaacaatatcaggaattggattcgcaatattgagcaacatgcttcagac

SEQ ID NO: 277952 - DNA, 299 bp, Glycine max
  unsure (1)..(299): unsure at all n locations
gagaganagaggcacttggaatccaaaaatgagagaaatcatcagcattcacataggtcaggccgggatccaggttgggcaactccctgctgggaactctactgcctggaacatggcatccagcccgatggcatgatgccaagtgactcctccttcggtgtagcccacgacgccttcaacaccttcttcagcgaaaccggatccggcaagcacgtccctcgcgccgtcttcgtcgatctcgagcccaccgtcatcgacgaatccgttgtggcacttacgtcaantcttccacncgaaca

SEQ ID NO: 277953 - DNA, 237 bp, Glycine max
  unsure (1)..(237): unsure at all n locations
ctttctggttctgcctatggaacaagggagtataggagattcatgtatactggcaaggtaaaccttcgtgctggaataaacagaatcgctctgctcagtgttgccattggacttcctaatgtgggagaacattttgagtcatggagcacaggaatccttggtccagttgcatccatggacttgaccagggaaaatgggactgtcaggcagaaatggacttatcaccnacggntganc

SEQ ID NO: 277954 - DNA, 303 bp, Glycine max
  unsure (1)..(303): unsure at all n locations
ccacaaatcaatctccaggctatctatcaagtaaganagctgttaagaggaggagaatggctgatgatggaagcaggagggaattgatattcaggtcgaagcttccggatatctacatccccaaacatatgcccctccactcttactgcttcgagaatttgagagagtgtggttcacgcccctgcctgatcaatgcncccacgggagacgtctacagctaccacgaggtggacagcaccgccagaaaggtggcgngggggctgaaganagagggcgtggaacagggccagtcatcatgatcct

SEQ ID NO: 277955 - DNA, 308 bp, Glycine max
  unsure (1)..(308): unsure at all n locations
cagaaaactcaccaccctcaaaactattgatganggagaaagtagcaagctgcagaagacgttgtcgatgccgtcgacaccaacaaccccgatgactccgacgactccaacgacaccgggatcggcccgtaaagctgacaacgtttggaggagcgtcttccatcctgggagcaactccgccacaaagaccatcggtgctcagatgtttgacaaaccacttcccaacactcccactgtctatgactggctgtacagtggggagaccagaagcaggcaccgctgaagctgaagtctttagctaagatgac

SEQ ID NO: 277956 - DNA, 299 bp, Glycine max
  unsure (1)..(299): unsure at all n locations
ctaacactcattaattgcaagaatggcacttcgttgcttggtgatgtccctttctgttctcttcactcttggtcttgcgagagaaagccatgccagagacgaagatttttggcatgctgtttggccaaacactcccattccaagttcattgcgagatcttctaaagcctggccctgcaagtgttgaaatcgatgatcaccctatgcaaattgaagaaacacagtacccgaaaaccttcttctataaagaagaccttcatccaggcaaaacaatganagtacaattcagcaagcctcccc

SEQ ID NO: 277957 - DNA, 303 bp, Glycine max
attaattgcaagaatggcacttcgttgcttggtgatgtccctttctgttctcttcactcttggtcttgcgagagaaagccatgccagagacgaagatttttggcatgctgtttggccaaacactcccattccaagttcattgcgagatcttctaaagcctggccctgcaagtgttgaaatcgatgatcaccctatgcaaattgaagaaacacagtacccgaaaaccttcttctataaagaagaccttcatccaggcaaaacaatgaaagtacaattcagcaagcctccctttcaacaaccatg

SEQ ID NO: 277958 - DNA, 249 bp, Glycine max
tagtgcctccttgccagaagttaaaatggcccaagaaactttcctattcacatctgaatcagtgaacgaggggcaccctgacaagctctgtgaccagatctccgatgctgtgctcgatgcatgcttggagcaggaccctgacagcaaggttgcctgtgaaacctgcaccaagaccaacatggtgatggttttcggagagatcacaaccaaggccaacgtggactatgagaagattgtgcgtgacacatg

SEQ ID NO: 277959 - DNA, 300 bp, Glycine max
ctctaacctacctctttttcttctctctcaacaacttcaccttcttcctcctcgatcatgtctcacttcaagggcaagtaccatgatgagcttatcgccaatgctgcgtacattggcactcctggaaagggtattcttgctgctgatgagtcaacagggacaattggcaagcgtttggccagcatcagtgtagagaacattgaatccaacaggcgagctcttagggagctgcttttcactgctcctcgtgttcttcaatatctcagtggtgtcatcctctttgaggaaaccctctaccag

SEQ ID NO: 277960 - DNA, 293 bp, Glycine max
ctatgagggtgttcaaagccttctaggtctcatgcataccacagggacaattcctaatgcacttcctccaccaatatcaactctattagcatcatttaattttccatgcaatccaaatgaaaatggcttgactgatggagctcgtgcattggccaagcatgcttgtaggagtagcagtggttattggggttctctgaatggaaatgattctaataaaaataggcttgcaatggatgttattaaccgcctaatatcacattgttgttggctgaatgtgtatactgttccaccac

SEQ ID NO: 277961 - DNA, 294 bp, Glycine max
cgggagtgaacaagttatcaggggacaaggctgttgtgtgccacaagcagaactacccttatgctgttttttactgtcacaaaactgagaccacaagagcttactctgtgcctttggagggtgctaatggggttagggttaaagcggtagcagtgtgccacactcacacgtcggaatggaaccctaaacatttggcctttcaagtgctcaaagttaagccaggaaccgttcctgtctgccacttcctacctgaggatcatgttgtttgggttcccaagtagatttgctttaatt

SEQ ID NO: 277962 - DNA, 303 bp, Glycine max
gaaaaggggtctcctgaatatgatgcgttggctaagaaccctgagaaggagtttttgaagactattactggcaagaaggagaccctcattgaccttacagttatagaaatcttgtcaaggcacgcatctgatgagttctaccttgggcagagagatggtggtgactactggacttctgatgccggtccattagaggcatttaagaggtttggaaagaagcttgaagagattgaaaagaagcttatagagaagaacaaagatgagacttgagaaaccgctatgggccagctaaaatgccttaca

SEQ ID NO: 277963 - DNA, 308 bp, Glycine max
gcttctcactgatctccattcccattccatggcttccactgaatcatcccctttcaagaaaattcagattcaaagggatgacactacatttgacgcatatgtggttggaaaagaggatgctcctggaattgttgtgattcaggagtggtggggtgtggattacgaaattaagaaccatgccgtgaagatttctcagcttggtagtgggtttaaagctcttattccagatttatacagaggaaaggttggtctggatgttgctgaagctcagcattgatggatggtctgattggcaagtgctgtgaagg

SEQ ID NO: 277964 - DNA, 300 bp, Glycine max
  unsure (1)..(300): unsure at all n locations
cgcagggtttcncgaagatttaacacctatggctcctaaagctgatagtttaaagaaggctgatccaaaggcacaagccttgaaaactgctaaggctgttaagtcaggtgctactttaaagaaaaagaccaagaagatccgaacatctgttaccttccatcgaccaaagaccttgaaaaaggataggaaccctaaatacccacgcattagtgctccacccaggaacaagcttgatcactatcagatattgaagtatcctctcacaactgagtctgcaatgaagaagattgaagacaacac

SEQ ID NO: 277965 - DNA, 296 bp, Glycine max
  unsure (1)..(296): unsure at all n locations
gtgaataagagatatcaatatattatgataatggagggatacaataagaaggttatgattgtggggatggtgttgggcatggccatgattgggatggccaatggccaatactcgttttgtcgcatgcccagcgatgggttggcggcatgcaagccgagtgtgagtggggactatcctgctgatccctcnnactgccttgttgctcagccattgccaaggctgatcttaaatgcttctgccgcttcaaggattcgggccttctctctatgtatggtgttgatcccaacaagtgcatg

SEQ ID NO: 277966 - DNA, 278 bp, Glycine max
  unsure (1)..(278): unsure at all n locations
ggaacatggaatgattacaagagtaatgctgaccgtcttccacaattgatacctgatcagatcctcaagcttaagcaacttacagttcttacactggctgagacatataaggtactaccctatgaccaactgatgcaggagttagatgtgacaaatgttcgtgagcttgaagattttctaattaatgaatgcatgtatgcgggaatagttcgaggaaagttgganagttgcggcggtgctttgaggnccatttgcagctggtagggnnctncnnccna

SEQ ID NO: 277967 - DNA, 278 bp, Glycine max
  unsure (1)..(278): unsure at all n locations
gcgccaagatactaaacaatggagagttactcactctttcattggacaaagcatctggttcaggttttcaatcaaagaatgagtatctctttgggaagattgacatgcagctcaagctcgtccctggaaactctgctggtaccgtcactgcctattatttatcttcaaaaggatctacttgggatgagatagactatgagtttcttggaaacttgagtggngatccatacatccttcacacaaacgttttcagccaggccaanggggacagggaacnt

SEQ ID NO: 277968 - DNA, 273 bp, Glycine max
  unsure (1)..(273): unsure at all n locations
ctcaactgcgcggtgagtgagtganagacggaaagtncaaagncaccgtcttctcttctcanancttggctatncttatcgattctctctcctctcatctntctcattcaaggtttgtanaagatggccgatgctgaggatattcaaccccttgtttgtgacaatggaactggnatggtcaaggctggatttgctggtgncgatgctcccagggctgtctttcccagtattnttggccancctcgacacactggtgttatggtcgggatgggt

SEQ ID NO: 277969 - DNA, 281 bp, Glycine max
  unsure (1)..(281): unsure at all n locations
gttttctttgctattgttatgcttcttctccaggctaggcatcaaaaagttggggagaagcctcttctntcaatttctanatttgtgcaggcagctcgtaacaatgtccttctggcagttcccgcacttctgtatgcnataaacaactatctgaagntnatcatgcagctgtattttaatcctgctactgtgaagatgctaagcaatttgaaggttttagtaatagcacttctgttaaaggtgattatgaagcgccggntttccatcattcagtgggaagc

SEQ ID NO: 277970 - DNA, 272 bp, Glycine max
  unsure (1)..(272): unsure at all n locations
cagggatgcgtcggtggctttgttgcacatgtcaggtngaagagtcttacccatcaaatgaaaatgagcacntgaaaagcccaaggaattatggagatggaaatcaaaaaggctcaaaggtgtcagctcctgtcaagcctgaaacacaaaaggcacctccacctattgaagctccagccttatctttagatgagctgaaggagaagacagacaactttggttcaaaggcattaataggtgaaggatcgtatggaagggtgtattatgcaacc

SEQ ID NO: 277971 - DNA, 271 bp, Glycine max
  unsure (1)..(271): unsure at all n locations
aagaaaaactagctgtcaaggttgaaaagctgggaaaggattcactaattaactgtgcnnngannntgntgtcntcaaanttgatagctggtnntagtgncttctttgccatnttggttgtagatgcagtgcnagctgtagagnngaccaatgctcgaggtgaagttaaatacccaatcaagggaatcantatcttgnaagctcatggnaaaagtgctngagacagctttctgatgaatggttatgctctaaatactgnccgtgctnctcc

SEQ ID NO: 277972 - DNA, 270 bp, Glycine max
  unsure (1)..(270): unsure at all n locations
cttcaacttaaccttttctactcataatcttaacaacttgctagaanaagataaagaaagagaaaaagtgtgtgtgtgtgaganagagcaatggctggctcgtgggcacgccgttctctgattgntctggctatcatttccttcggatgtntatntgcaatttccattgctaaggaggnccccacaaaatnggggacggtcatcgggnttgatctnggaccgacctattcatgtgtnggtgtttacaagancggccatgttganatcata

SEQ ID NO: 277973 - DNA, 270 bp, Glycine max
  unsure (1)..(270): unsure at all n locations
tgggaattcaacttccgtgacttcgacgtggcgcgtgacgcctacgctcccgactccatcgatcttctccgtcgtcagggcatcgatttcgcgcgtaacaccgccgacgggtggattccacgtgcttcgcggagtgatgatgtcttcggggctcgtgtgcaacgacgccgtnagttgggtcacgttccacagcgcgtacgatttcggttacttggtnaagatcttgacgcgcngnaacctaccgacgaggttggagnattcttnaanacg

SEQ ID NO: 277974 - DNA, 268 bp, Glycine max
  unsure (1)..(268): unsure at all n locations
gcaccggtctccagggtttcctcgtcttcaacgccgtcggtggcggcaccggttctggcttgggctcgcttctcttggagcgtctctccgttgactatggaaaaaagtcaaagctcggtttcaccgtttatccatcccctcaggtttcgacctcggtcgtggaaccctacaacagcgtcctttcaacgcattctctcctcgaacacaccgatgttgctgtgcttctcgacaacgaggcaatctanganttngcnggagatcttttgaa

SEQ ID NO: 277975 - DNA, 270 bp, Glycine max
  unsure (1)..(270): unsure at all n locations
cgagtagcaacaatgtcgaagcgaggtcgcggaggatcggcgggaaacaagttccgcatgtccgctgggtctnccggtggcggcgacggtgaactgcgccgacaacaccggcgcgaagaacctctacatcatatcagtgaaggggatcaagggtaggctgaaccggttgccgtcagcttgcgtcggagacatggttatggccaccgtcaagaagggaaagcccgatctccgtaagaaggtgctncccgccgtcatcgtccgccancgcaa

SEQ ID NO: 277976 - DNA, 243 bp, Glycine max
  unsure (1)..(243): unsure at all n locations
ggggcagtgaaaganacaacaccagatngtgaggaganttcaagagaaaggagtgcctgcattttggcttactgccatgaaaaacaatgaagtgttggctgaggagatttcagagcgtgatgaaggtgcccttaagtatctcaaagatatcaagtggagcaggatagnccaacccgaaaggattcaaacttgagtttttctctgacaccaacccttattntatcaattctgtcttgacaaaaa

SEQ ID NO: 277977 - DNA, 275 bp, Glycine max
  unsure (1)..(275): unsure at all n locations
ttttcgagaggnaaattaggccaaagataacactccctgtcttcttacagatagtggnactgggatttgtggagccagtgattgaccaagggttcactttcttgggcatgcaatatacatcggcttcatttgcctntgccataatgaatgttgtgccttctgtcacttttgtgctagccgtaattctaaggttagagcgtgtgaatgtaaaagaggtgcggagcctagcaaaggtgattgggacgttggtatntttctcaggtgctttgttaatc

SEQ ID NO: 277978 - DNA, 271 bp, Glycine max
  unsure (1)..(271): unsure at all n locations
ctcgtgcctctagggttatcatatctccatttccatttcctctctctcagtttccaagaatcttaagctatgggaaagtcttacccaaccgtgagcgctgattaccagaaggccgttgagaaggcgaagaagaagctcagaggcttcatcgctgagaagagatgcgctcctctantgctccgtttggcatggcactctgctggaacttacgacgtgagctcgaagaccggtggtcccttcggaaccataaagcacccctccgaancgcnna

SEQ ID NO: 277979 - DNA, 265 bp, Glycine max
  unsure (1)..(265): unsure at all n locations
ttataattctggtgtgagcccagactatagcccaagttcgccccaatttagtcccagtacgggttactcaccaagtcaacctggttactcaccatcttcaaccagccagtacactccacaaactagtgacaaggatgatggaggcactcgctgaggacaacttgaggctggacagaggacttatgctatgctgggatcagacattgagctgttcgagggctattagtttgcattgtattaatcatcngtatcatttgagtctctg

SEQ ID NO: 277980 - DNA, 268 bp, Glycine max
  unsure (1)..(268): unsure at all n locations
cttctctttacacccccctcncctattttgcgttcattctgttttccagttgaagtctttccctagccaatggccactgatcgtttgacccgggttcacagtctccgtgagaggcttgatgaaaccctcactgccaacaggaacgaaattttggcccttctgtcaaggatcgaagctaagggcaaggggatcctgcaacaccaccaggtcattgctgagtttgagganatccctgaggagaacaggcagaagcttnctgatggngnct

SEQ ID NO: 277981 - DNA, 268 bp, Glycine max
gttctttctctcgcaatcttcactacattcaccgagcatttgcattcacattgaatatggctgagactacacaatctaatgctgagttgttggagtggcctaagaaagataagcgccgcttcctgcatgttgtgtatcgtgttggtgatcttgatcgcaccattaagttttatactgaatgttttgggatgaagcttttgaggaaaagagatattccagaggagaaatatgccaatgcttttcttggatttggccctgaacaatccca

SEQ ID NO: 277982 - DNA, 266 bp, Glycine max
  unsure (1)..(266): unsure at all n locations
gggctggggatccaggattgggcaatgttgcatggaaagaaagagttgatggctggaagatgaagcaaganaagaatgttgttccaatgagcacaggccaggctgcttctgaaagaggagctggagatattgatgctagtactgatgtgctngccgatgatnctntattgaatgatgaagctcgacagcctctttcnaggaaggtttctatnccancttcgggaaaaacccgtancntntggtnnnatgctgcggctggntatcct

SEQ ID NO: 277983 - DNA, 267 bp, Glycine max
  unsure (1)..(267): unsure at all n locations
gggcgaaactcgagagtgtaaggttttgcatttcatttgacgaagagtgagagagtcttatctgtcncctctgatctctgatcgnatctncattccgaanatggctgtttcggctatcactggnncgaggctaactctanggatgtcnctntnctcttccangngatcacgcnntnnncgnaanggacgnanctatcgaccccaagacngataacaaatnactctnaccangtccgnggaagctttcgctgcggccaaggagntnat

SEQ ID NO: 277984 - DNA, 115 bp, Glycine max
  unsure (1)..(115): unsure at all n locations
caatctatgaggggtatgcactcccccatgccatccttcgtttggatctcgctggtcgtgatctaactgatcatttgntgaagatcctcactgagagaggatacatgttcaccac

SEQ ID NO: 277985 - DNA, 264 bp, Glycine max
  unsure (1)..(264): unsure at all n locations
cactgctggaatatcaggtgggcacataaatccggcagtgacgttcggtttgtttctggctaggaagctgtccctgacaagagcgctgttctacattgtgatgcagtgtcttggagctatctgtggtgctggtgtggtgaaggggtttgaggggaatgccaggtatgagttattcaaaggtggagccanttttgtgantcatggatacnccaagggtgatncnccttggcgccgatattgtgggcactnttattcttgtnaacc

SEQ ID NO: 277986 - DNA, 263 bp, Glycine max
  unsure (1)..(263): unsure at all n locations
atgagtccaacatgggtttttgtgttaggtgtanccagcaatgttggtggttgtgagtggacaatcatcagtgaagcctttggtgaagacagtgaaggggaagaaggtgtgtgacaaagggtgggagtgcaaaggttggtctgcatattgctgcaatgagactatctccgactacttccagacataccagtttgagaacctcttcgcgaanccaattcgccggtggcacatgctgttggtttctgggacaccgttcttncatc

SEQ ID NO: 277987 - DNA, 266 bp, Glycine max
cgcactcgtccccacaccttctcctccgtctccggtaccaaggacctccagatggttaacctaaccctccgcgtcctctcccgccccgacaccgagaagctccccaccatcgtccagaacctcggcctcgaatacgatgaaaaggtcctcccttccatcggcaacgaggtcctcaaggccgtcgtcgcgcagttcaacgccgatcagctgctcacggagcggtcacaggtctccgccctcgtccgtgacagcctcattcgtcgcgc

SEQ ID NO: 277988 - DNA, 268 bp, Glycine max
  unsure (1)..(268): unsure at all n locations
gggagaagagaagttttgtgcaaaatccttgggaacagtaattggttttgccatttcaaagctgggaaagaacattcaagtactttcaagttcctttgtcaataannnaagaccaatacactgtggaaggagtgcagaatcttggagacaaagcagtgatgtgtcataggctaaatttcagaactgcagtattttactgccatgaagtccgtgaaacaacagctttcatggctccagtggtggctggtggtgnaaccncaagtcctgc

SEQ ID NO: 277989 - DNA, 269 bp, Glycine max
  unsure (1)..(269): unsure at all n locations
cctagcccgttttctgttcgtgaacctggggtcactcatgttttagtaacagggggtgcaggatatattggttcacatgctgctctacgacttctgaaggagaactatcgtgtcaccatagtagacaatctgtcacgtggaaatttgggggccgtcaaggttcttcaagacttatttccagaacctggaaggcttcaatttntnaacagattggggatctcgcntgctactacnctaatatctatanccctgtatanaattnncccccc

SEQ ID NO: 277990 - DNA, 263 bp, Glycine max
  unsure (1)..(263): unsure at all n locations
caatatattccattctctctgtgtattnccctacctctcccttcaagatgcagatcttcgtcnngaccntcaccggcaagaccatcacccttgaggtggaaagctctgacaccatngacaacgtcaaggccaagatccaggacaaggaangaatccccccggaccagcaacgtctcattttcgccggaaagcaacttgaggacggccgtacccttgctgactacaacattcagaaggagagtattcttcactcgtcctccgtc

SEQ ID NO: 277991 - DNA, 263 bp, Glycine max
  unsure (1)..(263): unsure at all n locations
ctcntcctcaccgattgctagnctggaatttcgatgctcagtcatctcttttaccattctcttctctcttgctcttgcaggagagagccatgtccatgcatcgctacctgaggaagattattgggaagctgtttggccaaacactcccattcccactgcactgcgagagcttctaaagcctctccctgcaggtgttgaaatngatgaactccctaagcaaattgatgatacncagtncccaaaaacnttcttcnanaaagang

SEQ ID NO: 277992 - DNA, 242 bp, Glycine max
  unsure (1)..(242): unsure at all n locations
cttgaaggtgggagaagctgatantaacataggaaatactggtgatgtgaatctatatncccaaatgattgatgaagctgagggattggagaaaattgagaacctccagagtcatgacaacacagagatttacgaaaaggcggtcaagattcttgagacatactggttggaggaggaagatgagactatgcctccaggggatgcttctcagtcagggttcanctttggtagcantgncnctc

SEQ ID NO: 277993 - DNA, 269 bp, Glycine max
  unsure (1)..(269): unsure at all n locations
ctcccataaatctttcagatcgtctgcatcaagttctccgttggggcacttggatctgttgagatcctgttgantaagcattgtcctatatggtatggatatggttgtggcttgaaatggctggagcgtttttcttacataaactcgntcatttatcctttgacatcacttcccttaattgcctattgcaccttgccggctgtctgtcttctcactggaaagttcatagtccctgagattagcaatatgccagtatcattttnanggcc

SEQ ID NO: 277994 - DNA, 264 bp, Glycine max
  unsure (1)..(264): unsure at all n locations
ctgccactccactgcaactttgtgananggcaaagatcccaaccgaatccggaccaggcttcatcccagagcatctggacncaatctanagcagttcctgtagcctttgaaaggantctgtcaaagtttcctctgcaattgataggngtncagcagggttactagcatctntcagggtatgctgaggagtggtaaccaccgantcacaactagcatcagtagttgttgccgatggagtanccaattgctgctcataaaaccatt

SEQ ID NO: 277995 - DNA, 207 bp, Glycine max
  unsure (1)..(207): unsure at all n locations
cttntttntntactcttgcaaaccctanttntcatttnttcccngcaaatttcaaagtgcgtganatcnttcacntccagggtggccaatacagcaaccagatcggcgccaanttctgggaggtggnngcgcagagcacgggntngaccctacnggaangtacggtggggactcggagtgcagctcgagangntcaatgtctactnc

SEQ ID NO: 277996 - DNA, 161 bp, Glycine max
  unsure (1)..(161): unsure at all n locations
caaatacatggtcatccanggtgagcctggtgctgtcattcgagggaagaagggtcctggtggngntactgtgaagaagancggtgcggcctngancattggcanttatgatgaaccaatgantccaggtcaatgcaacatggtagntgaaaggcntangc

SEQ ID NO: 277997 - DNA, 208 bp, Glycine max
ctcttaagcttgctactgagtttccacactgcataccttaggtcttccgaattcgaagttaatttgcaagatggctaaggaaaaggctcagatcaacattgtggtggttggtcatgtggaccctgaggaggcaaccaccattaacgagctgaagaagcctgttgtggagaaagaagctccagggcatgccatatgagggcatgcacgc

SEQ ID NO: 277998 - DNA, 293 bp, Glycine max
  unsure (1)..(293): unsure at all n locations
cagaattctctaaaagagatctttttctgctctttgaagaaagaagggtctttncttgattttggagatgtctctgctctcagatctcatcaaccttaacctctccgataccaccgagaaggtgatcgcagagtacatatggatcggtggatcaggaatggacctgaggagcanagcaaggactctccnaggcccatttagcgacccttncagagcttcccaagtggaatatgatggttccagcacaggtcaagctcctggtgaagacagtgaagtgatttatacccacaagc

SEQ ID NO: 277999 - DNA, 289 bp, Glycine max
caaatacatggtcatccagggtgagcctggtgctgtcattcgagggaagaagggtcctggtggtgttactgtgaagaagaccggtgcggccttgatcattggcatttatgatgaaccaatgactccaggtcaatgcaacatggtagttgaaaggcttggcgattatctcattgatcagggtctctaatctttgctttatgtctgttatcgtgcatatttcattggcttctgtacaagtttttgcatcgacctggactggaatgcttgatgcagtgtaataacttgttgt

SEQ ID NO: 278000 - DNA, 291 bp, Glycine max
aactttggtcaagatgctctgattggagagggatcctatggaagagtatattatggtgttcttaaaagtgagctggctgcagcaatcaagaagttggatgccagtaaacagcctgatgaggaatttttagcccaggtttcaatggtatcaaggttgaagcatgaaaattttgttcagttgcttggatattgcattgatggaagctcccgtattcttgcttatgagtttgcatctaatgggtccttcatgatatttacacggcagaaaagtgttaaaggagcacagcctggc

SEQ ID NO: 278001 - DNA, 289 bp, Glycine max
  unsure (1)..(289): unsure at all n locations
cagggactcactctcttcgcagcggcactctcggtggctttcatcttctcggggtgagttgtcaagatgtacacatcgaggaagaaaattcacaaggataaggatgctgagccaactgaatttgaggaatcagttggacaggcattgtttgatctagaaaataccaacaatgagctgaaaagtgatctgaaagatttatacataanctcagctgtccaaattgatgtttctggcaaccgaaagctgtggttatccatgtcccctacagactaaggaaaggatccggaag

SEQ ID NO: 278002 - DNA, 291 bp, Glycine max
gggaatcttgagaaatggcaggggacagcaagagcaagattctgttcatcggagggactggttacatcggaaaattcatcgtggaagccagcgccaaagctggccacccaactttccttttggtgagggagtccactctctccaaccccgcaaaatcacccctcatcgacaatttcaaaggcctcggtgtcaatcttgttttaggagatctatacgatcaccaaagtttggtgagtgctataaagcaggtcgatgtggtaattctactgtaggacacctgcagctagctgg

SEQ ID NO: 278003 - DNA, 284 bp, Glycine max
  unsure (1)..(284): unsure at all n locations
gacgaatatggcaacccggttcatgccactagtgtcacttatgtngccaccaaaagtgttggtggctacaatgatgacgctnctaagcaacatgntattactggtgtctatcccgagaaagacaccggtagacatcattttggtcgnggttacgacggtgacactaannagcaacatgatgctnctggtgtttatcccggaatagacatggtagagatcatgggactaccgtgtttaggcctaaacaccgacagactcaggaactctggggtgaatcccgggaa

SEQ ID NO: 278004 - DNA, 291 bp, Glycine max
  unsure (1)..(291): unsure at all n locations
gntgaaatgacgaggattanatggangatgatcaaggatcaaacttatanttccttacctggatttaagcataaagtantttgnatttgnggcttcaaaatcgtgatgctactnnngncagngttactgtggaaantgctgangccactctcangtataacgtcgctgtgaaatgtgcaacaataactcctgatgagacccgagtgaaagaatttggactggaagtctatgtggagaagccccaatggnaacaatttaggaatattttaaatggtantgttttccgtgncc

SEQ ID NO: 278005 - DNA, 288 bp, Glycine max
  unsure (1)..(288): unsure at all n locations
ggcccttgaaaatccggaggaccgagtgcctcccacgcccggtcgtactcataaccgcatcaggtctccaaggtgaacagcctctggtcgatggaacaatgtaggcaagggaagtcggcaaaatggatccgtaacctcgggaaaaggattggctctgagggctgggcacgggggtcccagtcccgaacccgtcggctgtcggtggactgctcnanctgcttccgcggcgagancnggtcgttcncgtgccggtcgggggacggattgggaagggcccttcggggcttc

SEQ ID NO: 278006 - DNA, 291 bp, Glycine max
  unsure (1)..(291): unsure at all n locations
gaagctgtttggccaaacactcccattcccactgcactgcgaganttctaaagcctctccctgcaggtgttgaaatcgatgaactccctaagcaaattgatgatacacagtacccaaaaacattcttctataaagaagaccttcatccaggcaaaacaatgaaagtacaattcaccaagcgtccctatgcacaaccttatggtgtatatacatggttaacggtattaaagacacctctaaagaaggatatagttttgaagagatatgcatcaagaaagaagcgtttgaggg

SEQ ID NO: 278007 - DNA, 141 bp, Glycine max
  unsure (1)..(141): unsure at all n locations
ctctcttctctctccacncaaaccctaactnccgaccctgttcncctctcgtaancgtnatgaaaggaggaaagtccaagaccgaatctaagagagccgatcccaaacttgctgtgaataagaagggagccgccaccaagg

SEQ ID NO: 278008 - DNA, 262 bp, Glycine max
  unsure (1)..(262): unsure at all n locations
gttgggtgttgcaggaatgttgcttcctgaggttttcaccaagtttggaatcatcaatgcccctcaatggtatgatgctgggaaatcagagtactttgcatcttcctcaaccctcttcgtgatcgagttcatcttgttccactacgtcgagatccgaagatggcaggacatcaagaacccggctgtgtcaaccaagaccccatcttcaagcaatacagcttgcccccacatgagtgtggatancctggtatgtgttcacccc

SEQ ID NO: 278009 - DNA, 251 bp, Glycine max
  unsure (1)..(251): unsure at all n locations
acgtgctttatatannggctggcttccttcactcattggagttattccttactgtgggtctcaactttgcagtgtatgagtctttgaaagattggttaattaaatctaatccattaggtctagttcaagattctgagttgagtgtgacaactcgcctggcttgtggtgctgcagctggaactattggcnaactgttgcttaccctcttgatgtcatcgtcgaagaatgcagatggtgggttggaaccatgc

SEQ ID NO: 278010 - DNA, 243 bp, Glycine max
  unsure (1)..(243): unsure at all n locations
aaggattctacccgccgctcgatgggaattgcgcttcaaggcgtctcgtagggctaatccgcctcacgagggtcaccaacggcacgtgcctttggggggccgaggccccctactgctggtcggcaaacggacggcgggcgnacgcntcgcttctagccnggattctgacttagaggcgttcagtcataatccaacgcacggtagcttcgcgccactggtttacaaccaagcgcgatgaccaat

SEQ ID NO: 278011 - DNA, 280 bp, Glycine max
caactgttaggcacttgctacatcaaaaaatacgtgatgcatatactcatccccagtttgtgtcagatgtgatgaagccacttcttattgaacagttaatggaccaagaagttgtgaatctttctggtggagagttgcagagagttgctctgtgtctctgtcttggaaagcctgcagacatctatctgatagatgagccaagtgcgtatctagattctgaacagcgaattattgctgccaaagtcattaagaggttaattcttcatgcaaagaaaacggc

SEQ ID NO: 278012 - DNA, 279 bp, Glycine max
  unsure (1)..(279): unsure at all n locations
caatccctgactggggtaagaaccctaggaagatggctgaagctgttgatagggtgatagtacctgactttcagcctaagaaagatgtgaaaatagtgacagatgagaaggccaccagtctctctacagcttctatagatgatgcagcggttattaatgatctagtaatcaagttagagaggtgccgggcaaatcttccaccagtgttcatgatgaaaccattcaatttgagaaggatgatgacacaaactaccatatggatgtgantgctgggctgcc

SEQ ID NO: 278013 - DNA, 281 bp, Glycine max
  unsure (1)..(281): unsure at all n locations
cttttttctctctcttgcaaaacctaattttcatttcttccctcanatttcaaaatgcgtgagatccttcacatccagggtggccaatgcggcaaccagatcggcgccaagttctgggaggtggtttgcgcggagcacgggatcgaccctaccggaaggtacggtggggactcggagttgcagctcgagaggatcaatgtctactacaacgaggccagttgcggtcggttcgtgccgcgcgcggttctcatggacctcgaaccgggcaccatggacagcgt

SEQ ID NO: 278014 - DNA, 255 bp, Glycine max
  unsure (1)..(255): unsure at all n locations
gagaatggctcccaagggtttaacctttctggcantgttactatgcgtttcagcactgtcactgagtccttctgttgcgggggaagggcanaataatggccttgttatgaacttctacaaggaatcatgccctcaggctgaagacatcatcacagaacaagtcaagcttctctacaagcgccacaagaacactgctttctcctggctcaggaacatcttccatggactgtgctgttcagagttgtgatgcttcat

SEQ ID NO: 278015 - DNA, 268 bp, Glycine max
  unsure (1)..(268): unsure at all n locations
cgcaaacgcgatgggaaggtttacgtttgatgcagtcgtctccttgttcgttacggtgcacccgcacgagacctctactttgctccatnnnnnnnnnnnnnnnnnnnntattttgagtgcgtatttcgtagttcttccgttgcgcgatgagggtgccatctcattggggttatcaaatctgccgggtctatttgtggggtccctggtgctcaccctcattgctgcacccttttcttctctcatattctctctacctaacctttccaaa

SEQ ID NO: 278016 - DNA, 280 bp, Glycine max
gtttggattggatctaagacgttgtttttgcttcatccaaactactcaatgggtgccgacgaagactacgactacttgttcaagctggtcctcatcggagactccggcgtcggcaagtccaacctcttgtcccgattcacccgaaacgagttcagcttggagaccaaatccaccatcggcgtcgaattcgccactcgaagtgtccccgttgatagcaagctcgtcaaggcacaaatctgggacactgcaggccaagaaagatatcgtgcattacaagtgc

SEQ ID NO: 278017 - DNA, 280 bp, Glycine max
gaagaattagtcttaatcaggtttcttacctggtgctagatgaggcagacaggatgctggatatgggtttttgaacctcaaattaggaaaattgtgaatgaggtgcccaatcgcaggcaaactctaatgtttactgcaacatggccaaaggaggttaggaaaattgcagctgatctgctagtcaagcctgtccaggtgaacattgggaatgtagatgagctgttgctaacaagtctatactcagcatgttgaagtattgccaccaatggagaaacaaaga

SEQ ID NO: 278018 - DNA, 256 bp, Glycine max
  unsure (1)..(256): unsure at all n locations
aatcatgacttngcncaanccgnnnacctttcgataccctagtgtcaaactcgtcatcgtcggtgacggtggtacaggaaagacaacgttcgtgaataggcatcttaccggtgaatttgagaagaaatacganccgaccattggagtggaggttcacccattggatttcttcacanactgtgganagatcgcttctactgttgggatactgccggacaagagaagtntggtggccncagggatggatnttatatcc

SEQ ID NO: 278019 - DNA, 240 bp, Glycine max
  unsure (1)..(240): unsure at all n locations
ttcgtgttggtctttcagtacgangggatcgttngaaggagctcattgatctggccacnggtgagctcgtgagccttagcgagcaacagcttgtggattgcnatcacgtgtgtgatccnnaannntatggagcgtgtnactcaggctgtaatngtgggtngatgaacaacgcatttgagtacatacttcagtctgggggagtacagaaagaaaaggatgtccatacaccgggagagatgg

SEQ ID NO: 278020 - DNA, 287 bp, Glycine max
  unsure (1)..(287): unsure at all n locations
ctctcccaccccacttacatacacactctcccactcctccgagccggtcgagttgaatcggtgagtcagtgaccgagttgaaccatgtcggacgaagagcaccatttcgaatccaaggccgatgccggagcctccaagacctatcctcagcaggccggaaccatccgcaaaaacggctacatcgtcatcaagggtcgtccctggcaagttgttgaagtttctacttccaagactggtaagcacggccatgctaagtgtcatttgttgggatgatntttcatgccaga

SEQ ID NO: 278021 - DNA, 286 bp, Glycine max
  unsure (1)..(286): unsure at all n locations
cgcagatcttgtccgcgaaggtccaccctctggtcatcttcaacatctggcgattgctnatgttcgacgccctgaccaagccgaccgcgtcatcggaaccctactcggctccgtccttcccgacggaaccgtcgatatccgaaattcctatgctgttcctcacaacgagtctatccaacaggttgcattggatatagagtaccaccacaatatgttaatatcccaccaaaaagtgaatccaaaggaaatcatagtaggaggtatcaancggtcttggataatggtg

SEQ ID NO: 278022 - DNA, 284 bp, Glycine max
  unsure (1)..(284): unsure at all n locations
caggaagcnatagttttgccaccatgggttgctctggctgttcgtccaagacctggtgtgtgggagtacctgagagtgaatgtgcacgctcttgttgttgaggagttgcaacctgctgagtacctgcacttcaaggaagaanttgttgacggaagttctaatggcaactttgtgcttgagttggatcttgaaccattgcaatgcagccttcccccgcncaantncttaacaagtcantggaaatggtgtgcaatcctcaaccgtcaccttctgccaaactctcc

SEQ ID NO: 278023 - DNA, 286 bp, Glycine max
  unsure (1)..(286): unsure at all n locations
tgtggccatccaggctgttctctccttgtatgcaagtggtcgcacaactggtattgtattggactctggtgatggtgtgagtcacactgtaccaatctatgaggggtatgcactcccccatgccatccttcgtntggatctcgctggtcgtgatctaactgatcatttgatgaagatcctcactgagagaggatacatgttcaccacctctgctgnagcgagaaattgtccgtgacatgaaggaaaaacttgcatatgttgccctagattatgagcaggaatcgag

SEQ ID NO: 278024 - DNA, 286 bp, Glycine max
  unsure (1)..(286): unsure at all n locations
attcctaatgcaganngnnttgattatntagttggggtttgacacagccccaactagataatcaagctccttctgcattncggaatcctgcaacagagggcttcaagtatttggcaactccttctgtagaagcatgagctctgaancgcagtgccaaatgcatcattcacatagagatcagctagagaagccaacttctttctcgagccgatcggctcgagccagtttgctggatcatcttgggagagctcaaacacatacgccangctgtgggctttctggtttt

SEQ ID NO: 278025 - DNA, 285 bp, Glycine max
tatcaaaccaaaaattctcaaaatctcttcacctctgtgatgaccatggaatacagaaccttagaactcaacatcatatccgcaaaggacatcaagaacgttaacctcttctccaagatggacgtatacgccgtcgttacgctctccggcgaccctctccaccctcagggcgccaccacccacgtccacaaagacgccggcagcaaccccacgtggaactaccccgtgaaattctccgtcaacgaatcgctggccaaggagaatcgtttgtctcttgagatcaag

SEQ ID NO: 278026 - DNA, 286 bp, Glycine max
  unsure (1)..(286): unsure at all n locations
cacaaacccgtccctcacactctccaaaccctagcggcactacacactagttctatcgctatctccccaagatgtcgagcgccgatcccgagcacagagaagaggaggaggcacccgccgttggcgacgacgaggacaccggagctcacgtcgctccaatcgtcannctcgaggaggttgctgtcaccaccggcgaggaggacgaagatgcaatcctgggatcttcaatcgaagctttaccggttcgacaaggacgggaaccagtggaaggagcgtggcgccggca

SEQ ID NO: 278027 - DNA, 283 bp, Glycine max
  unsure (1)..(283): unsure at all n locations
tgaagaaccaacaagaggggtattgagattgagattcaagtaatggggaagagcaaggttcttgtggtggggggaactgggtacatagggaggaggatagtgagggcaagcctggcactgggccatgagacctatgtggttcagaggccagagttgagcctccagatagagaagctgcagaggctcctctccttcaagaagcaaggtgntcatctcattgaggcctctttcaatgatcacaagagcncgttgatgctgtgaagcaggttgatgttgtcatcag

SEQ ID NO: 278028 - DNA, 279 bp, Glycine max
  unsure (1)..(279): unsure at all n locations
ctggcttttatcttcaaaattggttgtgaaaccagacatgttatnnggaaagcgtggcaaaagtggtttggttgccttgaatctagatttggcagaagttgattcttttgtgaaagggcgtcttggcaaagaggttgagatgggtggatgcaaaggacctataacaactttgcattgttgaacctttatccctcacaatgaggagttttaccttaacatgtctgagagagactagggaacagtataagcttttctgaatgtggaggatgaantgaggag

SEQ ID NO: 278029 - DNA, 279 bp, Glycine max
  unsure (1)..(279): unsure at all n locations
gtccatttcgggcaatccgattcagcgattgggagcatacatattggagtcatttgttgcaaggatggctgcttcaggaagcacaatctacaagtccttaaaatgtagtgagcctactggtaatgaactactttcatacatgcatgtgctttatgaaatttgtccatncttcaagtttgggtacatgtcggcaaatggagcaattgctgaagctctgaaggaggaaagtgaagtccacatagttgacttcagattggccagggaacccatgggtgagct

SEQ ID NO: 278030 - DNA, 281 bp, Glycine max
gatcgagataactagaaacagtgtgatgaaaatgaaggtccttgttttcttcgttgctacaattttggtagcatggcaatgccatgcgtacgatatgttccctctccgaatgaacactggctatggtgcccgtactccggaggtgaaatgcgctcgttggaggcttgctgtggaagcacacaacatctttggctttgagaccattcctgaagagtgcgttgaagcaacaaaggaatacatccatggcgaacaatatagatcagactccaaaacagttaacc

SEQ ID NO: 278031 - DNA, 283 bp, Glycine max
atcgatttcgcgcgtaacaccgccgacggcgtgggattccacgtgcttcgcggagctgatgatgtcttcggggctcgtgtgcaacgacgccgtgagttgggtcacgttccacagcgcgtacgatttcggttacttggtgaagatcttgacgcgccgtaacctaccgacgaggttggaggaattcttgaaaaccgtgaaggtgttcttcggagataacgtttacgacgtgaagcacatgatgaggttctgtgacacgctctacggcggattggaccgcgttgca

SEQ ID NO: 278032 - DNA, 282 bp, Glycine max
gagaaaatggtttcggggtcagggatctgtgccaagagggtaattgtggacgcacgacaccacatgctggggaggctggcatcgatcgtggcgaaagaacttctgaatgggcagaaggtggtggtggtacgctgcgaggagatttgcatctccggtgggctcgtcaggcagaagatgaagtacttgcgtttcctccgcaagcgcatgaacaccaagccctctcacggccccatccattccgtgcacccggcaagatcttctggcgcaccgttcgtgggatga

SEQ ID NO: 278033 - DNA, 282 bp, Glycine max
  unsure (1)..(282): unsure at all n locations
tgataatttgattggcagaggtggctgtagttatgtttacagaggatgtctccagatggcgaggaattggcggtgaaaattttgaagccgtctgaaaacgtgataaaggagtttgttcaggaaattgagatcattacaactttgcgccacaagaacatncatatctatatctggcttttgtttagagggcaaccatttgctactagtgtatgattttttatcaagaggaagcctggaagaaaacctcaggcaacaaggtggactgtagtgcnttggttggca

SEQ ID NO: 278034 - DNA, 282 bp, Glycine max
  unsure (1)..(282): unsure at all n locations
ctcccctttgccgctgttgttgttgctgcaccaccgaacaacttcccctgtaaatcgcgtttcgtttgtgncaaggttttaaaagatggctgatgctgaggacattcaacctcttgttgttgataatggaactggaatggtcaaggctggttttgcaggtgatgatgctcctagggccgtgttccccagcattattgggagacccgacccatactggtgtaatggttgggatgggtcagaaggatgcttacgtgggtgatgaagcccaatcaaaaaggggta

SEQ ID NO: 278035 - DNA, 278 bp, Glycine max
  unsure (1)..(278): unsure at all n locations
gngaccgagtgagtntnnttatctcagctgatatatatggcgcttgatcgcttccattataancaaaacgacgtggtacancgtcgtattntggatgatngtggtgctngngngngtncacgntgcagccgcgaggccgaaccggaaggagtgggactcagtcataaagttaccgactgaaccggtggatgctgactcggatgaagtgggaacacgatgggcggttctcgtggctggttcaaacggctacggaaatacaggcatcaagcagatgtgtg

SEQ ID NO: 278036 - DNA, 276 bp, Glycine max
  unsure (1)..(276): unsure at all n locations
ccgccacttctgaatctattgaatcaacaatnatgtcggacgaagagcaccatttcgagtccaaggncgacgccggagcctccaaaacctaccctcagcaagccggtaccatccgcaagaacggctacatcgtcatcaaaggccgcccctgacaaggttgtggaagtttcgacttccaaaactggaaagcacggtcacgctaagtgtcatttgttggantgatattttcatgncaagatannccngatntgtgccctcttctcacaatgtgatgtt

SEQ ID NO: 278037 - DNA, 278 bp, Glycine max
  unsure (1)..(278): unsure at all n locations
gcatccttcgtttcaatttctctctctcagcgcttnctgcaatcgaacctttcatctccaaagggatccacaggccgaaggagaaatggggctgacattcacaaagcttttcagtcggcttttcgcgaagaaggaaatgcgaattctgatggttggtctngatgctgctggtaagancactatcctgtacaagctcaagctcggagagatcgttaccacaattcctaccatcgggttcaatgttgagactgtggatacaagaacattagttcactgtt

SEQ ID NO: 278038 - DNA, 282 bp, Glycine max
  unsure (1)..(282): unsure at all n locations
gtagaagcgcacagagagagctaagtggaggaagaaaatgaaggcattggggatggtggctgatagcggtaggcacgcttcgattagcttccgtgtggttcggtttcttcgacatttgggctcttcgtctcgccgtcttctccaacactacaatgactgaagttcatgggcngcacatttggaacttggacactgttgacctgcaccctttgttatatctgcgcattcaaccttgaaaataagcctctctacctggctacttttttgtcattcatctatgca

SEQ ID NO: 278039 - DNA, 271 bp, Glycine max
cagtagacaacttttcatagatggagagtggaaagtccctcttctcaacaatcggtttccgatcatcaaccccgctactgaagacatcatagggcatattccagccgctactaaggaagatgttgaccttgcggtggatgctgctaaaagagccttttcccataacaaaggcaaagatggtcttcagctcctggctctgttcgtgctcgctatcttcgagccatcgcttcaaagataacagagaaaaaggatgaataggaaagcttgaagc

SEQ ID NO: 278040 - DNA, 300 bp, Glycine max
  unsure (1)..(300): unsure at all n locations
aacatctcatccaanatngcgccaaagtnattctctccagccacttggggcggccgaagggtgtcactacnaantacagcttggngcctcttgtaccccggctttctgnnctcattggtatccagattgtcaaggccgaggacagtattggnccagaagtagaaaaatnggtggcttctcttccagatggangtgttctccttctagaaaatgtgaggttttacaaggaggcagaaaagaatgaccccgagcatgcgaanaagctngcntctctggcnagatctgtatgtgaatgatgcc

SEQ ID NO: 278041 - DNA, 294 bp, Glycine max
  unsure (1)..(294): unsure at all n locations
cacagcatataagctgtttacaggttctgcntggatgatgctctctcgccaatttgttgaatatttgttatggggatgggntaacttgcctagaattgtcttgatgtattatgccaattttntatcctcccctgaagggtatttncacacagcnnacgnncacgctgaggngttccngnacaccacggnganncntgacctccacttcatntnnngggacaaccctccaaaacaacagccananttcnttacananggatanntnccagnnagatggtggacagtnacactccc

SEQ ID NO: 278042 - DNA, 290 bp, Glycine max
  unsure (1)..(290): unsure at all n locations
tggatggtaatcacactttgcatattattccagattctagacaagtgaaggcagaggagttgcagcctggtgtctgttaccttcagattactgccgttgatccagtaatggaagatgaggatttaggaagtaggagagaaagaattttctctctctctactggangcgtccgagcccgcgtatttgaccgattcttgtttgacaccccatttaccaaaaatggcaagactcaaggtggattggaagatcaatggaagagacgcactgttcttcggactgagggttctttt

SEQ ID NO: 278043 - DNA, 290 bp, Glycine max
gggaggttgaaggcggcgtgagaagcatgttggacatcaacctattcagagaggagaagggccacaaccctgaattcatccgcgaatcccagcgccgtcgtttcgccagcgtcgaagtcgtcgacgaggtcatcaatctcgacaaagaatggcgaaagcgtcaattcgagttggagaatctccgcaaagaatttaacaagatcaacaaggaagtctccaaactcaagcgtgctggcgaggatgcaactaagttcatcagtgaatcagaggaaaccaagaaatcgataggg

SEQ ID NO: 278044 - DNA, 293 bp, Glycine max
  unsure (1)..(293): unsure at all n locations
cttgctggttgccacactacaccgatangcgccaccaaacccgtttgcnntgttgtttgcgaataaatggcaactaagaggagncnnnggaaanttgaaggagggtgatttgnaaggggaagagggtattcgtgagggtcgatctgaacgtgcctttggatgacaaccttaacatcaccgatgacactagagtccgtgctgctgttcccaccatcaagtacttgactggttatggtgctaaagtgatcctttctagccatttgggacgtccaaaaggtgtaacacctaaatac

SEQ ID NO: 278045 - DNA, 290 bp, Glycine max
  unsure (1)..(290): unsure at all n locations
taancagattgatccttaccatggtgancatgctgctgagatccttgttgagntctttgagaagancaaggctgntncntctcactgggacnnaatctcccagggnggactcaagcgtattcatgnnaagtacacatggcaaatttactcggncaggctcttgacactcactggtgtgtatggcttctggaagcacgtgaccaatcttgaacgccgtgagagcaaacgttacctcgagatgttctatgctctcaagtaccgcaaattggctgagtctgtgccccttgcta

SEQ ID NO: 278046 - DNA, 287 bp, Glycine max
  unsure (1)..(287): unsure at all n locations
cccatcttctctctcgtaacaatcaaatcacacttttgtgttgtgttgggacaccctanaccccnttttcngtgaaatcgagatcgatcgaacatggatgaggagtacgatgtaatcgtgtngggcacgggnctcaaggagtgcattctcagcggtcttctctccgtcgatggcctcaaggttctgcatatggataggaacgactattacggaggagantccacttcgctcaatcttattcanctttggaaganattcaggggagangncaagcctcctccacattt

SEQ ID NO: 278047 - DNA, 287 bp, Glycine max
tttcgcactttctttcagtcaccatctccgactctttctcttatctctaagtcaacatggctcaccttgaagattcaagtgcatggaattcgagtatacctcaccctaagctcaatgaaagaattctgtcttctctgtcacggagaactgttgctgctcacccctggcacgatttagagattgggccaggagctccagctgttttcaactgtgtggttgaaattggcaaaggcagtaaggttaagtatgagctggacaagacaagtggacttataaaggttgatcgt

SEQ ID NO: 278048 - DNA, 286 bp, Glycine max
  unsure (1)..(286): unsure at all n locations
aagaatcgcagtgagaagaagagggggtcagagtgagaaagagaaagagagaattcgtaaaccctaatttcggaaagatcggcgatgactgcctccaaggatcgcgagancttcgtctacatcnccaaactcgccgagcaggccgagcgttacgaagagatggtggaatcaatgaagaacgttgcgaatctcgacgttgaactgacggtggaggagcggaatttgctttctgttgggtacaagaatgtgattggtgctcgcagacgtcctggaggatcctgtcttc

SEQ ID NO: 278049 - DNA, 291 bp, Glycine max
  unsure (1)..(291): unsure at all n locations
tgcgactgcgcttcagcacaatgggtgcctacaagtatgtttcggagctatggcgcaagangcagtctgatgttatgagattcttgcagcgggtgaggtnctgggagtatcgccagcaaccttctattgtcccgtttgacaaggtctactcgcccagataaggctcgtcgcttgggtttcaangctaagcagggttacgtgatttaccgtgttcgcgtacgaaggggtggccgtaagagaccagttccaaagggtattgtttatggtaagcccaccaaccaaggtgttact

SEQ ID NO: 278050 - DNA, 284 bp, Glycine max
  unsure (1)..(284): unsure at all n locations
caatccctgactggggtaagaaccctaggaagatggctgaagctgttgatagggtgatagtacctgactttcagcctaagaaagatgtgaaaatagtgacagatgagaaggccaccagtctctctacagcttctatagatgatgcagcggttattactnatctagtaatcaagttagagaggtgccgggcaaatcttccaccagtgttcatgatgaaaccaattcaatttgagaaggatgatgacacaaactaccatatggatgtgatgctgggcttgccaaca

SEQ ID NO: 278051 - DNA, 282 bp, Glycine max
  unsure (1)..(282): unsure at all n locations
ctcgagccctgaaggtgttgatagtacaatttggctattggccaaggctcatgttattgtnaatgactctggttatcatcagctcgtgagccattggttaaatactcatggcantgatggaaccatttgccatagcaacnaataggcatctcagtgtgctccaccctatttataaactnctttatcctcactaccgcgacaccataaatatcaatggacttgctaggcagtccctgattaatgcagatggcattatagagaaatcatttttgcccggaaagt

SEQ ID NO: 278052 - DNA, 276 bp, Glycine max
  unsure (1)..(276): unsure at all n locations
ttctaccttatnttctttccctagtcaaggagattcatctctgcagcaggttgttttaganaagagaaaatgctgaagatttgctgcattgggggctggataatgtgnggggtccaacnatggccagtcattgcactgaaatgcccctcaattgaagtggctgttgttganatctctaaatccaggattgcagcatggaacagtgaccagctcccctatctatgagccaggccttgatgatgtggtgaagcaatgtcgtagcaagaaccttttctt

SEQ ID NO: 278053 - DNA, 279 bp, Glycine max
  unsure (1)..(279): unsure at all n locations
aacctctaacctacctctttttcttctctctcaacaacttcaccttcttcctcctcgatcatgtctcacttcaagggcaagtaccatgatgagcttatcgccaatgctgcgtacattggcactcctggaaagggtattctngctgctgatgagtcaacagggacaattggcaagcgtttggccagcatcagtgtagagaacattgaatccaacaggcgagctcttagggagctgcttttcactgctcctggtgttcttcaatatctcagtggtgtcatc

SEQ ID NO: 278054 - DNA, 286 bp, Glycine max
  unsure (1)..(286): unsure at all n locations
aaacaaattgagaagacaattcagtaccttattgggtctgggatggatcctcggaccgagaacagcccctaccttggtttcatttacacttcatttcaagagagggcaaccttcatatcccacggaaacacngccaggcttgcgaagngancncngtgncataaaattggcacagatctgcggcatgattgcctcagatgagaagcgccacgagactgcatacacaaagatagtggaaaagctgtttgaggttgatcctgatggtacagttatggcatttgccgac

SEQ ID NO: 278055 - DNA, 281 bp, Glycine max
  unsure (1)..(281): unsure at all n locations
cgattgctagaatggaatttcgatgctcagtcatcnccnttaccattctcttctctcttgctcttgcaggagagagccatgtccatgcatcgctacctgaggaagattattgggaagctgtttggccaaacactcccattcccactgcactgcgagagcttctaaagcctctccctgcaggtgtngaaatcgatgaactccctaagcaaattgatgatacacagtacccaaaaacattcttctataaagaagaccttcatccaggcaaaacaatgaaagta

SEQ ID NO: 278056 - DNA, 179 bp, Glycine max
agtaatcgagcaagtgcagtgcttcgggcggaagaagacagcggtggcagtgacctactgcaagcgtggtcgaggcctcatcaagatcaatggctgcccgatcgagctggtggagccggagatcctccgtttcaaggccttcgagccaatcctcctcctcggccgccaccgcttcgccg

SEQ ID NO: 278057 - DNA, 179 bp, Glycine max; identical to SEQ ID NO: 278056

SEQ ID NO: 278058 - DNA, 267 bp, Glycine max
  unsure (1)..(267): unsure at all n locations
ttgaggcccttgatgcggatagcatggacatggaaattgatttatctaatcttgggactgtgaacacaatgtttacagctttattcagcaaaatgggtgtccctatcaagactaccatttcagctantgttcttgaagaagctctgaatggaacagttacaatcagaccccttccaattgttctactttgaacaagatgcaaatggaggctatggtttagcattgcaggaagatagtgagaagactggcaaggtgacatctgcagga

SEQ ID NO: 278059 - DNA, 281 bp, Glycine max
  unsure (1)..(281): unsure at all n locations
ttccaaacaaaacccatcaaagtctttctccctcagtgatcatatattcattcagttctatacaaaatcctcaaaaactcttcctctctgccatgaccatggaatacagaaccttagaactcaacatcnnattccgcaaaggacatcaagaatgttaatctcttctccaagatggacgtatacgccgccgtttcgctctccggtgaccctctccaccctcagggcgccaccacccacgtccacaaagacgccggcagcaaccccacgtggaataccccgtg

SEQ ID NO: 278060 - DNA, 277 bp, Glycine max
  unsure (1)..(277): unsure at all n locations
caaaagtgaaaatggagttagttctaaacagcacaacaattggagttggagttgtttctctgatcctcctcttgtacttgtntttgcgtggtggttcatggaagagtggggaagagggtcctccaacagttgcaggtgcatggccaggcantggtcacctcccattgttgcttggttcaaagacacctcataaaacattgggtgacttggctgacaagtatggacccatattctcgatcaagattggtgccaaaaacgcagtggttgttagcaactg

SEQ ID NO: 278061 - DNA, 267 bp, Glycine max
attctcttcaccctttgcctctgaaagaaatgggtagtcttgaagcggaaagaacaacagtaggattggcagcaagagacccttcagggattctctccccatacacctacaatctaagaaacacaggccctgatgatgtttacattaaagttcactactgtggaatttgccattctgatctccaccagattaaaaatgatcttggcatgtccaactatcccatggtcccaggacatgaagtggttggtgaggtactggaggtgggat

SEQ ID NO: 278062 - DNA, 275 bp, Glycine max
tgatcttctactctctgggtatggcattgtccaaggatatatctgacgttaaaggagataaagcatacggcatcgatactttagcgatacgtttgggtcaaaaatgggtattttggatttgcattatcctttttgaaatggcttttggagttgccctcttggcaggagcaacatcttcttacctttggattaaaattgtcacgggtctgggacatgctattcttgcttcaattctcttgtaccaagccaaatctatatacttgagcaacaaagtt

SEQ ID NO: 278063 - DNA, 273 bp, Glycine max
cagggactcactctcttcgcagcggcactctcggtggctttcatcttctcggggtgagttgtcaagatgtacacatcgaggaagaaaattcacaaggataaggatgctgagccaactgaatttgaggaatcagttggacaggcattgtttgatctagaaaataccaacaatgagctgaaaagtgatctgaaagatttatacataaactcagctgtccaaattgatgtttctggcaaccgaaaggctgtggttatccatgtcccctacagacta

SEQ ID NO: 278064 - DNA, 273 bp, Glycine max
  unsure (1)..(273): unsure at all n locations
caatatattccattctctctgtgtatttccctacctctcccttcaaggttagtcgatttcttctgttttnnttcttcgttctttccatgaattgtgtatgttctttgatcaatacgatnttgatttgattgtgttttgtttggtttcatcgatcttcaattttcataatcagattcagcttttattatctttacaacaacgtccttaatttgatgattctttaatcgtagatttgctctaattagagctttttcatgtcagatccctttacaa

SEQ ID NO: 278065 - DNA, 277 bp, Glycine max
  unsure (1)..(277): unsure at all n locations
gggaatcaaacttgcagaaagaactganccgatacattcccaccgcggcagcatttggaggcatatgtatcggtgcattgactgtgttgggcagatttcatgggggcaattggttcagggacaggaatattgcttgcagtaacaatcatctatcagtacttcgaaacntttgagaaggagagagcaagcgagcttggcttcttcggtttctaagctctgcttagcacattcactgttggtgacgcaattcggctctaccgcacccacagttttgttg

SEQ ID NO: 278066 - DNA, 286 bp, Glycine max
  unsure (1)..(286): unsure at all n locations
cacaacaaaaaaagacaacccagagagcgcgtcttaataaacgctcttctctgaaaacccccatttacttttcttctttcttcttctctttcgcttcttcgatcttcgatcttacgtacgctgaaaatgagagagtgcatttacaatccacatcggccaggccgggattcaagccanaaacgcctgctgggagctttactgcctcgaacacggcattcagcctgatgggcagatgccaagtgacaagaccgttggtggaggtgatgatgctttcaacaccttcttc

SEQ ID NO: 278067 - DNA, 281 bp, Glycine max
gcctacgctctgtatacattagcatgggataacaccacaggattctgatcctattgtgttggccttcgggatcggagtaatgattaacagggacagtcgggggcattcgtatttcatagtcagaggtgaaattcttggatttatgaaagacgaacaactgcgaaagcatttgccaaggatgttttcattaatcaagaacgaaagttgggggctcgaagacgatcagataccgtcctagtctcaaccataaacgatgccgaccagggatcagcggatgttgc

SEQ ID NO: 278068 - DNA, 280 bp, Glycine max
gggtccctcacactggggggaactgaagaaggaatgggaaacatgtaaaagtggcaaaatgcaatctccaattgatttgtcaagccacagagtgagagtggtgccaaagttaggggagcttaagaagtactataagcctcagaatgccactgtcaagaacagaggccatgatattgagctgaaatgggagggagatgctggatcaataaacatcaacggcaccgagttttttctgcatcaatgccattggcattcaccttcagaacatacaatcaatggc

SEQ ID NO: 278069 - DNA, 280 bp, Glycine max
  unsure (1)..(280): unsure at all n locations
gcgacacanataggaaaaatgctaaagtccgtttctattgatgactacgaagatgttccngcctatgatgagttagcctgaaaaaggccgttgcaaatncagcccgtgagcgttgctattgaaggagggggcagggaatttcaattatatgtatctggtgtattcacggggagatgtggcacagcactagatcatggtgtcgtggctgttgggtatggaacagctaaaggtcagattatggatcgtaaggnttcatggggttctagctggggagaggatg

SEQ ID NO: 278070 - DNA, 284 bp, Glycine max
  unsure (1)..(284): unsure at all n locations
aaaaaaaaaccctctctttctctctcttccaaaacctaattttcatttttnctcttcaancaaattttcaatcngcgtgagatccttcacatccagggtggccaatgcggcaaccagatcggcgccaagttctgggaggtggtttgcgcggagcacgggatcgaccccactggaaggtacggtggggactcanagcttcagctcgagaggatcaatgtctactacaacgaagccagctgcggccggttcgtgccgcgcgcggttctcatggacctcgaaccggg

SEQ ID NO: 278071 - DNA, 241 bp, Glycine max
  unsure (1)..(241): unsure at all n locations
gaagatgaaactaaaggtgtatatattgccaagcttgaagaactcaaaaagcaaggtgatccaattgatgggcgatacgaagaantcacggagaggggtactatacttgaacagttcgtgtattgtataaatagttacagacaagttgcaatgtcaaatgatcctagatttgagcacattgacattaacgagaaacagaaggtcataaataaatgtgttgaagctgagaagtggtttaatg

SEQ ID NO: 278072 - DNA, 287 bp, Glycine max
cctcactcagctacaagggcagccatgttggttaggatcaataccttgcttcaaggatactacaggcattagatttgaaatcatggaggccatcaccaagtttttgaaccataacataaccccatgtcttcctctacgtggtacaatcactgcatcaggtgacttggttcctttatcatatgttgctggcctcttgattggaaggccaaactccaagtctattggacctaatggacaagttctaatgctaaagaggccttcaactagctggaatagatggtggtttc

SEQ ID NO: 278073 - DNA, 281 bp, Glycine max
  unsure (1)..(281): unsure at all n locations
agcgtcacaagagctggtattcttggattctgtcttcgctcacaagttgtgtatacatgtttggctttattatgatgtgccctcaattgttcatcaactannagctcaaatctgttgctcatctaccttggaggcaaatgacatacaagtttctcaacaccataattgatgacctttttgcctttgtcattaaaatgccaacactccatcggctttctgtcttccgtgatgatcttatctttgtcatatacttataccagaggtggatttataaagtggac

SEQ ID NO: 278074 - DNA, 252 bp, Glycine max
  unsure (1)..(252): unsure at all n locations
taacaagttgaacggccaatacngatggatatcctnncagatgaaccgtgtgaggaacggagagctctaccgtgtcatctgtgacacaaggggtgcctttgtgcagcctgcagtttatgaggcctttgggttgactgtggttgaggccatgacttgtgggttgccaacgtttgccacatgcaatggtggtcctgctgagatcatgtgcaggaaaatctggttaccacatgatccntaccaggtgaccagctg

SEQ ID NO: 278075 - DNA, 280 bp, Glycine max
  unsure (1)..(280): unsure at all n locations
gcgacacatataggaaaaatgctaaagtcgtttctattgatgactacgaagatgttcctgcctatgatgagttagcctgaaaaaggccgttgcaaatacagcccgtgagcgttgctattgaaggagggggcagggantttcaattatatgtatctggtgtattcacggggagatgtggcacagcactagatcatggtgtcgtggctgttgggtatggaacagctaaaggtcatgatattggatcgtaaggantcatggggttctagctggggagaggatg

SEQ ID NO: 278076 - DNA, 280 bp, Glycine max
  unsure (1)..(280): unsure at all n locations
aagttggctatgatgaatttgtcaagatgatgatgattattggatgaaaatttaaaccaacaaatttattgttcgaattcgtttttgtgcgccntctcatttactcccaagaaattaataagtcttccaattaatgtttgtngtatttaacttgtacacatgatgtgaatgaccaatgtattagagtgacatctcagccacccatttcatgttcaaacttcaacccataattattctttcagttttagtttagtattcctatgttttacaataattagag

SEQ ID NO: 278077 - DNA, 276 bp, Glycine max
  unsure (1)..(276): unsure at all n locations
aattgcaagaatggcacttcgttgcttggtgatgtccctttctgttctcttcactacttggtcttgcgagagaaagccatgccagagacgaagatttttggcatgctgtttggccaaacactcccattccaagttcattgcgagatcttctaaagcctggccctgcaagtgttgaaatcgatgatcaccctatgcaaattgaagaaacacagtacccgaaaacctcttctataaagaagaccttcatccaggcaaaacaatgaaagtacantcagc

SEQ ID NO: 278078 - DNA, 264 bp, Glycine max
  unsure (1)..(264): unsure at all n locations
tttctctctccagtatggcttctactcacaatgagttttcctgcacttatgctagtggtggtggttggctccatggtggcttcctgtggtgctaacttcaaccaagactttgatctaacatggggtgatcaccgtgctaagatattcaatggtggtcagcttctatctctttctctggacaaagtctctggctccggcttccaatccaagaaagagtacctatttgggaggatcgatatgcaactcaagccntncatggcaatc

SEQ ID NO: 278079 - DNA, 272 bp, Glycine max
  unsure (1)..(272): unsure at all n locations
tcgattggntaccaggaattaaggaaattcggttgaaggatcttcccagcttcattagaaccacaaataccagatgagttcatgcttgatttcatacagtgggagtgtgggaggactcgaagagcttctgcaataattttgaacacctttgatgccttagagcacgacgttttggaagcgttctcgtccattttgcctccggtttattccattggtccttgaattactcgtgaaacatgttgatgacaaagactaaacgcaattgggtccaa

SEQ ID NO: 278080 - DNA, 274 bp, Glycine max
  unsure (1)..(274): unsure at all n locations
caagttggctatgatgaatttgtcaagatgatgatgattattggatgaaaatttaaaccaacaaatttattgttcgaattcgtttttgtgccccactctcatttactcccaagaaattaataagtcttccaattaatgtttgttgtatttaacttgtacacatgatgtgaatgaccaatgtattagagtgacatctcagccacccatttcatgttcaaacttcaacccataattatctttcagttttagtntagtatcctatgttttacaatta

SEQ ID NO: 278081 - DNA, 278 bp, Glycine max
  unsure (1)..(278): unsure at all n locations
gggataatgcagctccccattctcagangcttacacaaatattcttgcggagactgaaaaagtacaaccctaactacttgaagctgtagtcacttatactgangagttggcacacgagcaagcaaaagangcagataagttgcttagccgtggagtctatctggggcctcttcatgggattcctatggattgncngacnnctatcagtgcccaaatacaaaacgacctggggatcaaaatcatcaaaaatcaagttattgacgtagaagcttgggtct

SEQ ID NO: 278082 - DNA, 273 bp, Glycine max
  unsure (1)..(273): unsure at all n locations
ttccagccacacgcttcagaagacatggcctcattgggtgggttacaaaatgtgaacggcatacaattttcttatcaaagagggtccaaaagtcaatgcaaagttcgagctgaagccgccaccatatccactgaatggtttggagccggtgatgagccagcagacacttgagtttcactgggggaagcaccacaagacttatgtggaaaatctgaaaaaacaagttgttgggacagagctgatgggaatcatagaagagntatgtcacatcta

SEQ ID NO: 278083 - DNA, 275 bp, Glycine max
gccaaaaatgcattggaaaattatgcctataacatgaggaacacaatcaaggatgacaagattgcttccaaactgtcttctgatgataagaagaaaattgaagatgcgattgagcaggctatccaatggctagatggaaaccaacttgctgaggctgacgaatttgaggataagatgaaggagttggagagcatttgtaatgcccatcatagcaaagatgtaccagggtgctggtggtgatgcgggtggagccatggatgaggatggtcctgcag

SEQ ID NO: 278084 - DNA, 274 bp, Glycine max
  unsure (1)..(274): unsure at all n locations
tttggttcgagtttctgctgttcttacaaatgcaccattcatgttgaatctggattgtgatcnctacgtcaataatagcaaggcagtcagagaggccatgtgctttttaatggaccccaaccttgggaagaagctgtgctatgtccaatttccacaaagatttgatggncatgatcgccacgatagatatgctaaccgaaacacggtgttctttgatatcaatatgaaagggctgatgggatcaaggtccagtatatgttggtactggaactgt

SEQ ID NO: 278085 - DNA, 280 bp, Glycine max
ctggcacccaagagcatgtagttactgctctcctgaacttgtctatcaatgtggataataaagagcgcatcatggcttcagaggctgtgccaggcatccttcatgtgctagaaaatggtagtatggaagctcaggaaaatgcagcagccacctttttcagcctctctggggtggatgagaacagagtggcaattggtgcgtctggagcaatcccagcatagttactctattttgtgagggaagtcaaagagggaaggtggatgccgcaaaagcatattca

SEQ ID NO: 278086 - DNA, 270 bp, Glycine max
  unsure (1)..(270): unsure at all n locations
gcttctacgggatgaaacagtgaggtcattttcctgggcactgaaggctttcttagggttcatgaatgggaaggctccacagactatattaaccgaccaaaatatatntctcaaagaagcactatccacagaaatgccaacaacaaaacatgctttctgtatatggatgatagtagcaaagtttccatcttggtttaatgctgttttaggggaacgatacaatgattggaaggcagaancncatagacttataatctgagtcattgagga

SEQ ID NO: 278087 - DNA, 269 bp, Glycine max
gctggttgccacactacaccgatatttccaccaaacccgtttgcgttgttggtttgcgcaggtttgcgaataaatggcaactaagaggagcgtgggaacgttgaaggagggtgatttgaaggggaagagggtattcgtgagggtcgatctgaacgtgcctttggatgacaaccttaacatcaccgatgacactagagtccgtgctgctgttcccaccatcaagtacttgactggttatggtgctaaagtgatccttctagccattggga

SEQ ID NO: 278088 - DNA, 273 bp, Glycine max
gcaagaatggcacttcgttgcttggtgatgtccctttctgttctcttcactcttggtcttgcgagagaaagccatgccagagacgaagatttttggcatgctgtttggccaaacactcccattccaagttcattgcgagatcttctaaagcctggccctgcaagtgttgaaatcgatgatcaccctatgcaaattgaagaaacacagtacccgaaaaccttcttctataaagaagaccttcatccaggcaaaacaatgaaagtacaattcagc

SEQ ID NO: 278089 - DNA, 275 bp, Glycine max
  unsure (1)..(275): unsure at all n locations
aagtatagagtgaaagaatgggtgaggaaagcncgattttgatcataggaggcaccggctacatncggcaaacatatantggaagcaagcgcaaaggctggaaatcccacttttgctttggtgagggaatccacactctctgacccctccaaggcacaactcatccacaattttgaggctttgggcgttaatttggtccgcggggatctgtacgatcatgagaagttggtgaaagctatcaagcaagtagatgtcgtcatatccacgctgggtca

SEQ ID NO: 278090 - DNA, 272 bp, Glycine max
  unsure (1)..(272): unsure at all n locations
gtcgtgcggtttgttccatattgcttaccccagtgcnccagagtcggtgaagactgaactgagagccatatatggtcagctgtgtcaagatgatatgcccatggtnaggagatccgctgccacaaacctgggaaagtttgccgcaactgttgaagctcctcacttgaaatctgacatcatgtctgtgtttgaggatctcacacaggatgatcaagattctgttcggctacttgctgttgagggttgtgcagctctgggaaaatgttggaacc

SEQ ID NO: 278091 - DNA, 279 bp, Glycine max
ttcacaaccgaaacagtttccatctctctcacaaaatgacaacaatatcaaattgctcccttctccttcctcttcctcttcctctaccaccctccacatagcttccaccctctcaacccccaccaacttcatcaagtcctcctgcagcaccacccagtacccagccctctgcatccagtccctctccgtctacgcctccaccatccagcaagacccccacgagctcgtccagacagccctctccctctccctcaaccacaccgaggccaccaaaacctt

SEQ ID NO: 278092 - DNA, 271 bp, Glycine max
  unsure (1)..(271): unsure at all n locations
gttgcaacctgctgagtaccttcacttcaaggaagaacttgttgatggaagttctaatggcaactttgtgcttgagttggactttgaaccattcaatgcagccttccctcgcncannnccttaacaagtcaattggaaatggtgtgcagttcctcaaccgccacctttctgccaaactcttccacgaaaangaaaaatggaaaaanacttttggaattcctcaggcttcacagcgtcaagggaaagactttgatgttgaatgacagaatca

SEQ ID NO: 278093 - DNA, 271 bp, Glycine max
gcaagatgaaggagcgtctcgttggggtttctgaggaaaccaccactggagttaagaggctctatacagatgcaggcgaatgggactcttctcttccctgctattaatgtcaatgactctgtcaccaagagcaagtttgacaacttgtatgggtgccgtcactctctccctgatggtctcatgagggctaccgatgttatgattgctggaaaggtggctgttgtggctggatatggtgatgttggcaagggttgtgctgctgcaatgaagc

SEQ ID NO: 278094 - DNA, 262 bp, Glycine max
  unsure (1)..(262): unsure at all n locations
ttctaccttattttctttccctagtcaaggagattcatctctgcagcaggttgttttagaaaagaaaaaatgcngaagatttgctgcattggggctggatatgtggggggtccaacaatggcagtcattgcactgaaatgcccctcaattgaagtggctgttgttgacatctctaaatccaggattgcagcatggaacagtgaccagctccctatctatgagccaggccttgatgatgtggtgaagcaatgtcgtggcaaga

SEQ ID NO: 278095 - DNA, 276 bp, Glycine max
  unsure (1)..(276): unsure at all n locations
agagaacattgacctctctctattgcttngacctgcagctgaactgcggccagaagcttctcaatactgtgtgcaaaaacaggntcntggtttggatatggccttggataataagctcataagtctgtctagtgctgctttggaaaaaggtctccagtatacattgaaacncccaatatataatgtaaaccgtgctgtgggaactatgcttagccatgaggtgactaaactgtaccacctagctggtcttccaaatgacaccatccannttagatt

SEQ ID NO: 278096 - DNA, 301 bp, Glycine max
  unsure (1)..(301): unsure at all n locations
cgcttcacgatgggtgcttacaagtatgttcggagctatggcgcaagaagcagtctgatgttatgagattcttgcagcgggtgaggtgctgggagtaccgccagcaaccttctattgtccgtttgacaaggtctactcgcccagacaaggctcgccgcttgggtttcaaggctaagcagggttatgtgatttaccgtgttcgtgtacgaaggggtggccggaagagaccattcacaaaggtatgtttatggtaagcccaccaaccaagtgttatcaatgaanttcagcgcacaagagtctg

SEQ ID NO: 278097 - DNA, 298 bp, Glycine max
  unsure (1)..(298): unsure at all n locations
gacaagtttggtgccatgggaattgacaccccggcgtagttgcattgcttggagcacacagtgttggtcgaacccattgtgtgaagttggtgcaccgtttgtacccagagattgatccagctctgaaccctgaccacgtccctcacattctgaagaagtgccctgatgccattccagaccctaaggccgtgcagtacgtgaganacgaccgtggcacccccatgattctagacaacantatacagaatatattggacaacagggttgttgatagtggatcacaatagccatgacagag

SEQ ID NO: 278098 - DNA, 303 bp, Glycine max
taacttcaacaacttctttcttctcgattcacgatggctcatttgggccctgtctcagatggctgtaactgttcctgttggcaacgatttgtctctcagaagatctgcagttaaggcccctaacttgaacttttgggataaatcatgggcaccagtatttactttggacttgaagccaaacaacccaagtttaagaagtcgtcatgtggtatgcatgtccgtgcaacaagcaagtgtatccaaagttaatgtctcacctttagattggaagatgctaaagaactccatgaattatacaagcta

SEQ ID NO: 278099 - DNA, 307 bp, Glycine max
  unsure (1)..(307): unsure at all n locations
ctcaccctgacagttcctattgggcccatacacatagtcaaggngttccatcttcacccgccgctgggactcctttaancatagagacaccacccaaatcatctggaaatactgatcagggtttaatgaaganattgaaagagtttgatggacttgcaatgtcaataggaaatggccatgctgaaagtgcagagcctggaggtgaaaacaggctgtcaganagtgtggatactgagggttccagtgatggaagtgatggcaaccttcaggggctatcanacaagaaggaaaagaagccgtgaggacc

SEQ ID NO: 278100 - DNA, 308 bp, Glycine max
  unsure (1)..(308): unsure at all n locations
aggtagagagctcttcctcactctcatcgcantggccgcagcagcacgtcctctcgtacaccgtgcaggccctcgacagtgacatggccaccgacgcctccgccaccgtccctatccctgacgtcatgaagtcctccatccgcccggacatcgtcaacttcgtacactccaacatctccaagaacagccgacaaccctatgcagtcagccgccgcgctggccaccagacttccgccgagtctggggaacggtcgtgccgtctcccgtatcccccgtgttcccggcggcggaaccatcgcgccggccag

SEQ ID NO: 278101 - DNA, 308 bp, Glycine max
  unsure (1)..(308): unsure at all n locations
gganaattagcctcacaaaagcaaagtcaaacaaaccaaggacgagaacacgatgttgcttgaacttgcacttggtttattggttttggctctgtttctgcacttgcgtcccacacccactgcaaaatccaaaagcacttcgccatctcccaaacccaccaagcccaaagcctcgtcttcccttcataggacaccttcatctcttaaaagacaaacttctccactacgcactcatcgacctctccaaaaaacatggtcccttattctctctctatttggctcctgccaacgttgttgcctccacacag

SEQ ID NO: 278102 - DNA, 303 bp, Glycine max
  unsure (1)..(303): unsure at all n locations
atgggttcaacaggtgagactcagatactccaacccatgtatctgatgaagaggcaaaccttttcgccatgcaactagccagtgcctcagtactccctatggttctcaantcagctcttgagcttgatctgttggaaatcatagccaaggctggccctggtgttcacctttccccctccgacattgcttctcggctcccaacacacaaccctgatgcacccgttatgttggaccgtatatgcgcctcttggcttgctacaatatcctctctttttctcttcgcatctccctcaggcaagttga

SEQ ID NO: 278103 - DNA, 307 bp, Glycine max
  unsure (1)..(307): unsure at all n locations
tggaataaataattatggaatgacttgcttttttggctgcacgcttctacgggatgnaacagtgaggtcattttcctgggcactgaaggctttcttagggttcatgaatgggcaggctccacagactatattaaccgaccaaaatatnngtctcaaagaagcactatccacagaaatgccaacaacaaaacatgctttctgtatatggatgatagtagcaaagtttccatcttggtttaatgctgttttaggggaacgatacaatgattggaggcagattttatagactttataatcttgagtcagt

SEQ ID NO: 278104 - DNA, 307 bp, Glycine max
  unsure (1)..(307): unsure at all n locations
tacagtttccgatgatcttgaagtgttncttctattttgangtggcttagctacattccttctcatgttggcggtgcacttcccattgtaaagccacttgatcctccagaaagaccagtggagtatttcccagaaaactcgtgtgatcctcgtgctgccatttctggaaccttggatggtaatggaagatggctgggaggaatttttgacaaagacagctttgnnggngacactagagggatgggcaagaacagttgttacaggaagggcaagcttggaggaatccctgtgggagtagttgctgtaa

SEQ ID NO: 278105 - DNA, 239 bp, Glycine max
  unsure (1)..(239): unsure at all n locations
atgttgggtgttataaggcacaagagtattcgccctgccttctccgcaatcagacacttgtcttctgcagctaaagagattactgtcagggaggctctgaactccgcactcgatgaggaaatgtcagctgatcctaaagtgttcttgatgggtgaagaggttggggaatatcagggtgcatacaagatatccaaggggctgctcgacagtatggccccgagaggttctcgatatccanc

SEQ ID NO: 278106 - DNA, 300 bp, Glycine max
gcatttggtactgctcacagggccatgcatcaacagagggtgttactaaatacctgaagccatctgttgctggttttcttttgcaaaaggaacttgattaccttgttggggcagtatcaaaccccaaaaggccatttgctgccattgttggtggttccaaagtctcatctaaaattggagtgattgagtcacttttagaaaaagttgacatcctcttcttggtggaggaatgatcttcacatttacaaggcacaaggtcttcatgggttcatccctgtagaagaagataagttggacttg

SEQ ID NO: 278107 - DNA, 301 bp, Glycine max
  unsure (1)..(301): unsure at all n locations
gcatttggtactgctcacagggcactgcatcaacagagggtgttactaaatacctgaagccatctgttgctggttttcttttgcaaaaggaacttgattaccttgttggggcagtatcaaaccccaaaaggccatttgctgccattgttggtggttccaaagtctcatctaaaattggagtgattgagtcattttagaaaaagttgacatccttcttcttggtggaggaatgatcttcacatttacaaggcacaaggtctttcatgggttcatccctgtagaagagntanttggatctgct

SEQ ID NO: 278108 - DNA, 305 bp, Glycine max
  unsure (1)..(305): unsure at all n locations
caattttctagggtttatacaatttcgatggcttcttcagatgttgagtaccgttgctttgtcggtgggctcgcttgggccactgacgaccaagctctcgagagagccttctctcagtacggcgaaatcgttgaaacgaagattatcaacgatcgtgagactggaagatccaggggttttggatttgtgaccttcgcctcggagcagtccatgaaagacgccatcgaagggatgaacggccaaaaccttgacggccgtaacatcatgttaacgaagctcatcccgtggtngcggtggcggcggag

SEQ ID NO: 278109 - DNA, 300 bp, Glycine max
  unsure (1)..(300): unsure at all n locations
tcgcagtttgatgctcggcaatatgattctaagatgaatgaattgctttccgccgatggacaagaatttttcacttcatatgacgaagtctatgatagttttcatgcaatgggccttcaagaaaatcttctgagaggcatatatgcttatggttttgagaggccttctgcaatccagcagaggggaattgttcctttctgcaagggtctggatgtgattcagcaggctcagtctggaatggaaagacagcangttctgttcaggantttgcagcagcttgactaggntggttcatgtcag

SEQ ID NO: 278110 - DNA, 302 bp, Glycine max
  unsure (1)..(302): unsure at all n locations
gcaggtgaatggtttaccgcccgatctctgcatgtggactatttcatattgcataccctagcgcaccagaaacatcanagacagagttgagatcaatatacagtcagttatgtcaggatgatatgcctatggttagaaggtcggctgcatcaaatcttgggaaatttgctgcaactgttgaatatgctcatttgaaggctgatgtcatgtcaatttttgacgatcttactcaagatgatcaagatctgtcagattgttggctgtggagggctgtgctgctcttggcaagctgttggagccac

SEQ ID NO: 278111 - DNA, 295 bp, Glycine max
  unsure (1)..(295): unsure at all n locations
ccgatcttcgtcgctgaaatgagancagtgcatttcaatccacatcggccangacnnngattcaggttggaanncgcctgctgggagctttactnncctcgaacacggcattcagcctgatgggcagatgccaagtgacaagaccgttggtggaggtgatgatgctttcaacaccttcttcagtgtcaactggggcaggaaagcacgtgccccgtgcgatttttgtagatctgagcccatgtgatgatgaggttaggatgggacataccgccaatattccatcctgagcagctca

SEQ ID NO: 278112 - DNA, 301 bp, Glycine max
gcaaatcggttcatctttcactcgatgagagaacaggttcaggatttgtgtcgcatgatctttaccttcacggatatttcagcgcttctattaagttgccttctgactacactgcaggagttgtggttgccttctatatgtcaaatggtgacatgttccagaataaccatgatgaaatcgactttgagtttttggggaacattagaggcaaagactggaggattcagaccaatgtttatggcatggtagcaccaacatggcagagaggaaagatatggtctgtggtttgaccctgcagaga

SEQ ID NO: 278113 - DNA, 302 bp, Glycine max
  unsure (1)..(302): unsure at all n locations
gttcaacaggtgtcctattctgtggtacagactcaaggattggacccaagtttctcaatgccagtgttggttttggtggatcctgcttccagaaggatatcttgaaccttgtttacatctgtgagtgcaatggccttccagaggtggctgagtattggaaacaagtgatcaagatcaatgattatcagaagagccgatttgtgaaccgtgttgttgcatcaatgttcnacacagtttcaaacaaaaagattgctattctgggattgccttcaagaaagacactggtgacacaagggagctcc

SEQ ID NO: 278114 - DNA, 302 bp, Glycine max
  unsure (1)..(302): unsure at all n locations
ccccaaaaccctaggtagaggctcttcctcactctcattcgcantggccgcagcagcacgtcctctcgtcaccgtgcaggccctcgacagtgacatggccaccgacgcctccgccaccgtccctatccctgacgtcatgaagtcctccatccgcccggacatcgtcaacttcgtacactccaacatctccaagaacagccgacaaccctatgcagtcagccgccgcgctggccaccagacttccgccgagtcctggggaacggtcgtgccgtctcccgtatcccccgtgttcccggcggcgg

SEQ ID NO: 278115 - DNA, 303 bp, Glycine max
  unsure (1)..(303): unsure at all n locations
cttcgttaagacactcaccgncaagaccataaccctagaggttacnagctccgacaccatcgataacgtcaaggccaagatccaggacaaggagggtatccccccggaccagcaacgtctcatcttcgccggaaagcagctcgaggacggccgcaccctcgccgactacaacatccagaaggaatcaacccttcacctcgtcctccgtctccgtggtggcatgcagatcttcgttaagaccctcaccggcaagatattaccctagaagtcgaaagctccgacaccatcgacaagtcaaggcta

SEQ ID NO: 278116 - DNA, 297 bp, Glycine max
gaaggatgctggtcagagacaattgcatggctggacaaattgagaaattcaaatggctcattgccaacttcacaaattcggttgaatatgcaacgagtaatgcaaaacaatgctgctgtgtttcgtacacaagaaacattagaagaaggttgtcaattaattgataaaacatgggagagcttccatgatgtccaggtgaaggaccgcagtttaatctggaactccgacttgattgagactattgattggaaaatctttgataatgcatgcatcacatgtactctgctgaagctagga

SEQ ID NO: 278117 - DNA, 296 bp, Glycine max
ccctttgccgctgttgttgtgctgcaccaccgaacaacttcccctgtaaatcgcgtttcgtttgtgcaaggttttaaaagatggctgatgctgaggacattcaacctcttgttgttgataatggaactggaatggtcaaggctggttttgcaggtgatgatgctcctagggccgtgttccccagcattattgggagaccacgccatactggtgtaatggttgggatgggtcagaaggatgcttacgtgggtgatgaagcccaatcaaaaaggggtatatcaccttgaatatcctat

SEQ ID NO: 278118 - DNA, 295 bp, Glycine max
gatagaagagtgtagtagaagcgaggcaatcgtggaggaggatgaacaagacgatggaagagaacgagaaagcgtttaatgttaatggaagggaagtgatacctctcctcgccccattcaaaatgggaaaattcaatctatctcacaggattgttctggcaccgttaacaagaacgaggtcatacaacttcatggctcagcctcatgctgctttgtattattctcaaagaacaacaaagggtggatttttgattggggaagcctcgggggtgtcagacatgcacaaggtaccaaa

SEQ ID NO: 278119 - DNA, 226 bp, Glycine max
tgattgaagaagatgccgatcagaaacatcgccatcggaaggcctgaagaggctactcaccccgacacgttgaaggcggggttggctgagttcatctccaccttgatcttcgtgttcgccggttcaggttccggcatcgcctacaacaagctcaccgacaaggcgccgccatcccgccggcctcatctccgcttccatcgcccatgctttcgccctcttcgtcgcc

SEQ ID NO: 278120 - DNA, 296 bp, Glycine max
gttacaggtaacacatttcaaatgtggaggggtttccctgggagttggtatgcaacatcatgtagcagatggagcctctggtctgcacttcatcaatacatggtcagatgtggctcgtggcttggatgtttccattccaccattcattgatcgtacaatacttcgtgcccgtgatccacctcgacccatttttgatcacattgaatacaagcccccaccagccagaagatcaacaagctactaatgcatcagcagctgtctctattttcagatcagcgtgaccagctcaacacatg

SEQ ID NO: 278121 - DNA, 296 bp, Glycine max
gcttctctcgattgcaaaaaacataacttcttaatctttgaggatcgtaaatttgctgatattggcaacacagtgaccatgcaatatgaaggaggggtttttcgtatattggattgggctcatatagtaaatgctcacataatctcaggtcctggaattgttgatggattaaaattgaagggtttacctcgtggtaggggtctattactgcttgctgaaatgagctcagctggtaaccttgccaagggagatatacaacttctgcagtaaaaatgctgaggatcatctgactttgt

SEQ ID NO: 278122 - DNA, 297 bp, Glycine max
ctgaaagttattggggaatgttaaccctattggagttcgtagttgctatgatgaggggaaacgggtggccgagacattgatgtttgattaccataggcagcatgggattgaaatacgcattgcaagaatctttaacacatatggaccacgcatgaatattgatgatgggcgtgttgttagcaacttcattgctcaagcacttcggggggaaccattgacagtccaatgtccaggaacacaaactcgaatttctgctatgtctctgacctggttgatggccttatccgtctcatggga

SEQ ID NO: 278123 - DNA, 300 bp, Glycine max
  unsure (1)..(300): unsure at all n locations
cctagattcagccacagttggaaaaaaaaaaaaagttgttcgagatggcacgtacgaagcaaactgctccgtaagtccacaggnggaaaggcncctaggaagcagctcgcaaccaaggctgcacgtaagtctgcaccanctactggtggtgtgangaagccacatcgttatcgtcctggtnccgttgctcttcgtgagattaggaaataccagaagagtaccgagcttttgatcaggaagctccccttccagaggctggttcgtgaattgctcaggattcaagactgatctgcgtttcca

SEQ ID NO: 278124 - DNA, 297 bp, Glycine max
  unsure (1)..(297): unsure at all n locations
agaagagaaaaattnagtggaggggaagganaggatgtgtcgctgngagcgaacaagttccccggaganacagccgattnggacggaggcgcagagccaagncgacggcaaggantancaggancnggcgccccngctactggttgacccgacggantttacgtnatggtccttttacagagcagggatancagagtttgtggccacttttctntttctatacatcactgtcttaaccgtcatgggagtcgcnggggctaagtctaantgcagtaagttgggattcaaggaatcgct

SEQ ID NO: 278125 - DNA, 298 bp, Glycine max
  unsure (1)..(298): unsure at all n locations
cgttcattctgttttcagttgaagtctttcnctagccaatggccactgatcgtttgacncgtnntcacagtcnccgtgagaggcttgatgaaaccctcactgccaacaggaacgaaattttggcccttctgtcaaggatcgaagctaagggcaaggggatcctgcaacaccaccaggtcattgctgagtttgaggaaatccctgaggagaacaggcagaagcttactgatggtgcctttggagaagtcttgagatctacacaggaagccatagttttgccaccatgggttgctctggc

SEQ ID NO: 278126 - DNA, 293 bp, Glycine max
  unsure (1)..(293): unsure at all n locations
ttgcgcaaacccctgnatcgccggcgagcgacagtncggccaagacgttcgcacccaaaacgttgtggcatgccaagccgttgccaacatcgtcanaagctctttaggccccgttggcctcgacaagatgctcgtcgacgacattggcgacgtcactatcaccaacgacggtgccacgattctcaagatgcttgaagtggagcatcctgctgccaaggttttggtggaatcgccgagcttcaggaccgagaagtcggngaggcactacttcggtcgtcatgtcgctgctgagc

SEQ ID NO: 278127 - DNA, 293 bp, Glycine max
tgaaaacacaaaagaaaaaaatgggttcttctctgtggacctgtctgattttgttatcacttgcttctgcttccttcgccgccaacccaagagcaccaattgatgtgccatttggcagaaactatgtgcctacctgggcctttgatcacatcaaatacctcaatggtggttctgagattcagcttcatcttgataaatacacaggtactggcttccaatcaaaagggtcctacttgtttggtcattcagcagtacataaaattggttgctggtgatcagctggcacagtcatg

SEQ ID NO: 278128 - DNA, 293 bp, Glycine max
  unsure (1)..(293): unsure at all n locations
tgtagatcggagactggcaagaaggtcgcattagcttcttcatcgcgcaatggcccatccctctgctgtcgtctccgtcagaaggccaatcacccacgtcgtttttgacatggacggtctcttgctcgacactgagaggttctatactcaagtccaggaaatcatactcgctaggtacaacaaaacctttgattggtccctaaaggcaaagatgatgggaaaaaaagcaatagaatctgctaggatctttgttgaagagactggantagtgttctcttagtgccgagcattcc

SEQ ID NO: 278129 - DNA, 292 bp, Glycine max
  unsure (1)..(292): unsure at all n locations
tgcttagagtgaagcatttcgaaacagcaagacacaatgccttcggctcaagatccattctacgttgtcaagcaagaaattcaagaatctattgataagctacaatctacgtttcaccaatgggaaaagactgctgatgctggcgagcgatccaatctatcaaaggaagttcttggtagttgtgaaagcattgaatggcaggtggatgaattggacaaagcaatttctgtagctctagagatcctcttggtatggcntgatgaagtggagttgaaaacggagaagtggacca

SEQ ID NO: 278130 - DNA, 293 bp, Glycine max
  unsure (1)..(293): unsure at all n locations
gcctacgctctgtatacattagcatgggataacaccacangattctnatcctattgtgntggccttcgggatctgagtaatgattaacagggacagtcgggggcattcgtatttcatagtcagaggtgaaattcttggatttatganagacgaacaactgcgaaagcatttgccaaggatgtcttcattantcaagaacgaaagttgggngcncgaagacgatcagatnnggcctagtctcanccatagacgatgccngccaggancagcggatgtgcttttangctccgctg

SEQ ID NO: 278131 - DNA, 294 bp, Glycine max
  unsure (1)..(294): unsure at all n locations
cttcaggatgtgtacaagattggaggtattggaactgtgccagtgggacgtgttgagaccggtgtcttgaagcctggaatggtggtgacttttgcaccaactggactgacaactgaagtcaagtctgtggagatgcaccatgaatctgntacagaggcacatcctggtgacaatgtgggattcaatgttaagaatgttgctgttaaggatttgaagcgtggttatgttgcccaaactcaaaggatgacctgcaaaggaggctgctaacttcacagcccaagtcaccaccatgaa

SEQ ID NO: 278132 - DNA, 290 bp, Glycine max
  unsure (1)..(290): unsure at all n locations
ttgcaatcaaattagttcattctctttgcgcagttccctacctctcctttcaagatgcagatcttcgtcaagaccctcaccggaaagaccatcacccttgaggtggaaagctctgacaccatcgacaacgtcaaggccaagatccaggacaaggaaggaattcccccggatcagcaacgtctcatcttcgccggaaagcagctcgaggacggccgtaccctcgccgatacaatccagaaggagtcaaccttcacttgtcttcgtctcgtggtggcngcagncttcgtcaa

SEQ ID NO: 278133 - DNA, 199 bp, Glycine max
  unsure (1)..(199): unsure at all n locations
cttcaggatgtgtacaagattggaggtattggaactgtgccantgggacgtgttgagaccggtgtcttgaagcctggaatggtggtgacttttgcaccaactggactgacaactgaagtcaagtctgtggagatgcaccatgaatctcttacagaggcacatcctggtgacaatgtgggattcactgttaagaatgttg

SEQ ID NO: 278134 - DNA, 291 bp, Glycine max
  unsure (1)..(291): unsure at all n locations
tccaagactcgttaagattagccactgatgttatccccaactactccttcggctgcgtcaacgccatcaccggcgcctctgtcncggcccaagggcttttgggcctgggngtggcccgctgtccttgctctcccaatccgggtcaaattactcgggcatttctcttactgtctccccagcttcaagtcctactacttctctgggtcgctcaagctcgggcccgtgggccgcccaagagcattcgcaccaccccgcttcttcgcagccctcatgtccttctctttatagtga

SEQ ID NO: 278135 - DNA, 195 bp, Glycine max
aacaccaccacccattgatgggtttttgcttcatccaaactcaatgggtgccgacgaagactacgattacttgttcaagctggtcctcatcggagattcgggtgttggcaagtccaacctcttgtcccgattcacccgaaacgagttcagcttggagaccaaatccaccatcggcgtcgaattcgccacgcgaag

SEQ ID NO: 278136 - DNA, 195 bp, Glycine max
  unsure (1)..(195): unsure at all n locations
ctttctttttctgtgagcctttctttcaggttcttaacttgancagtgtgcagtgtccaaatcataagggtagttgcaaattgcaatggctaagcatgatgttgagggtggttccttctctgcaaaggactaccatgatcctcctccagcaccgttgattgatgctgaggaactcacacagtggtccttctacag

SEQ ID NO: 278137 - DNA, 194 bp, Glycine max
  unsure (1)..(194): unsure at all n locations
caagagcgaganatctatttagatctctgaaaaacagagtttcatttcaattacagtcttattattagggtttgccgattnagagaganagagaaatgggagaacgaaaaggaatcccaatggctttggggctcttggcgatgatcctcttcttcattgcttcctcttcctctcacctcgttacgcgcttccga

SEQ ID NO: 278138 - DNA, 297 bp, Glycine max
  unsure (1)..(297): unsure at all n locations
ttccgcaaagggacctgccagaagggtgattcctgcgagtatgctcatggtgtttttnagtcctggctacatcccgcccaataccggacaaggctttgcaaggatgagacgggctgtgctagaanagtatgcttctttgctcacaaacctgaagagctacgccctntgtatgcttccactgggtcggctatgccatcaccaanatcctattcagctantggattnacatganngcgatagtccntagctcttantactcattatgcggtgcnactgttacnanccgaccatnntcct

SEQ ID NO: 278139 - DNA, 287 bp, Glycine max
  unsure (1)..(287): unsure at all n locations
tttttactctctctctgtttctctctacgctttctcgttcganatccctcaagggatccactaactgaaggagaaatggggttgacattcaccaagcttttcagccggcttttcgccaagaaggaaatgcgaattctgatggtgggtctcgatgcagctggtaagaccaccatcctgtacaagctcaaacttggagagatcgttaccacaattcccaccatgggttcagtggagactgtggaatacagaacatagtttcatgtctgggatgttggtggccagacaag

SEQ ID NO: 278140 - DNA, 285 bp, Glycine max
  unsure (1)..(285): unsure at all n locations
atcaaaganaggggtggtggctgcttcgaaagcttaataatttgtttatttccagaacttcatagttctccgcagcagcaaactaacaaattactgcatatcatataataagatggcccgttctctctcgcaagccaaacgtattggtgtccttgttgctcantctatctccctaattcccgttcatcggcgaggttacgcatggcatccgatgtatcggtaagagttgatgggtaatatgggcgaagaatggatcgtgggagtgtagagagaagcctgatacag

SEQ ID NO: 278141 - DNA, 288 bp, Glycine max
  unsure (1)..(288): unsure at all n locations
gtagggaagcacctaaagcagtcattgagctagagaattacggattaccattttcccgaacagaggatgganaaatatatcaacgtgcatntggtggtcaaagcttaanctatggaaaaggtggtcaagcttaccgctgtgcangtnctgctgatcganctggacangctttatgcacactctctatggccnagctatgagacatgatacccagttttttgtggaatatnttnatggatctnncattaatagtggnggccttgccaggatgttgctgatangaggagg

SEQ ID NO: 278142 - DNA, 292 bp, Glycine max
  unsure (1)..(292): unsure at all n locations
acangnnatatgccgttanntctataatcatcaaaacaaggatggtgggtngggttngcatattgaangtccaagcaccanntttggctctgtctngagttatattactctnagattgctaggtgaggggcctaatgatggacaangggaaatggngaangcacgtgactggattctagggcatggtggtgctactnatataacgtcatnggggaagatgtngcttncatcatggagtnnagantggtcnggaatantcccctgcccntagatatggcncttccnacagctt

SEQ ID NO: 278143 - DNA, 281 bp, Glycine max
  unsure (1)..(281): unsure at all n locations
tatatattgcagagtggttctagtaattcagtgctgctagaagatggaaactagtgaatggcatatcgagcgaagatctagcttcggctctgaatcccccttagcaagagaggcaggaaatgtgcctganactgggtcactctctattgtggtgcttggtgcttctggtgatcttgctaagaagaagacatttcctgcattttccacctatacctgcaggatcttaccaccagatgaagttcatattttggctatgcaggacaaaatctctgatgatgaat

SEQ ID NO: 278144 - DNA, 219 bp, Glycine max
  unsure (1)..(219): unsure at all n locations
tagtgcctccttgccagaagttaaaatggcccaagaaactttcctattcacatctgaatcagtgaacgaggggcaccctgacaagctctgtgaccagatctccgatgctgtgctcgatgcatgcttggagcaggaccctgacagcaaggttgcctgtgaacctgcaccaagaccaacatggtgatggttttcggagagatcacaaccaggccangtgga

SEQ ID NO: 278145 - DNA, 283 bp, Glycine max
gaagttcacgccaaattgtctgcgtatcttcccaaggatgatgatcatgagatggaagtggacgctgcaacatctgcgattcaaaccccagccaaacacttgttgcccgagctagaaatctactgttacctgcttgtactcctttttctgattgatcagaaaaaatacagtgaggccaaagcttgttcctcagctagcatgtttggctgaagaacataaacagggaatgttgatgttattgcatccagactgtattttatatcgtatagctatgaattatggg

SEQ ID NO: 278146 - DNA, 179 bp, Glycine max
gcgcttgctccagctaggtgtatgtccctgaatttggctgtcaagtatgccaatgtcattcattctattgttttgcaggatgatttcttgccaagaacggccactccattggaagatatattcaaatcaatattctgcttgccctgcttgttgttcttggtttgcctgagagacacctt

SEQ ID NO: 278147 - DNA, 287 bp, Glycine max
ggcatttactatctgcgatttagatatgtcgacatctgataagccagaagtggtggaaaggggtagcaaggatgaaaaacacaaggaagatgatcaagaggaggggaagggtggattcattgagaaggtgaaggatttcattcatgacattggtgagaagattgaggaagctattgggtttgggaagccaactgctgacgttactgcgattcacattccatcgataatcttcacaaggcagatctgttgttgatgtgctcatcaagaacccgaatccggtgccaatc

SEQ ID NO: 278148 - DNA, 280 bp, Glycine max
ctgaaagttattggggcaatgttaaccctattggagttcgtagttgctatgatgaggggaaacgggtggccgagacattgatgtttgattaccataggcagcatgggattgaaatacgcattgcaagaatctttaacacatatggaccacgcatgaatattgatgatgggcgtgttgttagcaacttcatgctcaagcattcggggggaaccatgacatccaatgtccaggaacacaaactcgaagtttctgctatgtctctgacctggttgatggctta

SEQ ID NO: 278149 - DNA, 285 bp, Glycine max
ctaagaaaccttaaaaaacaagtagtgttccgaaaagatggctcagcaggaagtggtagaagggttcaagttcgaacagaggcacgggaaagagcgcgtgagagtggcgcgcgtgtggaagacgaggcaggggcagcacttcgttgtggagtggcgcgtgggcatcactctcttctcagactgcgtcaactcgtatctccgcgatgacaactctgacatcgtgctactgataccatgaaaaacacagtgtatgcaaaagcaaaggaatgctcagacatatctctg

SEQ ID NO: 278150 - DNA, 290 bp, Glycine max
  unsure (1)..(290): unsure at all n locations
ctaagatcaccgaggctttccttgttcaatcaaaacacaaaaatggaggggactgttttcactcctgcacttgaaggaattaagcttgtaaaatcagagcaaggagaaattttgacccagcctttcttggatgcttgcaagcatatactgcctgttatagacaagtttggagctgctatggcccttgttaaatctgacatggtggtaacatatcgagattggaatctaagatcctccaatccaaccaaattcaatacctgtacagtttgtacaagtagaggtgaattana

SEQ ID NO: 278151 - DNA, 285 bp, Glycine max
  unsure (1)..(285): unsure at all n locations
tttaatcctaattctgcacttcttgatcattcgatttttctcctcaagatgcagatantcgtaaaaactttgaccggcaagaccatcacccttgagncggaatcctccgacaccattgacaacgtaaaagctaagattcaagacaaggaagggatcccacctgaccagcagagacttatctttgcgggtaaacaacttgaggatggtcgcacccttgccgatacaacatccaaaaggaatcaaccctccatctcgtgcttcgcctcagggtggcatgcaaatctt

SEQ ID NO: 278152 - DNA, 170 bp, Glycine max
ggcacctgttgaccagaccattaagaccctatctgcatacatggaaaaaggtgactgcataattgatggtggtaacgaatggtacgagaacaccgaaagaagagagaaatcggtggctgaattgggtctgctctaccttgggatgggagtttctggtggtgaggaaggtg

SEQ ID NO: 278153 - DNA, 285 bp, Glycine max
  unsure (1)..(285): unsure at all n locations
caaaagcatcatttcccaggtccaaactttgacaaaagcatgggagtacacatctgctgatcagtttctgcattgtctaccactacatcatgttcatgggtttttcaatggtttaatggcccctctctatgcaggctccacggttgagtttttgccaaaatttagtgtgagaggagtttngcagagatggcgtgagtcatatccaactgatggttctaaggctgngatgctataactgtgttcatggagttccactatctatgccgatggatncaggttatcagc

SEQ ID NO: 278154 - DNA, 306 bp, Glycine max
cttcactttcctgggaaaaaattggaacctgcctctgttaaagtttgtatttttctgagtgggtgggttgattgagagtgctgtgcaagctttggaactttttcccaacctgctacttcaatggccactgaagaggttaacaaacctcaatcacttcctccataccctgagatgatagtgaaagcacttgaagcactgaatgagccaaatggatcgaacaagtcagcaatatcaaagtacatagaaaccacctacggtgagttgccagacgcaaccgttttggggagtcaccttaacaagatgaaa

SEQ ID NO: 278155 - DNA, 303 bp, Glycine max
  unsure (1)..(303): unsure at all n locations
gctgaacagaggtgtctttcatgatntcaatggatgcatttcaactggaaaggaagcaaatgtttatcatgcaactaaatctgatactcaagaacttgcaattaaagtatacaaaacatctgttctggtatttaaggatagagatagatatgtgcaaggagacttccggtttcgaaatggatactgcaagcataatcccaggaaaatggtaaaaacatgggctgagaaagaaatgagaaatcttatgaggcttaaggcagcaggaattaggtttcctacgccatatcttctgaggctacagtt

SEQ ID NO: 278156 - DNA, 301 bp, Glycine max
  unsure (1)..(301): unsure at all n locations
anacataacgatcaaatgggatgttgtgtcatggacaccagatggctatgtagccgtggtaacaatgagcaatttccaaatgtttcggcacatcatgaatcctggatggaccttgggatggacatgggcaaagaaggaagttatatggtccatggtaggagctcaaaccactgaacaaggagactgttctaagttcaaaggcaatgtacctcactgctgcaaganaactcccacagttgtagacttgctccctggtgtgccttacaaccagcaattctcaaactgttgcaagggtggagtg

SEQ ID NO: 278157 - DNA, 298 bp, Glycine max
gtaaaaaacaaccaacagcctgtgtggtattttaatgataaattctcattccatgtactttttactgaggatggtagaatggaacgttccgctttcttagagacttggaggtcccttcctgattcaaacgaggtttccaaggacttcccagacattgtgattggcggtgtggaagcgacactggatcgactagctgcatcaaacgtgttctttattgcaaagcgcaagaatgcaaaccaggatgtgttttacttctcagctaagattcctcgagggataccattattaattgaactta

SEQ ID NO: 278158 - DNA, 297 bp, Glycine max
  unsure (1)..(297): unsure at all n locations
cacagactcacttccaagttccaagctttggccatttattcccactgnttattgaacatggcacagattttggctccctctacgcaatggcagatgagaatctcaaaatcctctcccaatgcaagtcccattacatcaaacatgtggagttctttattgtggaaacaaaataagaaagtttcacccacaagttctgctaaatttagagtgatggcaattaagtctgacaatagcatcatcaacaggctagagggtctacttaatttggatatcatccattcaggacaagataatgct

SEQ ID NO: 278159 - DNA, 300 bp, Glycine max
  unsure (1)..(300): unsure at all n locations
cttctataaagaagaccttcatccagggcaaaacaatgaaagtacaattcagcaagcctccctttcaacaaccatggggtgttggtacatggttaaaggaaattaaagacactactaaagaaggatatagttttgaagagctatgcatcaagaaagaagccattgagggagangagaagttttgtgcaaaatccttgggaacagtaattggttttgccatttcaaagctgggaaagaacttcaagtactttcaagttcctttgtcaataagcagaccaatacctgtggaaggagtgcaga

SEQ ID NO: 278160 - DNA, 296 bp, Glycine max
  unsure (1)..(296): unsure at all n locations
ggaacatcggcttcgtctcaaatgatgtgggactggatgccgacaactgcaaggtcctcgtcaacattgagcagcagagccctgncattgctcagggtgtacacggccaccttaccaaaaaacctgaagaaattggtgctggtgaccagggtcacatgtttggctatgccactgatgaaacccctgaattgatgccattgagccatgttcntgcaacaaaactcggtgctcgtctcaccgaggttcgcaagaacggtacctgcccttggctgaggcctgatgggaagacccaagtg

SEQ ID NO: 278161 - DNA, 290 bp, Glycine max
gttcggttcttccattgttcagtatggtctttatgatgaaggttggatggctgatctttctcacttgtatgctcgcaaggttgatatagttttgcgaggatatgctggttggaattcaaggcgtgctctgcaggttctggataaaatctttcctaaggatgcccctgtacaaccttcattggtcattgcctactttggtggtaatgattcttctactccccactcatcaggcctaggtcctcatgtgcctctccaagaatacattgaaaattgaggaagatgttaaccat

SEQ ID NO: 278162 - DNA, 294 bp, Glycine max
tgataatcctcgagaagagacaatcaaacctatggtggatggtgggactgaaggtttcaagggccatgctagggttatcttgccagggatcacaccgtgctttgaatgtactgtctggctttttccacctcaagttaagtttcctttgtgtaccctggctgaaacccctagaactgctgcccactgtattgaatatgcccacttgattaagtggaatgaggttcatggcggagtggcttttgatccagataaccctgagcatatgaaatgggtttatgacgaggctgtcaagag

SEQ ID NO: 278163 - DNA, 295 bp, Glycine max
  unsure (1)..(295): unsure at all n locations
acttaacaacagcacaaagcgggttactntctgttcaagctaccanctctctctctctttcttagtgcctccttgccagaagttaaaatggcccaagaaactttcctattcacatctgaatcagtgaacgaggggcaccctgacaagctctgtgaccagatctccgatgctgtgctcgatgcatgcttggagcaggaccctgacagcaaggttgcctgtgaaacctgcaccaagaccaacatggtgatggttttcggagagatcacaaccaaggccaacgtggactatgagaaga

SEQ ID NO: 278164 - DNA, 297 bp, Glycine max
taaaagaaagaatcccaggcgaggagaaagatggaggggaaggagcaggatgtgtcgttgggagcgaacaagttccccgagagacagccgattgggacggcggcgcagagccaagacgacggcaaggactaccaggagccggcgccggcgccgctggttgacccgacggagtttacgtcatggtcgttttacagagcagggatagcagagtttgtggccacttttctgtttctctacatcaccgtcttaaccgttatgggagtcgccggggctaagtctaagtgtagtaccgttggg

SEQ ID NO: 278165 - DNA, 298 bp, Glycine max
  unsure (1)..(298): unsure at all n locations
ctctttctcttcttccttcgctcgttgttctncctcgcgtagatngacaatggnggagacagagacgtttgctttccangctgagatcnaccagctcntcagtttcatcatcaacaccttctactccaacaaggagntttttccttcgtgaactcatcagcaacgcctccgatgctttggacaagattngatttgagagtttganagataagagcaagctcgatgntcagccagagttgttcattcatattattccagacaagactanataaaanctgaccattgttgacagtggtat

SEQ ID NO: 278166 - DNA, 289 bp, Glycine max
  unsure (1)..(289): unsure at all n locations
tattttccactcttcctcaccgattgctagaatggaatttcgatgctcagtcatctcttttaccattctcttctctcttgctcttgcaggagagagccatgtccatgcatcgctacctgaggaagattattgggaagctgtttggccaaacactcccattcccactgcactgcgagagcttctaaagcctctccctgcaggtgttgaaatcgatganctccctaagcaaattgatgatacacagtacccaaaaacatcttctataaagaagaccttcatccaggcaaaa

SEQ ID NO: 278167 - DNA, 273 bp, Glycine max
  unsure (1)..(273): unsure at all n locations
ctctgcttcaacttgctcccatngaagcgaanaagaagccacagannactantctcctantctcacncgcaaganaanaatggcanctcacatgcgttggatacccccntatgggtcccaagagagagctcaagttcgctctcgagtctttctgggatngcaagagnagcgccgaggatttgcngaaggngtcttctgatctcagggcatccatctggnagcanatggctgatgctnggancaagtacatccccagcaacatttctctcatag

SEQ ID NO: 278168 - DNA, 290 bp, Glycine max
  unsure (1)..(290): unsure at all n locations
atcctgacaggatgatgcttactttctccgtttttncttcgcccaaggtctccgacactgttgttgagccttataacgctactctctctgttcaccagttggtggagaatgctgatgagtgtatggtgctggataatgaggcgctctacgatatctgcttcaggactctcaagttgaccactcctagctttggtgacttgaatcacttgatctccgcaaccatgagtggtgttacatgctgtcttcgtttccctggtcaatcaactctgatctgaggaaatggccgtgaa

SEQ ID NO: 278169 - DNA, 290 bp, Glycine max
  unsure (1)..(290): unsure at all n locations
ctatcatctatacaatcaagtgtcatacatgtctctggatcagatctctcctttgacgtttagcattggaaacaccatgaaacgtatatctgtcattgtgtcttccattattatcttccacacaccagttcaacncatcaatgctcttggtgccgccattgctatccttggaaccttcttgtattcacaggcgaaactatagagttggggaataagattcctctagggacttgtttgttacagttcttcatgctcaaccagggacaaggaagttgatttgtaatgtgtca

SEQ ID NO: 278170 - DNA, 292 bp, Glycine max
  unsure (1)..(292): unsure at all n locations
gtagatcanagatattagtacttgacgaagcaaccgcagcagttgatgttagaacagatgcactcatacagaaaacaattcgagaggaattcaaatcttgtacaatgctcattatagctcatcgccttaacaccattattgattgtgatcggattcttttgcttgatggtggtaaggttcttgaatatgatacccctgaggagctgttgtcaaatganggtagtgctttctctaagatggtccaaagtacaggagcggcaaatgcccaatattacgcagcttagcccttgga

SEQ ID NO: 278171 - DNA, 292 bp, Glycine max
  unsure (1)..(292): unsure at all n locations
caaganatggcttctcctcttcttactccttacaagatgggcaaattcaatctgtcccatagagttgttttggcaccgctgaccagacagaggtcttacgacaacgtcccacaaccccatgccatcctctactactcccagagaacttccaacggaggccttctcattactgaagccactggcgtctctgacacggctcaaggctatccgcaaacccctggcatatggactaaagaccatgttcaagcttggaaacccattgtcgatgccgtccacgccaaaggggtgtttt

SEQ ID NO: 278172 - DNA, 284 bp, Glycine max
gcacccaacttatgatttgaagggcattatcaagctagcacttgaagaagatgctggggatcgaggtgatgtaacatgcttggccaccattccatttgacatggaagtggaagcttattttttggcaaaggaggatggcatcattgctggaatagctcttgcagagatgatatttcatgaggttgatccttctctgaaggtggagtggagtaaaaatgatggagattttgtccataaagggctacagtttggaagagttcgtggacgggctcataacattgttg

SEQ ID NO: 278173 - DNA, 288 bp, Glycine max
tggcaagcttgcagatgtctggtcatgtggagtaaccttatatgtgatgctagtgggagcatatccttttgaggatcctaatgaaccaaaggactttcggaagacaattcagagagttcttagtgtccagtattccattccggacggtgttcaaatatctccagagtgtcgccaccttatttcaaggatctttgtttttgacccggcagagagaatcaccatgtctgaaatctggaaccatgaatggtttctgaagaatctcccggcagacctgatggacgagaagat

SEQ ID NO: 278174 - DNA, 287 bp, Glycine max
agattctggtgtaggcaagtcatgtcttctcctgaggtttgctgatgattcataccttgacagctatatcagtaccattggagtggactttaaaatccgcactgtggagcaggatgggaagactattaaacttcaaatttgggacactgcgggtcaggaacgtttccggacaatcactagcagctactatcgtggggctcatggcattattgttgtttatgatgtcactgaccaagagagcttcaacaatgttaagcagtggctgaatgaaatgaccgttatgcaag

SEQ ID NO: 278175 - DNA, 286 bp, Glycine max
  unsure (1)..(286): unsure at all n locations
gnaancttgnagatgtctggtcatgtggagtaaccttatatgnnatnctagtgggagcatatncttntnangatcctaatganacaaaggactttcggaagacaattcagagagttcttagtgtccagtatnccattccggacggngttcanatatctncagagtggcgncaccttatctcaacgatctgtgttnntganccggcagngagaatcaccatgtctgaaatctggaaccatgaatggtttctgaagaatctcncggcagnctgatggncganaanata

SEQ ID NO: 278176 - DNA, 289 bp, Glycine max
ccgctccgaattagggttttccaattcgcagagcaactcaacacaacgaaccaaaccaacaatgtcgcagccgcagcctcagtcgcagccgcaacacgggcaagcggcgctggagcaggtgcagtgcttcggtcgcaagaagacggcggtggccgtgacctactgcaagcgcgggcgcggcctcatcaagatcaacggctgccccatcgagctcgtcgagccggagatcctccgctttaaggccttcgagcccatcctcctgttgggaaagagccgcttcgccggcgtc

SEQ ID NO: 278177 - DNA, 274 bp, Glycine max
  unsure (1)..(274): unsure at all n locations
gatcgagataactagaaacagtgtgatgaaaatgaaggtccttgttttcttcgttgctacaattttngtagcatggcaatgccatgcgtacgatatgttccctctccgaatgaacactggctatggtgcccgtactccggaggtgaaatgcgcaagttggaggcttgctgtggaagcacacaacatctttggctttgagaccattcctgaagagtgcgttgaagcaacaaaggaatacatccatggcgaacaatatagatcagactccaaaaca

SEQ ID NO: 278178 - DNA, 282 bp, Glycine max
  unsure (1)..(282): unsure at all n locations
caaaactactgtaacagaagaccgagatgtgttggtagatgcagctgctgataagatggaaagggatttgattcttcttggtgctactgcagttgaggatagactgcaaaagggggttcctgaatgtattgaaaagctcgcccgggcaaaaatcaagttatgggtattaaccggagacaagatggaaactgcagtcaacatagggtatgcatgtagnntacttagacaagacatganacagatagtgatcactctggattcaccagatatcctatcattgga

SEQ ID NO: 278179 - DNA, 279 bp, Glycine max
  unsure (1)..(279): unsure at all n locations
ttggaatccanaaatgagaganatcatcagcattcacataggtcaggccgggatccaggttggcaactcctgctgggaactctactgcctggaacatggcatccagcccgatggcatgatgcnaagtgnctcctccttcggtgtagcccacgacgccttcaacaccttctncagcgnaaccggatccggcaagcacgtccctcgngccgncttcgtcgatctcgagcccaccgtcatcgacgaagcngtngtggactnacgtnaactctttcacccgaa

SEQ ID NO: 278180 - DNA, 286 bp, Glycine max
ggtacccacaatggccatgggagttcagcaattgaagaaaggtatggatccaaagattgtttatgaagatcttgttgagattcatcagttccttgaccgcttctacatgtcaagaattggaatccgtatgcttatcgggcagcatgttgagttgcacaatcccaatcctcctccccacgtcgtgggttacatacacacgaaaatgtctcctgtggaggtggcaaggaatgccagtgaagatgcacgttctatatgttgtcgtgaatatggaagtgcccctgatgtc

SEQ ID NO: 278181 - DNA, 286 bp, Glycine max
gtggcagccaagaaggattctactgaggaaggtgaggctgctgctgaagaaactaagaaaagtaaccatgtgcagagaaaacttgagaaacgccagaaagatcgtaatcttgactcccacattgaagagcaatttggtggtgggcgattgttggcctgtatttcttctcgtcccggacaatgtggcagggctgatgggtacattcttgaaggtaaggagctggagttttacatgaagaaactccagaggaagaagggaaagggtgctgcttaattttagtgttttc

SEQ ID NO: 278182 - DNA, 287 bp, Glycine max
  unsure (1)..(287): unsure at all n locations
ccgccttgttcctggttggacaaaggcaatatgtattggaaggcatgcgtttggtgatcaatatcgggctactgacnctgtaattaaaggagctggaaagctgaagctggtgtttgttccagaaggccaaggtgaggaaactgaattcgaggttttnncacttcactggtgaagggggtgtttcattggctatgtacaatactgatgagtctattcgttctttnnnnaaggcttctatggcaactgctttagagaaaaagtggccactttatcttagcaccaaaaat

SEQ ID NO: 278183 - DNA, 281 bp, Glycine max
  unsure (1)..(281): unsure at all n locations
ctcttaccttgggttcacagcaagcctgggttttatcttgtcttggggagctccaatgtggatgaagggtttcgtggttacttgaccaagtatgattgcagctcagcagatataaatccaattggtagtataagtaagcaagaccttcgggcattcttgcaatgggcagccatccatcttggttactcatctttggcngatattgaagcagctccacccacagctgaactggagcctatacgttctaattacagtcagcttgatgaagtcgatatgggaat

SEQ ID NO: 278184 - DNA, 280 bp, Glycine max
gttccgcaaagggacctgccagaagggtgattcctgcgagtatgctcatggtgtttttgagtcctggctacatcccgcccaataccggacaaggctttgcaaggatgagacgggctgtgctagaaaagtatgcttctttgctcacaaacctgaagagctacgccctgtgtatgcttccactgggtcggctatgccatcaccaaaatcctattcagctagtggacttgacatgacagcgatgagtccattggctcttagttccacatctttgccgatgcca

SEQ ID NO: 278185 - DNA, 308 bp, Glycine max
  unsure (1)..(308): unsure at all n locations
aaaccacacctatagctgtggcaggtgatctgatgtcaaaaccaacatggtatgctnacaaaagaatccacaatgcattgttacgaatggacaangattattagagatctgctctngactatctagaactgcaacccgatctaaaagcgctggttcgtggggctcatactttcaagtgtccaaaccttggtatcactagctggactaggcttccaatccatgatgctgactttggttggggaaggccaatattcatgggacctggtggaattgcatacgaggggctatctttcataattccaagctca

SEQ ID NO: 278186 - DNA, 309 bp, Glycine max
ttgaaaatcttaaatcatttgatccagaacaagaatgaatactgtatggaggtgactcccaaaacattggctgatgtaaagggtggcactttgatttcttacgaaggaagggttcagcttttggaaattgcacaagtcccagatgaacatgtcaatgagttcaagtcaatagagaagtgcaaaattttcaacacaaataatttgtgggtgaacttaaatgcagttaaaaggcttgttgaagctgatgctcttaagatggaaattattcccaatccaaaggaagttgatggaataaaagttcttcagctg

SEQ ID NO: 278187 - DNA, 309 bp, Glycine max
  unsure (1)..(309): unsure at all n locations
gtggtgccttatcgctgtggttatcatcntcttcttcctctttcttagatctcttctttctctacgccgcacgccgaaaccatggccggaaaaggagagggtcctgctatcggaatcgatctcggaaccacctactcttgcgtcggtgtgtggcaacatgaccgcgttgaaatcatcgccaacgaccaagggaacagaaccacgccgtcttacgtcggattcactgacaccgagcgtctcatcggtgatgcggccaagaatcaagtcgccatgaaccccatcaacaccgtcttcgatgccaagaggttg

SEQ ID NO: 278188 - DNA, 305 bp, Glycine max
  unsure (1)..(305): unsure at all n locations
cattctcatatcctcaatcaccccccctcgcactcgctcttcccttcctctggtngcgacaatgnngactcctgctaggtagangctgatganananttcnagangctgcaacaaganccgcctgcagggatcantagngccccccaggataacaacataatgctgtggaatgctgtcattttnnnncctgatgatactccatgggatggaggcacgttcaagttgacactccaatttactgaggactatccaaataaaccaccgactgtacgatttgtgtctcgcatgtttcatccaaatattt

SEQ ID NO: 278189 - DNA, 303 bp, Glycine max
  unsure (1)..(303): unsure at all n locations
tcttgtttgcattcatgtgagggtgattttgcagagagttaacagcacaaaccactcactctcttaacttgagattattttttttctttccccaaacccaaagaggcatgagttgcaacgggtgccgcgtccttcgaaagggttgcagcgagtcttgtatcctgcggccgtgtctacagtggatcgatacgcccgaagcacaaggccatgccactgtcttcgttgccaaattctttggccgtgccgacctcatgtccttcatttccaacgtccctgaaccccaaangcccgtctgtttcaatt

SEQ ID NO: 278190 - DNA, 309 bp, Glycine max
attaattgcaagaatggcacttcgttgcttggtgatgtccctttctgttctcttcactcttggtcttgcgagagaaagccatgccagagacgaagatttttggcatgctgtttggccaaacactcccattccaagttcattgcgagatcttctaaagcctggccctgcaagtgttgaaatcgatgatcaccctatgcaaattgaagaaacacagtacccgaaaaccttcttctataaagaagaccttcatccaggcaaaacaatgaaagtacaattcagcaagcctccctttcaacaaccatggggtgt

SEQ ID NO: 278191 - DNA, 304 bp, Glycine max
  unsure (1)..(304): unsure at all n locations
aggtgaccatgctgctgagatccttgttgagttctttgagaagagcaaggctgatccatctcactgggacaaaatctcccagggtggactcaagcgtattcatgagaagtacacatggcaaatttactcggacaggctcttgacactcactggtgtgtatggctncganaagcacgtgaccaatcttgaacgccgtgagagcaaacgttacctcgagatgttctatgctctcaagtaccgcaaattggctgagtctgtgccccttgctattgaagagtaaattcatgtttgaagagaacatcaa

SEQ ID NO: 278192 - DNA, 305 bp, Glycine max
  unsure (1)..(305): unsure at all n locations
atcaagttgaacgatgcgattctcgctgaggataagcacaaacctatgtatgaagnttnggctaacaatcctaatgtggagtacattgctggaggtgctactcagaattcaatcagggttgctcagtggangcttcangcaccaggtgccacaagttacataggttncanaggaaaggacaaatttggagaggagatgaagaagaaatgtacacttgatggtgtaaaggttaactattatgaaatcgacaatacacctactggaacttgtgctgtttgtgtggttggcggtgaaaggtcccttgt

SEQ ID NO: 278193 - DNA, 304 bp, Glycine max
  unsure (1)..(304): unsure at all n locations
atcaccattggcgatgagcgtttcagatgtccagaggttctgttccaaccatccatgattggaatggaagcttcaggcantcacgagacaacatacaactccataatgaagtgcgatgttgatatcaggaaggacctctatggtaacattgttctttcaggagggnaaaccatgtttccctggtattgctgacagaatgagcaancaaatttcggcattggcacccagcagcatgaagatcaaggttgtagcaccaccggagagaaaatacagtgtctggatcggtggttctatcttggcatct

SEQ ID NO: 278194 - DNA, 305 bp, Glycine max
  unsure (1)..(305): unsure at all n locations
ggattaaattaagtgcagaaaaggcaatctttatatttgtggacaacgtccttcctcctacaggagcaattatgtctgccatatatgatgagaagaaggacgaggatgggtttctctatgttacatacagtggcgagaacacctttggggatctgatttccattcagtagccattanaaattcacaccgtttgaccttgtggtctcattggtctgtctgataaatttgttatagtactcatgtcaagaaccttactctcgatgttttgtacagttgtatataaattccgtgaacttgatcaatat

SEQ ID NO: 278195 - DNA, 241 bp, Glycine max
  unsure (1)..(241): unsure at all n locations
tagtgnctccttgcnagaagttaanatggcccaaganactttcctattcacatctgaatcagtgaacgaggggcaccctgacaagctctgtgaccanatctccgatgctgtgctcgatgcatncttggagcaggaccctgacagcaaggttgcctgtgaaacctgcaccaanacnaacatggtgattgttttcggagagatcacaaccaaggccaacgttgactatgagaagattgtgcnt

SEQ ID NO: 278196 - DNA, 293 bp, Glycine max
  unsure (1)..(293): unsure at all n locations
gtcaaggatctcaagcgtgnttttnttgcatccaactccaaggatgaccctgnnccnggaagctgccaacttcacatctcaagtcattatcatgaaccaccctggccagattggaaatggatacgcaccggtgcttgattgccacacttctcacattgctgtcaagtttnctgaaatcttgaccaagattgacaggcgatctggtaaggagcttgagaaggagcccaaatttttgaagaatggtgatgcaggtatggttaagatgattccaaccaagcccatggtggttgaaa

SEQ ID NO: 278197 - DNA, 283 bp, Glycine max
  unsure (1)..(283): unsure at all n locations
gagcaatnacaagtataccatctgtactgtcccaacaancaaaacgcctcaggaggtggaggtgaatcttgttataacagattacngtatgcctggcatgacaggctatgacttgcttaagaaaatcaaggaatcttcatctttgagaaacataccagtggtgattatgtcatctgaaaatgtgccttcaaggattaacagatgtttggaggaaggagccgaagaatttttcttgaagcctgtgaggttgtcagatttgaacaagcttaaaccccacatgaag

SEQ ID NO: 278198 - DNA, 305 bp, Glycine max
agcggaatctgctagaattttctaataatggcgaaagacgttgagcaggtcacagagcaaggtgaatactccgcgaaggactaccatgaccctcctccggcaccgttgatcgacccagatgagctcacaaagtggtccttgtacagagccgccatagctgagttcatagcaacactcctttttctttacatcaccgtgttgaccattattggctacaagagacagagtgacaccaaaatccccggtaacaccgaatgtgacggcgttggcattttgggcatcgcttgggccttcggtggcatgat

SEQ ID NO: 278199 - DNA, 304 bp, Glycine max
  unsure (1)..(304): unsure at all n locations
aaggcagctcatatgctatcacnnccttagtagatanatctccatacataaganatctctactaaggcagctcatatgcaatcactncctaaggtttcggatttctttacaaagttaatacnaagagttgcctccaaagagttaccancaggctgnannagaagtttatgtgacacaaaagtttctananaatttttgcggggatcatgttcgnntcctggcaaggtcttttggtgtccctggaaatcatcttggacaacaaagtcatggtttcgttggccatatggtcccgtggccattatat

SEQ ID NO: 278200 - DNA, 130 bp, Glycine max
  unsure (1)..(130): unsure at all n locations
gcgaaactcgagagtgtaaggttttgcatntcatttgacgaagagtgagagagtcttatctgtcgnntctgatctctgatcgcatcttcattccgaaaatggctgtttcggctatcactggagcgaggct

SEQ ID NO: 278201 - DNA, 303 bp, Glycine max
  unsure (1)..(303): unsure at all n locations
ggtgagggagcccaacaagaagaccaggatttggctggggactttccccacgccgganatggcggctcgggcgcacgacgtggcggcaatggccctgaggggccggtatgcctgtctaaactttgctgactcggcctggcggttacctgttcccgccacggccgaggcaaaggatatacagaaggcagcagcagaagctgcccaggctttcagaccagatcaaaccttaaaaaatgctaatacaaggcaggagtgtgtggaggcggtggcggtggcggtggcggagacaacaacggcgacggc

SEQ ID NO: 278202 - DNA, 294 bp, Glycine max
  unsure (1)..(294): unsure at all n locations
tgttttgtgtttcgttgcgttgtgtttaggttctgatctgatttnggattttggttaggttttcgcgatggcatcgaaacggatcttgaaggaactcaaggatctccagaaggatcctcctacctcttgcagcgccggtcctgttgctgaagacatgtttcactggcaagcaacaattatgggtcctccagacagtccttatgctggaggtgttttcctagtcactattcatttccctccagattatcccttcaagccacccaaggttgcattcagaacaaaggtatttcaccc

SEQ ID NO: 278203 - DNA, 293 bp, Glycine max
  unsure (1)..(293): unsure at all n locations
tttgaagaagtgaggggtgttctttgttggtgaatacacccactcacgcgtncgtggttgcaggctctaatcagatcccaaatgatcaactttgtgcttctcattagtcgccaagggaaggtgagactgacaaaatggtactcaccttattctcagaaagaaaggagtaaggtaatccgtgagctcagtggaatgattctttcccgtgctcccaagcaatgtaattttgtagaatggcgaggacataaagttgtttataaaaggtatgctagtctctatttctgcatgtgcat

SEQ ID NO: 278204 - DNA, 295 bp, Glycine max
  unsure (1)..(295): unsure at all n locations
catttggtactgctcacagggcacatgcatcaacagagggtgttactaaatacctgaagccatctgttgctggttttcttttgcaaaaggaacttnattaccttgttngggcagtatcaaaccccaaaaggccatttgctgccattgttggtggttccaaagtctcatctaaaattggagtgattgagtcacttttagaaaaagttgacatccttcttcttggtggaggaatgatcttcacattttacaaggcacaaggtctttcagtgggttcatccttgtagaagaagataag

SEQ ID NO: 278205 - DNA, 295 bp, Glycine max
  unsure (1)..(295): unsure at all n locations
cgtgtgtttgcgaattgtgcaattttcaagatctgaatcagagaatagataataatggctacaccggaccacctgtatcaacctccgcaacaacttgtatctcggggcgtaccaagccgccatcaacagcggcgacgtcaccaacctctcccaagaagactccctcgagcgcgacaccctcgnccaccgctgctacatcgccctcggccagcttcagttcgtcatctccgngatccatgacgacgctcccacacctctccaagccgtcaaactcctcgctctctatttctcctcc

SEQ ID NO: 278206 - DNA, 289 bp, Glycine max
caccattgttttgcacaacacatgcgaggattccctcttagctgctcctattatcttggacttggtccttcttgctgagctcagcactagaatcgagtttaaagctgaaaatgagggaaaattccactcattccacccagttgctaccatcctcagctacctcaccaaggctcctctggttccaccgggtacaccagtggtgaatgcattgtcaaagcagcgtgcaatgctggaaaacataatgagggcttgtgttggattggccccagagaataacatgattctcgag

SEQ ID NO: 278207 - DNA, 278 bp, Glycine max
atcatacgtgaatttctaatgtggggttattaatataatttcgttataccccgtgttatgtttgtttggtaccttatcagttgggaaagagattgttgatctgtgcttggaccgcatcagaaagcttgctgacaattgcactgactccaagggtttttggtcttcaatgccgttggtggaggaactggttctggacttggttcccttctcttggagcgtctctccgttgattatggcaagaaatcaaagcttggtttcacagtctacccctctcctca

SEQ ID NO: 278208 - DNA, 285 bp, Glycine max
ctctaacctacctctttttcttctctctcaacaacttcaccttcttcctcctcgatcatgtctcacttcaagggcaagtaccatgatgagcttatcgccaatgctgcgtacattggcactcctggaaagggtattcttgctgctgatgagtcaacagggacaattggcaagcgtttggccagcatcagtgtagagaacattgaatccaacaggcgagctcttagggagctgcttttcactgctcctggtgttcttcaatatctcagtggtgtcatcctctttgag

SEQ ID NO: 278209 - DNA, 282 bp, Glycine max
  unsure (1)..(282): unsure at all n locations
gtgattggcgctactaattttccacaatcattggataacgcattggtgagacctgggcggtttgatcgccatgttgttgttcccaatcctgatgncaaaaggaagacagcagattttggaatcacacatgtcaaaggttctgaaggctgatgatgttgatctaatgatcatngcccgagtaacacctgggttctctggtgctgaccttgcaaacttgattaacatgctgctatcaaggcggcaatggatggtgctaaagctgtgagcatggctgattagagc

SEQ ID NO: 278210 - DNA, 284 bp, Glycine max
  unsure (1)..(284): unsure at all n locations
cactggcaaaaccataaccctagaggtcgaaagctctgacaccattgacaacgtcaaggccaagatccaggacaaggagggaatccccccagaccagcaacgtctcatctnacgccggaaagcaacttgaggacgggcgcaccctcgccgactacaacatccagaaggaatcaacccttcacctcgtcctccgtctccgtggtggcatgcagatcttcgttaagaccctcaccggcaagactataaccctagaagtcgagagctccgacaccatcgacaagtca

SEQ ID NO: 278211 - DNA, 217 bp, Glycine max
  unsure (1)..(217): unsure at all n locations
tgattgaagaagatgccgatcagaaacatcgccatcggaaggcctgaagaggctactcaccccgntacgttgaaggcggggttgctgagttcatctccaccttgatcttcgtgttcgccggttcaggttccggcatcgcctacaacaagctcaccgacaacggcgccgccactcccgccggcctcatctccgcttccatcgcccatgctttcgccct

SEQ ID NO: 278212 - DNA, 281 bp, Glycine max
ctcttcctcaccgattgctagaatggaatttcgatgctcagtcatctcttttaccattctcttctctcttgctcttgcaggagagagccatgtccatgcatcgctacctgaggaagattattgggaagctgtttggccaaacactcccttcccactgcactgcgagagcttctaaagcctctccctgcaggtgttgaaatcgatgaactccctaagcaaattgatgatacacagtacccaaaaacatcttctataaagaagaccttcatccaggcaaaaca

SEQ ID NO: 278213 - DNA, 282 bp, Glycine max
gagaatatagtatggcacaatctagtggcaaaaaattggttgagtggctggttgcagcattattgttcattgccttgttgagtggtagtgcacatgctgttgcaatatgtaacattgactcaagtcaactgaacttgtgtcgtgctgcagttactggtcaaaaccctccaccacctgatgagaaatgctgtgcagttattcgccaggccaatttgcgttgcctctgcagttacaagtctatcctaccttcatttggaattaaccccaaaaatgctttggcct

SEQ ID NO: 278214 - DNA, 282 bp, Glycine max
  unsure (1)..(282): unsure at all n locations
gccaaacatgccatacctttttgccatgncattttattgatgtcttgaagangaaacatgcatctggaagttacaaggagatggttatatacgtggaagcttgtgaaagtgggagcgtgtttgagggtataatgcctaaggatctgaattttatgtcncaactgcatcaaatgcacaagagaatagttggggaacttattgtcctggaatggatccttctccacctccagagtacatcacttgcctaggggatttgtacagcgttgcttggatggaagatag

SEQ ID NO: 278215 - DNA, 287 bp, Glycine max
  unsure (1)..(287): unsure at all n locations
caagcaacaaggggtatctaatatggggttgggcaccacaacttctcatactagagcatcatgcccattggagctgtggtgacacactgtggatggaacacaataatcgaaagtgttaatgctggtttgccaatggctacttggcctctgtttgctgagcagttttacaatgagaagttgctggctgaggtgctgagaattggggtgccatgggggcaaaggaatggaggaattggaatgagtttggagatgaggtggtaaaaaggaagagataggnatgccantgg

SEQ ID NO: 278216 - DNA, 279 bp, Glycine max
  unsure (1)..(279): unsure at all n locations
gcggaatctgctagaattttctaataatggngaaagacgttgagcaggtcacagagcaaggtgaatactccgcgaaggactaccatgaccctcctccggcaccgttgatcgacccagatgagcncacaaagtggtccttgtacagagccgccatagctgagttcatagcaacactcctttttctttacatcaccgtgttgaccattattggctacaagagacagagtgacaccaaaatccccggtaacaccgaatgtgacggcgttggcattttgggca

SEQ ID NO: 278217 - DNA, 277 bp, Glycine max
  unsure (1)..(277): unsure at all n locations
ctcttcgccgcngtnnccnccgccgcgatggcggtggccgcgtcccgacgccgacgacatcctgatccgtcaggtggtgccagatgttggcgaaccgaagaggaggacaaactgctgaacgccgagcaccacttcgcgagctcaaggccaagttcgccaagacctacgccaccaaggaggagcacgatcatcgcttcggcgtcttcaagtccaacctccgcagagccaggctgcacgccaagctcgacccctccgccgtccacgggtcaccaaattt

SEQ ID NO: 278218 - DNA, 269 bp, Glycine max
  unsure (1)..(269): unsure at all n locations
gcatgatgttgatcaacagagaattccantgcgttttgttattacaagtgcaggattggtaggttctgatggtccccttcaatgtggagcatttgatataaacttnatgtcatgcttaccaaacatgattgtcatggcccatctgatgaggttgaactcatgcacatggtggctactgctactcgcatcaatagtcagcctatctgctttcggtatccaaggggtgccctggttgggagagggtacatataagcgaggaatccccatca

SEQ ID NO: 278219 - DNA, 272 bp, Glycine max
  unsure (1)..(272): unsure at all n locations
gggnagcttcttaggtccactgtttgtacacactgcacttcaaacagaccccgaagctgttgaatctgcaaggggtcgtcagctgcgctttcttgcaaatgttgatcctattgacgtggctagaaatatcacaggattaaacctgaaacaacacttgtntggttgtttcaaagacttttacaactgctgagactatgctgaatgctcgaactcttagagaatggatttcatcagcacttgggccctctgcagttgcaaagcatatggtggct

SEQ ID NO: 278220 - DNA, 278 bp, Glycine max
ttccaacctctcaagtccaacctacccctttttcttctcccaccaacttcaccgtcttcttcctcgatcatgtctcacttcaagggcaagtaccatgatgagcttattgccaatgctgcttacattggcactcctggaaagggtttcttgctgctgatgagtcaacagggacaattggcaagcgtttggccagcatcagtgtagagaatgttgaatccaacaggcgtgctcttagggagctgcttttcaccgctcccggtgctcttaaatatctcagt

SEQ ID NO: 278221 - DNA, 273 bp, Glycine max
  unsure (1)..(273): unsure at all n locations
caacananaaagacaaccnagagagcgcgtcttaataaacgctcttctctgaaaacccccatttcttttcttctttcttcttctctttcgcttcttcgatcttcgatcttcgtcgctgaaaatgagagagtgcatttcatccacatcggccaggccgggattcaggttggaaacgcctgctgggagctttactgcctcgaacacggcattcagcctgatgggcagatgccaagtgacaagaccgttggtggaggtgatgatgctttcaacacc

SEQ ID NO: 278222 - DNA, 274 bp, Glycine max
  unsure (1)..(274): unsure at all n locations
actgggccaccagaggtggtttggtgaaaactgattggtcaaangcaccctttacagcatactaccgcaatttcaaagccacagagttctccacctcttncttccaattccttctctgatgctgcatggcagagcaacgagcttgatgcctatggcagaagaagactgagatgggctcagaagtacttcatgatctataactactgcaacgatcttaagcgattcccacaaggcattcccgctgagtgcaggcgctgagaaatactatgttata

SEQ ID NO: 278223 - DNA, 273 bp, Glycine max
  unsure (1)..(273): unsure at all n locations
ccgcagcngccttcttcgccgtttcagctcaagagccaccagcaggtaagatatggttaagcataacaacgttatccccaatgggcacttcaggaaacactggcaaaactatgtgaagacttggtttaatcaaccagcacgaagaccagaaggcgtttagctcggcagaagaaggctgtcaagattttcccaaggcctactgctggacctctcaggccaattgttcatggccagactctgaaatacaacatgaaagtcagatctgggagagga

SEQ ID NO: 278224 - DNA, 239 bp, Glycine max
gcacttggaatccaaaaatgagagaaatcatcagcattcacataggtcaggccgggatccaggttggcaactcctgctgggaactctactgcctggaacatggcaccagcccgatggcatgatgccaagtgactcctccttcggtgtagcccacgacgccttcaacaccttcttcagcgaaaccggatccggcaagcacgtccctcgcgccgtcttcgtcgatctcgagcccaccgtca

SEQ ID NO: 278225 - DNA, 272 bp, Glycine max
  unsure (1)..(272): unsure at all n locations
ggctgttttcgcctatacagnncncnctaacagtgttcaaatccaccaaaggtgnaagccacagttgtgtggcattagtgtacattcgccttgctgacctttactacaggacaggaaaattaagagagtcaaaatcgtattgcgaaaatgccttaagaatatacagcaagcctgtggctggaacaaccgccggggagattgcgagnggtttgaccganatntctgccatctntgaagctctaaagagcctgaagaggcgctgnagctgctac

SEQ ID NO: 278226 - DNA, 285 bp, Glycine max
  unsure (1)..(285): unsure at all n locations
cttcttttgttgtttgtgtgtttgttttttctctcacctgaaaatgtcttgctgcggtgnnaccacncggttgcggaagcgcctgcaagtgcggcaacggctgcggaggctgcaagatgtacccagacttgagctacaccgagtcaaccaccacgagaccttggtcatgggagtggcaccagttaaggctcaattcgagagtgctgaaatgggtgttcccgctgagaacgatggctgtanatgtggagctaatgcacctgcaacccctgcattgcaagtgaggtg

SEQ ID NO: 278227 - DNA, 287 bp, Glycine max
  unsure (1)..(287): unsure at all n locations
gttcaacangtgagantcagattactccaacccatgtatctgatgaagaggcaaaccttttcgccatgcaactagccagtgcntcagtactccctatggttctcaaatcagctcttgagcttgatctgttggaaatcatagccaaggctgncccggtgttcaccntccccctccgacattgcttctcggctcccaacacacaaccctgatgnnccccgttatgttggaccgtatattgcgcctcttggcttgctacaatatcctctctttttctcttcgcactctcc

SEQ ID NO: 278228 - DNA, 285 bp, Glycine max
  unsure (1)..(285): unsure at all n locations
attgntgcttaattagnccatgcatcttgagcaccatgagaatgagattgtgtatanaatacattatcatgtgctgtgtgttgtgcaagtactaccttctctagctagattgctaganctagaatttcaacctacctatgtgtactgataagatctgcttccctacttaaagagagcatcatcctgtgatcagtgtgcttcgtattctctctctctatatatatatggtaaaaagtggttatctcgtgcctcgccttgcagctatncatcacttttttttttttc

SEQ ID NO: 278229 - DNA, 285 bp, Glycine max
  unsure (1)..(285): unsure at all n locations
gntggaaggaccacatcncnccctcaaaagtagcatcatgttgcaaaagnattanatgatatgggttgctttgnaatctcccttngtgacacaattggagttgnnacaccaggaactgnagttcctatgcttntggctgtnctggctgttgttccaatagataagatagctgtccactttcatgacacatatggacaatcccttccaaatatacttgtgtccctccaaatggggnttagcacagtggattcctctgttgctggtctnggtgggtgtccatatgct

SEQ ID NO: 278230 - DNA, 282 bp, Glycine max
  unsure (1)..(282): unsure at all n locations
ggagcttcnaggatgttgaggttaatgatatgtctctggctgattacattggngtgtccccatccaaagcatgctacatatgttcctcacactgctggtaggtactcagtgaagnggttcaggaaagcgcagtgccccattgttgagaggctcccaactctctgatgntgcacgggaggaacaatggaaagaagctcatggctgtcaggattatcaagcatgccatggagatcatccacttgctcatgactgaacccantcaggtcatgttgatgccgtcat

SEQ ID NO: 278231 - DNA, 278 bp, Glycine max
  unsure (1)..(278): unsure at all n locations
tgcccaagtatcatactgatntatgttaattntgtaatttactgntntnctaggnctatggattttatgatgaatgccagangaagtatggcaatgccaatgcttggcggtattgtacagatgtgtttgactacctaactctttctgcaattattgatggaactgtaaatatntttcactccctcctctncaagtatctatcccccatgtgcctctgtncatcttggtgctttgtgttcatggcgggctanctcctgacattcgaacaattgatcaga

SEQ ID NO: 278232 - DNA, 268 bp, Glycine max
  unsure (1)..(268): unsure at all n locations
gnccaggcaagcaccactcaaccancacacatctnctcgttcaagctacccctttgtncnctncttctaantttcaagttttaaaagtatacagatggcagagacattcctatttacctcagagtcggtgaacgagggacaccntgacaagctctgcgaccaaatctccgatgctgtcctcgacgcttgcntcgagcaggacccagacagcaangttgcctgcgaaacatgcaccngaaccaacttggtcatggtcttcggagaaatc

SEQ ID NO: 278233 - DNA, 269 bp, Glycine max
  unsure (1)..(269): unsure at all n locations
ccccactcaaccactanacntntcctcnttcacgctacccctttctgctctncttntacntttcaagttttaaaannataaagatggcagagacattcctatttanctcagagtcggtgaacgagggacaccctgacaagctctgcgaccaaatctccgatgctgtcctcgacgcttgcctcgagcaggacccagacagcaaagttgcctgcganacatgccaccaaaaccaacttggtcatggtcttcggagaaatcacgaccaaggc

SEQ ID NO: 278234 - DNA, 303 bp, Glycine max
caaccacacctatagctgtggcaggtgatctgatgtcaaaaccaacatggtatgctgcaagcagaatccacaatgcattgttacgaatggacaacgattctttgagatcggctcttgactatctagaactgcaacccgatctaaaagcgctggttcgtggggctcatactttcaagtgtccaaaccttggtatcactagctggactaggcttccaatccatgatgctgactttggttggggaaggccaaattcagggacctggtggaattgcatacgaggggctatctttcataattccaagc

SEQ ID NO: 278235 - DNA, 279 bp, Glycine max
  unsure (1)..(279): unsure at all n locations
anaccaggtacagtttcagctncactctgcttcacttgngtggttctagtaatccggtgctgctagaggatgggaactagtgaatggcatatcgagcgaagatctagcttcggcactgaatcccccttagcaagagaggcaggaaatgtgcctganactgggtcactctctattgttgtgcttggcgcttctggggatcttgctaagaagaagacatttcctgcatttccatctataccggcaggattcttaccagcagatgaagttcacatttttggc

SEQ ID NO: 278236 - DNA, 299 bp, Glycine max
  unsure (1)..(299): unsure at all n locations
gggctctctaagaaacatggctgaagagggtcaggttgtcggcgtccacaccgttgatgcgtggaaccagcaactgcagaatggaaaagactcccaaaaattgattgtggtggattttactgcttcctggtgtggtccatgccgttttattgccccagttctggcagagattgctaggcatactcctcaagtgatcttcctcaaggtggatgtggatgaagtgaggcctgttgctgaggaatatncattgaggccatgccaaccttcctcttcttgaaagatggcaagatcgtggataa

SEQ ID NO: 278237 - DNA, 301 bp, Glycine max
  unsure (1)..(301): unsure at all n locations
acatcttcttcccaaccactactactcncctcactgcagatctcaattgcatcgctgtccatggctaccatcgttagcatcaaggcccgccanatcttcgacagtcgtggcaatccaactgtcgaggtggatttgacttgctccgatggnacttttgccaganctgctgttccaagtggtgnatccactgggatttatgangcccttgaattgaganatggangatctgactaccttggnaanggntatcnnacgctgttnacaatntgaacaccgtcattgggcctgctttgantggcna

SEQ ID NO: 278238 - DNA, 309 bp, Glycine max
  unsure (1)..(309): unsure at all n locations
gagggagccattgtgaaattgaaagtaattggtaagctgcnagatggtactttgtttttgaaaaagggccatgacgatgaaggagagctgtttgaattcaaaactgatgaggagcaagtaattgatgggcttgacagagctgtgttgactatgaagaagggtgagatagcattgttgattataggacctgaatatgcttttggttcatcagagtctcagctggaacttgcagtggttccacctaactccacatatattacgaggttgagctagtatcatttgagaaggagaaggaatcctgggacatgg

SEQ ID NO: 278239 - DNA, 308 bp, Glycine max
  unsure (1)..(308): unsure at all n locations
cagagtgttgcagttggagctgtcattgtcactaaaatggatngccatgcaaagggtggtggggctcttagtgctgtagcagcaacaaagagtcctgtcatattcattggaactggagaacacatggatgaatttgaagtttttgatgttaaaccatttgtcagtcgtctactaggcatgggagactggtctgggttcatggatcnaaattcatgaagttgttcctatggatcaacaacctgaactgcttcaaagctgtcagaaggaaactncaccttgaggattatgtatgagcagtttcagaactt

SEQ ID NO: 278240 - DNA, 296 bp, Glycine max
  unsure (1)..(296): unsure at all n locations
ttccaatacggaatctaaggcaaagcaaaccaaacatcttgaatcatgggttcaacaggtgagactcagattaccccaacccacgtatctgatgaagaagcaaaccttttcgccatgcaactagccagtgcttctgtccttccaatgatcctcaaatcagcacttgagcttgatcngttggaaatcatagccaaggctggccctggtgttcatctttcccccactgacatttcttctcagtcccaacacagaaccctgacanccacgtnatgttggaccgtatattgcgcctattg

SEQ ID NO: 278241 - DNA, 297 bp, Glycine max
gctttgtgatttatatgaaaatgattcaatttttgataagtttgagtgttgtctaagtggtgatggattgcgtgtttcaactggctcttacagcaatctattccgtgtgtttggttgtgttcctggaagtactgaggctacaactttggaagccagtaaaaatccaatgagacgccaagttccaaccccttcaagaccatctagatcattgggaaacagtataacaagagttgtaagacgtgagcagagagcgccggtgttgacgcaaatgggaattcttttgatttcacaacaaag

SEQ ID NO: 278242 - DNA, 298 bp, Glycine max
  unsure (1)..(298): unsure at all n locations
ctcgcgggtggacaacgaaatttctcagncaaagaacaaggatcagaatcgtttaatcaagttgaggaagatggcactagtctccggangaagatcaacactgaancctaacgcccctctttacattcccgccgcgttccgccaagtggaggatnnttctccagaatggtggcagctggtgacgacactgacatggtaccatgactactggctaagccagcagcacgatgatggagccttctatgggaggatgggtttgatggcatgatgtggttggnttgcttcctgatcgtttgat

SEQ ID NO: 278243 - DNA, 304 bp, Glycine max
  unsure (1)..(304): unsure at all n locations
ctctctgtgtatttccctacctctcccttcaagatgcagatcttcgtcaagaccctcaccggcaagaccatcacccttgaggtggaaagctctgacaccatcgacaacgtcaaggccaagatccaggacaaggaaggnatccccccggaccagcaacgtctcattttcgccggaaagcaacttgaggacggccgtacccttgctgactacaacattcagaaggagagtactcttcacctcgtcctccgctccgtngtggcatgcagatcttcgttaagacatcaccggcaagacnataacccta

SEQ ID NO: 278244 - DNA, 294 bp, Glycine max
  unsure (1)..(294): unsure at all n locations
ctttttgatgcggttgagaagcattatggaattcgcantgagtacatgttccctnatgctgttgaggttcaggcattngtgangagtagggggtnttctctttctncngaggatgggcaccaagagtnttgcagggtgagataagtgaggcctttcaaggtggncccttaanggtctcagagcatggataactggtcaaaggaaanaccagtacacctggtactaggtctgaaataccngttttcaggttnatccggtttttgaaggcatngatagtngaatggaancttggtg

SEQ ID NO: 278245 - DNA, 297 bp, Glycine max
  unsure (1)..(297): unsure at all n locations
attaattgcaagattggcacttcgttgcttggtgatgtccctttctgttctcttcactcttggtcttgcgagagaaagccatgccaganacgaagatttttggcatgctgtttggccaaacactcccattccaagttcattgcgagatcttctaaagcctggccctgcaagtgttgaaatcgatgatcaccctatgcaaattgaagaaacacagtacccgaaaaccttcttctataaaganaccttcatccaggcaaaacaatgaaagtacaattcagcaagcctccctttcaacaa

SEQ ID NO: 278246 - DNA, 165 bp, Glycine max
ggcgaaactcgagagtgtaaggttttgcatttcatttgacgaagagtgagagagtcttatctgtcgtctctgatctctgatcgcatcttcattccgaaaatggctgtttcggctatcactggagcgaggctaactctagggatgtctctttcctcttccacacaa

SEQ ID NO: 278247 - DNA, 290 bp, Glycine max
  unsure (1)..(290): unsure at all n locations
ctagtctcaacttctgctcttccaactcctacaacgctnttctctgcactcatgggcaaggtcaagatcggaatcaacggatttggaagaattggccgtttggttgccagagtcgctctgcaaagagacgatgttgaactcgttgccgttaacgaccctttcattaccaccgattacatgacatacatgtttaaatacgacagtgttcacggacactggaagcatcacgatgtcaccttaaggacgagaagacccttctcttcggtgacaaggcagtcatgtttttggac

SEQ ID NO: 278248 - DNA, 289 bp, Glycine max
ttctcattcttaaaaaaaaccctcattattccatcaaaactagctactacaacatgtcgaacgtgttagcaggagaagaaagcgaaaaagttgttacctatgggtgggcagctagagacacctcgggaattctctccccattccactttatcagaagggtcaaatggtgataatgatatcacactcgacgtactctattctgggatttgccacaccgatctccacatggtgaagacgactttagaatatccatctatccaatggttcctgggcatgagattgtgggtaa

SEQ ID NO: 278249 - DNA, 281 bp, Glycine max
ataaattgtaatgattctaggaagtggggagcagagattatgcgtcaggattggggggaagcagctagaagtggttttaagcagtcaaaactttcaaatcagtgtaatcatcggtataagatctatgctgaagggtatgcatggtctgtgagtttgaaatatattctctcatgtggttctgttgcattaattatatcaccccagtatgaagattttttcagccgtggcttattccaaaccataatttttggcttgttgattctctaaatctatgtccatct

SEQ ID NO: 278250 - DNA, 291 bp, Glycine max
  unsure (1)..(291): unsure at all n locations
ctctttctctagtcctgttatttctcagcgcgtaaagcatggctntgttggtggagaaaaccacgagtggtcgcgagtacaaggtcaaggacctttcccaggccgacttcggccgcctcgagatcgagctggccgaggttgagatgcccggcctcatggnctgtnggaccgagttcggcccctcccancccttcaagggggcccgcatcaccggctccctccacatgaccatccagancgccgttctcattgagaccctcaacggccttggcgccgangtccgctggtgct

SEQ ID NO: 278251 - DNA, 295 bp, Glycine max
  unsure (1)..(295): unsure at all n locations
cttgaggtggaaagctctgacaccatcgacaacgtcaaggccaagatccaggacaaggaaggaattcccccggatcagcaacgtctcatcttcgccggaaagcagctcgacgacggccgtaccctcgccgactacaacatccagaaggagtcaacccttcaccttgtccttcgtctccgtggtggcatgcagatcttcgtcaagactctcactggcaaaaccataaccctagaggtcaaagctctggacaccantgacaacgtcaagggcaaggntcnnggaccanggggggant

SEQ ID NO: 278252 - DNA, 268 bp, Glycine max
  unsure (1)..(268): unsure at all n locations
cttgaaggtgggagaagctgatnnantacataggnaatactantgatgtgaatctatatgcacaaatgattgatgaagctgagggattggagaaaattgagaacctccagagtcatgacaacacagagatttacgaaaaggcggtcaagattcttgagacatactggttggaggaggaagatgagactatgcctccaggggatgcttctcagtcaggttcaatttggtagcagtgacgctcctgctgtgccgtccggtngattcaact

SEQ ID NO: 278253 - DNA, 306 bp, Glycine max
  unsure (1)..(306): unsure at all n locations
agaagagttgcnngagctgggttctggtacgtttgggactgtgtaccatggaaaatggagaggatcggatgttgcaattaaaagaataaagaaaagctgcttcgctggtcgatcttcanaacaagaaaggctgaccatagagttctggcgggaagctgacatactttccaagcttcaccatccaaatgtggtggcattttatggtgtagttcaggatggaccaggagcaacactagcgactgttgccgagtacatggtggatggttctcttaggaatgttttgcttcgtaaggataggtatcttgt

SEQ ID NO: 278254 - DNA, 307 bp, Glycine max
aggattaaattaagtgcagaaaaggcaatctttatatttgtggacaacgtccttcctcctacaggagcaattatgtctgccatatatgatgagaagaaggacgaggatgggtttctctatgttacatacagtggcgagaacacctttggggatctgatttccattcagtagccattataaattcacaccgtttgaccttgtggtctcattggtctgtctgataaatttgttatagtactcatgtcaagaaccttactctcgatgttttgtacagttgtatataaattccgtgaacttgatcaatatt

SEQ ID NO: 278255 - DNA, 306 bp, Glycine max
acaatttctctctttctttttgtgtccaaaatggctcctagttctactcacaatactgggatctatgtgcttatgctagttgggatagtgattagcactatggttgctacctgtgctggtagcttctaccaagactttgatctaacatggggtggtgaccgtgctaagatattcaatggtggccagcttctatctctttcccttgacaaagtctctggctctggcttcaaatcaaagaaagaatacctatttgggaggattgatatgcagctcaagctcgttgctggcaactctgctggcactgtc

SEQ ID NO: 278256 - DNA, 302 bp, Glycine max
  unsure (1)..(302): unsure at all n locations
agttgatatttgaatccagtttagtaggagtcntgggaagacntgttctcactttgaccccagcagtgacttgttcgttcccaatgaaatgtaaagatgttattacttccacagcttgtngggctgcnatgttgggattgcttgtnggattggggtttgtaatgggtccaattcaacttcttaagctttatggtgttccctatgttgtaagtatcttcctctttnccatcatttccatggttctttttgaatcaagaatgaatgaagttctcatttgaatttcttggaattgaagatattcg

SEQ ID NO: 278257 - DNA, 299 bp, Glycine max
  unsure (1)..(299): unsure at all n locations
tcaagcccagattcaaccagttaaacttggaacccaaggcttngaggtttcaaaattgggattcggatgtatgggccttactggagcgtacaatgaccctctccaagaacaggatggcatatctgttatcaagtatgcgttcagtaagggaatcacattttttgatactgcggatgtttatggagccaatgctaatgaacttttggttggaaaggctttgaagcagctgcccagagaaaagattcagatagccacaaaatttggtattgcttcacgaggntttcctgatatgaagatca

SEQ ID NO: 278258 - DNA, 305 bp, Glycine max
  unsure (1)..(305): unsure at all n locations
gaaattcaatttatggttcccacgtgatgcagtatggtgacatagggcttagcgagaacaatctcgtncttatannngggtacaaatcctgctaatgataattttacttttgtgcttaaaaactcattggtgccaccttcaaaagcagtcaaccaacgtgatgcagatctcatccatttttgggataagttccgcaaagctcctgtgggttcttctaggaaagctgcagctgagaaacaaattcttgaagcaatgtctcacagaatgcatatagatgacagcatgaaacgtattggaaagctctt

SEQ ID NO: 278259 - DNA, 298 bp, Glycine max
  unsure (1)..(298): unsure at all n locations
gaaattgttgtgcatcactcgcgtcgacgtctgtgtatgaatgtgtttgtgttgtgaaagagaaaatggaagctgtgatgggactgatgcggaggattccgccgaaacacacagaaacagctctgtctgcgcttctgagccttatgcctcaccactcctccgatctcctctctcaagtcgatcagcccctccaggttctgtgcgatgtcgaatgcggcaaggagttcattttgtgtgaatacaacagagacgccgactcttacagatcancttggtcaaataaatatcatccaccatt

SEQ ID NO: 278260 - DNA, 295 bp, Glycine max
  unsure (1)..(295): unsure at all n locations
tcttctctctctgtccgaagatggcttcacgcaggttcgtatcttctctgattcgatcctcccttcgtagatctcaatcgaaaccctcgatttccgcatccgcatcgagnggnacgtcatccaaccgtgcctctccgcacggttacttgctgaaccgcgtcgccgaatacgctaccgcggcggcggctgctaccgctcctccctctggtccgcctccgggcaagaaggaggttagcggcgncgggaagatcaccgatgagttcaccgggaagggtcgatcggcangtctgccagg

SEQ ID NO: 278261 - DNA, 298 bp, Glycine max
tcttttttcccgcagtcatgggcaaggtcaagatcggaatcaacggatttggaagaattggccgtttggtggccagggtggctctgcagagagacgatgttgaactcgttgccgttaacgatcctttcattaccaccgattacatgacatacatgtttaaatacgacagtgttcacgggcactggaagcatcacgatgtcaccgttaaggatgagaagacccttctcttcggtgacaagccagtcactgtttttggacacaggaaccctgaagagatcccatggaagtcgactggagc

SEQ ID NO: 278262 - DNA, 295 bp, Glycine max
  unsure (1)..(295): unsure at all n locations
gggaaggaaaagaaggtgactattgattttgagcctttcagacctattaatgcatccctttatctttgtgacaataagtttcacactgaagctttgaatgagctccttgagtctgatgacaagtttggatttattgtcatggatggcaacggtactttgtttgggacattgagtggtaatacaagagaggtgcttcataaattcagtgtggatctcccaaagaaacatggaagaggancgcaatctgctctgcgttttgcccgtcttcgcatggagaagcgtcataactatgtgc

SEQ ID NO: 278263 - DNA, 294 bp, Glycine max
  unsure (1)..(294): unsure at all n locations
tttgttgtgagctataagctagtttatcgtgaggagaatatgaagttgtttgttttctttgttgctgcagtagttttggtagcatggccatgccatggcgcaggctaccaaaggttccctctccgaatgaaaactggctatggtgagcgttcttcggaggtaaaatgcgcaagttttaggcttgctgtggaagcacacaacatccgagcctttaaaaccattcctgaagagtgcgtngaaccaacaaaggactacattaatggcgaacaatttagatcagactctaaaacagtt

SEQ ID NO: 278264 - DNA, 293 bp, Glycine max
  unsure (1)..(293): unsure at all n locations
aacgtcattcctctcttccgctgcatattttccgatcacctcactccggtgcttgcgtaccggtgcctggttaaggaggacgagagagatgctccgagttttctctttgaatcggtcgagccaggccaaatttctagcatcggacggtacagtgtggttggagcacagccgtgtatggaaattgtggcgaaagagaacgtggttactattatggaccacgtggaagggcgcaggagtgaggaaatnnncagaggatcctctggtgattcctcgtaggatcatggagaagtgga

SEQ ID NO: 278265 - DNA, 299 bp, Glycine max
gttggaagcagagagatggaaggttgggacccgaatacgaagtcgacgctgacacagatccctctgctgacgacgaaggcgggtccacgagacggagcggcatggacgcagaggcttaaggaagagtacaaggctctgatagcgtacacgcagatgaacaagtccaacgacaacgattggttccgtatctccgccgccaatccggaaggcactcgctggaccggtaaatgctggtacgttcacaacctcctcaagtacgaattcgacctccaattcgatgtccccgtcacttacccttc

SEQ ID NO: 278266 - DNA, 298 bp, Glycine max
  unsure (1)..(298): unsure at all n locations
agcagttatagagaactgactgagattgctgagcaggccaagagaagagctgaagttgcaaggcttcgcgagcttcacacacttaagggacatgttgagtctgtggtgaagctgaagggtctggacatngnnacnatccagcngcattacactgtgnaatnnncaanannagaacgttgtagatagtaaaggggcanaatncantgngtnaaatgatcngagagnnantgntgnnngctgactctannnnggctnanncagtgttaggtgtctccngtgatatatctatccgctcnnt

SEQ ID NO: 278267 - DNA, 290 bp, Glycine max
  unsure (1)..(290): unsure at all n locations
ttgggttattattggtcactctgaacggaggcagnttttgaatcgaatcaaatgagtttgtgggagataaagttgcctatgcacttcaacaaggtctgaaagttatagcatgcattggggaaactcttgaacagcgtgaagctggtacaacaacggctgttgttgctgagcaaacaaaagcaattgcagctaaaatatcaaattgggacaatgtcgttttggcctatgagccagtttgggccattggaacaggaaaggttgcaactcctgctcaggctcaagaggttcat

SEQ ID NO: 278268 - DNA, 291 bp, Glycine max
  unsure (1)..(291): unsure at all n locations
agtagcgccgcctttaaggtcggtgtgttggggagtggaatttcaggagccgtgcgtgcttcaactcttgccagaaatggggtttctgttactctctttgagtcagctagaggccctggtggacgcatgtcccaaagnngagagagaactgaagatgggacggagctgcattttgaccatggtgctccatttttctcggttagcaagtctgaagttttacatctggttcaagagtgggaatcaaggggtctcgtagctgaatggaaagagaagtttgcctcgtttgatttt

SEQ ID NO: 278269 - DNA, 285 bp, Glycine max
  unsure (1)..(285): unsure at all n locations
gaggagatagaccccagaagtggtttctgcagctccaattcaatcttctacagcaagcgtaantncctcccactccctcccaacaangccttagacgtcaccaccttcatctcctcccgcgcccaccgcgccaccacagccttcgtngacgccgccaccgcccgccgcntcacctacacccaactatggcgttccgtggagggcgtggcagcctctctctccgtggacatggggatccganagggcaacgtggtcctcatcntctcccccaactccatccacttc

SEQ ID NO: 278270 - DNA, 287 bp, Glycine max
  unsure (1)..(287): unsure at all n locations
ccgagtagcaacaatgtcgaagcgaggtcgcggaggatcggcgggaaacaagttccgcatgtcgctgggtctnccggtggcggcgacggtgaactgcgccgacaacaccggcgcgaagaacctctacatcatatcagtgaaggggatcaagggtaggctgaaccggttgccgtcagcttgcgtcggagacatggttatggncaccgtcaagaagggaaagcccgatctccgtaagaaggtgctgcccgccgtcatcgtccgccagcgcaancttggcgccgaaangg

SEQ ID NO: 278271 - DNA, 222 bp, Glycine max
  unsure (1)..(222): unsure at all n locations
tagtgcctccttgccagaagttaaaatggcccaagaaactttcctattcacatctgaatcagtgaacgaggggcaccctgacaagctctgtgaccagatctccgatgctgtgctcgatgcatgcttggagcaggaccctgacagcaaggttgcctgtgaaacctgcaccaagaccaacatggtgatggttttcggagagatcacnaccaaggccaacgtggg

SEQ ID NO: 278272 - DNA, 307 bp, Glycine max
  unsure (1)..(307): unsure at all n locations
ctcagtganagaaactctntctctagaaaccctattgcnccgttttgcaatcgaactcgacaatggccaacagcaacctccctcgaagaatcatcaaggaaacgcagcgtttgctcagtgagccagcaccaggaattagtgcctccccttctgaagagaatatgcgatatttcaatngtgatgatccttgggccaacccagtcgccttatgnaggaggagttttcaagttaganctatttttgccagangaatatccaatggctgctccaaaggttangttcctcacacgctatatctcaacccatt

SEQ ID NO: 278273 - DNA, 311 bp, Glycine max
  unsure (1)..(311): unsure at all n locations
acttaatcgatcatcacttcacttcactaatacatcatggcagacgagacccagaacaagtatgagagctctgaggttgangtccaggatcgtggtgtttttgactttctcggtnagaaaanggatgaagaagacagcctcatcctcaggaggnggtcatcgccaccgaatttcaaaancnccatgtctcagaccaaggagagaacaagcacagcctcttagaaaagcttcaccgatctgacagcagctctagctcttcaagtgaggaggaaggagaagntggnaaacnanggaggangangaggagggac

SEQ ID NO: 278274 - DNA, 276 bp, Glycine max
caaccatcgatctcaattttcaaccttaacctctaagaatgtcttacgcttatctcttcaaatacatccatcatcggtgacaccggagttggaaagtcttgtcttctacttcaattcacggacaagcgctttcagcccgtccatgacttgaccatcggtgttgaatttggtgccaggatgatcacaattgataacaagccaatcaagttgcaaatatgggatacggctggtcaagaatcatcagatctatacaaggtctattacagagggctgcag

SEQ ID NO: 278275 - DNA, 300 bp, Glycine max
  unsure (1)..(300): unsure at all n locations
gctctggcatggcatataacaaactcacagacaatggttcggcaacancagctggggtggtggcagcatccctgtctcatgcatttgctactttttgttgcggtctctgttggtgctaacatctcaggtgggcatgttaaccctgctgtcacatttggtgcctttattggtggaggngatatccctacctcagaggcattctgtactggattgctcagttgcttggctctgtagttgcttgcttgctcnttaaattgccactggtggatggaaacatctgcgttctcatgtctcctgggg

SEQ ID NO: 278276 - DNA, 296 bp, Glycine max
aaaaacccttctttctttcaggttcattacttgatcagtgtcaaaagggtagttgcaaattgcaatggctaagcatgatgttgagggtggttcctctcagcaaaggactaccatgatcctcctccagcacctttgattgatgctgaggaactcacacagtggtcctctacagggcttgattgctgaattcattgccacattacttttcctttacatcacagtgctcactgtgattggttacaagagccagagtgatgtcaggccgggggtgatgtgtgtggtggattggcatctgg

SEQ ID NO: 278277 - DNA, 299 bp, Glycine max
  unsure (1)..(299): unsure at all n locations
cttgttcttctttctctattgtctatagtcatctccattgttctctttcattacccacacacacaaaagaaacaacactccaagaggaccaccaggtcctccacctcttcctctcatcggcaaccttcaccaactccacaactcatccccacatctcngcctatggcaactcgccaaactccacggtcctctcatgtcgtttcgcctcggcgccgtgcaaaccgtcgtggtttcatcggccagaatcgccgaacaaatcttgaaaacccacgacctcaattcggttccaaggctctctt

SEQ ID NO: 278278 - DNA, 291 bp, Glycine max
gttatgaagtcattgatgccatcaagtctaaggtggaggcactatgccctggagtggtgtcatgtgctgatatcgttaccattgctgctcgtgactctgttgcaattcttggagggccaaattggaaggttaaacttggtagaagggattccacgactggctttttcaaccttgcaaacagtggtgtgcttccaggaccgaattcttccctcagcagcctatccaaagattgatgatcaagggctctctaccaaggacatggttgcatatcagagcacacacattggaaag

SEQ ID NO: 278279 - DNA, 293 bp, Glycine max
  unsure (1)..(293): unsure at all n locations
ggtttctcttcctccctggaaganaaagaagagtcaccgctacgacgccgttcgtgcttttttgaggtgccacagtcatgtttgggcgtngtggaccaaggnggagtgacaactccaaatattatgatattctcggggtttccaaaaatgccagtgaagatgaaatcaagaaggcctatagaaaggctgctatgaagaaccatccagataagggaggagatcctgaaaattcaaggagttaggtcaagcatatgaattttaagtgatcctgagaagaaagacctgtatgacca

SEQ ID NO: 278280 - DNA, 300 bp, Glycine max
aaaagaagaagagaaaaaagatgagcgacggaggaaaacgacaaggtggaagagcgttgccgccgccgccaagaggccctccgcctacctcccccctctcgccctcgcctcgaacccgtcgatcgcgaaaagacatgtccgttactgctgcgagtgttcactaagattgggagtcaccattccatggaagactttgccgtcagaggcaaagagcccaaagacgaggttcagatttacacctggaaggacgctacttctccgagaatccaccgatcttgttcaaagaattgctccggctgc

SEQ ID NO: 278281 - DNA, 297 bp, Glycine max
  unsure (1)..(297): unsure at all n locations
gggccaggcaagccccactcaaccaccacacctncgcctcgttcacgctacccctttctgctcttcttctacctttcaagttttaaaagtataaagatggcagagacattcctatttacctcagagtcggtgaacgagggacaccctgacaagctctgcgaccaaatctccgatgctgtcctcgacgcttgcctcgagcaggacccagacagcaaagttgcctgcgaaacatgcaccanaaccaacttggtcatggtcttcggagaaatcacgaccaaggccaagttgactacgaga

SEQ ID NO: 278282 - DNA, 289 bp, Glycine max
gggattttatgatgaatgccagaggaagtatgggaatgctaatgcttggcgatattgtacagatgtttttgactatccttactctttctgcaattatagatggaactgtgctttgtgttcatggtggccttctccagacattcgatcaatagatcagataagggtcattgagaggaactgtgaaattcctcatgagggaccattttgtgatctgatgtggagtgatcctgaagatatcgaaacagggcatcatcctcgtggagctggttggcttttggatcccgggtca

SEQ ID NO: 278283 - DNA, 289 bp, Glycine max
  unsure (1)..(289): unsure at all n locations
gtaccatgcagagatccttgcctatggatccttcatnaatttacgggcagggaggaatgcantcaaagcctggaattgcaaatgcaggattgantccgggagttggtagtctcacattgaaaggatggcctctaactggcattgatcaaattcgtcctggttttggagcaccagttcagaagcctctccttcagagtgcaaatcagtttcagcctttgccgnnnnnnnnnnnnnnnnngatcctgcacaggttcgggcacaangaaatttggcaattcactgcttatgg

SEQ ID NO: 278284 - DNA, 288 bp, Glycine max
ggacctcttggattgactgggaataaggtggagaaactctgtgatctctgtaacattactgttaacaagaacgctgtttttggtgatagcagtgccttggcccctggtggagtgcgaattggtgcccctgccatgacttctaggggtttggttgaaaagcactttgagcagattggtgagttccttcaccgtgctgtgactctcacactggagatccagaaggagcatggcaaacttctcaaggattcaacaagggtctcgtcaacaacaaggctatgaagatctcaa

SEQ ID NO: 278285 - DNA, 290 bp, Glycine max
  unsure (1)..(290): unsure at all n locations
acagagcaagaacactgttccaatacggaatctaaggcaaagcaaaccaaacatcttgaatcatgggttcaacaggtgagactcagattaccccaacccacgtatctgatgaagaagcaaaccttttcgccatgcaactagccagtgcttctgtccttccaatgatcctcaaatcagcacttgagcttgatctgtnnacaatcatagccaaggctggccctggtgttcatntttnccccactganatttcttctcagctccnangcaacaanctgantgaatacgttatg

SEQ ID NO: 278286 - DNA, 287 bp, Glycine max
gtcgagcagtgaataccagttgctcctatagccggcgctcaacaacatggcggacaaggcagtcaccatccgaaccagaaagttcatgacgaacaggcttctctccagaaagcaattcatcgttgatgtccttcatccagggagggctaatgtttccaaggctgaactgaaggagaaattgggcagaatgtatgacgtgaaagacactaacactgtatttgtcttccaagtttcgaactacatttggtggtggcaatccactgggtttggtttgatctatgatcagt

SEQ ID NO: 278287 - DNA, 282 bp, Glycine max
ccatcttcgccttcgttgtcaccaacaagggcgctggcgaagttgtgtctaatagagggtataaggagtataggcttggggattactcgaactggttgcagaagagggttaacaacactaagacgtggaacaggatcaggagttgcttgcaatctgggaaagtctgcactgagtttcaatccaagtttctaaacgacaccgttactgagttttactccgaaaacctgtccgcgctcatctggatgctgtaaacctgcagaagatgccatttagctatgtgaa

SEQ ID NO: 278288 - DNA, 282 bp, Glycine max
gaccaaccaactggaactggctttagttacagtactgataagcgtgacattcgtcatgatgaagaaggtgtgagcaatgacctctatgactttctacaggccttctttgctgaacatcctgagtatgtaaagaatgacttttttattacgggtgaatcatatgctggacattatattccagcttttgcagctcgtgtccataggggaaacaaagctaaagaaggaattcatataaacctaaagggattgccatggtaatgggctactgatcctgggatccag

SEQ ID NO: 278289 - DNA, 288 bp, Glycine max
  unsure (1)..(288): unsure at all n locations
gtttcggaggagaagaaaatagtcgttcgagatggcccgtacgaagcaaactgctcgtaagttccacaggaggaaaggctcctaggaagcagcttgcaaccaaggctgcacgtaagtctgcaccaactactggtggtgtgaagaagccacatggncctaccntncctggtaccgttgctcttcgtgagattaggaaataccagaagagtaccgagcttttgatcaggaagctccccttccagaggctggttncgtgaaattgctcaggattcaaaatgatctgcgttt

SEQ ID NO: 278290 - DNA, 282 bp, Glycine max
gatggggtagctgataatatgtctgaggttagtgagtccgaattatgttgcatctgctttgagcaggtgtgcacaattgaagttcagaactgtggccaccagatgtgtgcacaatgcacactagccctgtgttgccacaacaagcccaaccctgccactgcctgtccttactccaccagtttgtccattttgtcggagcacgataacaagactcgttgttgtgaagacagaatgccacgatgaaatggatcaagacatgctgatatcaatgttccaagctgg

SEQ ID NO: 278291 - DNA, 270 bp, Glycine max
  unsure (1)..(270): unsure at all n locations
aaaataagaagaaataaagacaagtgtagtgtagggaaatcaagaggttgtttcngtgtttngtgtggaccgagacaacatgtcaaacttcaaggctggttatggccacttctcaacaaatgtcaaaggggtgtttgcagccggtgattgtcgccgtggtcagtccctggtggtgtgggcgatttcagagggacgacaaggcagcagcacaggtcgacaactacctcgtcaaagaagacaaagaccaccggaatcaggatggcctgtcaa

SEQ ID NO: 278292 - DNA, 282 bp, Glycine max
  unsure (1)..(282): unsure at all n locations
gcagagtgaaacnntgccgtgncctcaacctctccaccaacgttaacctagacggcgtcgacacctcttccattctctccgaagccacctcaactgtcgccagcatcatcggcaaacccgaggcctatgtgatgattgtattgaaaggatcagtgcctatatctcatggtgggagtgagcagccagcagcttacggtgaattggtgtccattggtggtcttagccctgacgtgaacgagaaactcagtgctggcattgcttcaattctcgaaaacaagttgt

SEQ ID NO: 278293 - DNA, 278 bp, Glycine max
ggtgcttggatgtactttgctactggaaattcgtcgtaccttaagcttgctacggctcctggcctggccaagcatgctggtgccttctggggaggccctgattatggagtactcagctgggataacaagcttgctggtgctcaggttcttctgagtcgtttgaggttattcttgagtcccgggtatccatatgaagaaattttaaagacctttcacaaccagacaagcataatcatgtgctcctatctaccagttttcacaagctttaatagaaccaa

SEQ ID NO: 278294 - DNA, 277 bp, Glycine max
  unsure (1)..(277): unsure at all n locations
atttcctcttcctgatatcaaaacaaggagacgcatctttcagatacacacatcgaggatgacattagctgatgatgtcaacttggaagaatttgttatgactaaagatgaattctctggagctgatataaaggcaatatgtactgaagccggtttacttgctctacgagaacgccgaatgaaggtgactcatgccgcctttaagaaggccaaggataaagtgatgtttaagaagaaagaaggggtgcctgaagggctgtatatnnnnntactatcc

SEQ ID NO: 278295 - DNA, 278 bp, Glycine max
  unsure (1)..(278): unsure at all n locations
tctcaccaaagccttcctagaacgaaaaaaaaaagaagagcaattttccctcaccaaagaagaagaagcaaacaatggccgatcaanttaccgatgaacagatctccganttcaaggaagccttcagcttgttcgacaaggacggcgatggttgcatcacaacnaagcnaattggaactgttatgcgttcattggggcaaaacccaactgaggcagagctccaggacatgatcaatgaagtggatgctgatgggaatggtaccattgacttccctgag

SEQ ID NO: 278296 - DNA, 278 bp, Glycine max
gggaaacagacaagaagtttccaatatgtctctgatttggtggagggtctaatccgccttatggaaggagaacacgtgggacctttcaatcttggaaatcccggagaatttaccatgcttgaacttgccaaggtggttcaagaaacaatagaccctgatgctaggatagagtacaggcccaacacagaggatgacccgcacaagagaaagcctgatataagtagggctaaggatcaacttggctgggaacccaaggttgacctgcgcaagggcctccc

SEQ ID NO: 278297 - DNA, 275 bp, Glycine max
  unsure (1)..(275): unsure at all n locations
agcagaggtgcacacataaacctcaaacgtgcagagaaagcacggatattggtcaacaaaattccagctttggttgatacattggttgctaaaactcgtgcatgggaagaagatcatggtatgtcanggacatatgatggcgttcctcttcttgccatgttagatgaatatgccatgctcagacatgagcgggaagaggaaaaacggaggatgagggatcagaaaaagcatcacgagcagcgaaacacggaacaagaaaccatctttggttcaag

SEQ ID NO: 278298 - DNA, 278 bp, Glycine max
  unsure (1)..(278): unsure at all n locations
caactcacaagctcacagagcaagaacactgttccaatacggaatctaaggcaaagcaaaccaaacatcttgaatcatgggttcaacaggtgagactcagattaccccaacccacgtatctgatgaagaagcaaaccttttcgccatgcaactagccagtgcttntgnccttccaatgatcctcaaatcagcacttgagcttgatctgttggaaatcatagccaaggctggccctggtgttcatctttcccccactgacatttcttctcagctcccaa

SEQ ID NO: 278299 - DNA, 276 bp, Glycine max
gatagcccgaattgttgcaaagcaccccaggcttctggttctctctgatgaaatttacgaacacataatttatgcaccagcaactcacacgagctttgcatctttaccaggaatgtgggacagaactcttactgtgaatggattttctaaggcctttgcaatgactggttggcggcttggatatattgctggtccaaaacattttgttgcagcatgtggaaagatccaaagtcagtttacttcaggggccagtagtatagctcagaaagctgcagt

SEQ ID NO: 278300 - DNA, 277 bp, Glycine max
catgaaccattcacctgaagcatgggatcacatgcaattcaaagatgttgttgtcaaagttgctaatgtagagttgtattacaaggctgttcacttctatttacaagagcatccagatcttatcaatgatgttttgaatgtccttgcacttcgtgttgatcatgcacgtgttgttgacatcatgcgaaaggctggtcatctccgtcttgtcaagccttacatggttgcagttcagagtaacaacgtgtctgctgttaatgaagccctgaatgaaata

SEQ ID NO: 278301 - DNA, 278 bp, Glycine max
  unsure (1)..(278): unsure at all n locations
gtcatctacanctagtaacnnagatccaacaagcagatcaatctctctctgctgtctcccaatnaaaacagacatgggtttgnaggaggattttgagcagtatgctgagaaagcaaagactttgccaccgactcactcaaacgaagacttgcttatcctttatggattgtacaagcaggccaccgttggacctgtcaacaccagccgtccgggaatgtncaacatgagggacagagctaaatgggatgcatggaangctgttgaagggaaatccaagg

SEQ ID NO: 278302 - DNA, 274 bp, Glycine max
ctggtggagagctctttgagaggatttgcagtgctggaagattcagcgaagatgaggctcgatatttcttccagcagctcatctcaggagttagctactgtcattccatgcaaatctgccatcgagacttgaagctggagaacaccttattggatggcagccctgccccacggctcaaaatttgtgattttggttattctaagtcatctctgcttcattctaggcctaagtcaacggtgggaaccccagcctacattgcaccagaggttctttc

SEQ ID NO: 278303 - DNA, 274 bp, Glycine max
  unsure (1)..(274): unsure at all n locations
cttgtctaaggaagcaggagatgaaggatataacattgatnctgcccacctttcaattgtgctagctgatcatggggtcctttctgaaggtgctggttctgggcaaaanttgggagtgatggatgcttatgcggaagtgtccaccattatcaggcagtatggatctatgtatttgcgtcttggtgatctccaaatggccctagaatactacgcacaagctgctgctgcagtgggtggggggcaattgtcgtggactggtagaggtaacgttgat

SEQ ID NO: 278304 - DNA, 274 bp, Glycine max
  unsure (1)..(274): unsure at all n locations
tgcgactttgagtcttccgatcatagacctctcttctccccatcgtctttccacagccaattccattngtcaggcatgcgtggaatatggtttcttttaccttgtgaaccatggggtggacaccgattttgtgagcaaagtcttcgaccaaagttgcaagttcttctcgcttccggtccaacgcaaaatggacctggcccgcaaggaatatagaggctacactcctctctatgctgagacacttgatcctacttcatctccaaaggtgatccaa

SEQ ID NO: 278305 - DNA, 272 bp, Glycine max
  unsure (1)..(272): unsure at all n locations
ttgaaatagaccatcccgaagtccattcggcacgaaggaagcacctgctgttgtcaaatcttactatgataaaaggatagtcggatgcccaggaggtgaaggtgaggatgagcatgatgttgtctggttttggctggagaaagacaagccccacgantgtccagtgtgcgcacagtattttgttcttgaagtggtaggacctggtggatcacccgatgggcatggcgatgatgatcaccatgattgcaatccttccaattaaatctggaata

SEQ ID NO: 278306 - DNA, 273 bp, Glycine max
attcttcttgtggtggtctgtgctgaggtatctctagttctaacctacatgcacctatgtgtggaggactggagatggtggtggaaatcattttttgcctctggttctgttgctatatacatctttttgtactccgtaaactatcttgtatttgatctcaagaatctgagtgggcctgtttctgcaactctttacttgggatattccctcttcatggttctagcaatcatgttggctacaggcacagttgggttcctttcctcattctggttc

SEQ ID NO: 278307 - DNA, 271 bp, Glycine max
aggatttacagggccaatccaggttctcacccatttgatgagatactttactgcaacattggaaatcctcagtctctgggccagcagccaataacttttttccgagaggttcttgcattatgtgaccatccagctatattggacaaaagtgaaacacagggtttgttcagtactgatgcaatacagcgagcatggcagattgtggatcagattcctgggagagcaactggtgcctatagccatagtcagggtgtcaagggcttgcgtgata

SEQ ID NO: 278308 - DNA, 273 bp, Glycine max
  unsure (1)..(273): unsure at all n locations
cacactctctctcaccaaagccttcctagaacgaaaaaaaaaagaagagcaattttccctcaccaaagaagaagaagcaaacaatggccgatcaacttaccgatgaacagatctccgagttcanggaagccttcagcttgttcgacaaggacggcgatggttgnccnacaaccaaggagcttggaactgttatgcgttcattggggcaaaacccaactgaggcagagctccaggacatgatcaatgaagtggatgtgatgggaatggtaccat

SEQ ID NO: 278309 - DNA, 274 bp, Glycine max
  unsure (1)..(274): unsure at all n locations
cttgttgggttgttctgatcttctctcatagcaatcaaatcacactcccatcttctcatctcgtaaaccctaaaccccgttttcagtgacatcgagatcgatcgaacatggatgangagtacgatgtgatcgtgttgggcacgggtctcaaggattgcattctcagcggtcttctctccgtcgatggcntcaaggttctgcacatggacaggantgantattacggaggagaatccacttcgctcaatcttattcagctttggaagagattcat

SEQ ID NO: 278310 - DNA, 274 bp, Glycine max
ctattatactctctagagtaattgcggaatctgctagaattttctaataatggcgaaagacgttgagcaggtcacagagcaaggtgaatactccgcgaaggactaccatgaccctcctccggcaccgttgatcgacccagatgagctcacaaagtggtccttgtacagagccgccatagctgagttcatagcaacactcctttttctttacatcaccgtgttgaccattattggctacaagagacagagtgacaccaaaatccccggtaacacc

SEQ ID NO: 278311 - DNA, 262 bp, Glycine max
gtagactatgagaagattgtccgtgacacatgccgcgaaattggattcatctctgatgatgttggtcttgatgctgacaaatgcaaggtgttggtcaacattgagcagcagagccctgatatcgcccagggtgtgcacggtcacttcaccaagcgcccagaggaggttggtgctggtgaccagggtcacatgtttggctatgccactgatgaaacccctgagtacatgcccctcagccatgtccttgcgcccaaactcggtg

SEQ ID NO: 278312 - DNA, 270 bp, Glycine max
  unsure (1)..(270): unsure at all n locations
atcaagatggcagatctcactattaatctggctgccattnncactcccgcggattacaacacccgccctctcgacaccatttacagcaatttcatcgacgcgctccccgtgntgaaatactgtncccgagaacaacaagcgccttatccatttctctacttgcgaagtgtacggaaagacgattggagcctttctccctaaagatagtcctcttcgtaaggatccggcatactatgttcttaaagaagacgagtctcctgcattttggtt

SEQ ID NO: 278313 - DNA, 273 bp, Glycine max
agactgttgatgggccatcagccaaagactggagaggtggaagagctgcttcatttaacatcattcctagcagcactggagctgccaaggctgttggaaaagtccttcctgctttgaacggaaaattgactggtatggcattccgtgttcccaccgtggatgtctctgttgttgacctcacagtgaggctggagaaggaagcctcctaacgatgaaattaaaaatgctatcaaggaggaatcagagggcaagttgaagggaattcttggttac

SEQ ID NO: 278314 - DNA, 272 bp, Glycine max
  unsure (1)..(272): unsure at all n locations
gttgattcggatctagagtcttcagtttctcctcgttgttcttcgctttcctgttttcaatttcgattctttcgttaatttaataagatgtttgggagggcaccgaagaagagcgataatacgaggtactacgaaatcctcggcgtctccaagaacgcttcgcaggatgntctgaaganggcttacaagaaagccgccattaagaatcaccccgacaagggcggtgatcccgagaagtttaaagagcgggcgcaacttatgaggttctgagt

SEQ ID NO: 278315 - DNA, 271 bp, Glycine max
  unsure (1)..(271): unsure at all n locations
gttcactcttcttctcttgcggctagggttttagcgcantttctttctagatttaaggaagatgggtaaggaaaaggttcacatcagtattgtggttattggccatgttgactctgggaagtccactaccactggccacctgatctacaagcttggangcattgacaagcgtgttattgagagatttgagaaggaagctgctgagatgaacaagaggtcttcaagtatgcctgggtgcttgataagcttaaggctgagcgtgaaagaggaa

SEQ ID NO: 278316 - DNA, 252 bp, Glycine max
  unsure (1)..(252): unsure at all n locations
tatacaacagcacaaagcgggactactgtctgttcaagactaccatctctntctctctttcttagtgcctccttgccagaagttaaaatggcccaanaaactttcctattcacatctgaatcngtgaacgaggggcaccctgacaagctctgtgaccagatctccgatgctgtgctcgatgcatgcttggagcaggaccctgacagcaaggttgcctgtgaaacctgcaccaagaccaacatggtgatggtt

SEQ ID NO: 278317 - DNA, 262 bp, Glycine max
  unsure (1)..(262): unsure at all n locations
cgatcaactcaacacnaaccaaaactcaagctaaaattctcactctctctctacatctcgagatcatagtatcatattcaatatcatttcataccaaacacatggctttggaagctctcaactcaccaacaacaaccgctccatcttttccctttgacgacccaactattccatgggcgaaacgaaaacgttcaaagcgttctcgcgaccatccttctgaagaagagtacctcgccctctgcctcatcatgctcgctcgcgg

SEQ ID NO: 278318 - DNA, 267 bp, Glycine max
aagaagaagatgtcgtacctgttgcctcacttgcactctgggtgggcggttgatcaagcaatcctggcagaagaggagcgtctggtcgtgatccgtttcgggcacgactgggacgaaacctgcatgcagatggacgaggtgttggcgtcggtggcggagacgataaagaactttgcggtgatatacctggttgacataacggaggtgccggatttcaacaccatgtacgagctctacgacccttccacggtgatgttcttcttcagg

SEQ ID NO: 278319 - DNA, 267 bp, Glycine max
  unsure (1)..(267): unsure at all n locations
ctctttttctcaaccaaaaggggttcaattctagctagttctattacatcgtccgcnaccatgaacatggcgatcgtgcttctgttcatggttttcgcagtttcatcagctttagacatgtctataatatcacatgacaacgctcatgcgnatagggccacgaggcgcaccgacgacgaggtgatgtcaatgttcgaggagtggctggtgaaacacgacaaggtgtacaacgcgctcggtgagaaggagtagaggttccaatcttcc

SEQ ID NO: 278320 - DNA, 250 bp, Glycine max
  unsure (1)..(250): unsure at all n locations
ggcgggtcagagtgagaaagaacnagagagaattcgtacaaccctaatttcggaaagancggcgatgactgcctccaaggatcgcgagaacttcgtctacatcgccaaactcgccgagcaggccgagcgttacgaagagatggtggaatcaatgaagaacgttgcgaatctcgacgttgaactgacggtggaggagcggaatttgctttctgttgggtacaagaatgtgattggtgctcncagacgtcct

SEQ ID NO: 278321 - DNA, 289 bp, Glycine max
  unsure (1)..(289): unsure at all n locations
gtgaaaatggcggtacccttgctctccaagaagatcgtgaagaagcgcgtcaagaagtttatacgcccccanagtgatcgcaagatctccgtcaagccaagctggcgcagacccaagggtattgattctcgtgtcaggagaaagttcaaaggatgcactttgatgcccaacattggttatggctcagacaagaaaacccgccattatctaccaaatggtttcaagaaatttgtcgtgcacaatgtgaaagacctggaacttctcatgatgcataacaggacatattgtg

SEQ ID NO: 278322 - DNA, 288 bp, Glycine max
  unsure (1)..(288): unsure at all n locations
aattcattttaatcctaattctgcacttcttgatcattcgatttttctcctcaagatgcagatattcgtaaaaactttgaccggcaagaccatcacccttgaggtggaatcctccgacaccattgacaacgtaaaagctaagattcaagncaaggaagggatcccacctgaccagcagaganttatctttgcgggtaaacaacttgaggatggtcgcacccttgccgattacaacatccanaaggaatcaaccctccatctcgtgcttcgcctcaggggtggcatgca

SEQ ID NO: 278323 - DNA, 287 bp, Glycine max
  unsure (1)..(287): unsure at all n locations
gagaccacagaacgaggagcctgaggcntaccacatcagaaccctcacttcagtccttggcagtgaggatgctgcaaaggaagctttgttgtatagttacaagtctgcagccagtgggttctcagctaagcttactccggagcaggttgaacagatttcaancctaccaggtgttcttcaagttgttcctagcaggacatatcagctccatggaccaaataacctgcagtagagaatgttcacctaaagttgtatcggttaaaccgttatctatgccatgtataaac

SEQ ID NO: 278324 - DNA, 291 bp, Glycine max
  unsure (1)..(291): unsure at all n locations
gggagatacttcaggttgggcaattggtactgattatagcacttggactggcgacaagatcttttcagtgggtgatagtctcgcgttcaactatggagctgggcacacagtggatgaagttaaagagagcgattacaagtcgtgcaccgcagggaatntctattagcacagacagtagtggtgcgaccacaattgcccttaaaagtgcaggnnctcattacttcatatgttctgttcctggacatgttccgcccccnngaaacttgccgtcactgtcaaatcaggaaaagc

SEQ ID NO: 278325 - DNA, 282 bp, Glycine max
  unsure (1)..(282): unsure at all n locations
tattattggagctgagagtcaccctcttcaccttcatggcttcaacttcttcattgttggccaaggaaatgggaactttgaccccaaaaaggaccccataaagttcaaccttgttgaccctgctgaaaggaacactgctggtgtgccatctggagggtgggttgctgttcgcnttcttgctgntantccaggtgtttggttcatgcattgccaccttgangtncatantagntggggcttganaatggcaggatagtccnaganggtaaacggcgcaatcag

SEQ ID NO: 278326 - DNA, 283 bp, Glycine max
  unsure (1)..(283): unsure at all n locations
ttctgttgatattggacaacaaagttaggtttatattaggggttgtgaatggagaaattgtcgtgagcnacaggaaaaaggctgaattgttgattgagctgcancagaaaggttttactcccatgccaaggaaaggtaaatctgcagaaccccaagttgctggggcaaatgatgaagaggagcaggaagatgacaacaacactagagagcaggaaactggaagtgttgaaggagtgaacgaggtgactatgaatatctgttatccatgtcaattggactttga

SEQ ID NO: 278327 - DNA, 284 bp, Glycine max
  unsure (1)..(284): unsure at all n locations
gttgcatccttactggagtttgggtcattgcccatgagtgtggccaccatgcattcagtgactaccagttgcttgatgatatngttggccttgtcctccactccggtctcctagtcccatacttttcatggaaatacagccatcgccgtcaccactccaacactggttctcttgagcgggatgaagtatttgtgccaaagcagaagtcctgtatcaagtggtactctaaataccttaacaatcctccaggcagagtcctcactcttgctgtcaccctcacactt

SEQ ID NO: 278328 - DNA, 282 bp, Glycine max
  unsure (1)..(282): unsure at all n locations
ttcctcagtagtgtcatttacgcttctcttctctgcagcaactatgcctaaccctaaggtcttcttcgacatgaccatncgcggtcaatctgctggccgcatcgtgatggagctctacgccgacgtcactccccgcaccgccgagaacttccgcgcgctttgcaccggcgagaagggcgtagggcggagggcaagcccctccactacaagggctcgtccttccaccgcgtgatcccgagtttcatgtgtcagggtggcgattcaccgccggaaaggaacggc

SEQ ID NO: 278329 - DNA, 287 bp, Glycine max
  unsure (1)..(287): unsure at all n locations
aagaaccctagacagtcacagaaccattccatagaaatgtcaggtgttggccctctttctcaagattgggaacccgtcgtcctccgcaaganggctcccactgccgccgccaagaaggatgagaaagccgtcaacgccgcccgccgctccggcgccgaaatcgaaaccctaaaaaaatataatgctgggacaaataaagcagcatctagcagcacttcattgaacactaagaggctggatgatgatactgagagtctagctcatgagaaggtaccaactgaattaag

SEQ ID NO: 278330 - DNA, 290 bp, Glycine max
  unsure (1)..(290): unsure at all n locations
gtttgcattcaagaaggacactggggacacaaggganacaccagcaattgatgtgtgcaagggactactcggtgacaaggcacgcctaagcatatatgatccacaagtcactgaggaccaaattcagagggatttatggatgaacaagtttgattgggaccaccctattcacttgcagccaactagtcctacaactgagaagaaagttagtgtcgtttgggatgcatacgaggcaacaaaggatgcagatggtgtctgcattctcactgagtgggatgagttcaagactc

SEQ ID NO: 278331 - DNA, 283 bp, Glycine max
  unsure (1)..(283): unsure at all n locations
gtgaaaatggcggtacccttgctctccaagaagatcgtgaagaagcgcgtcaagaagtttatacgcccccagagtgatcgnaagatctccgtcaagncaagntggcgcagacccaagggtattgattctcgtgtcaggngaaagttcaaaggatgcactttgatgcccaacattggttatggctcagacaagaaaacccgccattatctaccaaatggtttcaagaaatttgtcgtgcacaatgtgcccgacctggaacttctcatgtngcataacaggacaa

SEQ ID NO: 278332 - DNA, 279 bp, Glycine max
  unsure (1)..(279): unsure at all n locations
aatcacagcatctggtgatcttgttcctttgtcctacattgctggtttgctaactggtagaccaaactccaaggctgttggaccctctggtgagattctgaatgccaaagaagcctttgatntggccaacatcggtgctgagttctttgagttgcaacctaaggaaggccttgcccttgtgaatggcactgctgttggttctggcttggcctcaattgttctatttgaagccaacatcattgctgtcttgtctgaagttatttcagcaatttttgctga

SEQ ID NO: 278333 - DNA, 288 bp, Glycine max
  unsure (1)..(288): unsure at all n locations
ttagtagtanatcantctctttgcngccggcnnnatctntcntttcaagatgcagatcttcgtcaagaccctcaccggaaagaccatcacccttgaggtggaaanctctgacaccatcgacaacgtnaaggccnagatncnggacaaggaaggaattcccccggatcagncacgtctcatcttcgccggaaagcagctcgaggacggccgtaccctcgccgatacaacatccagaaggagtcaacccttcaccttgtcttcgtcttcgtggtggcatgcanatcttcg

SEQ ID NO: 278334 - DNA, 279 bp, Glycine max
ccgaatcgaggtgtcggttttgaaaagagttaacaatctcttctcttcgctcctgcacttgttgtttctttgcccttcatggcatctcaggctagccttctccttcaaaagcagctcaaagatctttgcaaaaaccccgtcgacggcttctctgccggtttggtcgatgaaaccaacatttttgaatggagtgtcaccataattgggccgcccgatactctctacgaggggggattttcaatgctattatgagtttcccatccaattacccaaatagtc

SEQ ID NO: 278335 - DNA, 275 bp, Glycine max
  unsure (1)..(275): unsure at all n locations
atattggagtagtcaatgaaaccttagagagcatttctatagatcttggctttagtgggaatacaatggctgagggtcttgtagtaagtatatgcttangaggtgcttttattggatctctgttcagtggatggattgcagatggtgttgggcgtagaagaagtttccagttgtgtgctttacctatgataatcggggctggaatgagtgcaacagcaaaaactctgtggggcagcttttgggnaggttattgttggtactggaatgggacttgg

SEQ ID NO: 278336 - DNA, 283 bp, Glycine max
  unsure (1)..(283): unsure at all n locations
acaaaattcaattttgagcactaaccangcaccacttccaatggcttcaaatcatgaagaagtgatacttttgggcaagtgggccagcccatttagcaacagagtagaccttgctctcaagctcaagggagttccctacaaatactcggaggaagatcttgctaacaagagtgctgatcttctcaggtacaaccccgtgcacaagaaggttccggttttggtccacaatgggaacccattacccgagtcacttatcattgttgaatacatcgatgagacatgg

SEQ ID NO: 278337 - DNA, 291 bp, Glycine max
  unsure (1)..(291): unsure at all n locations
gggagatanttcaggttgggcaattggtactgattatagcacttggactggcgaacaagatcttttcagtgggtgatagtctcgcgttcaactatggagctgggcacacagtggatgaagttaaagagagcgattacaagtcgtgcaccgcagggaattctattagcacagacagtagtggtgcgaccacaattgcccttaaaagtgcaggcactcattacttcatatgttctgttcctggacattgttctggcggtatgaaattgccgtcatgtcaaatcaggaaaagcc

SEQ ID NO: 278338 - DNA, 280 bp, Glycine max
  unsure (1)..(280): unsure at all n locations
gtnaaaatgggttcttcttcttctatgtggacggtaggtgtgattttggcatcactggcctctgcagcactnngtgccaaccnncgcaggccagtggatgtacaatttggccgaaactacgtgcccacatgggcctttgatcacatcannncatttcaatggtggttctgacattcagcttcatcttgacaagtacactggtactggcttccagtccaaagggtcttacttgtttggtcacgtcagcatgtacataaagatggttcctggagatctgctg

SEQ ID NO: 278339 - DNA, 276 bp, Glycine max
ttcatcgtcccactttcttctccttttagggtttcctttttgtttctcctttccagatctgcatcttccattttttaggattaagcggtgagattcgtgaatctgagaaatgtcggattcttctcgggaggagaatgtttacatggcgaaattggcggagcaggccgagcgttacgaggagatggttgagttcatggagaaggtagcaaagactgtggaggttgaggagttgacggtggaggagagaaatcttctctctgtggcttacaagaagtg

SEQ ID NO: 278340 - DNA, 276 bp, Glycine max
gccaagaaaatctggtgctttggccctgagacccttggacccaacatggtggttgatatgtgtaagggagtccagtatttgaatgaaatcaaggattctgtggttgctggattccagtgggcatcaaaagaaggtgctttggccgaagaaaacatgagagccatttgctttgaagtatgtgatgttgttctgcacgctgatgctatccacagaggaggtggtcaaatcatccctactgccaggagagtcttctatgcttcccagattactgccaaa

SEQ ID NO: 278341 - DNA, 277 bp, Glycine max
  unsure (1)..(277): unsure at all n locations
tgcacgaatatcttgttgtttggngcgatccgaganaaactctgtaaacatgttggtttaccaggacctccttacaggtgatgagcttctctctgactccttccgttacaaggaaattgagaatggaatgctgtgggaagttgaggggaagtgggttgttaaaggagcagttgatgtagacattggtgcaaacccttctgctgagggtggaggagaagatgagggagttgatgatgcagctgttaaggttgttgacattgttgacacattcagactt

SEQ ID NO: 278342 - DNA, 277 bp, Glycine max
  unsure (1)..(277): unsure at all n locations
anggtctggatcgccgccggcnacatcatcctcgtcggcctccgcgactaccaggacgacaaggctgacgtcatcctcaagtacatgcccgatgangcccgcctcctcaaggcctacggcgagcttcccgacaccaccaggctcaacgagggcatcggcgccggccttgatgaggaggaggacggttccgggaatgattatattgagttcaggatgaggatattgataagattgaaacaaatacaaataatagggttttggttttggttgctgttga

SEQ ID NO: 278343 - DNA, 277 bp, Glycine max
  unsure (1)..(277): unsure at all n locations
gttttccaggatggtgtnattcttggggctgatactagggcgactganggacctatagtgggctgataaaaaactgtgaganaattcattatatggcacccaacatatattggtgtggtgnaggnacagctgctgntacagaggctgtaanagncatggtncnnttnacagctgcaactacannnttnncatactggtcgggaatcaagagttgttacggcactgactcttcttaagaaacacctgttcattatcaagggcatgtctcactgttaaa

SEQ ID NO: 278344 - DNA, 274 bp, Glycine max
  unsure (1)..(274): unsure at all n locations
ttaattgcaagaatggcacttcgttgcttggtgatgtccctttctgttctcttcactcttggtcttgcgagagaaagccatgccagagacgaagatttttggcatgctgtttggccaaanactcccantccaagttcattgcgagatcttctaaagcctggccctgcaagngntgaaatcgatgatcntcctatgcatattgaagaaanacagtacccgaaaaccttcnnnnatagagaagaccttcatncangcaanacaangaaagnangtt

SEQ ID NO: 278345 - DNA, 274 bp, Glycine max
  unsure (1)..(274): unsure at all n locations
gtggaagtagtcgaggtaggaggcagaggcgcggagaagacgtggttcaccctctcaaggtctctttggaggacctttatctggaacttccaagaagctctccctctccagaaatgttatatgctccaagtgcagtggcnagggttctaagtctggtgcttcgatgaagtgtgctggttgtcaaggaactggtatgaaggtttctataagacatcttggcccatccatgattcagcagttcagcatgnctgcaatgnaggtaagggtactggaa

SEQ ID NO: 278346 - DNA, 274 bp, Glycine max
  unsure (1)..(274): unsure at all n locations
aaangcctgcangcntancacatcagnnccctcactatcagtaccttggcaatnangatgcngcaaangaagctttgntgtatagttacaagtctgcagccagtgggttctcanctaagcttactccggagcaggttgaacagatttcaaagctaccaggtgttctncaagttgtncctagcaggacatatcagctccatggaccaaataacctgcagtagagatgttcacctaaagttgtatcggttanacgttatctatgccatgtataant

SEQ ID NO: 278347 - DNA, 276 bp, Glycine max
  unsure (1)..(276): unsure at all n locations
tcagagtaacattagtggtgaaactcaaaactctcacataattgaggatggaaaccttgtcatttctatacaagtactacgcaaggttaccaatgattttgcttcagaaaatgaactaggccgtggagggtttgggactgtttacaagggagaactagaagatgggacaaaaatagcagtgaagagaatggagcatggggttattntagtaaggcattggaggngtttcaagctgnaatagctgttctttccaaggtccggcaccggcatctggta

SEQ ID NO: 278348 - DNA, 285 bp, Glycine max
  unsure (1)..(285): unsure at all n locations
ttagtgcatcaaatcagggcaagtactcttcaatttgtggagaatgcaaatatcggagaaagtgtctttcaaagatttcctccagagttgttagggaagatgagtacagattgtcttgtcatgcaaaaccatcgttatggcatatcccctggaaagcttctgaataancccaaagttgtctagtttttttgagatcttgacaacttgcacagatgaagatgataaggtttatgtttccactgtacgttctcaaaactatcctgtgactggctccaatggcatcca

SEQ ID NO: 278349 - DNA, 286 bp, Glycine max
  unsure (1)..(286): unsure at all n locations
cgctcttcctctcccagacaaacacatggctttgcccaatcagcaatccgtcgattaccccagcttcaagctcgtcatcgtccggtgacggtggcacaggaaagacaaccttcgtgaaaaggcatctcactggtgaattcgagnaagaaatatgaaccgaccattggtgtgncaggttcatccgttggattttttcactaactgcggaaagattcgattctattgttgggatactgctgggcaagagaagtttggcggcctcagagatggatattatatccagggg

SEQ ID NO: 278350 - DNA, 281 bp, Glycine max
gaaaatggcggtgcctctactctcgaagaagatcgtgaagaagagggtgaagaagttcaagaggcctcagagtgacaggaaaatttctgtcaagacaaactggcgcagaccaaagggtatcgattcccgtgttaggagaaagttcaagggatgcactttgatgccaaacattggttatggttcagacaagaagacccgccactatctccctaatggttttaagaaatttgttgttcacaatgtgaaggactggaactgctcagatgcacaacaggactact

SEQ ID NO: 278351 - DNA, 280 bp, Glycine max
  unsure (1)..(280): unsure at all n locations
cgtggatctaagattcttgcttgtgctgcctcaaatatngctgttgacaacattgttgagnggctagttccacatagctggtgagantgggtcatcctgcacgtttattgcctnaagtactggacagtgcactggatggctcaggtactacgaggagataataacgntcttgcaaacgacattcggaaagaaatgaaggcattgaatggaaagctactgaaaaccaaagacagaaatacgagaaaggacatacaaagggaattaggatctatccaaagaa

SEQ ID NO: 278352 - DNA, 281 bp, Glycine max
  unsure (1)..(281): unsure at all n locations
ctggaattccgtatgtctttgctccatgcattgcggtctgcngagatccaaganggggacgttgctatganagctacagcgaggaccctaagattgttaaaactatgactgaaattatacctggtttgcaaggagatatccctggcaattccattaagggagttcccttgttgctggaaagnacaaggttgcagcttgtgccaagcactacttaggagatggtggcacnaacangggaatcatgagaacaacactctgatcattacnatggactgcttagc

SEQ ID NO: 278353 - DNA, 285 bp, Glycine max
  unsure (1)..(285): unsure at all n locations
accgattgctagaatggaatttcgatgctcagtcatctcttttaccattctcttctctacttgctcttgcaggagagagccatgtccatgcatcgctacctgaggaagattattgggnagctgtttggccaaacactcccattcccactgcactgcgagagcttctaaagcctctcccancaggtgttgaaatcgatgaactccctaagcaaattgatgatacacagtacccaaaaacatcttctataaagaagaccttcatccaggcaaaacatgaaagtacat

SEQ ID NO: 278354 - DNA, 280 bp, Glycine max
cgaaacttgaggggcatctggaacttcacaaatcctggggccgtgagccacaatgagattctccgagatgtacagggattacattgatccaagcttcaagtggactaacttcaatcttgaagagcaagccaaggtgataattgctccacggagcaacaatgagatggatgcatccaaactgaagaacgagttccctgagcttcttccatcaaggaatcactgatcagtagtcttgagccaaacaagaaaactgcttaaaagtattgagcggtttcagttt

SEQ ID NO: 278355 - DNA, 283 bp, Glycine max
tccattctctctgtgtatttccctacctctcccttcaagatgcagatcttcgtcaagaccctcaccggcaagaccatgcacccttgaggtggaaagctctgacaccatcgacaacgtcaaggccaagatccaggacaaggaaggaatccccccggaccagcaacgtctcattttcgccggaaagcaacttgaggacggccgtacccttgctgactacaacattcagaaggagagtactcttcacctcgtcctccgtctccgtggtggcatgcagatcttcgtt

SEQ ID NO: 278356 - DNA, 279 bp, Glycine max
  unsure (1)..(279): unsure at all n locations
gggactgtcttgatccctaggaacactacaattccaaccaagaaggaacaggttttctcaacatactctgacaaccagcctggtgtgttgatccaggtcttgaagntgaaagagcaaggactaaagataacaatttgttgggcaaatttgaactttctngcattcctcctgcccccaggggtgttcctcagattactgtgtgctttgacattgatgccaaggtattttgaacgtctctgccgangataagaccacggccagaaaaataagatcactatc

SEQ ID NO: 278357 - DNA, 275 bp, Glycine max
  unsure (1)..(275): unsure at all n locations
ggccacgtgcacgggacaagangcntgttgaagaatgggcagttcccttganaagcgttgaagatatatatgagaggtttagactgtattgccttggaaagttgagaagcaatcctggtcagaacttgatggtctcagcctgagacaaagatcataaatgtnccagctggagnagattaacacaaagggctgcctcaccatcaatagccagccagctgttcatggggaaaattcagattctcctactgtaggcggggtggacctggtgggtngtt

SEQ ID NO: 278358 - DNA, 279 bp, Glycine max
  unsure (1)..(279): unsure at all n locations
gggttcacaacttttccttttccttttgcttgcgaatctgaatcaaataancaatcatccattcattattcatcatgtcgtcggcgaagaaaatcacgctgaagagttcggacggcgaggctttcgaggtggaggaggcggtggcgctggagtcgcagacgananagcacatgatcgangacgactgngcngacagcggcatccctctggccgaacgtgacgagcaagatcctggcgaaggttatcgagtactgcagaagcacgtcgaggccgcgaatc

SEQ ID NO: 278359 - DNA, 278 bp, Glycine max
  unsure (1)..(278): unsure at all n locations
gncatctacaactagtaacaaagatcnancaagcagatcaatctctctctctgtctcccaattcaaaacagacatgggtttgaaggaggattttgagcagtatgctgagaaagcaaanactttgccaccgactcaatcaaacgaagactggctatcnttatggatngtacaagcaggccaccgttggacctgtcnacaccagncntncggggatgttcaacatgagggacaganctanatgggatgcanggcangctgatgcnggganatccaggacg

SEQ ID NO: 278360 - DNA, 275 bp, Glycine max
  unsure (1)..(275): unsure at all n locations
ttcaagatgcagatcttcgtcaagaccctcaccggcaagaccntcacccttgaggtggaaagctctgacaccatcgacaacgtcaaggccaagatccaggacaaggaaggnatccccccggaccagcaacgtctcattttcgncggaaagcaacttgaggacggccgtacccttgctgactacnacattcagaaggagantactcttcacctgtcctcgtctccgtggtggcatgcagatctncgttaagacantcacnggcaagacnanaaccc

SEQ ID NO: 278361 - DNA, 274 bp, Glycine max
  unsure (1)..(274): unsure at all n locations
cngtgagaggggcagtagccgagattccgtgagttgcaaaaatgaagacgattctttccaccgagaccatgaacatcccggacggcgtgagcatcaaagttcatgccaaggtcatcgaagttgagggcccccgcggaaattggtgcgagacttcagcatttgaatctcgattttcagctcattactgacgaaaacggtaaaagaaagctgaaantcgacgcgtggtttggttctcggaaaacatccgccgccatcgcacgcttgagccagtgga

SEQ ID NO: 278362 - DNA, 272 bp, Glycine max
  unsure (1)..(272): unsure at all n locations
gccatttgggnagttaggttctgcacgctctgcttccagcgagtgttctttcttcgtttcaacaccttaatttgcacacgctgcttcttcagcttgagaaatggcacaagaaacctttctattcacatctgaatctgtaaacgagggtcaccccgacaagctgtgcgaccagatctctgatgcagtgctcgatgcgtgcctgaacaggaccctgacagcaaggttgcctgtgagacatgcaccaagaccaacatggtcaggtcttggagaga

SEQ ID NO: 278363 - DNA, 199 bp, Glycine max
  unsure (1)..(199): unsure at all n locations
tcaaccatgngagagatcctgcacgttcagggaggccaatgcggtaaccaaatcggttccaagttctgggaggtgatatgcgacgagcacggcatcgatcctaccggaaagtacaacgacgaaggnaacagcggcatccaactcgagaggatcaatgtctattacaatgaggcctctggcggaaggtagttccgagagc

SEQ ID NO: 278364 - DNA, 271 bp, Glycine max
  unsure (1)..(271): unsure at all n locations
gtgggacctttgatgtcagtaatcttgacaattgataanggtgtttttgaagtccttgctacaaatggagatactcatcttggaggtgangattttgatcaaagaataatggagtacttcattaaattgatcaagaaaagcatggaaaggctattagcaggacaacagagnnctggaaagctgaggagagatgctgagcgtgcaaagagggntctcagcagccagcaccaggtccgcgtggaaattgaatcacttttgatggtgttgattt

SEQ ID NO: 278365 - DNA, 263 bp, Glycine max
  unsure (1)..(263): unsure at all n locations
aaggctaatcgtgagangatgacccaaatcatgtttgagaccttcaacacccctgctatgtacgtagccatccaagctgttcttcactgtatgcaagtggtcgtacaactggtattgtgttggattctggtgatggtgtcagccatatnaacgaaaanatgagggttatgcactcccacatgccatccttcgtctgatctgggcggtcgtgacctcactgatttctgatgaaaatttgatgagcgtggttatcctcaccacct

SEQ ID NO: 278366 - DNA, 272 bp, Glycine max
  unsure (1)..(272): unsure at all n locations
tttgcttcccaaaganagaganaataaaaagcaatgggtagccntgaagcggaaagaacaacagtaggattggcagcaagagacccttcagggattctctccccatacacctacaatctaaganacacaggccctgatgatgtttacataaaagttcactactgtggaatttgccattctgatctccaccagattaaaaatgatcttggcatgtccaactatcccatggtcccaggacatgaagtggttggtgaggtactggaggtggggtc

SEQ ID NO: 278367 - DNA, 273 bp, Glycine max
  unsure (1)..(273): unsure at all n locations
caaggctaatcgtgagaagatgacccaaatcatgtttganaccttcaacacccctgctatgtnccgtagccatccaagctgttctttcactgtatgcaagtggtcgtacaactggtattgtgttggattctggtgatggtgtcaccacactgtccctatctatganggttatgcactcccacatgccatccttcgtcttgatctggccggtcgtgacctcactgatttcttgatgaaaatnttgactgagcgtggttattccttcaccacctc

SEQ ID NO: 278368 - DNA, 270 bp, Glycine max
  unsure (1)..(270): unsure at all n locations
aagaatacaccttgttgcagaaagatatccaatggcctcttgggtggcctgttggtggtttccctggacctcagggtccatactactgtggtgttggcgctgacaaggcttttggccgtgacattgttgacgcacactacaaaccgtatttatgctggcatcaacatcagtggaattaatggagangtgatgcccggtcagtgggaattccaagttggaccttcagttggaatctcagctggtgatgagatttgggcagctcgttanntc

SEQ ID NO: 278369 - DNA, 272 bp, Glycine max
  unsure (1)..(272): unsure at all n locations
accaccaacgtcatatcctccacctccttaccactacgtgagccctccaccaccttctccatctcctcccccaccataccattacacatcaccacctcctccttccccagctcctgcnccccaagtacatttacaaatcacctccacctccggtttatatctatgcntccccacctccacctatctanaagtaagcncaaattgtgaaagcacattcatgatgaatcagtnctagtttcatcggaggaataaggccagctctatttngggcc

SEQ ID NO: 278370 - DNA, 267 bp, Glycine max
  unsure (1)..(267): unsure at all n locations
gggaagcctttagcctcttcgacaaggacggcgatggttgtattaccaccaaggaacttgggactgtgatgcggtcgcttgggcagaacccaactgaggctgagctgcaggacatgataaatgaggttgatgctgatgggaatggtancatgatttcccagaattcctcaatctcatggcgcgcaagatgaagacactgattcagaggaagagctgaaggaggtttccgtgtgtttgacaggatcagatggtttcatctctgccgca

SEQ ID NO: 278371 - DNA, 270 bp, Glycine max
  unsure (1)..(270): unsure at all n locations
cgnttttcgctgaggataagcacaaacctatgtatgaagaattngctaacaatcctaatgatggagtacattgctggaggtnctactcagaattcaatcagggttgctcagtggatgcttcaagcaccaggtgccacaagttacataggttgcataggaaaggacanatttggagaggagatgaagaagaatgtacacttgatggtgtaaaggttaactattatgaaatcgacaatacacctactggaacttgtgctgtttgtgtggttg

SEQ ID NO: 278372 - DNA, 264 bp, Glycine max
  unsure (1)..(264): unsure at all n locations
tctgctcgtgcctctagggttatcatatctccatttccatttcctctctctcagtttccaagaatcttaagctatgggaaagtctacccaaccgtgagcgctgattaccagaaggccgttgagaaggcgagaagaggctcagaggcttcnnnnntgatnagagatgcgctcctctaatgctccgtttggcatggcatctgctggaacttacgacgtgagctcgaagaccggtggtcccttcggaaccataaagcacccctccgg

SEQ ID NO: 278373 - DNA, 260 bp, Glycine max
  unsure (1)..(260): unsure at all n locations
gnaagcctagtattttatctagaggcatgtgaatctgggagtatctttgaaggtcttcttccagaaggtctgaatatctatgcaacaacagcttcaaatgctgaagaaagcagttggggaacatattgtccgggagtatcctagtcctccccctgaatatgaaacctgcctgggtgacctgtacagtgttgcttggatggaagatagtgacatacacaatttgcgaacagaaactttacatcaacaatacgacttggtca

SEQ ID NO: 278374 - DNA, 295 bp, Glycine max
  unsure (1)..(295): unsure at all n locations
cgtaagtacagcggaaacttctntgtagatctattgggaaaatggaaggaatctgaatatggaggtggtcagtctgttcctgttggtggtattgcatactacatcactgcaccatccagcttagctgatatggcggccaatcctttccatgcactgttctatcttgtgtttatgctttcagcttgtgccttgttctcaaaaacatggattgaagtctctggttcatctgctagagatgttgccaagcagctgaaggaacaacaaatggtaatgcccggacaccgtgagtcaaact

SEQ ID NO: 278375 - DNA, 298 bp, Glycine max
  unsure (1)..(298): unsure at all n locations
ccctgcgctcgtcgtagggatgcagttcctacacccggcttacacgctagggaaaaatctcaaaggncagagatctcctcgcactcgcgtcanagttcaacgagattaactcgataacggtggttttaacggcgaaggacgttgccgttgagggcttctgcatgagccgctgtggcacccacggctctacccggaacgttaaaagtaatgcccgaaccgcatatatctgggttggaaactccgaaacacagtgccccgggcaatgcgcgtggccattccaccaaccgatttacgggcc

SEQ ID NO: 278376 - DNA, 298 bp, Glycine max
  unsure (1)..(298): unsure at all n locations
ttcaagatgcagatcttcgtcaagaccctcaccggaaataccancancctnganggtgganagctctgnnaccatcgacaacgtcaaggccaagatccaggacaaggaaggaattcccccggatcagcaacgtctcatcttcgccggaaagcagctcgaggacggccntaccctcgcngactacaacatccagaaggagtcaacccttcaccttgtcnttcgtctncgtggtggcatncagatcttcgtcaagactctcactggcaanaccataancctagaggtcganaantctgac

SEQ ID NO: 278377 - DNA, 294 bp, Glycine max
  unsure (1)..(294): unsure at all n locations
agaagcctttagcctcttcgacaaggacggcgatggttgtattaccaccaaggaacttggggactgtgatgcggtcgcttgggcagaacccaactgagnctgagctgcaggacatgataaatgaggttgatgctgatgggaatggtaccattgatttccncgaattcctcaatctcatggcgcgcaagatgaaagacactgattcagaggaagagctgaaggaggctttccgtgtgtttgacaaggatcagaatggtttcatctctgccgcagagctccgccacgtaatgacca

SEQ ID NO: 278378 - DNA, 297 bp, Glycine max
  unsure (1)..(297): unsure at all n locations
antcctgattaagccaactcatggtggcggtggaaagggaatgaggattgtacacgctcccagatgagtttgttgaancgttcttagcagcacaacgggaagcagctgcttcttttggtgtcaacacgatattgttggagaagtatattacacggccaagacacatagaagtccagatatttggggataagcatgggaatgttctgcatttgtatgagcgagattgcagtgtgcagagaagacaccagaaaataattgaagaagctccagctccaaatatttctgccanctttcgtg

SEQ ID NO: 278379 - DNA, 296 bp, Glycine max
  unsure (1)..(296): unsure at all n locations
aacaagccaagtgaaagtgagaaaaaataaaaatcaaagagcataatgtcagggatcattcacaagattggggagacccttcatgtgggagggcacaagaaggaggaggagcataagggtgagcaccatgctggagaatacaaaggggagcaccatggtgaacacagtagtgagtacaaaggagagcatcatggtgaacacaaagctggagagtaccatggtgagcacaagccagannccaaagaggggttcctagacaaagtcaaggacaagatccatggtgagggcggcgccgc

SEQ ID NO: 278380 - DNA, 294 bp, Glycine max
  unsure (1)..(294): unsure at all n locations
ctggttttgagggtgacaacatgattgagaggtccaccaacctngactggtacaagggaccaactctccttgaggctcttgaccaaatcaatgagcccaagaggccctccgacaagcctctaaggcttccattgcaggatgtctacaagattggtggtattggtactgtgccagtgggacgtgtagagactggggttgtgaagcctggtatggtggtgacttttggtcccactgggctgacaactgaggttaagtctgttgagatgcaccatgaggctctcacagaggctcttc

SEQ ID NO: 278381 - DNA, 290 bp, Glycine max
  unsure (1)..(290): unsure at all n locations
tcatctacaactantaacaaaganccaacaagcagatcaatctcnctctctntctccnaattcaaaacagacatcggtttgaaggaggattttgagcagtangcngagaaagcanagactttgccaccgacncaatcaaacgaagactngcttatccnttatggattgtacaagcaggccaccgttggacctgncaacaccagccgtccgggaatgtncagcatgagggacagagctanatgggatacatggaaggctgttgaagggaatccaaggacgaagcaatgagt

SEQ ID NO: 278382 - DNA, 294 bp, Glycine max
  unsure (1)..(294): unsure at all n locations
aaaaagttcttattcagtttgaagattttgcaaaccacaatgcttttganttgcttgnaaaaatatggnacaactcatcttgttntcaacgatgatattcaggggactgcatctgtcgttcttgctggggtcgtggcagccttgaagctcattggcggtaatctggctgaccacacattcttgttccttggggctggagaggctggaactggaatagcagaactaatagctcttgagatgtcaaagcagacnaagacacctatagaggagactcgcaagaagatatggcttgtt

SEQ ID NO: 278383 - DNA, 293 bp, Glycine max
  unsure (1)..(293): unsure at all n locations
ctgtgaccagatctccgatgctgtgctcgatgcatgcttggagcaggaccctgacagcaaaggttgcctgtgaaacctgcaccaagaccaacatggtgatggttttcggagagatcacaaccaaggccaacgtggactatgagaagattgtgcgtgacacatgcaggaacattggttttgtctctgatgaanttggtcttgatgctgacaactgcaaggtcctcgtcaacattgagcaacagagtcctgatattgctcaaggtgtgcacggccacctcacaaagaggcctgag

SEQ ID NO: 278384 - DNA, 291 bp, Glycine max
  unsure (1)..(291): unsure at all n locations
aagatatgtttgcgagtgttccgaaancngangcnatttttatgaagtggatttgccacgattnnagtgangagcactgcttgaagtttttgaagaacngctacgaggcacnaccagacaatgggaaggtgattgtggcagaangcatncttctcntggctccagactctagcttggccacaaaaggtgtggttcacatcgatgtgatcatnttggcacataatccaggtgggaaagagagaacagagngaaganttgaggctctggccaaagggnctggatccaaggttc

SEQ ID NO: 278385 - DNA, 294 bp, Glycine max
  unsure (1)..(294): unsure at all n locations
cgggggcatgcctgggggcttcccaggggccgggggtatngccgggaggttcccaggggccgggggtatgcctgggggaggcttcccaggagctgagtggcatgcctggaggggtgcctggaaacattgattttagcaaaatcttgagtgaccctgaactgatggcggcatttagtgatccggaggttatggctgctcttcaagatgttatgaagaaccctgctaattttgccaagcaccaatcaaatccaaaggtaggtcctgtaattgcgaaaatgatgaccaaacttggag

SEQ ID NO: 278386 - DNA, 289 bp, Glycine max
  unsure (1)..(289): unsure at all n locations
atcaagttcttgctatcaacgagatttttgagaagaacccaaccaagattaagaactaacgggatatggttgcggtatcagagtaggactggttaccacaacatgtacaaggagtaccgcgataccactctaaacggttcagttgaggcaatgtcncatgagatggcttctcgccacagggtcaggagcccatgcatccaaattatcaagactgcaaccatcccagctaagctttgcaagaggaaganannnnaagcaattccacaatccaaaatcaagtcccattggt

SEQ ID NO: 278387 - DNA, 287 bp, Glycine max
  unsure (1)..(287): unsure at all n locations
angtggttgagcnntatgaggtaatggccagtaanaccanaattnacnntgtcatggnaacangcagaaggtggtgagcncttcaacaaggtagtntaaggaaggctcaaggtggangttgctcggaaatatnttcagcaactgantagtgcagttgacnacngccatagcaggggtgtgtgtcatcgagatnaaaacccgaaaatctacnantggatgaaaatgagaanngaaggnnctgacttgggctnagtgcacntgctgaatcnaagtgccaagatggattg

SEQ ID NO: 278388 - DNA, 291 bp, Glycine max
  unsure (1)..(291): unsure at all n locations
cttcaacaaggaccttggttgggatgaacactggatcttctgggtgggaccattcatcggtgcagctcttgcagcactctaccaccaggtcgtaatcagggccattcccttcaagtccaagtgattcaatcaaacggttcatgcttaatcaagttgggnnnnnnnnnnnnnnnnnnnntcaagccaatgtttgtgggttttggtttcatttcattaagatgatctgtttatctcttttcttctttttaaaatttaaagtctttgtattttgtatgtaaagatgtaaaatta

SEQ ID NO: 278389 - DNA, 288 bp, Glycine max
  unsure (1)..(288): unsure at all n locations
tctgctcgtgcctctagggttatcatatctccatttccatntcctctctctcagtttccaagaatctnaagctatgggaaagtcttacccaaccgtgagcgctgattaccagaaggccgttgagaaggcgaagaagaagctcagangcttcatcgctgagaagagatgcgctcctctaatgctccgtttggcatggcactctgctggaacttacgacgtgagctcgaagaccggtggtcccttcggaaccataaagcacccctccgaactcgtcacggcgctaacaac

SEQ ID NO: 278390 - DNA, 288 bp, Glycine max
  unsure (1)..(288): unsure at all n locations
gcaagaatggcacttcgttgcttggtgatgtccctttctgttctcttcactcttggtcttgcgagagaaagccatgccagagacgaagatttttggcatgctgtttggccaaacactcccattccaagttcattgcgagatcttctaaagcctggccctgcaagtgttganatcgatgatcaccctatgcaaattgaaganacacagtacccganaaccttcttctataaagaagaccttcatccaggcaaaacaatgaaagtacaattcagcaagcctcctttcaac

SEQ ID NO: 278391 - DNA, 286 bp, Glycine max
  unsure (1)..(286): unsure at all n locations
gatagttgatggtgatgctgttgttacattcaacttccgagctgatcgtatgacaatggattgcnanagctcttgagtatgaaaatnttgacanatttganagagttcgttacccaaaaatccgctatgctggaatgcttgaatatgatggtgaattgaaacttccaagtcattaccttgtttctccaccagagattgacaggacttctggtgaatatttagtgtataatggtattcggacttttgcttgcagtgagactgttaaatttggccacgtcacattctt

SEQ ID NO: 278392 - DNA, 284 bp, Glycine max
  unsure (1)..(284): unsure at all n locations
ccttgaattgaccaaagttcccaagtcctcttctaagggagccatgttgaatgatgatgaagatgcaaaagtggaaggcactggctcgggcttcatttgggataaatttggtcacatagttaccaattatcatgttgttgctaaactggctactgacacaagtggtttacaacgttgtgttcctagttnatgccaaagggaatagctttgacagggaagggaagataattgggtttgatccagcgtatgatctagctgttctgaaggttgatgttgatggatat

SEQ ID NO: 278393 - DNA, 285 bp, Glycine max
  unsure (1)..(285): unsure at all n locations
gcgcttccggcggcggggaggttctccgcctcggcgttttggaaggacatgantaaatacagcgccacatggtacaccgcggttcccaccatacaccagatcatacttgatcgccactccagcaaccccgaangnnntacccgcggctccggttcatccgaagctgcagcgcctcgctcgcaccggttatactcggtaaactcgaggaggctttcggtgcaccggttttagaggcctatgcgatgacggaagcgtcgcanttgatggcttcgaaccctttgccag

SEQ ID NO: 278394 - DNA, 282 bp, Glycine max
  unsure (1)..(282): unsure at all n locations
tgagaaagagaaagagagaattcgtaaaccctaatttcggaaagatcggcgatgactggtctccaaggatcgcgagancttcgtctacatcgccaaactcgccgagcangccgagcgttacgaagagatggtggaatcaatgaagaacgncgcgaatctcgacgttgaactgacggtggaggagcggaatttgctttctgttgggtacaagaatgtgattngtgctcgcagacgtcctggaggatcctgtctnccattgagcagaaggaagaaacaaaaggg

SEQ ID NO: 278395 - DNA, 286 bp, Glycine max
  unsure (1)..(286): unsure at all n locations
ctcagcatcacctccttttacactctcgaattcgnattctcttcactcattttccaatccatggccaanggagagaaaaaacctgcagagaagaagcccgcggcggagaaggctccggcggagaaaacaaaagccgagaagaagatcccgaaggacgcagnctccggcgagaagaagaanaagaggacgaagaagagcgtggagacgtacaagatctacatcttcaaggtgctgaagcaggttcaccctgacatcgggatctccagcaaggccatggggatcatga

SEQ ID NO: 278396 - DNA, 284 bp, Glycine max
  unsure (1)..(284): unsure at all n locations
ttgtggtacactcaagcatcttttcttggcatcaaccttgtgagtnatggtcacacaatcatagaattgtcccagcttcgcaactggggggagtgtccctcatggtctaatttcaccattgctccatttgaggttgctgggggtagattgatcacattttcaaatccatgtgattatttctcagttggcaaagtaaaggccatgaccctctctctctcagtcttggtggcaattgagatgtttaactctttgaatgccctctcagaagagaatagcttgaggat

SEQ ID NO: 278397 - DNA, 281 bp, Glycine max
  unsure (1)..(281): unsure at all n locations
ttggttntgnagtaagtgaggtgaggtcccanaatggtgaagataactctgggtacttcgatgactcttttggtgttgcctctnttaaggnttatttggcagagttccatgcaactctgatttncgtggtcgctggtgttngttcagccatcgcttacaacgagcttacnanagatgcagccttggatccaacggggctggtggcagtagctgtggcccatgcatttgcactgtttgtatgtgtctccggcgcagccaacatctcggggtggccatttgaa

SEQ ID NO: 278398 - DNA, 278 bp, Glycine max
  unsure (1)..(278): unsure at all n locations
cacttggcaccaggttaattaaggagagggtatagtatggcccagtctantggcaaaactttggtgcagtggttggtagcagcnttgctcattgccttgttgggtggtgcanaagctgntgcaatatgtaacatagactcangtcaattagacttntgtcgngctgnanttactggtcaanaccctccaccaccggatgaganatgttgtgcagttattcgccaagccnatnngcgttgcctctgcagttacaagtctatcctacnttcattcggnat

SEQ ID NO: 278399 - DNA, 276 bp, Glycine max
  unsure (1)..(276): unsure at all n locations
aagctggttaaggatgggtttatcatcaggaagcccaccaagattcactctcgcttcacgtgctcgtcgaatgaaggnagccaagaggaaaggacgtcactctggatacggtaagcgtaagggtacaagggaggcaaggcttcccactaaaattctatggatgaggagaatgcgtgtgctcagacgcttgcttcgcaagtacagggaatctaagaagattgacaagcacatgtatcatgacatgtacatgaaggttaagggtaatgtttncnagaa

SEQ ID NO: 278400 - DNA, 277 bp, Glycine max
  unsure (1)..(277): unsure at all n locations
atttgaggccaggcaagcnccactcaaccaccacacctctcctcgttcacgctacccctttctgctcttcttctacctttcaagttttaaaagtataaagatggcaganacattcctatttacctcagagtcggtgaacgagggacaccctgacaagctctgcgaccaaatctccgatgctgtcctcgacgcttgcntcgagcaggacccagacagcaaagttgcctgcnanacatgcaccaaaaccaacttggtcatggtcttcggagaaatcacg

SEQ ID NO: 278401 - DNA, 291 bp, Glycine max
acgagacctgattcttctgcttcagtaatccttggtgacaagggtgacagcattaaagcatcatacctccatcatctggatctattgaagaagagtgccgctgttgcagagatcactagaaagttctcaacaaatgagaacatttttacagtaggagggtcttttgctgttgaccctctgacacaggtcaaagcaaggctcaacaatcatggaaagcttggggccctcctgcagcatgagatcataccaaagtcagtgtttactgtttctggtgagattgacaccaaggcc

SEQ ID NO: 278402 - DNA, 285 bp, Glycine max
gaagagtaccgagcttttgatcaggaagctccccttccagaggctggttcgtgaaattgctcaggacttcaagactgatctgcgtttccagagccacgccgtgcttgcattgcaagaagctgctgaggcataccttgttgggctctttgaggacactaacctgtgtgccattcacgctaagcgggtaaccattatgcccaaggatatccagctggcaagaaggattcgcggtgaacgtgcttgaggtggtggttgtgaagatgaagatgaagatgggttgctgcg

SEQ ID NO: 278403 - DNA, 280 bp, Glycine max
  unsure (1)..(280): unsure at all n locations
caccctccncnncacacattttcngtgcgctctaacaaacatctctcgttcacactttcagattgtgngaagatgggggcgggtggccgnactgatgntcctcctgccaacaggaantcanaggntgaccctttnaagngggagccattngnaaaaccnccatnggnnctcagccaaatcaagaaggtcatgccacctcactgtntccagcgttctgatttccgctcattctcctatgntgtttacgaccncaccatagccttctgcctctattatgttg

SEQ ID NO: 278404 - DNA, 270 bp, Glycine max
ctttgatctctgtccccgctgcgtctctcgtaatcatgcctaagcaaatccacgagattaaggatttccttctcactgccagaaggaaggatgcgaggtcagtgaagattaagaggagcagagatgtggttaagttcaaggtcagatgctccaagtacctctacacactttgtgtgtttgacccagagaaagctgataaattgaagcaatctcttcctccaggtttgagtgttcaagacctgtaaaggtactgggcgagagatcaagaag

SEQ ID NO: 278405 - DNA, 188 bp, Glycine max
  unsure (1)..(188): unsure at all n locations
ggcagactgatacaacggtaggtggcaccgnctgtnatggggttggcattttgggcatcgcttgggcctntggtggcatgatcttcatccttgttaactgcnccgccggtatttcaggaggacacataaacccggcggtgacattcgggttgttcctaggacgcaaggtgtcgttgataagggcgtct

SEQ ID NO: 278406 - DNA, 281 bp, Glycine max
  unsure (1)..(281): unsure at all n locations
gtcatctacaactagtaacaaagatccaacaagcagatcaatctctctctctgtctcccaattcaaaacagacatgggtttgaaggaggattttgagcagtatgctgagaaagcaaagactttgccaccgactcaatcaaacgaagacttgcttatncctttatggattgtacaagcaggccaccgttggacctgtcaacaccagccgtccgggaatgttcaacatgagggacagagctaaatgggatgcatggaaggctgttgaagggaaatccaaggac

SEQ ID NO: 278407 - DNA, 224 bp, Glycine max
  unsure (1)..(224): unsure at all n locations
ctcccgtgatttcagcagaganggcataccatnancagctttcagttgcagagatcacaaacaccgcgtttgagccgtcctctatgatggccaagtgcgaccctcgccacggcaagtacatggcttgctgtctgatgtacagaggcgatgtggtccctaaagatgttaatgcagccgtagccattatcaanaccaagcgcactatccantttgttgattngtgc

SEQ ID NO: 278408 - DNA, 274 bp, Glycine max
  unsure (1)..(274): unsure at all n locations
ggataaattgtttattgtatattactatcatatatgatagttttttctgatgtggcaattatgtattattggaacagcaattgaaacaactctatggtcgattgagtggggcattgctgagcttgtgaaccacccagagatccagcaaaagttaagggatgagattgacagagttcttggagcagggcaccaagtgactgagccagacatccanaagctcccatacctccaagcngtggtcaangaaactcttcgtcttagaatggcaatccct

SEQ ID NO: 278409 - DNA, 283 bp, Glycine max
  unsure (1)..(283): unsure at all n locations
cggacaaagtcctcgtgccagctggcacaacagcaancgttaacatgtgggccatttcgcatgactcgtccatctgggaagacccatgggctttcaagcccgagangttcctcaaagaagatgtttccatcatgggatcngncttgaggcttgcaaaccttcggggctggacgtagggtgtgtccgggccgggccttgggcttggccacggcccatctctggctcgcgcaacttcttcggcacttccatatgggttnccgcacaaancgtggattttccgaat

SEQ ID NO: 278410 - DNA, 273 bp, Glycine max
  unsure (1)..(273): unsure at all n locations
gccaganttacttcaaggctttgattatttgccttatagcactaattggatcaactcaagctcaattgcagcttggtttctatgccaaaagttgtccaaaggctgagcaaataattctgaagtacgttgttgagcatatccacaacgctccatcactagcagctgctctcataagattgcacttccatgattgttttntcaatngttgtgatggatcagtgcttgtggactcaacaccagggaatcaagctgaaaaggacgctattccaaatc

SEQ ID NO: 278411 - DNA, 275 bp, Glycine max
ctgaggaaatcagagcaagctcactacttggactgggctgtccatgccttcagaatcaccaatgttggtgtccaggataccacccagatccacactcacatgtgctactcgaacttcaacgacatcatccactccatcatcgacatggacgccgatgttatcaccattgagaactctcgctccgacgagaagcttctgtcagtcttccgcgaaggtgtgaagtatggtgctggaattggccctggtgtctatgacatccactccccaagaatacc

SEQ ID NO: 278412 - DNA, 279 bp, Glycine max
tttttcttcctcagtagtgtcatttacgcttctcttctctgcagcaactatgcctaaccctaaggtcttcttcgacatgaccatcggcggtcaatctgctggccgcatcgtgatggagctctacgccgacgtcactccccgcaccgccgagaacttccgcgcgctttgcaccggcgagaagggcgtagggcggagggcaagcccctccactacaagggctcgtccttccaccgcgtgatcccgagtttcatgtgtcagggtggcgacttcaccgccgga

SEQ ID NO: 278413 - DNA, 283 bp, Glycine max
  unsure (1)..(283): unsure at all n locations
aggaggcaatcttctttgatgaagctgtgagaaatgcaaaacaaaagcaattggaatcaaaggctttggatcttgtntaccctgcttatacaacattgctagggcatatacgctctaaagctctagatgattttaagactaagctggaacaatcnctaaacaatggagaagggtttgcttcatctgttcgcacttggactcagtctactatgcttgagtttgacaaagcatctgctgatgctgctataagacaagctaattggggtgcttcaaaagtgcgagt

SEQ ID NO: 278414 - DNA, 276 bp, Glycine max
aagaagaagatgtcgtacctgttgcctcacttgcactctgggtgggcggttgatcaagcaatcctggcagaagaggagcgtctggtcgtgatccgtttcgggcacgactgggacgaaacctgcatgcagatggacgaggtgttggcgtcggtggcggagacgataaagaactttgcggtgatatacctggttgacataacggaggtgccggatttcaacaccatgtacgagctctacgacccttccacggtgatgttcttcttcaggaacaagcac

SEQ ID NO: 278415 - DNA, 223 bp, Glycine max
  unsure (1)..(223): unsure at all n locations
tcccgtgcatttcagcagagnaggcataccatgaacagcttncagttgcagagatcacaaacaccgcgtttganccgtcctctatgatggccaagtgcgaccctcgccacggcaagtacatggcttgctgtctgntgtacagaggcgatgtggtccctaaagatgttaatgcagccgtagccattatcaagaccaagcgcactatccaatttgttgattggtg

SEQ ID NO: 278416 - DNA, 270 bp, Glycine max
  unsure (1)..(270): unsure at all n locations
gcattattagtaaagagtgatgggagttgcaacaagatgaagataccgggatcggtgtcggaagcactgatccactactcaacatcaagcataaccccacagcaaacggtgaaagagatatcagtgacagcaagagttctggagaagaagtcgcngngcaatttcctggtgttcgggttggggcacgacagcctgatgtggaatgcgctgaatcacgggggaaggacgatattcctggaagaagacgagtcgtggattcagcaaatgagg

SEQ ID NO: 278417 - DNA, 272 bp, Glycine max
  unsure (1)..(272): unsure at all n locations
aacgganccctctcttcaggtcaccatctagactgcaatcatggctgatggaccacagcatccatcagttgttcagaagctagctggacagtcttacctggtgtccaggcttagccccaactttaactctaggaattattctgcaactggntcttacgtcaatggcggaatgcactcgcctgggttggctgttgtgtcacctgtatctccagttactgtgcatnctccagcagagaaaggagtgagtggatttctagtggattttctgatgg

SEQ ID NO: 278418 - DNA, 311 bp, Glycine max
gctcgagggagcaaggaatattggttctcaacaatgccatagcttcttgcactgaagcaatagaacaacacaagggtaaacttgtggttaaggaggcagctagagcagtgagtgaacgtgatgataaattgcttgccgagcacatggctaagctacgccaagataatgaagaggtcagtggtgatgaagacagtgaggaggaagaagatacaggaatgggcgaggttgatgtggataatggtgccgggataacagagtgacaaaaaacttgtgggtatagtagtaaggcatagatagcagagtccggcttt

SEQ ID NO: 278419 - DNA, 284 bp, Glycine max
  unsure (1)..(284): unsure at all n locations
gtttgctgaactcanngaccaagattgacagancgatccggcaaagagcttgaanaaggagcccaagtttttgaagaacggtgatgctggttttgttaagatgattccaaccaaacccatggttgttgaaactttctccgagtatcctccacttggtaggtttgctgttagggacatgcgtcaaactgttgctgtgggagtcatcaagaacgttgagaagaaggatcctaccggagccaaggtcaccaaggctgcccagaagaagaagtgaatcgtgcgggctg

SEQ ID NO: 278420 - DNA, 312 bp, Glycine max
aataactccatcaggggatgtatttttgctagaggccaaccctcgagcttctcgtacagttccatttgtatcaaaagcaattggccatcccttggctaaatatgcttcccttgtcatgtctggaaagaccctctatgatttacagtttacaaaagaagttatccctaaatatgtgtcagtcaaggaagctgttcttcctttttcaaagttcccaggctgtgacgtgtttttaagtcctgagatgcgaagtactggtgaggtcatgggtattgacccttcttataatattgcatttgctaaggcacaaattgc

SEQ ID NO: 278421 - DNA, 311 bp, Glycine max
  unsure (1)..(311): unsure at all n locations
cagttttttgcgtgtgcgaattaactcgaaaatgattccctttatttttggatcgtatgcagataggaatagatttcgtcagtgttgaaatcacgagaaattcatggctgctccaccggcaagagctcgtgcggattacgattatctcataaaacttctcttgattggcgatagtggtgtcggaaagagttgccttcttctacgattctctgatggttctttcacaactagtttcatcacaactataggcattgattttaagataagaaccattgagcaggatggaaaacggntcaagctccaaatttggg

SEQ ID NO: 278422 - DNA, 307 bp, Glycine max
  unsure (1)..(307): unsure at all n locations
gccctttcacaaggtatggacaaactccggcaaacacttgctgatagtgtagcagctggggcagttcatggaaggaacatatattccacagatgacttcngcaatggacaagttgaaagctctggtgagctttgtgaaccaggctgatcatcttcggcaggaaactttgcagcaaatgtctcgaatacttacaatccgtcaggcagctcgatgcttgcttgctttgggggaatatttccaacgcctgagggctttgagctcactgtggtctaatagacctcgtgaacctgcttagtctcacaacaag

SEQ ID NO: 278423 - DNA, 306 bp, Glycine max
cacctttgttcactcttcttctcttgcggctagggttttagcgcacttcttcctagatttaaggaagatgggtaaggaaaaggttcacatcagtattgtggtcattggccatgtcgactctgggaaatccactaccactggtcacctgatttacaagcttggaggcattgacaagcgtgttattgagaggtttgagaaggaagctgctgagatgaacaagaggtctttcaagtatgcctgggtgctggacaaacttaaggctgagcgtgaaagaggaatcaccattgatattgctttgtggaagtt

SEQ ID NO: 278424 - DNA, 309 bp, Glycine max
  unsure (1)..(309): unsure at all n locations
gaaaaatagaanttnttcaaagangggtgtcattggacccaactttgaaatcccagnttaaggnntggcntgtnanggacacngtcttctccntctcttgatgnccggtcaactgcatcacaggttattgcnaaagttgctggcattgagttgcctcataaacagtggcctganttgataggatccctcttgtctaatgctcatcagcttcctgcccctacaagacaggcaacacttgagacccttggttacatctgtgaagaagtntcccctgatgtagtagaccaggatcatgtaaataagatacnc

SEQ ID NO: 278425 - DNA, 308 bp, Glycine max
atccaccaagactattgcttcatttaagctgcctgattataattctggcaagttagaggttcaatacttccatgaccatgctaccttaacaacagctgttgcactgaagcaatcccctgtcattgatgtttctgccactgttggtaccccaaccattgctttgggtgctgaggcaggctatgacacttcatctggtggttttacaaaatacactgctggaattagtgtcacgagacctgattcttctgcttcagtaatccttggtgacaagggtgacagcattaaagcatcatacctccatcatctgg

SEQ ID NO: 278426 - DNA, 309 bp, Glycine max
  unsure (1)..(309): unsure at all n locations
catcactgtagtntccaacantcagatctggaaacattgttgcctctttgttagcacataaattaggngtaactcagtgtaccattgctcatgctctagaaaagaccaagtaccctgagtctgacatttactggaaanantttgaagaganatatcatttctcatgccaatttactgctgatctttttgcaatgaaccacacagactttatcatcaccagcnccttccaagagattgctggaagcaaggacactgtnggacagtatgagagtcacactgccttcacccttccangactttaccgtgttg

SEQ ID NO: 278427 - DNA, 303 bp, Glycine max
  unsure (1)..(303): unsure at all n locations
ggaaagattgctgaattgctcaggtaccactccaccaagagtggtgatgagctgacaagcnctcaaggattatgtgaccaggatgaaggaaggtcagagtgacatctactacatcaccggtgaaagcaagaancgctgttgagaactccccattcttggagaagttgaagaagaaagggtatgaggttcttttcatggttgatgccattgatgaatatgctgttggccagctcaaggaatttgagggcaagaagcttgtctctgccaccaaggagggtctcaaacttgacgagagtgaagatg

SEQ ID NO: 278428 - DNA, 301 bp, Glycine max
aggcgtcttcataaacgcctttcttctccgtttccgtttcctcgttcgaattcgctttttgatctgcgaaaatgagagagtgcatctcgatccacattggtcaggctggtatccaggtcggaaatgcttgctgggagctctactgcctcgagcacggcatcgggcccgatgggcaaatgccaagtgacaagacagttggcggtggtgatgatgctttcaatactttcttcagcgagactggtgctggaaagcacgtgccacgtgcagtgtttgtagatcttgagcccactgttattgatga

SEQ ID NO: 278429 - DNA, 289 bp, Glycine max
  unsure (1)..(289): unsure at all n locations
ttatagcaagtnngtgtcagangcgtcactngcaaccctgcgatttttcagaaaggctancgcatcatcgaaggnttacnatgatcngttcagggaacttggtgcaagcagggaaagacattgaaagtgcatattgggaactngtagtgaaggatatccaagatgcttgcaaattatttgaaccantctatnatcaaacagatggtggtgatggctatgtttctgttgaagtatctcccaggctcgctgatgacactgaggganccatagaactgcaaaatggcttcat

SEQ ID NO: 278430 - DNA, 300 bp, Glycine max
  unsure (1)..(300): unsure at all n locations
aatttttgtacacacacacagattcccctctttcgaatttcgatactttgatcagatccacaacacttcttcatccatgacgcttggttcttcaggatccagtgtcgtggttccaaggaacttcagattgctggangagcttganaagggagaaaaaggaataggagatggcacagttagttatggaatggatgatggtgatgacatttacatgcgctcttggactggaaccattattggtccctatnnngctgtacatgaaggaagaatttatcaattgaagctgttttgtgataaaga

SEQ ID NO: 278431 - DNA, 298 bp, Glycine max
  unsure (1)..(298): unsure at all n locations
actaggtgttgtagctacgacatgtaaagatttgcaagaattgagggtttttccatctgttccctttggggatccagcagctgtcacagaaaaagggctggttgcaatatcaatgggctgccctaagcttcactcgttactctacttctgccaccagatgacaaatgctgcactcataacagtggctaagaactgcccaaattttattcgattcaggttgtgtatccttgatgcnacaaaacctgaccctgatacaatgcagccactggacgaaggttttggcgcaattgtgcagtct

SEQ ID NO: 278432 - DNA, 298 bp, Glycine max
  unsure (1)..(298): unsure at all n locations
atagattggggtcttgctgaattttatcatcctggaaaggaatacaatgttcgtgtggcttcaaganactttaagggccctgaacttctagttgatttacaagactatgactactcattagacatgtggagtcttggctgcatgtttgctggaatgatatttcgcnaggnaccttttttttatggtcacgacaaccatgatcagcttgtcaaaatagctaaggtgcttgggacagatgaactgaatgcatatctgaataagtatcatctggagcttgatcctcaacttgatgcactgg

SEQ ID NO: 278433 - DNA, 299 bp, Glycine max
  unsure (1)..(299): unsure at all n locations
ggcaatgaaggtctactagnctattgggaagttgtgctccaatctaaggttcatatccatcaaggactgctctggtgttagtgatcagggaattgcaggattgttttcttcaacttctttgtttctaacaaaggtgaagctccaggcactgactgtttcagatctctctctagctgttattggtcattatggcaagtcagttactgatcttgtccttaattgcctcccaaatgtcagtgagagggggttctgggtcatgggtaatggtaatggattgcagaagctaaaatcacttacag

SEQ ID NO: 278434 - DNA, 292 bp, Glycine max
aagaaagcataagagaagggtgggaatacagtgtgggattcatcactgaaagtatcctgacggagtatattccaaatgcatctcctgataccttggcattgacttgtggaccaccacctatgattcaatttgcagtccagccgaatttggagaagttgggctacgacacccagaataacttgctcgtgttttaggggactaaactagaatacattgtatgtgtatatagtagtttattgttatatataaataatggattctattagctgcttcgtttcaagatttttttatg

SEQ ID NO: 278435 - DNA, 286 bp, Glycine max
  unsure (1)..(286): unsure at all n locations
agaacancaagcgccttatccanntctctactngcgaagtgtacgganagacgattggatccngtctncctannganagtcctcttcgtaaggatccggcatactatgttcttaaagaagacgagtcnccttgcntttntagttcnattgaaaaacagaggtggncttatgcctgtgcgaaacagtngannannnggctnattnatgctgagggtgtgnaaatggcntggagtcacaattgtgaggccttttaactngattggaccncnaatggattcattcctgg

SEQ ID NO: 278436 - DNA, 293 bp, Glycine max
gttctttctgtttatgataatggttcagtgttcagtcctgaggttcttgatcttactgaggatgaccttattgagaagtttgctgctggtgtctcaatggttacttcactttcattagctatctcatacccaacacttgctgctgcaccacacatgtttgtcaatgcctacaagaatgttcttgctgttgcggttgagacagattattctttccctgaggcagacaaggtcaaggagtatctgaaggatccaagtaaatttgctgtcgctgctgttgctgctcctgctgctga

SEQ ID NO: 278437 - DNA, 288 bp, Glycine max
  unsure (1)..(288): unsure at all n locations
cagnagaacaagtagttgagaactaagaaggagaagcaaatggcttcctcaatgatctcttccccagctgttaccactgtcaaccgtgccggtgccggcatggttgctccattcactggcctcaagtccatggctggcttccccaccaggaagaccancaatgacattacctccattgctagcaacggtggaagagtgcaatgcatgcaggtgtggccaccagttggcaagaagaagtttgagacnctttcctacctgccagaccttgatgatgcncaattggcaaag

SEQ ID NO: 278438 - DNA, 289 bp, Glycine max
  unsure (1)..(289): unsure at all n locations
ctgcaattaacataatagcagaatcccttttccaacctttcttctcttcagatcggatcagatcagaatcccaccgccatggatttcatgaaggtcttcgatcaaaccgttcgagaaataaagagagaggtgaatctgaaggtgctcaaggttccggnaatcgaacagaaggtgctggatgcaactgataatgaaccttggggtcctcatggtactgtgctggcagagatttcacaggctaccaaaaaatttactgaatgccaaatgatcatgaatgtcctttggacaa

SEQ ID NO: 278439 - DNA, 285 bp, Glycine max
  unsure (1)..(285): unsure at all n locations
ttcagcagtagtaaagtttgataagtgtgacagcaattgattgctgggaagtttttgcaccatttctggctaatgtaatatgttgtccccaattggaagccactctcacaattcttattggtcaatccagnaaacttaccaatgtacttgccttaaacgggaccgttgctaaacattgccttgcagatgtggaacaaattttgatgggccagggtgccactaataatctgaagcaggtatgttcaattcgttcttcaaatctcactgaggcatcttgcccagtaa

SEQ ID NO: 278440 - DNA, 284 bp, Glycine max
ggaatatgctgttcaagttgagacctacacgctcacaaaggcaaataatttagttcttaacgtagatggtgcaattggatctcttttcttggatcttcttgctggtagtggaatgttcaccaaacaagagattgatgaaattgtggagattggctatctgaatggcctctttgtgctggcacgctccattggtctgattgggcacacctttgaccaaaagcgattgaagcaaccactttaccgtcacccatgggaggatgttctctacacaaagtgagaaagtt

SEQ ID NO: 278441 - DNA, 284 bp, Glycine max
cgctctgtttctgtctctgtgtttgcggctgaggattccgaacgagcgaccttcttcgtttctcgcaaagtttaagtcatcatgggtaaggaaaagactcacatcaacattgtcgtcattggacatgtcgactctgggaagtcaactaccactggtcatttgatctacaagcttggaggtattgacaagcgtgtgattgagaggttcgagaaggaggctgctgagatgaacaagaggtcattcaagtatgcctgggtgcttgacaagctcaaggctgagcgcga

SEQ ID NO: 278442 - DNA, 287 bp, Glycine max
  unsure (1)..(287): unsure at all n locations
ggcgatgccaacagatacaagattcttgangttgntgggaagggtagctatngagntgttgtgtncagnaatcgatacncacactgggggaaaggttgcaattnagaagattcntnatatttttgaacatatctctgntgccattagaatcctcagggaagtcaagttgctaagacttttaagacaccctgntattgttgagattaagcggatcatgttgccgccttcaaagagggagtttaaagatatatatgnagtctttgagcttatggagnctgatctccatc

SEQ ID NO: 278443 - DNA, 287 bp, Glycine max
  unsure (1)..(287): unsure at all n locations
gaggagttcattcttatgcctaatgttgctaatcttcaaaatgttggtgaccggttgtacgatgaagcattatatgaagctgcaaaaatcatatttgcttttatatctaactgggccaagttgnctatcacactggtcaaattacaacagtttcaaggtgctgttgatgcagcaaggaaagccaacagctcaaagacatggaaggaagtttgctttgcttgtgttgatgcagaggagtttcgtttggcccaaatttgtggactaaacattattattcaggtggatga

SEQ ID NO: 278444 - DNA, 289 bp, Glycine max
  unsure (1)..(289): unsure at all n locations
ccgagaaanggaactgaaggctcaaattacggccattattgacaanagcaaggaaatnnttaaagcagagactgaatctggtgatgtcggtcctcttgttactgaggcagatattcaacatattgtctcctcttggactggaattcctgtgnnagaaagngtcgtctgatgagtctgaccgtctcctaaagatggaagagacactgcatacacgtatcattggccaggacgaggctgtcaaagctattagccgtgctatccgccgtgctcgtgttggcctgaagaatcc

SEQ ID NO: 278445 - DNA, 287 bp, Glycine max
aaaacatctcatcattcacccaacaaaatggcgctgcttctgataattcccatctcactggtcaccctctggctcggttacaccctataccagcgattaagattcaagctccctccgggtccacggccctggccggtagtcggtaacctctacgacataaaacccgtccgcttccggtgcttcgcggagtgggcgcagtcttacggccccataatatcggtttggttcggttcgaccctaaacgtcatcgtttcgaactcggagctggcgaaggaggtgctgaagga

SEQ ID NO: 278446 - DNA, 287 bp, Glycine max
ctcagccaaagaacaaggatcagaatcgtttaatcaagttgaggaagatggcactagtctccggaggaagatcaacactgaaccctaacgcccctctttacattcccgccgcgttccgccaagtggaggatttttctccagaatggtggcagctggtgacgacactgacatggtaccatgactactggctaagccagcagcacgatgatggagccttctatggcgaggatgggtttgatggcaatgatgtggttgatttgcttcctgattcgtttgattttgatgct

SEQ ID NO: 278447 - DNA, 282 bp, Glycine max
taagcactatagtaaaaaaaggacattcattcatctatggctacccttattgctcccagcaaccactctccccaagaagatgctgaagctctcagaaaggcttttgaaggatggggaactgatgagaacactgtcatagtaattttgggtcatagaactgtgtatcagaggcagcaaatcagaagagtttatgaggaaatttaccaggaggatcttgtgaagcgcctagagtctgagatcaaaggagactttgagaaagccgtgtaccgatggatactggaa

SEQ ID NO: 278448 - DNA, 285 bp, Glycine max
ctctcaccaaaacaatttgctcacaaaggaggaaaaatggcacctttcgtttccctctctttgttgcttctctttctcaaccaccccctcctttccctctcaaccaaccctgaagggaacgctctgcatgctttgagaagcaggctttctgatcccaacaatatgttgcagagttgggacccaacactggttaatccctgtacttggtttcatgttacctgtgactccaacaatcatgtgattcgcttagacttgggcaactctaacgtttctggaactctgggc

SEQ ID NO: 278449 - DNA, 275 bp, Glycine max
  unsure (1)..(275): unsure at all n locations
acagacgaagatcaacagagattagnacctcacaagtatcaantaagntaantccatanaacggtttacnatcaatatttggtagggttntgaaaccaaatactgctgcaaatgattggttctcttcttgttcttaagcttcttaaaagcacttgactcgatttgcctaattctctccctactcanacccaacntctcccctatctcttgcagggtcttcgtccttccatcatccataccaaanctccatcttaccacctgcntctctcttggat

SEQ ID NO: 278450 - DNA, 278 bp, Glycine max
attcctgtgaggagaggctattggggtaacaagatcggaaagccccacaccgttccctgcaaggttaccggaaagtgtggctccgtcaccgtccgcatggtccccgcccctcgtgggtccggaatcgtcgccgctagggtccccaagaaggtcttgcagttcgctggaatcgatgacgtcttcacttcctccaggggttccaccaaaaccctcggaaatttcgtcaaggctacttttgactgtttgctgaaaacctacggttttctaacacctgaatt

SEQ ID NO: 278451 - DNA, 281 bp, Glycine max
ctggtaattatgatcaatatgttcagacacgttctgagctagaagagaaccagatgaaacagtacaagtgggagcaggagcagattgcctcaatgaaggaatacattgcccgatttggccatggttcggctaaactagctcgccaggcacagagtaaggagaaaacactggcaaaaatggaacgtggtggacttgcagagaaggtggtcagagacaaagttttggtatttcgttttactgatgttgggaaacttccccctccagttctccagtttgttgag

SEQ ID NO: 278452 - DNA, 282 bp, Glycine max
  unsure (1)..(282): unsure at all n locations
gcctcacaaaagcaaagatcaaacaaaccaaggacgagaacacgatgttgcttgaattgcacttggtttattggttttggctctgtttctgcacttgcntcccacacccactgcaaaacccaaaagcacttcgccatntcccaaacccaccaagcccaaagcctcgtcttcccttcataggacaccttcatctcttaaaagacaaacttctccactacgcactcatcgacctctccaaaaaacatggtcccttattctctctctactttggctccatgcnaa

SEQ ID NO: 278453 - DNA, 282 bp, Glycine max
  unsure (1)..(282): unsure at all n locations
cttctctctccctcacgcgcccctcgcacactcgccgctccttngtcgtcaaagcctcctccagcgagcttccgctagttggaaacaccgcaccggatttcgaagcagaggctgtgtttgaccaggagtttatcaacgtgaaactatctgattacattgggaagaaatatgttgtgctcttcttctacccgttggacttcacttttgtttgtcccacagaaatcactgctttcagtgaccggcatgcagagttcgaggcactaaatactgagatattgggtg

SEQ ID NO: 278454 - DNA, 269 bp, Glycine max
ctagtatccgatcctctgtcctctcgaagctttcatcgttcaacatattctcaccatctcagtcatgggcctgctatcttgttttaggtctaccgtcctgagaaaatgttccaaaggaagctctggcatgtcaagattcctgtatacgaacaattttcaacgaaacttgatttcgtctggtggcaatgaatcgtattatgggtattttaacaggagatcatacacttcactttatatgggaactggaactgtgggtgggattacaagtg

SEQ ID NO: 278455 - DNA, 278 bp, Glycine max
  unsure (1)..(278): unsure at all n locations
gctagaatggaatttcgatgctcagtcatctcttttaccattctcttctctcttgctcttgcaggagagagccatgtccatgcatcgctacctgaggaagattattgggaagctgtttggccaaacactcccattcccactgcactgcgagagcttctaaagcctctccctgacggtgttgaaatcgatgaactccctaagcaaattgatgatacacagtacccaaaaacattcttctataaagnagaccttcatccaggcaaaacatgaaagtacat

SEQ ID NO: 278456 - DNA, 281 bp, Glycine max
  unsure (1)..(281): unsure at all n locations
ctcattctcattcgttcactgtcactttacccaatcctaacactttcttctctctgtnttccttcttcctcgcatcaatggagtnggacggcgttctcctcggcatgtgcaaccctctcctcgacatctctgccgtcgtcgacgacgctttcttgcaaaaatacggtatcaagttgaacgatgcgattctcgccgaggataaacacaaacctatgtatgaagaattggctaacaatcctaatgtnnngtacattgctggaggtgctactcagaattcaatc

SEQ ID NO: 278457 - DNA, 279 bp, Glycine max
ctcagcttggagaggttatccgtgagaaaggacaacagcttgacacaccagttctagaaaatggagataattggagtgtaggacagcgacaacttgttgctctgggccgagctctgctgcagcagtcaagaatacttgtactggatgaagcaacagcatcagttgatactgccacggataatcttatccagaagattatccgaagtgagttcaaagactgcactgtttgcaccattgcacatcgaatacctactgtcattgacagtgatctagttcttg

SEQ ID NO: 278458 - DNA, 274 bp, Glycine max
  unsure (1)..(274): unsure at all n locations
tgatttaaagattatngatnttngncttncgagaccgantntggaaagtnacttcatganagaatatgtagtcacaagatggtatagagctcccgaattgtngtngnactcctctgattacacctctgctatagatgtgtggtctgttggntgcatcttnatggagcttatgaatanaaagcctctgtntccgggcaaagaccatgtgcatcagatgcgcctattgacagagcttcttggcaccccaactgaggctgaccttgggttagtgaat

SEQ ID NO: 278459 - DNA, 274 bp, Glycine max
  unsure (1)..(274): unsure at all n locations
gcagggatcaccagctctttcgttcggncacagtggccaggagttgacattcccgtggatcatgaagtatttgcagttccaaagggttataatgcacctcaacaagtgcacatcacgcaaggtgactatgatggaaaagcagtaatagtctcatgggtgaccccagatgaaccagggactcgccatgtgcaatatggcacatcaaaggataagtttaaaactagtgcagaaggcacagttgcaaactacactttctataactacaagtctggct

SEQ ID NO: 278460 - DNA, 273 bp, Glycine max
  unsure (1)..(273): unsure at all n locations
cnagaacaacaagcgnnttatccatntntcnactngcgnagtgtacggnaagacgattggagcntntctccctanagatagtccncttcgtaaggatccggcatactatgtncntaaagaagacgagtcnccttgcannnttngtncnattgganaacagangtggtcnnatncctgngcganacagttgantgagaggctnattnatgctgagggtgctgaaaatggcttggagttcacaattgtgaggccttttaactggattggacctcg

SEQ ID NO: 278461 - DNA, 273 bp, Glycine max
agatccagcagcaatggtgtacgtcaaggctcagaaatcaaaagcctacttcaagagatatcaagtcaagttcaagagaagaagagagggaaaaaccgattaccgtgccaggattcggttgattaatcaggacaagaacaaatataacactccgaaataccgatttgtggttcgctttagcaacaaggacattgttgcacaaataatatctgctagcattgccggcgatttagttcttgctacagcatattcacatgagctgccacgatatgg

SEQ ID NO: 278462 - DNA, 273 bp, Glycine max
  unsure (1)..(273): unsure at all n locations
tcaacgtccagatgtttttaggggcacagttcgttatgctagtgtgcatgctcatcttggtcgaacaggtagcaggaganatgacttggaatctcttgcttacactcttgtctttcttcttcgtggtcggctaccttggcaaggatatcagggagaaaataaagggtttcttgtctgcaagaaaaagatggccacgtctccagaaactttgtgttgcttttgtccccaaccatttcggcaatttgtggaatatgtagtgaatttgaagtttga

SEQ ID NO: 278463 - DNA, 276 bp, Glycine max
  unsure (1)..(276): unsure at all n locations
ggtaccattgcgaggtccgggaccaaggngttcatggaggcgttgcaggccggtnctgatgtcagcatggatagggcagttcggtgtggggttctactctgcttaccnngttgcaganaaggtcattgttaccaccaagcacaatgatgatgaacagtacatttgggagtctcaggctggtggctctttcactgttactagggacactgatggcgagcaactcggaaggggaaccaagatcaccctcttcctcaaggannatcagttggagtactt

SEQ ID NO: 278464 - DNA, 275 bp, Glycine max
  unsure (1)..(275): unsure at all n locations
gttctttctgtttatgataatggttcagtgttcagtcctgnggttcttgatcttactgaggatnaccttatngagaagtttgctgctggtgtctcaatggttacttcactttcattagctatctcatacccaacacttgctgctgcaccacacatgtttgtcaatgcctacaagaatgttcttgctgtntccggttnagacagattattctttccctgaggcagacaaggtcaaggagtatctgaaggatccaagtaaatttgctgtcgctgctg

SEQ ID NO: 278465 - DNA, 272 bp, Glycine max
cacactgagaggaagagggagtgagagagagtgttcttcgtttgctaccttctcccagaaatggttacgttcaggtttcaccagtaccaggtggtcgggagggctctcccaacggaagcagatcagcatccgaagatctaccgaatgaagctctgggccaccaacgaggttcgcgccaagtctaagttctggtattttttgaggaagctgaagaaggtgaagaagagcaatggtcaagttcttgctatcaacgagatttttgagaagaaccc

SEQ ID NO: 278466 - DNA, 275 bp, Glycine max
gtttctttgtagcacattagttgataatttttattattataattgtgcgttgcagtttttctgtggatggcacccctataagagaattcaagaatttagaatcaattggagttccttttccgaagaggcaaccgatgaggatatactcaagcctatggaacgctgatgattgggccacaaggggtggacgcatcaaaaccgattggtccaaagctcctttcactgcatcctacagaaacttcaacgctaacgcttgtgtttggaacagaggaaaa

SEQ ID NO: 278467 - DNA, 270 bp, Glycine max
  unsure (1)..(270): unsure at all n locations
attcctgtgaggagaggctattggggtaacaagatcggaaagccccacaccgttccctgcaaggttaccggaaagtgtggctccgtcaccgtccgcatggtccccgcccctcgtgggtccggaatcgtcgccgctaaggtccccaagaaggtcttgnagttcgctggnatcgatgacgtcttcacttcctcatgggttccaccanaacctcggaaattcgtcaagctactttgantgtttgctgaaacctacggtttctaacacctgaat

SEQ ID NO: 278468 - DNA, 281 bp, Glycine max
  unsure (1)..(281): unsure at all n locations
tcagggttaagcggtgagatttgcgaatctgagaaatggcggattcttctcgggaggagaacgtttacatggcgaaattggcggagcaggccgagcgttacgaggagatggttgagttcatggagaaggttgcaaagactgtggaggttgaggagttgacggtggaggagaggaatctcctctctgtggcttacaagaacgtgattggtgcganganggcttcgtggaggatcatatcctccattgagcagaaggaggagagcaggggcaatgaagaccac

SEQ ID NO: 278469 - DNA, 272 bp, Glycine max
  unsure (1)..(272): unsure at all n locations
ttcaacttcacccattcatacgtggtgttgttactgctgctcntttctcttttcttttctctttagttctctcttcccctttnnnnnnnnnnnnnnnnnnnnnnngagcttgtttaagcttntcttccattaacatattatcacaatgtgtggtattcttgctgttcttggttgttctgatgactctcgagccagaagggtccgcgtggntgagcgcttcggagatgaaggcaacgtgggccttgactggangtggggcnannananngntg

SEQ ID NO: 278470 - DNA, 283 bp, Glycine max
  unsure (1)..(283): unsure at all n locations
atgttgagaacaatagccttgcacaaacccttctaggttcaggtcacagtaatttcgtttttgattggaaaacacgatctaggatttgcattgggattgcacgtggacttgcttatcttcatgaagaagtaataccacatattgttcacagagatataaaagcaagcaatattctccttgaccaaaaccttacacccaagatttctgattttggtcctgcaaagcttattccatcatacatgactcatgtcagcacacgtgttgcagggaccataggntattt

SEQ ID NO: 278471 - DNA, 276 bp, Glycine max
  unsure (1)..(276): unsure at all n locations
ccgccatttctttcacaggccctcaaaagcatacacgactggaacaaggaaaagaagaaaggttcacactgatgatgaaggaattgaaacaagatggcacaaaacgggaaaaactagagcagtttttgcatctggtggtgcagtaaaaggttttaagaaaatactagtactctacaccaactatggaaggcaaangaagcctgaggaaaccttactggntgatgcatcataccatctnggcatactgaggaagagaaggatggagactagtngttc

SEQ ID NO: 278472 - DNA, 265 bp, Glycine max
  unsure (1)..(265): unsure at all n locations
tctcaccctcctcttcacacattttctgtgcgctctaacaaacattctcgttcacactttcagattgtgtgaagatgggggcgggtggccgaactgatgttcctcctgccaacaggaagtcagaggttgaccctttgaagcgggtgccatttganaaacctccatttagtctcagccaaatcaagaaggtcattccacctcatgtttccagcgttctgttttccgctcatctcctatgttgttncgncttcacatagcttntgct

SEQ ID NO: 278473 - DNA, 277 bp, Glycine max
  unsure (1)..(277): unsure at all n locations
gaattctcagctgaggatgaagccaaaattgagagacctgtaatgatacacagagccatcctaggatctnntgaacgcatgtttgccatacttttagagcactacaagggtaaatggcctttctggctcagtcctcgtcaagcgattgtatgccctgtgtctgaaaagtcacaatcttatgcactacaggtgcgagatcagatccaccaagcagggtatcacgttgatgctgatacaactgataggaagattcagaaaaaggtacgagaagcacagt

SEQ ID NO: 278474 - DNA, 274 bp, Glycine max
  unsure (1)..(274): unsure at all n locations
tcttctccacgtatcggagaacatggggaacaagttgaatgcgatcgcgttgtgcttgttagtgtcgaccctgttggtttctgnggtgtattgtgcaccgaatgctgggctccgtaggattggnctgaagaagattaaattggaccctaaaaacaggcttgctgctccagttgggtccaaagnngttnaatccttccggggntcnaataaaaagnttcnncnccnaaacnacnttnggtgcncnnnnggaacggtantgnnnccgttaagaata

SEQ ID NO: 278475 - DNA, 271 bp, Glycine max
  unsure (1)..(271): unsure at all n locations
ctgagaaccaaaagaggttgaaacgacgtcagagaaacctcgtttcgggcctncagaaagcaggcattagcacccttaagaccaacaatgcaggcttgttttgctgggttgacatgaggcaccttctccattccaacacattcgaagctgagatggaccttggaagaagatactctacgaggttccggtggacnatttcaccaggntngtcntgcnantgtacngaacntggctggttcngattgtgtttcgctaacatgtccgaggatat

SEQ ID NO: 278476 - DNA, 262 bp, Glycine max
  unsure (1)..(262): unsure at all n locations
ctgatgcaaaaattgagattagtcctagttgatcatgcattacaaaatggtgacaaagaggtgaattcaagtacctcaattttccaaaagattggtgcctttgaggaagagctcaatgcccttttgccaaaagaggtggaaagttctaggattgaagttgagaatggaaatcctgccattcctaaccgaattaaggatgcagatcctaccccatatatagtttgtagggaaatttgggacacttggntaccaggagagaagc

SEQ ID NO: 278477 - DNA, 273 bp, Glycine max
  unsure (1)..(273): unsure at all n locations
cggtggtnggacttntgntggcnngcnncnnannatcnnggagcngtatttncgaggtgaaggccactgctggtgatactcacttgggaggtgaagattttgataacagaatggtgaaccattttgttcaggaattcaagaggaagaacaagaaggatattagtggaaatgccagagctctgangaggttgagaacagcatgtgaacgggnaaagaaggactccctcttccatgctnaaaccaccataaaagattgatccctgtaacgaggnt

SEQ ID NO: 278478 - DNA, 282 bp, Glycine max
  unsure (1)..(282): unsure at all n locations
cttcttcccaaccactactactcactcactgcagatctcaatngcatcgctgtccatggctaccatcgttagcatcaaggcccgccagatcttcgacagtcgtggcaatccaactgtcgaggtggatttgacttgctccgatggtacttttgccagagctgctgttccaagtggtgcatccactgggatttatgaggccttgaattgagagatggagggatctgactaaccttggnaaagggtgtatcaaaggctgtngacaatgtgaacacngcaattggc

SEQ ID NO: 278479 - DNA, 278 bp, Glycine max
  unsure (1)..(278): unsure at all n locations
agttgaaggaggagatgcagtactgtgttgatcacccagaggaaattagcaagcttgctaaagtgaaagctcaggtttcagaantcaaaggagttatgatggaaaatattgagaaggttcttgaccgtggggagaaaattgagcttttggtggataaaacagagaaccttcgctctcaggctcaagatttcaggcagcaggaaccaagattagagaaagaatgtggttccaaacctgaagttaagnntattggtccggggancntaatggcntgnatc

SEQ ID NO: 278480 - DNA, 263 bp, Glycine max
  unsure (1)..(263): unsure at all n locations
tgaaccaaatcatcacacacacatactaagaagcaacaattctnctacaatggatctcctccttctggaaaagaccctcataggtctcttcctcgcngcggtggtcgccatcgccgtctccaccctccgcggccggaaattcaagctcccaccgggcccactccccgtcccaatcttcggcaactggctccaagtcggcgacgacctcaacaacgcaactncacgatttggcaaaaattcgtgacatttctctcgnatgggga

SEQ ID NO: 278481 - DNA, 248 bp, Glycine max
  unsure (1)..(248): unsure at all n locations
atggctttgcccaatcagcaaaccgtcgattaccctagtttcaaactcgtcatcgtcggtgacggtggtacaggaaagacaacgttcgtgaaaaggcatcttaccggtgaatttgagaagaaatacnaaccgaccattggagtggaggttcacccattggatttcttcacaaactgtggaaagattcgcttctactgttgggatactgccggacaagagaagtttggtggcctcagggatggatatat

SEQ ID NO: 278482 - DNA, 263 bp, Glycine max
  unsure (1)..(263): unsure at all n locations
aagggagaaagggtgtgagncnggagagcaaagagaccagatgtaagggttggagcaactaagttctcagaaaggcaaccaattggtacagcagctcagggtgacaaggactacaaagaaccacccccagcacctnngtttngagcctggtgagctaaagtcatggtccttctacagagctggaattgctgagttttgtggccatttcttgttcctctacaataccatcttaactgtcatgggtgtcaacagggcacctccag

SEQ ID NO: 278483 - DNA, 269 bp, Glycine max
  unsure (1)..(269): unsure at all n locations
aaatctttgtcaagactttgactggcaagaccatcaccctcgaggtcgaatcctcggacaccattgataatgtcaaggccaagatccaggacaaggagggtatccctccagatcagcagaggttgatatttgctggtaaaacaactttgaggatggaagaacccttgctgattacaatattcagaaggagtctacnttacacttggtccttngtttaagaggtggcatgcagattttngtcangactttgacgggaaagaccatcacnt

SEQ ID NO: 278484 - DNA, 261 bp, Glycine max
  unsure (1)..(261): unsure at all n locations
gagagcaagaaggcagtggagaactctcctttcttggagagactcaagaagaagggctatgaagttctcttcatggtggatgcaattgatgagtatgcagttgggcaactcaaggaatacgatggcaagaaattggtttcagccacaaaggaagggttgaagctggatgatgagactgagggaggagaaaagagaagaggataagaaggagtcatttgtgagctctccaaggccaccaagnaattctgggggccaagtgng

SEQ ID NO: 278485 - DNA, 266 bp, Glycine max
  unsure (1)..(266): unsure at all n locations
ctagaatggaatttcgatgctcagtcatctcttttaccattctcttctctcttgctcttgcaggagaganccatgtccatgcatcgctacctgaggaagattattgggaagctgtttggccaaacactcccattcccactgcactgcgagagttctaaagcctctccctgnaggtgttgaaatcgatgaactcctaagcaaattgatgatacacagtacccaaaaacattcttctataaagaagacttcatccaggcaaacatgag

SEQ ID NO: 278486 - DNA, 303 bp, Glycine max
  unsure (1)..(303): unsure at all n locations
cagaaagacaanacgacagacagattggagagagaatgagtggcggaggagaagagggagcaactctggagttcactccgacgtgggttgtggccgccttttgcacagtcatcgtcgccatttccctcgccgctgagcgcctccttcattatggcggaaagtttctcaaagccaaggaccagaagccgctctacgaagctctccagaagatcaaagaagagctgatgcttttggggttcatttccctgcttttgacggttacacaaaacggcattaccaaaatctgcgttcgaccctctttga

SEQ ID NO: 278487 - DNA, 302 bp, Glycine max
aaagtatagagtgaaagaatgggtgagaaaagcaagattttgatcataggaggcaccggctacatcggcaaacatatagtggaagcaagcgcaaaggctggaaatcccacttttgctttggtgagggaatccacactctctgacccctccaaggcacaactcatccacaattttgaggctttgggcgttaatttggcccgcggggatctgtacgatcatgagaagttggtgaaagctatcaagcaagtagatgtcgtcatatccacgctgggtcacctgcagcttgccgatcagctcaagat

SEQ ID NO: 278488 - DNA, 302 bp, Glycine max
  unsure (1)..(302): unsure at all n locations
tgatggctcaaccctccaagtgttccatgtgttcagcccatgttccccatttaggccctcaaagccaatgtcatgggaagagagtgtcctaaagctacaagccaaggaccaagccaggatgcagtacctttctagcttggtggctaggaggtccattgtcccaattgcctcagggaggcaantcacacaaagccctacttacatagtgaaggccaagattggtaccccagctcagaccctnnnnnnngcnatggncactagcaatgatgcttcctgggtcccttgcactgcttgtgttggct

SEQ ID NO: 278489 - DNA, 301 bp, Glycine max
  unsure (1)..(301): unsure at all n locations
caactccaaagctgttggacctaatggagaagtacttaacgctaaggaagcttttgaattggctagcatcaattctgagntcttngaattgnaacccaaggaaggccttgcccttgttaatggcactgctgttggttctggattagcttctatggttctctttgaggctaatatactagctgtgttgtctgaagttctatcanctattnttgcggaagtgatgcaaggganacctnaatttactgaccatttgacacacaagttaaagcancatcctggtcaaattgaggctgctgcaatt

SEQ ID NO: 278490 - DNA, 302 bp, Glycine max
  unsure (1)..(302): unsure at all n locations
tacacttccaaaagtgaggaggagcttaaaagcctagatgattatgttgaaaatatgggtganaaccaaaaggctatcttttatctagcaactganagcttgaagagtgcaaagactgctccatttttggagaaattggttcaaaaagatattgaggttcnntatttggtcgaacctattgatgaggttgccattcagaacctacagacatacaaaganaataaatttgttgatatcagcaaggaggatttggaattntactgatgaggacgaggtcaaagagagggaaaacaancaagant

SEQ ID NO: 278491 - DNA, 301 bp, Glycine max
  unsure (1)..(301): unsure at all n locations
gntcaagtcatggctagcttttgctgcccaaaaaattgttgaagttaacgcattggctaaagcattgtctggccacaaggatgangccttcttctctggtaatgctgctgctctggcttcaaggaagtcttctccaagagtgaccaacgaggctgttcagaaggctgctgctgcattgaagggttcagatcatcgccgtgcaanaaatgtcagtgccagactggattctcaacaaaagaagctcaaccttccaatcctgccaaccaccactattggatccttccctcagactgtagaactg

SEQ ID NO: 278492 - DNA, 299 bp, Glycine max
  unsure (1)..(299): unsure at all n locations
ananaattgaagcatcctaagggttgtttctaagggataccgggttgggagagaagatgaagcaggtggtgggaacggtggtttcaaataagatgcagaaatcagtggtggtggcagtngatagactattctaccacaaattgtacgaccgatatgtcaagcgcacgtctaagtttatggctcatgatgagcacaatcattgtaacatcggtgaccgagttcggctggatccttctaggcctttgagtaagcataaacattgggcagttgctgaaatctcaagaaagcacgtatatatg

SEQ ID NO: 278493 - DNA, 300 bp, Glycine max
  unsure (1)..(300): unsure at all n locations
gcgatgtgtctggtnaattccgttaacgaacganacctcagcctgctaaatagctatncggntnccacccacctgtccattggccangatcagacctcttgtgggaagatatgtgccccctgangttgttgctgttcgggtgccgcttttgaatctgtcaaattttcaaattaacgattggcctgatatttcagcaaagagctatgcnatcatggttctnatcctccctactgacagtgttagaaaatggcgagaccatgagttggaacttgttgatgttgttgcagatcaggtagcagt

SEQ ID NO: 278494 - DNA, 300 bp, Glycine max
  unsure (1)..(300): unsure at all n locations
ttattgtnttcctctcttcactgtcacncctctcnctgntctctngnccatnatcaggggancagtgatgctcccagatctnctgcnccgagattnngattccggtctgcgccatcagtggnatagggttcgcnctcttccagtgggtcctcttctccaaggntaanntctccgctgccaganacgcttcccctaacgccgncggcaaaaatggctacnangantacctcatcgaagaagaggaaggcctcaacnatcacaacgttgtcctcanatgcgccgaaatccaaaangccattt

SEQ ID NO: 278495 - DNA, 231 bp, Glycine max
  unsure (1)..(231): unsure at all n locations
gattncgaagatggctgaagcagagggatgccgtacgacgccgtaatgcggtcgccgagtatcgaaaganacttctccagcacaangnnttggaatccagagtncgatccgtcagggagaatttgcnagcttcaaaganagagttcaataaaacagaagatgatttgaagtctcttcaaagtgttgggcagatcattngcgaagttctcaggcctcttgacaacgaacgcc

SEQ ID NO: 278496 - DNA, 296 bp, Glycine max
  unsure (1)..(296): unsure at all n locations
cttttggattggccattggaggcaacatcaccctcattactggtttcttatactggattgcccagttgttgggttccattgtggcatgcctcctcctcaatttcatcaccgccaagagcattccaagccacgcaccggcaactggtgtgaacgattttcaagctgtagtgtttganattgtaatcacatttgggttggtttacactgtgtatgcaactgcagcagacccaaagaaggggtcattgggtatcattgcacccattnctattgggttcgttgtgggtgccaacatctta

SEQ ID NO: 278497 - DNA, 297 bp, Glycine max
  unsure (1)..(297): unsure at all n locations
aacaatctctgcatattnggcgcaactgctattgaagataaactgcagcaaggtgtgcnagaatccattgagtctctaangactgcaggtnttaaagtatgggtcttaactggggacaaacagcaaactgccatatcaattggatactcctcgaagctccttacgagcaacatgaatctaattacaattantaccaacaatagagagtcatgtagaagacgtttgcnagacgcccttgtcatgtctagaaaanacatgactgtgcctggggttagtcacaattctgaangaagatca

SEQ ID NO: 278498 - DNA, 295 bp, Glycine max
cttgcttcttctaacttcagttttgatttcattcttgtggctcaacatgaagaaattattgatcctatgtggccaacaagaagacatcgccaccgaagctcaatctttcatactattttctattcccgatcttgtagcacaatcattgctacaccctttgagaatctacttacgaagtcaatctataaccctacctctcacatacaccgcatctctgtctattctccttcacgtacccatcaactactttctcgtctctgtgcttaagcttggaatcaaaggcattgccttaggc

SEQ ID NO: 278499 - DNA, 291 bp, Glycine max
  unsure (1)..(291): unsure at all n locations
tgcaatagtactagtaatggtaattcgttgccgangcctgcnagtttgaatgcgtgtganatantatcggntnctcaaggctttganctatcagggttgtttnaggagaagggngatnaggcgaggtttgtgtcttctgntccggtgtcgaagattatatcgaaattggaggaggttgctcagttggttagnttcactgtgaggaagaaagattgcagggtgagcttggatgggtgtananaaggtgtgaaagggcctttgactattgctgctgagatntttaagttncac

SEQ ID NO: 278500 - DNA, 292 bp, Glycine max
  unsure (1)..(292): unsure at all n locations
tagggttatcatatctccatntccatttcctctctctcagtntccaagaatcttaagctatgggaaagtctacccaaccgtgagcgctgattaccagaaggccgttgagaaggcgaagaagaagctcagaggnttcatcgctgagaagagatgcgctcctctaatgctccgtttggcatggcactctggtggaacttacgacgtgagctcgaagaccggtggtcccttcggaaccataaagcacccctccgaactcgctcacggcgctaacaacggtcttacatcgctgtta

SEQ ID NO: 278501 - DNA, 292 bp, Glycine max
  unsure (1)..(292): unsure at all n locations
gtttcgacactcgcgtctcancctcagtttcggatctctcccttctctcaccaatttccagganttgananatggcngattccaaaccaggnttgaggaagccagtgttcaccaaggtcnatcagcttcgtccagggaccagcgggcacactttaactgtgaaggtggtcgatgctaagatggtgatgcagaaaggtcgttctgatggtcctcaatcccgccaaatgcgaattgctgaatgtttggttggtgatgagactggaatgatcatattcactgccagnaatgatca

SEQ ID NO: 278502 - DNA, 293 bp, Glycine max
  unsure (1)..(293): unsure at all n locations
aaaaatgaacgacgcagatgtctcgaagcaaatccagcagatggtgcggttcatccgccaggaagctgaggaaaaggccaacgngatctctgtctccgccgaagaggaattcaatatcgagaagctgcagttggtcgaagccgacaagaagaagatcaggcaagaatacgaacgcaaagngcgccaagtcgaaattcgcaagaagattgggtactcgatgcagctgaatgcttctcggatcaaagttctncnagctcaagatgacgtgntcagtgccatnnaagaagctgnat

SEQ ID NO: 278503 - DNA, 287 bp, Glycine max
  unsure (1)..(287): unsure at all n locations
ttgaatttgatcatcatcttttcagtagtctctacaacaggcaagtcactgagcttaaactactatgcaaaaacatgccctaatgtggagttcattgttgccaaggcagtaaaggatgccactgctagggacaaaactgttccagcagcaattctgcgaatgcacttccatgattgtttcgttcgggggtgtgatgcctctgtgctgctaaattcaaaaggnaacaacaaagcagaaaaagacgggccaccaaatgtttctttgcatgcattctatgtcattgatgc

SEQ ID NO: 278504 - DNA, 289 bp, Glycine max
  unsure (1)..(289): unsure at all n locations
aactctttcaaaagggagaagaaaaggaaaggaaacaaaacgcacaaaggattattatagcaatggcagaacaannccaaaaccaganaactgaagctggaaggcaccaagaggttggccacaagagccttctccagagtgatgctctttaccagtatattctggagaccagtgtctacccaagagaacctgaatccatganaganctgagngagttgacagcagaacacccatggnacatcatgacaacctctgcagacgaagggcaattcttgaacatgctccttaa

SEQ ID NO: 278505 - DNA, 288 bp, Glycine max
  unsure (1)..(288): unsure at all n locations
ttcgccaccaccggcgccggattggctctctacatcgtcctcatctttgtncccttcatcacattgtggtcnnntttactactactcccagaagcatcccgtcaattacttgctcctagcagttttcaccgtgtctcttggtgttgtcgttggattgagttgcgccnttacnagcgagaaagttattctggaagctgncatattgnctgctgtggtggtgattgctctaacactctacacattttnggctgcaaggagaggccatgatttcaactgccttggagcctt

SEQ ID NO: 278506 - DNA, 287 bp, Glycine max
  unsure (1)..(287): unsure at all n locations
ccgtggcgacggactagaagttgttgggaaaaggttggccttgatgtctgagaaatttggcntcccagttgagtttcatggagttcctgtttttgctccaaatgtgacaagggaaatgcttgatatcaggccaggagaggccttggctgtgaattttcccttgcaactccatcacacagctgatgagagtgttcatgtgancnacccaagggatggacttctganattggtaaggtcactttctcccaaggtgaccacactggtggagcaggaatcaaaccaaacac

SEQ ID NO: 278507 - DNA, 287 bp, Glycine max
  unsure (1)..(287): unsure at all n locations
atgggttcaacaggtgagactcagattactccaacccangtatctgatgaagaggcaaaccttttcgccatgcaantagccagtgcctcagtactccctatggttctcaaatcagctcttgagcttgatctgttggaaatcatagccaaggctggccctggtgttcacctttccccctccgacattgcttctcggctcccaacacacaaccctgatgnacccgttatgttggaccgtatattgcgcctcttggcttgctacaatatcctctctttttctcttcgcac

SEQ ID NO: 278508 - DNA, 287 bp, Glycine max
ctagaatggaatttcgatgctcagtcatctcttttaccattctcttctctcttgctcttgcaggagagagccatgtccatgcatcgctacctgaggaagattattgggaagctgtttggccaaacactcccattcccactgcactgcgagagcttctaaagcctctccctgcaggtgttgaaatcgatgaactccctaagcaaattgatgatacacagtacccaaaaacattcttctataaagaagaccttcatccaggcaaaacaatgaaagtacaattcaccaag

SEQ ID NO: 278509 - DNA, 294 bp, Glycine max
cggtttctgacgtagctgcctatataaaagccgggttctatgacattggtattggggctggactggagtctatgacagtagatcgtgtgaataggcttcccaacattaacccaaaggtagagacctttgcagaagcccgggattgtcttcttccaatgggaatcacttctgagaatgtagcacaacgttatggtgtgacaaggctagagcaagatcaggctgctgttgagtctcacaagcgagctgcagctgcaacagcagctggcaagttcaaagaaaaatcattccagtttc

SEQ ID NO: 278510 - DNA, 273 bp, Glycine max
  unsure (1)..(273): unsure at all n locations
aangaaggatctcattcaaanccatggaggctgctgaccnttaagaacagatgggagacgagttcttggggcagaaaactgattgtgcagaagaggagggcatcccttaatgactttgataggttcaagataatgttggccaagatcaagagggcagctgttgttaggcaagagcttgctaagctgaagaaaagtgcatcataggcattatatcatgtgcaattttcaaattttgttatgaatttcattcagttagtatttttggttgctatg

SEQ ID NO: 278511 - DNA, 294 bp, Glycine max
  unsure (1)..(294): unsure at all n locations
gaaacgatagcnggtttaaatccaaatgtnattaagagtatagaggagttcccactaagtagcaagcntgatactcaagnctatnagcgatcatncctgtataatagcaaaagaacatgtggagcctaacttaggtgggctcactgttgagcaggcnatccnaaacaagaagttgtncatcttagatcaccatgacaatctcantccnaatntgaggaaaatnaatgcaaataccacaaagacttatgcnncnaagaaccatatttgtcttganagatgtggaactttgacacc

SEQ ID NO: 278512 - DNA, 289 bp, Glycine max
cgtttttggaatcaggaaccctgaggaaattccatggggtgaggttggtgctgattatgttgttgagtcaactggtgtattcactgacaaggacaaggctgctgctcacttgaagggtggtgccaagaaggttgtcatctctgccccaagcaaagatgcacccatgtttgttgttggtgttaacgagaaggagtacaagccagagcttgacattgtttccaatgctagctgcactaccaattgtcttgctcccctcgccaaggttatcaacgacgatttggaattgtgg

SEQ ID NO: 278513 - DNA, 293 bp, Glycine max
  unsure (1)..(293): unsure at all n locations
gcagagtacaatcccaagcgttttgctgctgtcattatgaggataagagatcccaaaacaactgcacttattttngcttctggcaagatggtttgtactggagctaagagtgaacaacagtctaaattggcagcaaggaagtatgctcgtattatncaggagcttggcttcccagccaaatttaaggatttcaaaattcagaacattgtcggctcttgtgatgtcaagttccccatacggctggagggtcttgcatatncccatggtgctttctcaagttatgaaccagagct

SEQ ID NO: 278514 - DNA, 294 bp, Glycine max
  unsure (1)..(294): unsure at all n locations
atcggaacaaacagggaatagaagagaggagaagatgggtttcataatggaatttgcggagaacttggtattaaagttgatggaanatccgaaggaaagggatcggaggttcagggagcacgtttatagagtgaaggacaggtgcgagaagacgaaggagatgtgggagctaccctatgcgaccctatgggttttggacattcgaacgccacaattctcagcttgcttgggatgcacagattagccaagtggccgggaggagggacccttatgatgattcctcccaacatttct

SEQ ID NO: 278515 - DNA, 290 bp, Glycine max
cttgatccttctttttctccttgaactcaaacatggcagatgaggtggttctgctagatttctggccaagtccatttgggatgagggtcaggattgcacttgctgaaaagggtatcaaatatgagtacaaagaagaggacttgaggaacaagagtcctcttctcctccaaatgaacccggttcacaagaagattccggttctcatccacaatggcaaacccatttgtgaatccctcattgctgttcagtacattgaggaggtttggaatgacagaatcccttgttgcctt

SEQ ID NO: 278516 - DNA, 289 bp, Glycine max
  unsure (1)..(289): unsure at all n locations
ttnaagactacccanaanggttactngtggattctcaaacaggaaagactatcacacctncggcggggacacttggatntcacatttgcatctgcatggcatcctgatgnccacatatttgctactgggaaccaagacaaaacatgtcgtgtttggnatgttcggaacttgtcaaaatccgttgctgttcttaaaggcaatcttggagctatacgctcaatacgtttcacatctgatggacagttcatggcgatggccgagccagctgactttggcatgtgtatgacgc

SEQ ID NO: 278517 - DNA, 288 bp, Glycine max
  unsure (1)..(288): unsure at all n locations
aggagttagttgcggatagtcacctgctaccggctgtggcagttggaagaatcgtgggggaccagatcagagcctatgcttcttccgatcctaatccaacggtggcatcttgatttccgtggaacagtattgaacgttaagccttcaccagtagtggcagcttttagttccaganggcccaatatggttaccagacagattctgaaaccggacgttattgggcctggggttaacatcttggccgggtggtccgaagcaattgggccatcagggtatccgatgacactc

SEQ ID NO: 278518 - DNA, 288 bp, Glycine max
  unsure (1)..(288): unsure at all n locations
cacacctcncctcgttcacgctacccctttctgctcttcttctacctttcaagtttnaaaagtataangatggcagagacattccnatttacctcagagtcggtgaacgagggacaccctgacaagctctgcgaccaaatctccgatgctgtcctcgacgcttgcctcgagcaggacccagacagcaaagttncctgcgaaacatgcaccaaaaccaacttggncatggtcttcggaganatcacgaccaaggccaacgttgactacgagaaatagtgcgtgacacct

SEQ ID NO: 278519 - DNA, 287 bp, Glycine max
caaagcagtgatgtgtcatgggctaaatttcagaactgcagtattttactgccataaagtccgtgaaacaacagctttcatggttccattggtggctggtgatggaaccaaaactcaggcacttgctgtttgccactcagatacttctggaatgaatcatcacatgcttcatgaactcatgggagttgatcctggaactaaccctgtttgccatttccttggaagcaaggccattttatgggtacccaatttatctatggacactgcctatagactaacgttgttgt

SEQ ID NO: 278520 - DNA, 287 bp, Glycine max
  unsure (1)..(287): unsure at all n locations
cagggtgttccatacacatatgtgctnnccgtctgttgcaccaccggcatacaatgcagtgaattacagaccaaatggtgctnctggaggaaagctccagaacagcaaggaggagcggagtaactcattgaccatgggtgttgcagatgagcatataggattggttgttggtcgtggtggaaggaatattatggaaattcgtcaggctagtggggcaaggataaagatatcagatagaggtgattacgtatctggaacaaccgataggaaagtaccataacaggatc

SEQ ID NO: 278521 - DNA, 288 bp, Glycine max
  unsure (1)..(288): unsure at all n locations
attagtgttcttccacccccgtaccgtctctgcntctctgcantccacagnngaaaatgcctttcaggaggtacgttgagatcgggagggnngctcaaatcanctacggcaaggaatatggcaggctcgtcgtcatcgtcgacgtcattgaccagaacagagcacttgtcgatgcccctgatatggtgaggtcccaagtcaatttcaaaaggctttcccttaccgacancaagattgacatcaagagggtccctaagaagaaagatcttgtcaagccatggaggatgc

SEQ ID NO: 278522 - DNA, 283 bp, Glycine max
  unsure (1)..(283): unsure at all n locations
ccttttagntcttcgtgagggtgcccccactgctgtttctcatggcctctggctcaatatacctgattatgatgctccaacacagcttgtcaaacccctcgagaggaacaccaggtatgttgatgctgttcttaccattcccaaaggaacattgttccccatgtgtggtatgaatttggcattcgatcgtcagctgattggacctgcaatgtactttggactcatgggtgatggccaacctattggacgatacgatgatatgtgggcggatggtgtgttaagg

SEQ ID NO: 278523 - DNA, 190 bp, Glycine max
  unsure (1)..(190): unsure at all n locations
ggcaagtgttccaaaatgaaattaaancaaaccnatcntgttatggtattattatacgatgcccgcanaagcaagcttcaacacaaaaggaagaggcgctgttgcttgatcccgctagcttttacgtatnctctcttacgtaacaaccgtgtacaagttaccagtgtgattttcttacagaactatcttc

SEQ ID NO: 278524 - DNA, 265 bp, Glycine max
  unsure (1)..(265): unsure at all n locations
cggnntcgaggtttgctgaacacatgaccaagattgaaccgcgatccggcaaagagctncgagaaggagcccaagtttttgaagaacggtgatgctggttttgttaagatgattccaaccaaacccatggttgttgaaactttctccgagtatcctccacttggtaggtttgctgntcaggacatgcgtcaaactgttgctgtgggagtcatcaagaacgttgagaagaaggatcctaccggagccaagtcaccaaggctgccca

SEQ ID NO: 278525 - DNA, 283 bp, Glycine max
  unsure (1)..(283): unsure at all n locations
atcagattatgtgacattgcgacatgggttcattatgacccactgcaggacaaatccaaagtttaattttcacaagtacatgattcntgccctcgaagatgatttcaagcaagttgttggtataagttggtatctttggctctttgtggttatcttcttgttgcttaacatcaatggttggcatacgtatttctggattgcttttattcccgtcgttcttttacttgctgtgggcactaagctggggcacgtaataacccaactagctaagaagtagctgaaa

SEQ ID NO: 278526 - DNA, 283 bp, Glycine max
  unsure (1)..(283): unsure at all n locations
tgtggtcggtcactgcaaacgcanaaaccagaacattctcttcagcttaacccttctttttcgatggctaatgcggcacacgattattcttatgcagacctcgcagaacagagcaactaggacgttcatggattatgaatccataactnaggccatggatggcatatgtgcactgtatgaaaggaaactgaaggagttgaacccgaccataaganatctctcgtatgacattactgatctctacaacttcatagatggtcttgcagactgagtgccctagtgt

SEQ ID NO: 278527 - DNA, 282 bp, Glycine max
acagaatggcacacattaatggaaaattcatggataaaaacatcagattcactcttgtgaatatcagctcaaatcgttggctaaccataaggctagaaacattaggaggcctgatgatttggttgatagcaacatctgctgtcttgcagaatgcaagagctgcaaaccaggcaatgtttgcatctacaatgggtttacttctcagttatactttgaacataacaaatctcttgagtggtgtcctcagacaagcaagtagagctgaaacagtttaaattctgt

SEQ ID NO: 278528 - DNA, 188 bp, Glycine max
  unsure (1)..(188): unsure at all n locations
cttcaagatgcacntcttcgtcangnccctcacnggcannaccnnnacccttgacgtggaaagctgctgacaccntngagaacgtngggcnaagntccaggacnaggtaggcatccccccggatnagcaacgtctcatnttcgccggaaagcaacttgagganggccgtacccttnctgactacnaca

SEQ ID NO: 278529 - DNA, 282 bp, Glycine max
  unsure (1)..(282): unsure at all n locations
gcgaagagaatggctcccaagggtttaatctttttggctgtgttatgcttctcagcactgtcactgagtcgttgtcttgcggaggataatggacttgttatgaacttctacaaggaatcatgccctcaggctgaagacatcatcaaagaacaagtgaagcttctctacaagcnccacaagaacactgctttctcctggctcagaaacatcttccatgactgtgctgttcagagttgtgatgcttcactgttgctggactccacaagaggagcttgtctgaga

SEQ ID NO: 278530 - DNA, 279 bp, Glycine max
  unsure (1)..(279): unsure at all n locations
tcaagtctctcgaagcctctttctctctcttctagaagctatctgtgtttggtgttactaagtctccaacaagcaaagtacatggttgatttggaaatccaggtccccaccccattcgacccgtttgccgaggcgagagaatcggatgcccccggagcaaaggagtatgtgcatattcgaattcagcagaggaatgggaagaagagtctgaccacagtgcaagggctgaagaaggagttcagctacgagaagatcctcaaggnctcaagaaggagttct

SEQ ID NO: 278531 - DNA, 304 bp, Glycine max
attcatcacatcttgctcaacagctgaaaggaatgaacttctttctgaatgcttgtgtgtcctttacacaccaaaggatgagcacttcggcattgtttcctttggaggcaatggcagcttataaacctgttatcgcatgcaatagtggtggccctgtggagtcgattaagaatggtgtaacgggattcctttgtgatcctacaccactggagttttctttagcaatggctaagctcataagtgatccccaggaggcagataacatggggagagaagctaggaggcatgttgttgagtcattctc

SEQ ID NO: 278532 - DNA, 313 bp, Glycine max
  unsure (1)..(313): unsure at all n locations
ttggagactacccagaagggttactggtggattctcanacaggaaagactatcacaccttttcgtggacactnggntttctcatgtgcatctgcatggcatcctgatggccacatatttgctactgggaaccaagacaaaacatgtcgtgtttgggatntcggaacttgtcaaaatccgttgctgttcttaaaggcaatcttggagctatacgctcaatacgnttcacatctgatggacagttcatggcgatggccgagccagctgactntgtgcatgtgtatgacgcaaagcatggatttgagaaggagcaa

SEQ ID NO: 278533 - DNA, 318 bp, Glycine max
  unsure (1)..(318): unsure at all n locations
gttggagactacccagaagggttactggtggattctcaaanaggaaagactatcacaccttttcgtggacacttggattnctcatttgnatctgcatggcatcctgatggccacatatttgctactgggaaccaagacaaaacatgtcgtgtttgggatgtncggaacttgncaaaatccgttgctgttcttaaaggcaatcttggagctatacgctcaatacgtttcacatctgatggacagttcatggcgatggccgagccagctgactttgtgcatgtgtatgacgcaaagcatggattntagaaggagcaagag

SEQ ID NO: 278534 - DNA, 318 bp, Glycine max
  unsure (1)..(318): unsure at all n locations
caaggggcttntggtcctgtactgntttctccaggggttgtccnatttcctggntgtaggtcattattcggcanctgtaagtcctgtgctatctcctggcgctcaacctactgttggggcnacttctttatatggagtgacccagttgtcatcccnaacatcngcttttgctagaccatatactcctctgtcctctactacnggcccttcaggaagcaatctgaaggatcaattttttcctgaaagacccggtgaacctgaatgncaatactatctgagaacaggggactgtaaatttggattagcttgtcgatatca

SEQ ID NO: 278535 - DNA, 312 bp, Glycine max
  unsure (1)..(312): unsure at all n locations
anannatccatgaatataagcnacaattaatgaacatatttggaattgtttacccgatacaagnagatgnaaganatgagtgcggcataaagggaagcaaattttgttcctagagtttgtatatttgggggaaaagcatttgctacatatgtgcaagccaagagaantgtgaaatttattacagatgttggggctacagtaaatcatgaccctgaaataggagatctacttaaggttgtttttgtccctgattataatgtcagtnttgccgagatgcttattccagcaagtgaattgtcacnacatatcagt

SEQ ID NO: 278536 - DNA, 300 bp, Glycine max
  unsure (1)..(300): unsure at all n locations
gcgggtggacaacgaaatttctcagccaaagaacaaggatcagaatcgtttaatcaagttgaggaagatggcactantctccggaggaagatcaacactgaaccctaacgcccctctttacattcccgccgcgttccgccaagtggaggatttttctccagaatggtggcagctggtgacgacactgacatggtaccatgactactggctaagccagcagcacgatgatggagccttctatggcgaggatgggtntgatggcaatgatgtggntgattgcttcctgattcgtttgatttt

SEQ ID NO: 278537 - DNA, 298 bp, Glycine max
  unsure (1)..(298): unsure at all n locations
aagaaagcataagagaagngtgggaatacagtgtgggattcatcactganagtatcctgacggagtatattccanatgcatctcctgataccttggcattgacttgtggaccaccacctatgattcaatttgcagtccagccgaattaggagaagttgggctacgacacccagaataacttgctcgtgttttaggggactanactanaatacattgtatgtgtatatagtagtttantgttatatataaataatggntctatnagctgcttcgtttcaagatttnttatgtttcaatt

SEQ ID NO: 278538 - DNA, 303 bp, Glycine max
  unsure (1)..(303): unsure at all n locations
gaaagaacttccttataaccanaaccaacaacaactnctggcaagttatcagaancgctacgntgatcagggtcgcaaggtcnacnagtatggcaatgttgagaggcaaactgacgaatatggcaacccggttcatgccactagtgtcacttatgtngccaccaaaagtgttggtggctacaatgatgacgctaataagcaacatgatattactggngtctatcccgagaaagacaccggtagacatcattttggtcgtggttacgacggtgacactaacaagcaacatgatgctactggtgt

SEQ ID NO: 278539 - DNA, 304 bp, Glycine max
  unsure (1)..(304): unsure at all n locations
tgggatacaaggcagtcaaatccagtgcacacacagcaactcncagagcgctgntatgctatgacagtgagacatcctctgatggttgttggcactgctgatagaaatcttattgtttacaacttgcaaaaccctcaggttgaattcaagagaattgtttcacccttgaagtatcaaacaaggtgccttgctgcattccctgaccaacaaggtgtcttggttggatcaataggaggaagagttggggtgcatcatttggacgatagtcagcatggtaaaaacttcacttttaaatgccatagag

SEQ ID NO: 278540 - DNA, 310 bp, Glycine max
  unsure (1)..(310): unsure at all n locations
tgaaccactctcttgggacacccgaatcaaaatagctattggtgctgcacggggctttgctntcttacacacctcagaanagcaaatcatatacagagatntcaaagcctccaatatactacttgatgaggattataatgcaaaaatttcagattctggcttggcaaaattaggcccttctggggaagattcacacgtgagtaccaggatcatgggaacatatggctatgctgctccagaatacatggcaacaggtcacctttatgtaaagagtgatgtgtatggttttggtgtagtgctgcttgaaatg

SEQ ID NO: 278541 - DNA, 300 bp, Glycine max
  unsure (1)..(300): unsure at all n locations
ctaagactagggtcattacatttgccatncccannnttgagttggccacttnnntcagttgctttaccantttgattggaagcttcccaacanaatgaacattgaagaacttgacatgaaggagtcaaatggnattacttnaagangggagaatgacctctgcttaattcccattgctcgtcaaccttaaaatgtatgnncaattaatgtcatnaactatttaagttgtatcntttnctacttccagcattttgtaattggncaatgactatgattaacttaagttacttccttatgatt

SEQ ID NO: 278542 - DNA, 307 bp, Glycine max
  unsure (1)..(307): unsure at all n locations
gtgggtgatgaagctcaatcagaaaggggtatactcaccttgaagtatcctatagagcatggcatagtcagcaactgggatgatatggagaagatttggcatcacacattttacaatgagcttcgtgttgcccctgaagaacaccctgtacttntaccgaggcacccctcaatcccaaggccaacagagagaagatgacccaaattatgtntgagactttcaatgtgcctgcnatgtatgttgcaattcaggctgtcttgtctctgtatgccagtggaagaactacaggtattgtgcttgatctggt

SEQ ID NO: 278543 - DNA, 304 bp, Glycine max
tttgccgaggcgagagaatcggatgcccccggagcaaaggagtatgtgcatattcgaattcagcagaggaatgggaagaagagtctgaccacagtgcaagggctgaagaaggagttcagctacgagaagatcctcaaggacctcaagaagagttctggggcaacggaaccgtggtgcaggacaaggagcttggcaagatcatccaactccaaggcgaccagcgtaagaacgtctcccacttcctcgttcagctgggccttgtcaggaaggaccagatcaagattcatggtttttgaccaatttg

SEQ ID NO: 278544 - DNA, 294 bp, Glycine max
  unsure (1)..(294): unsure at all n locations
ataaatattccgttttgcgtttctctgcctaaaaggattgaaagatnggtcaagcactaggttgctatcaagttgatcagtcaaatgtggctatcaaggagcattttggaaaatttgatgatgtcctagaacctggatgtcattgcctgccttggtgtcttgggtaccagattgctggtagtttgtcactgcgtgtgcagcaacttgatgttcgatgtgagacgaaaaccaaggacaatgtctttgtcactgtggttgcatctgtgcaataccgagctgtgtctgagaaagcat

SEQ ID NO: 278545 - DNA, 297 bp, Glycine max
  unsure (1)..(297): unsure at all n locations
tccctacctctcccttcaagatgcagatcttcgtcaagaccctcaccggcaagaccatcacccttgaggtggaaagctctgacaccatcgacaacgtcaaggccaagatccaggacaaggaaggaatccccccggaccagcaacgtctcattttcgccggaaagcaacttgaggacggccgtacccttgctgactacaacattcagaaggagngtactcttcacctcgtcctccgtctccgtggtggcatgcagatcttcgttaagacactcaccggcaagaccataaccctagagg

SEQ ID NO: 278546 - DNA, 303 bp, Glycine max
  unsure (1)..(303): unsure at all n locations
ttagtgttcttccacccccgtancgtctctgcctctctgcaatccacagccgaaaatgcctttcaagaggtacgttganatcgggagggttgctcaaatcaactacggcaaggaatatggcaggctcgtcgtcatcgtcgacgtcattgaccagaacagagcacttgtcgatgcccctgatatggtgaggtcccaagtcaatttcaaaaggctttcccttaccgacancaagattgacatcaagagggtccctaagaagaaagatcttgtcaaagccatggaggatgctgatgttaagaacaa

SEQ ID NO: 278547 - DNA, 307 bp, Glycine max
  unsure (1)..(307): unsure at all n locations
gcatttctaaggcttttggcttggaacccgntgcagctaaactcatttgctcccttaagcccgatctcaaagattttgctcaaaaatgtgtcgacgccaccanaattgcaggattcgcccttgccacctcagctctcgttgtttctggagcgagtgcagaagntgttccaaagaggctaaccttcgacgaaatccagagcaagacatacttggaagtgaagggaactggaactgctaatcagtgcccaaccattgaaggtggagtggactcatttgccttcaaggcagggaagtacaaggcccagat

SEQ ID NO: 278548 - DNA, 307 bp, Glycine max
  unsure (1)..(307): unsure at all n locations
tagcatnaggtgtggctttggcaattcgttatcttcatgaggatgcagagcaaagtgttctacatagggatattaagtcggctaatgtgttattggacacagattttagcacaaagcttggtgattttgggatggcaaagttgttggatccaaggttgaggactcanaggacaggggtagtggggacttatgggtaccttgccccagaatatatcaacggaggtagggctagcaaggnatcagacatttatagtttcggggttgtggctcttgaaattgcatgtggaaggaggacttacaaagacgg

SEQ ID NO: 278549 - DNA, 304 bp, Glycine max
  unsure (1)..(304): unsure at all n locations
gcgattgancatagaagaagatgatgatgaacaaccaaataaganggttcgaatggnaatgcctgctacacaatggattagtgtttacaacgctcgtcggccaatgaagcaaaggtatcatnataatgttgctgatgtgcggctggcccaacacattganaaaggaaatgaagatggtttatttatcagcagtgtggcttcttgttctaatctttgggcactcattatggatgctggcactggtttcacagcacnagtttatgaactctctcccttcttccttcacaaggaatggattatggaa

SEQ ID NO: 278550 - DNA, 304 bp, Glycine max
tgcaacttttcctcaattaggagacaaatccaaaatgggaatcttagaggcgtttgtgtaaaagcaaataagctattgaatactgagattagcaactttatagataaatatgatgtcactctcgatgtttgtttgtcatcagtaaatcaacggcttatgtgctgaatcaactgcaagagacacagaagatagatgtttgtattggtgataaaacaaccacatacttgaacagaaaacaagtccaaaaagctctacatgctaatcttgttggagtcaccaaatggtcaacttgcagctcagttct

SEQ ID NO: 278551 - DNA, 309 bp, Glycine max
  unsure (1)..(309): unsure at all n locations
gttgttcaccgtgatctgaaaagtgcaaattgtctagtgaataagcattggactgtcaaaatatgtgattttgggctttcaagaataatgacagagtctcccatgagagattcttcatcagctggaacgccagaatggatggctcctgagcttattngaaatgaaccgttcacagaaaaatactgatatcttcagccttggggtgataatgtgggaactctgtaccttgaacagaccatgggaaggagtaccacctgagagggtggtttattctgttgcgaatgagggttccagattggagataccaga

SEQ ID NO: 278552 - DNA, 287 bp, Glycine max
gtcaccactccggaaatcaagtggaaatccgtggaggcgctgggtgctacagttgtgctcgtgggggattcatatgatgaagcacaagcgtatgctaagaagcggggggtagaggagggtaggacattcgtacctccttttgatcatcctgatgtcatcatgggtcagggaacagttgggatggaaattgtccgccaaatgcagggtccaatttttgcaatctttgtgcctgtgggaggaggtggtctcattgctggtattgctgcttatgtgaagagggttaatcc

SEQ ID NO: 278553 - DNA, 301 bp, Glycine max
  unsure (1)..(301): unsure at all n locations
gcagaagaaggcaaagatagtggcagagctccaagntgtgaagcacaacagtggcaagtcctacaatcagttagcggaagagactggactcaccaacgtctatgttgctcagcttctcaggagacaggctcagctcaatccccaaactgcccctctacttcgggcagcgctgcccgacctgccccaagaccttgtttctgagatgatgagaccccctttgaggtcttatgaccctaatctcatccaagaccccactgtctataggttgaatgaagctgttatgcattttggggagagcatc

SEQ ID NO: 278554 - DNA, 286 bp, Glycine max
  unsure (1)..(286): unsure at all n locations
gttgctaaaaaactgaggctgaantctgcaagtnctgttgcagatgctgagagcattgtatcaaaggctattcgtgatggtgcaattgatgctacattggatcatgccaatggttggatggtgtccaaagaaactggaganattactccacaaatgagcctcagttagcctttaattctcggattgctttctgtcttaacatgcacaatgaggcggttcgagcacttcgatttccaccaaacacacacaaagagaaggaaagtgctgaaaagagangagagagact

SEQ ID NO: 278555 - DNA, 287 bp, Glycine max
  unsure (1)..(287): unsure at all n locations
gttttgttctcattctgtnantctgtgcttagttaacgttaacagtgacttaagatggcggattctgcagatgtcacccacgatgttgtatcnctcntctcttctcctcaaagggactttcttcttcgaaacaacggcnanccaanntaaaattgacagcttgaagggtaagaaacttggtttgtatttttcggcatcctggtgtggtccatgtcaaacatttacgccaactttggtngatgtgtacaatgaggttgcaaaaaaaggtgacttccagatcgttttca

SEQ ID NO: 278556 - DNA, 282 bp, Glycine max
  unsure (1)..(282): unsure at all n locations
tccgcaccagtttcaccgcacgantatcttnttgtttggngcgttccgagananactctgtaaacatgttggtttaccaggncctccttacaggtgatgagcttctctctgactccttccgntacaaggnaattgagaatggnatgctgtgggaagttgaggggaagtgggttgttaaaggagcagttgatgtagacattggtgcnaacccttctgctgagggtggnggagaagatgagggagttgatgatgcngctgttaaggttgttgacattgttgaca

SEQ ID NO: 278557 - DNA, 283 bp, Glycine max
  unsure (1)..(283): unsure at all n locations
tcggcgcggcacccacacacacagttcgtcngaatgggaagggtgattcgcgctcagcgtangggtgctgggtcggtgttcaagtctcanactcaccaccgcaagggtccggcgaggttccgcagcctcgacttcggcgagcgcaacggctacctcaagggcgtcgtcaccgacatcatccacgaccccggtcgcggcgcccctctcgccaaggtggcattccgccaccccttccgctacnagangcnaacggngctcttcgttgcngccgagngcctctaca

SEQ ID NO: 278558 - DNA, 282 bp, Glycine max
  unsure (1)..(282): unsure at all n locations
tttggnatgatagaanttcggttcctttgttaaaagacgatggcttgatggcaactcatgatgnagacaccgagaactacttctacgacagtnaagtgcactgtgttttatgccctcgaaatcctgacgatggaggaagcgttgttcaggacgtagaaattttctccatgtttagtcatcatcagaaaattgtggtagtggacagtgctttgccgaatggnagatcagataanagaagaattgtgagttttgttgggggtattgatttntgtgatggaagat

SEQ ID NO: 278559 - DNA, 278 bp, Glycine max
  unsure (1)..(278): unsure at all n locations
ggagttgcaacaagatgaagatancgggatcnggtcggaagcnctgatccactactcaacatcaagcanaancccanagcaaacggtgaaagagatatcagtgacagcaagatttctggagaagaagtcnccgtgcaatttcctggtgttcnggttagngcacgacagcctgatgnggaatgcgctgaatcacgggggaaggacgatattcctggaagaagacgagtcgtggattcagcaaatgaggagaagatttccaatgctggaggcgtaccaag

SEQ ID NO: 278560 - DNA, 278 bp, Glycine max
  unsure (1)..(278): unsure at all n locations
ttgtgtgtctctntcaggcntcaccagctnagcacgcagaggagcagaagcctaagccgtcaacatggcgagagggttgaagaaacacttgangaggctcaatgctccaaaacactggatgcntgacaagccacatggggccttcnccaccgaagccatcatctggnccccacaagtccagggagtgtcttcctttgatcctcatcctacggaacaggctaaagtatgctctaacananagagaagttattgccatctngatgcagcgtcatgttctt

SEQ ID NO: 278561 - DNA, 277 bp, Glycine max
  unsure (1)..(277): unsure at all n locations
agaaagcataagagangggtgggaatanagtgtgggattcatnactgaaagtntcctgacggagtatattccaaatgcatctcctgataccttggcattgacttgtggacacaccacctatgattcaatttgcagtccagccgaatttggagaagttgggctacgacacccagaataacttgctcgtgttttaggggactaaactagaatacattgtatgtgtatatagtagttnattgtnatatataaataatggattctatnagctgcttcgttt

SEQ ID NO: 278562 - DNA, 270 bp, Glycine max
  unsure (1)..(270): unsure at all n locations
gacatcatccactccatcatcgacaggncgccgatgttatcaccattgagaantctcgctccgacgagangcttctgtcagtcttccgcgaaggtgtgangtatggtgctggaattggccctggtgtctatgacatccactccccaagaataccaccaactgaaganattgctgacagaatcaacaagatgctggcagtgctcgagaagnacatcttgtgggtganccctgactgtgggctcaagacccgtaagtacactgaggtgaagc

SEQ ID NO: 278563 - DNA, 272 bp, Glycine max
  unsure (1)..(272): unsure at all n locations
acactgcgattcccagtaataatngtnttgttgatgccatctccnaccancatcaaatangtcttttnntgatcaatngacacatnttcctcgtaaacaccggcggtgacgtagatcaggaagtaccccgccgtggatgcagtcttgttcggggctgcggcgaggncgtcgccgatggtggtgaagtttccgcttccatcttnactcaccgtcacaatgtnttttaccttaaccacgtcgcccacngtcgccgcctganggagctttctctt

SEQ ID NO: 278564 - DNA, 268 bp, Glycine max
  unsure (1)..(268): unsure at all n locations
taatccctctttcttcctcttctcagtagtgcgattttcgattctcttctntgcaactatgcntaaccctaaggtcttcttcgacatgaccatcggcggtcaacctgccggccgcatcgtgatggagctctacgccgacgtgactccgagcaccgccgagaacttccgcgngctctgcaccggcgagangggcgccgggcggagggcaagcccctccantanaaaggctcgtccttccaccgcgtgatcccgaacttcatgtgcnagg

SEQ ID NO: 278565 - DNA, 278 bp, Glycine max
caaattctttgagttgaacacaggggccaagattccttctcttgggttagggacttggcaagctgaacctggtgttgtagctgaagctctcaccacagccattcaggttggatacaggcatattgactgtgctagtgcgtataagatcaagcagagattggttctgctcttaagaagctttttgatgatggtgtggtgaagcgtgaggacttatggatcacttccaaactctggtgttcagatcatgcaccagaagatgtgccaaaagcattggataa

SEQ ID NO: 278566 - DNA, 287 bp, Glycine max
  unsure (1)..(287): unsure at all n locations
tcttgacttcaggcccgaaaggtggctgcgtgatggggtgttcgtgccagagtgtccctttaagtaccctgtttttcaggctggtgtaagggtgtgtttggggaaggacttggcttngatggagatgaagtccgttgtggttgcgttggttcgaggtttgatattcgggtcgcccaaccggatcaggagccccggttcgcgcacggtctaaccgctactttgagaggggggtttccggttcgggtttgtgaaaggaaatgaatagataaaggagttcacaacatgaa

SEQ ID NO: 278567 - DNA, 283 bp, Glycine max
ccatttcttcagtcctgcacatgttatgccgcttctggaaattgtacgtaccaagcagacctctccccaagtgatagttgacgtgttagatatttcaaagaagataaagaaaactccagtggtggttggaaactgcacaggatttgctgttataggatgttcttcccatacacgcaagcaggtctcttgcttgttgaacgtggtgcagatgtttatcaaattgatagaataataaccaaatttggaatgcccatggggcctttcagattggctgaccttgttg

SEQ ID NO: 278568 - DNA, 287 bp, Glycine max
  unsure (1)..(287): unsure at all n locations
gcttcancttgctccctcagaagcgaagaagaagccacagagaactagtctcctactcncanccncnaganaaaaatggcatctcacatcgttggatacccccgtatgcgtcccaaganagagctcaagttcgctctcgagtctttctgggatgcaagagcagcgccgaggatttgcagaaggtgtcttctgatctcagggcatccatctggaagcagatggctgatgctgggatcaagtacatccccagcaacactttctctcactatgaccaggttctcgacgca

SEQ ID NO: 278569 - DNA, 285 bp, Glycine max
  unsure (1)..(285): unsure at all n locations
atttctggaataaaacaacttattcatcctttggaggcatctggcatattggttaagcggactgatgaagagctgttaaaaacattggattcatnngttgttgtggaaagagaaggtcacataattgcttgtgctgccatttttcctcacttgaggagaagtgtggagaggttgcttgtattgcagtatctcctgattgtcgtggccaaggacagggtgacaaattgcttgattatatggagaagaaagcatcatctcttggatttaatatgcttttccttctta

SEQ ID NO: 278570 - DNA, 292 bp, Glycine max
agcgtccctatgcacaaccttatggtgtatatacatggttaacggatattaaagacaccctctaaagaaggatatagttttgaagagatatgcatcaagaaagaagcgtttgagggagaagagaagttttgtgcaaaatccttgggaacagtaattgttttgccatttcaaagctgggaaagaacattcaagtactttcaagttcctttgtcaataagcaagagcaatacactgtggaaggagtgcagaatcttggagacaaagcagtgatgtgtcatgggctaaatttcag

SEQ ID NO: 278571 - DNA, 291 bp, Glycine max
  unsure (1)..(291): unsure at all n locations
atatttgttgacacagatgctgntgttcgtttggnaaganggattaggcgtgacactactgagaagggtcgggatattggagcagttcttgatcagtattcaaaatttgtnaagccagcttttgatgactttattcttccaacaaagaagtatgcgatataattataccccgtggaggagataatcatgtggccattgatttgattgtacagcatattcgcacaaagcttggtcagcatgacctgtgtaaaatatatcctaatttgtatgtcattcagtcaacttttcaga

SEQ ID NO: 278572 - DNA, 298 bp, Glycine max
  unsure (1)..(298): unsure at all n locations
gaaaaantgagtnangtttctagcttctactgttgantaaacatgactatngaaganggcagggtagagaacgaggactacacacaagatggaactgtgaacattaaagggaaacctattcttagatccaaaagtggtggttggnaagcttgctcctttgtgttgtatatgaggtattcgaaagaatggcttattatgggatatcatnaaatttgattctgtatcttacaacaaagcttcaccaaggcacagtttcctctgcaaacaatgtcaccaattgggttggtaccatttggat

SEQ ID NO: 278573 - DNA, 289 bp, Glycine max
  unsure (1)..(289): unsure at all n locations
caggaagatgcacttcgcaattgcacaaggaaaacaacggaagccaagtttccgcgcattttgtcacataagaaaaacgaagtgtcaatccctttcttcttcgtttgtattgtttatgaattattaattactttggttttagacagttgtatgcactgcttttgtctctgtcgttgaatganacccnatgaaatgcattttggtttgcaacctgctgcgcttgcaaggggttgtgaagccaattttataatgaataanatcaaatatatgctttgtatatttattgaaa

SEQ ID NO: 278574 - DNA, 280 bp, Glycine max
tgtcttgatccctaggaacactacaattccaatcaagaaggaacaggttttctcaacatactctgacaaccagcctggtgtgttgatccaggtctttgaaggtgaaagagcaaggactaaagataacaatttgttgggcaaatttgaatttctggcattcctcctgcccccaggggtgttcctcagattactgtgtgctttgacattgatgccaatggtattttgaacgtctctgccgaagataagaccactggccagaaaaataagatcactatcacca

SEQ ID NO: 278575 - DNA, 289 bp, Glycine max
  unsure (1)..(289): unsure at all n locations
cttttcccttttattttgctctcttctctgcacaacaattccttntcattccagatattccaaccatcgaccgatctcaattctcaaccttaacctctcagaatgtcttacgcttatctcttcaaatacatcatcatcggtgacaccggagttggaagtcttgtcttctacttcaattcacagacaagcgctttcagcccgtccatgacttgaccatcggtgttgaatttggtgccaggatgatcacaattgataacaagccaatcaagttgcaaatatgggatacggc

SEQ ID NO: 278576 - DNA, 279 bp, Glycine max
gtgaagggagatagcagcaggaacaatacctgacccagggtcattgaaggcaagtgacacaacaatgttggatgtgccagtgaaggtgcctcatagcatattactgagcttggcaaaggacattggtgcagattgggacattgataccaattggatattggacttgttattgaccttcctgtcattggcaacttcaccattcctctttctcagaagggagagatcaagctccctaccctcactgacatgtttgcctaattccaactaaaggcttagaac

SEQ ID NO: 278577 - DNA, 280 bp, Glycine max
  unsure (1)..(280): unsure at all n locations
gttttgcctgtcctacagagttatggtattgctgcaatctctccattttctcaccgactgagttttgacaacttgcctgtggatattcaacacctacgttgtaaagtaaacttccaagctttaacctttgtttctcatatcagaacnttggagatgcccttatcagccgccttcgctatcctcaaggctcagctgaagaaatgggcttcaactaccttcaagaggtcactggtgcaggtgctaggaaaaatgcagggaaatttgttgttctacacctccg

SEQ ID NO: 278578 - DNA, 274 bp, Glycine max
  unsure (1)..(274): unsure at all n locations
atgctctccaactccttcatcttgtcctcgaattcgtcagcttcagcnagttggtttccatcgagccattggatagcctgctcaattgcatcctcaattttnttcttatcatcagcagacagcttggnagcnatcttatcactttaatngtgtncctcatgttataggcgtnattntccaatgtatttttggcctccactttcttcntatgctcctcatcctcagccttgtacttctcagcttcctgcaccatcntctcaatcgcctncttaga

SEQ ID NO: 278579 - DNA, 274 bp, Glycine max
ccaaaactccaatattgagattcatacttttaaccagagccagtatcctcgattggttgctgaggactttttgccattgccttccaaagggcatactgacaaggatggatggtaccctcctggccatggagatgtctttccacattattgaacagtggcaaacttgatgcactattgtcacagggtaaagagtatgtatttgttgccaattcagataacttgggagctatagttgacttgaaaatcttaaatcatttgatccagaacaagaatg

SEQ ID NO: 278580 - DNA, 277 bp, Glycine max
  unsure (1)..(277): unsure at all n locations
aatcgtgtancaaggaccaagagaaaatgtggtagagtttntcgaatcaatgggttttaagtgtcctgnaagaaaaggagttgctgacttcttgcaagaagtgacatcaataaaggatcaatggcaatattgggcacgtaaagagaaccttatngctttgtcactgtcaaggaatttactgaagcattccagctatttcacatagntcaaaatcttggagaggagctagcctgtccatttgacaagtctaaatgccatccaaatgtattgaccacna

SEQ ID NO: 278581 - DNA, 274 bp, Glycine max
  unsure (1)..(274): unsure at all n locations
tgcctncngcagttcctgctatcgttttcttgtctggtgggcagagtgaggaggaggcatccgttaacctcaatgccatnaaccaggtcaatggaaagaagccatggtcactctctttctcctttggaagggcacttcaagnagcacccttaaggcatggagtggaaaagaggagaatgtgaagaaggctcaggaagcccttttggtaagagccaaggccaactcagaggcaactctgggaacctacaagggtaactcaaagcttgctgatggt

SEQ ID NO: 278582 - DNA, 272 bp, Glycine max
acagagtcctgatattgctcaaggtgtgcacggccacctcacaaagaggcctgaggagattggtgctggtgaccaaggtcatatgttcggctatgccactgacgagactcccgagctcatgcccttgagccatgtccttccacgaagctcggtgccaagctcaccgaggttcggaagaacgggacatgcccttggctgagacctgatggcaagacccaagtcactgttgagtactacaatgacaagggtgccatggttccaatccgcgtcca

SEQ ID NO: 278583 - DNA, 279 bp, Glycine max
cagaattctctaaaagagatctttttctgctctttgaagaaagaagggtctttgcttgattttgggagatgtctctgctctcagatctcatcaaccttaacctctccgataccaccgagaaggtgatcgcagagtacatatggatcggtggatcaggaatggacctgaggagcaaagcaaggactctcccaggaccagttagcgacccttcagagcttcccaagtggaactatgatggttccagcacaggtcaagctcctggtgaagacagtgaagtga

SEQ ID NO: 278584 - DNA, 138 bp, Glycine max
  unsure (1)..(138): unsure at all n locations
anaagttaaaccaaaggatgccgctgatatatgtgaaactctatacataccagatctttagggcgttatctnatattcatcgttgtattggagtctgccatcgggatatcaagcctcaaaatctattggtcnatccac

SEQ ID NO: 278585 - DNA, 293 bp, Glycine max
  unsure (1)..(293): unsure at all n locations
ctcattaattgnaagaatggcacttcgttgcttggtgatgtccctttctgttctcttcgactcttggtcttgcgagagaaagccatgccagagacgaagatttttggcatgctgtttggccaaacactcccattccaagttcattgcgagatcttctanngcctggccctgcaagtgttgaaatcgatntcaccctatgcaaattgaagaaacacagtacccgaaaaccttcttctataangaagaccttcatccaggcaaaacaatgaaagtacaattnagcaagcctccct

SEQ ID NO: 278586 - DNA, 288 bp, Glycine max
  unsure (1)..(288): unsure at all n locations
cgaagtttcacatcagccttatccagtttagggtttcggtccttaccctacctttgacgtatcgaaaccttaaatttgggattaggtctgagcaatctggttggtagaacctttggtcttagagagtcaagttttatgtctggattagacgatcaaattcctactgccttcgatccttttgctgatnaaatgctgatgactcgggtgctgnnncaaaggagtatgtgcatattcgcgttcagcagcgaaatggtaggaaaagcctgacaaccgttcagggattgaaaa

SEQ ID NO: 278587 - DNA, 287 bp, Glycine max
  unsure (1)..(287): unsure at all n locations
ccttccggnaccctaaggtaagtnagtaatcagtggttgagaatggtggngaaggcgaagggtagaanggnggaggtggttanacgtgagtncaccattaacctccacaagcgcctccatggctgcacatttaagangaaagctcctaaagctattaaggagantaggaaatttgcccaaaaggccatggggaccaatgatgtgagggtggntgtgaagttgaacnagtttgtctggagccngggaatcnggngtgttccnaggaggattagagtaaganttctcgc

SEQ ID NO: 278588 - DNA, 286 bp, Glycine max
  unsure (1)..(286): unsure at all n locations
gcattgtggcaagtggactagccagaaggtgcattgtgcaagtntcttatgccattggtgtgcccgagcctttgtctgtctttnttgacacctatggcaccgggnagatccatgataaggagattctcnacattgtgaaggagaactttgatttcaggcccggtatgatctccatcaaccttgatctcaagaggggtgggnataacaggttcttgaagactgctgcatatggncacttcggcagagaggaccctgacttcacatgggaagtggtcnagcccctcaa

SEQ ID NO: 278589 - DNA, 283 bp, Glycine max
  unsure (1)..(283): unsure at all n locations
tntctctnaaactncanaagcngcttnccgnagcattctcaagtntggnanangcaaagtttggcttgacccgaatgangtcaatgaaatctccatggcnaannctcgacaaaacanaaggaaantngtcaannatngnttcaggancaggaagccacagagangcantcccntncccnactcncagaatgaaggaggccaagaggaagngacgtcactctggttatgggaagcntaagggtacaagagaggctaggctccccaccaaaatccnttngatgag

SEQ ID NO: 278590 - DNA, 280 bp, Glycine max
  unsure (1)..(280): unsure at all n locations
ggaagcnatgnggcttcacccaccaancncactaatgctcccacaccgtgccaatgcttgatgtcanagttggnggctatganatnccaaaagggtccaatgtgcatgtgaatgtgtgggccgtggcccgtnacccggcagtgtggnaggntccgttggagttccgncccgagaggtccttgaggnggatgtggacatgnngggccatgactttnggctacttccattcggggcgggtcgccgggtatgccctggtgcccaacttggtatcnncttggta

SEQ ID NO: 278591 - DNA, 280 bp, Glycine max
  unsure (1)..(280): unsure at all n locations
gncacatcttgtttggnacattnatcaggtaaagaaanatntngaggacaaaacncaccaacatganagntgctcnttcaaagcctagatttgatggaactgtacaagagcctcganngggaatcngaagtggtcatgtacctggtagcnaatgcntcccttttgcncagttgttagangttcacagacattgttaccagcngatgagttgaagnngcgatttgnncnaganggcntctctctggaaagcccagctgtgacttcntgtggnacnggcgta

SEQ ID NO: 278592 - DNA, 275 bp, Glycine max
  unsure (1)..(275): unsure at all n locations
antcagtcaaggnggtgccttganttggctagtgttctactgtancctaaaacttgaggtggaggtgcngtcttnagtggttggtttcnantcaattcanctannatagaacaaattacaccngaggcnangcngacncccatactagtggtcccatgggctggttgatagancggtaatgtttgangccggacnagcaggtcccccgttccttgaaaaanttggtgtgggatgcgagtttnaggcttatcctggtcnaggncacncganaanca

SEQ ID NO: 278593 - DNA, 275 bp, Glycine max
  unsure (1)..(275): unsure at all n locations
aaagggtgatattcatggatgaatnaaagctgctggtgctgttaggcgcttaanttgagtgaacaagnacttgaaaaggcttctgaatcttatggagctgatattgttaggtttacgcagaanaatattctcagagtanatcnaaagggaanacntctcaattcctcaaattagaagccacacatagggtggacatacggngctcagatggttgcnttcaacatgcaggggtatggaaaatcacttcggtacatgcnaggnatgtttagagcaaa

SEQ ID NO: 278594 - DNA, 263 bp, Glycine max
  unsure (1)..(263): unsure at all n locations
agcaactctttttgttcttcagtttggtataaccttagccgaggtcacgaggtgcactagctagtttcacaatttccaaatggctaggggnttgaagaagcatctcaagaggctcaatgctcctaagcattggatgcttgacaaactgggtggtgcatttgcgccaaaccctcatctggaccanacaaatctagggagtgccttcccctcatantcatcctacgaaaccggctaaagtatgctctgacttaccgtgaagtcat

SEQ ID NO: 278595 - DNA, 274 bp, Glycine max
  unsure (1)..(274): unsure at all n locations
antagcatcaaaaccagagtngtctagtaatccggtgctgctagaggnnggntggngagtgaatggcatatcgagcgaagatctagcttcggcactgaatcccccttagcaagacangcaggaaatgtncctganactgggtcactctctattgttgtncttggcgcttctggggatcttgctaagaagaagacatttcctgnacttttccatctanaccggnagggattcttaccagcagatgaagttcacatgtttngcnatgcaaggacaa

SEQ ID NO: 278596 - DNA, 293 bp, Glycine max
  unsure (1)..(293): unsure at all n locations
gaaattgtagtaaagactctatcaanganctcatggcaagtcagtgacagagttcataaatgaagtaaaattaattgnaaaacttcagcatcggaatcttgtaaaactcctggttgttncattcaaggacaagagaaaatgctaatttatgagtacatggcaaacggcagcctggactcctcatttttgatgataaaaaaagaaaattgctaaagtggcctcaacaatccacataatctgtgganncgcaagggggcttatgtatcttcatcagatcccgactgnggattatc

SEQ ID NO: 278597 - DNA, 303 bp, Glycine max
accactattggatccttccctcagactgtagaactgaggagggtacgccgtgaattcaaggctaacaagatctccgaggaagagtatgtaaagtcaattaaggaggaaattcgcaaagttgttgagcttcaagaagagcttgatattgatgttcttgttcatggagaaccagagagaaatgatatggttgagtacttcggtgaacaattgtcaggcttgccttcaccgttaatgggtgggtgcaatcctaggttcccgttgcgtgaagccaccgatcatctatggtgagtgagccgcccaaag

SEQ ID NO: 278598 - DNA, 285 bp, Glycine max
  unsure (1)..(285): unsure at all n locations
cttgatcaggggcngaggtagcnttaaggatccagctagggaggaaatgatgagagggaaacctgggtatgaacatctgaatgaacctctccacattctagttgaggcagaattacctgttgaaatagtagatgctcgtttgatgcaagcacgtgacatacttgaagatttgctcaaaccggtggatgaatctcaggatttctacaagaagcagcaacttcgggagttagcaatgctgaatggcactcttcgcgaggagggttctcccagtcggttctgtttcac

SEQ ID NO: 278599 - DNA, 278 bp, Glycine max
tgaagttgtttgttttctttgttgctgcagtagttttggtagcatggccatgccatggcgcaggctaccaaaggttccctctccgaatgaaaactggctatggtgagcgttcttcggaggtaaaatgcgcaagttttaggcttgctgtggaagcacacaacatccgagccttaaaaccatcctgaagagtgcgttgaaccaacaaaggactacattaatggcgaacaattagtcagactctaaaacagttaaccaacaagctttctttatgctagtga

SEQ ID NO: 278600 - DNA, 258 bp, Glycine max
  unsure (1)..(258): unsure at all n locations
ggctcccaagggtttaacctttcnngctgtgttaatatgngtttcagcactgtcactgantccttctgttgcgggggaagggcaaaataatggccttgttatgaacttctacaaggaatcatgccctcaggctgaagacatcatcacagaacaagtcaagcttctctacaagcgccacaagaacactgctttctcctggctcaggaacatcttccatgactgtgctgttcagagttgtgatgcttcactgttgctgga

SEQ ID NO: 278601 - DNA, 298 bp, Glycine max
  unsure (1)..(298): unsure at all n locations
ctcaattctcttcaccctttgcctctgaaananatgggtagtcttgaagcggaaagaacaacagtaggattggcagcaagagacccttccagggattctctccccatncacctacaatctaagaaacacaggccctgatgatgtttacattaaagttcactactgtgaaatttnccnttctgatnctccaccagnttaaaatgatcttggcatgtccaactatcgttnctccnaggacatggaagtggttagtgaggtnctggnggtgggnatcaaacgttancaggttccaagtggg

SEQ ID NO: 278602 - DNA, 287 bp, Glycine max
  unsure (1)..(287): unsure at all n locations
cttggacctcatttgtcgtgctcatcaggttgtagaggatgggtatgaattctttgctgataggcaacttgttacgatattttcagctccaaactatngtggtgaatttgacaatgctggtgcgatgatgagtgtggacgaaaacttgatgtgctcatttcagattcttaagcctgcagagaaaaaatcaaagtttgtgatgtcaaacaagatgtgatggttggcacatcactgtcaaatgtatcgtggagctaattaaatcctgaagattagatgcatggtcttaa

SEQ ID NO: 278603 - DNA, 283 bp, Glycine max
  unsure (1)..(283): unsure at all n locations
gtttgttgttgtanatcgttcttcttcntttgttgttctgtgtttgtgtttgtntttnctctcacctgaaaatgtcttgctgcggtggtacctntggttgcggaagctcctcncaagtgcggcaacggctgcggaggctgcaagatgtacccagactngagctacactgagtcaaccaccaccgagaccttggtcatgggagtggcacctgttaaggctcanttgagggtgctgaaagggtgtncccnctganaacanggctncaaatgggnncaactncccc

SEQ ID NO: 278604 - DNA, 169 bp, Glycine max
  unsure (1)..(169): unsure at all n locations
cnaagatgnacccatgtttgttgttggtgttaacgagaaggagtacaagccagagcttgacattgtttccaatgctagctgcnancaccaattgtcttgctcccctcgccaaggttatcaacgaccgatttggaattgtggagggtcttataaccantgttcatgccat

SEQ ID NO: 278605 - DNA, 298 bp, Glycine max
  unsure (1)..(298): unsure at all n locations
gatgcctcgtggaacacttgaagttgttctgatcagcgccaaaggatcgatgaccaatgattttcntcctccagcatagatccttatgtgattctcacatacagggcacaggagaaaaagagcactgtgcaagaagatgctggatccaagccacaatggaatgagagctttcttttcactgtctctgacagtgcttctgaacttaatctgaagataatggataaagacaactttagtcaagatgattgtcttggcgaggcaaccattcatttagatccagtgtttgaagccggtagca

SEQ ID NO: 278606 - DNA, 289 bp, Glycine max
  unsure (1)..(289): unsure at all n locations
gttggagactacccagaagggttactggtggattctcaaacacncaagactatcacacctnntcgtggacacttggatttctcatttgcatctgcatggcatcctgatngccacatatttgctactgggaaccaagacaaaacatgtcgtgtttgggatgttcggaacttgtcaaaatccgttgctgttcttaaaggcaatcttggagctatacgctcaatacgtttcacatctgatggacagttcatggcgatggccgagccagctgatttgtgcatgtgtatgacga

SEQ ID NO: 278607 - DNA, 288 bp, Glycine max
  unsure (1)..(288): unsure at all n locations
ctcattaattgcaagantggcacttcgttgcttggtgatgtcctttctgttctcttcactcttggtcttgcgagagaaagccatgccagagacgaagatttttggcatgctgtttggccaaacactcccattccaagttcattgcgagatcttctaaagcctggccctgcaagtgttgaaatcgatnatcaccctatgcaaattgaagaaacacagtacccgaaaaccttcttctataangaagaccttcatccaggcaaaacaagaaagtacaatcagcaagcctct

SEQ ID NO: 278608 - DNA, 293 bp, Glycine max
  unsure (1)..(293): unsure at all n locations
caagtgttgaaatcgatgatcaccctatgcaaattgaagaaacacagtacccgaaaaccttcttctataaagaagaccttcatccaggcaaaacaatgaaagtacaattcagcaagcctccctttcaanaaccatggggtgttggtacatggttaaaggaaattaaagacactactaaagaacatatagttttgaagagctatgcatcaagnnnnnngccattgagggagaagagaagttttgtgcaaaatccttgggaacagtaattggtttgcccattcaaagctgggaaa

SEQ ID NO: 278609 - DNA, 297 bp, Glycine max
  unsure (1)..(297): unsure at all n locations
gtgattttgcctgtgaagttccctcagttntttactgggaaaagagaccctgntcagctttcttgttgtatggacctcctggaacgggaaaatcatatttagccaaggcagttgcaacagaagctgagtccacgtttttcagtgtttcttcatcagaccttgtttcaaagtggatgggtgaaagtgaaaagctggtttcaaaccttttcgaaatggctcgagaaagtgccccttctatcatatttattgacgaaattgattccctgtgtggtcagcgtggagaaggcaatgagagta

SEQ ID NO: 278610 - DNA, 288 bp, Glycine max
  unsure (1)..(288): unsure at all n locations
aagtatccnccttctgtcccatcggacaaactaactcatgtgtacactgcaattctgaannctgataatgaattgcaaatnttnattgatggggaggagaagaaaaaggcaaatttcttgtcttctgaggactttgagcctcctcntataccttccaagacaatccctgcgcctgatgatacgaaacctgaggactgggacgaaagagccaaaatcccagacccaagtgctgtnaagccagatgactgggatgaggatgcaccatggaaatcttagatgaagaagcag

SEQ ID NO: 278611 - DNA, 298 bp, Glycine max
  unsure (1)..(298): unsure at all n locations
taattgcaagaatggcacttcgttgcttggtgatgtccctttctgttcnccttcactcttggtcttgcgagagaaagccatgccagagacgaagatttttggcatgctgtttggccaaacactcccattccaagttcattgcgagcnccttctaaagcctggccctgcaagtgttgaaatngatgatcaccctatgcaaattgaagaaacacagtacccgaaaaccttcttctataaagaagaccttcatccaggcaaaacaatgaaagtacaattcagcaagcctccctttcaanac

SEQ ID NO: 278612 - DNA, 277 bp, Glycine max
  unsure (1)..(277): unsure at all n locations
aaaaccnaaaaaagagnntagagtganagatagagaatcatggaattagaacaaaaccagagatgggaaggctatgtgaactngaggaacaagcctgctctcagtggctgcaatggtggcatgcttgctgcctcctttgttttagtggttgagatattggagaatctggcatttctagccaatgcaagcaatttggtgctgtatctgaggcagtacatgcacatgtccccttcaaaatctgccaacaatgtcacaaatttcatggganggccttccc

SEQ ID NO: 278613 - DNA, 273 bp, Glycine max
  unsure (1)..(273): unsure at all n locations
ggtcctcccaagcctgaccccgatatgatgctctcatccaccacgctgttcaaactggtgtcacttttcttgacacttctnacgtctatggtcctcacaccaacgaactccttctaggaaaggctctgaagggaggggtgagagatnnggttgaattggctacaaagtttggaatcaacgttgctgaagggaagagagagatccgtggtgatccggcatatgtgagggctgcttgtgagggaagcttaaagagattggcatcgattgcataga

SEQ ID NO: 278614 - DNA, 274 bp, Glycine max
gaggagaaaggttagggagccaaaggaggaaaatgtcactcttggtccagccgttagagacggtgaacatgttttcggcgtggctcgcatctttgcctccttcaacgacaccttcatccatgtcactgatttgtctgggagggaaacccttgttcgcatcactggtgggatgaaagttaaagctgacagagatgaatcatctccatatgctgctatgcttgcagcacaggatgttgctgccagatgtaaggaatgggcataatgctcttcatac

SEQ ID NO: 278615 - DNA, 276 bp, Glycine max
  unsure (1)..(276): unsure at all n locations
ggagnnacncaggagtgttatcggcgaaggggcattcgagaagcttnncnnacgtgggagaagggacatatgggatcttgcacagggacttgaagcntcacaatctcttgatggaccgaaacgcccatgatgcttaaaattgctgatcttggactcgctccnccatttaccgtgccaattaagaaatatacacatgagatataaccctgtggtatagagctcctgaagtcctcttgggtgctacccatactcaatggcggtggacatgtggtccgt

SEQ ID NO: 278616 - DNA, 280 bp, Glycine max
  unsure (1)..(280): unsure at all n locations
gtgatcattcatgaggttaagatcaatgtttcacntggctcttctttccattgcactgntcccagggtggtttagggtgtgctatgccaacatggatgatatggctgtgcaaattgcattgcaaagaattcgaaccttcgtgcttcaaaacaaggaggtcatggttcctaacaagaaacattgctggcacagtaacttgaggttgagcctcaaaaccagaaggtttgatgatatcatgatgtcacctcactcccctatacctcagtcccctttggttaag

SEQ ID NO: 278617 - DNA, 278 bp, Glycine max
  unsure (1)..(278): unsure at all n locations
ctttttgtttcttcagtttggtataaccttagccgaggtcacgaggagcactagctagtttcacaatttccaaatggctaggggattgaagaagcatctcaagaggctcaatgctcctaagcattggatgcttgacaaactgggtngtgcatttgcgcccaaaccctcatctggaccacacaaatctagggagtgccttcccctcatactcatcctacgaaaccggctaaagtatgctctgacttaccgtgaagtcatcgctattctgatgcagagat

SEQ ID NO: 278618 - DNA, 289 bp, Glycine max
  unsure (1)..(289): unsure at all n locations
gnccgtgaggntgatcttccaataacctatttcaggagcaattgaaccaagctatatctggnccaaatatcaccagaagctgttgtggatcttcgtctgcaagcctataatgaaataactaaaaatctagttaatnacaacatcttttcacagtatatgtacaaaactntacctagtggcaaccatagttgggctttcaagaagcaattcgccatccagttagccctttcgagtttcatgtccttcatgctgcaaattggtgggagatccccgaanaagatcttgttta

SEQ ID NO: 278619 - DNA, 314 bp, Glycine max
  unsure (1)..(314): unsure at all n locations
tgccggtgcgctggacgtggaaggcaaggaacttcctaaacttgtctatatttcacgtgaaaaacgtcccggctatcctcaccacaagaaagcaggtgccatgaatgctttggttcgagtttctgctgtgcttacaaatgcaccattcatgntgaatctggattgtgatcactacgtcaataacagcaaggcagtaagagagaccatgtgctttttaatggaccccaacctagggaagaagctgtgttatgtccatttccacaangattgatggnatngatcgccagntagntatgctaaccgaaacacntgnt

SEQ ID NO: 278620 - DNA, 308 bp, Glycine max
ccgatggctaatctctcactcttgttcttcggtctcctcctattctccgctgccgtagccaccgtcgaacgaatcgacgatgaagacaaccttctgatccgtcaagtggtgccggacgcggaggaccaccacctgctcaacgcggagcaccacttctccgccttcaagacaaagttcgccaagacctacgccacgcaggaggagcacgaccaccgcttccgtatcttcaagaacaacttgctccgcgccaagtcgcaccagaaattggacccctccgccgtccagggtcaccaggttctccgatctca

SEQ ID NO: 278621 - DNA, 308 bp, Glycine max
  unsure (1)..(308): unsure at all n locations
atgggttcaacaggtgagactcagattactccaacccatgtatctgatgaagaggcaaaccttttcgccatgcaactagccagtgcctcagtactccctanggttctcaaatcagctcttgagcttgatctgttggaaatcatagccaaggctggccctggtgttcacctttccccctccgacattgcttctcggctcccaacacacaaccctgatgcncccgttatgttggaccgtatattgcgcctcttggcttgctacaatatcctctctttttctcttcgcactctccctcatggcaaggttga

SEQ ID NO: 278622 - DNA, 307 bp, Glycine max
  unsure (1)..(307): unsure at all n locations
ggagggtctcattgccgtttttnaccttggaggtggaacatttgatgtgtccatcttagaaatttctaatggtgtttttgaggtgaaagcaacaaatggtgacactttcttgggaggagaggattttgacaatgccttattggattttctggtgaatgaattcaaaagaaccgagagtatcgacctttcaaaggacaggcttgcactgcagaggcttcgtgaagctgctgagaaagctaagatcgagctgtcttcaacatctcaaactgagatcaacctgcctttcatcactgctgatgcatctggt

SEQ ID NO: 278623 - DNA, 304 bp, Glycine max
  unsure (1)..(304): unsure at all n locations
ctgaaagangtgaagctgcgtganggatactatgtaatggtccctgaaaaagctgtggaaatggtagatgagaacaccatttgtnttgctgcnatccttggttccactcngantggngagcttgaagatgtcanactcttaaatgatctcctggtggaaaagaataaggaaactggatgggacactccantncatgtggatgctgccagtnggggattcattgcacctttgcttgatccagagcntgaatgggactttcggttgccactagtgaagagcatcantgttagnggacaccantntg

SEQ ID NO: 278624 - DNA, 301 bp, Glycine max
  unsure (1)..(301): unsure at all n locations
ccgcttctggatggtgtaattagttatctgccatgtccaatagaagttagtaattatgcccttgaccaagctaagaatgaggacaaggttgagttgcgtggaagtcctgatgggccacttgtggcattggctttcaagtnggaggaagggcggtttggtcagttaacatatctaagaatttacgagggtgtgattcggaagggtgattttattcttaatgtaaacactggcaagaagatcaaggttcctcgtttggttcggatgcattctgatgagatggaggacattcaagaggctcatg

SEQ ID NO: 278625 - DNA, 308 bp, Glycine max
  unsure (1)..(308): unsure at all n locations
aatctcgcgaanccgttgagagaatcgcaaattccgttcaagatccatattgtgaaggatcacgacatgaaggagaggctgtgcttggaggtggagaggcttgggttgagcgcggtgattatggggagtagagggtttggcgctgtgaggcgtggcagcgatgggaggcttgggagtgttagtgattactgcgttcatcactgtgtttgtcctgttgtgggtggtgcgttatcccgatgataaggatgtngttncggcggncaccacgcntcggcctggtgcgctcaaggacgggggatgaaggcgat

SEQ ID NO: 278626 - DNA, 275 bp, Glycine max
  unsure (1)..(275): unsure at all n locations
attaaactaagctaaattcctttctctctctttctttctcttcgagggtttggntttctcttcctccctggaagaaaaagaagagtcaccgctacgacgccgttcgtgcttttttgaggtgccanagtcatgtttgggcgtngtggaccaaggaggagtgacaacnccaaatattatgatatnctcggggtttccaaaaatgccagtgaagatgnaatcaagaaggcctatagaaaggctgctatgaagaaccatccagataagggaggagatcc

SEQ ID NO: 278627 - DNA, 302 bp, Glycine max
  unsure (1)..(302): unsure at all n locations
agaagcanaaggaggagaagcagaaagagnagacnaagcaatggcgccgaagaagccccgaaccacgtcgaggaaccctgatttggtcaggggaattggcaaatattcgaggtcgcagatgtaccacaagangngcatctgggccatcaaggccaaaaacggcggtgttttgcccctccacgatcccaagcccaaacccgaggccccggcccagaagccgcccaagttctacccggccgatgacgtgaagaagcccctcgtcaacaagcacaagcccaagcccgcgaaactcaggtgcttgg

SEQ ID NO: 278628 - DNA, 294 bp, Glycine max
  unsure (1)..(294): unsure at all n locations
ttggaaactaaaacgactcctcaacgtaggttccgaaagaaaactgagagaagcaatcaacgttgtaanccgacgtcgctaatgagatgatcaaacagagaatagaaatggggttcaacacgcggaacgaccttctctcgcggttcacgggatccataaacgacgacgtttatttaagagacattgtggtgagttttctcttagcgggccgtgacaccatcgcctccgggttaacgggcttttttatgttgttgtctaaaagcccggagtggaggagtgattagagagaggcgg

SEQ ID NO: 278629 - DNA, 301 bp, Glycine max
gtcaaggcacacatctgatgagttctaccttggggagagagatggtggtgactattggacttctgatgctggtccactagaggccttcaagaggtttggaaagaagcttcaagagattgaacaaaagcttatacagaagaacaaggacgagacgttgagaaaccgcagtgggccggctaaaatgccttacactttgctctatccttctagtgaggagggattgactttcagaggaattcccaacagtatctccatctaggggctctatggttgttgcagtactttccctggttttcaataa

SEQ ID NO: 278630 - DNA, 299 bp, Glycine max
  unsure (1)..(299): unsure at all n locations
atccgcagcngcttttattcgcaccgcaaacncntcnnccatggccgttcgganagaanaagcgcatctccaaggggaagaanggtggcaagaagaaggcagctgatccctttnccaagaaggattggnatgacatnaaggctccttctnttnttcaagtgaaaaatgttggcaaaaccctacgtctctcgtacncagggtaccaagattgcttctgaaggactcaagcatagagtgtntgangtctccgtggctgatcttcaaggggatgaggatcatgcatcaagaagataggttga

SEQ ID NO: 278631 - DNA, 301 bp, Glycine max
  unsure (1)..(301): unsure at all n locations
attntcnctcaccaaagaagaagaagcaaacaatggccgatcaacttaccgangaacagatctccgagttcaaggaagccttcagcttgttcgacaaggacggcgatggttgcatcacaaccanggagcttggaactgttatgcgtncattggggcaaaacccaactgaggcagagctccaggacatgatcaatgaagtggatgctgatgggantggtaccattgacttccctgagttcctaaatctcatggccaggaagatgaaggacactgattctgaggaggagctgaaagaggcatt

SEQ ID NO: 278632 - DNA, 301 bp, Glycine max
  unsure (1)..(301): unsure at all n locations
caggtggcaaggtatctcatgaagactgtttctcagctgggctctggaaataagcctgttggtactacagcttatatggctcgagtggaacaactgatgcaatatcactctgatgttaaaaaggctgaggactggttgaagcctaatgtagtgttggaagcatttgaagctagggctgctaggatgtcagtngcttgtgctcaaaatcttagcaagttcactaatcctgaggagggttttcaagaactagctgctgatttagttgatgcggcattgctcattgccagttaatcgtngtntc

SEQ ID NO: 278633 - DNA, 299 bp, Glycine max
  unsure (1)..(299): unsure at all n locations
ctcagacactgctggttctgctcaaacggcttcctccaangggnacntaactcatggttattggcacaacaagtgaactagatttcttngaatcaattggattttgtnataccttctctgttacntacnatattcctaccttgaacacaacggatgnaaagaaggtcctagaacagttgaatgtgtttactgatgaagatattgattctgctgcagaggcgttgaangatatgcnnctcaggaaacnatacatggtgatcgagatggcagcgcaaggggagcatggtggatctgcagat

SEQ ID NO: 278634 - DNA, 294 bp, Glycine max
  unsure (1)..(294): unsure at all n locations
tttaataaaggaaaggttcataaggtgcctgcaaacgacatggaggccttgaagtccccacttatggggctatttganaaacgccgggcacgcaagtntnncatttatgtgcaaaactacaacgagagcgatcccaagacccacgagggggcggacttgacaagagtgactacnaaagagttganagcaaaatacggccttgatganaacactatagacttcattggtcatgctttggcgcttcatagcgatgatcgtacttggctgagccagcactggacaccgtgaagagaa

SEQ ID NO: 278635 - DNA, 292 bp, Glycine max
  unsure (1)..(292): unsure at all n locations
tttctcttctgcctcacgccgctgattccttcaatgttagctatatccagatgaagaacgctgggacttgctcttactcggtggttataactactagctgttcgtctcctaggtatacaagggatcagatcagtatttcttttggggatgcttatggcaaccagatatatgcgccaagactggatgatccagcttcaggtacattcgagagctgtncttcagatacatttcagataactggtccgtgtgcatatcagatctatataggtacacataacanatctgatatgca

SEQ ID NO: 278636 - DNA, 294 bp, Glycine max
  unsure (1)..(294): unsure at all n locations
aaacattgacttganactgatcagatcaattaacacacagagaganagagagagagnagcatagcaaacatgggaagagctccttgttgtgacaaagctaatgtcaagagaggtccatggtcacctgaagaagacaccaaactcaaatcttatattgaagagcatggaactggtggcaactggatagccttgcctcagaaaataggcctcaagaggtgtgggaaaagctgtcgtctcaggtggctgaattatcttcgtccaaacatcaaacacggaggtttctcagaagaagaa

SEQ ID NO: 278637 - DNA, 292 bp, Glycine max
  unsure (1)..(292): unsure at all n locations
gtaatggccancagtggaggcgatgaggggcagancaaccctgccctcgacccggatttngatgctccggatgacccggatcacgagttcgctgagttcgggtcgggttgcttctggggtgctgagttggcctttcagcgagttgtgggtgtggtgancactgaggttggttacactcagggtcacactccggatccgaattacaaactggtttgcaccggnnncactaaccacgttgaagtggttcgggtccagttcgacccgaagntttgcccctacaatgatctactcg

SEQ ID NO: 278638 - DNA, 290 bp, Glycine max
  unsure (1)..(290): unsure at all n locations
taatggccaccagtggaggcgatgaggggcagaacaaccctgccctcnacccggatttggatgctccggatgacccggatcacgagttcgctgagttcgngtcgggttgcttctggggtgctgagttggcctntcagcgagttnttggtgtggtgaagactgaggttggttacactcagggtcacactccggatccgaattacnaactggtttgcaccggaancactaaccacgttgaagtggttcgggtccagttcgacccgaagtttgcccctacnatgatctatcgt

SEQ ID NO: 278639 - DNA, 273 bp, Glycine max
  unsure (1)..(273): unsure at all n locations
ccagattgctttggctatcaaggaagnagtggaggaccttacnaaggctggcatcactgtactccaaattgatgaagctgctttgagagagggtctgccactgaggaaatcagaacaagctcactacttggactgggctgtccatgccttcagaatcaccaatgttggtgtgcaggataccactcagatccacacccacatgtgctactccaacttcaacgacatcatccactccatcatcgacatggacgctgatgttatcaccattgagat

SEQ ID NO: 278640 - DNA, 293 bp, Glycine max
  unsure (1)..(293): unsure at all n locations
agagaagatgaagttcaatccacgagtntcgagcagccgccgcaagagccgaaangctcactttcacggcgccgtcgagcgtgcggagggtgctgatgagcgcccctctgtcggcggagtccggtcgaagtacaacgtgcggtcgatcccagtccgcaaggaggacgaggtgcaggtggtgcgcggaacatacaagggtcgcgaggggaaggtgacgcaggtgtaccgtcgcaagtgggtcatccacatcncagcgcataacccgcgagaaggtgaatggctccaccgtcaac

SEQ ID NO: 278641 - DNA, 319 bp, Glycine max
  unsure (1)..(319): unsure at all n locations
gaacgcctatggcttgcgctagttacgctgtcatatgccaggagaatggcctggttcccattgttgagcntgagatcctngttgatggacctcatgacattcacaagtgtgccgccgtcaccgagcgtgtccttgcagcatgctacaaggctttgaatgatcaccntgtccttcttgagggtaccctattgaagccnaacatggtcacccctggntcccaatctgctaaggtttcccctcaggtggttgccgagcacactgtcagagcccttcagagaaccgtgcctgctgcagttcctgctgtcgttttctngtctgg

SEQ ID NO: 278642 - DNA, 315 bp, Glycine max
  unsure (1)..(315): unsure at all n locations
ctgggaggttttactccttgcttgatccaacatatgctaaggatcacattccaattattgcatctgtctctgancatcagccaactgcttggtcgtccttcatgtttgatttccacatcttgctgttccnnttccctgctggcctctatttttgcttcaagcgtttgtctgatgccacaatctttttagtaatgtatggtcttacaagcatgtattttgctggggttatggttcggttgattcttgtggctacccctgctgtgtgcctcattagtgctatagcggtttctgccactgtgaagaatttggctcggg

SEQ ID NO: 278643 - DNA, 311 bp, Glycine max
taaccatcaagtttcagttccaaacaaaacccatcaaagtctttctccctcagtgatcatatattcattcagttctatacaaaatcctcaaaaactcttcctctctgccatgaccatggaatacagaaccttagaactcaacatcatatccgcaaaggacatcaagaatgttaatctcttctccaagatggacgtatacgccgccgtttcgctctccggtgaccctctccaccctcagggcgccaccacccacgtccacaaagacgccggcagcaaccccagtggaataccccgtgaattctctgtcaacg

SEQ ID NO: 278644 - DNA, 305 bp, Glycine max
  unsure (1)..(305): unsure at all n locations
tggtattgctgtngctgcgcttgnccatgctgagtaccattgccaccgganttggccattgatgcatatggtccaatcagtgacaatgctggaggtattgctgaaatggctggtatgagtcacagaattagagagagaactgatgcccttgatgctgccggaaacacgactgccgctatngggaagggatttgccnctggttctgctgcccttgtatcactggccctctttggtgcctttgtgagccgagctgctattacaactgttgatgtgttgactccaaagttttcattggtttgattgtg

SEQ ID NO: 278645 - DNA, 311 bp, Glycine max
gttcataagaatataaagtcggccaacatattgcttgatacagattttaatcctcatctttctgacagtggattggcaagctatattccaaatgcaaaccaggtattaaacaataatgctggatctggatatgaagctcccgaagttggtttgtctggtcattatactcttaagagtgatgtttatagcttcggagttgtcatgttggaacttcttagtggacggaaaccgtttgatagctcaaggccgaggtctgagcaggcgttggttcgagggcaacacctcaatccatgatatcgatgctttggcta

SEQ ID NO: 278646 - DNA, 310 bp, Glycine max
  unsure (1)..(310): unsure at all n locations
cgcatttcctcgttttnttcttcccttttctctntctccggcgacgatctcagattccggccactcctctcgccggcgagcccttactcttccctcctccgtcgagccctctccgattcgaatcgttcccagcctcgcaccaccatgaatcccgaatacgattatnngttcaagcttttgctgattggagattctggtgtaggcaagtcatgtcntctcctgaggtttgctgatgatcataccttgacagctatatcagtaccatggagtggatttaaaatccgcatgtggagcaggatgggangactat

SEQ ID NO: 278647 - DNA, 307 bp, Glycine max
  unsure (1)..(307): unsure at all n locations
tcagacactgctggttctgctcaaacggcttcctccaaaggggaaaaaactcatggttattggcacaacaagtgaactagatttcttggaatcaattggattttgtgatancntctctgttacttaccatattcctaccttgaacacaacggatgcaaagaaggtcctagaacagttgaatgtgtttactgatgaagatattgattctgctgcagaggcgttgaatgatatgcctatcaggaaactatacatgttgatcgagatggcagcgcaaggggagcaggtggatctggcagaagccatcttt

SEQ ID NO: 278648 - DNA, 315 bp, Glycine max
  unsure (1)..(315): unsure at all n locations
caaagattangccatgcatgtgtaagtatgaactaattcagactgtgaaactgcgaatggctcattnantcagttatagtttgtttgatggnatctactactcggataaccgtagtaatgtctancgctaatacgtggcnacaaaccccgncttctngaagggatnnnattnantagatcnaaaggtgcaacacanggctctgcctgttgctttgatgattcatggtaactcgtcggatacncacggccnntgngccggcnacgcatcattcaaatnctncctancaactntcgtggtaagaatagtggccganc

SEQ ID NO: 278649 - DNA, 305 bp, Glycine max
  unsure (1)..(305): unsure at all n locations
gtgatttggaacatgatgggagcccaaaccacagagcaaggggactgttcanagttcaaagcaggcattccacatttctgtaagaaggaccctacagttgtggatttactgccagggactccttacaaccagcagattgcaaattgttgcaaagggggtgtcctaaattcatggggtcaggaccccagcaatgcagtaagttctttccagattagtgttggttctgccggaacaacaaacaaaaccgtcaaaatgcctaaaaattttaccctcaaagcaccgggacctggctatacttgtggtcc

SEQ ID NO: 278650 - DNA, 313 bp, Glycine max
  unsure (1)..(313): unsure at all n locations
gtgttttcctagtcactattcatttccctccagattatcccttcaagccacccaaggttgcattcagaacaaaggtatttcacccaaatanaaatagcaatggaagcatttgccttgacatattgaaggagcagtggagccctgcgctaactatttcaaaggtgttgctctcgatttgttccctgttgacggaccctaatcctgatgatcctttggtccccgaaatagccccatatgtacaagacaganagaaaacaagtacgagtcaattgccagaaggtggacccagaaatatgcccatgggttaagtgnc

SEQ ID NO: 278651 - DNA, 303 bp, Glycine max
  unsure (1)..(303): unsure at all n locations
ctcagacactgctggttctgctcaaacggcttcctccaaaggggaaaaaactcatggttattggcacaacaagtgaactagatttcttggaatcaattggattttgtgataccttctctgttantaccatattcctaccttgaacacaacggatgcaaagaaggtcctagaacagttgaatgtgtttactgatgaagatattgattctgctgcagaggcgttgaatgatatgcctatcaggaaactatacatgttgatcgagatggcagcgcaagggagcaggtggatctgcagaagccatct

SEQ ID NO: 278652 - DNA, 315 bp, Glycine max
  unsure (1)..(315): unsure at all n locations
gcaaagaaaattttattaatagccggtctcttagacatgctcgtgacattcacaggcagattcagggacatgttgaacaaatgggtctgaatctttcttcttgtggagatgatatgcttcaattccggagatgccttgcagcttctttcttcctcaatgcagctgtaaagcagccagatgggacatacaggactttggnaagcggtcaggtggtgcagatccacccttcttctgtattattccggcaaaaaccagagtgtgtgatatttaacgaattggtccaaactaataacaagtatgtccggaatttaacca

SEQ ID NO: 278653 - DNA, 301 bp, Glycine max
  unsure (1)..(301): unsure at all n locations
gtaatggccaccagtggaggcgatgaggggcagaacaaccctgccctcgacccggatttggatgctccggatgacccggatcacgagttcgctgagttcgggtcgggttgcttctggggtgctgagttggcctttcagcgagttgtgggtgtggtgaagactgaggttggttacactcagggtcacactccggatccgaattacaaactggtttgcaccggaancactaaccacgttgaatggttcgggtccattcgacccgaagtttgcccctacaatgatctactcgctctcttttggg

SEQ ID NO: 278654 - DNA, 300 bp, Glycine max
aacaaaataaagaaggtcaagtgccctgtacttgtaatacatggtacagaagatgatgttgtcaattggttacatggtaatggactttggaagatggcaagggagtcatatgaccccttgtggatcaaaggaggtggtcactgcaacttagagctttaccccgattacatccgccatctttgcaaatttatccaagaaatggagagcatgacaactgagaagcgcctcaaaaagattcggcaaagtgcaaaccatcaaagtcaaacactggttgcacctgtagtagatgctgtagagtga

SEQ ID NO: 278655 - DNA, 298 bp, Glycine max
gtgaaagatgcctattgtctgctgaattttggtgacagtataacgaccgatcacatttctcctgctggaaacattaacaaggatagtcctgctgcaaagtaccttctggatcgaggtgtggaacaaaaggacttcaactcttatgggagtcgtcggggcaatgatgaagtgatggcaaggggaacttttgccaacattcgtcttgttaacaagctcttgaatggagaagttggtcccaagacagttcacatccgaccggggagaagcttatgtgtttgatgcagcccagagatacaag

SEQ ID NO: 278656 - DNA, 293 bp, Glycine max
  unsure (1)..(293): unsure at all n locations
ctgaaagaggtgaagctgcgtgatggatactatgtaatggaccctgaaaaagcagtggaaatggtggatgagaacaccatttgtgttgctgctatccttggttccactctgaatggagagtttgaagatgtcaaactcttaaatgatctcctggtggaaaagaataaggaaactggatgggacactccaattcangtggatgctgccatgggggattcatgcaccttttctttatccagagcttgaatgggacttcggttgccattagtgaagngcatcaatgttagtggacc

SEQ ID NO: 278657 - DNA, 293 bp, Glycine max
  unsure (1)..(293): unsure at all n locations
gctcgccctcgcattgatttctcttcggnnttngctctggtcaaccctatcgttgaccacgttcgcgaaanangcgatgctgctgtcaaagaatacacattgagatccgacaaagctgaattggataacatcgttgaacttgtctccgaccntcctgatccacaactcgatgcgcatgttaaggaagcttttgatgtcgcctacaacaatatatatgccttcatgctgctcagaagacacccgagagaaatgttgaaaatatgaaaggagtccatgcaagcgattgcagaagt

SEQ ID NO: 278658 - DNA, 298 bp, Glycine max
  unsure (1)..(298): unsure at all n locations
caaaggactaccatgatcctcctccagcaccgttgattgatgctgaggaactcacacagtggtccttctacagggctttgattgctgagttcattgccacaatgctcttcctttacatcacantgctcactgtgattggttacaagagccagagtgatgaaaggctgggggtgatgtgtgtggtggagttggcattcttggcattgcttgggcctttggtggcatgatcttcatctggtgtactgcactgctggaatctcagggggtcacataaacccagcagtganattgggctctt

SEQ ID NO: 278659 - DNA, 293 bp, Glycine max
  unsure (1)..(293): unsure at all n locations
ctcgacgtcgcaaacaacatgctacaaggcccctgccgcgccnncctggccgacctctgcgccggagaccaccggaaaacgcgaaacgccaacgccttcttctccttcttcatggccgtcggaaacgtcctgggctacgccgcgggctcttacgcggccnccacaacgtnttccctttcactaaaacaaaagcatgtgatgtttactgcgcgaatttgaagagttgtttcttcctctccatcgcgcttcttctcactctctccacaatcgccttgacctacgtgaaggagaaa

SEQ ID NO: 278660 - DNA, 287 bp, Glycine max
gaacgcctatggcttggctagttacgctgtcatatgccaggagaatggcctggttcccattgttgagcctgagatccttgttgatggacctcatgacattcacaagtgtgccgccgtcaccgagcgtgtccttgcagcatgctacaaggcttgaatgatcaccatgtccttcttgagggtaccctattgaagccaaacatggtcacccctggatcccaatctgctaaggtttcccctcaggtggttgccgagcacactgtcagagcccttcagagaaccgtgcctgc

SEQ ID NO: 278661 - DNA, 278 bp, Glycine max
atcggctcattgatgatatggtggcgtatgcacttaagagtgaaggaggttatgtatgggcttgcaaaaactatgatggagatgtccagagtgatttcttagctcaaggttttggatcactaggtttgatgacatctgtattggttgccctgatggaaagactattgaagcagaagcagctcacggcacagttacccgtcatttagggttcatcagaagggaggtgaaaccagcacaaatagctagcatccatcttgccggacaagagggctagccca

SEQ ID NO: 278662 - DNA, 274 bp, Glycine max
  unsure (1)..(274): unsure at all n locations
aattttggaaagncattcctccanatgaancatatccgtgtgctactgggtgaagtaaggaataggcnttaccagactcgtgaacgntcacgccatttgctagctcacggatactctgacattccagaggaagagacttttacaatgttgangagttctggaaccccttgaactctgttacagatcactctgtgcttgtggcgatcgtgtcaatgncgatggaagccttctagatttctgagacaagtctctatntcggactctccctagtgag

SEQ ID NO: 278663 - DNA, 275 bp, Glycine max
  unsure (1)..(275): unsure at all n locations
gttgtttcctgtgntgatatcctcgntcnctctgccagnncatggcattntttcgctaggaggtccccatatccctcttaaaacaggaagaagggatggtagaaggagcagagccgatgtggtanagcagttcctcccagaccaaatgaatccatttctgcagttcttgacaagtttggtgccatgggaattgacacccccggcgtagttgcattgcttggagcncacagtgttggtcgaacccatgtgtgaattggtgcncgtttgtacccaga

SEQ ID NO: 278664 - DNA, 289 bp, Glycine max
  unsure (1)..(289): unsure at all n locations
cttctccttctctctgagaacaacaccccacactcctctctcnctctccgcttccttctcttctcacncctccatggcccacacttncccttccctccgccgatgccggcatggacgncgtccagcgccgtctcatgttcgaagacgaatgattttggtggatgagaatgaccgtgtggttggtcatgattcaaaatacaattgtcacttgatggaaaagatgaagctgagaattgctgcatagagctttcagtgtatcctgttcaattcaaagtatgagttgcttctt

SEQ ID NO: 278665 - DNA, 272 bp, Glycine max
  unsure (1)..(272): unsure at all n locations
gtgcctatntatcatgattggtccaggcantncattanctcctttcaggggtttcttgcaggaaagattagctcctgaaaggagggggagctgaacttggcccttcagttttattctttggatgcaggaaccgtcaaatggatacatctatgaagacgagttgaatcacttcgttaatactggtgcactttctgagctcatcttgcctctctcgagagggacccaccaagcgtatgtacaacataaatgatggagaaggcttcagaatttgg

SEQ ID NO: 278666 - DNA, 289 bp, Glycine max
  unsure (1)..(289): unsure at all n locations
ctcggcatgtgcnaccctntcctcgacatctctgccgtcnnccccgacgctttcttgcaaaaatacggtatcaagttgaacgatgcgattctcgctgaggatangcacaaacctatgtatgaagaattggctaacaatcctaatgtggatacattgctggaggtgctactcagaattcaatcagggttgctcagtggatgcttcaagcaccaggtgccacaagttacataggttgcatagganaggacnnatttggagaggagatgaagaagaaatgtncattgctggt

SEQ ID NO: 278667 - DNA, 283 bp, Glycine max
  unsure (1)..(283): unsure at all n locations
gcacgcacgcattctgtgtgttgtggtttctctgagttccgagtggactcagttacggagcaataatgagtcaggaatcgtttatatatancttcgtggctcgtgggacgatggtgttggctgagtacacggagttcactggaaactccctgccattgcagcncantgtcttcagaagcttccatcttccaacaacaagttcacttacaactgtgaccaccacacctcaatttcctagttgaagatggttatgctactgtgttgttgccaaggatctgttagc

SEQ ID NO: 278668 - DNA, 284 bp, Glycine max
  unsure (1)..(284): unsure at all n locations
cnggaactcgtttctaccttcacttcgcacatctcgaaccctcnctttccggcaactagnctaaagttcatccaatggcaggtcgtggcaaaaccctaggatccagcgccgccaagaaggccacctcaaggagcagcaaagccggctccaattccccgtcggccgtatcgcccgtttcctcaaggccggaaaatacgccgagcgcgtcggcgccggtgctcccgtttacctcgccgctgtcctcgaatatctcgcagccgaggttttggagttggctggaaagc

SEQ ID NO: 278669 - DNA, 269 bp, Glycine max
  unsure (1)..(269): unsure at all n locations
gtccttcacccagcaatgctttggaatgtgattgctgtctttggtttgagctgctgctgctgcgtatctcaataattggttggcttggctctctantgggctgctcaaggcactatgttctgggctctgtntgttctngtcatgattntggncaggaagctttcaaacaactccaaattnaacagtgttgttggacatctgctgnatccgtcaattctagtgccatatcatggatggagaatcagtcataggattcatcaccaacatca

SEQ ID NO: 278670 - DNA, 270 bp, Glycine max
  unsure (1)..(270): unsure at all n locations
gagnagattggggtcgtgctgaattttatcatcctggaaaggaatacaatgttcgtgtggcttcaagatactttaagggccntgannttctagttgatttacaagactatgactactcattagacatgtggagtctggcgcatgtttgctggaatgatatttcgcaaggaaccttttttttatggtcacgacaaccatgatcagcttgtcaaaatagctaaggtgctgggacagatgaactgaagcatatctgaataagtatcactggag

SEQ ID NO: 278671 - DNA, 277 bp, Glycine max
  unsure (1)..(277): unsure at all n locations
ttttcctctgagaagacgtgtcggtagctgaagcattttataagcctccactttcctgaactagttttaacatacaatctttcaagtacacctccccagcttccatttaagaatggagatcactagaataggccaatggttagtctctgatatgtgtactactattactgcagacagaaggggttcctgtgggaatcacttttgttgaaaatgncagtggcaaaaggggctgtttgtttggatgggagtcctccagctttaccacttccacaaggat

SEQ ID NO: 278672 - DNA, 142 bp, Glycine max
  unsure (1)..(142): unsure at all n locations
ctttttacagagctgggatcgcagagtttgtggccacattcttgntcctctacatcactgtcttgactgtcatgggtgtcaacagggcacccaacaagtgctcttctgttggcattcaaggaattgcatgggcttttggtgc

SEQ ID NO: 278673 - DNA, 264 bp, Glycine max
  unsure (1)..(264): unsure at all n locations
ctactgagtttccacattgcataccttaggtcttccgaattcgaagttaatttgcaagatgggttatgaaaaggctcagatcaacattgtggtggttggtcatgtggaccnnngaggaggcaaccaccataacgagctgaagaagcctgttgtggagaaacaagctccagggcatgccatatgagggcatgcacgcacggcctcgggaggggaaccagaaattatgttaacaaaataatctggaaccctaatgtatcagtgtca

SEQ ID NO: 278674 - DNA, 277 bp, Glycine max
  unsure (1)..(277): unsure at all n locations
gttatggtgggngcactgccagctgcgttaacttantactggnggntnangatctccggaaactgcccgttacaccgctctagtacgccangaacacgaagcannctgcagcagatatgtctaaggttctgcaggttgagattaagctgaaccgcagnannnggagcagaaggctaactcatatggcttatttncaaaggagttcctccgtcgtcatgggatgcntctantggtacagcaagcacatggttctgcntganntgcatctatagccaaa

SEQ ID NO: 278675 - DNA, 274 bp, Glycine max
  unsure (1)..(274): unsure at all n locations
gggcacataaatccggcagtgacgttcggtttgtttctggctaggaagctgtccctgacgagagcggtgttctacattgtgatgcantgtcttggagctatctgtggtgctggtgtggtcaaggggtttgaggggaatgcaaggtatgagttgttcaaaggtggagcgaattttgtgagccatggatacaccaanggtgatggcttggagctganattgttggcaccttattcttgtttacaccgtcttctccgccactgatgccagagaaacg

SEQ ID NO: 278676 - DNA, 181 bp, Glycine max
  unsure (1)..(181): unsure at all n locations
gngcttccttaagnnccttagtgctgctccttgcagctctaattctatcccctcaagttcttgcnaactatgagaatnccccagtgtacaagcctcccactgaganaccaccagtttagnngcccccagttgagaagcccctgtntacaanccnccagttgagaagcctccnntttataag

SEQ ID NO: 278677 - DNA, 278 bp, Glycine max
  unsure (1)..(278): unsure at all n locations
tcncctctgagatgacgtgtcggtagntnaagtattttataagcctccaacttttcctgcaaataattttaacatacaatctttcaagtacaccncnccancttccatttaagaatggagatcactagaataggccaatggttagtcttctgatatgtgtactactnttactgcagacagaaggggttcctgtgggnatcactttgttgaaaatggcagtggcaaaaggggctgtttgtttggatggganncctccagcttaccattccacaaggatc

SEQ ID NO: 278678 - DNA, 294 bp, Glycine max
  unsure (1)..(294): unsure at all n locations
ggcgaacagttcctcaagtatccaccacctaaagtnatgcaggtggataagtctgcatggatgactgatgaagaatttgcaagagaaacgattgctggtttaaatccaaatgtcattaagattatagaggagttcccactaagtagcaagctagatactcaagcctatggtgatcatacctgtataatagcaaaagaacatttggagcctaacttaggtgggctcactgttgagcaggctatccaaaacaagaagttgttcatcttagatcaccatgactatctcattccttat

SEQ ID NO: 278679 - DNA, 287 bp, Glycine max
  unsure (1)..(287): unsure at all n locations
cttgcactcctggcgcanatactatggccgtggtgccatccnactttactggaactacaactatggaaaagccggggaagccttgaaggtggatctgttgaaccatccagaatacatagaacaaaacgccactctagccttccaggctgcactctggcactggatgaccccaccagagaagcacctaccatcaccccatgatgtctttgttggcaactggaaacccanaaaaaatgacacattgtccaaaagggtacccggatttggtgccacaataaacttgctct

SEQ ID NO: 278680 - DNA, 286 bp, Glycine max
cgacattcattcatctatggctacccttattgctcccagcaaccactctccccaagaagacgctgaggctcttcagaaaggcttttgaaggatgggggactgatgagaaaactgtcatagtaatattgggtcatagaactgtttatcagaggcagcaaatcagaagagtctatgaggaaattttccaggaggatcttgtgaaacgcctagagtctgagatcaaaggagactttgagaaagccgtgtaccgatggatactagaacctgcagatcgtgatgctgtttt

SEQ ID NO: 278681 - DNA, 277 bp, Glycine max
  unsure (1)..(277): unsure at all n locations
aganaatganagtccttgttttctttgttgctatagttctagcagcatggcattgccatggctcagaccatgaccatgaccatggccacacctaccaaattttccctctgagaatgaaaactggcttgaggtggccactacattccggaggtatcatgccaaagttggaggcttggtgtggaagcacacaacgtcattgactggaaaaccgttcctcaagattgcgagggatatattgggaactacatgcttggcgaacaatatagatcagactccg

SEQ ID NO: 278682 - DNA, 283 bp, Glycine max
  unsure (1)..(283): unsure at all n locations
agcagatgcagcatgcttgcnatgaatgcaagggtactggagaaaccatcaacgacaganatcgcnnccgcacagtgcaagggagaaaaggttgtgcaggagaaaaaagtccttgaagtnattgtggaaaagggaatgcagaacgggcagaagattacattccctggcgaantgatgaagcgccagacacaattactgggganattgtctttgtccttcagcagaaggaacatcccaaattcanaaganaggctgaagatcttttngtagagcacattttgtc

SEQ ID NO: 278683 - DNA, 282 bp, Glycine max
  unsure (1)..(282): unsure at all n locations
gcaaaacatgttcctggaatgctaattctagagattgatgcaccaatttacttgccaatgccagncnatttntagagaaaggatcacaaggtggattgatgaagaagaagaaagaattnaagctacaggggagactagtttgcagtatgttataattgatatgagtgctgttggaaacattgatacaagtggaataagtatgcttgaagaggtgaagaagattacagagagaagagagctacagcttgttttggtcaatcctgtaagtgaagtgatgaagaa

SEQ ID NO: 278684 - DNA, 281 bp, Glycine max
  unsure (1)..(281): unsure at all n locations
ctcattctcattcgttcactgtcacnttaccctatcctaacnttnttcttctctctgntttccttcnncntcgcatcantggantnggacggcgttctcctcggcatgtgcaaccctctcctcgacatctctgccgtcgtcgacgacgctttcttgcaaaaatacggtatcaagttgaacgangcgattctcgccgaggataaacacaaacctatgtatgaagaattggctaacaatcctaatgtggagtacattgctggaggtgctactcagaattcaat

SEQ ID NO: 278685 - DNA, 279 bp, Glycine max
  unsure (1)..(279): unsure at all n locations
gctcgcattccgtggagatctagtgctgccaaacctcgctganaattagggtttcgtttcggaggtagangaagatgttcggaagggcaccgaagaaaagcgacagcaccaggtactacgaaatcctcggcgtntcgaagaacgcttcgccggatgatttaaagaaggcttacaaganagccgccattaagaaccaccctgacaaaggcggtnatgctgagaagttcaaagagcttgctcaagcctatgaggttctgagtgaccctgagaagcgtgant

SEQ ID NO: 278686 - DNA, 280 bp, Glycine max
  unsure (1)..(280): unsure at all n locations
cctcttaagcttgctactgagtttccacactgcataccttancgtcttccgaattcgaagttaatttgcaagatggctaaggaaaaggctcagatcaacattgtggtggttggtcatgtggaccctgaggaggcaaccaccattaacgagctgaagaagcctgttgtggagaaagaagctccagggcatgccatatgagggcatgcacgtacggcctcngaggggaaccagaaaattatgttaacaaaataatctggaaccctaatgtatcagtgtcatc

SEQ ID NO: 278687 - DNA, 277 bp, Glycine max
  unsure (1)..(277): unsure at all n locations
cacaactacaaganagaacttccttataaccaannaccaacaacaactatggcaagttatcagaagcactacgatgatcagggtcgcaaggtcgacgagtatggcaatgttgagaggcaaactgacgaatatggcaacccggttcatgccactagtgtcacttatgtagccaccaaaagtgttggtggctacaatgatgacgctaataagcaatatgatattactggtgtctatcccgagaaagacaccgtncgaatcattttggtcgtggttacga

SEQ ID NO: 278688 - DNA, 273 bp, Glycine max
  unsure (1)..(273): unsure at all n locations
aaaaatccactttggttgttcacttgtatatgtatctcagtctcaggtggtggtgcatcgctgagttctgtgagagtgagaaagagagagtgtgtgtgtgtgcagaagatgtggccattcaggggaaaaggggcttctggtttttcatcatcatccacggcagagcaagtcactgaaggaattgatggaactngtctcnctgccattgtcacaggagcatccagtggtattggcactgagactacacgtgtcctttcattgcgtggtgtccat

SEQ ID NO: 278689 - DNA, 272 bp, Glycine max
  unsure (1)..(272): unsure at all n locations
attggtaggttctgatggtccccttcaatgtggagcatttgatataaactttatgtcatgcttaccaaacatgattgtnatggccccatctgatgaggttgaactcatgcacatggtggctactgctactcgcatcaatagtcagcctatctgctttcggtatccaaggggtgccctggttgggagagggtacactataagcgatggaatccccatcaagataggaagaggaagagttcttgttgaaggcaaagatgttgctttcctaggat

SEQ ID NO: 278690 - DNA, 273 bp, Glycine max
  unsure (1)..(273): unsure at all n locations
gcagggattgagccagatgatgaaatttacaccctagaaagggttacagaagctataanaaaaggcactgggtttnccccagggatagagtgcaatananattnanctcgtaatagtcaactttaccaagtgtacatgtgcgtggacacttctgggtcaaatctcattgagtgccctgtgcntccaaggagcagatgtggngaacaaattcaattccccaaatnttaagaagaaaatntagttcggtaaaattgacatgtantttccccattg

SEQ ID NO: 278691 - DNA, 275 bp, Glycine max
  unsure (1)..(275): unsure at all n locations
ttcgggaccaccttcgagtgcacgcgccgtgcgagtggtgggaagttcgcgtgcangtcgattccgaagcggaagctgctatgcaaggaggactacgaggacgtgtggcggganattcagntnatgcaccncttgtcggaacacgccaacgttgnccgcatcgaagggacgtacgangattccacggccgtgcacctggtcatggagtngtncgagggnnnagnnttgtttgacaggatcgtncagaagggacactacagcgagagacaggcggc

SEQ ID NO: 278692 - DNA, 280 bp, Glycine max
  unsure (1)..(280): unsure at all n locations
gaaattgagattgttgataaactgatttctgttccatatgttgaaatgactctgaagntgatggagcgttttngagtttctgtggaacacagtggtaattgggataggttcttggtccatggaggtcanaagtacaagtctcctggnaatgcttttgttgaaggtgatgcttcaagtgcnagttatttactanctggtgcagcaantactgnngggactatcactgtnnatggctgtggcacaaacagtttacagggagatgtaaaatttgcngnagttc

SEQ ID NO: 278693 - DNA, 279 bp, Glycine max
  unsure (1)..(279): unsure at all n locations
gngcccncgactggggccccggtggtggacaccgacctcatcgtcgacgacggtggtgangnnacnctnctcatccacnaaggcgtcaangccnaggagcncnatgagaagaccggcgaantcnccgannccaactccaccganaacgccgagctgcagatcgngcttaccatcancagagangggttgaagaccgancccatnaggnancgcaagatgaaggagcgtctcgttggggtntctgaggnnaccancactggagttaagaggctcnatcag

SEQ ID NO: 278694 - DNA, 270 bp, Glycine max
  unsure (1)..(270): unsure at all n locations
tgttcttcgtttgctaccttctcccagaantggttacgttcaggtttcaccngtaccaggtggtcgggagggctctcccaacggaagcagatcagcatccgaagatctaccgaatgaagctctgggccaccaacgaggttcgcgccaagtctaagttctggtattttttgaggaagctgaagaaggtgaagaagagcaatggtcaagttcttgctatcaacgagatttttgagaagaacccaaccaagattaagaactacgggatatggt

SEQ ID NO: 278695 - DNA, 275 bp, Glycine max
  unsure (1)..(275): unsure at all n locations
ccaggcgaagaaatcgaaggaggatttgaaggaagtnacccacaaggtttactttgatgttgagattaatggaaaagaagcaggtcgtattgtgatgggtctttttggaaaggctgttccaaaaactgcagaaaactttcgagctctttgcactggggaaaagggaactggtaaaagtggcaagcctctccattacaaaggtagctcattccatagaattattcctagctttatgctccaaggaggtgattttacacatggcaatggtatgggtg

SEQ ID NO: 278696 - DNA, 268 bp, Glycine max
  unsure (1)..(268): unsure at all n locations
cgccatttctttcacaggccctcaaaagcatacacgactggaacaangaaaagaagaaaggttcacactgatgatgaaggaattgaaacaagatggcacaaaacgggaaaaactagagctgcaaatgcatctggtggtgcagtaaaaggttttaagaaaatactagtactctacaccaactatggaaggcaaaagaagcctgagaaaactactgggtgatgcatcaataccatcttggcaatactgaagaagagaaagatggagaact

SEQ ID NO: 278697 - DNA, 278 bp, Glycine max
  unsure (1)..(278): unsure at all n locations
atagtatggcacaatctagtggcaaaaaattggttgagtggctggttgcagcattattgttcattgccttgttgagtggtantgcacangctgttgcaatatgtaacattnactcaagtcaactgaacttgtgtcgtgctgcagttactggtcaaaaccctccaccacctgatgagaaatgctgtgcagttattcgccaggccaatttgcgttgcctcttcagttacaagtctatcctaccttcatttggaattaaccccaaaaatgctttggccttg

SEQ ID NO: 278698 - DNA, 276 bp, Glycine max
  unsure (1)..(276): unsure at all n locations
cttcctcaccgattgcnagantggaatttcgatgctcagtcatctctttnaccattctctncctctcttgctcttgcaggagagagccatgtccatgcatcgctacctgaggaagattattgggaagctgtttggccaaacactcccattctcactgcactgcgagagcttctaaagcctctccctgcaggtgttgaaatcgatgaactccctaagcaaattgatgatacacagtacccaaaaanattcttctataaagaagaccttcatccaggc

SEQ ID NO: 278699 - DNA, 202 bp, Glycine max
  unsure (1)..(202): unsure at all n locations
tcaattctccattncnantntctctcncacttntcaagaatcgtaagctatgggaaagacttanccaactntgagtgcngantancagaaggncgtngngnaggcgaagaagatgctcanaggcttcatcgctgagaagagatgcgctcctctaannctccgnttagcatggcacnctgntggaaccnttgacaagggnacg

SEQ ID NO: 278700 - DNA, 266 bp, Glycine max
  unsure (1)..(266): unsure at all n locations
cagaagaacaagtagttgagaactaagaaggagaagcaaatggnttcctcaatgatctcttccccngctgttaccactgtnaaccgtgccggtgccggcatggttgctccattcactggcctcaagtccatggcttgcttccccnccaggaagaccaacaatgacattacctccattgctagcaacggtggaagagtgcaatncatgcaggtgtggccaccagttggcaagaagaagtttganactctttcctacctgccagacct

SEQ ID NO: 278701 - DNA, 298 bp, Glycine max
  unsure (1)..(298): unsure at all n locations
tngtcaacattctgtatgcngaaaatggacctgattttngagcagccagtnatggggatggtgatagaaatatgattttaggaagaagtttcttgtaactnccttcagactctgtagcagttattgcagccattgcaaganaagcgattcnatacttcaagaacggagttaagggtcttgctcgatcaatgccaacaagcggtgctctggaccgtgttgctaaaaaattgaacctccctttctttgaggtccccactggttggaaattttttgggaatcttatggatgctgggaattt

SEQ ID NO: 278702 - DNA, 298 bp, Glycine max
  unsure (1)..(298): unsure at all n locations
atttccctacctctcccttcaagatgcagatcttcgtcaagaccctcaccggcaagaccatcacccttgaggtggaaagctctgacaccatcgacaacgtcaaggccaanctccaggacaaggaaggaatccccccggaccagcaacgtctcattttcgccggaaagcaacttgaggacggccgtacccttgctgactacaacattcagaaggagagtactcttcacctcgtcctccgtctccgtggtggcatgcagatcttcgttaagacactcaccggcaagaccataaccctaga

SEQ ID NO: 278703 - DNA, 294 bp, Glycine max
  unsure (1)..(294): unsure at all n locations
caattattctttngcaccttcgaaaatcaattttntgtcttctctggcgtctncnnnctctatnagtngnnntccatggntcgtncccangcaaacncnctcgcaaatncaccggtggaaaggctcctaggaagcaactcgcnaccaaggctgcaaggaaatctgcaccgacaaccggtggagtcaagaagcctcatcgctatcgccctggaactgttgctcttcgtgagatccgaaaataccaaaagagcacagagcttctgatccgcaagctccccttcnagcgtcttgttc

SEQ ID NO: 278704 - DNA, 284 bp, Glycine max
  unsure (1)..(284): unsure at all n locations
gctcccaagggtttaacctttctggctgtgttaatatgcgtttcagcactgtcactgagtccttctgttgcgggggaagggcaaaataatggccntgttatgaacttctacaaggaatcangccctcaggctgaagacatcatcacagaacaagtcaagcttctctacaagcgccacaagaacactgctttctcctggctcaggaacatcttccatgactgtgctgttcagagttgtgatgcttcactgttgctggactccacaagaaggagcttgtctgagaa

SEQ ID NO: 278705 - DNA, 288 bp, Glycine max
ctccttgggaggatgctttacatggctccttcagatggaaaatggggcgaacacgagttggattacctcctgttcatggttcgtgacgtgaagctcaacccgaatcctgaacaggtggccgacgtcaagtacgtgaaccgcgatcagctgatggagctgctcaggaaagctgatgctggggaagatggcgttaagatgtccccttggttcaggctggtggtggacaacttcctcatgggctggtgggatcatgtcgagcaagggactctgcagggggcagcggacatg

SEQ ID NO: 278706 - DNA, 283 bp, Glycine max
  unsure (1)..(283): unsure at all n locations
tagaatggaatttcgatgctcagtcatctcttttaccattctctnctctcttgctcttgcaggagagagccatgtccatgcatcgctacctgaggaagattattgggaagctgtttggccaaacactcccattcccactgcactgcgagagcttctaaagcctctccctgcangtgttgaaatcgatgaactccctaagcaaattgatgatacacagtacccaaaaacattcttctataaagaagaccttcatccaggcaaaacaatgaaagtacaattcacc

SEQ ID NO: 278707 - DNA, 280 bp, Glycine max
  unsure (1)..(280): unsure at all n locations
ccaatcgtagccgtcgcactctgtgttttcancgccgtctccgatctccgacaatggcgacccaaatgagcaagaagagaaagttcgntgctgatggagtgttcttcgctgaactgaacgaggttctgacaagagagttggccgaggacggttactccggcgtggaagttagggttacgccgatgcgcaccgaaatcataattagagccaccagaacccaagctgttctcggtgagaagggaaggagaataagggaacttacctctgtggttcagaagag

SEQ ID NO: 278708 - DNA, 181 bp, Glycine max
  unsure (1)..(181): unsure at all n locations
gcgaaactcganagtgtaaggnttngcattncanttgacgaagagtgagagagtctnatctgtcgngctctgatntnngatcgcatcntcattccganaatggctgtttcggctatcactggagcgaggctaactctagggangtctctnncctcttccacacaacatacgagnntcntcg

SEQ ID NO: 278709 - DNA, 275 bp, Glycine max
  unsure (1)..(275): unsure at all n locations
tccgaactcgctcacggcgctaacaacggtcttgacatcgctgttaggcttttggagccactcaaagcggagtttcctattttgagctacgccgatttctaccagttggctggcgttgttgccgtngaggtcaccggtggacctgaagttcccttccatcctggaagagaggacaaacctgagccaccaccagagggtcgcttgcccgatgccactaagggttctgaccattgagagatgtgtttggcaaagtatggggcttagtgaccgagata

SEQ ID NO: 278710 - DNA, 248 bp, Glycine max
  unsure (1)..(248): unsure at all n locations
ctttttgtttcttcagtttggtataaccttagagngggtanngaggagcactagctagtttcacaatttcanaatggctaggggattgaagaagcatctcaagaggctcaatgctcctaagcattggatgcttgacaaactgggtggtgcatttgcgcccaaaccctcatctggaccacacaaatctagggagtgccttcccctcatacttcatcctnacgaaaccggcttaaagtatgtctgactta

SEQ ID NO: 278711 - DNA, 283 bp, Glycine max
  unsure (1)..(283): unsure at all n locations
tttgttcttctaccttattttctttccctagtcaaggagattcatctctgcagcaggttgttttagaaaagaaaaaatnctgaagatttgctgcattggggctggatatgtggggggtccaacaatggcagtcattgcactgaaatgcccctcaattgaagtggctgttgttgacatctctaaatccaggattgcagcatggaacagtgaccagctccctatctatgagccaggccttgatgatgtggtgaagcaatgtcgtggcaagaaccttttcttcagc

SEQ ID NO: 278712 - DNA, 282 bp, Glycine max
  unsure (1)..(282): unsure at all n locations
caattttcacattctttgtattgagttacttgagctagccgcaaccatggaaccatccaaaaactcgcanaagccctcacatttccatgactacctccccgtgatggcgaacaagctcggcggggacggcctcatcgatgagctctgcaacggcttcaacctgctcaaggactccgacagaggggtgataacctttgagagcctcaagaggaacgctgctctgctgggcctgcaaggactcggcgatgaggaccttcggtcgatgctcgggcagggtgattt

SEQ ID NO: 278713 - DNA, 273 bp, Glycine max
  unsure (1)..(273): unsure at all n locations
acgcaccaaccgaggccacaggccaccaccattccttccttgttccttccccanctccgcaggctgctcatcgccctccctccgcgcccccgatccagatccagatccaggggctgtcatggcatccaaacgtatcctcaaggaattanaggacttgcaaaaggaccctccaacatcatgcagtgcaggtcctgctggtgaggatatgttccactggcaggcaaccatcatgggtcctcctgatagtccatatgctggaggtgttttcttggt

SEQ ID NO: 278714 - DNA, 279 bp, Glycine max
  unsure (1)..(279): unsure at all n locations
attggatatgctcttgtccctatgattgctaggggagtgatgctgggtcctgaccagcccgtgatcctccacatgcttgacattcctccagcagcanagtcatggaatggggttaaaatggaattggtggatgctgcattccntcttcttaaaggtgttnttgctacaaccgatnnggttgaggcatgcactggggtcaatattgcagtgatggttggtggattccctagaaaacaaggtatggagaggaaggatgtgatgactaagaacgtctccatt

SEQ ID NO: 278715 - DNA, 273 bp, Glycine max
ctggatgccattgaaggagaaagaagactcttcattcgtagtgatgaactggatgctgcttggtcactctttacacctgtactgaaggagcttgaagagaagaagataattccagagtactatccttatggtagtaggggtcctgttggtgctcactatcttgcagccagacacaacgtgcgatggggtgaccttgggacagacgtagaccattaaccctcgcattttgttgcacttctgatcggcctaagatgttagctattatgcatgcta

SEQ ID NO: 278716 - DNA, 282 bp, Glycine max
  unsure (1)..(282): unsure at all n locations
cgtgcaaccattgatactaaagccagacataactgctcctggtgtgaacgtaattgctgcttttacacaaggagctggtccgtctaatcttccatcggatagacgccgatctcttttcaatgtgcaacagggaacttctatgtcttgccctcatgtcgctggcattgcaggtctnctcaaaacatatcatcctacttggagtccagcagctatcaaatcagctattatgaccacagctacaacactagataacaccaatcaaccgattcgcaatgcatttca

SEQ ID NO: 278717 - DNA, 274 bp, Glycine max
  unsure (1)..(274): unsure at all n locations
gaaacaccctgcatggattcacttaaaaagggtgctcctgaacggtggagattggtcagggctcatggtactgctgtaggacttccaacagaagatgacatgggcaatagtgaagttggtcacaatgcccttggggctggtcgcatatttgctcaggnngctaagcttgtcgaccttgctctagcctctggaaaaatttttgaaggcgcaggtttcaagtacataaaggaatgttttgaaaatggcacattgcatctcattgggctactgagtg

SEQ ID NO: 278718 - DNA, 264 bp, Glycine max
  unsure (1)..(264): unsure at all n locations
atagaatttgtgaagtcagtccaaacttcagtttcaaagatgcctcgtggaacgcttgaagttgttctgatcagcgccaaaggaatcgatgacaatgattttctctccagcatnagtccttatgtgattctcacatacagggcacaggagaaaaagagcactgtgcaagaagatgctggatccaagccacaatggaatgagagctttcttttcactgtctctgacagtgcatctgaactaatctaaagataatggataaagaca

SEQ ID NO: 278719 - DNA, 260 bp, Glycine max
  unsure (1)..(260): unsure at all n locations
gtgataagtcgatgattaagaagcgatacatgtacttaaacnaagagatcctgaaggagaatcccagtgtttgtggcatatatggcaccttcgttggatgcaaggcaagacatggtggttatggaggtaccaaagttgggaaaagaggctgcaactaaggcaatcaaggaatggggtcaacccaagnccaagattacccatctcatcttttgnaccactagtggtgtcgacatgctggtgctgattatcagctcactaaa

SEQ ID NO: 278720 - DNA, 262 bp, Glycine max
  unsure (1)..(262): unsure at all n locations
gatgacgagaatgccacgcaaattagaagtgaaaacgaggcgaaggctgcagctaaganaatatttcanaatgttgctagacgcgggtgcaggtatatatacccggatgacttgatgcgctttatgcgagaagatgaagctgcaaaaaccatgaatctctttgaaggagcgtctgaagctgagagaatcagcaaatcggccttgaagaactgggtgtgtatttaacaaanctcagctggaaggggntgtagaagccaattca

SEQ ID NO: 278721 - DNA, 260 bp, Glycine max
  unsure (1)..(260): unsure at all n locations
gacaagcctctaaggcttccattgcaggatgtctanaanattggtggtattggtactgtgccagtgggactntagngactggngttgtgaagcctggtatagtggtgacttttggtcccactgggctgacaactgaggttaantctgttgagatgcaccatgnggctctcacagaggctcttccaggtgacaatgttggatttaatgtgaagaatgttgcagtcaaggatctcaancgtggtttngttgcatccaactcc

SEQ ID NO: 278722 - DNA, 255 bp, Glycine max
  unsure (1)..(255): unsure at all n locations
ccaacatcggtgctgagttctttgagttgcaacctaaggnaggccttgcccttgtgaatggcactgctgttggttctggcttggcctcaattgttctatttgaagccaacatcattgctgtcttgtctgaagttatttcagcaatttntgctgaagttatgcaaggaaagcctgaattcnctgaccatttgactcataaactaaagcaccaccctggtcagattgaagctgtgctattatggaanacattttgga

SEQ ID NO: 278723 - DNA, 259 bp, Glycine max
  unsure (1)..(259): unsure at all n locations
ctccgcagcagccttcttcgccgtttcagctcaagagccaccancaggtaagatatggttaagcataacaacgttatccccaatgggcacttcaggaaacactggcaaaactatgtgaagacttggtttaatcaaccagcacggaagaccagaaggcgtttagctcggcagaagaaggctgtcaagattttcccaaggcctactgctggacctctcaggccaattgttcatggcagactctgaaatacaacatgaaagt

SEQ ID NO: 278724 - DNA, 259 bp, Glycine max
  unsure (1)..(259): unsure at all n locations
agcagtgcagggaagttggtgtgtgtcaccggtgctgccggttatattgcttcatggattgtcaagttcctacttganacgtggttacactgtcagggccactgttcgaaacccaaatgatcacacgaaggtagaacatttgctaaaacttgaaggtgcaaaggagagactgcacctttttaaggcagatcttttgggtgaaaattcttttgactccattgttgagggctgtgaggcgtctttcatactgcttctcctt

SEQ ID NO: 278725 - DNA, 257 bp, Glycine max
  unsure (1)..(257): unsure at all n locations
tttatcaatgacaggtttgggcattgttgagggtttgatgaccactgttcattccatncaccgctacccagaagactgttgatggaccatcagncaaggactggagatgtggaagagctgcttcatttaacatcattcctagcagcactggagctgccaaggctgttgggaaagtcctccctgctttgaatggaaaattgactggtatggcattccgtgttcccaccgtggattctctgttgttgacctcacagtga

SEQ ID NO: 278726 - DNA, 255 bp, Glycine max
cggtttctgacgtagctgcctatataaaagccgggttctatgacattggtattggggctggactggagtctatgacagtagatcgtgtgaataggcttcccaacattaacccaaaggtagagacctttgcagaagcccgggattgtcttcttccaatgggaatcacttctgagaatgtagcacaacgttatggtgtgacaaggctagagcaagatcaggctgctgttgagctcacaagcgagctgcagctgcaac

SEQ ID NO: 278727 - DNA, 254 bp, Glycine max
  unsure (1)..(254): unsure at all n locations
cttttcttctctctcaacaacntcaccngtcttcctcctngatcatgtccnacttcaagggcnagtaccatnntgagntgntctnctatgctgcgtacntcnncactcctggaaagggtatttcttgctgctgacgagtcaacagggacaacgggcaagcgttnggncagcatcagagtagagaacattgaatccaacaggcgagctcttagggngcagnctttcactgcccnngtgtncttcaatatctcant

SEQ ID NO: 278728 - DNA, 257 bp, Glycine max
  unsure (1)..(257): unsure at all n locations
cgatgatcaccctatgcaaattgaaganacacagtacccgaaaaccttcttctataaagaagaccttcatccaggcaaaacaatganagtacaattcagcaagcctccctttcaacaaccatggggtgttggtacatggttaaaggaaattaaagacactactaaagaaggatatagttttgaagagctatgcatcaagaaagaagccattgagggagaagagaagttttgtgcaaaatccttgggaacagtaattg

SEQ ID NO: 278729 - DNA, 246 bp, Glycine max
  unsure (1)..(246): unsure at all n locations
tatcgctgtggttttcatcgtcttccttctcttatattnctttttttttgtngtcttcgccgnangcngaaacaatgggccggaaaaggagagggncctgctatcggaatcgntctcggaaccacctactcttntgtcggtnngtggcaacatgaccgngttgaaatcatcgccaacgaccaagggaacagaacgacgccgtctnacgtcggnttcactgatccgagngtctcatcggtgatgcgg

SEQ ID NO: 278730 - DNA, 198 bp, Glycine max
  unsure (1)..(198): unsure at all n locations
tagtgcctccttgccagaagttaaaatggcccaagaaactttcctattcacatctgaatnagtgaacgaggggcaccctgacaagctctgtgaccagatctccgatgctgtgctcgatgcatgcttggagcaggaccctgacagcaaggttgcctgtgaaacctgcaccaagaccaacatggtgatggttttcggaga

SEQ ID NO: 278731 - DNA, 255 bp, Glycine max
  unsure (1)..(255): unsure at all n locations
atntcgtttgttctcactaactattacttcatcatgtcgtcgagcacagttggtcaagtcatcaaatgcaaagctgcggtttcatgggaggcagggaagccacttgtgattgaagaagtagaggtggcaccaccacaagctggtgaagtgcgtttgaagatcctctacacctctctttgccacactgatgtntacttctgggaagccaagggccaaactccattgtttcctcgtatatttggtcatgaagctgga

SEQ ID NO: 278732 - DNA, 251 bp, Glycine max
  unsure (1)..(251): unsure at all n locations
ctggatgccattgaaggagaaagaagactcttcattcgtagtgatgaactggatgctgcttggtcactctttacacctgtnactgaaggagcttgaagagaagaagataattccagagtactatccttatggtagtaggggtcctgttggtgctcactatcttgcagccagacacaacgtgcgatggggtgaccttgggacagacgtagaccattaaccctcgcatttgttgcacttctgatcggcctaag

SEQ ID NO: 278733 - DNA, 253 bp, Glycine max
gttggttctgataagtcaccagaacagcgtgccctgcttgtggaatcaaggaggcaggaggttttattcttagataatgagattgccttcaatgaggctattattgaggaaagggagcaaggcattcaagaaatacaacagcaaattggtgaagttaatgagatcttcaaagatcttgctgtgcttgtccatgagcaaggagccatgattgatgatattggctccaacattgagaactcccatgcagcaactg

SEQ ID NO: 278734 - DNA, 249 bp, Glycine max
cggatttcttgcgcggtttatcatgggggatagtcagtattcgttttctctcaccacatttagcccttctggaaagcttgttcagattgagcatgctttgacggctgtcgggtctggacaaacgtctttgggaattaaagctgcaaatggagttgtcattgctaccgagaagaaattgccatctatattggttgatgaagcatcagtccagaaaattcagttataacaccaaatataggtgtcgtatat

SEQ ID NO: 278735 - DNA, 249 bp, Glycine max
aaacaccctgcatggattcacttaaaaagggtgctcctgaacggtggagattggtcagggctcatggtactgctgtaggacttccaacagaagatgacatgggcaatagtgaagttggtcacaatgcccttggggctggtcgcatatttgctcagggtgctaagcttgtcgaccttgctctagcctctggaaaaatttttgaaggagaaggtttcaagtacataaggaatgttttgaaaatggcacatt

SEQ ID NO: 278736 - DNA, 251 bp, Glycine max
cgtcgccacgtggtggaaaggcactgaaaaatactaccaactcatcaagtcggcaccaaaacccagcctcaccctcgctctcggtgcccaaatcctcgacgagaactactcccttggaaaatcactcaccaccgacaacatcgttagtttagcatccaagggtgctcccaatgacgccatcaacgttgttctaacattctcggacgtaaccgttgaggggttctgtccagtaggtgcgggactcacggctc

SEQ ID NO: 278737 - DNA, 247 bp, Glycine max
ccagccacacgcttcagaagacatggcctcattgggtgggttacaaaatgtgagcggcatcaattttcttatcaaagagggtccaaaagtcaatgcaaagttcgagctgaagccgccaccatatccactgaatggtttggagccggtgatgagccagcagacacttgagtttcactgggggaagcaccacaagacttatgtggaaaatctgaaaaaacaagttttgggacagagcttgatgggaagt

SEQ ID NO: 278738 - DNA, 222 bp, Glycine max
  unsure (1)..(222): unsure at all n locations
ctcggcttcttccttcncctcatcaacaacatgacagatcttcgtcaagactttnaccggcaagaccatcaccctcgaggtcgagagcagcgacaccatcgacaacgtcaaggccaagatccaggacaaggaaggtatccctcctgaccagcagaggttgatttttgctggtaagcagctggaagatggtcgcactctgctgattataacatacaaaaggat

SEQ ID NO: 278739 - DNA, 290 bp, Glycine max
accgattgctagaatggaatttcgatgctcagtcatctcttttaccattctcttctctcttgctcttgcaggagagagccatgtccatgcatcgctacctgaggaagattattgggaagctgtttggccaaacactcccattcccactgcactgcgagagcttctaaagcctctccctgcaggtgttgaaatcgatgaactccctaagcaaattgatgatacacagtaccccaaaaacattcttctataaagaagaccttcatccaggcaaaacatgaagtaccaattcc

SEQ ID NO: 278740 - DNA, 288 bp, Glycine max
ggtggtgaattcccaagggaggatgtacactcaaagagttgaaccaaggctggctttggttgaggttgaattgccatctgaggcatttcttgaaaactgggaacctacacaagactcctacatggtggtgaatgcacctgggatgcaacctctcaaaatatgtttgagccaacaagggaaggaggtagcaaatgctgtctcagtatgggaatggactggatctgccttggatgagggagctgaagcatcacagtggttctcagattatttaggaaaaccatgtcaact

SEQ ID NO: 278741 - DNA, 294 bp, Glycine max
  unsure (1)..(294): unsure at all n locations
ggtcagattgaaatatttacctagtctgcttctggtgctatcattacagaagcttttgcatccacatttcccactgtagttgcctatgtagttgatacaccccgttcagaagatcccaccactttcatgagcaacatgttgtatgcttgtagtatcctctataagacaaggttacctctcatcttgacattcaacaaggttgatgtagcagcacatcaatttgcttnngagtggatggaggattttgaggcgttccaaacagcagcaagttcagatcagtcgtacacatcaact

SEQ ID NO: 278742 - DNA, 283 bp, Glycine max
  unsure (1)..(283): unsure at all n locations
ttcttgtatgatggagaagatccagcacagtgaggtggaagnnaaggtactgaagcttcacgtggcagagattggaagtggctccaaaacagtggtattcttgcatggattcccagagatctggtacacatggaggcaccaaatgatttctgtggcaaacgctggttatagggctattgcctttgatttcagaggctatggactttctcagcaaccagcagagcctgaaaaggaaaccatgtttgatctggttcatgaaattgtaggccttttggatgctttg

SEQ ID NO: 278743 - DNA, 286 bp, Glycine max
ggaagaggaaccctagctagggtttggaagaagctgatccgagaagatggtgcagcgtctcacctaccgcaaacgccacagctatgctaccaaatccaaccagcacagagtcgtcaagactcccggtggcaagcttgtttatcagaccacgaagaagagggccagcggacccaagtgccctgtcactggaaagaggattcaagggattccacatttaaggccagcagagtataatagatcaaggttacacagaaaccgaaggactgtgaaccgtgcatatggtggt

SEQ ID NO: 278744 - DNA, 293 bp, Glycine max
  unsure (1)..(293): unsure at all n locations
agatcgagatnactagaaacagtgtgatgaaaatgaaggtccttgttttcttcgttgctacaattttngtagcatggcaatgccatgcgtacgatatgttccctctccgaatgaacactggctatggtgcccgtactccggaggtgaaatgcgcaagttggaggcttgctgtggaagcacacaacatctttggctttgagaccattcctgaagagtgcgttgaagcaacaaaggaatacatccatggcgaacaatatagatcagactccaaaacagttaaccaacaagcttac

SEQ ID NO: 278745 - DNA, 287 bp, Glycine max
  unsure (1)..(287): unsure at all n locations
ggctcgnagttgagagggaataacacacaagaacgnngngaggaagnnacgcganttaagggagaattagggttgccaccagggttcagatgtcaccccactgatgaagaattggtggatcantacttgtgtaggaagtgcgcgggtcanccaatcgcggntcccatcatcnaagaggtcgatttgtanaagtttgatccatggcagcttccananattggctactacggcgaganagaatggtanttcttttctcctcgggatcggaaatacccgaacggttcacg

SEQ ID NO: 278746 - DNA, 287 bp, Glycine max
  unsure (1)..(287): unsure at all n locations
antggncactggcagtgancttatttggacacagtgcaagcnttgcacgcagtgttataaacaaccaacacccatttttnatcccaagaagtcctcttctttttccaaggtttcatgtggtagcagcttgtgcagtgctgtgccttcttcaacatgcagtgatgggtgtgagtatgtttattcatacggtgactattcaatnnnacaaggcgttttggccactgagactttcacttttgggaagtctaagancaaagtttcggttcacaacattggttttggttgtg

SEQ ID NO: 278747 - DNA, 277 bp, Glycine max
  unsure (1)..(277): unsure at all n locations
ctctttcttcctcttcctcagtagtgcgattttcgattctcttctctgcaactatgcctaaccctaaggtcttcttcgacatgnccatcggcggtcaacctgccggccgcatcgtgatggagctctacgccgacgtgactccgagcaccgccgagaacttccgcgngctctgcaccggcgagaagggcgccgggcggagggcaagcccctccactacaaaggctcgtccttccaccgcgtgatcccgaacttcatgtgccagggcggcgacttcacc

SEQ ID NO: 278748 - DNA, 285 bp, Glycine max
  unsure (1)..(285): unsure at all n locations
gaagagcgaagagaatggctcccaagggtttaatctttttggctgtgttatgcttctcagcantgtcactgagtcgttgtcttgcggaggntaatgganttgttatgaacttctacaaggaatcatgccctcaggctgaagacatcatcaaagaacaagtcaagcttctctacaagcgccacaagaacactgctttctcctggctcagaaacatcttccatgantgtgctgttcagagttgtgntgcttcactgttgctggantccacaagaaggagcttgtctg

SEQ ID NO: 278749 - DNA, 283 bp, Glycine max
  unsure (1)..(283): unsure at all n locations
agacgaatacatantcgttggatctgccaatatcaaccaaaggtcaatggatggtgctagggactctgagattgccatgggtgcttatcagccctatcatttggctaccaggcagccagcacgtggtcagattcacggtttccgcatgtcattgtggtatgagcaccttggcatgcttcatgactccttcctccagccagaaagtgatgaatgcattaacaaggtgaaccaagttgctgacaaatattgggatctgtattctaacgagtcacttgagcatgac

SEQ ID NO: 278750 - DNA, 285 bp, Glycine max
  unsure (1)..(285): unsure at all n locations
aagaatcccaggcgangagaaagatggaggggnaggagcangatgtgtcgttgggatcngacaanttccccgatagananccgattgggacggcggcgcagagccaagacgacggcnaggactaccaggagccgtgcgccggcnccgctggttgacccgacggantttacgtcatggtcgttttacagagcatggatagcagagtttgtngccacttttctgtttctctacatcaccgtcttaaccgttatggganctccngggctaagtctaagtgtagtancg

SEQ ID NO: 278751 - DNA, 289 bp, Glycine max
  unsure (1)..(289): unsure at all n locations
gcannacnccantncaaccaccacacctctcntcgttcangctannnaaatnctgctgttcttctacctgtcaagttttgaaagtatanagatggcaganacattcctatttacctcanagtcggtgaacgagggacaccctgacaagctctgcgaccaaatctccgntgctgtcctcgacgcttgcntcgagcagnacccagacagcaaagttgccngcganacatggaccaaaaccaacttggtcatggtnttcggagaaatcacgaccaaggccaacgttgactac

SEQ ID NO: 278752 - DNA, 284 bp, Glycine max
  unsure (1)..(284): unsure at all n locations
ggatgcantttttgctgctgttgaaaccattgcacaaaaagcaaatgttgtcagacctgactggaatggcnctaatgtattgcttctccannctgcccaggctgctgcgcttgaccttggacttgttccacaatctgagaaaagncttgagtctgcaaaatttgtatatttgatgggtgctgatgatgttaacttagacaagatcccagatgatgcttttgttgtttatcaaggtcaccacggtgacaagagtgtttatcgggcaaatgttgttttgccagcag

SEQ ID NO: 278753 - DNA, 279 bp, Glycine max
  unsure (1)..(279): unsure at all n locations
actggtggataacgaaatttcttagacaaaaaacanggatcagnaccgttgaatcaagttgangaagatggcantagtctctggaggaatatcaacactgaaccctaacgcccctctttacattcctgccgcgtttcgccaagtggaggatttctctccggaatggtggcagctggtgacgacgctgacatggtaccatgactactggctaagccagcagcacgatgagggagccttctacggcgaggacgacgggtttgatggcaatgatgtcgttna

SEQ ID NO: 278754 - DNA, 284 bp, Glycine max
  unsure (1)..(284): unsure at all n locations
attgaagaaacacagtacccganaaccttcttctataaagaagaccttcatccangcanaacaatganagtacaattcagcaagcctccctttcaacaaccatggggtgttggtacatggttaaaggaaattaaagacactnntaaagaaggatatagttttgaagagctatgcatcaagaaagaagccattgagggagaagagaagttttgtgcaaaatccttgggaacagtaattggttttgccatttcaaagctgggaaagaacattcaagtactttcaag

SEQ ID NO: 278755 - DNA, 282 bp, Glycine max
  unsure (1)..(282): unsure at all n locations
gctgctttcgcccatttcacccatgaaacaggacatttttnctacatagaanagattaacggtgcatcaggggactactgtnacgagtnctacaccnagtacccatgtncccctaacaaagcgtactatgggcgtggaccaatccaactatcatggaacttcaactacggaccagcagggcagagcatcggatttnatggattgaacgctccagagacggtggccaatgaccctgttgtgtccttcaagacagccttgtggtactggatggaacatgtgcgt

SEQ ID NO: 278756 - DNA, 281 bp, Glycine max
  unsure (1)..(281): unsure at all n locations
aagatcctgaagccaagaagcctnaagattgggatgatgaggaagatggtgagtggacaccccctaccattgccaaccctgattacaagggcccatggaaggcaaagaaaatcaagaaccccaactataaaggaaattngaaggcaccattgattgataacccagatttcaaggatgaccccgacctatatgttttccccaacttgaagtacgtgggcattgaattgtggcaggtgaaatctggtactttgtttgacaatgtcttaattactgatgatcct

SEQ ID NO: 278757 - DNA, 281 bp, Glycine max
  unsure (1)..(281): unsure at all n locations
aaacacccngcatggattcacttaaaaagggtgctcctgaacgntgtanattggtcagggtctcanggtactgctntaggacttccaacagaagatnncatgggcantantgaagttggtcacaatnccctgngggcnggtcgcatatntgctcaggntgctaagcttgtcgnccttgctctagcctctngaaaaatttttgaaggagaaggtttcaagtacataaaggaatgttntgaaaatggcncattgcatctcattgggcnactgagtgattgtgg

SEQ ID NO: 278758 - DNA, 265 bp, Glycine max
  unsure (1)..(265): unsure at all n locations
ggnaatttcgatgctcagacatctcntttaccattctcttcncctcnnggctctngnaggagatnagtcatgtccatgcatcgctacctgaggaagattattgggaagctgtgtggccaaacactcccattcccantgcactgcnagaacnntctaaagcctctccctgcaggtgttgaaatcgatgaactccctaagcaaattgatgatacacagtacccaaaaacattcttctataaagaagaccttcatccaggcaaaacaa

SEQ ID NO: 278759 - DNA, 283 bp, Glycine max
  unsure (1)..(283): unsure at all n locations
tcagattgagcatgctttgacggctgtcgggtctggacaaacgtctttgggnattaaagctgcaaatggagttgtcattggctaccgagaagaaattgccatctatattggttgatgaagcatnagtccagaaaattcagttattaacaccaaatataggtgtcgtatatagtggcatgggtcctgattttcgagttttggttcggaaaagcaggaaacaagccgagcagtatcaccgtttatataaagaaccaattcctgtcactcaacttgtcagggaagt

SEQ ID NO: 278760 - DNA, 281 bp, Glycine max
  unsure (1)..(281): unsure at all n locations
tcganccgttnttcttcttcttcaagactgcnacgacgatccanntnatagacactcgtcncgatggaacgtgtagctgaatccgngcgaactctgtacccatncgngactggatcctctgtagtcgcnatcaaatacaaagatgggattctaatngccgctgacatgggaggttcgtatggatctnccctgcggtacaagagtgttgagcgtntcaancctatgggaaagcattctctgcttggtgctagcggggagataagtnncttnnaggagattct

SEQ ID NO: 278761 - DNA, 294 bp, Glycine max
aagaaagtaggatacaaccctgacaagattccttttgttcctatctctggttttgagggagacaacatgattgagaggtccacaaaccttgactggtacaagggtccaactctgcttgatgcacttgaccagattagtgagcccaagaggccctctgcaagcccctcaggcttccccttcaggatgtgtacaagattggaggtattggaactgtgccagtgggacgtgttgagaccggtgtcttgaagcctggaatggtggtgacttttgcaccaactggactgacaactgaag

SEQ ID NO: 278762 - DNA, 288 bp, Glycine max
  unsure (1)..(288): unsure at all n locations
caaaganggcgtcttcataaacgcctttcttctccgtttccgtttcctcgtnccganttcgcnttttgatctggcganaatnagagattgcatctcgatnaacattggtcaggctggtatccaggtcggaaatgcttgctgggagctctactgcccgagcacggcatcgggcccgatgggcaaatgccaagtgacaagacagttggcggtggtgatgatgctttcaatactgtcttcagcgagactggtgctggnnagcacgtgccacgtgcagtgtttgtagatctt

SEQ ID NO: 278763 - DNA, 215 bp, Glycine max
  unsure (1)..(215): unsure at all n locations
ttaaccatgagagtntcttgcacgttcagggaggccaatgcngtaaccanatcngttccaagttctgggangtgatctgcgagagcacggcatcgatcccaccggaaagtacaacgaggaaggcaacagcagcatccaactcgaaaggatcaatgtgtattacaacgaggcctctggcgggaggtacgttccccgtgccgtgcttatggatctcg

SEQ ID NO: 278764 - DNA, 273 bp, Glycine max
  unsure (1)..(273): unsure at all n locations
ttcggcttgacatgagtnaattcatggaaaggcacactgtctccaaacttattggttcacctcctggatatgttggttacactgaaggtggtcaattgaccgaggcagttcggcgtcgtccttacactgttgtactgtttgtgagattgagaaagcccatcctgatgtgttcaacatgatgcttcagatcctggaagatggaagactaacagacagtaagggcagaacagtggatttcaagaacacacttcttataatgacatcaaatgttgg

SEQ ID NO: 278765 - DNA, 282 bp, Glycine max
  unsure (1)..(282): unsure at all n locations
ttggggacgaggctcaatccaagangggtattttgactctcaaatacccanttgagcatggaattgtgagcaattgggacgacatggagaagatctggcatcacactttctacaacgagcttcgtgtggctcctgaggaacaccctgtgttctcaccgaggcacctcttaatcctaangntaatcgtgagaaaatgactcanatcatgtttganaccttcaacacccctgctatgtatgtngctatccaggccgtgctttccctttatgctagtggccgtac

SEQ ID NO: 278766 - DNA, 282 bp, Glycine max
tatagtaaaaaaaggacattcattcatctatggctacccttattgctcccagcaaccactctccccaagaagatgctgaagctctcagaaaggcttttgaaggatggggaactgatgagaacactgtcatagtaattttgggtcatagactgtgtatcagaggcagcaaatcagaagagtttatgaggaaatttaccaggaggatcttgtgaagcgcctagagtctgagatcaaaggagactttgagaaagccgtgtaccgatggatactggaacctgcaga

SEQ ID NO: 278767 - DNA, 281 bp, Glycine max
  unsure (1)..(281): unsure at all n locations
ctcgctctatttctcagtctctgtgtttgcngctgaggattccgnacgagtgaccttcttcgtttctcgcaaagtttaagtaatcatgggtaaggaaaaggttcacatcaacattgtcgtcattggacatgtcgactctgggaagtcactaccactggtcacttgatctacaagcttggaggtattgacaagcgtgtgattganaggttcgagaaggaggctgccgagatgaacaagaggtcattcaagtatgcctgggtgctcgacaagctcaaagctga

SEQ ID NO: 278768 - DNA, 281 bp, Glycine max
  unsure (1)..(281): unsure at all n locations
tctttctttctcccctanacaaaacatggctttgcccaatcagnaaaccgtcgattaccccagcttcaagcttgtcatcgtcggcgacggtggcacaggaaagacaaccttcgtgaagaggcatctcactggtgaattcgagaagaaattgaaccgaccattggtgtggaggttcatccgttggattttttcacgaactgtggaaagattcgcttctattgttgggatactgctgggcaagagaagtttggtggcctcagagatggatattatatccatgg

SEQ ID NO: 278769 - DNA, 280 bp, Glycine max
  unsure (1)..(280): unsure at all n locations
ggggaccaaaactagtgatgttcaacaccaaaattacacttgctgagaccattgaagcaacaagacaattcgacgaagagaacgtncngagcagaacaaggcatggattagtgttcaaggcctgctacaacgatggaatggtcctttcattcgcaggctgcaanatggatcattggatgagaacatgtttagaaaagaagccgagtcacttggcaaagtcaagaaccgaaatttaacagttctcagaggttactatgcagggccacctgacatgagactc

SEQ ID NO: 278770 - DNA, 285 bp, Glycine max
  unsure (1)..(285): unsure at all n locations
cctaggaggctttgacacatgctacacagtcccaatagtncncacccaccataacattcatgttctcaggcatgaacgtgaccctgccagaggacaacattctcatacacagcactgcgggcagcaccacatgcttggccatggcttcggtccagataacgtgaactcagtgctcaatgtcatagccaacatgcagcaacaaaaccaccgtgtgctctatgacgtgcccaattcaaggcttggagttgctcgtgaactttgcactaaataaaatggttaacacct

SEQ ID NO: 278771 - DNA, 276 bp, Glycine max
  unsure (1)..(276): unsure at all n locations
ctttgttcactcttcttctcttgcggctagggttttagcgcanttcttctagatttaaggaagatgggtaaggaaaaggttcacatcagtattgtggtcattggccatgtcgactctgggaaatccactaccactggtcacctgtttacaagcttggaggcattgacaagcgtgttattgagaggtttgagaaggaagctgctgagatgaacaagaggtctttcaagtatgcctgggtgctggacaaacttaaggctgagcgtgaaagaggaatca

SEQ ID NO: 278772 - DNA, 245 bp, Glycine max
  unsure (1)..(245): unsure at all n locations
ttntttgtttcttcagtttggtataaccttagtccangncacgaggagcactagctagtttcacaatttcnaaatggctaggggattgaagaagcatctcaagaggctcaatctcctaagcattggatgcttgacaaactgggtggtgcatttgcgcccaaaccctcatctggaccacacaaatctagggagtgccttcccctcatactcatcctacgaaaccggctaaagtatgctctgactta

SEQ ID NO: 278773 - DNA, 278 bp, Glycine max
  unsure (1)..(278): unsure at all n locations
tctctgattttgtaattgagttcgatcaaatagctcccagtactttaattgatttctgaatatcatcacttaatttgaaggaaagatggtgagcgtantgagatccgccaggcacaaaggncagaaggcccagcaaccatccttgccattggaactgcaaacccaccaaactgtgttgatcagagcacctatcctgactactacttcagaatcaccaacagtgagcacatgaccgagctcaaagagaaattccagcgcatgtgtgacaagtctatgat

SEQ ID NO: 278774 - DNA, 270 bp, Glycine max
  unsure (1)..(270): unsure at all n locations
attcaatttgcaacctaagtgaggatgcaaaaacaatncacatcatagactttggcatccgctatggcttcanatggcctgcacttatcagccgtctatnaagacgccctggtgggccacccaaacttcggatcacgggatagatgtgccacaacctggtttaagaccacaagagagggtgctcgaaacagggcgcagacttgcaaattattgcaagcgtttcaatcttccatttgagttccatgctattgcacagagatgggacaccat

SEQ ID NO: 278775 - DNA, 155 bp, Glycine max
cttttgtgtggggaattatggtaattgattttgagggtttgactactcatggattatgatggtatgagaaaaccttccaaaaacttatttcactctcgcttcttcctttttgggttctattgctgggattgggagttctgaccgctctcctcctt

SEQ ID NO: 278776 - DNA, 300 bp, Glycine max
  unsure (1)..(300): unsure at all n locations
gtcggcttcggccggtcgatccgggcggaagacattgtcaggtggggagtttggctggggcggcacatctgttaaaagataacgcaggtgtacctaagatgagctcaacgagaacagaaattctcgtgtggaacaaaagggtaaaagctcgtttgattactgatttccagtacgaatacgaacctgaaagcgtggcctatcgatccttagtccntcggaatttgaagctagangtgtcagaaaattaccacagggataanggctgtggcagccagcgttcatagcgacttgcttttgatc

SEQ ID NO: 278777 - DNA, 302 bp, Glycine max
  unsure (1)..(302): unsure at all n locations
ctcaccgtcgagaatttcctcgagcgccgccttcagacgctcgtccttcaaatccgggatggccaagtccattcaccacgccagggttctcatcaagcagagacatatcagggttgggaggcaagtggtgaacatcccatctttcttggtgagggttgactcacagaagcacattgacttctcacttacaagtaccccttggtggcggacgccctggaagagtgaagagaagaaaccaaagggctgctgctaagaaggccgcagtggagaggagacgaggaagacgaggntagactgttcnt

SEQ ID NO: 278778 - DNA, 273 bp, Glycine max
  unsure (1)..(273): unsure at all n locations
gctctcttcttccctgcttcacaatttttattttaatgatactattttgttattgttaagacggcatcatcagggaaatggatcgggtgaaggncccatggagcccagaagaggacgaggctttgcggaggctggttcaggcccacgggcctcgaaactggtcggtgataagcaagtccgttccgggacgatccgggaaatcgtgccgcttacggtggtgcaaccagctnctncgccgcagtggcccaccgccccttctcgccggacgaggac

SEQ ID NO: 278779 - DNA, 296 bp, Glycine max
aagagattgggtggatttacggctcggtcacagaagatattttgactggattcaagatgcactgcagagggtggaaatcagtatattgcatgccaaagcgaccagcattcaagggatctgccccaataaatctatcagatagattgcaccaagttctgaggtgggctctggctctgttgaaatttttcttagtcgtcattgcccgttgtggtatggctatggaggaaaactaagtacctacagaggatggcttacaccaacaccatgtttatccaggactccatccctctgctgca

SEQ ID NO: 278780 - DNA, 311 bp, Glycine max
  unsure (1)..(311): unsure at all n locations
gtttttaatgaagttgaacaatgaaaccgtgtcaattgagctcaagaatggcactattgttacatggcaccattacaggtgttgatatncagtatgaacacacatttgaaaacagttaaactaactctgaaagggaaaaatccagtgactctggatcatctcagtgtgaggggtaacaacatccgttactacattctcctgacagcttgaatctcgagaccctgcttgtggaagagacacctcaagatcaaacccaagaagccaatgctgggganaccttgggacgtggacgagggaagggcctgggcgtg

SEQ ID NO: 278781 - DNA, 306 bp, Glycine max
  unsure (1)..(306): unsure at all n locations
tcaaagatctatgcttacctcttcctctgcatgatctttctctcttccgccactcccattctcggttgtggctactgtggcaaaccccccaaaaagcacaagcctggtaaaacaccaaagacacccaaaacacccgttgttaagccaccagtcaccatcccncccattaatgttcctcccgttgttcttccaccaatagtgaagcccccaggtattctccctccaattccaattattaacccaccaaccacaccagggaagggagggaacatccatgcncaccaccaaagtntcctgcgcagctag

SEQ ID NO: 278782 - DNA, 301 bp, Glycine max
  unsure (1)..(301): unsure at all n locations
cttcctctcccagacaaacacatggctttgccnaatccagcaaaccgtcgattaccccagcttcaagctacgtcatcgtcggtgacggtggcacaggaaagacaaccttcgtgaaaaggcatctcactggtgaattcgagaagaaatatgaaccgaccattggtgtggaggttcatccgttggattttttcactaactgcggaaagattcgattctattgttgggatactgctgggcaagagaagtttggcggccttcagagatggatatatattccaggggcatgtgcgatatcngtttg

SEQ ID NO: 278783 - DNA, 301 bp, Glycine max
  unsure (1)..(301): unsure at all n locations
gtaatgtgcaaaaagattttagctcatggaattaagacattgcatctttatacactaaatatggagaaatctgcattggcaatactaatgaaccttggcctaattgaagagtccaaagtttctaggtccttaccttggagacgccctgcaaatgttttccgtgttncacaagatgtaccgtccaatactttgggncaaatcgaccaaaaagctacatatcaagggaccataggatgggatcaatacccacatgggcgttggggtgattcctgtatccatcatatggtgcntatctgattat

SEQ ID NO: 278784 - DNA, 179 bp, Glycine max
  unsure (1)..(179): unsure at all n locations
ttttgggacanaggtagcaaactaccctgcatgcccaaagccagagttggtgaagggtcttcgtgcacatacggatgcgggtgggattatccttctcttgcaagatgacaaggtcagtggccttcagcttctcaaagatgaccaatgggtggatgtgcctcctatgcgccattccattg

SEQ ID NO: 278785 - DNA, 301 bp, Glycine max
  unsure (1)..(301): unsure at all n locations
gggcgtttgcgtacgcggggtaccaccaactctctgagagggaagtgtgggaactgcaaccgggcaacaagtacttcttcaccaganatcactccaccatcgtcgccttcgccatcggcaaaaagtacgttgctggaaatggattctacataattggggctcacacggatantccttgtctcaaactcaagcctgtcaccaaggttgttaaggctgggattttggaggttggtgtccaaacctatggaggtggtctgtggcacacgtggtttgattcgagactgactgtggcggggaggtc

SEQ ID NO: 278786 - DNA, 290 bp, Glycine max
  unsure (1)..(290): unsure at all n locations
gttatgttggnccgcattttgcggctcttggcttgctacaatatcctttctttttctctccgtactctccctgatggcaaggttgagaggctctatggtctcgcccccgttgctaagtacctggtcaagaccgaagatggtgtctccattgctgctcttaacctcatgaaccaggacaaagtcctcatggaaagctggtactatttgaaagatgctgtcctgaagggggtatccattaacaaagcatatggaatgacagccttgaataccaggaacagatccaggtttaa

SEQ ID NO: 278787 - DNA, 176 bp, Glycine max
atccttcaaatgggtgtggtcctcatgttcggtggccaaatgcccgttatcaaggtggggagaatggcaggtcaatttgcaaagccgagatccgattcatttgaggagaagaatggagtgacgctcccgagttacaggggtgataatgtgaatggcgatgcatttgacgcggcatc

SEQ ID NO: 278788 - DNA, 285 bp, Glycine max
  unsure (1)..(285): unsure at all n locations
tcaaccttaacctctccgataccaccgagaaggtgatcgcagagtacatatggatcggtggatcaggaatggacctgaggagcaaagcaaggactctcccaggaccagttagcgaccctttcagagcttcccngtggaactatgatggttccagcacaggtcaagctcctggtgaagacgtgaagtgattttatacccacaagccattttcagggatccattcagaggggtaacaatatctggttatctgtgatgcctacactctgctggagaacnattcccata

SEQ ID NO: 278789 - DNA, 288 bp, Glycine max
  unsure (1)..(288): unsure at all n locations
ttgctcagtggggatgttgatcagaaganatttggnggggatactccttacagtattatgtttngcccanatatctgcggttacagtaccaagaaanttcacgctattcttacctacaataacacnaaccacttgataaaganggatgttccttgtganantgaccanctactcatgtttacacatttatcctccgtccggatgcaanctacagcatccgattgataatgtggagangcaaacggtantcctactctgatgggacttctccctccaaagacaatcagg

SEQ ID NO: 278790 - DNA, 285 bp, Glycine max
tgacacggggaggtagtgacaataaataacaataccgggctcattgagtctggtaattggaatgagtacaatctaaatcccttaacgaggatccattggagggcaagtctggtgccagcagccgcggtaattccagctccaatagcgtatatttaagttgttgcagttaaaaagctcgtagttggaccttgggttgggtcgatcggtccgcctccggtgtgcaccggtcggctcgtcccttctgccggcgatgcgctcctgtcctaactggccggtcgtgcctcc

SEQ ID NO: 278791 - DNA, 286 bp, Glycine max
  unsure (1)..(286): unsure at all n locations
gnagtctcttcctacttgaagaaggttggttacaacccagacaagattccatttgtggcccatctctggtttcgagggtgacaacatgattgagaggtccaccaaccttgactggtacaagggaccaactctccttgaggctcttgaccaaatcaatgagcccaagaggccctcagacaagccactcaggcttccattgcaggatgtnctacaaaattggtggtatggtaccgtgnccagtgggactgttgagactggtgtnctgaagccggtatggtggtgactt

SEQ ID NO: 278792 - DNA, 282 bp, Glycine max
  unsure (1)..(282): unsure at all n locations
gtcatatgcttgtctcaaagattaagccatgcatgtgtaagtatgaactaattcagactgtgaaactgcgaatggctcattaaatcagttatagtttgtttgatggtatctactactcggataaccgtagtaattctagagctaatacgtgcaacaaaccccgacttctggaagggatgcatttattagataaaaggtcaacacaggctctgccgttgcttgatgattcatgataactcgtcggatncgcacgccttgtgccggcgacgcatcatcaanttc

SEQ ID NO: 278793 - DNA, 285 bp, Glycine max
attcagcacctttgatcaatggaaagctccgttatgctgttaacagtgtctcatatgttaaccctgacacccctctcaagcttgctgattacttcaacattcccggagtcttcagtgtgaatttactccaaaactctccctcaaacggtccaggatacataggcacctacagtgttgcaaacttctctccatgattttattgaggttattttccagaacaacgaaaacaccatgcaatcttggcatcttgatggttatgatttttgggtcatggtcaggtttcgg

SEQ ID NO: 278794 - DNA, 283 bp, Glycine max
  unsure (1)..(283): unsure at all n locations
caaaaaaagacaacccagagancgcgtcttaataaacgctcttctctgaaaacccccatttacttttgttctttcttcttctctttcgcttcttcgatcttcgatcttcgtcgctgaaaatgagagagtgcatttcaatccacatcggccaggccgggattcaggttggaaacgcctgctgggagctttactgcctcgaacacggcattcagcctgatgggcagatgccaagtgacaagaccgttggtggaggtgatgatgctttcaacaccttcttcagtga

SEQ ID NO: 278795 - DNA, 288 bp, Glycine max
cgatcttttcctctgagaagacgtgtcggtagctgaagccaccttataagcctccactttcctgaactagttttaacatacaatctttcaagtacacctccccagcttccatttaagaatggagatcactagaataggccaatggttaagtttctgatatgtgtactactattactgcagacagaaggggttcctgtgggaatcacttttgttgaaaatgcagtggcaaaaggggctgtttgtttggatgggagtcctccagcttaccacttccacaagggatctgga

SEQ ID NO: 278796 - DNA, 286 bp, Glycine max
  unsure (1)..(286): unsure at all n locations
ttttacttcccctatggctcgtcactccttgctcttagccctcctcctcttcnccgccgnnncccaccgccgcgatggcggtggcngcgtccgaacgccgacgacatcctgatccgtcaggtggtgccagatgttggcgaacgaagaggaggacaacctgctgaacgccgagcaccacttcgngagcttcaaggcanngttcgccaagacctacgccaccaaggaggagcacgatcatcgcttcggcgtcttcaagtccaacctcccgcagagccaggctgcacgc

SEQ ID NO: 278797 - DNA, 284 bp, Glycine max
  unsure (1)..(284): unsure at all n locations
gtgcctgctgcagttcctgctatcgttttcttgtctggtgggcagagtgaggnggaggcatccgttaaccctnaangccattaaccaggtcaatggaaagaagccatggtcactctctttctcctttggaagggcacttcaacagagcacccttaaggcatggagtggaaaagaggagaatgtgaagaaggctcaggaagcccttttggtaagagccaaggccaactnagaggcaactctgggaacctacaagggnaatcaaagcntgctgatggtgcctcaga

SEQ ID NO: 278798 - DNA, 285 bp, Glycine max
  unsure (1)..(285): unsure at all n locations
tntcgcaccaccatgaatcccgaatacgattatttgttcaagcttttgctgattggagattctggtgtaggcaagtcatgtctnctcctgaggtttgctgatgattcataccttgacagctatatcagtaccattggagtggactttaaaatccgcactgtggagcaggatgggaagactattaaacttcaaatttgggacactgcgggtcaggaacgtttccgaacaatcactagcagctattatcgtggggctcatggcattattgttgtttatgatgtcact

SEQ ID NO: 278799 - DNA, 283 bp, Glycine max
  unsure (1)..(283): unsure at all n locations
aagatcaatgccaagcttggtgggttgaattcattgttaggcgttgaacattctccttctncttcctgttgtttccaaagctacccaccctcattctgggaatggacgtgtcacatggctcacctgggcagactgacattccttcaatgctgcggtggtcagctctagacactggcctctgatatcaaagtatagggcatgtgttcgtacgcaatctgcaaagatggaaatgattgataatttgttcaagctagtatctgaaaaggaagatgaaggcatcata

SEQ ID NO: 278800 - DNA, 274 bp, Glycine max
  unsure (1)..(274): unsure at all n locations
ggtgtatatacatggttaacggatattaaagacacctctaaagaaggatatagttttgaagagatatgcatgcaagaaagaagcgtttgagggagaagagaagttttgtgcaaaatcctgggaacagtaattggttttgccatttcaaagctgggaaagaacattcaagtactttcaagttccttgtcaataagcaagagcaatacactgtggaaggagtgcagaatcttggagacaaagcagtgatgtgtcagggctaanttcagaatgcata

SEQ ID NO: 278801 - DNA, 277 bp, Glycine max
  unsure (1)..(277): unsure at all n locations
gggaaaagntgcagantccgctggattaactatttgaggcctgatatcaagagagggaatttcacaattgaagaagaagaaactatcattaagctgcatgagatgttggggaacaggtggtcagcaattgcagccaaattgccagaagaactgacaatgacncanaaaatgtttggcacaccaatttgaagaagaggctgctgaaatcagaccagtccaagccaagttccaaaagagccataagccaaatattaaacgttctgattccantccagca

SEQ ID NO: 278802 - DNA, 281 bp, Glycine max
gtttgtgttgcagttggtgacttgaaccacttgatctctgcgaccatgagtggtgttacatgctgtcttcgattccctggtccaactcaactctgatctgaggaaatttgccgtgaatctcattcccttccctcgtctgcacttcttcatggttggatttgcgcctctacacctactccgcggctctacagcaataccgcgcattgacagtgccagagctgacacagcaaatgtgggatgccaagaacatgatgtgtgctgcagatccaaggcagggcgtt

SEQ ID NO: 278803 - DNA, 279 bp, Glycine max
  unsure (1)..(279): unsure at all n locations
ggaaaangcgtcttcataaacgccgcccaaaanttctcatacccttttattcattccattgcgtttctagggttttccttttctttgccgagaaaatgagagagtgcatttcgatccacattggccaggccggtatccaggttggaaacgcctgctgggaacntattgccttgaacacggcattcagcccgatggacagatgccgagtgacaagaccgttggcggangagacgacgccttcaacacatttttcagcgagaccggcgccggaaagcacgt

SEQ ID NO: 278804 - DNA, 279 bp, Glycine max
cagaatttcccggtgttattttccgaccacatgtggaccccaccaaacccttgcaaccaccgcaaccgtccctccgaccactaccgcctcctcaagtccaacgttgacgctctcaacctcatccaggtcggcctcaccctcaccgacgccgccggcaacctccccgacctcgccggaaaccgctccatctgggaattcaacttccgtgacttcgacgtggcgcgtgacgcctacgctcccgactccatcgatcttctccgtcgtcaggcatcgatttcg

SEQ ID NO: 278805 - DNA, 278 bp, Glycine max
agctttccacccaactacccaaatagtccgccatcagtgaaatttacctccagagttatggcatcccaatgtgtaccccgatgggcgagtttgcatatcaattcttcatccacccggtgatgacccaaatggttatgagcttgcagtgagcgctggacgcctgttcatacagtagagagtatagtattaagtatcatatcgatgctttctagtcctaatgatgaatctccagcaaatgttgaagctgcgaaggagtggagggataggagagatgattc

SEQ ID NO: 278806 - DNA, 276 bp, Glycine max
  unsure (1)..(276): unsure at all n locations
accgaatgagagcatcaaactcttcttcttcgatttccattgcgaangtgtactttntcttcttctttctcttcattttcttcgctcttcgatcttcgtccggggactgctccgaataccaccaccaccactcgccgatggccacgatcggaggcttacacgactcccaaggctctcaaaacagcgtcgaaaccgaagccctcgctcgattcgccgtagacgaacacaacaagaagcagaattcgcttctggagtttgctagggtggttagggcac

SEQ ID NO: 278807 - DNA, 276 bp, Glycine max
  unsure (1)..(276): unsure at all n locations
gtgagantcagattactccaacccatgtatctgatgaagaggcaaaccttttcgccatgcaactagccagtgcctcagtactccctatggttctcaaatcagctcttgagcttgatctgttggaaatcatagccaaggctggccctggtgttcacnnttccccctccgacattgcttctcggntcccaacacacaaccctgatgcacccgttatgttggaccgtatattgcgcctcttggcttgctacaatatcctctntttttctcttcgcactc

SEQ ID NO: 278808 - DNA, 274 bp, Glycine max
  unsure (1)..(274): unsure at all n locations
gacttagataatgaagatgaggattggctttttgagtttaatgaagagaggaacattcngacacctgaaatgtttgagagacttcttttcaagntggaggtattggatcataaagctcgtgaaagagctggacttataacacctacacttggttcaccaattcctgtgcaactacggcttgatactgctattgaggcctacaagcacagggcttcaaatattcaattatccagtctgtatatgattattggaaagagaagcgagaacgatggca

SEQ ID NO: 278809 - DNA, 278 bp, Glycine max
  unsure (1)..(278): unsure at all n locations
aaggtctccggcaagtccaagggctacggcttcattctcttcaagacccgccgcggcgcgcgcaacgccctgcaaggagccgcaaaagaagatcggcaaccgcatgacggcgtgccagctggcatccatcggtccggttagcaacccgccgcagacggcaccgccggcngtggcggctccgtcgtcgtcggtttcggagtacacacagaagaagatctacgtgagcaacgtcggtgcggatctggatccgcagaagcttctcgcgtttttctcgcggt

SEQ ID NO: 278810 - DNA, 275 bp, Glycine max
atctttctcttttttagcttttcttttcctctaaaagtgagtccttccttcttcgatcacttgttaaattcacatatcatagcaatggcagcacgttcctacagccccatcatggttgccctctctttgcttcttttggtcacattctctaatgtagctgaggcttatacacgcagggaacacttcgtccttcagattgtaaaccaaagtgtacttaccgttgctctgcaacttcacacaagaagccatgcatgtttttctgccagaagtgttgt

SEQ ID NO: 278811 - DNA, 195 bp, Glycine max
  unsure (1)..(195): unsure at all n locations
ttcgaactccactagtgtggctgaagtgttctccaggattgatcataagtttgacctcatgtatgcgaagagggccttcgtgcactggtatgtgggtgaaggtatggaagagggtgagttctcanaggtcgtgaggaccttgctgctcttgagaaggattatgaggaggttggtgccgagtctggtgatggagat

SEQ ID NO: 278812 - DNA, 269 bp, Glycine max
  unsure (1)..(269): unsure at all n locations
tttgataatggcactgttgaatcacctcctgaggaacccttttaccctatggccncgcttgtgtatttccaattccacattgctgctattactcttattctgttggctggctctgtccttggccgaatgaacatcaggcttggatggcttttgtgcctctttggttgatcttttcctacacagtcggggcttttagtctttggggtggtggcttctctaccaatggggcgttattgattattctggcggctatgtcatacacctttctt

SEQ ID NO: 278813 - DNA, 274 bp, Glycine max
  unsure (1)..(274): unsure at all n locations
agaagatgggagatgtatcagatctggagcaggagaatagcgttgggagcgttcgcgtttgnnctgcttttcctatgcggcctcagcagacgacgtcgttgtgctctctgaagataacttcgagaaggaagttggtcaggacagaggagctctcgttgagttctatgctccttggtgtggacactgcaaaaagctggctccagaatatgaaaagctggtagcagcttcaagaaagccaaatgctgttttaatcggcaagttgactgtgatgagc

SEQ ID NO: 278814 - DNA, 272 bp, Glycine max
  unsure (1)..(272): unsure at all n locations
aacaatctctgcatattnngcgcaactgctattgaagannaactgcagcaaggtgtgccagaatccattgagtctctaaggactgcaggtattaaagtatgggtcttaactggggacaaacagcaaactgccatatcaattggatactcctcgaagctccttacgagcaacatgaatctaattacaattaataccaacaatagagagtcatgtagaagacgtttgcaagacgcccttgtccatgtctagaaaagacatgactgtgcctgggg

SEQ ID NO: 278815 - DNA, 269 bp, Glycine max
  unsure (1)..(269): unsure at all n locations
caagccccactcaaccaccacaccactctctctgctcttcttctacctttcaagtttttaaagtattaagntggcagagacattcctatttacctcagagtcagtgaacgagggacaccctgacaagctctgcgacaaatctccgatgctgtcctcgacgcttgccttgaacangacccagacagcaaggttgcctgcgaaacatgcaccaagaccaacttggtcatggtcttcggagagatcaccaccaaggccaagttgactagaga

SEQ ID NO: 278816 - DNA, 273 bp, Glycine max
ccaatatattccattctctctgtgtatttccctacctctcccttgcaagatgcagatcttcgtgcaagaccctcaccggcaagaccatcacccttgaggtggaaagctctgacaccatcgacaacgtcaaggccaagatccaggacaaggaaggaatccccccggaccagcaacgtctcattttcgccggaaagcaacttgaggacggccgtacccttgctgactacaacattcagaaggagagtatcttcacctcgtcctccgtctccgtgg

SEQ ID NO: 278817 - DNA, 195 bp, Glycine max
  unsure (1)..(195): unsure at all n locations
gctttatcctgatgcntgtggcgggggangncgtggttggataanccnaggaatagctanttatggcanaggacatgggacaagagaaacttgtgccctgcatactgccagactttcatgtgatacacttgtggatttttggtcagcactgggagacgagatgcggctttctcttctaagaatgaaggatgnaga

SEQ ID NO: 278818 - DNA, 278 bp, Glycine max
  unsure (1)..(278): unsure at all n locations
aaaccagtgactgacttttcgagaaagaaaaacaaaaatgagtttccgtcattccatccatgaacgctcttcccantctcctcttncttcctcttcgtttctgcattagtttctgcgaagaaaactggtgatgtgacggagctgcaaattggcgtgaagcataaaccagtatcatgtgaagttcaggcacacaaaggtgacagagtcaaagtacactataggggaaaacttcactgatggaactgttttcgntctagcttgaaagaataatccattga

SEQ ID NO: 278819 - DNA, 290 bp, Glycine max
  unsure (1)..(290): unsure at all n locations
aacctaacgcagcatcgctattctcttcattccatgngctttgcccaaccagcaaaccgtggattaccctattttcaaacttcgttatgcgtcggcgatggtggcacaggaaagacaacctttgtgaaaaggcatctcaccggagcattcgagaagnaatatgagcccaaccatcggtgtggaggttcacccattggattttttccancaaactgtggaaagattcgattttactgctgggatactgctggacaggagaaatttggtggcctcagagatggatactatat

SEQ ID NO: 278820 - DNA, 279 bp, Glycine max
  unsure (1)..(279): unsure at all n locations
caacactgaacaatggcgcaaccttcctcctcctcgaagcctgttgtccctctcctgaaggacgagctggacatcgtgatcccgacaatccgaaacctcgacttcctcgagatgtggcggcccttcttcgaaccttaccacctcatcatcgtgcaggacggagaccccaacaggaccatcaatgtccccgaaggcttncgattatgaactctacaaccgcaacgacatcaatcgcatcctcggacccaaagcctcctggcatctcgtttaaggattctg

SEQ ID NO: 278821 - DNA, 267 bp, Glycine max
cttgaatcttcgttatccttctttttttctccttgaactcgaatattcactatggcagatgaggtggttctgctagatttctggccaagtccatttgggatgagggtcaggattgcacttgctgaaaagggtatcaaatatgagtccaaagaagaggacttgcagaacaagagcccttgctcctcaaaatgaacccggttcacaagaaaatcccggttctcatccacaatggcaaacccatttgtgaatctctcgttgctgttcagt

SEQ ID NO: 278822 - DNA, 254 bp, Glycine max
  unsure (1)..(254): unsure at all n locations
aagtttgtcaatgacctacactgctttgataagtacaacaccacaggggacaccccttccccctagctctgttgggaaagtccaagaatgctctactctccactttcttgtttcttgatcaatttgtgtggcttggcagaacaggcatctaccagaataaagagcgcaccgaactaattggccggntatctcttactgttggttgggatcctcggtgtgtgccaccttggttgagcttggggagttggaagact

SEQ ID NO: 278823 - DNA, 276 bp, Glycine max
  unsure (1)..(276): unsure at all n locations
gcctggaagggtgagaccctccaggaatactggtggtgcaccgagcncgccctcgactggngccccggcggcggccccganctcatcgtccgacgacggcggcgacaccactcttctcattcacgagggcgtcaaggccgaggagatctttgagaagaccggccagttccccgacccggcttcctccgacaatgcggagttccagatcgtgctgagcatcattcagggatggcttgaagaccgatcccaagaggtaccacaagatgaaggacagaa

SEQ ID NO: 278824 - DNA, 277 bp, Glycine max
gaaatccactgtccctgtgaaaactgctgaggccatagagaaaattttgactcacaatggcaagggaatcaagttccaaatcctttcaaaccctgaattccttgctgagggaactgcaatccaagatcttttcaatccggaccgtgtcctcattggaggcagggagaccccagaaggccaaaaagccattcaaacattgaaggatgtatatgctcattgggttcctgagggaagaatcctaaccacaaacctgtggtctgctgaactgtccaagctt

SEQ ID NO: 278825 - DNA, 279 bp, Glycine max
  unsure (1)..(279): unsure at all n locations
tgctaatatcgcgggtaacaacaagttggttttgcctgtncctgctttcaatgtncattaatggtggatcacatgctggaaacaaacttgcctatgcaggagtttatggttcttcctgtgggancttcctcgttcaaggaagccatgaagatgggtgtagaagtgtatcacaatttgaagtctgtgattaagaagaaatatggtccaagatggcaataaatgttggtgacgaaggtggctttgcccctaacatccaggaaaacaaggaaggctggantg

SEQ ID NO: 278826 - DNA, 272 bp, Glycine max
  unsure (1)..(272): unsure at all n locations
ttggatttgaaaaagaaggagaaggaacttcaagccaaggaaactgaattgagaaaaagggaacaggaagtgagacggaaagaagaagctgcttcacgagctggaattgttcttgaggagaagattggccgcctttttcccaataatccatncatgacattgctaatgaaattccaattncatgntgcaaaaattgcaatatgttgcatttactacattgttaggatagtgttgtgcctttttggaatgttgtagctgttactgctgctgga

SEQ ID NO: 278827 - DNA, 260 bp, Glycine max
  unsure (1)..(260): unsure at all n locations
tctaaaaganatctttttctgctctttgaagaaagaagggtctttgcttgattttggagatgtctctgctctcagatctcatcaaccttaacctctccgataccaccgagaaggtgattcgcagagtacatatggatcggtggatcaggaatggacctgaggagcaaagcaaggactctcccaggaccagttagcgaccctcagagcttcccaagtggaactatgatggttccagcacaggtcaagctcctggtgaagac

SEQ ID NO: 278828 - DNA, 276 bp, Glycine max
  unsure (1)..(276): unsure at all n locations
ggagtatctgggcacagngcctcctgaaactcnctactgcagantttgagcacaagttccaggagnntggtttggagaganngtggggtgacaacgcgnantgtccttgagtcaattcaacttctcttggatcttcttgnggcccctgacccgtgcacccttgagactttccttggaagaatccctatggngttcaatgttgnnatctttctccccatggttactttgcccaagataatgtcttggganacctgacactggtggccaggttgttac

SEQ ID NO: 278829 - DNA, 236 bp, Glycine max
  unsure (1)..(236): unsure at all n locations
ggagtggataccgttccggtcctcgntggccctntnacatacctgttgctnctccaagcctgccaagggagttgagaaatcctttctctcctctntntncttcgnaaggntnttgcngtctanaaggaagtnattgntgaccttaaggcagctggtgcttcatggattcagtttgatgagcctacccttgtcttggaccttgngtctcacaagttgcaagcattcagtgccgcana

SEQ ID NO: 278830 - DNA, 225 bp, Glycine max
tgggtaacagcttaaggtgttgtttggctgcgttcttccgtgtggagccctagacttgatccgcatagtgcacttgaacgggtacgtggaagaaatcacgcgtccaattcacggcgggggaagttcttaaagcgaatgccaaaccatgtcttgagcaaaccgacctcccaaggcgtggttcgccggattctgatcctctgcaccagataccgaacttcaagagag

SEQ ID NO: 278831 - DNA, 273 bp, Glycine max
  unsure (1)..(273): unsure at all n locations
agcatattaacagggcttctttcattcatgatggacaacagtccaaccactggcagtgtaaacaccaccactgctgagaagcagcgtctagcaaaatcttccctttctttcaactgtaagaatgctacattcaggaagatgttccctgagtatgttgagaagtacaaccagcaacagctttctgagcaggctgctccagagagggtctcatcggatacgtctcccgacaagagttcaaggccagttttggaaaagaantagaatccatggaga

SEQ ID NO: 278832 - DNA, 265 bp, Glycine max
gttttctttgaaacgcacagcttcaatgcaccgaccacaccacccatcaacgacatgcttcctctttcccttctcaagactgcccaaggccaccctatgttggtggaactgaaaaatggggagacatataacgggcatttggttaattgcgacacatggatgaacatcctctgcgagaagtcatttgtacatctaaagacggagatagattttggaggatgcctgaatgctacatacgaggcaatacaatcaagtaccttcgagt

SEQ ID NO: 278833 - DNA, 273 bp, Glycine max
  unsure (1)..(273): unsure at all n locations
ctgcttcaagctctgtccccttcttccacatccacactcccctctcaggtttttgtggataagattgagctataatggctgccaggagaccgggtttgattgctttgtttgatgttgatggaactcttacagctcccaggaaggtggtcacaccggagatgttgacattcatggcaagaactgcggaaggttgtaactgttggagttgttgggggttctgaccttataaagntatcagagcaacttggcagcacanttaccaatgataganta

SEQ ID NO: 278834 - DNA, 274 bp, Glycine max
  unsure (1)..(274): unsure at all n locations
gtgattgactttttttcttcttctattctcacacatacccatctactccttccctcatggctgaacaatcttccanctccatttacgatttcactgtcaaggacatcagtggaaatgatgtgagtctgaatgattacagcgggaaggttctactgattgtgaatgtcgcctctcaatgtggtttgacacagacaaattacaaagnnttgaatgtatgtacgagaagtacaagaatcaaggattgaaatcttggcattccgtgcaancagtttgc

SEQ ID NO: 278835 - DNA, 307 bp, Glycine max
  unsure (1)..(307): unsure at all n locations
cttctcaatcgcaaattttctcccccaaatcgtagatctacggttaaattggtgtagtgtggtaagatgggaggaggatttagagtgcttcacttagttaggccatttctctcgtttcttcctgaagttcaaactgctgacaggaaagtgccatttagagagaaggtcatatacactgtgatctctctttcattttcctggtttgtagtcagctccctctatatgggatacactcaacaacaggtgctgatccattctattggacgtgttatctcgcttcaaaccgtggaactgtcagganttggaa

SEQ ID NO: 278836 - DNA, 306 bp, Glycine max
  unsure (1)..(306): unsure at all n locations
tagcaggttgtagaaaatatggccaagcatcatcctgatttgnttatgtgccggaagcagccagggattgccattggacgactgtgcgaganatgtgacggcaagtgtgtgatctgtgactcttatgtgcgtccttgtacgcttgtccgagtttgtgatgaatgcaactatggatcatttcagggtcgatgtgtcatatgcggaggagttggaatatctgatgcctactactgcaaggaatgcacacagcaggagaaagatagagggttgccccaaaatgttaatttaggatgccaaantgattat

SEQ ID NO: 278837 - DNA, 314 bp, Glycine max
attgttgtaactttttgattcctaaattctctaaaattcgaaattctaatttcgttaggggaaagagattgtttgtgtgtgagtgagtatggctggaaaaggcgagggtcctgctatcggaatcgatttgggaacgacgtactcttgcgtcggcgtgtggcaacacgatcgtgttgaaatcatagccaacgatcagggtaacagaactaccccatcctacgtggctttcaccgacacagaacggttgatcggcgatgcggcgaagacaggtcgctatgaacccaaccaacaccgtttttgatgctaagcgtttg

SEQ ID NO: 278838 - DNA, 312 bp, Glycine max
  unsure (1)..(312): unsure at all n locations
tagaatggaatttcgatgctcagtcatctcttttaccattcncttctctcttgctcttgcaggagagagccatgtccatgcatcgctacctgaggaagattattgggaagctgtttggccaaacactcccattcccactgcactgcgagagcttctaaagcctctanntgcaggtgttgaaatcgatgaactccctaagcaaattgatgatacacagtacccaaaaacattcttctataaagaagacttcatccaggcaaaacatgngtacattcaccaagcgtccctatggcaaacntatggtgtatatac

SEQ ID NO: 278839 - DNA, 311 bp, Glycine max
  unsure (1)..(311): unsure at all n locations
ggccaggcaagccccactcaaccaccacacctctcctcgttcacgctacccctttctgctcttcttctacctttcaagttttaaaagtatacagatggcagagacattcctatttacctcagagtcggtgaacgagggacaccctgacaagctctgcgaccaaatctccgatgctgtcctcgacgcttgcctcgagcaggacncagacagcaaagttgcctgcgaaacatgcaccaaaaccaattggtcatggtcttcggagaaatcacgacagccangttgatagagagatatgcgtgacnctgcagaca

SEQ ID NO: 278840 - DNA, 294 bp, Glycine max
  unsure (1)..(294): unsure at all n locations
ctgtgagcctttctttcaggttcttaacttgaacngtgtgcagtgtccaaatcataagggtagttgcaaattgcaatggctaagcatgatgttgagggtggttccttctctgcaaaggactaccatgatcctcctccagcaccgttgattgatgctgaggaactcacacagtggtccttctacagggcttgattgctgagttcatgccacaatgctctcctttacatcacagtgctcactgtgatggtnaagagccagagtgatgtaaaggctgggggtgatgtgtgtggtnga

SEQ ID NO: 278841 - DNA, 307 bp, Glycine max
gctccgcactgggattgccccttaaactacgcgcgctcctacttggccaacctcttgcccatctgcgtgaggcgcgtggtgtacttggactccgatctcatcctcgtcgacgacattgccaagctggcagcaacaccattgggcgaaaacaaggtcctggctgcccccgaatactgcaacgccaatttcacctcgtacttcaccccaacgttctggtccaacccttcgctgtctctcacgttcgcggataggaggcgtgctatcaaccgggggtcatggtcatcgatttggagcggtggcggagggg

SEQ ID NO: 278842 - DNA, 304 bp, Glycine max
  unsure (1)..(304): unsure at all n locations
ttcccaattcctaattgtttaaacctaattctcatttcttcatcgttcgattcttctcctcctaaagatgcagatcttcgtgaaaactttgaccggtaagaccatcacccttgaggtggagtcctccgacaccatcgataacgtgaaagctaagattcaanctccaggaagggatcccacctgaccagcagagacttatctttgcgggtaaacagttgangaggtcgaaccctgccggatacaacatccaaaggatccntcncactcgtgctcgcctcagggtggcatgcaatcttgtcagntt

SEQ ID NO: 278843 - DNA, 305 bp, Glycine max
  unsure (1)..(305): unsure at all n locations
ttaagggagaagaaaaggaaaganaactctcaaaaaactattatagcaatggcagancaaaaccaaaaccaaacaactgaagctggaaggcaccaagaggttggtcacaagagccttctccagagtgatgctctttaccagtatattctggagacaagtgtctacccaagagaacctgaatccatgaaagaactgagagagttgacagcaaaacacccatggaacatcatgacaacctctgcagacgagggcagttcttgaantgctcntagctcatcatgccaggaacaccnggaattggtgtc

SEQ ID NO: 278844 - DNA, 307 bp, Glycine max
tggagctggggatggtgggggtggagacttgtagtaataaggtggcggcggaggaggatcctttgtattctattcttcaagattcaggtactgcgtttcggaagcagacacagatggctcgtacgaagcaaaccgctcgtaagtccacaggaggaaaggctcctaggaagcagcttgcaaccaaggctgcacgtaagtctgcaccaactactggtggtgtgaagaagccccaccgttatcgtcctggtaccgttgctcttctgagattaggaaataccagaagagtaccgagcttttgatccggagc

SEQ ID NO: 278845 - DNA, 310 bp, Glycine max
  unsure (1)..(310): unsure at all n locations
ttcgaatccacacagttctactctacgctctaaaccctctctctntctctctctcgatctatcatggctttgcccaatcagcaaaccgtggattaccctagtttcaaactcgtcatcgtcggtgacggcggtacaggaaagacaacgttcgtgaaaaggcatcttaccggtgaattcnagaaaaaatacgaaccgaccattggagtggaggttcacccattggatttctcacaaactgcggaaagatcgcttctactgttgggtactgctggacaagagaagtttggtggctcagagatggaattatatc

SEQ ID NO: 278846 - DNA, 304 bp, Glycine max
  unsure (1)..(304): unsure at all n locations
ttcccaccccacttacatacacactctcccactcctccgagccggtcgagttgaatcggtgagtcagtgaccgagttganccatgtcggacgaagagcaccatttcgaatccaaggccgatgccgnagcctcaaagacctatcctcagcaggcnggaaccatccgcaaaaacggctacatcgtnatcaagggtcgtccctgcaaggttgttgaagtttctattccaagactggtaagcacggccatgctaatgtcatttgtgggttgatattttcatgcccaagaagttgaagatattgtgccc

SEQ ID NO: 278847 - DNA, 305 bp, Glycine max
  unsure (1)..(305): unsure at all n locations
ttngaaacagtgtgatgaaaatgaaggtccttgttttcttcgttgctacaattttggtagcatggcaatgccatgcgtacgatatgttccctctccgaatgaacactggctatggtgcccgtactccggaggtgaaatgcgcaagttggaggcttgctgtgcgngcacacaacatctttggctttgagaccattcctgaagagtgcgttgaagcaacaaaggaatacatccatggcgaacaatatagatcagactccaanagttaaccaacaagcttactttatgccagagacctcgagtccatc

SEQ ID NO: 278848 - DNA, 307 bp, Glycine max
  unsure (1)..(307): unsure at all n locations
taaaagctccaccaatggcgggttacagagccgacgacgactangactacctcttcaaggtggtcctcatcggcgactccggcgtgggcaagtccaacctcctctcgcgcttcaccaanaacgagttcaacctggagtccaagtccaccattggcgtcnagttcgccncccgcaccttgaacgtcgattccaaagtcatcaaggcccagatctgggataccgcaggccaagnnaggtatcgtgcgatcaccagtgcttacatcgtggggcagtnggtgcacttcttgtgtatgatgtcactcgccat

SEQ ID NO: 278849 - DNA, 305 bp, Glycine max
ggcgcatagtgtggtaccagcagcagagcttgtatacgtcgccgcttcagcgtagcaaacatgatcattcccgagaagaaccgtaaagagatctgcaaatacctcttccaagagggagtttgctttgcgaagaaggacttcaatctggcgaagcacccggagattgatgtgccgaatctgcaggtgataaagctgatgcagagcttcaaatccagagagtacgtgagggaaacatttgcgtggatgcatattactggttcccaccaacgatggattgagttccttaggacttacctcaacttcca

SEQ ID NO: 278850 - DNA, 308 bp, Glycine max
  unsure (1)..(308): unsure at all n locations
gtnaccattgatcgtgacttcccctcacaggtgattctgggcgacggtcggagactctccggcgtgtcgctatacgccggagcagctttgaaggggaaaatgtatcaacttgtttacccagggaaatcagggattcttggagactcactctgcatggagaattctctagatccgaacatggtgaagggtannatagtaatatgcgacagaggaagtagcccgagggtagcaaaggggttagtggtgaagaaagcagggggagggaatgattctggccacggaatatccaacggcgaaggactcgtggg

SEQ ID NO: 278851 - DNA, 302 bp, Glycine max
  unsure (1)..(302): unsure at all n locations
tttcagtggtgttagatctgtacccgcctagccattgatttggaaaagtccaagcttcaaagatgagtaagcttcagagtgatgctcttagagaagctatctcaggaatcatgactgattccaaggaaaagaacaggaaatttgtggagaccattgaactccaaattgggctgaaaaactatgatccccagaaggacaagcgttttagtggctctgttaagttgcctcacattcctcgccccaagatgaagattgtanctggagatgcccaacacgttgaagaggctgagagataggntgga

SEQ ID NO: 278852 - DNA, 303 bp, Glycine max
gacttagataatgaagatgaggattggctttttgagtttaatgaagagaggaacattttgacacctgaaatgtttgagagtcttcttttcaagttggaggtattggatcataaagctcgtgaaagagctggacttataacacctacacttggttcaccaattcctgtgcaactacggcttgatactgctattgaggccttacaagcacagggcttcaaatattcaattatccagtctgtatatgattattggaaaggaagcgagaacgatggcaaaagccggttttgcgacgtttgcagccgc

SEQ ID NO: 278853 - DNA, 300 bp, Glycine max
  unsure (1)..(300): unsure at all n locations
ggctccgcctctccagatccaaatccaactgctccaaggggacatgtgcaatttgcctgaactcaatgaaagcagggcaggggcatgccatttttactgcagagtgttctcnntctttccattttcaatgcattacatctaatgtaaaacacggganccggatttgccccgtctgcagagcaaaatggaaagaggttccttttcagagtcgttcttctaaggtctcccatggcatcaaccgagtaaatcaccgcgaagatcctggacaatctactagggaggttcctaccaacaagctag

SEQ ID NO: 278854 - DNA, 306 bp, Glycine max
ttgggagaagaggtcgagtttcacagcagcaatggtgtacgtcaaggctcagaaatcaaaagcctacttcaagagatatcaagtcaagttcaagagaagaagagagggaaaaaccgattaccgtgccaggattcggttgattaatcaggacaagaacaaatataacactccgaaataccgatttgttgttcgctttagcaacaaggacattgttgcacaaataatatctgctagcattgctggcgatattgttcttgctgagcatatgcacatgagctgccacgatatggtctgaagtagggctta

SEQ ID NO: 278855 - DNA, 185 bp, Glycine max
  unsure (1)..(185): unsure at all n locations
tcgangcccaatcctggggcgtcaatgtgcagccctantccggctcccctgccaacttcgccgcctacaccgacgttcctnaaccccnangaccgcatcatggggctggatctcccctcnggcggccanctcacccacggctactacacctccggcggcangaagatctccgccacctccattta

SEQ ID NO: 278856 - DNA, 297 bp, Glycine max
  unsure (1)..(297): unsure at all n locations
ggaatggcagtggaggatccatcctctccctatggccttcgccttgtgatagatgactacccttatgctgttgatggactagagatatggagtgctatccagacatgggttaaggactacgtctccttgtactatgccacggatgatgcagttannaaagactcagaactccaagcttggtggaaggaagctgttgagaagggtcacggtgacttgaaagacaagccatggtggctaagttgaacactcttcaatctgattcncatttgctgcatattatatggatgctcagcactc

SEQ ID NO: 278857 - DNA, 297 bp, Glycine max
actatgagaagcgcctacagttgcatagtccacccgaaaagaaggagaactactaatgaagcctgtggacctaatgcgagcagttgttcctgttttccctccatcagtctccaaacttgtaagagagggatacttgaatggtgaaagaagtcctggccatttattctgtctcccttcagaattttttatgctttttgatgtagacaacgacggacttatatctttcaaagagcatatcttttttgtaactctgttagcatccaagaatcaagtttttctgcggcattaggagtttga

SEQ ID NO: 278858 - DNA, 299 bp, Glycine max
  unsure (1)..(299): unsure at all n locations
atgatganatcaacaaagtcggcactantgaggagccaaactggagattttgatcataataggtggctctttgaaacaaagggcacctatggctatggcaatgctatatggccaaaggaaggtggttttggaaatgaaaaagaggatgatgttgttcagccaactgaattgatgagcagaccctggagaccacttactcggaaactgaagatactgctgccgttttgagcccatatcgtcttatcattttattctttggttgtctggcactgttcttggcatggaggatcaaacaccaa

SEQ ID NO: 278859 - DNA, 235 bp, Glycine max
gcgctttctgcaaaccgaacatttcatctccaaaggtcgaaggagaaatggggctgacattcacgaagcttttcagccggcttttcgcgaagaaggaaatgcgaattctgatggttggtcttgatgctgctggtaagaccactatcctctacaagctcaagctcggagagatcgttactacaattcctaccagggttcaatgttgagatgtggaatacaagaacatagcttcatg

SEQ ID NO: 278860 - DNA, 299 bp, Glycine max
gggaagttccatcaaccctagtgagagaacctatccagaggagatgatagcgacaggaatatctaccattgatgtcatgaattctattgctagaggtcaacagatccctctattctcagctgctggtctcccccataatgagattgctgcacagatatgccgtcaggtgggcttagtcaagcgactagaaaagtctgataatctctcgagggtggaggagagaggacaattttgccattgtgtttgcagctatgggttaacatggagactgcacagtttttcaacgtgacttgaggaaa

SEQ ID NO: 278861 - DNA, 294 bp, Glycine max
  unsure (1)..(294): unsure at all n locations
aaggactaccatgatcctcctccagcaccgttgattgatgctgaggaactcacacagtggtccttctacagggctttgattgctgagttcattgccacaatgctcttcctttacatcacantgctcactgtgattggttacaagagccagagtgatgtaaaggctgggggtgatgtgtgtggtggagttggcattcttggcattgcttgggccttggtggcatgatcttcatctggtgtactgcactgctgaatctcaggggtcacataaacccagcagtgacattgggctctc

SEQ ID NO: 278862 - DNA, 295 bp, Glycine max
  unsure (1)..(295): unsure at all n locations
gaaccaggcagcttgatggtgcccatgttgagtttctaagaggagttgctaatcccttgggaattaaggtaagtgacaagatggatccaaatgagctagttaaactcattgagatcttgaatcctcaaaacaaagcaggaagaattactgtgatcacgngatgggagctgaaaatatgagggtgaagcttccacatctcatcagggcagtgcgcagagcaggccaaattgtcacttgggtcagtgatcctatgcatggaaacaccattaaggctccctgtggtcttaaaactcgc

SEQ ID NO: 278863 - DNA, 296 bp, Glycine max
  unsure (1)..(296): unsure at all n locations
cgcccatcacgacacaaaaagacgagaaccatggttgtttggagaacgaaatacagaattgattaaggatgcaatacatgttcgttatgcacttctcccgtatttctacacatnattcaggancgctaacactacaggtgttcctgtggtccgtccatttggatggaattcccatctgatgaagctacttttagcaatgacgaaactttcatggttgggagcagtattttagttcaagggatctatacagagcgagctaagcattnatcagtctatttgcctggaaaacaatcctg

SEQ ID NO: 278864 - DNA, 300 bp, Glycine max
  unsure (1)..(300): unsure at all n locations
atttcagtgagtgatcggtgttcacttgatctcatcataatcgtcagcgtcaattgaagaagatgccgatcagaaacatcgccgtncggaaggcctgaagaggcgactcaccccgacacgttgaaggcggctttggctgagttcatctcaaccttcatctngtgttcgccggctcaggctccggcatncgcctacaacaagctcaccgacaacggcgctgccacccctgccggcctcatctccgcctccatcgcccatgcattcgccctcttcgtcgccgtctccgtcggcgccaacatt

SEQ ID NO: 278865 - DNA, 298 bp, Glycine max
ggcggagaacggtgaaggcggcgaggagtacctgttcaagatagtgctgattggggactccgcggtggggaagtccaacctcctctcgcggttcgcgcggaacgagttcgatagcaactccaaggccaccattggggtcgagttccagacgcagctcgtcggatcgacggcaaagagatcaaggcgcagatctgggacactgcgggacaagagaggtttcgagctgtcacctctgcttactacagaggcgctgttggtgcgctcgttgtttacgatatcagcaggaggggcacttcga

SEQ ID NO: 278866 - DNA, 302 bp, Glycine max
  unsure (1)..(302): unsure at all n locations
gcaattcacactggtctttgtcntctcgttactcatttctccacctaactttctattcttctcagtctcagatncagaaccttagccatggcagcnttccagaagatcaaggtcgccaaccccatcntcgagatggacggagatgaaatgactagggttatctggagtcaatcaaggacaagctcattttgcccttcttggagttggacatcaagtattatgacttaggccttccttaccgtgatgagaccgatgataaagttacaattgaaagtgcggaacaatctcaatataatgtggca

SEQ ID NO: 278867 - DNA, 313 bp, Glycine max
  unsure (1)..(313): unsure at all n locations
gggagattaccacaggtacctcggccgagttcaagacnggcgcggagcgtaaggaggctgccgagagcactctctctgcatacaaagccgctcaggancattgcaaatgccgaactgactccaactcatccaattaggcttggccttgcacttaacttctctgtattttatacgaaatccttaactctcccgatcgtgctgcaaccttgcaaaacaggcttttgatgaagctattgctgaattngatacactggggagaggagtcatacaaggatagcatctggtgcaggcaactccttcgtggaaagangcc

SEQ ID NO: 278868 - DNA, 293 bp, Glycine max
gctatctcatcatcgaatgcttacaatgatcagttcagggaacttgtgcaaacagggaaagacattgaaagtgcatattgggaacttgtagtgaaggatatccaagatgcttgcagactatttgaaccaatctatgatcaaacagatggtggtgatggtatgtttctgttgaagtatctcctaggctcgctgatgacactgagggaaccatagaagctgcaaaatggcttcataaagtggttgatcgccccaatgtgtatattaagattcctgctacagaggcatgtgtgcct

SEQ ID NO: 278869 - DNA, 290 bp, Glycine max
  unsure (1)..(290): unsure at all n locations
cagcaatgctcgggctcatagattatcaagcagccattcatttgtggaaaatcgacaaatttgatttactagtgtgcttcactgcttatgttggcgtagtctttggcagtgttgaaattggcctagtcatagcagttgcagtatctctgcttcggtacttctatttattgcaaggccaaggacatttctcttaggcaacattccaaattctgcagtatacagaaatgtggaacaatatccaaatgcaaatncatattcctggaatcctaatcttgaattgatgcacccat

SEQ ID NO: 278870 - DNA, 282 bp, Glycine max
tactgattaccagctcattgatattgctgaggatggatttttgagtctgcttactgaaaatgggaacaccaaggatgacctcaagcttcccactgatgagagtctgctcactcagataaaggatggatttgctgagggcaaggatcttgtttgtctgtcatgtctgctatgggtgaggaacagatttgcgccctgaaggatattgggccaaagaactagcttttggtgctggcagcctgttgtttctattaagcaaagatcctttgtaagccttatatggtt

SEQ ID NO: 278871 - DNA, 285 bp, Glycine max
  unsure (1)..(285): unsure at all n locations
gccgaaaaggctaaagacagccgcagcattcgtcccggcaagggaaaaatgcgtaaccgccgctacatctctngccggggaccacttgtggtgtacggaaccgaaggtgcgaaggccgttaaggcttccgtaacgtccccggcgtcgaggtgccaacgtcgagaggctgaaccttctgaagctggcccccggtgggcacctcgggaggtttgtaatttggaccaagagcgctttcgagaagttggattcatttacgggtcttttgataagcctctgagaagaaga

SEQ ID NO: 278872 - DNA, 286 bp, Glycine max
caaactgtttcttgttcgtatactgattccgttgcacaagccaaagtgcttagcaatgtatcatcaacagttatcttattgcattacccaatttgtagagaaagactgcaagcttgctgatacaattattaggggattgttgaagtactggctataacaaatagtccaaaggaggttatgttcctgggtgagttggaagaagtcttggaagcaatcaacccccagaatttcagcgttgtatggtgccatgtttcgtcgcattgcacgttgtttgaatagccctcat

SEQ ID NO: 278873 - DNA, 298 bp, Glycine max
  unsure (1)..(298): unsure at all n locations
aacaaccttctttctttcaggttcttgatcagtgtcaaaaccaaaagggtggttgcanattgcaatggctaagcatgatgttgagggtggttccttcgctgcaaaggactaccatgatcctcctccagcaccattgattnnnactgaggaactcacaagtggtccttctacaggggctttgattgctgagttcattgccaacaatgctcttcctttacatcacagtgctcactgtgattggttacaagagccanagtgatgtaaaggtgggggtgagtgtgtggtggagttngcattc

SEQ ID NO: 278874 - DNA, 282 bp, Glycine max
ttgaaatcgatgatcaccctatgcaaattgaagaaacacagtacccgaaaaccttcttctataaagaagaccttccatccaggcaaaacaatgaaagtacaattcagcaagcctccctttcaacaaccatggggtgttggtacatggttaaggaaattaaagacactactaaagaaggatatagttttgaagagctatgcatcaagaaagaagccattgagggagaagagaagttttgtgcaaatcctgggaacagtattggttttgccattcaaagctggg

SEQ ID NO: 278875 - DNA, 281 bp, Glycine max
  unsure (1)..(281): unsure at all n locations
gttggaatcattggagaccaatggagcgatctgcttggagaccacagaggcgaaagcaggacctttaagcttcctaatcccatgtactacattgagtagtaccttcacctctctcaacaatctagctagagtttgctcctatctattgtaataaggtatgctgatatgcactattcaaataggagcattagctatgtttgttaatgtncactttatgttatgtgggtaagtcacctaagacatccacgtacctacttgttgtctcttacgcggctttaata

SEQ ID NO: 278876 - DNA, 301 bp, Glycine max
  unsure (1)..(301): unsure at all n locations
ctgaaccaaatcatcacacacacatactgcgnngcaacaattcttctacaatggatctcntcnttctggaaaagaccctcataggtctccttcctcgcngcggtggtcgccatcgccgtctccaccctccgcggccggaaattcaagctcccaccgggcccactccccgtcccaatcttcggcaactggctccaagtcggcgacgaacttcaaccaccggcaacctacaccgatttggccaaaaaattcggtgacatcttcctcctcngcatggggcagcgcacttcgtcgtggtttntcc

SEQ ID NO: 278877 - DNA, 293 bp, Glycine max
  unsure (1)..(293): unsure at all n locations
gggagattaccacaggtacctcgccgagttcaagaccggcgccgagcgtaangaggctgccgagagcactctctctgcatacaaagccgctcaggacattgcaanganccgaactgcctccaactcatccaatnaggcttggccttgcacttaacttcancgtattttactacgaaatcctaactctcccgatcgtgcctgcaaccttgcaaaacaggctttgatgaagctattgctgaatggatacactgggagaggagtcatacaaggatagcactgatcagcaactcntc

SEQ ID NO: 278878 - DNA, 294 bp, Glycine max
  unsure (1)..(294): unsure at all n locations
gtgttgcctctttctttgtcagtagagtggacactctccattgacaaggcccttgagaaaattggcaccccagaggctcttaatctacgtgggaaggcagcagtagcccaagcagcattggcttaccacctctaccaaaggaaattttctggtccaaggtgggaagctctagttaaaaagggggccaagaagcaaaggctctttgggcctcaaccagtgtaaagaaccctgcctattctgacacntatatgttgctcctctattggacccgacatgatcaaccagccagaccaa

SEQ ID NO: 278879 - DNA, 297 bp, Glycine max
  unsure (1)..(297): unsure at all n locations
gaagagaagattttcatcagttgagttgagagaaggaaagggaaaatgggtaaggatctgagcgaggaacaagtgtcttccatgaaggaagccttctctctattcgacactgacggagacggtcggatcgctccgtcggagctggggatcctgatgaggtctctgggaggtaacccgacgcaggcccaacttcaaagccatcgtggctgaagagaaccttcacggccccntcgacttcccccgattcctcgatctaatggccaaacacntaaacccgaacttcgatcgccaatccgc

SEQ ID NO: 278880 - DNA, 295 bp, Glycine max
  unsure (1)..(295): unsure at all n locations
gaaggaatgatttatacaccaacagaaggtgtgatgatgacaggnagatatgcttcaaaggaagaggccaagaagaaggggaataagatcaatagtgtaggatggtggtttaaaccatggttctatcagcatgcacagacggcactgaagaaaggagagtttgtagaatacattcctaccagagaatattatcacagggcacacaagatgctgtactgggagggaaagctatcctcccattgctgatcattttggtttaggtatcgtttggcggttggccacccangtttctctc

SEQ ID NO: 278881 - DNA, 259 bp, Glycine max
  unsure (1)..(259): unsure at all n locations
tcaagccnctgtntgngggttttggtttcatttcatncaagatgatctgtttatgctcttttcttctttttaaaatttaaagtctttgtattttgtatgtaaagatgtaaaattatgattattaggtggtgcatgtgtcgcgtcatgggccaatgtnatcctctgcttttaagttggaagaggcccaactacatgtgtgatgtacggctgtgatgtgtaatttgcaaaatcaaaaataacaccagagtcatatatatgc

SEQ ID NO: 278882 - DNA, 288 bp, Glycine max
  unsure (1)..(288): unsure at all n locations
cctaaaccctagtctccatacatcaacttgggaggttaaagagacggcaacgttgtgctgtccgccttgaccgagccagagcttcgtcttggccctcgattttgccctgtaaaactaatcccagtcacaacagaaataatcaatggcaccgaaacagaccaaggctgagaagaagatcgcttacgatgcgaantgtgcgacctaatggaggagtacggccaaatcctcgttgtaaattccgacaagtgggtcgaaccagctccagaacntcgaggtctcgcggcgatc

SEQ ID NO: 278883 - DNA, 280 bp, Glycine max
  unsure (1)..(280): unsure at all n locations
atcatcatccagctatgttttgcgggtataattgtgatatgtctagatgagcntcttcaaaaaggatatggtctggggtctggaatatncctattcattgcaaccaatatctgtgaaaacattatatggaaggcatttagtccaaccaccatcaacagtggacgtggagctgaatttgaaggtgctgttattgctctgttccatttgttgataactagaacagacaaggtccgtggctctcgtgaggcatttacggcagaatctcccatgtgacaanttg

SEQ ID NO: 278884 - DNA, 290 bp, Glycine max
  unsure (1)..(290): unsure at all n locations
attcagtgaaacactagctagggnattgggagctctcgttgtttcggagttagggaccttacgcagccatggccactgctacgaatncncgccgcncgccccaccacgccagctactcccagaaggaagctgacattccagatgatgttggccgccgacgtccacctcggcaccaagaactgcgattnccaaatggaacgttacatctttcaagcgccgcaacggagggatttcacttattnaacntgggaagacgtgggagaagntcagtcacagctaggttagattgc

SEQ ID NO: 278885 - DNA, 291 bp, Glycine max
  unsure (1)..(291): unsure at all n locations
ggcggtggtgatagtagggaacagaaaagattcacagagctatgttggaatgaagagaaaggcatgcgctgaattgggaatcaaatccttcgatgtggaccttcccgaacaagtctcccaagctgaactaatcaaacaagttcaccagttgaatgctaaccctgacgtacatggtatattggttcagctcccgttgcctaagcacataaatgaagaggnagttctgactgaattcagcctgagaaggatgtagatggttttcatccttgaactggcaagcttgcntggaaa

SEQ ID NO: 278886 - DNA, 284 bp, Glycine max
  unsure (1)..(284): unsure at all n locations
ttgcctcccatcctcgagtgaagaaagtgaattatgctggctngcctggtcatcctggtcgtgatttacactattctcaggcaaagggtgcaggatctgtgcttagcttcttgactggttcattggaactttcaaagcatattgttgaaactaccaaatacttcagtataaccgtcagctttgggagtgtgaagtcccttattagcatgccatgctttatgtcacatgcaagcnngncngctggcagttcgtgaggccagagtttaagaagatctgtagtatat

SEQ ID NO: 278887 - DNA, 167 bp, Glycine max
  unsure (1)..(167): unsure at all n locations
gnttacncccccttctgtcccatccggncanactaactccatgtgtacnctgcaattctgaagcctgataatgaangcaaatcttgattgatggggaggagnaganaaaggcaaatnctctgtcnnctgaggncttgagcctcctnttataccttccanganaatcc

SEQ ID NO: 278888 - DNA, 284 bp, Glycine max
  unsure (1)..(284): unsure at all n locations
gtgagaagaatgttgaagaaacatatgaggctcttcagtttcttgagaatgagctgaaggacaagaagttttttggaggagaggaatttgggttggtagatattgctgctgtcttcatagcattttggatcccaatttttcaggaaatagcagggttgcagttattcaccagtgagaaatttcctatactnctacaaatggagccaagaatcccttaaccaccctttgtgcaagaagtccttcctccnagagacccatttttacntctcaagccgctatgaaag

SEQ ID NO: 278889 - DNA, 281 bp, Glycine max
  unsure (1)..(281): unsure at all n locations
gagaacaaaaaaaaaaacgtgattcgctcttctcttcgaatanaccacaaaaccaacaaacgagaagaggagtgagagaagatggggttancgttcacgaagctgttcagcaggttgtttgcgaagaaggaaatgaggntnctgatggtaggtcctcgatgctgctggtaagacaaccatcttgtacaagctcaagcttggagaaatccgtncaccaccatccccaccatgcggatttaatgttgagangtggagtacagaactngttcatgtgtgggatg

SEQ ID NO: 278890 - DNA, 280 bp, Glycine max
  unsure (1)..(280): unsure at all n locations
gagaacaaaaaaaaaaacgtgattcgctcttctcttcgaataaaccacaaaaccancaaacgagaagaggagtgagagaagatggggttgtcgttcacgaagctgttcagcaggttgtttgcnaagaaggaaatgaggattctgatggtaggtcctcgatgctgctggtaagacaaccatcttgtacaagctncaagcttggagaaatcgtccaccaccatccccaccatcggatttaatgttgagatgtggatacagaacntcattcatgtgtgggngt

SEQ ID NO: 278891 - DNA, 280 bp, Glycine max
  unsure (1)..(280): unsure at all n locations
gttcagcaccagccgacccancaccccacttcggaggaattgagcattgggaagattcaagtttaaggctttgatttggggggccatcaagttgcccgcagagtctggaaagactattacgcaaaggtggatgcagtagtttacctggttgatgcctttgacaaagagaggtttgcagaatcaaagaaggagcttgatgccttactttcagatgaatcatgggcaaatgttccattctgtgctagggcaacaagatgacntctatgctgcatcgaagaag

SEQ ID NO: 278892 - DNA, 282 bp, Glycine max
  unsure (1)..(282): unsure at all n locations
gcatgaagttgttggcaatttgggtagctctcttagaggccttaactccaagnaataccctgtcaatgtcccattaacagttgatncactcacttatcttcactgttgggttgggaattaacccttgtccatcttgcaaagctgcaaatgggagcagggtggtggctgctatcaacaatgttacatttattatgccaaccattgccttacttcaagcacattatttcaacatcaaaggggtgttcaccactgatttccctgccatcccccatgttttcaata

SEQ ID NO: 278893 - DNA, 289 bp, Glycine max
  unsure (1)..(289): unsure at all n locations
cttgcctttcgatgtgaagggtgtgtgggaatccatggaanagtgccagaaacttgggcctcaccaaagccattggagtcagcaacttctctgtcaagaagcttcagaatctgctctctgttgctaccatccgtcccgtggtcgatcaagtggagataaccttgcatggcaacagaagaagctaagagagttctgcaaagaaaatgggataatactaactgcgttctctcatgaggaaaggtgcgagcaaggcccaangaatgtggagatgatgtgngaaanagntgca

SEQ ID NO: 278894 - DNA, 215 bp, Glycine max
  unsure (1)..(215): unsure at all n locations
cgcccatctccatgatnngcgccgtcgccaccaacgccaacccgttctacaccgcncccggagatcttcaagcagttanccgtctaccaaggcgangttgatcataacacaggcaatgtacgtggacaagctccgcaaccacgacggcgcgaagtcgtncgggacttcaaggtcgtaaccgtcgacgatccgccggagaattgcctccacttctc

SEQ ID NO: 278895 - DNA, 280 bp, Glycine max
  unsure (1)..(280): unsure at all n locations
tctttcaaaagggagaagaaanggaaaggacacaaaacgcacaaaggattattatagcaatggcagaacaaaaccaacaccagacaactgaagctggaaggcaccaagaggttggccacaagagccttctccagagtgatgctctttaccagatattctggagaccagtgtctacccaagagaacctgaatccatgaaagaactgagagagttgacagcaaaacacccnggaacancagnttnttctgcagaganggcattntgaacngctcttaagctc

SEQ ID NO: 278896 - DNA, 293 bp, Glycine max
  unsure (1)..(293): unsure at all n locations
cgttctgaacggaaaagcactggcgcagtacccctgaggcttcttcttctcttctcttctctgtcgtgagtncaccatggtgagggntagtgtgctgaacgatgctctgaagagcatgtacaatgctgagaaaaggggaaagcgccaagtcatgatnggccatcctccaaagtcattatcaaattccttttggtgatgcaaaagcacggatacatcggagagtttgagtatgttgatgaccacaggntggnaaaancgnggttgattgaaggtanatgaacaatgtggggtna

SEQ ID NO: 278897 - DNA, 210 bp, Glycine max
  unsure (1)..(210): unsure at all n locations
gaaagacaaagagagagatggagaactttcccgtgatcaacttggagaatctgcaacggtgnggcgaggnaagctaccctggcaccagattgaagatgcttgccagaactggggattttttgagttggtgaatcatggaataccccttgaacttttgatacnnncgcaaggttaacaaaagagcattataggaaatgcatggagaagagg

SEQ ID NO: 278898 - DNA, 284 bp, Glycine max
  unsure (1)..(284): unsure at all n locations
gnnngaccttcatccaggccaaaacaatgaaagtacaattncagcaagcntccctttcaacaaccatggggtgttggtactggttaaaggaaattaaagacactactaaagaaggatatagttttgaagagctatgcatcaagaaagaagccatgagggagaagagaagttttgtgcaaaatccttgggaacagtaattggttttgccnttcaaagctnnnnnaanaacatccaagtatttcaagttcnttgtcataagcaagaccannacatgtggaggatgc

SEQ ID NO: 278899 - DNA, 280 bp, Glycine max
  unsure (1)..(280): unsure at all n locations
atctccgagaagtcatttgtacatctaaagacggagatagattttggaggatgcctgaatgctatatacgaggcaatacaatcaagtaccttcgagttcctgatgaggttattgacaaagttcaagaagaaaccaagagccgtgcagatgcaaaccacctggagtgggncgtggaangggaagaggcagagaggatggtctggtgggcgcccagcaaaaggattgggcgtggtcntgatgatggtggtgccaaggantgnacgaggcgagcagggtggtc

SEQ ID NO: 278900 - DNA, 207 bp, Glycine max
  unsure (1)..(207): unsure at all n locations
tgtatttcnctacctctcccttcaagatgcagatcttcgtcaagaccctcaccggcaagaccatcacccttgaggtggaaagctctgacaccatcgacaacgtcaaggccaagatccaggacaaggaaggaatccccccggaccagcaacgttcattttcgccggaaagcaacttgaggacggccgtacccttgctgactacaacat

SEQ ID NO: 278901 - DNA, 201 bp, Glycine max
  unsure (1)..(201): unsure at all n locations
cnagatggagcaaatanagcacagaacagttgaagtgaatggcataaaaatncatgttgcagagaaaggagagggncccagtggtgttgttcctccacggcttccctgagctctggtactgcatggcgccatncagattctnctcttcagctccctcggctaccgcgccgtcgctncccgatctccgnggctacggtgaca

SEQ ID NO: 278902 - DNA, 281 bp, Glycine max
  unsure (1)..(281): unsure at all n locations
ggctgcaattnttgctgctgttgaaaccattgcacaaaaagcaaatgttgtcagacctgactggaanggccttaatgtattgcttctccatgctgcccangctgctgcgcttgaccttggacttgttccacaatctgagaaaagcctgagtctgcaanatttgtatatttgatgggtgctgatgatgttaacttagacaagatcccagatgatgcttntgttgtttatcaaggtcaccaggtgcacaagagtgtttatcgggcaangttgttttgccagca

SEQ ID NO: 278903 - DNA, 188 bp, Glycine max
  unsure (1)..(188): unsure at all n locations
tnntagctagngnttgctcctatctatatgtaataaggtatgctgatatgcactattncaaataggagcattagctangtttgttaatgtcactttatgttatgngggtaagtcacctangacactccacgtacctacttgttgtctntacgcggctttaataaatcttctgcccttgttccatattt

SEQ ID NO: 278904 - DNA, 276 bp, Glycine max
  unsure (1)..(276): unsure at all n locations
acttccggaaccctaaggtangtgagnaatcagtggttgagaatggtggngaaggcgaagggtagaaaggaggaggtggntacncgtgagtacaccattaanctccacaagcgcctccatggctgcacatttaagaagaaagctctaaagctnncaaggagataaggaaatttgcccaaaaggccatggggaccaatgatgtgagggtggatgtgaattgaacaatttgtctggagccagganncaggatgttccaaggaggntagataagantgc

SEQ ID NO: 278905 - DNA, 278 bp, Glycine max
  unsure (1)..(278): unsure at all n locations
tgaagatgccccatcttatccangagtggaacatgttggtggagatatgtttgtcagtgttccaaaagctgatgctatttttatgaagtggatttgccacgattggagtgatgagcactgcttgaagtttttgaagaactgctagaggcactaccagataatgggaaagtgattgnggcggaatgcattcttccggtggctccagactctagcttggccacaaagggtgtggttcacatcgatgtgatcagttggtcacaatccaggtgggaaagaga

SEQ ID NO: 278906 - DNA, 278 bp, Glycine max
  unsure (1)..(278): unsure at all n locations
ggtaagttgacatcagatgcagcacttgatcctgctgggttactggcagttgctatttgccacggttttgcactctttgttgcagttnctgtcggtgccaacatctctggtggccatgtcaaccctgctgtgacttttggattgctcttggtggccacatcaccatcctcactggcttcttctactggattgcacagcttcttggctccatcgtggcatgttttcttctcaatatgtcacaggaggcttgccaactccaatccacagtgtggcttcag

SEQ ID NO: 278907 - DNA, 281 bp, Glycine max
  unsure (1)..(281): unsure at all n locations
anaagttcnacccaaaggatgccgctgatatatgtgaaactctatacataccagatctttnnggcnccctcctnatattncatcgttgtatngcnngtctgccatcgggatatcaagcctcaaaatctattggtcaatccacacactaccaggttaaattatgngactttggaagtgcaaaggttttggtaaaaggcgaaccaaatatatcatacatatgttctagatactatagagcacctgagctcatatttggcgcaatgaatatattcagccntgac

SEQ ID NO: 278908 - DNA, 272 bp, Glycine max
  unsure (1)..(272): unsure at all n locations
aggatgccgangaacaagggaaanggnggtaagaacaggaagagggganagaacgangcggacgacgagaagcgggagctggtgttcaaggaggacgggcaggagtacgcgcaggtgctccggatgctggggaacgggcggtcgangcgatgtgcatcgacgggacgaagaggctctgccacatccgcgggaagatgcacaagaaggtgtggatcgccgccggagacatcatctggttggattcaggatgaccaggagacaagctgagtcnc

SEQ ID NO: 278909 - DNA, 286 bp, Glycine max
  unsure (1)..(286): unsure at all n locations
caaccatcgatctcaattttcaaccttaacctctaagaatgtcttacgcttatctcttcaaatacatcatncatcggtgacaccggagttggaaagtcttgtcttctacttcaattcacggacaagcgctttcagcccgtccatgacttgaccatcggtgttgaatttggtgccaggatgatcacaattgataacaagccaatcaagttgcaaatatgggatacggctggtcaagaatcattcagatctattacaaggtcttattacagaggggctgcaggtgcat

SEQ ID NO: 278910 - DNA, 298 bp, Glycine max
  unsure (1)..(298): unsure at all n locations
cccatcacgacacaaaaagacgagaaccatggttgtttggagaacgaaatatcagaattgattaaggntgcaattgcatgttcgttatgcacttctcccgtatttctacacattattcagggtggctaacactacaggtgttcctgtggtccgtccattgtggatggaattcccatctgatgaagctacttttagcaatgacgaaactttcatggttgggagcantatnttagttcaagggatctctacagagngngctaagcatgcatcagtctatttgccggnaaacaatcctggc

SEQ ID NO: 278911 - DNA, 299 bp, Glycine max
  unsure (1)..(299): unsure at all n locations
aaagaacttccttataaccaaaaccaacaacaactatggcaagttatcagaagcactacgatgatcagggtcgcaaggncgacgagtatggcaatgttgagaggcaaactgacgaatatggcaacccggttcatgccactagtgtcacttatgtngccaccaaaagtgttggtggctacaatgatgacgctaataagcaacatgatattactggtgtctatcccgagaaagacaccggtagacatccattttggtcgtggttacgacggtgacactaacaagcaacatgatgctactgg

SEQ ID NO: 278912 - DNA, 293 bp, Glycine max
  unsure (1)..(293): unsure at all n locations
tctctcttctttttactctctctctgtctctctctacgctttctcgttcganatccctcaagggatccactaactgaaggagaaatggggttgacattcaccaagcttttcagccggcttttcgccaagaaggaaatgcgaattctgatggtgggtctcgatgcagctggtaagaccaccatcctgtacaagctcaaacttggagagatcnttaccacaattcccaccattgggttcaatgtggagactgtggaatacaagaacattagtttcatgtctgggatgttggtggc

SEQ ID NO: 278913 - DNA, 297 bp, Glycine max
  unsure (1)..(297): unsure at all n locations
gtttctgtgaagagaattcagnaatgatacttgtactatgagtatgtcgaaaagggtccactgaagaagcatttatatggttcatcactatnaaacacctctctcttggaagcagcgtcttgagatatgcattggtgcggctagaggccttcactatcttcacactggttttgctcaaggnatcatccaccgtgacatcaagtcaaccaacatattacttgatgaaaatatgttgcccaaggttgctgactttggtctttcaaggtcagggccagcatcaatgacacacatgtgagt

SEQ ID NO: 278914 - DNA, 292 bp, Glycine max
  unsure (1)..(292): unsure at all n locations
tctctcttctttttactctctctctgtctctctctacgctttctcgttcganatccctcaagggncccactaactgaaggagaaatggggttgacattcaccaagcttttcagccggcttttcgccaagaaggaaatgcgaattctgatggtgggtctcgatgcagctggtaagaccaccatcctgtacaagctcaaacttggagagatcgttaccacaattcccaccattgngttcaatgtggagactgtggaatacaagaacattagtttcatgtctgggtgttggtggc

SEQ ID NO: 278915 - DNA, 146 bp, Glycine max
  unsure (1)..(146): unsure at all n locations
gttcccactaagtagcaagctagatactcaagcctatggtgatcatacctgtataatngcaaaagaacatttggagcctaacntaggtgggctcatgttgagcaggctatccaacacaagacgttgttcatcttngatcaccatgc

SEQ ID NO: 278916 - DNA, 295 bp, Glycine max
  unsure (1)..(295): unsure at all n locations
acttcagagcgcaggcaaacaacttcttctctcagacatggcatctcaaggtttgtgtccttcgataaaaaatattcttcttttggacttctgaagggaagcgtgtggcagtcaagtattactcagatgactggcccaacaaacaatgcanagttagctnctgngaagtttgtatttanccaagacngttaagncanatgctcgtacagangctgaggtaacactacttgagaccaatatcattattncantttgtacaagacctgcattttttnntcactggtggngannagaa

SEQ ID NO: 278917 - DNA, 243 bp, Glycine max
  unsure (1)..(243): unsure at all n locations
tagaatcagatgcncccggggcaaaggagtatntgcacatacganttcagcagaggnntggatcgaagagtctgacaacagtgcaagggctgaagaaggnnntcagctacgagaagcatcctcaagganctcaagaaggacttctgctggcaacgggactgtggtgcaggacaaggagcttggcnagattatccanctccaaggcgaccagcgccagaacncatcccattnccncgttcaggc

SEQ ID NO: 278918 - DNA, 291 bp, Glycine max
  unsure (1)..(291): unsure at all n locations
anagcggcctgaactcttgacagcaaaatcaaacatgacttaccatgaaaganaactggctggcctctgccccttgaattctattgaggttacaaggctgcttaaaggtctaggtgctccaaaaaatgcaagaatttattgggctggaggacaaccactgggtggaaaggaggtcttacagccattaatcaatgaatttccacatctttacagtaaagaagatcttgctttgcatggagagctggaaccatttgcaaataaagcttctctatggctgccattgattacata

SEQ ID NO: 278919 - DNA, 290 bp, Glycine max
  unsure (1)..(290): unsure at all n locations
gccgtttcagctcaagagccaccagcaggtaagatatggttaagcataacaacgttatcccccaatgggcacttcagganacactggcaaaactatgtgaagacttggtttaatcaaccagcacggaagaccagaaggcgtttagctcggcagaagaaggctgtcaagattttcccaaggcctactgctggacctctcaggccaattgttcatggccagactctgaaatacaacatgaaagtcagatctgggagaggttttctcctcgaanagttganggcgtgggattc

SEQ ID NO: 278920 - DNA, 221 bp, Glycine max
  unsure (1)..(221): unsure at all n locations
gaatagctttaggtactgcaagagggttggtttacttgcatgagcaatgtgaccctaaaattattcaccgtgatgtcaaagcagccaacatattgctagatgaagactttgaagctgtngttggtgattttggtttagctaagcttttggatcatagagattcacatgtgaccactgctgtgcgtggcacgttggccacattgctccagantacctntccc

SEQ ID NO: 278921 - DNA, 289 bp, Glycine max
  unsure (1)..(289): unsure at all n locations
ttcaaactagggttttacagaatataagctctctctatctttggttttccgtcattccaaatccaatccaatatcaaatatgagtngtcatcccgaggttaagtgggctcagagacttgacaaggtctatatcacggtgcaattggctgattcaaaaaatgccaaggtggatcttacaccagatggtatttttaccttctctggtagtgctggtgctgaagaccatcagtatgagctaaaactggagctctttgacaaggttaatgtagaggagagcaaaattaatgta

SEQ ID NO: 278922 - DNA, 288 bp, Glycine max
  unsure (1)..(288): unsure at all n locations
gagaatcagatgcccccggggcaaaggagtatgtgcacatacgaattcagcagaggaatggaaagaagagtctgacaacagtgcaagggctgaagaaggagttcagctacgagaagatcctcaaggacctcaagaaggacttctnctgcaacgggactgtggtgcaggacaaggagcttggcaagattatccaactccaaggcgaccagcgcaagaacgtatcccatttcctcgttcaggccggtcttgtccggaaggaccaggtcaagattcatggtttttgattta

SEQ ID NO: 278923 - DNA, 289 bp, Glycine max
  unsure (1)..(289): unsure at all n locations
ttcacgatgtcaccgttaaggacgagaagacccttctcttcggtgacaagccagtncactatttttggacacagaaaccctgaagagatcccatgggggtcaactggagctgacatcattgttgagtccaccggagttttcaccgataaggacaaggccgccgcacatttgaagggtggtgcaaagaaggttattatttctgcccccagtaaggatgcccccatgtttgttgttggtgtcaacgagcacgagtacaagccagagcttgatattatttccaatgctagct

SEQ ID NO: 278924 - DNA, 288 bp, Glycine max
  unsure (1)..(288): unsure at all n locations
ggccatttctgatggcaaattagctgtgttgcttttatctggtnncccangggactcgacttggaanttcagatccaanaggatgtttcaatattggacttccatctggaaaatcactttttcaacttcaagctgagaggattttgtgtgcacagagactagctgctcaagctacaaatgagaattctgcttctncagtgcanatacactggtacatcatgaccagtccattcactgatgaggccaacacgcaaattctttgaaagtcatnaattttttggtctcgag

SEQ ID NO: 278925 - DNA, 284 bp, Glycine max
  unsure (1)..(284): unsure at all n locations
atttcttctgggaaactctattttctctaatatggagcaatactggtctgggantgccatcaatgaaaacaaaggaatggtagataatttgcatcgttatggagtaatcacatctagaaaggtagctgaagtaatggaaaccattgatagagctttgtttgtacccagcggcggcggactccaaccttatgtggacagtcctatgccgattggctacaatgccaccatctctgcgccgcatatgcatgccactgccttcagttgcttgagaagaatttgcaacc

SEQ ID NO: 278926 - DNA, 276 bp, Glycine max
  unsure (1)..(276): unsure at all n locations
ctactgagtttccacattgcataccttaggtcttccgaattcgaagttaatttgcaagatgggttatgaaaaggctcagatcaacattgtggtggttggtcatgtggaccctgaggaggcaaccaccattaacgagctgaagaagcctgttgtggagaaacaagctccagggcatgccatatgagggcatgcacgcacggcctcggangggaacagaaaattatgttaacaaaataatctggaaccctaatgtatcagtgtcatcatcagtgtgta

SEQ ID NO: 278927 - DNA, 287 bp, Glycine max
  unsure (1)..(287): unsure at all n locations
cctctttcttcctcttcctcagtagtgcgattttcgattctcttctctgcaactatgcctaaccctaaggtcttcttcgacatgaccatcggcggtnaacctgccggccgcatcgtgatggagctctacgccgacgtgactccgagcaccgccgagaacttccgcgcgctctgcaccggcgagaagggcgccgggcggagcggccaagcccctnccagtaacaaaggctacgtccttccaccgcgtgatcccgaattcatgtgccagggcggcgattcaccgccgga

SEQ ID NO: 278928 - DNA, 282 bp, Glycine max
  unsure (1)..(282): unsure at all n locations
ggaatcattggagaccaatggagcgatctgcttggagaccacagaggcgaanccaggacctttaagcttcctaatcccatgtactacattgagtagtaccttcacctctctcaacaatctagctagagtttgctcctatctatatgtaataaggtatgctgatatgcactattcaaataggagcattagctatgtttgttaatgtccactttatgttatgtgggtaagtcacctaagacactccacgtacctacttgttgtctctacgcggctttaataaat

SEQ ID NO: 278929 - DNA, 278 bp, Glycine max
  unsure (1)..(278): unsure at all n locations
gccaccagtatacaaaccacccgtttataagccaccagtttacaagccaccagtgtacaagccaccagttgagaagccaccagtgtacaagcctccagtgtacaagccaccagtatacaaaccaccagtttataagcctccagttgagaaacctcctatttacaagccaccagtttacaagcctcctatagagaagcnaccagtgtacaagccaccagtgtanaaccaccngtgtaaaaaccacgngtacaggcccctggttaggaanccncctttta

SEQ ID NO: 278930 - DNA, 283 bp, Glycine max
  unsure (1)..(283): unsure at all n locations
ggtggtgacttttgcaccaactggactgacaactgaagtcaagtctgtggagatgcaccatgaatctcttacagaggcacatcctggtgacaatgtgggattcaatgttaagaatgtnngcgttaaggatttgaagcgtggttatgttgcctcaaactcaaaggancnaccctgcaaaggaggctgctaacttcacagcccaagtcatcatcatgaaccaccctggtccagattggaatggctatgcccctgtcctcgatgncacattctcacattgctgtcc

SEQ ID NO: 278931 - DNA, 212 bp, Glycine max
  unsure (1)..(212): unsure at all n locations
tgattgaagaagatgccgatcagaaacatcgccatcggaaggcctgaagaggctactcaccccgacacgttgaaggcggggttggctgagttcatctccaccttgatcttcgtgttcgccggttcaggttccggcatcgcctacaacaagctncaccgacaacggcgccgccactncccgccggcctcatctccgcttccatcgcccatgct

SEQ ID NO: 278932 - DNA, 277 bp, Glycine max
aacagggagaattatgaattgggtttgcctgtaattaaaaaagctggtgttgaccacaaaattgaattcagagaaggtcctgctctaccagttcttgatgaaatgattaaagatgagaagaaccatggaagctatgacttcatctttgttgatgcggacaaggacaactacctcaactaccacaagaggttgatagagctgtaaaagttgggggcgtgatcgggtacgacaacaccctatggaacggatctgtggtggcaccccctgatgctcctct

SEQ ID NO: 278933 - DNA, 279 bp, Glycine max
  unsure (1)..(279): unsure at all n locations
cggcatctgccagggtgacgtcatcatgctcgtcctccgcaactgcccgcagttcgcactcgccttcctgggcgccactcaccgcggcgccgtcgtcaccaccgccaaccccttctacactccggcggagcncgcgaanaagcgatggccacgaaaaccaggctggtcataacgcaatccgcgtaccttgagaaaatcaagagtttcgcggacgacagcgatgtcatggtgatgtgcattgatgacgattattctnctgaaaacgatggcgttttgcat

SEQ ID NO: 278934 - DNA, 279 bp, Glycine max
  unsure (1)..(279): unsure at all n locations
ccgattgcnagaatggaatttcgatgctcagtcatctcttttaccattctcttctctcttgctcttgcaggagagagccatgtccatgcatcgctacctgaggaagattattgggaagctgtttggccaaacactcccattcccactgcactgcgnnagcttctaaagcctctccctgacnggtgttgaaatcgatgaactccctaagcaaattgatgatacacagtacccaaaaacatcttctataaagaagaccttcatccaggcaaaacaatgaag

SEQ ID NO: 278935 - DNA, 275 bp, Glycine max
  unsure (1)..(275): unsure at all n locations
gcttcatgttcatagcactgatctggaaatttgacttctctcctttcatggttttnatcattgccattctcaatgatggaacaatcatgacaatttcaaaggacagggtgaaaccatctcccttgcctgatagctggaaactgcaagancatatttgctactgggattgtacttggaagttacttggcgctgatgactgtcatattcttcctgggcatgaagaaccgatttcttccccgacaaattgggattaagacactgaccctgatgaatgg

SEQ ID NO: 278936 - DNA, 270 bp, Glycine max
  unsure (1)..(270): unsure at all n locations
ctcaagtctctcgaagcctctttctctctcttctagaagctatctgtgtttggtgttactaagtctccaacaagcaaagtacatggttgatttggaaatccaggtccccaccccattcgacccgnttgccgaggcgagagaatcggatgcccccggagcaaaggagtatgtgcatattcgaattcagcagaggaatgggaagaagagtctgaccacagtgcaagggctgaagaaggagttcagctacgagaagatcctcaaggacctcaa

SEQ ID NO: 278937 - DNA, 269 bp, Glycine max
tccaatatattccattctctctgtgtatttccctacctctcccttcaagatgcagatcttcgtcaagaccctcaccggcaagaccatcacccttgaggtggaaagctctgacaccatcgacaacgtcaaggccaagatccaggacaaggaaggaatccccccggaccagcaacgtctcattttcgccggaaagcaacttgaggacggccgtacccttgctgactacaacattcagaaggagagtatcttcacctcgtcctccgtctccg

SEQ ID NO: 278938 - DNA, 269 bp, Glycine max
  unsure (1)..(269): unsure at all n locations
gttaatttgtctttctctatctctatcggtcatgggtgcttttgcttttgatgaggaaaactcctccaccgtggctccggcaacactctacaaagctctgacaaaagatgctgacactatcatcccaaagattattggggccatccaaactattgaaatcgttgaaggaaatggaggacccggaaccgtcaagaagataacagctagtgaaggtgaccaaaccagtttcgtgctgcaaaaagtggatgcaattgncgaggctaantggt

SEQ ID NO: 278939 - DNA, 226 bp, Glycine max
  unsure (1)..(226): unsure at all n locations
gcatttggtactgctcacagggcacatgcatcaacagagggtgttactaaatacctgaagccatctgttgctggttttcttttgcaaaaggancttgattaccttgttggggcagtatcaaaccccaaaaggccatttgctgccattgttggtggttccaaagtctcatctcaaattggagtgattgagtcattttagaaaaagttgacatccttcttcttggtgg

SEQ ID NO: 278940 - DNA, 301 bp, Glycine max
aaaagaagaagagaaaaaagatgagcgacggaggaaaacgacaaggtggaagagcgttgccgccgccgccaagaggccctccgcctcctcccccctctcgccctcgcctcgaacccgtcgatcgcgaaaaacacatgtccgttactgctgcgagtgttcactaagattgggagtcaccattccatggaagactttgccgtcagaggcaaagagcccaaagacgaggttcagatttacacctggaaggacgtactctccgagaactcaccgatcttgtcaaagaagttgctccggctgcaag

SEQ ID NO: 278941 - DNA, 300 bp, Glycine max
gtttcagttccaaacaaaacccatcaaagtctttctccctcagtgatcatatattcattcagttctatacaaaatcctcaaaaactcttcctctctgccatgaccatggaatacagaaccttagaactcaacatcatatccgcaaaggacatcaagaatgttaatctcttctccaagatggacgtatacgccgccgtttcgctctccggtgaccctctccaccctcagggcgccaccacccacgtccacaaagacgccggcagcaaccccacgtggaactaccccgtgaaattctctgtc

SEQ ID NO: 278942 - DNA, 297 bp, Glycine max
cgctcttcccttcctctggtggcgacaatgtcgactcctggctaggaagaggctgatgagagacttcaagaggctgcaacaagacccgcctgcagggatcagtggtgccccccaggataacaacataatgctgtggaatgctgtcatatttggtcctgatgatactccatgggatggaggcacgttcaagttgacactccaatttactgaggactatccaaataaaccaccgactgtacgatttgtgtctcgcatgtttcatccaaatatttatgctgatggaagtatttgtttgga

SEQ ID NO: 278943 - DNA, 297 bp, Glycine max
agactattgaagcagaagcagcccacggcacagttacccgccattttagggttcatcagaagggaggcgaaaccagcacaaatagcatagcatccatctttgcctggacaagagggctagcccacagggcaaaactggatgacaatgctaaactcttggatttcactgaaaagctagaggcagcttgcattggagtagtagaggctgggaagatgaccaaggatttggcacttattcttcatgaattcctctgtgttcaaataatgctcccttctcgagccgaatcggctcgagcgg

SEQ ID NO: 278944 - DNA, 297 bp, Glycine max
gcggccatgtttgtcattggatggaacttggtgtccaccaccatcattctccttgtcataaaattgttcatacccttgaggatgccggatgagcagctggaaatcggcgacgacgccgtccacggcgaggaagcttatgccctctggggtgatggagaaaaatatgacccaactaggcatggttccttgcaaagtggcaacacttttgtgtcaccttatgttaatggtgcaagaggggtgaccataaacttatgagtcaagaaattcggctgtgctttgctcacacatatgtataaa

SEQ ID NO: 278945 - DNA, 296 bp, Glycine max
aggaggtgttctcttcaaggtttatatagttggtgatgctataaaggttgtaaggcggttttcgttacctgatgttagcaactgggaactctccaaagatgctggtatatatcgctttccaagggtttcttgtgctgcagcttctgcggatgatgcagatctggatcctactgttgccgagcttcctccaagacctttactagagaaactggctaaggagcttcgatggcgattggtaactagctcatctttggttcaaggtgtcatgttattgatacaaggactataatatgctt

SEQ ID NO: 278946 - DNA, 297 bp, Glycine max
  unsure (1)..(297): unsure at all n locations
gccgtggttggaggtccatttattgcatgccaaagagagcagcattcaagggtactgctcccatcatcttgtcagataggcttaaccaggtgcttcgttgggcactaggctccatagagatcttcttcagtcgtcattgccctttatggtatggttataaggaagggaagttgaagtggcttgagagatttgcctacgcaaacacaactgtctaccccttcacctccatacctcnagttgcctactgtgttcttcctgctgtttgtttactcactgataaattcatcatgccgccgg

SEQ ID NO: 278947 - DNA, 295 bp, Glycine max
cacatttcaaaatgaagcattgcatctcaaaacattttctaagttgtttcgctttgtttctgttgctagtcgcaacaacctatgccactgttgtccctaccaccacccaaaagccaccaagaagctttgcaaaccaattcctcatcccccagaacgcggcacgtgcggtgctgaggctgcggccattggtgtgggactccaaattagcacactacgcgcaatggtatgccaaccagaggcgcaacgattgtgccctagagcactccaacggaccttacggtgagaacattttctg

SEQ ID NO: 278948 - DNA, 292 bp, Glycine max
  unsure (1)..(292): unsure at all n locations
agaagaagtacatctacaccatcgatgacgactgcttcgttgctaaggatccttctggaaaggatatcaatgcacttgagcagcacattaagaatctcctttgtccatccactccattttttttcaacaccctttntgcacccttacagagaaggtgctgatttcgtccgtggatacccttttagtcttcgtgagggtgcccccactgctgtttctcatggcctctggctcaatatacctgattatgatgctccaacacagcttgtcaaacccctcgagaggaacaccaggt

SEQ ID NO: 278949 - DNA, 291 bp, Glycine max
gctcccctcgccaaggttatcaacgaccgatttggaattgtggagggtcttatgaccactgttcatgccatcacagctactcagaagactgttgatggtccatcaaacaaggactggaggggtggaagagctgcttccttcaatataattcccagcagcactggagctgctaaggctgtaggaaaagttcttccagcactgaatggtaaattgactggcatgtccttccgagtccccactgtagatgtttcagttgttgacctcactgttaggctagagaagccagcaacc

SEQ ID NO: 278950 - DNA, 291 bp, Glycine max
gcatgtgcctggggattctagggtgaagggagagttctttcaccaaaccacatttagcatcagtttgtctgttgcaaaaaaaatttattgaagatgtgcaaaagctagttcaattggagccgaagggattttgtggcatagagctttacaatggaattctcatgcgttatgtcaaggcttcgagtgcctatttggggaagcaagaggatgctttagacattgatatcacttactaccgtagcaaggatccaatgactcctaggctttatgaagacattcttgaagaggttg

SEQ ID NO: 278951 - DNA, 287 bp, Glycine max
gcattagcaaaagcaagaagaactagtctaagcagaaatggcctcttcagtgatggcatctgtggccctcaaacctgcccctttcactgttgagaagtcctcagttagaggccttccctccctctcaaggaactcctcttcattcagagttgtggccagtggtggcaagaagatcaagactgacaagccttatggaattaatggtggcatggctttgagggaaggagttgatgcatctggcaggaaaggaaagggaaagggcgtttaccagtttgtagacaaatacg

SEQ ID NO: 278952 - DNA, 285 bp, Glycine max
  unsure (1)..(285): unsure at all n locations
gcgggttttgcaggtgatgacgctcctagggccgtgttccgcagtattattgggcgaccangccataccggtgtaatggttgggatgngtcagaaggatgcttacgtgggtgatgaagctcaatcaaaaaggggtatactcaccttgaagtatcctatagannatggcatagtcancaactgggatgatatggagaagatttggcatcacncattttacaatgagcttcgtgttgcccctgaagaacaccctgtacttcttacngatgcacccctcaatcccaag

SEQ ID NO: 278953 - DNA, 288 bp, Glycine max
  unsure (1)..(288): unsure at all n locations
ccctaaacgactctatctctnttcgtntngttcttccttgcgctcctcctcgntcgtncgttctccctcgcgtagatcggcaatggcggagaccgagacgtttgctttccaggctgagatcaaccagcncctcagtctcatcatcaacaccttctactccaacaaggaanacttccttcgtgaactcatcagcaacgcctctgatgctttggacaagattagatttgagagtntgacggacaagagcaagctcgatgctcagccagagttggttcattcatattattc

SEQ ID NO: 278954 - DNA, 287 bp, Glycine max
aagaagttgtattttggcatccccgtggcttcaagaagagaatctcaatggaggcccaggagctgaagcgcgtgttccagatgttcgaccgcaacggcgacgggagaataacgaagaaggagctgaacgactcgctggagaacctgggcatcttcatctctgacaaggacctgagccaaatgatccagaggatcgacgtcaacggcgacggttgcgtggacatggacgagtttggggagctgtatcagaccataatggacgagcgcgacaatgaggaggacatgagg

SEQ ID NO: 278955 - DNA, 284 bp, Glycine max
  unsure (1)..(284): unsure at all n locations
aattatttggacgctcaatattttggtgagattggaattggcacacccncacagcccttcactgtagtgtttgacactgggagttccaacctttgggttccatcatcaaagtgctactttacttctgcttgctatacccataattggtacacggctaagaaatcaaagacacatgtcaaaaatggaacttcatgtaaaataaactatggaactggatcaatatctggtttcttcagtcaagataatgttaaagttggcagtgctgttgtcaagcatcaggattt

SEQ ID NO: 278956 - DNA, 285 bp, Glycine max
cattaattgcaagaatggcacttcgttgcttggtgatgtccctttctgttctcttcactcttggtcttgcgagagaaagccatgccagagacgaagatttttggcatgctgtttggccaaacactcccattccaagttcattgcgagatcttctaaagcctggccctgcaagtgttgaaatcgatgatcaccctatgcaaattgaagaaacacagtacccgaaaaccttcttctataaagaagaccttcatccaggcaaaacaatgaaagtacaattcagcaagc

SEQ ID NO: 278957 - DNA, 286 bp, Glycine max
agcacttgaaacatcaaaacagacaaatgctccactggaggaagtgcgcaagaatatttggctggtggactcaaagggattgattgtcagttctcgcaaagattcgctccaacattttaagaagccctgggctcatgagcatgaacctgttaaaaatcttctagatgctgttaataaaattaagccaacagtgttgattggaacatcgggacaaggaagaacttttactaaagaagtgattgaggcaatggcttctattaacaagagacctattattctttctctt

SEQ ID NO: 278958 - DNA, 287 bp, Glycine max
tggccagaaggagcttgctgctttctttggccatgttggcagcaagacctcttgtggttatggggtggctacagggggacccttagcctggggcttatgctacaataaggaattgagtcctgataaattctactgcgatgactactacaaattaacctacccttgtactcctggtgcagcatactatggccgtggtgccatcccactttactggaactacaactatggaaaagctggggaagccttgaaggtggatctgttgaaccatccagaatacatagaacaaa

SEQ ID NO: 278959 - DNA, 225 bp, Glycine max
  unsure (1)..(225): unsure at all n locations
caatatantccattctctctgtgtatttccctacctctcccttcaagatgcagatcttcgtcaagaccctcacnggcaagaccatcacccttgaggtggaaagcntgacaccatcgacaacgtcaaggccaagatccaggacaaggaaggaatccccccggaccagcaacgtctcattttcgccggaaagcaacttgaggncggccgtacnctngntgactacag

SEQ ID NO: 278960 - DNA, 283 bp, Glycine max
aaaacgtgttgtggttgcaggaaaccgagccagggatgctcttgttgcgcagggacttaaagttggtcttgttgaagttcttcttggtcttcttgattggagggctggcggaaggaatggcttttgttctcagatgaagtggaatgaatctgaagcgtctattggcagggtgcttgcaattgaggtcttgcatgcctttgctactgaaggagcccattgcactaaagtgcgagagctattgaataattctgatgtttggagtgcttacaaagaccagaggcat

SEQ ID NO: 278961 - DNA, 285 bp, Glycine max
  unsure (1)..(285): unsure at all n locations
attaattgcaagaatggcacttcgttgcttggtgatgtccctttctgttctcttcactcttggtcttgcgagagaaagccatgccagagacgaagatttttggcatgctgtttggccaaacactcccattccaagttcattgcgagatcttctaaagcctggccctgcaagtgttgaaatcgatgatcaccctatgcaaattgaagaaacacagtacccgaaaancttcttctataaagaagaccttcatccaggcaaaacaatgaagtacaattcagcaagcct

SEQ ID NO: 278962 - DNA, 279 bp, Glycine max
ttggttttgtagtaagtgaggtgaggtgccaaaatggtgaagataactcttggtactttcgatgactcttttggtgttgcctctcttaaggcttatttggcagagttccatgcaactctgattttcgtgttcgctggtgttggttcagccatcgcttacaacgagcttacaaaagatgcagccttggatccaacggggctggtggcagtagctgtggcccatgcatttgcactgtttgtaggtgtctccgtcgcagccaacatctcgggtggccatttg

SEQ ID NO: 278963 - DNA, 280 bp, Glycine max
  unsure (1)..(280): unsure at all n locations
caacaggcccagtctggaactgggaaaacagcaactttctgctctggaattctgcagcaacttgactatagtgtgactgaatgccaagccttggttttagcaccaactagggagcttgctcagcaaattganaaggttatgcnggcactcggagattatcttggtgtgaaggtgcacgcatgtgtgggaggtaccagtgttcgtgaagaccaacgcattctatcaagtggtgttcatgttgttgttggtactcctggtcgtgtattgatatgctgcgcag

SEQ ID NO: 278964 - DNA, 307 bp, Glycine max
  unsure (1)..(307): unsure at all n locations
cttttaattcatctcactcacaaatcacaatgctcttcctttnttccttaataataataccataataatctgttacnttacggggcccanctgtctgttacggagctcaaggagcgtcactctgctgccaccgacaccgtcaacaatctcagacaccgtttaaagcagaagcgcctttcgttgctcgacacagatatttctgggtatgcaaggtctcagggtagaacgcctgtgacctttggacctacggatctggtttgctgtagaaccttgcagggtcacacgggaaaggtgtattcattggatt

SEQ ID NO: 278965 - DNA, 305 bp, Glycine max
catcagtgcctccttctggtctccctggtgttggtctcctacgctgcccggtcggaatcagcgctgggcggctggagccccatcaaggacgtaaacgacagccacgtggcggagatcgccaactacgcgctgagcgagtacgacaagcgttctggggccaagctatcccttgtcaaggtcgtcaagggcgagactcaggtcgtttccggcaccaactaccgtctcgtcctcaaagccaaggatggatccgccacggccagttacgaagccatcgtctgggagaagccttggctccattcatgaat

SEQ ID NO: 278966 - DNA, 305 bp, Glycine max
  unsure (1)..(305): unsure at all n locations
acagtatccatatggaggtttaatcctaaacaggccaactattagcaggagattcatgcctgaaaaggggtctcctgaatatgatgcgttggctaagaaccctgagaaggagtttttgaagactattactggcaagaaggagaccctcattgaccttacagtnatagaaatcttgtcaaggcacgcatctgatgagntctaccttnggcaganagatggtggtgactactggacttctgatgccggtccattagaggcatttaagaggnttggaaagnagcttgaagagattgaaaagaagctta

SEQ ID NO: 278967 - DNA, 302 bp, Glycine max
gtttgttgtgagctataagctagtttatcgtgaggagaatatgaagttgtttgttttctttgttgctgcagtagttttggtagcatggccatgccatggcgcaggctaccaaaggttccctctccgaatgaaaactggctatggtgagcgttcttcggaggtaaaatgcgcaagttttaggcttgctgtggaagcacacaacatccgagcctttaaaaccattcctgaagagtgcgttgaaccaacaaaggactacattaatggcgaacaatttagatcagatctaaaacagttaaccaaca

SEQ ID NO: 278968 - DNA, 304 bp, Glycine max
gaagaagtacgcaggcaattcaacaccattccagggttgatggagggaactgctaagcctgactatgccacatgtgttaagatctccactgatgcttccattaaagaaatgattccacctggtgctcttgtcatgcttacaccgcttgttgttggaatcctttttggtgttgaaacactttctggtgtcctagctggatctttggtgtctggtgtacagattgctatttctgcatccaacaccggtggtgcttgggataatgccaagaagtacattgaggctggtgcttctgagcatgcaagaa

SEQ ID NO: 278969 - DNA, 281 bp, Glycine max
  unsure (1)..(281): unsure at all n locations
agcaggagtggcttgcagaagtanttgaatgagctaggntttaatatagttgggtatnnatgcaccacatgcattggaaattcaggggatatnaccgaagctgtngcanctgcaattacngaaaatgatatagtagctgcanctgtactgtctggaaataggaactttgagggccgagttcacccattaacaagagctaattatcttgcttctcctcctcttgttgtngcctatgcccttgctgggcacagtggacatgactttgacactgaacccattgg

SEQ ID NO: 278970 - DNA, 303 bp, Glycine max
  unsure (1)..(303): unsure at all n locations
tgatctaccanagaagcatggtagaggaggtcaatcagctnngcgttntgctcgtccttaggatggnaaagcggcacaactatgttaggnaaacagcagaatatgctactcantatttcatcantactgccaccagtnnacctaatntttctngactnatacttgctggttctgctgacttcaanantgancnnagtcaganaganatnantgacccncgatngcaagcncaantatnnaatgcgggagatgtcncttatggtggggtcnatggntgcantcaagccatcgagcnatctgctg

SEQ ID NO: 278971 - DNA, 296 bp, Glycine max
agaagaagtacatctacaccatcgatgacgactgcttcgttgctaaggatccttctggaaaggatatcaatgcacttgagcagcacattaagaatctcctttgtccatccactccattttttttcaacaccctttatgacccttacagagaaggtgctgatttcgtccgtggatacccttttagtcttcgtgagggtgcccccactgctgtttctcatggcctctggctcaatatacctgattatgatgctccaacacagcttgtcaaacccctcgagaggaacaccaggtatgtt

SEQ ID NO: 278972 - DNA, 298 bp, Glycine max
  unsure (1)..(298): unsure at all n locations
gctgacttttcgagaaaggaaaaaaaaagagtttccggcntattccatcatgaacgctcttcccattcttctcttcttcctcttngtttcggcattagttnatgcgaagaaaactggcgatgtgacggagttgcaaattggcgtgaagcataaaccagcatcatgtgaagttctggcacacaaaggtgacagagtcaaagtacactatcggggaaaactcactgatggaactgttttcgattctagctttgaaaganataatccaattgaatttgagcttggtactggtcaagtgatc

SEQ ID NO: 278973 - DNA, 300 bp, Glycine max
cttcaaggtgcactgaggagttccgcctcaggaagattaagaatgatcagctaaaggccgaagccaaggtcaagggtgagaagatcagcaccaagagacagcctcagggtcccaaacccggtttcatggtggagggtgcgacccttgagacagttacccccatcccatatgatgttgtcaatgacctcaagggaggttattagtttgtctacctgtttgattgttggtttcagtagttttttgttttgagttttttgtccctttttggttgaaaaggccattacttatgaacaaacgaga

SEQ ID NO: 278974 - DNA, 297 bp, Glycine max
  unsure (1)..(297): unsure at all n locations
cttccctnctccaacatgccnaacgacagcgttctgagtcttgacttcttcgttaccctcttcacatgccttctctctgctaattcccacgatgaccatattnncctaccgagtcaactccatgacgatgactcagtgagttgcactgctaccgacccaaaccttaactacaagccggtgatcggaatcctgacccancccggcgacggtgnctctggccggctcagcaacgccaccggggtttcttacatcgccgcctccnacgttaaattcgtggagtccggtggtgctagagtt

SEQ ID NO: 278975 - DNA, 283 bp, Glycine max
  unsure (1)..(283): unsure at all n locations
gctcgtgcctctagggttatcatatctccatttccatttcctctctctcagtttccaagaatcttaagctatgggaaagtcttacccaaccgtgagcgctgattaccagaaggccgttgagaaggcgaagaagaagctcagaggcttcatcgctgagaagagatgcgctcctctaatgctccgtttggcatggnactctgctggaattacgacgtgagctcgaagaccggtggtcccttcggaaccataaagcacccctccgaatcgctcacggcgtaanaag

SEQ ID NO: 278976 - DNA, 296 bp, Glycine max
  unsure (1)..(296): unsure at all n locations
ctgcctcttcctcacccctttctccancctaacgagtaaggaaaaatggcgcgtaagaagatcagagagtatgactcaaagaggttgttgaaggagcactttaagagactttctggcaaggagttgccgatcaagnctgcacaaattactgcatcaactgatttcactgagctacaagagaatgaaccctggctttcatcttctaaattggttgtgaaacctgacatgttatttggaaagcgtggcaaaagtggtttggttgccttaaatttggattttgcacaagttgtttcgtt

SEQ ID NO: 278977 - DNA, 294 bp, Glycine max
  unsure (1)..(294): unsure at all n locations
tcagattggaaagcccacaccanaacctgtggcactagagaatacaaatgcgactgtngcaccctcttctccaggaaagacagcttcattactcatagagcattctgcgatgcattggctgaagagagtgctaggctcacatcagttacaacaacaaatctaaatttcaagagtgaagagggtggtaataatgtgatgaactcgcagcagcatggtttgggaggacatggactaattggagcncaaagtcttcaaaatgtttctggcattccacaatttggttcacanggtttt

SEQ ID NO: 278978 - DNA, 291 bp, Glycine max
gttttcctcttctgaatccaccgccactgcagcgtggacggaatcggagtgcagccatatcagcagcagcagaagtccttgaagtgctgctctagtttgaggcacaatgagattggagaaatgctggttttgctcttcaaccatataccctggacatggaatccagtttgttcgtaatgatgcaaagatttttcggttttgtagatctaaatgccacaagaactttaaaatgaagagaaatcctcgtaaggtaaaatggaccaaggcatatcgtcgagtgcatggaaagga

SEQ ID NO: 278979 - DNA, 290 bp, Glycine max
ggaaaatgaaagggttgaagcagaagaaagcccatatcatggaaattcaggttaatggtggtagtattgcacaaaaggtggactttgcatacagtttctttgagaaacaggttcctattgatgcagtgttccagaaggatgagatgattgacatcattggtgtgaccaagggtaaaggttatgagggtgttgtcactcgttggggtgttacccgccttccccgtaagactcacagaggtttgaggaaggttgcttgtattggtgcctggcatcctgcaagagtttcatca

SEQ ID NO: 278980 - DNA, 293 bp, Glycine max
gtccgtgaaacacccagttatctgcagcgagagtgggagagccatcgtgtctcatcattcggtcttgattttcgaggcggttggcaccagcagcaccaccgggggaggagcttcccctgcattgtccgctcaatatctggcggaggagctgtcggaggattaccgcaatctgtcggagctggcttttagaggggaatatgaaacgtgtctggtgtacacggaggagatgaaggagcgatgcgtggaacagttcaagcaagggacggtgtgtatggaacagctggcagcggtgg

SEQ ID NO: 278981 - DNA, 291 bp, Glycine max
  unsure (1)..(291): unsure at all n locations
tggcacatgcacttgtggtggctgtaatgatctccgccgcccacatttccggtggccacctcaaccccgccgtcacccttggcctcctcgccggtggtcacatcaccatctttcgttccatgctctattggattgatcaattagtagcagccgcaacagcttcttatctcctttactanctctcaggaggacaggcaactccagttcatacgtggccagtggagtggggtatggtcnaggagtagtttgggagattgtgttgacgttttctttgttgttcactgtgnatgc

SEQ ID NO: 278982 - DNA, 290 bp, Glycine max
gtacgtttggggaggtgcttggatgtactttgctactggaaattcgtcgtaccttaagcttgctacggctcctggcctggccaagcatgctggtgccttctggggaggccctgattatggagtactcagctgggataacaagcttgctggtgctcaggttcttctgagtcgtttgaggttattcttgagtcccgggtatccatatgaagaaattttaaagacctttcacaaccagacaagcataatcatgtgctcctatctaccagttttcacaagctttaatagaacca

SEQ ID NO: 278983 - DNA, 266 bp, Glycine max
  unsure (1)..(266): unsure at all n locations
ctcagagataatgactcagttaaanttatctngacgatgaanttattagactgctccattcantatcatgtgccaagtacaagattctcaacaaggagccaaatacaaaaacaatattgtccactgattattttgaatttaattccaaatttactgacaaaatgaggagaatcaagattcctcttcctcctgtggatgagaagaaaaaggttattgaggatgttgacaaggacagnngatatgctattgatgcctcattgtgcgta

SEQ ID NO: 278984 - DNA, 288 bp, Glycine max
  unsure (1)..(288): unsure at all n locations
ctaagaggagcgtgggaacgttgaaggagtgtgatttgaaggggaagagggtattcgtgagggtcgatctgaacgngcctttggatgacaaccttaacatcaccgatgacactagagtccgtgctgctgttcccaccatcaagtacttgactggttatggtgctaaagtgatcctttctagccatttgggacgtccanaaggtgtaacacctaaatacagtttgaagcctcttgtgccaaggctgtctcaacttcttggaattgaggttacgatggccaatgactcta

SEQ ID NO: 278985 - DNA, 295 bp, Glycine max
  unsure (1)..(295): unsure at all n locations
attatgagcaaagaaagatagtgagtgaagtaactgaaganaagaaaaaatgccgtgcctcaacctcagcaccaacgtgtccctcgaaggcgtcgacacctcttccatcctcgccgaagccacctcctccgtcgccagcataatcggcaaacccgaagcctatgtgatgattgtactganaggntcagtacccataagcttttggtgggaatnaggcagccagcagcttanggngganttggtttccattggtggtcntaaccctnnnggtaaacgaggnaattatggnggaatt

SEQ ID NO: 278986 - DNA, 187 bp, Glycine max
  unsure (1)..(187): unsure at all n locations
gaacaagtcaagcttctactacaancgccacaagaacactgctttctnctggntcagnnncatcntccatgactgtgctgttcagagttatgatgcttcactgttgctggactccacaanaaggagcttgtctgagaagganacagatagaagctttgcgnnnaaaaaattcnaggacattgagacc

SEQ ID NO: 278987 - DNA, 308 bp, Glycine max
  unsure (1)..(308): unsure at all n locations
ctccgcctgggcccactcggacgatcctcctcccgggtcaactcgcccgtgatctcaacgcagaggctgccccgcccctgaccccaacctctactacaagccagtcatcggaatcgtcagccatcccggcgacggcgcctccggccgcctcagcaacgccaccggcgctcctacatcgccgcctcctatgtcaaattcgttgaggccgccggngcccgtgtcgttcccctcatctataccgancctccggagaagcttctcaagaagctcgaattggtaaatggggttctcttcactggtggatgggc

SEQ ID NO: 278988 - DNA, 222 bp, Glycine max
gaacgtcattcctctcttccgctgcatattttccgatcacctcactccggtgcttgcgtaccggtgcctggttaaggaggacgagagagatgctccgagttttctctttgaatcggtcgagccaggccaaatttctagcatcggacggtacagtgtggttggagcacagcgtgtatggaaattgtggcgaaagagaacgtggttactattatggaccacgtg

SEQ ID NO: 278989 - DNA, 297 bp, Glycine max
tctaaaagagatctttttctgctctttgaagaaagaagggtctttgcttgattttggagatgtctctgctctcagatctcatcaaccttaacctctccgataccaccgagaaggtgatcgcagagtacatatggatcggtcggctcaggaatggactgaggagcaaagcaaggactctcccaggaccagttagcgacccttcagagcttcccaagtggaatatgatggttccagcacaggtcaagctcctggtgaagacagtgaagtgattttatacccacaagccattttcaggga

SEQ ID NO: 278990 - DNA, 310 bp, Glycine max
  unsure (1)..(310): unsure at all n locations
aactcactcatcaatctcgttngttctcactaactattacttcatcatgtcgtcgagccncagttggtcaagtcatcacaatgcaaagctgcggtttcatgggaggcaggnaagccacttgtgattgaagaagtagaggtggcaccaccacnagctggtgaagtgcgtttnagatcctctacacctctctttgccacactgatgtttacttctgggaagccaagggccaaactccattgtntcctcgtatatttggtcatgaagctggagggattgtgganagcgtaagtgcgggtgtgactcatctcaa

SEQ ID NO: 278991 - DNA, 310 bp, Glycine max
  unsure (1)..(310): unsure at all n locations
ggaaccttgttgatttctaagatcagggaagagtacccagatagaatgatgcttactnngctctgttttcccatctcccaaaggtttcagacactgttgtgnaaccctacaatgctactctctctgttcaccagcttgttgaaaatgcagacgagtgcatggtgcttgaaatgaagctttgtatgacatctgcttccgtaccctcaagctaaccacccctagctttggngacttgaaccatttgatctcagcgacaatgtctggtgtcattgttgtttgaggttccctggtcagttaaactctgatcttg

SEQ ID NO: 278992 - DNA, 282 bp, Glycine max
  unsure (1)..(282): unsure at all n locations
gccagcacggaagacaagaagacggttggctcgtcagaagaaagctgtgaagattttccccagacctacagctggacctcttagacccattgtacatggtcaaactttgaaatacaacatgaaagtgagagctggaaggggattttcccttgaagaactcaaggcanagggattcccaaaaagcttgcaccaacaattggtattgctgttgatcatcgccgcaagaaccgttctttggaaagtctgcaagctaatgtgcagaggctgaaaacatacaaggcc

SEQ ID NO: 278993 - DNA, 304 bp, Glycine max
tggttctgtaccagcctcagcacaagctactttcccttatttatttgcagtcagtaagttcttgcagtctggaacttttgaccttgtgggcactatcatatacgagatagatgaacatccattccaaagcaccttttttaatggcactgttgaagttgttgaatcggtgcttttctaagcatggaatctgtttttcttgttactcttggggttgcactccttgtcctcctggggctatggattcatggtcaaatacaacacctatctaagaaaacaaagagggcgccaaaagttgaagtgggat

SEQ ID NO: 278994 - DNA, 311 bp, Glycine max
  unsure (1)..(311): unsure at all n locations
ggagatttctgatgatgaggatgaggaagagaagaaggatgangagggtanagttgnagatgtgggatgaagatnannagaangangagaacnanaaanaagaccattaaggaggtatctcacgagtggtcattggtgaacaagcagaagcctatttggatgaggaaacctgaagagattacgaaagaagaatatgctgctttctacaagagtcttaccaatgattgggaagagcatttggctgttaagcacttttctgttgagggtcagctggantttaaggctgtcctctttatccccaagagggcacc

SEQ ID NO: 278995 - DNA, 302 bp, Glycine max
  unsure (1)..(302): unsure at all n locations
atgggttcaacaggtgagactcagattactccaacccatgtatctgatgaagaggcanaccttttcgccatgcaactagccagtgcctcagtactccctatggttctcaaatcagctcttgagcttgatctgttggaaatcatagccaaggctggccctggtgtcacctttccccctccgacattgcttctcggctcccaacacacaaccctgatgnncccgttatgttggaccgtatattgcgcctcttggcttgctacaatatcctctctttttctcttcgcatctccctcatggcaagg

SEQ ID NO: 278996 - DNA, 253 bp, Glycine max
  unsure (1)..(253): unsure at all n locations
agnncaacnnacaggggctgcctcaacatnnaactggtgtntctantcttgtgccgncaccanccccanntncctgctatgacagcggntctggctgcantatnctagatgangttattagaggtaccattaactcanctgtgactttacatgactatgtgnaatanttnanccatangtacaagatcattttactnanaaggctgtgaagcaattcaagcagtgtnttctagntcagaccgacaagatctgg

SEQ ID NO: 278997 - DNA, 296 bp, Glycine max
  unsure (1)..(296): unsure at all n locations
ggggatgctaagaaggaccatgcttgttgggagagaccanaggacntggatactccnagaagcgtgtttaaaatagatgcaaacacacctggttcagaagttgccgcagaaactgctgcagctcttgcagctgcttctctggtttttagangaagtaccccacatactccaaaattttagtcaggagagccatcagggttttccagtttgctgataagtacaggggntcctacagcaatgccttgaaaccttatgtgtgccccttctactgctcttactctggatatcaggatgag

SEQ ID NO: 278998 - DNA, 293 bp, Glycine max
  unsure (1)..(293): unsure at all n locations
ggacgagatccctctctctcccattccagatctcgccatcagattcaccctttcattttaagcaaagtcataacttgaagaaggttcatggctgctccaccggcaagggctcgtgccgattacgattatctcataaagcttctcttgatcggtgaagccnngttggaaaaagttgcctcctcctgcgtttctccgatgggtctttcaccactagtttcatcacaactataggcattgatttaagataagaaccattgagcttgatggaaaacggatcaagctccaaatttggg

SEQ ID NO: 278999 - DNA, 312 bp, Glycine max
  unsure (1)..(312): unsure at all n locations
cgacgatgcggcgccgtttcgggtcttaccaccgttaagaacccgatctcgcttgctacgtttggttatggacaaatccccgcattcctacctcgccttctccggcgccgaagaattnnctaggcaacagggtgtggaggttgtggacaacgagtactttatcacacctgacaacgttggcatgctcaagctggcaaaggaagcaaacacaatcctgtttgattaccgaatcccaacatcggggtacgagacgtgcggatccggtgtggagagtccatgcaaatgaatggatcccataagcgtgtagcgccc

SEQ ID NO: 279000 - DNA, 298 bp, Glycine max
  unsure (1)..(298): unsure at all n locations
tgaggacactactactggccntgtctctcgcaggttggccctacactgngctcattggtgctgctgctgttggctctaaggtggcacctgctgatgcagcctatggagaagctgccaatgtgtttggaaaaccaaagacaaacacagacttcctttcatacaatgggaatggattcaaactctcaattccctcaaagtggaacccncagcaaagaggttgagtacccaggtcaggttcttagatatgaggacattttgatcaaccagcatgttgctgtcaggtcatgcaatgacaaga

SEQ ID NO: 279001 - DNA, 300 bp, Glycine max
  unsure (1)..(300): unsure at all n locations
cagcctcctcatgagaagccncccatctacaagcctccttatgnaaaaccacccattcacaaacccccattncgagaaaccacccatttacaaacctccattcgagaaaccacccatttacaaacctccattcgagaaaccacccatttacaancctccattcgagaaaccacccatttacaaacctcctttcgagaaaccaccagtatacgagccactcctttggtgaagccaccaccatttgaaaagccacccttttacaaacctcctttcgagaaaccaccgctttacgagccacct

SEQ ID NO: 279002 - DNA, 217 bp, Glycine max
  unsure (1)..(217): unsure at all n locations
ctgaaccaaatcatcacacacacatactnagangcaacaattcttctacaatggatctcctctttctggaaaagaccctcataggtctcttcctcgctgcggtggtcgccatcgccgtctccaccctccgcggccggaaattcaagctcccaccgggcccactccccgtcccaatcttcggcaactggctccaagtcggcgacgacctcaacaccgc

SEQ ID NO: 279003 - DNA, 302 bp, Glycine max
  unsure (1)..(302): unsure at all n locations
gtcnggtacctcnatggcatgcnctcatgtcagnggaattgctgctctcattcgctccggttnncncgagatgganccctgnagccatnaaatctgcaatcatgacaanggccgnggtgactgnccacaccggaaggccaatactcgatgaagaccnnncagcgggagttttcgncatgggagccggacatgtgaatccacaaagagcattgaaccctggattggtgtatgnnattangccagatgnctcacatcagccatctttgcngccttggatacacatgtcagnaagttcagnatcc

SEQ ID NO: 279004 - DNA, 297 bp, Glycine max
  unsure (1)..(297): unsure at all n locations
tgcaagaatggcacttcgttgcttggtgatgtccctttctgttctcttcactcttggtcttgcgagagaaagccngccagagacgaagatttttggcatgctgtttggccaaacactcccattccaagttcattgcgagntgnatctaaagcctggccctgcaaangttgaaatcgatgatcaccctatgcaaattgaagaaacacagtacccganaacctattntataaagaagacctcatccaggcaaaacaatgaaagtacaattcagncaagctacccttcaacaancagggg

SEQ ID NO: 279005 - DNA, 290 bp, Glycine max
  unsure (1)..(290): unsure at all n locations
cttcaacaaggacctnggntgggatgaanactggatctacctgggtgggaccnncatcggtgcagctcctgcagcactctacnaccaggtcgtaatcagggccattcccttcaagtccaagtgattcnntcaaacggttcatgcttaatcaagttgggnnnnnnnnnnnnnnnnnnnntcaagccaatgtttgtgggttttggtttcattcntaagatgatctgtttatcncttntcttcttttaaaattaaagtcttgtatcttgtatgtaaagatgtaaaattatgat

SEQ ID NO: 279006 - DNA, 294 bp, Glycine max
  unsure (1)..(294): unsure at all n locations
ggagagcatacacaagtcaaaggctgagaaggcaagagagaagaccttatctgaccagtttgaggccaaacgggcaaagaacaaggcaagcagggaaaggaaaattgctaggagagaagagcgtttggctcaaggccctggagagaagccatcagcagccccaagtgctccatctggcaacagtatgcccagccagtcccaaggcattcaaagaaatcaaagaagtgacatttttggagttggaaggaacggcttgaatattcangtggctgacatcctgattacgtggcnatg

SEQ ID NO: 279007 - DNA, 264 bp, Glycine max
  unsure (1)..(264): unsure at all n locations
tttgtnaggttttttgtcactccttcagattccgtggccattatcgctgcaaatgcacttgaagctataccatacttttctgctggtttaaagggtgttgccaggagcatgccaacctctgctgccctggatgttgttgccaaattctgaatttgaaattttttgaggtccccacgggttggaagttcttggtantttaatggatgctggattgttcagtctgtggtgaagaaagtttgggatggttcgaccagttcgtgagna

SEQ ID NO: 279008 - DNA, 281 bp, Glycine max
  unsure (1)..(281): unsure at all n locations
cacacacacatactaagaagcaacaattcttctacaatggatctcctccttctggaaaagaccctcataggtctcttcctcgcngcggtggtcgccatcgccgtctccaccctccgcggccggaaattcaagctcccaccgggcccactccccgtcccaatcttcggcaactggctccaagtcggcnccgacctcaaccaccgcaacctcaccgatttggccaaaaaanncggtgacatcttcctcntccgcatggggcagcgcaacctcgtcgtggtttt

SEQ ID NO: 279009 - DNA, 219 bp, Glycine max
  unsure (1)..(219): unsure at all n locations
agctggtactatttgaaagatgacntccttgaagggggacttccatttaacaaagcatactggaatgacagcctttgaataccatggaacggatccaaggtttaacaaggttttcaacaaggggatggctgatcactctaccantacaatgaagaaaattcttgagacctacacaggactttgagggactaaatccctggttgatgttggtggaggacc

SEQ ID NO: 279010 - DNA, 286 bp, Glycine max
  unsure (1)..(286): unsure at all n locations
cngatctgtttcgtgttgtagctagctcctcgaaaatgctggcacgcctcgccgcgagtcgcttcaacgnnatccgtcagattttccgtcagcctcctagggctttctcaaccgcncncnaactaccaccttgacacaccggannacaaccctaaacttccatgggaattcaccgaggccaatcaagcaaaggttaaggagnttttgtctcactatccntccaactataagcaatctgctacnatcctcttttagatcttgcccagcagcagcatggaggttggct

SEQ ID NO: 279011 - DNA, 196 bp, Glycine max
  unsure (1)..(196): unsure at all n locations
gnncgggcccttgnggtcaaggcattgctgaagtcangggacaggtcatttcggccttttgaggggnnnacaatggcnatgatatttacaaagccgtccatgagaacacgtgtntcgttcgagactggctttacattgttanctggccatgctatatatttaggacccgatgacatccaaatgggnaagcgagagg

SEQ ID NO: 279012 - DNA, 286 bp, Glycine max
  unsure (1)..(286): unsure at all n locations
cacatcactaactgatcctcaaaggcttgctcgttctgcctccaatcttgaaaatgaattgaggcattggcgaaacacctttgagtcttggatcacttctcaaagatcctatattcatgctctaactggctggcttctaagatgtgtgagatgtgagcatgatccatcaaagttagcatgctctcctcgtaggtccagtggtactctccattatttggactttgtgttcagtggtcaagacgtctagacgccctccaagaaacagcagtgctgatggcatagantt

SEQ ID NO: 279013 - DNA, 281 bp, Glycine max
  unsure (1)..(281): unsure at all n locations
cgcttgcttaccaacagaaccaaaagannattacacaaacantaattaacacactgagtcttaagtttctctgtttatcacaaagatggtgagaaccctctcttgtgacaaaagtggaacgaggaaaggtacttggactccggaggaagatagaaagttaattgctatgtcactagatatggctcctggaattggcgccaattcccaggtttgctggtctggcaagatgtggcaaaagttgtagactgagatggatgaattatctaaggccaaatgtcaaa

SEQ ID NO: 279014 - DNA, 220 bp, Glycine max
  unsure (1)..(220): unsure at all n locations
cnagaccttaatttttctctcattcgcttcaaatttcaggaaatcaattatggctcaaccctcaacaagaataggccttgctggactggctgttatgggccaaaatctagcactcaatattgctgagaaaggctttcccatttcgncntataaccgaaccacttccaaggttgatgagactgtagaacgagcaaaacaagaaggaaatcttccagtttnt

SEQ ID NO: 279015 - DNA, 304 bp, Glycine max
  unsure (1)..(304): unsure at all n locations
catctactggggccaaaaccggaacgagggcaccctnctcagaagcatgtgcaacaggcaaatactcacacataaacatagcctttctcaacaaattcggcaatggcaaaaccccagaaatgaaccttgctggtcactgcaaccccacaaccaattcctgcacaagttcagctctgaaatcaaggactgccaaagcaaaggtatcaaggtgttgctttcaataggtggtggcattggaagctacactttggctcagtagaagacgcaaganccgtttcaacgtttctgtggaacatttcttggg

SEQ ID NO: 279016 - DNA, 303 bp, Glycine max
  unsure (1)..(303): unsure at all n locations
aaacaaccttctttctttcaggttcttgatcagtgtcaaaaccaaaagggtggttgcaaattgcaatggctaagcatgatgttgagggtggttccttcgctgcaaaggactaccatgatcctcctccagcaccattgattgatgctgaggaactcacacagtgtccttctacagggctttgattgctgagttcattgccacaatgctcttccttacatcacagtgctcactgtgattggttacaagagccagagtgatgtaaaggctgggggtgntgtgtgtggtggagttngcatcttggca

SEQ ID NO: 279017 - DNA, 297 bp, Glycine max
  unsure (1)..(297): unsure at all n locations
tctgtttctgtctctgtgtttgcggctgaggattccgaacgagcgaccttcttcgtttctcgcaaantttaagtcntcatgggtaaggaaaagactcacatcaacattgncgtcattggacatgtcgccnntgggaagtcaactaccactggtcatttatctacaagcttggaggtattgacaagcgtgtgattgagaggttcgagaaggaggctgctgagatgaacaagaggtcattcaagtatgcctgggtgcttgacaagctcaaggctgagcgcgaaagaggattaccnttga

SEQ ID NO: 279018 - DNA, 299 bp, Glycine max
  unsure (1)..(299): unsure at all n locations
atgggttcaacaggtgagactcagattactccaacncatgtatctgatgaagaggcaaaccttttcgccatgcaactagccagtgcctcagtactccctatggttctcaaatcagctcttgagcttgatctgntggaaatcatagccaaggctggcccngtgttcacctttccccncccganattgcttctnggntccnaacacaaaaccctgatggncnnngntntgttgggaccgtatattgcgcctcttggcttgnnncaatancntctcntttctgtnngcatntacctnaggca

SEQ ID NO: 279019 - DNA, 293 bp, Glycine max
  unsure (1)..(293): unsure at all n locations
ggaaaggttccgacnttgccattaagagaataaaagccagttgttttgctggaaggccatctgaaanagcaagattgatngcagacttctggaaggaggcattgatgttgagttcattgcatcatccaaatgttgtctccttttatggcattgttcngatggccccgatggttctttagcaacagtcacagagttcatgattaatggatcttgaaacagttctgcataagaaagatagaacaatagatcgtcgtaagaggctcntatagccatggagctgcattgggnggagt

SEQ ID NO: 279020 - DNA, 287 bp, Glycine max
  unsure (1)..(287): unsure at all n locations
gttaagactctgaccggaaagacaatcancctngaggtggagagctctgacaccnctgacaatgttnaggctaagatncaggacaaagagggtatcccaccagaccaacagaggctcatctttgctggaaagcagctagaagatggcgaaccttggctgattacaacatccaaaaagatctaccctccacttggtnctccgccttcgtggtgggatgcaaatcttgtnaagactctcactggaaagaccatcacccttgaggtggagagctctgacactttgacang

SEQ ID NO: 279021 - DNA, 294 bp, Glycine max
  unsure (1)..(294): unsure at all n locations
ttnntgttggtctttcagtacgacgggagcgttgacaggagctcattatctggccactggtgagctcgtgagccttagcgagcaacagcttgtggattgcnatcacgtgtgtgatccagaagaatatggagcgtgtgactcaggctgtaatggtggttgatgaacaacgcatttgagtacatacttcagtctgggggagtacagaaagaaaaggactntccatacaccgggagagatggcacctgcaatttgacaaaaccaaagttgcggctatgtatctattacatgtggttc

SEQ ID NO: 279022 - DNA, 299 bp, Glycine max
  unsure (1)..(299): unsure at all n locations
gacgaatatggcaacccggttcatgccactagtgtcactnatgtngccaccaaaagtgttggtggctacaatgatgacgctaataagcaacatgatattactggtgtctatcccgagaaagacaccggtagacatcattttggtcgtggttacgacgtgacactaacaagcaacatgatgctactggtgtttatcccggaatagacattggtagagatcatgggactaccggtgtttatggcctaaacaccgacagacattcatggaattctggggtgaatcccgggtaganacccata

SEQ ID NO: 279023 - DNA, 299 bp, Glycine max
gcaagccccactcaaccaccacacctctcctcgttcacgctacccctttctgctcttcttctacctttcaagttttaaaagtataaagatggcagagacattcctatttacctcagagtcggtgaacgagggacaccctgacaagctctgcgaccaaactccgatgctgtcctcgacgcttgcctcgagcaggacccagacagcaaagttgcctgcgaaacatgcaccaaaaccaacttggtcatggtcttcggagaaatcacgaccaggccaagttgattacgagaagtagtgcgtga

SEQ ID NO: 279024 - DNA, 301 bp, Glycine max
  unsure (1)..(301): unsure at all n locations
ggctccaggtcggcgacgacctcaaccaccgcaacctcaccgatctcgccaaaaaattcggtgacatcttcctcctccgcatggggcagcgtaatctcgtcgtggtttcttccccggagctcgccaaggaggttctccacacgcagggcgtggagttggctcccgcactcgcaacgtcgtcttcgacatcttcaannggcaagggccaggacatggtcttcaccgtctacggcgagcactggcgcaaaatgcgccgcatcatgaccgtcccttcttcaccaacaaggtggtgcaaaatacc

SEQ ID NO: 279025 - DNA, 299 bp, Glycine max
  unsure (1)..(299): unsure at all n locations
cnaatttccacaaagncttgatgnagnctgatcgtccacgatagatatgctaaccgaaacacggtgttcnntgatatcaatatganagggcttgatgggatttnaggtccagtatatgttggtactggaactgtgttcaacaggcaggcattgtatgctacgatccancagtanctgngananngccaaagatganntgtgactgctggncatcatggtgttgctgttgctgtggtggtnncagcgaagtccagtcaaaaaagaaatcaggaaaaggtctctcagtgtgttcttccaga

SEQ ID NO: 279026 - DNA, 302 bp, Glycine max
  unsure (1)..(302): unsure at all n locations
cagagagtgatttcagtgagncgatcggtgttcacttgatctcatcataatcgtcagcgtcaancgaagaagatgccgatcagaaacatcgccnccggaaggcctgaagaggcgactcaccccgacacgttgaaggcggctttggctgagttcactcaaccttcatcttcgtgttcgccggctacaggctaccggcatcgcctancaacanccttcaccgacaacggcgctgccacccctgaccggcctcatctccgcctccatcgcccatgcatcgccctcttcgtcgccgtctccgtcgg

SEQ ID NO: 279027 - DNA, 292 bp, Glycine max
  unsure (1)..(292): unsure at all n locations
gntcaacaggtganactcagattactccaacccatgtatctgatgaagaggcaaaccttttcgccatgcaactagccagtgcctcagtactccctatggttctcaaatcagctcttgagcttgatctgttggaaatcatagccaaggctggcctggtgttcacctttccccctccgacattgcttctcggctcccaacacacaaccctgatgnncccgttatgttggaccgtatatgcgcctcttggcttgctacaatatcctctctttttctcttcgcattctccctcagg

SEQ ID NO: 279028 - DNA, 294 bp, Glycine max
  unsure (1)..(294): unsure at all n locations
gtggactgngaatngnactggctggntacantccagcttggcggtgcagtccctcgtagaccagcagaagacttggcgntttccagttgcaagattcatacagaatggtggttcattcgttaactactatatgtaccatggaggaacgaactttggccggacatcaggtggcctctacattgccactagctatgactatgatgcgccgcttgatgaatacggacttgaaaatgaaccaaagtatgagcattgagagctttgcataaagcaataaaacaagtgaaccgcttagtg

SEQ ID NO: 279029 - DNA, 312 bp, Glycine max
  unsure (1)..(312): unsure at all n locations
gctgtagtgaggtgttcaatctganatttcctgtaaccaaattcatggcggaactgatagggcctcgcttgtacagctgctctaattgtaggaatnatgtctcactccatgatgatatcnnttccaaggcttttcatggaagaaacggccgagcctttctgttttccatgcnatgantattgtcacagggccanaagaagacagacatctcttgactggcctccacactgttgctgatgtttnctgtggtgatgccgtgaagtgttgggttggaaanatgnaagagcttacggancatcccagaagtacaag

SEQ ID NO: 279030 - DNA, 280 bp, Glycine max
  unsure (1)..(280): unsure at all n locations
caacnnttgaggaggagttgaagacccttttgcctaaggaagtggaaggtgcacgagntgcatatgagaatgaaccaatgtgctattcccaacaagatcaaggaatgcaggtcttaccccttgtacaagtttgtgagagaggagttgggacagcatgcttactggtgaaagggttgtctcaccgggtgaagagtgtgacaaatttttactgctatgtgccaagggnagatcntgatccactttggaagcctggagagtggatggtgccccattccanttg

SEQ ID NO: 279031 - DNA, 284 bp, Glycine max
  unsure (1)..(284): unsure at all n locations
caacatttgnggaggagttgaagacncttttgnctanggangtggaaggtgcangantngcatatgagaangaccantgtgctattcccaacaagatcaaggaatgcaggtnttaccccttgtacaagtntgtgnnagnggagtggggacagcattgcttactggtgaaagggttgtctcancgggtgaanagtgtgacaaagttttncangctcngtccnangggaaaaactngatccacttttggaatgcntggaaagnggaatggtgctcnacttccattt

SEQ ID NO: 279032 - DNA, 287 bp, Glycine max
  unsure (1)..(287): unsure at all n locations
gcgttttggaagcagagaccgaaatacttcgagatggcccgtacaaagcaaactgctcgtaagtcaactggaggaaaagctcccaggaagcagcttgcaaccaaggctgcacgtaagtctgcaccaacaactggtggtgtgaagaagcctcatcgttatcgccctggaactgttgctcttcgtgagattaggaaataccagaagaanttgagctcctaatcaggaagcttcctttccagaggttggttcgtgaaattgcccaggatttcagactgatctgcgtttnc

SEQ ID NO: 279033 - DNA, 187 bp, Glycine max
gttgatgaacaacgcatttgagtacatacttcagtctgggggagtacagaaagaaaaggactatccatacaccgggagagatggcacctgcaaatttgacaaaaccaaagttgcggctactgtatctaattacagtgtggtttcccttgatgaagaacaaattgctgcaaacctagtaaagaatggc

SEQ ID NO: 279034 - DNA, 141 bp, Glycine max
  unsure (1)..(141): unsure at all n locations
ccnaaacatttgaanaactttgatgtttaatgggtctgtaataatgtcccttgaaaataagttcggtttgtgttgaactcaattgtgtcccattaataatagtactctaatatcccacctacgtttgttctgaatgtgtga

SEQ ID NO: 279035 - DNA, 123 bp, Glycine max
  unsure (1)..(123): unsure at all n locations
ctagaatggaatttcgatgctcagtcatctcttttaccattctcttctctcttgctcttgcaggagagagccatgtccatgcatcgctacctgnggaagattattgggaagctgtttggccaa

SEQ ID NO: 279036 - DNA, 275 bp, Glycine max
  unsure (1)..(275): unsure at all n locations
ctccaagaggcttctcaaggagcatctcaaacgtctcgcctctatcgacctccaaatcctctcagctcaggtgacagaatctacggatttcactgagctgacagaccagcatccatggctttcgtcaaccagattggtcgtcaagccagacatgctgttcgggaagcgcggcaagagtggcttagttgctctcaatttagacatagctcaagtngccgagttcgtcaaagcacgcctcggcgttgaggttgagatgggaggttgcaaggcgccta

SEQ ID NO: 279037 - DNA, 174 bp, Glycine max
  unsure (1)..(174): unsure at all n locations
cattaattgcaannatggcacttcgttgcttggtnatgtccctttctgttctcttcactcttggtcttgcgagagaaagccatgccagagacgaagatttttggcatgctgtttggccaaacactccnattccaagttcattgcgagatcttctaaagcctggccctgcaagtg

SEQ ID NO: 279038 - DNA, 174 bp, Glycine max
cagagagtgatttcagtgagtgatcggtgttcacttgatctcatcataatcgtcagcgtcaattgaagaagatgccgatcagaaacatcgccgtcggaaggcctgaagaggcgactcaccccgacacgttgaaggcggctttggctgagttcatctcaaccttcatcttcgtgt

SEQ ID NO: 279039 - DNA, 280 bp, Glycine max
ggtgaattcgagaagaaatatgaaccgaccattggtgtggaggttcatccgttggattttttcacgaactgtggaaagattcgcttctattgttgggatactgctgggcaagagaagtttggtggcctcagagatggatattatatccatgggcaatgtgcgattatcatgtttgatgttactgcccgtctaacatacaaaaatgtccctacctggcaccgtgatctttgccgggtctgtgaaaacatcccaattgttcttgcggtaacaagttgatgtc

SEQ ID NO: 279040 - DNA, 262 bp, Glycine max
  unsure (1)..(262): unsure at all n locations
ctctggttgattcggatctagagtcttcagtttctcctcgttgttcttcgctttcctgttttcaatttcgattctttcgttaatttaataagatgtttgggagggcaccgaagaagagcgataatacgaggtactacgaaatcctcggcgtctccaagaacgcttcgcaggatgatctgaaganggcttacaagaaagccgccattaagaatcaccccgacaagggcggtgatcccgagaagtttaaagagctggcgcaact

SEQ ID NO: 279041 - DNA, 175 bp, Glycine max
  unsure (1)..(175): unsure at all n locations
aacagagagtggtttcagtgagtgatcggtgttcacttgatccttcataagnnnnnnnnnnnnnnnnnnnnnnnnnnnntgattgaagaagatgccgatcagaaacatcgccatcggaaggcctgaagaggctactcaccccgacacgttgaaggncgggttggctgagttcatc

SEQ ID NO: 279042 - DNA, 155 bp, Glycine max
  unsure (1)..(155): unsure at all n locations
ccgattgcnagaatggnatttcgatgctcagtcatctctnttaccattctcttctctcttgctcttgcaggagagagccatntccatgcatcgctacctgaggaagattattgggaagctgtttggccaaacactcccattcccactgcactgcg

SEQ ID NO: 279043 - DNA, 292 bp, Glycine max
  unsure (1)..(292): unsure at all n locations
gtctctccgcagcngccttcttcgccgtttcagctcaagagccaccagcaggtaagatatggttaagcataacaacgttatccccaatgggcacttcaggaaacactggcaaaactatgtgaagacttggtttaatcaaccagcacggaagaccagaaggcgtttagctcggcagaagaaggctgtcaagattttcccnggcctactgctggacctctcaggccaattgttcatggccagactctgaaatacaacatgaaagtcagatctgggagaggttttctctcgaana

SEQ ID NO: 279044 - DNA, 292 bp, Glycine max
gctgcatatcgaggtcttgcctttatgtatgactggttcatggaaccactttactctggaacatatcctgctgtaatggttaacagagttggaggtcgtttgccaaagtttaccaaaagggaatacttgatggttaaagggtcctatgatttcatagggttaaactattacacttcaacttatgcaactagttctccttgcccacgtgaaaggccaactgcctttacagacgcctgcgttagatttactactgtaagaaatgggcttctcattggtccaaaggcagcctcag

SEQ ID NO: 279045 - DNA, 291 bp, Glycine max
  unsure (1)..(291): unsure at all n locations
atttgaccntatanttcaaacaatagcttcagctgttgaggcccaggataatactgangtattagcctattggntgtnctaatacatcctactttgntgttgctactccaacgcactcttaaagctagtggagctgctagcttaacaccacagcggcggagaacagcgtcctcttctctgtttggaagaatgtctcaagggctaagggcgtctccccaaagtgctggattgtcatttctaaatggtcgnggtcttnatagactggatgntttacgacaagtagangcnaaa

SEQ ID NO: 279046 - DNA, 292 bp, Glycine max
  unsure (1)..(292): unsure at all n locations
gtttgagggtataatgcctaaggntctgcagatttatgtcacaactgcatccaatgcacaagagantagttggggaacttattgtcctggaatggatccttcnccacctccagagtacatcacttgcctaggggatttgtacagtgttgcttggatggaagatagtgagactcataatctaaaaagggagtccgtgaaacaacaatacaaatcggtaaagcaacggacttcaaatttcaacaactatgcgatgggttctcatgtgatgcaatacggtgacacaaacatcacg

SEQ ID NO: 279047 - DNA, 290 bp, Glycine max
  unsure (1)..(290): unsure at all n locations
tcattaattgcaagantggcacttcgttgcttggtgatgtccctttctgttctcttcantcttggtcttgcgagagaaagccatgccagagacgaagatttttngcatgctgtttggccaaacactcccattccaagttcattgcgaganccncctaaagcctggccctgcaagtgttgaaatcgatgatcaccctatgcanattgaaganacacagtacccgaaaaccttcttctatanaggagacttcatccagngcaaaacaatgaaagtacaattcagcaagcctc

SEQ ID NO: 279048 - DNA, 288 bp, Glycine max
  unsure (1)..(288): unsure at all n locations
gtccaccaaagatcccacaagtgcacattccagagaaacctgttttagaatttgcctctgctcttagagttgagatcaaccgggcttttgcgttgttaagggatattgcatctggaagggatctcaagaagttcttatcagtgattgctggattatgggtnttctctattttgggtagctgggccaacttcttgaccctgttctacatagcttttgtttnnntgcacactgtgcctgtgctttatgagaaatatgaagatcatgtngactcttttngtgggaaggcaa

SEQ ID NO: 279049 - DNA, 287 bp, Glycine max
ttactcaaagaggcatgtttggattccggttttttctacgttgtcaatcatggaataagccaggaattcatggacgaggtttttgcgcagagcaagaagttcttctctcttcctcacaacgagaagattgaagactctcaggaatgaacaacacaggggatacacccctgttcttgatgagttgcttgatcctgaaaaccaagtacatgtaggagattacaaagaggggtattatattggagttgaaaaaggtgaagatgatccacaatcgaagaaacctttttatg

SEQ ID NO: 279050 - DNA, 285 bp, Glycine max
  unsure (1)..(285): unsure at all n locations
gaaagaacaatatcatgttcttgggtgatgggaggaccaacactatcatcantgctagcagaaatgttgttgatggtagcaccaccttccactctgccaccgtcgttgtggtgggttcaaatttcttggcccgggacttaacattccaaaacacagcgggncgcatcaaagcaccaagctgtggccctaagggttggtggggacctctcagcattcttcaattgtgacatcctagcattccaagacaccctttatgtccacaacaatcgccaattctttgtgaag

SEQ ID NO: 279051 - DNA, 141 bp, Glycine max
  unsure (1)..(141): unsure at all n locations
cccataangtttgacgaacttngatgtntaatgggtctgtaanaatgtcccttgancataagttcggtttgtgtngaantcaattgtgncccattaatcntagtactctaatatcccacctacgtnngtnatgaatgtgtg

SEQ ID NO: 279052 - DNA, 283 bp, Glycine max
gagaatctttcaggaagaagacaccacatttgttcagtgaagatcatgaacgccattttcagaggtgggatgatcaatatgtccgtcttctcaagcatgaattcgtgcgttttaagaatgctgtggtgctttggtccatgcacccttgggaaagagatgcccgtttagtaaaagaggccctaaagaagggtccaaatgcatatggagtgctgattgaggtttcatgcactagatcctcagaagagctattgggagctaggaaggcataccattccctctttga

SEQ ID NO: 279053 - DNA, 278 bp, Glycine max
  unsure (1)..(278): unsure at all n locations
ggccaggcaagccccactcaaccaccacacctctcctcgttcacgctacccctttctgctcttcttctacctttcaagttttaaaagtataaagatggcagngacattcctatttacctcagagtcggtgaagagggacaccctgacaagctctgcgaccaaatctccgatgctgtcctcgacgcttgcctcgagcaggacccagacagcaaagttgcctgcgaaacatgcaccagaaccaacttggtcatggtcttcggagaaatcacgaccaaggc

SEQ ID NO: 279054 - DNA, 274 bp, Glycine max
cttgtggcacttaagaatatctttgagaagaaatatgggaaagattttgtatctgcagctgttgatctaagacctagctgcggtgtaaatcgccagttgatcgaaaagctctcagtacgaacaccacctggtgaagtaaaattgaaagtgttgaaggaaatagctaaggaacatcatattgattgggatactacagatagcgagaaagaacttctcaagcctccagaagagctaatagtagggccaagtgcttttgtcatgccagcagcctacc

SEQ ID NO: 279055 - DNA, 169 bp, Glycine max
  unsure (1)..(169): unsure at all n locations
accgattgctagaatggaattncgatgctcagtcatcncttttaccattctcttctctnttgctcttgcaggagagagccatgtccatgcatcgctacctgaggaagattattgggaagctgtttggcnaaacantcccattcccactgcactgcgaganttctaaagc

SEQ ID NO: 279056 - DNA, 323 bp, Glycine max
  unsure (1)..(323): unsure at all n locations
gcaatgtattccttggcacacagcaaggtgaacaacaggatgtggggatctgtgaaaggaggaaatgatgaagatgggttaaggactttgnacattagccaatgcactgcactcaccccatctgctgttcaagctgtttgtgactcattcccttcccttcacacatgtcagggaggcactcactcatcatgagtggctgcntcaacttgacttcagtgcattgtgcctgtgctgtccatgcncaccgtgcattcaccactttccctcatcctgcncataagaagctcatgctttgangttgnacacattcgaggtgtgccttt

SEQ ID NO: 279057 - DNA, 308 bp, Glycine max
  unsure (1)..(308): unsure at all n locations
ctccttaccactacgtgagccctccaccaccttctccatctcctcccccaccataccattacacatcnccacctcctccttccccagctcctgctcccaagtacatttacaaatcacctccacctccggtttatatctatgcttccccacctccacctatctacaagtnagctcaaattgtgaaagcaccattcatgatgaatcatgttctagttttcatcgaggaataaaggcaagctctattttgagccaagtgaaacatctatcttcctgtctaagttcttngaataaaagtctgaagtgtctcc

SEQ ID NO: 279058 - DNA, 272 bp, Glycine max
  unsure (1)..(272): unsure at all n locations
ctcgttgttctccctcgcgtagatcgacaatggcggagacagagacgtttgctttccaggctgagatcaaccagctcctcagtctcatcatcaacaccttctactccaacaaggagattttccttcgtgaactcatcagcaacgcctccgatgctttggacaagattcgatttgagagtttgacagataagagcaagnctcgatgctcanccagatttgttcattnatattattccagacaaggntngcaatacanngaccattgttgacag

SEQ ID NO: 279059 - DNA, 311 bp, Glycine max
  unsure (1)..(311): unsure at all n locations
gcggcagctacttcggctccatcttcttcgatctctcaaactctatcggcgcagaaccaatcctatatcactatggggaagacacatggaatgggagctgcccgcaagctgaagtctcaccgtaggagacaaaggtgggctgacaagtcatacaaaaagtctcatcttggaaatgaatggaagaagccttttgctggttcatcccatgcaaagggtattgttcttgaaaagataggtattgaggctaagcagcccaactctgccattcgaaaatgtgccagggtcaaactcatcaaaatgggaaaagntng

SEQ ID NO: 279060 - DNA, 257 bp, Glycine max
  unsure (1)..(257): unsure at all n locations
cgggattctccacccacctcatgaagcggatccagaagggtcccgtacgtggaatctccctcaagctgcaggaggaggagcgcgagcgccgcatggacttcgnccccgatgtctccgcnatcagaaccgaccagatcgaggtcgacaaggagacgctcganatgctcgccgccctcggaatgtccgaggttcccggggttgttcaggtggatcctgttgctgtcanggacggntcggntcagcgagggnccggaaag

SEQ ID NO: 279061 - DNA, 167 bp, Glycine max
  unsure (1)..(167): unsure at all n locations
gcggcctgggcgattggaccgtaaagttgagtttngccttcctgacttagagagtaggacgcagatattcaagatacacacaagaaccatgaactgcgaaagggatattcgatttgaacttctggctcggctttgcccanattccantggagctggtataaggaggc

SEQ ID NO: 279062 - DNA, 322 bp, Glycine max
  unsure (1)..(322): unsure at all n locations
ccgattgctagaatggaatttcgatgctcagtcatctcttttaccattctcttctctcttgctcttgcaggagagagccatgtccatgcatcgctacctgaggaagattattgggaagctgtttggccaaacactcccattcccactgcactgcgagagcttctaaagcctctccctgcaggtgttnnaatcgatgaactccctaagcaaattgatgatacacagtacccaaaaacattcttctataaagaagaccttcatccaggcaaaaccaatgaaagtacaattcaccaagcgtccctatgcacaacttatggtgtat

SEQ ID NO: 279063 - DNA, 301 bp, Glycine max
  unsure (1)..(301): unsure at all n locations
ctggaatcacaatcctgaaacaanaacatcttagcatttaacatactactagacaanatgancancacattggagagaggtttctcggaagagcaagaagctctggtggtgaagtcatggaatgtcatgangaaganttctggagagttgggtctcaagtntttcttgagaatatttgagattgctccatcagctcagaaattgttctcattcttgagagattcaacggttnctttggagcaaantcccaagctcaagccccatgcngtgtctgtctttgtantgacctgtgattcagcag

SEQ ID NO: 279064 - DNA, 130 bp, Glycine max
  unsure (1)..(130): unsure at all n locations
ctgctctctgttgctaccatccgtcccgtggtcgatcaagtgganatgaaccttgcanggcaacagaagaagctaagagagttctgcaaagaaaatgggataatantgnctgcgttctctccactgagga

SEQ ID NO: 279065 - DNA, 302 bp, Glycine max
  unsure (1)..(302): unsure at all n locations
ctcttcctcaccgattgcnagaatggaatttcgatgctcagtcatctcttttaccattctcttctctcttgctcttgcaggagagagccatgtccatgcatcgctacctgaggaagattattgggaagctgtttggccaaacactcccattcccactgcactgcgagagcttctaaagcctctccctggcaggtgttgaaancgatgaactccctaagcaaattgatgatacacagtacccaaaaacatcttctataaagaagaccttcatccaggcaaaacaatgaaagtacaattcacca

SEQ ID NO: 279066 - DNA, 301 bp, Glycine max
atcgatttcgcgcgtaacaccgccgacggcgtgggattccacgtgcttcgcggagctgatgatgtcttcggggctcgtgtgcaacgacgccgtgagttgggtcacgttccacagcgcgtacgatttcggttacttggtgaagatcttgacgcgccgtaacctaccgacgaggttggaggaattcttgaaaaccgtgaaggtgttcttcggagataacgtttacgacgtgaagcacatgatgaggttctgtgacacgctctacggcggattggaccgcgttgcacggacgcttaacgtggac

SEQ ID NO: 279067 - DNA, 294 bp, Glycine max
agaaatcaatgtgcagccaattctttgagctcgaaaggaatgtttcaactgatccaaagaaaaggttcttcaaggaatctgatggctcttgttaatgatgatggatctgtggcaaaggcttggcctgttaatttagttgactgtaatgggaagcctgtatggtgccatggacctgagaatggagttggacatccaatgtatggtcccttaagaattggaaaggcagaacctgtcaatcttcagtttggtttttatgggatcagtgcatggccaagtgatggtggcactagtcgt

SEQ ID NO: 279068 - DNA, 302 bp, Glycine max
  unsure (1)..(302): unsure at all n locations
caatggcttctgtgcctcaaccaaaaatctcccttctaaccttattcttcttntgcgtccttcaccatcattggcgcatgcaattgttcctcaaaacgaaaccttcaaatttgagaactcaggtgaacttggaccctacatcgttgagtacggtgcagnttacagaatgataagcatcttcaantctccattccaagttggtttctacaacaccaccccaaatgccttnactctagctttgcgtgtagggctccaacgcttcggagcagctatttcgttgggtttgggaggccaatagggca

SEQ ID NO: 279069 - DNA, 298 bp, Glycine max
ctagaatggaatttcgatgctcagtcatctcttttaccattctcttctctcttgctcttgcaggagagagccatgtccatgcatcgctacctgaggaagattattgggaagctgtttggccaaacactcccattcccactgcactgcgagagcttctaaagcctctccctgcaggtgttgaaatcgatgaactccctaagcaaattgatgatacacagtacccaaaaacatcttctataaagaagaccttcatccaggcaaaacaatgaaagtacaattcaccaagcgtccctatgca

SEQ ID NO: 279070 - DNA, 295 bp, Glycine max
  unsure (1)..(295): unsure at all n locations
gctatcgtgtgggacgtcgccgaaggtgcaagtcccgtgtnggaatccagcaccgtgtcacaaaggaggatcctangaagtggttccaggtgaaatatgagggagtgatccttaacaagtctcaggcgattgtttagntagattgagttcatttcangggagtgtttttatcagttttgtcaactatcttnctgggatagtatcttaatttgaggcaggttttgaatcaatgtttctcatttgcagtttngtgatgaagcacatgtattaacaatagcccttttaaacgacactt

SEQ ID NO: 279071 - DNA, 293 bp, Glycine max
  unsure (1)..(293): unsure at all n locations
ggagcttatgttgctgtcaagcaagannatgatgcaacctactgccagcatcaaagacagaccagcatatgcaatgatccacagatgctgaggaaaagaatctgataactcctggaaagacaactctgattgagcccacgtcaggcaatatgggtatcagcatggcatttatggccgccatgaagggatacaagatggttttgaccatgccctcttacacaagcttggaaagaagggtgaccatgagagtgtttggagctgaattaatcctcactgatccagccaaaggaatg

SEQ ID NO: 279072 - DNA, 286 bp, Glycine max
  unsure (1)..(286): unsure at all n locations
ggatcgagataactagaaacagtgtgatgaaaatgnangtccttgttntcttcgttgctacaattttnngtagcatggcaatgccatgcgtacgatatgttccctctccgaatgaacactggctatggtgcccgtactccggaggtgaaatgcgcaagttggaggcttgctgtggaagcacacaacatctttggctttgagaccattcctgaagagtgcgttgaagcaacaaaggaatacatccatggcgaacaatatagatcagactccaaaacagttaaccaac

SEQ ID NO: 279073 - DNA, 215 bp, Glycine max
  unsure (1)..(215): unsure at all n locations
atcaccagcaccttccaagagattgctggaagcaaggacactgttggacantatgagagtcacactgccttcacccttccaggactttaccgtgttgttcacggtattgatccatttgatccaaagttcaacattgtctctcccggtgncgacatgggtatatacttcccatacactgaaactgagcgtaggttaacagaattccacacaacata

SEQ ID NO: 279074 - DNA, 277 bp, Glycine max
  unsure (1)..(277): unsure at all n locations
tttntcaacaacttctgctanntcctactcnaaccgacacttctgctccgcaattatcnctgggcaaggtcaagatcggaatcaacggatttggaagaattggccgtttggtagccagagtggctctgcagagagacgatgttgaantcgttgccgttaacgacncnttcatcaccaccgattacatganatanatgtntanntacgacagtgttcatgggcantggaagcatcncgntgtcangtnaggacgagangannntctcttcgntgacag

SEQ ID NO: 279075 - DNA, 304 bp, Glycine max
  unsure (1)..(304): unsure at all n locations
ctagaatggaatttcgatgctcagtcatctcttttaccattcncttctctcttgctcttgcaggagagagccatgtccatgcatcgctacctgaggaagattattgggaagctgtttggccaaacactcccattcccactgcactgcgagagcttctaaagcctctncctgcaggtgttgaaatcgatgaactccctaagcaaattgatgatacacagtacccaaaaacattcttctataaagaagaccttcatccaggcaaaacaatgaaagtacattcaccaagcgtccctatgcacaacct

SEQ ID NO: 279076 - DNA, 301 bp, Glycine max
  unsure (1)..(301): unsure at all n locations
caaagttagaaacaaggagaaaganagaagatggcaggaaaganaatcccagatgtgttgctgaattcaggacacaaaatgccagttataggcatgggaacttcagtggagaatcgtccatcaaatgagacccttgcttctatctatgttgaagccattgaggtgggttaccgtcattttgacactgctgcagtgtatggaacagaggaagccataggcctagccgtggccaaagccatagacanaggccttataaagagtagagatgaagttttcatcattcaaagccttggaacacagt

SEQ ID NO: 279077 - DNA, 299 bp, Glycine max
gggaattggatttttggggattggtttccagccaaagtggggaatcaaagacatacctataatgccaaagggaagatacgacatcatgaggaactacatgcctaaagttggctctcttgggcttgacatgatgttcaggacatgcactgtgcaggtcaatctggactttagttctgaagctgacatgatcaagaaatttcgtgcaggccttgctttgcagccgatagcaacggctctttttgcaaattcaccctttaaagagggaaagccaaatggttttgtcagtatgagaagccata

SEQ ID NO: 279078 - DNA, 298 bp, Glycine max
  unsure (1)..(298): unsure at all n locations
ggnaataagagctcggaatttgttaatgacatcataataaaacctgctgaccgtcataatcttttgagacctgagaccgtggagtcattgtttgttttgtaccgtatcacagaagatccaaaatatcgggaatggggttggcaaatctttgaagcttttgaaaatcacacaaaggttgatactggtggatattgttctctggacgatgtaactagtgttcctcctcatagaagagacaaaatggagactttctttctaggagaaacacttaagtatttctacttgctttttgcggaca

SEQ ID NO: 279079 - DNA, 298 bp, Glycine max
cactctctgctcctagggtttctccttcgagtgagggaaatggctcccaaaccgcctagtacgggtctgtttgttggactgaacaagggtcacgtcgtcaccaagaaggaattgcccccacgcccctcagatcgtaaggggaaaacaagcaagagggtgcactttgtgaggaacctcataagagaggttgctggttttgcaccctatgaaaagcgtataactgagttgctgaaggttgggaaggataagagggcatgaaggttgcaaagagaaagcttggaacccacaaacgtgcaaa

SEQ ID NO: 279080 - DNA, 276 bp, Glycine max
  unsure (1)..(276): unsure at all n locations
accgattgctagaatggnnttnccgatgctcagtcatcnncttttaccattctctnctcacttgctcttgcaggagagagccatgtccatgcatcgctacctgaggaagattattgggaagctgtttggccaaacactcccattcccactgcactgcgagagcttctaaagcctctncctgcaggtgttgaaatcgatgaantccctaagcaaattgatgatacacagtacccaaaaacattcttctataaagaagacttcatccaggcaaaacaa

SEQ ID NO: 279081 - DNA, 301 bp, Glycine max
  unsure (1)..(301): unsure at all n locations
aagagattataaatgcaagacgaagtatgaaacatgctgaagtaattatagccagatgggcagtggaagaaggacgtgggctggttgtgattgtgaacaagatgaaccttccaagaggcaaacaccaatcgtcatcctatgagaaggttatggaaattgtnccacaagaaattcagacaattatacctcaggtaaaaggaatcccagttgtattcatttcagcattggagggaaggggcaggaccactgtcttgaatcaggtcatcgaaacatatgaaaaatggtgttcaagntactacag

SEQ ID NO: 279082 - DNA, 298 bp, Glycine max
  unsure (1)..(298): unsure at all n locations
acgacctggacgattggatcgtaaagttgaatttggccttcctgatttagagagtaggactcagatattcaagatacacacaagaaccatgaactgtgaaagggatatccgctttgaacttttagctcggctttccccaannnctactggagccgatataaggagcgtttgcactgaagctggtatgtatgctattcgagccagaaggaagaccgtgacagagaaagacttccttgacgcagttaataaagtcatcaaaggataccagaagttcagtgcaatccaaagtatatggtct

SEQ ID NO: 279083 - DNA, 295 bp, Glycine max
  unsure (1)..(295): unsure at all n locations
gaagagcgtcgcagtcgcaaccctaatcagaagaagcgcanttcaagcgagtgacagccaccagccatgggtcgtatnccacagccgcggtaagggtatatcctcttctgctttgccctacaaaaggacacctcctagctggctcaagatctcttcgcaagatgtcgaagaaaatatctgcaagtttgcgaagaaaggtttgaccccgtctcagattggtgtcattctcagagattctcacggtattgctcaggtcaatagcgtcatggcagcaaaatccttcgcatcctcaaag

SEQ ID NO: 279084 - DNA, 295 bp, Glycine max
  unsure (1)..(295): unsure at all n locations
caccatctaaggggtgcagagaaattcgaagctttgattcaagaccacctggccagggagcaaacagcaactgcactaagctatatacattcatngagcagaatacaagaacaaattagagttcgaagaatctgtatgataacagaagccaggattaagcaaaaganattggaaacccagttaaaaattgaggccaagattcatgagctcgaggtggagtggtgcaatggttctgaaaccatggaagaaataatttcgaggttacatcagcgagaggaagcagcaattaagcgag

SEQ ID NO: 279085 - DNA, 276 bp, Glycine max
  unsure (1)..(276): unsure at all n locations
cttgaaggtgggagaagctgatancaacataggaaatacnggtgatgtgaatctatatnncccaaatgattgatgaagctgagggattggagaaaattgagaacctccagagtcatgacaacacagagatttacgaaaaggcggncaagattcttgagacatactggttggaggaggaagatgagactatgcctccaggggatgcttctcagtcagggttcaactttggtagcagtgacgctcctgctgtgccgtccggtggattcaactttaata

SEQ ID NO: 279086 - DNA, 291 bp, Glycine max
  unsure (1)..(291): unsure at all n locations
tctctngctcnnnntcgnctncactatggttgcacaacgaaacttccaagactacttgcctgtgatggcgcacaagcttggtggggatggcctaattgatgaactgtgcaatgggttcaatctgttgaaggattctgataaaggggtcatcacctttgagagcctcaagaggaactctgccttgtttggccttcagggtcttagtgatgaagatcttcggtccatggttttggaaggtgactttgatggtgatggtgcatcaatcagttggagtctgtgttttgatgttca

SEQ ID NO: 279087 - DNA, 292 bp, Glycine max
  unsure (1)..(292): unsure at all n locations
gttgaacctgataatgaccctcctcaaaagatgggagatccttctgctgaaataacggaagaacaaagggatgctgcacaactagcaaaatcaaaagcagtcgatgctatgtcacaaggtaatttggatgaagcactggcccaactgacagaagccattttgttgaatccgcaatcagctatactttatgctactagagctagcatctatatganattgaagaaaccaatgctgctatacgtgatgctgacgctgccttgaagattaacccagactcagctaaaggctacaa

SEQ ID NO: 279088 - DNA, 296 bp, Glycine max
  unsure (1)..(296): unsure at all n locations
gctatcgtgtgggacgntcgccgaaggtgnangtcccgtgttggaatccagcaccgtgtcacaaaggaggatgctatgaagtggttccaggtgaaatatgagggagtgatccttaacaagtctcaggcgattgtttagttagattgagttcatttcaggggagtgtttttatcagttttgtcaactatctttctgggatagtatctaattttgaggcaggntttgaatcaatgtttctcatttcagttttgtgatgaagcacatgtattnacaatagccctttaaacgacactnta

SEQ ID NO: 279089 - DNA, 299 bp, Glycine max
  unsure (1)..(299): unsure at all n locations
gggtncttcctcnctntccggttagggnaagaaacgcactttntggttttggttttggatttcgntctcnctgcattgccttctgctactgctagttgcatgatggttgtgcagaactttgtagtngatttgaataaggcccttgttttccaggttgggcatcttggagatgcttatgnagagtgggttcaccagcccattgtcagcaaggaaggcccccgnttctttgaaaatgagattctggattcttgacgcgcacagtctggtgggcaataccagtcattggctgccagttgtat

SEQ ID NO: 279090 - DNA, 292 bp, Glycine max
  unsure (1)..(292): unsure at all n locations
gctatcgtgnnngacgtcnnngaagaagcaagtcccgtgttggaatccagcaccgtgtcacaaaggaggatgctatgaagtggttcnaggtgaaatatgagggagtgatccttaacaagtctcaggcgattgtttagttagattgagttcatttcaggggagtgtttttatcagttttgtcaactatctttctgggatagtatcttaattttgaggcaggttttgaatcantgtttctcatttcagttttgtgatgaagcacatgtattaacaatagcccttttaaacgaca

SEQ ID NO: 279091 - DNA, 291 bp, Glycine max
accttctgaaagatctcattgttcagtgtttgctaagactgaaagagccttctgtcttattgagatgtcggaaagatgacctgcacttggtagagaatgtgctggattcagctgctcaggagtatgctgagaaagcaaatgttgatcccccagagatcattgttgacaaccaagtctatcttccacctggactcactcatcaaaattctcatgatctctactgctctggtggggtggtgttggcttctcgtgatggaaagattgtgtgtgaaaatacacttgatgcacgtc

SEQ ID NO: 279092 - DNA, 292 bp, Glycine max
  unsure (1)..(292): unsure at all n locations
tccaggcaaaacaatganagtacaattcagcnagcctccctttcaacaaccatggggtgttggtacatggttaanggaaattaaagacactactaaaganggatatagttttgangagctatgcatcaaganagangccattgagggagaagagaagttttgtgcaaantccttgggancagtaattggttttnccatttcatagctgggananancattcaagtactttcaagttcctttgtnaatnagcnagaccaatacactgtggaaggtgtgcagantcttggagca

SEQ ID NO: 279093 - DNA, 288 bp, Glycine max
gaagaggagtaggcaatttcaaccccaaaattgaccctaagaactttaaccttgttgatcctgttgaaaggaacactattggagtaccagctggagggtggactgcatttagattcagagcagataatccaggagtttggttcatgcactgccacttggaggtacacacaacatggggactaaagatggcctttttggtggacaatggcaaaggtcctaagcaatcagtgatacccccaccaaaagatcttcccaaatgctaatgtgtcaatcatcaattaattatgc

SEQ ID NO: 279094 - DNA, 286 bp, Glycine max
  unsure (1)..(286): unsure at all n locations
cagnggagtaggcaatnncaaccctnaaattgnccctaagaactttaaccttgttgatcctgnngaaaggaacactattggagtaccagctggagggtggactgcattnagattcagagcagntnatccaggagtttggttcatgcantnccncttggaggtacacacnacatggggactaaagatggcctttttggtggacaatggcaaaggtcctaagcatcagtganccccccaccannagatcttcccanntgctnatgtgtcnatnatcantaatatgnat

SEQ ID NO: 279095 - DNA, 293 bp, Glycine max
  unsure (1)..(293): unsure at all n locations
tgccctttcacaaggtatggacaaactccggcaaacacttgctgatagtgtagcagctgggcagttcatggaaggctgcatatattccacagatgacttctgcaatggacaagttgaaagctctggtgagctttgtgaaccaggctgatcatcttcggcaggaaactttgcagcaaatgtctcgaatacttacaatccgtcaggcagctcgatgnttgcttgctttgggggaatatttccaacgcctgagggtttgagctcatgtggtctatagactcgtgaactgcttagtc

SEQ ID NO: 279096 - DNA, 293 bp, Glycine max
  unsure (1)..(293): unsure at all n locations
caaaatgctgggttctcagccccaactccaattcaggcacagtcatggcccattgctcttcaaggtagagatatagttgccattgctaaaacaggctcagggaaaaccttgggatatntaattccancatttnancacctcaagcgctctggtaataactccaaaatgggccccactgcattggtactttcaccaacaagggagtcngcaacacagatacaagatgaagccatgnagtttgggaaatcatctagaatttcatgtgcatgtttgtatggaggagcaccaaaggg

SEQ ID NO: 279097 - DNA, 250 bp, Glycine max
tcttagatctcttctttctctacgccgcacgccgaaaccatggccggaaaaggagagcgtcctgctatcggaatcgatctcggaaccacctactcttgcgtcggtgtctggcaacatgaccgcgttgaaatcatcgccaacgaccaagggaacagaaccacgccgtcttacgtcggattcactgacaccgagcgtctcatcggtgatgcggccaagaatcaagtcgccatgaaccccatcaacaccgtct

SEQ ID NO: 279098 - DNA, 286 bp, Glycine max
  unsure (1)..(286): unsure at all n locations
aanggagaagggggtttctaaaactgttgcttggaaatgtnggagttggtttgcctgcactattggcaagtggcaaagcttatgcnngatgaacaaggggtttcctcctccagaatgtcttactccaggtttctggagtatttggacaaggacagagttaanaaagtggatctgtatgacaatggaaacacngctgttgttgangctgtttctcccgagttggggaatcggttgcagtatgttagagttcaactccctggacttaaccaagagctccttcagaaat

SEQ ID NO: 279099 - DNA, 290 bp, Glycine max
  unsure (1)..(290): unsure at all n locations
caccgtaagggttgtgaagcaggcagagaagagccatggtgcacgtttctttctaccgaaactatgggaaaacgttcaagaagcctcgtcgtccctacgagaaggagcgtttggacgccgagttgaagctggtcggtgagtacgggcttcgctgcaagagggagttatggagggtccagtacgccctgagccgcatccgtaacaacgccaganacctattgacccttgatgagaagaaccctcgccgtatcttcgagggtgaagccttctccgaagaatgttccgttacg

SEQ ID NO: 279100 - DNA, 295 bp, Glycine max
  unsure (1)..(295): unsure at all n locations
ctacaactagtaacaaagatccaacaagcagatcaatctctctctctgtctcccaatcaaaacagacatgggtttgaaggaggattttnagcagtatgctgagaaagcaaagactttgccaccgactcaatcaaacgaagacttgcttatcctttatggattgtacaagcaggccaccgttggacctgtcaacaccagccgtccgggaatgttcaacatgagggacagagctanatgggatgcatggaatgctgttgaagggnatccaaggacgaagcaatgagtgttantcact

SEQ ID NO: 279101 - DNA, 291 bp, Glycine max
  unsure (1)..(291): unsure at all n locations
ctcttcctcaccgattgctagaatggaatttcgatgctcagtnatctcttttaccattctcttctctcttgctcttgcaggagagagccatgtccatgcatcgctacctgaggaagattattgggaagctgtttggccaaacactcccattcccactgcactgcgagagcttctaaagcctctccctgcaggtgttgaaatcgatgaactccctaagcaaattgatgatacacagtacccaaaaacattcttctataaagaagaccttcatccaggcaaaacaatgagtac

SEQ ID NO: 279102 - DNA, 290 bp, Glycine max
  unsure (1)..(290): unsure at all n locations
agggcactcaacattttacactcttttcttcttctcgttgttgcttcgctnttgaatcatggatcagaaggtcgatttcagcgctccccattccatgggaaccactatcatcggcgttacttacaacggcggtgtcgttctcggagccgactctcganccagcaccggagtgtatgttgccanccgagcatcggacaaaatcactcagctcactgataatgtatacgtgtgtcgctctggatcggctgctgattctcagattgtctctgattatgtgcgttacttctcca

SEQ ID NO: 279103 - DNA, 285 bp, Glycine max
  unsure (1)..(285): unsure at all n locations
gctcggtgaagctttatacccgcttgtggatcactggaacacgatgctgcagcaaaggttactggcatgcttctggagatggaccagcctgaagttttacatctgattgagtcaccagatgctctgaaggcaaaagttgctgaagccatggatgtgtnaagaaatgttgctcaacagcaaactaacccagctgatcaactagcttcactctctctcaatgacaatcttgtgtcttagattcctttagtcttttgactggaatctgctttccagttatcctatcgt

SEQ ID NO: 279104 - DNA, 285 bp, Glycine max
gagatatcaatatattatgataatggagggaacaataagaaggttatgattgtggggatggtgttgggcatggccatgattgggatggccaatggccaatactcgttttgtcgcatgcccagcgatgcgttggcggcatgcaagccgagtgtgagtggggactatcctgctgatccctccactgcttgttgctcagccattgccaaggctgatcttaaatgcttctgccgcttcaaggattcgggccttctctctatgtatggtgttgatcccaacaagtgagga

SEQ ID NO: 279105 - DNA, 288 bp, Glycine max
  unsure (1)..(288): unsure at all n locations
cttttctcagctgctgttcctgcgcgtgaacaagcctcaggtangccaaanccatggttangcataacaatgttatccccaacggacacttccgtaagcactggcagaactatgtgaagacctggttcaatcagccagcacggaagacaagaagacggttggctcgtcagaagaaagctgtgaagatttnccccagacctacagctggacctcttagacccattgtacatggtcaaactttgaaatacnacatgaaagtgagagtggaagggnattcccttgaaactc

SEQ ID NO: 279106 - DNA, 292 bp, Glycine max
cttcggcgctttctacgccgccaaacacgccgctgaaataatgtttcctagaaagatagggagcattgtgttcacgtctagcgctgtttcggtgactcatccgggttcgccgcacccatacacggcgtcgaagtacgcagtggtgggtctgatgaagaacttgtgcgtggaactggggaagcatggaatcagagttaactgcatttcaccctatgctgtggccactcctctgctgacacgtggaatgggaatggagaaggagatggtagaggaatgtttgcggaggcaggac

SEQ ID NO: 279107 - DNA, 277 bp, Glycine max
  unsure (1)..(277): unsure at all n locations
ttcttcttctcttcttcttcagattgcnacgntcgatccaagtgatagacactcnttgcgatggaacttgtagctgaatccgagcgaactctgtacccatacgtgactggatcctctgtagtcgctatcaaatacaaagntgggattctaatggccgctgacatgggaggttcgtatggatctaccctgcggtataagagtgttgagcgtatcaagcctattggaaagcatctcttcttggtgctagcggggagataagtgactttcaggaattttg

SEQ ID NO: 279108 - DNA, 287 bp, Glycine max
  unsure (1)..(287): unsure at all n locations
aaataaccaagcagaccttgatggaattgctttgaccgagcaactccgggaaagacaggaaatggaaaagaaactccagaagttagcaaaaaccatggattatttggaaagagccaaaagagaagangctgctcccctgattgangctgcgtatcaacagcgtctagtggaagagagacttcttcatgagcgtgagcagcagcaagaggttgaactgagcaaacagaggcatgagggagatctcaaggagaaggagaggcttgttcgaatgatgggcaataaangtt

SEQ ID NO: 279109 - DNA, 287 bp, Glycine max
  unsure (1)..(287): unsure at all n locations
ggttggagttatncacaagtgagaaatttcctaagctccacaattggagccaagaatttttgaaccatccaattgtcaaagaaagtctgccccctagagatcctgttttctcctttttcaagggtctctatgaaagcctttttggttcaaaatagatttgatgatgtggtgtgagacttagtatttctaagaattatgtgtttgttaaaggcttctatgaaagcctcactgcttcaaaatagattcatgtatgtgagactcagaatctctggggaaaattgttgtgg

SEQ ID NO: 279110 - DNA, 287 bp, Glycine max
ggagaaagaagaggaaaatgacattcttcacaacgccttcaacagtatgagaacagatggtctgaatatgaattaaagatgaaatccatggaagaagtatggcagaaacaaatgaggtctctacagtctagcctctctattgcaaagaagagccttgctatggatgattctgaaagaaattcagatgcttctgttaatgcaagtgatgacagggatttcagctgggatgtaggaaccaatcaccggcgccaagaaagcaatggggcaagatcaatgagtgctgttga

SEQ ID NO: 279111 - DNA, 290 bp, Glycine max
  unsure (1)..(290): unsure at all n locations
gtgaaagannatccganngcganganangagnaaattaagatggaggggaaggagcaggatgtgtcgctnggagcgaacaagttcccggagagacagccgattgggacggcggcgcagagccaagacgacggcaangactaccagganccggcgccgncgccactggttgacccgacgnagtttacgtcatggtccttttacagagcagggatagcagagtttgtggccacttttctgttctatacatcactgtcttaaccgtcatgggngtcgccggggctagttaatt

SEQ ID NO: 279112 - DNA, 284 bp, Glycine max
  unsure (1)..(284): unsure at all n locations
cagattatgcttataaggcaattnatgcattgcctgtttctgctcatccaatgactcaattcacaactggtgtcatggcccttcaggtgcagagtgagnancacaaggcatatgagggtgggataactaaggcaaggtactgggagccaacttatgaggatacaatgaatttaattgctcgtttgccagccatngctgctnatatttatcgacggaaatataaggatggaaaaatcataccattggacgattctttggattatggcgcaaactatgctccatgt

SEQ ID NO: 279113 - DNA, 281 bp, Glycine max
  unsure (1)..(281): unsure at all n locations
ctcaagtctctcgaagcctctttcctctcttctagaagctatctgtgtttggtgttactaagtctccaacaagcaaagtacatggttgatttggaaatccaggtccccacccnattcgacccgtttgccgaggcgagagaatcggatgcccccggagcaaaggagtatgtgcatattcgaattcagcagaggaatgggaagaagagtctgaccacagtgcaagggctgaagaaggagttcagctacgagaagatcctcaaggacctcaagaaggagntgct

SEQ ID NO: 279114 - DNA, 279 bp, Glycine max
  unsure (1)..(279): unsure at all n locations
cccaattaggggttcaaccatcccagtggtggcagctttcagctcaagagggccaaatgtgctcacaccaaaaatactcaaaccagacctgattgctccaggagtcaacatcctagctgggtggactggtgcagttggaccaactggcttgactgaagacaccagacatgtggaattcaacatcatttcaggcacttccatgtcctgcccccatgtcactggcttagctgcccttcttaagggcatcacccagaatggagccctgcagctataagntgc

SEQ ID NO: 279115 - DNA, 280 bp, Glycine max
ctgagatttctgcaatctacaaaattcactatgggagtcacaacctttacacaggaatactcctcctctgttgccccatcacgcatgttcaaggccttgattgtagactccagaaatttgcttccaaagctcttacctcagtttgtaaaagatgtgaatgtgatccaaggtgatggtgaagctggaagcattgaacaagttaacttcaatgaagctagccccttcaaatatctgaaacacaggattgatgtgcttgacaaggacaacttggtttcaaata

SEQ ID NO: 279116 - DNA, 280 bp, Glycine max
  unsure (1)..(280): unsure at all n locations
atgagattgactttgaattctggggaatctgagcggtgacccatacattcttcacaccaatgtgttcagtcagggcaaaaggcagcagagagcaacagttctatctgtggttcgacccaactgcagatttccatacctattccattctttggaatcctcagcgcataatcttctcagtggatgggaccccaataagagattcaagaacatggnatcaaaaggagttgcattcccaaaggaacagccaatgaggatatactctagtctatggaatgtgatg

SEQ ID NO: 279117 - DNA, 298 bp, Glycine max
  unsure (1)..(298): unsure at all n locations
ccgacgaagactacgattacttgttcaagctggtcctcatcggagattcgggtgttggcaagtccaacctacttgtacccgattcacccgaaacgagttcagcttggagaccaaatccaccatcggcgtcgaattcgccacgcgaagntcccccgttgatagcaagctcgtcaaggcacaaatctgggacactgcaggccaagaaagatatcgcgctattacaagtgcatactaccgaggagccgtagtgctttggttgtgtacgatgtaacccgacagtgacntcgagangtggaga

SEQ ID NO: 279118 - DNA, 293 bp, Glycine max
  unsure (1)..(293): unsure at all n locations
gaggatgccgaagaacaagggaaagggaggtaagaacaggaagaggggaaagaacgaggcggacgacgagaagcgggagctggtgttcaaggaggacgggcaggagtacgcgcaggtgctccggatgctggggaacgggcggtgcgangcgatgtgcatcgacgggacgaagaggctctgccacatccgcgggaagatgcacaagaaggtgtggatcgccgccggagacatcatcctggttggatcagggataccaggacgacaaggctgacgtcatcctcaagtacatgccc

SEQ ID NO: 279119 - DNA, 280 bp, Glycine max
  unsure (1)..(280): unsure at all n locations
cttcatcaagctccgctccaacacagggncaaaatgagggagatccttcacgtgcagggagggcaatgcnggaaccagatcggttccaagttctgggaagtggtgtgcgacgagcacggcatagatccgacggggaagtacgtcggaaactcagatctgcaactgcgagcgcgtgaacgtctactacaatgaagcctcgtgcgggcgcttcgtgccacgcgcggtgctgatggactggagcccggaaccatggacagcgtgcggaccgggccgtacgggc

SEQ ID NO: 279120 - DNA, 270 bp, Glycine max
  unsure (1)..(270): unsure at all n locations
attcaagggagctgaaattgccatggcatcttattgttctgaacttcaatatttggcgaatccggtgacaagccacgtgcaaagcgcggancaacacaaccaagatgtgaactctctggggctgatttcatcaaggaagactctgaggctattgagatcctcaagctcatgtcctccactttcctggtcgccctttgccaagncattgacttgaggcattggaggagatttgaagaacaggtcaagaagttgtgagtcaattgctaagag

SEQ ID NO: 279121 - DNA, 272 bp, Glycine max
  unsure (1)..(272): unsure at all n locations
tgactagtcctcctcctagattagctgactttggctattcaaatgacatgtttgaaaaggacacggaactatggcntggagagttgagaagtactgggatctctgagtccaaaaatgcacatcaaacacattgaggaatntanngatatgaaagcaaacatgggttcatttgcagctgctcttagagacaagaaagtttgggtaatgaatgttgtacctncaagatggaccaaacacacttaagctcatatatgacagaggcctataggaac

SEQ ID NO: 279122 - DNA, 287 bp, Glycine max
tcatttctcagcaaattgaatcgagcgaattcacaaaccctagttttcgacgatgggtcagatccagtactccgagaagtacttcgatgacacttatgaatatagacatgtggttcttcctcctgaagtcgcaaaactgcttcccaagatcgtcttctctccgaaaatgagtggcgagctattggggttcagcagagccgtggctgggttcatatgcaattcatcgccctgagccacacataatgcttttcagaggccgttgaattatcagcagcagcagaaaacca

SEQ ID NO: 279123 - DNA, 271 bp, Glycine max
  unsure (1)..(271): unsure at all n locations
gncagttatgagaacatctccaaaaagtggatacctgngctgctaccattatgctccaaatgtgcctatagtgctggtgggaacaaaactanatttgcgagatgacaagcaatttctgattgatcatccgggatccgcacgaataacaactgctcanngtgaagaactgaagaaaatgattggtgcagtcacttatattgagtgcagctccaaaacacagcagaatgtgaagacagtttttgatgctgcaataaaggttgcntgaggccac

SEQ ID NO: 279124 - DNA, 289 bp, Glycine max
  unsure (1)..(289): unsure at all n locations
gattgctagaatggaatttcgatgctcagtcatctcttttaccattctcttctctcttgctcttgcaggagagagccatgtccatgcatcgctacctgaggaagattattgggaagctgtttggccaaacactcccattcccactgcactgcgagagcttctaaagcctctncctgcaggtgttgaaatcgatgaactccctaagcaaattgatgatacacagtacccaaaaacattcttngntnaagaagaccttcatccaggcaaaacaatgaaagtacaattcacc

SEQ ID NO: 279125 - DNA, 281 bp, Glycine max
  unsure (1)..(281): unsure at all n locations
ctcaaaccaccattgagattgattccttgtatgagggtattgacttccacacaacanacnanagncncncgtttcgaagagcttaacatggacctattcaggaagtgcatngagcccgnnnagaagngtttgcgggatgctaagatggacaagagacncgtccatgatgttgtncttgtcggtggttctactaggattcccaaggttcaacagttgttgcaggacttcttcaacggaaaggagcttngcaagagcattaacccagatgaagctgttgccta

SEQ ID NO: 279126 - DNA, 283 bp, Glycine max
  unsure (1)..(283): unsure at all n locations
aaagaaagctcctaatgtttccttaggagaaactgttagagcaaggctcaagcaattttcctgtaatgaacaagcttaaganaagagctttaagggtgattgctgagcatttgacagtagaagaagctgctgggctaaaagagggattccagcttatggatacaaacaacagaggcaagattaacattgatgaattacgagtagggttgcataaacttggtcatcaagttcccgaatcagatgtccaagctcttatggaagctggtgatgtagatggggatgg

SEQ ID NO: 279127 - DNA, 282 bp, Glycine max
  unsure (1)..(282): unsure at all n locations
gagaaaatggtttcggggtcagggatctgtgccaagagggtaattgtggacgcacgacaccacatnntggggaggctggcatcgatcgtggcgaaagancttctgaatgggcagaaggtggtggtggtacgctgcgaggagatttgcatctccggtgggctcgncaggcagaagatgaagtacttgcgtttcctccgcaagcgcatgaacaccaagccctctcacggccccatccatttccgtgcacccggcaagatcttctggcgcaccgttcgtgggatg

SEQ ID NO: 279128 - DNA, 134 bp, Glycine max
  unsure (1)..(134): unsure at all n locations
caagaatggcacttngttgcttggtgatgtccctttctgttctcttcactcttggtcttgcgagagaaagccatgccaganacgaagatttttggcatgctntntggccaaacactcccattccaagttcattg

SEQ ID NO: 279129 - DNA, 279 bp, Glycine max
  unsure (1)..(279): unsure at all n locations
gnaagatgncgnagcgtggtcgtggtggntcggcggggaacaagttccgcatgtcgctnggtcttccantggcggcgacggtgaactgcgccgacaacacgggggcgaagaacctctacatcatttcggtgaaagggatcaaaggccgtttgaaccgtcttccctcggcctgcgttggcgacatggtgatggccaccgtgaagaagggaaaaccnnncnnaggaagaaggtcttgccagctgtcatcgttcgccagcgcaancatggcgccgnnangac

SEQ ID NO: 279130 - DNA, 279 bp, Glycine max
  unsure (1)..(279): unsure at all n locations
gaaaacatttcctcgtcgtattgatgtcggaaaagggccggccacttccaaaatttggtgaatgggatgtcaatgatccaacctcagctgaggggttcacagtgatttttaataaggccagggatgagataaagacaggtggtaacccagattcaccaggaaagactgccactgatcctcatagcaaacctgctgtagagcctggcaaaactcaaactaaaaaancgttttgctgcatgcaaaacccttctgccgaatcatagcatagcaatggttgct

SEQ ID NO: 279131 - DNA, 276 bp, Glycine max
  unsure (1)..(276): unsure at all n locations
gtgtcttccaaaccaggggcatattcactatgaagggtattgctgctggcatgcagaacactggttaagtttgtttgaatactgaaagtgagtgctctagttttgttctcagatacactttttttgttttgttattatgttgccccacctttctgtacaatttggtatgctgctctagaattccagaagagctagctaccacacaaatgaatcaatgacattgatctgttatgtttcttaaaaaanaaaaaaaaanaaaannaaangngggagngt

SEQ ID NO: 279132 - DNA, 174 bp, Glycine max
  unsure (1)..(174): unsure at all n locations
gtcatgacaaatcttggggagaagctgaccgatgaggaggttgatgagatgatccgcgaggccgacgtcgatggtgatggacagatcaactatgaggagttcgtcaaagtcatgatggccaagtgaggaccattcaaccataacctaaatttgaaaagcatataaagagaagng

SEQ ID NO: 279133 - DNA, 275 bp, Glycine max
  unsure (1)..(275): unsure at all n locations
cctcgctctatttctcagtctctgtgtttncggctgaggnttccgaacgagtgnccttcttcgtttctcgcaaagtttaagtaatcatgggtaaggaaaaggttcacatcaacantgtcgtcattggacatgtcgactctgggaagtcaactaccactggncacttgatctacaagcttggaggtattgacaagcgtgtgattgagaggttcgagaaggangctgaaaagatgaacaagnggtcattcaagtatgcctgggtgctcgacaagctc

SEQ ID NO: 279134 - DNA, 276 bp, Glycine max
  unsure (1)..(276): unsure at all n locations
ctccaaaatagttaaccaacaagcttatttctatgctaaanccctcaatatcactgccaaanccgcatgggtgttcgacatagatgagactacactctctaatctcccttactatgctgaccntggatttggggtggagttatataatgaaacatcgtttaataaatgggttgaccttggcgaggcaccggcactcccanagagtctcaaattgtacaagaaactgttgtctcttggcatcaagattgtattcataacaggaagaccatggatcaa

SEQ ID NO: 279135 - DNA, 278 bp, Glycine max
  unsure (1)..(278): unsure at all n locations
ggaatggcagcgaagagcaaaatcctagtccttngaggaacaggntacattggaaaattcatagttaaggcaagcgcagaagcaggacaccccacttttgcnttagttagagagaccaccctttctcatcctgaaaagtctaaacttattgagagcttcaagagctctgganttactcttctttatggtgatgtaaatgatcatgaaagccttgttaaggcaatcaannnnnnngatgttgtaatatctacactaggtggacagcagatagatgatca

SEQ ID NO: 279136 - DNA, 285 bp, Glycine max
  unsure (1)..(285): unsure at all n locations
gtactcgtatcattggtcgtctttgtgctggaaacaagaatgggcttctcttgccccataccaccacagaccaagagcttcaacaattgagaaacngtctacctgatcaagttgttgttcagcgaatagatgaaagattatctgctctgggaaattgtatcgcatgtaatgaccatgtggccctcacacacactgatcttgacagggagactgaagagatgattgcagatgttcttggagtagaagttttcaggcagaccattgctggtaatattctgttggtag

SEQ ID NO: 279137 - DNA, 264 bp, Glycine max
taagggtcctggtctctactctgacattggcaagaaagccagagatctcctgttcaaggactaccacagtgaccagaagtttaccatcactacctactcacccactggagttgctataacatcctcggggaccaagaaaggtgacctttttgtggcggatgttaacacccagttgaagaacaagaacatcaccactgatatcaaagtggacaccggttccaatcttttcacaactatcactgtcaatgagcctgctcctggtct

SEQ ID NO: 279138 - DNA, 289 bp, Glycine max
  unsure (1)..(289): unsure at all n locations
aaaaaaccctctctttctctctcttccaaaacctaattttcattttttctcttcaaacaaattttcaaaatgcgtgagatccttcacatccagggtggccaatgcggcaaccagatcggcgccaagttctgggaggtggtttgcgcggagacgggatcgaccccactggaaggtacggtggggactcagagcttcagctcgagaggatcaatgtctactacaacgaagccagctgcnnnnggttcgtgccgcgcgcggttctcatggacctcgaaccgggcaccatgga

SEQ ID NO: 279139 - DNA, 297 bp, Glycine max
ctcgagccctagtgcaccgtaagggttgtgaagcaggcagagaagagccatggtgcacgtttctttctaccgaaactatgggaaaacgttcaagaagcctcgtcgtccctacgagaaggagcgtttggacgccgagttgaagctggtcggtgagtacgggctccgctgcaagagggagttatggagggtccagtacgccctgagccgcatccgtaacaacgccagaaacctattgacccttgatgagaagaaccctcgccgtatcttcgagggtgaagcccttctccgaagaatgtt

SEQ ID NO: 279140 - DNA, 296 bp, Glycine max
attgccggaaaggtagctgttgtgtgtggctacggagacgttggcaagggttgtgcttcggccatgaagcaagccggggctcgtgtcattgtcaccgagattgatcccatttgtgcccttcaggctctaatggagggtcttcaggttctcaccctggaagatgttgtctccgaggccgacatcttcgtcaccaccacagggaacaaggacattatcatgcttgaccacatgaagaagatgaagaacaatgccatcgtgtgcaacattggccacttcgacaacgaaatcgacatgct

SEQ ID NO: 279141 - DNA, 293 bp, Glycine max
  unsure (1)..(293): unsure at all n locations
cgattgctagaatggaatttcgatgctcagtcatctcttttaccattctcttcnctcttgctcttgcaggagagagccatgtccatgcatcgctacctgaggaagattattgggaagctgtttggccaaacactcccattcccactgcactgcgagagcttctaaagcctctccctgcaggtgttgaaatcgatgaactccctaagcaaattgatgatacacagtacccaaaaacattcttctataaagaagaccttcatccaggcaaaacaatgaaagtacnattcaccaag

SEQ ID NO: 279142 - DNA, 284 bp, Glycine max
  unsure (1)..(284): unsure at all n locations
ttgaanggnggtggtatanntggtgctgctgcatnaactgggggaactttgttggctatnactggtgggttagctgcaccagccnttgctgcaggtcttggtgctttagctccaactttgggtactctgatccctgtaattggtgcaagtgggtttncngcagctgctagtgctgcaggaactgttgctggttctgntgcagttgctgcatcanttggagctgctggagctggacttactggaagcaaaatggctaggagagtngggggtgttgatgagtttga

SEQ ID NO: 279143 - DNA, 291 bp, Glycine max
  unsure (1)..(291): unsure at all n locations
cccctctctattttgcgttcattctgttttccagttgaagtctttccctagccaatggccactgatcgtttgacccgggttcacagtctccgtgagaggcttgatgaaaccctcactgccaacaggaacgaaattttggcccttctgtcaaggatcgaagctaagtancaaggggatcctgcaacaccaccaggtcattgctgagtttgaggaaatccctgaggagaacaggcagaagcttactgatggtgcctttggagaagtcttgagatctacacaggaagccatagt

SEQ ID NO: 279144 - DNA, 289 bp, Glycine max
  unsure (1)..(289): unsure at all n locations
attaattgcaagaatggcacttcgtngcttggtgatgtccctttctgttctnttccactcttggtcttgcgagagaaagccangccagagacgaagatnncnggcatgctgtttggccaaacactcccattccaagttcattgcgagatcttctaaagcctggccctgcaagtgttgaaatcgatgatcaccctatgcaaattgaagaaacacagtacccgaaaaccttcttctataaagaagaccttcatccaggcaaaacaatgaaagtacaattcagcaagcctcc

SEQ ID NO: 279145 - DNA, 293 bp, Glycine max
  unsure (1)..(293): unsure at all n locations
agaaaatgaaagtccttgttttctttgttgctatagttctagcagcatggcattgccatggctcagaccatgaccatgaccatgnccacacctaccaaattttccctctgagaatgaaaactggccatggtggccactacattccggaggtatcatgccaaagttggncgcttggtgtggaagcacacaacgtcattgactggaaaaccgttcctcaagattgcgagggatatattgggaactacatgcttggcgaacatatagatcagactccaaaatagttaaccaacaag

SEQ ID NO: 279146 - DNA, 290 bp, Glycine max
gtttgatcctactgatcaggagattcttgaacatttggaagcgaaggtgcgctctgatattcataagcttcatcctttaattgatgagttcatccctactcttgaaggcgagaatggaatctgctgtacccatccagagaagttgccaggagttagcaaagatgggttgatccgacatttctttcacaggccttccaaagcatacacgaccggaacaaggaaaaggagaaaggtgcacacagatgcagatggcagtgagacacggtggcacaaaacaggtaaaactaggc

SEQ ID NO: 279147 - DNA, 291 bp, Glycine max
  unsure (1)..(291): unsure at all n locations
cttaacaacagcacaaagcgggttactgtctgttcaagctaccatctctctctctctttcntagtgcctccttgccagaagttaaaatggcccaagaaactttcctattcacatctgaatcagtgaacgaggggcaccctgacaagctctgtgaccagatctccgatgctgtgctcgatgcatgcttggagcaggaccctgacagcaaggttgcctgtgaaacctgcaccaagaccaacatggtgatggttttcggagagatcacaaccaaggccaacgtggactatgaga

SEQ ID NO: 279148 - DNA, 134 bp, Glycine max
  unsure (1)..(134): unsure at all n locations
tnccttaagctcnttagtgctgcncctngcagctctaattcantcccctcaagttcntgcaaactatgagaatcccccagtgtanaagcntcncantgananaccancagtttataagcccccagttgagaagc

SEQ ID NO: 279149 - DNA, 274 bp, Glycine max
  unsure (1)..(274): unsure at all n locations
gatgggaagacaattaaactacagatttgggatactgcnggacaagaacgatttaggacaataactagtagctactatcgtggagcacatggaatcattattgtttatgacgtgacagatgaagatagcttcaataatgtgaagcaatggctcagtgaaattgaccgctatgccagtgataatgttaacaaacttttggttggaaacaagagtgatctgacagcaaataganttgtcncatatgacacagctanggantccgcntccaattggg

SEQ ID NO: 279150 - DNA, 307 bp, Glycine max
  unsure (1)..(307): unsure at all n locations
ctttcagagctaatctttcctgcaagaaggaggagctgaactnggcccctcagttttattctttggatgcaggaaccgtcaaatggactacatctatgaagacgagttgagtcacttcgttaatactggcgcacttgatgagctcattcttgccttctctcgagagggacccaccaaggagtatgtacaacataaaatgatggagaaggcttcagaaatttggagcatgatatcacaaggagcttacatttatgtgtgtggtgatgccaagggcatggccagggatgtacaccgcgccctgcacaca

SEQ ID NO: 279151 - DNA, 297 bp, Glycine max
  unsure (1)..(297): unsure at all n locations
gtttgcggagagaaagagagagcaatgagagagatacagttacccttaagccaaacacagaaggttcgttcttcagaaggctctggaacagttagagtctctgtcaacgaaggtgaattccgatgcttcggtaatcatcgccgattccatccacgtcaaccacgaagatggnctcctcaagggacacggaaccgccgacctcaacggcgaagtcgtcgccaccctctgcggcgtcgtcgagcgcgtcaacaaacttgtctacgttcgcgcgttacgctccagggcgtgttgttgaag

SEQ ID NO: 279152 - DNA, 289 bp, Glycine max
  unsure (1)..(289): unsure at all n locations
tttggcacttattcttcatggatccaagctttcaagggagcatnatttgaacacagaggaattcattgatgccgtggnagccgagcttagtgctaagctttctacatagacttgatttaagacaggcggaaaagaagacgatagcaacaaggagcgtgcgtgcgtgcgtatgctgctctctatattcagaagnaataagaaagggaaaaagaagcattggtccttaccttagcccctttccttcatttgtttgttggttgggagagcaagggttgactgtttcttctcc

SEQ ID NO: 279153 - DNA, 294 bp, Glycine max
  unsure (1)..(294): unsure at all n locations
cagttccctacctctcctttcangatgcagatcttcgtcaagaccctcaccggaaagaccatcacccttgaggtggaaagctctgacaccatcgacaacgtcaaggccaagatccaggacaaggaaggaattcccccggatcagcaacgtctcatcttcgccggaaagcagctcgaggacggccgtaccctcgccgactacaacatccagaaggagtcaacncttcacnttgtccttcgtctccgtggtggcatgcagatcttcgtcaagactctcactggcaaaaccataaac

SEQ ID NO: 279154 - DNA, 293 bp, Glycine max
  unsure (1)..(293): unsure at all n locations
gttgaaaatagtttggttttgtagtaagtgaggtgaggtgccaaaatggtgaagataactcttggtactttcgatgactcttttggtgttgcctctcttaaggcttatttggcagagttccatgcaactctgatttnccgtgttcgctggtgttggttcagccatcgcttacaacgagcttacaaaagatgcagccttggatccaacggggctggtggcagtagctgtggcccatannnttgcactgtttgtaggtgtctccgtcgcagccaacatctcgggtggccatttga

SEQ ID NO: 279155 - DNA, 293 bp, Glycine max
  unsure (1)..(293): unsure at all n locations
gagcgagagaacaagaacataagggaaccacagcggcggtaacagaagaacaagcagagaatgggtcgagtgagaacgaagacggtgaagaaatcctctcggcaggtgatagagcgtcactactcgcgcatgaccctggacttccacacgaacaagaaggactggaggaagtggcgataatcccgtcgaagaggctaaggaacaagatcgcggggttctcgacgcacctgatgaagcgcatccagaanngcctgttgcgcggcatctccctcaagctccaggaggaggagcgc

SEQ ID NO: 279156 - DNA, 268 bp, Glycine max
  unsure (1)..(268): unsure at all n locations
gttttgaagagctaaacatgganttattcaggaagtgcatggaacccgtggagaagtgtttgcgggatgccangatngataagagtaccgtccatgatgttgttcttgttggtggttctactaggattcccaaggttcaacagttgttgcttatggtgctgcagtgcaggctgcgattctcagtggcgagggtaatgagaaagtgcaggatcttcttttgttggatgttactcctctatccactggtttggagactgcaggaggagtc

SEQ ID NO: 279157 - DNA, 288 bp, Glycine max
  unsure (1)..(288): unsure at all n locations
attatcatccgcagctgcttttattcgcaccncaaacagtgagccatggccgtcggaaagaacaagcgcatctccaaggggaagaagggtggcaagaagaaggcagctgatccctttgccaagaaggattggtatgacattaaggctccttctgtttttcaagtgaaaaatgttggcaaaaccctcgtctctcgtactcagggtaccaagattgcttctgaaggactcaagcatagagtgtttgaggtctccttggctgatcttcaaggggatgaggatcatgcattc

SEQ ID NO: 279158 - DNA, 289 bp, Glycine max
  unsure (1)..(289): unsure at all n locations
gcggcagcnacttcggctccatcttctncgatctctcaaactctatcggcgcanacccaatcctatatcactatggggaagacacatggaatgggagctgcccgcaagctgaagtctcaccgtaggagacaaaggtgggctgacaagtcatacaanaagtctcatctnggaaatgaatggaagaagccttttgctggttcancccatgcaaagggtattgttcttganagataggtattgaggtagcagcccaactctgccattcggaaagtgccagggttcactcanc

SEQ ID NO: 279159 - DNA, 293 bp, Glycine max
  unsure (1)..(293): unsure at all n locations
gccagttatgagaacatctccaaaancgtggatacctgagctgagacattatgctccaaatgtgcctatagtgctggtgngaacaaaactagatttgcgagatgacaagcaatttctgattgatcatccgggatccgcacgaataacaactnnntcagggtgaananctgaagaaaatgattggtgcagtcacttatattnagtgcagctccaaaacacagctnnaatgtgaagacagtttttgatgctgcaataaaggttgcattgaggccaccanagccaaagaagaaacc

SEQ ID NO: 279160 - DNA, 288 bp, Glycine max
  unsure (1)..(288): unsure at all n locations
gctcttctaacttctgggnncagccttgatgatcccaacactttcggtaacaggattcacaggatgctgaagcttggactgagcattgatgaagatgctggtgaagcagatgctgacatgcctcctctcgaggacgccgatgctgatgccgatgctgagggtagcaagatggaagaagttgattaaatctaacttaattattgatttgcctttgtgtttttagaaacaatgattggggaacagtcttttactatgtttatgttttgaattttcgaaattttggaatgt

SEQ ID NO: 279161 - DNA, 285 bp, Glycine max
  unsure (1)..(285): unsure at all n locations
ggctctctaagaaacatggctgaagagggtnaggttgtcggcgtccacaccgttgatgcgtggaaccagcaactgcagaatggaaaagactcccaaaaattgattgtggtggatnttactgcttcctggtgtggtccatgccgttttattgccccagttctggcagagattgctaggcatactcctcaagtgatcttcctcaaggtggatgtggatgaagtgaggcctgttgctgaggaatattccattgaggccatgccaaccttcctcttcttgaaagatggc

SEQ ID NO: 279162 - DNA, 288 bp, Glycine max
  unsure (1)..(288): unsure at all n locations
tgaagatctcgattagccgaaaattgcaagaacggcttcaggctcttgcnatcaacaaacgcagcgttttgatctcagatttgagggggagagaatggcaacaacagtgagaagtctgaagataaagacaagtacgtgcaaacgtatagtgaaggagctgcattcttatgagaaggaagttgagagagaagctgccancacagctgatatgaaggaaaaaggagccgatccctatgatctcaagcaacaggaaaatgtcttggctgagtctaggatgatgattcctga

SEQ ID NO: 279163 - DNA, 288 bp, Glycine max
  unsure (1)..(288): unsure at all n locations
tttccattctcttcaacctaacgcagcatcgctatactcttcattccatggctttgcccaatcagcaaaccgtggattaccctagtttcaaactcgtnatcntcggtgatggtggcacaggaaagacaacctttgtgaaaaggcatctcaccggngaatncgagaagaaatatgagccaaccatcggtgtggaggttcacccattggattttttcacaaactgtggaaagattcgattctactgctgggatactgctggacaggagaagtttggtggcctcagagatg

SEQ ID NO: 279164 - DNA, 283 bp, Glycine max
  unsure (1)..(283): unsure at all n locations
ggtacagagaccgtatcaatgggcgcccaagaagttatgatagggtactcggactcgggaaaagatgctgntcgtttctctgcagcatgggcactatacaaggctcaagnagagctcataaaggttgcaaaagagtttggtgttaagctcactctgttccatggcagaggaggnactgtgggaagaggaggaggtcccactcatcttgctatattatctcagccaccggatactattcatggctcacttcnggtaacagtgcaaggtgaagttattgaacagt

SEQ ID NO: 279165 - DNA, 287 bp, Glycine max
  unsure (1)..(287): unsure at all n locations
caaagcccaaattcgacgcagcattgaagccgaagganccccctatacgtacgtttccagcaactacttcgctggctattttcttcccanattagcacaaccaggtgcttttgctccacctccacccaaagacaaagtcattatcttgggcgatggaaatcctaaagcaattttcaacaancnagaggacattggaacctacaccatcagggctgtggatgaccctaggacattgaacaagattctctacctcaggccccctaagaacatttatcgttcacgagctt

SEQ ID NO: 279166 - DNA, 277 bp, Glycine max
  unsure (1)..(277): unsure at all n locations
gccagttatgagaacatctccaaaaagtggatacctgagctgagacattatgctccaaatgtgcctatagtgctggtgggaacaaaactagatttgcgagatgacaagcaatttctgattgatcatccgggatccgcacgaataacaactgctcagngtgaagaactgaagaaaatgattggtgcagtcacttatattgagtgcagctccaaaacacagcagaatgtgaagacagtttttgatgctgcaataaaggttgcttgaggccaccaaagcc

SEQ ID NO: 279167 - DNA, 279 bp, Glycine max
  unsure (1)..(279): unsure at all n locations
gatatctngtttcngccatgttgatgaagatanaaagcnaggacttgaccatggtgcttgggttcctctctttttgatgtatccagaagctgacatccctgtttgtcagatatctattcaatctcagcaancatggaacttatcattataacttaggaaaggcattggcccctcttaaagatgaaggtgtattgatcatgggttctgggagtgctgttcacaacttgagagcacttgagcctcactccactgttgctccctgggctctagagtttgata

SEQ ID NO: 279168 - DNA, 279 bp, Glycine max
  unsure (1)..(279): unsure at all n locations
taactagaaacagtgtgatgaaaatgaaggtncttgtnttcttngttgctacaattttncgtagcatggcaatgccatggtacgatatgttccctcnccgaatgaacactggctatggtgcccgtactccggaggtgaantgcgcaagttggaggcttgctgtggaagcacacaacatctttggctttgaggaattcctgaagagtgcgttgaagcaacaaaggaatacatccatggcgaacaatatagatcagactccaaaacagttaaccaacaagc

SEQ ID NO: 279169 - DNA, 286 bp, Glycine max
  unsure (1)..(286): unsure at all n locations
ctgcgaggtgagtgaaaatggcggtacccttgctctccancgaanatcgtgaagaagcgcgtcaagaagtttatacgcccccagagtgatcgcaagatctccgtcaagccaagctggcgcagacccaagggtattgattctcgtgtcaggagaaagttcaaaggatgcactttgatgcccaacattggttatggctcagacaagaaaacccgccattatctaccaaatggtttcaagaaatttgtcgtgcacaatgtgaaagacctggaattctcatgatgcataa

SEQ ID NO: 279170 - DNA, 279 bp, Glycine max
  unsure (1)..(279): unsure at all n locations
cctagattcagccncagtttcggagnnagaagaaaatagtcgttngagancgcccgtacgaagcaaactgctcntaagttccacaggaggaaaggctnctaggaagcagcttgnaacnaaggctgcacgtaagtactgcaccnactactggtggtgtgaagnnncccacatcgttaccgtcctggtaccgttgctcttcgtgagattaggaaataccagaagagtaccgagcttttgatcaggaagcaccccttccagaggctggttcgtgaattgctc

SEQ ID NO: 279171 - DNA, 282 bp, Glycine max
  unsure (1)..(282): unsure at all n locations
aggccaggcaagccccactcaaccaccacacctctnctcgttcacgctaccccttaatgctcttctnctacctttnaagttttaaaagtataaagatggcagagacattcctatttacctcagagtcggtgaacgagggacaccctgacaagctctgcgaccaaatctccgatgctgtcctcgacgcttgcctcgagcncgacccagacagcaaagttgcctgcgaaacatgcaccaanaccaacttggtcatggtcttcggagaaatcacgaccaaggcca

SEQ ID NO: 279172 - DNA, 270 bp, Glycine max
  unsure (1)..(270): unsure at all n locations
ctcgcgtcttcgantttcacagcgaagtcgtaggagggtttcaaaagatggagaacatgcagagcttctggcnttncggcgatgaactccgtggacactcaaaagcatcggaggatcacaaatggttaatggttgcttcgaaattggcggaacagacaagattgaagggggagcgtgtgaacaaccttgatctttcaaagggccccattgaaacaaggtcaagggataaatttgggttccaggaagagaacaaatttgattctcttaact

SEQ ID NO: 279173 - DNA, 268 bp, Glycine max
  unsure (1)..(268): unsure at all n locations
tggtggtattgcatactacatcactgcaccatccagcttagctgatatggcggccaatcctttccatgcactgtncctatcttgtgtttatgctttcagcttgtgccttgttctcaaaaacatggattgaagtctctggttcatctgctagagatgttgccaagcagctgaaggaacaacaaatggtaatgcccggacaccgtgagtcaaacttgcagaaagagctgaatcgatacattcccactgccgcagcatttggaggcatctg

SEQ ID NO: 279174 - DNA, 270 bp, Glycine max
  unsure (1)..(270): unsure at all n locations
tcacaactcgcaaaccacaatgcctaagcagatccacgagattaaggatttccttctgacggcacggaggaaggatgcgaggtcggtgaaaatcaagaggagcagggatgtcgttaagtttaaggttcgatgntccaagtatttgtacacgctttgtgtctttgannctgagaaagccgataaattgaagcaatctctcctcccggtttgagtgttcaagacctgtagaggtgctgagtgcggcacgtgcgtttgtttatcttttgttgc

SEQ ID NO: 279175 - DNA, 271 bp, Glycine max
  unsure (1)..(271): unsure at all n locations
gaaaatctctggcttatggtggtcttgcacgaggccttcacgaaggggcaaaagtgattgagaagcatgctgcacaactctgtgttctagcagaagactgtgaccagcctgactatgttaaactggttaaggccctttgtgcagagcacaatgttagcannctgacagttccgagtgcaaagaccctggagaatgggctggtttgtgcaagattgattccgaaggaaaagctaggaaggttactggttgctacctgtgtggttgtgaagga

SEQ ID NO: 279176 - DNA, 166 bp, Glycine max
  unsure (1)..(166): unsure at all n locations
cggcaacggatatctcggctcttgcatcgatgaagaacgtagccgaaatgcgatacttggtgtgaattgcagaatcccgtgaaccatcgagtctttgaacgcaagttgcgcccgaagccattaaccccganggcacgcctgcctgggtgtcacacatcgtttaaaa

SEQ ID NO: 279177 - DNA, 273 bp, Glycine max
  unsure (1)..(273): unsure at all n locations
catcttcaccctttccctgtctctcagaaagatgaaggtggtcgctgcgtatctgcttcgccgtcctcggtggcaacaacaccccctccnccgatgacatcaaggaaatcctcggctccgttggaatagaggcagatgaagataggattgaatcgttcttgtctgaagttaaggggtaaggatatagttgagctaattgctgccggtaaggaaaagctggcctcggtgccttctggtggcggtggtgccgttgccgtcgccgctgctcctggt

SEQ ID NO: 279178 - DNA, 302 bp, Glycine max
  unsure (1)..(302): unsure at all n locations
ggtctcatgagggctaccgatgttatgattgctggaaaggtggctgttgtggctggatatgntgatgttggcaatggttgtgctgctgcaatgaagcaggctggtgctcgtgtcatcgtgaccgagattgatcccatctgtgcccttcaggctctcatggaaggccttcaggttctgaccttgaggatgttgttctgaggctanatnttgncaccaccaccggnaacaaggacannagnangatnaccacantaggaaaannaagaacaagnccatnttncaacatngananttgacaagna

SEQ ID NO: 279179 - DNA, 307 bp, Glycine max
  unsure (1)..(307): unsure at all n locations
caccaacagcataccaagaatgcttcaccaaacacgacgttgccttggccaaccggctaccttctctctcgggaaaatacntntnctacancaacaccaccgccaggtcctgctcccacggggagcactggcggaacctccgccgcatcaccgccctggacgtcctctccacncagcgagtccactcttnntccggaaancgaagcgacgagacgaaaaggttngncagaggtncangccaagaacancaaggaggggttggggcgcgnnngtnaaagagangnangtgngnagtncnaggacangt

SEQ ID NO: 279180 - DNA, 319 bp, Glycine max
  unsure (1)..(319): unsure at all n locations
ggacatggttgtagtgaacccagttttggtacttggaccattactgcaacccagcataaatgctagtacaattcacatcctcaagtacctcactggctctgctaagacctatgcaaatgccacacagggcgtatgttcatgttagggacgtggcattggcccacatacttgtttatgagaagcctctgcctctggtagatacatatgtgccgaaagctctctccaccgtggagaattagttgaaattctcgccnagtatttccccgactacccagttcccaccaagtgttcagatgaaaagaatccgagagcaaaaccc

SEQ ID NO: 279181 - DNA, 297 bp, Glycine max
  unsure (1)..(297): unsure at all n locations
ctgttgagtactacaatgacaatggtgccatggttccagttcgtgtccacactgtcctaatttccacacaacatnanaaggnngtgagcaatgaccaaattgctgctgaccttaaagagcatgttatcaagcctgtnantcctgagaagtacctggatgagaagaccatcttcnaccttaacccttctggccgttttgtcattggtggccctcatggtgatgctggtctcatggaagaaagatcatcattgatacctatggtgggtggggtgctcatggtggaggtgcttttcaggg

SEQ ID NO: 279182 - DNA, 299 bp, Glycine max
  unsure (1)..(299): unsure at all n locations
gtcttcnnanttcgtcaaaaccaaccaaacccctccccaattctcaagccaaccatgtntcnccttcaagagcaagtacnaagatgaactcattgccaatgctgcttacattggcaccccagggaagggtatccttgctgctgatgagtcaactggtacaattggcaagcgattggccagcattaatgtcgagaatgttgaagcaaataggcgtgctcttcgtgaactcctattcaccacacctggtgcttttgagtgcctcatggtgtgatcttgtttgaggaaaccctataccaaaa

SEQ ID NO: 279183 - DNA, 288 bp, Glycine max
  unsure (1)..(288): unsure at all n locations
tcgcaagattctgggatatcagatgccaagaggaagacgtagacatgagtgaaggtgcaaagtgtttgttaaccaaaataggtgtagaaacatctttgagatatgctattcatctaatcacagcagctgcattggcatgccaaaagcgaaaggggannacagtggagttggatgatataaatcgggtttacaatctgtttttggatgtcaaaagatcaacacagtacctaatggagtaccaaagtcatacatgttcatgaaacaggagangctgatgaagatgaaccc

SEQ ID NO: 279184 - DNA, 290 bp, Glycine max
  unsure (1)..(290): unsure at all n locations
cagtaatggaaataacaacaacagtaacagctctgtcaccgccgccttcggaaggcgtggggtccacccacaccgtgagtccacggccaccaccgagacttcgatctcaacatcccggcttttgccggatttttcgaccaaggtcggagaagacgaggttgagagccctcaccctgtcatgaagaagcctcgccccttcgtcattcccaagatcgaaatccctcaatatcaatgaatctatgaattttttatnnttatntttttcgattattttggagaattttgagatt

SEQ ID NO: 279185 - DNA, 277 bp, Glycine max
  unsure (1)..(277): unsure at all n locations
ggaaaaggtgcaatgcattagaagttgttttcatctcaagtgncagagattcaaacctcctttgatgaattctttgcgggaatgccatggttggcacttccctttggggactcgaggaagaaattcctgagtcgcaaattcagggtatctggcatccccncgcttgtggccattgcatcaagtggtcagacattgacaacaaaagctcgagatctggtttcatctatggagcagatgcatatcctttcaccgaggagagaataangaaatagagacc

SEQ ID NO: 279186 - DNA, 284 bp, Glycine max
  unsure (1)..(284): unsure at all n locations
ggcatgatatacatgccatactggatgatggagaacatgcttttacaagagggggacattgtcaaagtgaaaaatgtnacacttccaaaggggacatatgttaagttacagccccacacaaaagacttttnggatatttccaatccaaaagctatcttagaaacaacattgaggaatttttcctgcttgactactggagatagcattatggtggctacaacaacaagaaatattacatagatattatagaaactaagcctgacactgccataagcatattgaga

SEQ ID NO: 279187 - DNA, 283 bp, Glycine max
  unsure (1)..(283): unsure at all n locations
ctttcactttaccaactcctaacaatttctctctgtttccttcttnaccgcatcaatggagttggacggcgttctcctcggcatgtgcaaccctctcctcgacatctctgccgtcgtcgacgacgctttcttgcaaaaatacggtatcaagttgaacgatgcgattctcgctgaggataagcacaaacctatgtatgaagaattggctaacaatcctaatgtggagtacattgctggaggtgctactcagaatcaatcagggttgctcagtggatgcttcaag

SEQ ID NO: 279188 - DNA, 286 bp, Glycine max
  unsure (1)..(286): unsure at all n locations
ggnaganaccctagccactctcncgggcgtcacgatgcagatcttcgttcaaaaccctaacgggtaaaacgatcacgttggaggtggagtcttcggacaccatgcgacaacgtgaaggccaagatccaggncaaggaaggnatccctccggaccagcagnccctcatcttcgccgggaagcagctggaggacggccgcaccctcgccgactanaacatccagaaggagtcccacgcttcacctcgtcctccgcctccgtggcggcgcnaagaagcgcaagaagaag

SEQ ID NO: 279189 - DNA, 274 bp, Glycine max
  unsure (1)..(274): unsure at all n locations
cggaagaaaccctagccactctcccggcgtcacgatgcagatcttcgtgaaanccctaacgggtaaaacgatccacgttggaggtggagtcttcggacaccatcgacaacgtgaaggccaagatccaggacaaggaaggcntccctccggacnagcagcgcctcatcttcgccgggaagcagctggaggacggccgcnnccctcgccgactacaacatccagaaggagtccacgcttcacctcgtcctccgcctcctggcggcgccannaancg

SEQ ID NO: 279190 - DNA, 275 bp, Glycine max
  unsure (1)..(275): unsure at all n locations
ggcaattgaaaaccaagacaccgctgtcagagaaatcaagcccaagaacncgaggatcatgggtgctggagggcctgatgatgaggacaataggtggccaccgtggttgaagccactgctgaaagagagcttctttgntcaatgcaagttgcatgctgagcctcacaagagcgaatgcaacatgtatnngcttggactgtatgaatggccctctctgctctctctgcctcgcccaccacaaagatcaccgtgcaatccagattaggaggtcctca

SEQ ID NO: 279191 - DNA, 201 bp, Glycine max
  unsure (1)..(201): unsure at all n locations
gaggaatatggcttccttaagctcctcattagtgctgctncttgcagctctaattctatcccctcaagttcttgctgactatgagangcccccaatttacaagccacctgtttacacaccgccagtttataannccccagttgaaaaaccaccagngtaaagccaccagnnnagaagccaccagcgtacaagccaccagtg

SEQ ID NO: 279192 - DNA, 240 bp, Glycine max
  unsure (1)..(240): unsure at all n locations
atgggttcaacaggtgagactncagattactccaacccatgtatctgatgaagaggcaaaccttttcgccatgcaactanccagtgcctcagtactccctatggttctcaaatcagctcttgagcttgatctgttggaaatcatagccaaggctggccctgncttcacctttccccctccgacattgctnttcggctcccaacacacaaccctgacgngtcntncangatggaccgnana

SEQ ID NO: 279193 - DNA, 291 bp, Glycine max
  unsure (1)..(291): unsure at all n locations
gttaagagcagagtttcgtcttcccagtataacggatgaggaagcaactcctgagaganancctcctatacgtgtaaaatttgaaataccatattttactgtatctggaatacaggtaanatatttgaaggttattgagaaaagtgggtatcaggctcttccanannngagatacataacgatggccggagagtatgaattaaggcttatttaagaacttgtatttttctttggtgctggaattccaccaaataacaggttcagcttccatgatcaatggttttaaagtgg

SEQ ID NO: 279194 - DNA, 290 bp, Glycine max
  unsure (1)..(290): unsure at all n locations
ggggcgatgggattgagttcatgttgtttatacggtggagctccatatcaaggtcaagaacttaagctgaggagaggtgttgatattgtcattggcacaccaggccgtgtgaaggatcatattgagaagggaaatattgacctgagccaactaagtttcgtgtccttgatgaagccgatgaaatgctgaggatgggttttgttgaagatgttgaaatgattctaggcaaggtagaaaatnncaataaagttcagacacttcttttcagtgctactttgccagactgggtt

SEQ ID NO: 279195 - DNA, 299 bp, Glycine max
  unsure (1)..(299): unsure at all n locations
accaaacaaacaaataaagcaaaaggcctttttattccaaagcaaggnaggaagaaataaaccgaatgagagcattaacctcttcttcttccactttcattccaaagcgttatnnnnnnnnnnnnnnnnnnnnnnntctcttcgctcttcgatcctcgtcgggggctgctccgaataccaccaccaccacgcgccgatggccacgataggaggcttacgcgactcccaaggctctcagaacagcgtccaaaccgaggccctcgcnnggntngccgncgatnaacacaacaagaagcaga

SEQ ID NO: 279196 - DNA, 286 bp, Glycine max
gccagaaatcactgccactggaaacaatgccactctctttaactcaggtgtcatggtggttgagccatcaaattgcacattccagctcctgatggatcatatcaatgagattgagtcttacaatggaggggaccagggatatttgaatgaatattcacatggtggcacaggataccaagacacatgaacttcttgaagcatttttggattggtgatgaggaagagaagaaacaaatgaaaactctgttgtttggcgcagaacctccaattttgtatgtccttcact

SEQ ID NO: 279197 - DNA, 244 bp, Glycine max
  unsure (1)..(244): unsure at all n locations
ctgtttgcatggtggactgtcaccttcaattgagacccttcntaacataaggnactttgatcgtgttcaagaggttcctcatgaaggccccatgtgtgatctattgtggtctgacccagatgacagatgtggctggggaatttctcctcgtggtgcggatatacttttggccaggatatatctgaacaatcaatcacactaacagccttaaattgattgctagagctcatcagcttgttaggag

SEQ ID NO: 279198 - DNA, 152 bp, Glycine max
  unsure (1)..(152): unsure at all n locations
ggacctgtctgtgncggagcactatgaaagacattgtcctcctgcggaaaggcgncacaattgcttgattcctcctccatcaggatacaaggttcctattaagtggccacancgcagannngaggtgtggaaagcaaatatcccacaactca

SEQ ID NO: 279199 - DNA, 280 bp, Glycine max
  unsure (1)..(280): unsure at all n locations
ctagtttatcgtgaggngaatatgaagttgtttgttttctttgntgctgcagtagttttggtagcatggccatgccnccgcgcaggctaccaaaggttccctctccgaatgaaaactggctatggtgagcgttcttcggaggtaaatgcgcaagttttaggcttgctgtggaagcacacaacatccgagcntttaaaaccantcctgaagagtgcgttgaaccaacaaaggactacattaatggcgaacaatttgatcagactctaaaacagttaaccaa

SEQ ID NO: 279200 - DNA, 202 bp, Glycine max
  unsure (1)..(202): unsure at all n locations
caattcctaattgtttaaacctaattctcatttcttcatcgttcgattcttctcctcctaaagatgcagatcttcgtgaaaactttgaccggtaagaccatcacccttgaggtggagtcctccgacaccatcgataacgtgaaagctaaattcaagacaaggaaggannnccacctgaccagcagagncttatcttgcgggg

SEQ ID NO: 279201 - DNA, 279 bp, Glycine max
  unsure (1)..(279): unsure at all n locations
ggaaagtgcggtagctcctctagccgctgtcattgttccaaaaagaggngcatgaggttgaagagggtagtgagggtaccagctataagcttgaagatggctgatatnccaccagatgatnattcttggaggaaatatggacagaaccaattaaaggatcgcctcatccaaggggttactacaagtgcagtagtgtgagagggtgtccagcgcgaaaacatgttgaaagagctttggatgatccagctatgctggtggtaacatacgagggagagcaca

SEQ ID NO: 279202 - DNA, 274 bp, Glycine max
  unsure (1)..(274): unsure at all n locations
cacaaagatggtgagaaccccatcttgtgacaaaagtggaacgaggaaaggtacttggactccggaggaagatagaaagttaattgcttatgtcactagatatggctcctggaattggcgccaacttcccaggtttgctggtctggcaagatgtggcaaaagttgtagactgagatggatgaattatctaaggccaaatgtcaaaagagggaacttcactcaacaagaagatgantgcatcattagaatgcacaaaaaactggtaacaaatggt

SEQ ID NO: 279203 - DNA, 277 bp, Glycine max
  unsure (1)..(277): unsure at all n locations
gggaatggatgttgcagcttctgaattctacaaggaagacaaaacatacgatttgaacttcaaggaagataacaatgatggctcccagaggatctctggagatgcttgaaagatctgtacaagtcatttgtgtcagagtacccaattgtntcaattgaggatccatttgaccaggatgactgggagcactatgctaagctaactgctgaggttggagccaatgtacaaattgttggtgatgatctctggttaccaaccccaaganggttcagaggcc

SEQ ID NO: 279204 - DNA, 280 bp, Glycine max
  unsure (1)..(280): unsure at all n locations
ttgttgtgagctataagctagtttatcgtgaggngaatatgaagttgtttgtnttctttgttgctgcagtagttttggtagcatggccatgccatggcgcaggctaccaaaggttccctctccgaatgaaaactggctatggtgagcgttcttcggaggtaaaatgcgcaagttttaggcttgctgtggaagcacacaacatccgagcctttaaaaccattcctgaagagtgcgttgaaccaacaaggactacattaatggcgaacatttagatcagacc

SEQ ID NO: 279205 - DNA, 288 bp, Glycine max
  unsure (1)..(288): unsure at all n locations
ggcgacatgtttctaagtgttcctaaagctgatgntgcttttcttatgtgggttttgcacgattggtcagacgaagagtgcatccaaatcttaaagaagtgtagggaagccatatcaaattcaaaggaaaacggaagggttattattgtggaggcggtgtttgaaggagaaggaganggagaaggagggaagcatgacggattgaaggatgtgggattgatgcggacatggtaatgatggcgcacactaacttcggcaaagagcgcacactccaagagtgggantngt

SEQ ID NO: 279206 - DNA, 294 bp, Glycine max
  unsure (1)..(294): unsure at all n locations
cgcgaacttcgaagatgaccaactagccaatatgaccaccgacgacatcgtcagagcttctcgtcttctacgacaacgagattcgcntcctcaaggaagagttgcagaggaccaatttggaattggaatcgtagaaggacaagatcaaggagaatcaggagaagattaagctcaataagcagttgccctacctcgttggcaacattgttgagatttggnaattnaacccggaagacgaagctgaanaagtngncncnattttgtncttcncncacnnggggggnaatttntttt

SEQ ID NO: 279207 - DNA, 271 bp, Glycine max
  unsure (1)..(271): unsure at all n locations
atggcgcgatccttacctcttgacaagcataccttggtaacccgtttgaggaatatgtttggtgaggttgttcctgntactggtgatggaaccaatgatgctcctgcactgnatgagncagacattgggcttgctatgggcatagctggaacagaggttgccaaagaaaatgctgatgtcattataatggatgataacttcactactatngtcatgtggccaatggggacgggccatatncataaacatncaaaattggtgcattcnagta

SEQ ID NO: 279208 - DNA, 285 bp, Glycine max
  unsure (1)..(285): unsure at all n locations
cggaaganaccctagccactctcccggcgtcacgatgcagatcttcgtgaaanccctaacgggtaaaacgatcacgttggaggtggagtcttcggacaccatcgacaacgtgaaggccaagatccaggacaaggaaggcatccctccggaccagcagtccctcatcttcgccgggaagcagctggaggacggccgcaccctcgccgatacaacatccagaaggagtccacgcttnacctcgtcctcngctccgtggcggcgccaanaagcgnaagaagnanccnt

SEQ ID NO: 279209 - DNA, 281 bp, Glycine max
  unsure (1)..(281): unsure at all n locations
agctggttaaggatgggtttattatcaggaagcccaccaagattcactctcgctcacgtgcccgccgaatgaaggaagccaagaggaaaggacgtcactctggatatggtaagcgtaagggtacaagggaggcaaggcttcccactaaaatccttggatgaggagaatgcgtgtgcttagacgcttgcttcgcaaatacagggaatctaagaagttgacaggcacatgtatctgacatgtacntgagncnagggtacgttttcaagaccaaaagntttttt

SEQ ID NO: 279210 - DNA, 283 bp, Glycine max
  unsure (1)..(283): unsure at all n locations
gttcggttcttccattgttcagtatggtctttatgatgaaggttggatggctganctttctcacttgtatgctcgcaaggttgatatagttttgcgaggatatgctggttggaattcaaggcgtgctctgcaggttctggataaaatctttcctaaggatgcccctgtacaaccttcattggtcatngcctactttggnggaaaggattcctccnattcccnnntcncnggnccgaggcccacagggccctcccaaaaaacnnntanaantgggggggattnc

SEQ ID NO: 279211 - DNA, 286 bp, Glycine max
  unsure (1)..(286): unsure at all n locations
gtggagggaatggtagctnnagatttgaagttgangctgaaacatggagccaatgntggacttttaantgcattgaaacttcttcatccgatcaaagacaactattctggtgtgacatatgcagacttatttcagttggctagtgctacggctgtggaggaagctggaggccccaaaatccctatgaaatatggaagagtggatgtatctggacctgaacaatgccctgaagaagggagacttcctgatgctgggcccccttcantgctgatcattggcnanaatt

SEQ ID NO: 279212 - DNA, 283 bp, Glycine max
  unsure (1)..(283): unsure at all n locations
caatatattccattctctctgtgtgtttccctacctctcccttcaagatgcaaatcttcgtcaagaccctcaccggcaagaccatcacccttgaggtggaaagctctgacaccatcgacaangtcaaggncaagatcccaggacnaggnaggaatccccccggacnagcaaaggnctcattttcgncgnaaagcaattgagggacggccgtacccttgctgactacaacatncagaggganagnactcttcacctnngtctccgtctccgtggtggcatncat

SEQ ID NO: 279213 - DNA, 281 bp, Glycine max
  unsure (1)..(281): unsure at all n locations
gttggaagtcctgaccttatctctataccaggagaaactggcagaatgtatgaagcgaatgttgatgatgttggctataggctggtggccatctatactcctgtaagagaggatggagtagaaggacaatcaatttcagtatccacagagccaattgcagttgagcctgatgttcttaaagaagtgaagcagaaccttgaacttggatcagtgaatttgaggtattgtgtgacanagnccaancctcaaaaaggttccncccangggccnctatggagagc

SEQ ID NO: 279214 - DNA, 180 bp, Glycine max
tttttcttcctcagtagtgtcatttacgcttctcttctctgcagcaactatgcctaaccctaaggtcttcttcgacatgaccatcggcggtcaatctgctggccgcatcgtgatggagctctacgccgacgtcactccccgcaccgccgagaacttccgcgcgctttgcaccggcgagag

SEQ ID NO: 279215 - DNA, 214 bp, Glycine max
  unsure (1)..(214): unsure at all n locations
tgcatccgttgtttacaatgaaggctactctgaagggaaagtacgacgtacgacaaaaacggcgctgcctttgccaacatcgccgtcaacgccggcgacgtcaagttccgagcctccgtaacggaagccactttcattaacggccccagcctcaccggcttggccctcgccgtcgagnnacctcgttccttcatcgtcgactacaacgttccca

SEQ ID NO: 279216 - DNA, 290 bp, Glycine max
  unsure (1)..(290): unsure at all n locations
gagaaaccctagcaaaaatgccggctggtcacggtttgagatcccgcaccagagattccttctctcgtcccttcaggaagaagggtaccatcgccctcaccacatacctcagaacctaccacgtcggcgattatgtcgacgtcaaggttaacggcgccgttcacaagggaatgatcacaagttctaccatggccgcaccggtcgcgtctggaatgtcaccaaacgtgctgttggggtcgaagtcaacaagcaggtcggcaacagaatcataaggncgaggttcagtgcnt

SEQ ID NO: 279217 - DNA, 304 bp, Glycine max
  unsure (1)..(304): unsure at all n locations
gggacatggttgtagtgaacccagttttggtacttggaccattactgcaacccagcataaatgctagtacaattcacatcctcaagtacctcactggctctgctaagacctatgcaaatgccacacaggcgtatgttcatgttagggacgtggcattggcccactacttgtttatgagaagccttctgcctctggtagatacatatgtgccgaaagctctctccaccgtggagaattagttgaaattctcgccaagtatttccccgantacccagttcccaccagtgttcagatgaaaagaanc

SEQ ID NO: 279218 - DNA, 298 bp, Glycine max
  unsure (1)..(298): unsure at all n locations
atgactgttattgatgaataccttattccctctagctcatctggtgaacctagtgtctttttctacaaaatgaagggggncctattaccggtacctcgcagagttcaagtccggtgatgagagaaaagaggctgctgatcattccatgaaagcgtatcagttgcttccactactgacngaggctnagttagcatccacacatcccatccgtnggggcctggctttgaacttctctgtctnntattatgaaattttgaatctcctgaaagggcctgtcacttgctaagcaggcatttga

SEQ ID NO: 279219 - DNA, 294 bp, Glycine max
atctttctttctcttcctgcagaagctatccgtgttacttgttcccaagtctccaacaagcaaagtacatggttgatttggaaatccaggtccccagcgcattcgacccgtttgccgaggcgagagaatcagatgcccccggggcaaaggagtattgcacatacgaattcagcagaggaatggaaagaagagtctgacaacagtgcaagggctgaagaaggagttcagctacgagaagatcctcaaggacctcaagaaggacttctgctgcaacgggactgtggtgcaggacaa

SEQ ID NO: 279220 - DNA, 288 bp, Glycine max
  unsure (1)..(288): unsure at all n locations
atacacagtacccaaaaacattcttctataaagaagaccttcatccagggcaaaacaatgaaagtacaattcaccaagcgtccctatgcacaaccttatggtgtatatacatggttaacggatattaaagacacctctaaagaaggatatagtttgaagagatatgcatcaagaaagaagcgtttgagggagaagagaagttttgtgcaaaatccttgggaacagtattggttttgccatttcaaactgggaaagaacnttcaggtatttcaggtnctttgtcaanaa

SEQ ID NO: 279221 - DNA, 185 bp, Glycine max
ttcctcttcctcagtagtgcgattttcgattctcttctctgcaactatgcctaaccctaaggtcttcttcgacatgaccatcggcggtcaacctgccggccgcatcgtgatggagctctacgccgacgtgactccgagcaccgccgagaattccgcggctctgcaccggcgagaagggcgccggg

SEQ ID NO: 279222 - DNA, 177 bp, Glycine max
  unsure (1)..(177): unsure at all n locations
ttgctactgnagtttccacattgcataccttatgtcttccgaattngaagttaatttgcaanatgggttatgaaaaggctcagatcaacattgtggtggttggtcatgtggaccctgaggaggcaaccaccattaacgagctgaagaagctgttgtggagaaagaagctccncggcc

SEQ ID NO: 279223 - DNA, 282 bp, Glycine max
  unsure (1)..(282): unsure at all n locations
agtaatggaaataacaacaacagtaacagctctgtcaccgccgcctcggaaggngtggggtccacccacaccgtgagtcacggccaccaccgagacttcgatctcaacatcccggcttttccggatttttcgaccaaggtcggagaaacgaggttgagagccctcaccctgtcatgaagaagcctcgccccttcgtcattcccaagatcgaaatccctcaatatcaatgaatctatgaattttttatttttatttttttcgattattttggagattttgaga

SEQ ID NO: 279224 - DNA, 139 bp, Glycine max
  unsure (1)..(139): unsure at all n locations
actgaaccaaatcatcacanacacatactaagangcaacaattcttctacaatggatctcctcnttctggaaaagaccctcataggtctcttcctcgcngcggtggtcgccatcgccgtctccaccctccgcggccgga

SEQ ID NO: 279225 - DNA, 283 bp, Glycine max
  unsure (1)..(283): unsure at all n locations
tgagggagaagcagaatccaaatatctgtcaggactcggtatcgctcgccaacgtcaagccattgtggatggactgagggacagtgtgcttgctttctcngagaacgtgcctgggacaacagctaaagatgtcatggacatggtgcggtgactcaatactttgacaccatgaaagagattggagcatcttcaaagtcctcatctgttttcataccacatggtcctggcgcattaaggacattgccatgcagattcgggatggtctgcttcaggccaccattca

SEQ ID NO: 279226 - DNA, 229 bp, Glycine max
  unsure (1)..(229): unsure at all n locations
tctggcaaggngttgccgatcaagtctgcacaaattaccgcatcanctgatatcactgngctacaagagaaggnaccctggctttcatcttctaaattggttgttaaacctgacatgttatttggaaagcgtggcaaaagtggttggttgcctgaatttggattttgcacaagttgtttcatttgtgaaggagcgtcttggaaaagaggttgngaggagtggntccaac

SEQ ID NO: 279227 - DNA, 281 bp, Glycine max
  unsure (1)..(281): unsure at all n locations
ggaaganaccctagccactctcccggcgtcacgatgcagatcttcgtgaaanccctaacgggtaaaacgatcacgttggaggtggagtcttcggacaccatcgacaacgtgaaggccaagatccaggacaaggaaggnatccctcggaccagcagcgcctcatcttcgccgggaagcagctggaggacggccgcaccctcgccgactacaacatccagaaggagtccacgcttcactcgtcctccgcctccgtggcggcnccaagaagcgcaagaagaaga

SEQ ID NO: 279228 - DNA, 282 bp, Glycine max
  unsure (1)..(282): unsure at all n locations
agcgacggaggaaaacgacaaggtggaagancgttgccgccgccgccaagaggccctccgcctcctcccccctcttcgcccttcgcctcgaacccgtcgatcgcgaaaagacatgtccgttactgctgcgagtgttcactaagattggagttcaccattccatggaagactttgccgtcagaggcaaagagcccaaagacgaggttcagatttacacctggaaggacgctactctccgagaatcaccgatttgtcaaagaattgctccggtgcaaggagaaa

SEQ ID NO: 279229 - DNA, 296 bp, Glycine max
  unsure (1)..(296): unsure at all n locations
aagaaagattcgaaacgaagaaaganagcgttgtgaagaatggcggaagagggacaagtgatcggtgtccacagcgtagaggagtggaaggaacatctcaagaagggagaagagtccaagaaattgattgtggtggattttactgcttcttggtgcggccatgccgtttcattgccccaattcttgcagagtttgctaaaaagttgccgaatgtcaccttcctcaaggtggatgtggatgaattggagactgtttccaaggagtggggaattgaggctatgccaaccttcctgttc

SEQ ID NO: 279230 - DNA, 291 bp, Glycine max
  unsure (1)..(291): unsure at all n locations
gaaagatgtcgatcttcgagtacaacgggagtgccctagtggctatggtggggaagaactgcttcgccatcgcgagcgatcggagactcggggttcagctccagaccattgccaccgatttccagaggatttcaaaaatccacgacaagctttcatcggtctctcnggcctcgccaccgacgcccagaccctctaccagcgcctccttttccgccacaaattgtatcagctccgcgaagagagggacatgaagccccaaacctttgccagcctagtctccgctattctcta

SEQ ID NO: 279231 - DNA, 152 bp, Glycine max
aacaggtcaccctccaagtgtgcctctgttggcattcaaggcattgcttgggcctttggtggcatgatctttgcccttgtctactgcactgctggaatttcagggggacccatcaacccagctgtgacctttggtctctttttggcaaggaa

SEQ ID NO: 279232 - DNA, 301 bp, Glycine max
aagtggacagaagagagcgtcctagtcgcaaccctaataagaagaaccacagctttcaagcgagtgacatccaccagccatgggtcgtatgcacagccgcggtaagggtatatcctcttctgctttgccctacaaaaggacaccccctagctggctcaagatctcttcgcaagatgtggaagaaaatatctgcaagtttgcgaagaagggtttgaccccgtctcagattggtgtcattcttcgagattctcacggtattgctcaggtcaacagcgtcactggcagcaaaatccttcgcatc

SEQ ID NO: 279233 - DNA, 297 bp, Glycine max
tgggagtgatggatttctcttcggtgagggctgcgttggattcgaagtcgtacgacaaggttgcggatgtgtgcgacaacttgatgcttcaggttgcagctgagggcattgcttatcaggacgattggccctacacaattcacctcctctctcacatttatgttcacgacatcaatagtgcgcgctttctttggaagtcaataccttcctcaatcaaagagagccagcctgaagtcaccgcggtttggaaaattggtcagaagctctggttacgtgactatgccggagtgcacgagg

SEQ ID NO: 279234 - DNA, 294 bp, Glycine max
gttgcgactaagagttgctgcttcttccgccactcagcacttcgctccctctgtgcttcaccaaccatgggccgaaatcgaagctaccgttccagatccctctcaaatcgacgtcaaacttttcaaccgctggagcttcgacgacgttgaggttactgatatgtctctggctgattacattggagtgtccccgtcaaagcatgctacatatgttcctcacactgctggtaggtactcagtgaagaggttcaggaaggcgcagtgccccattgttgagagactcaccaatctctc

SEQ ID NO: 279235 - DNA, 292 bp, Glycine max
aacgaactgtcatttggatgggaaagaggcaagaaactgtagaggatgtcccctgtggtaatacagtggctatggttggtcttgaccagttcatcacaaagaatgcaacattgacaaatgagaaggaagtcgatgcccaccctatccgagctatgaagttttctgtctcacctgttgttcgtgttgctgttcaatgtaaggttgcatcagatcttcccaagcttgttgaaggtcttaagcggttggctaagtcagatcctatggttgtttgtaccattgaggagtctggtga

SEQ ID NO: 279236 - DNA, 299 bp, Glycine max
  unsure (1)..(299): unsure at all n locations
gttccgaaatggacgctgggcggaaagatcaaganggggcgccggangaagaaaagggcggcgggccctaaagaaagaagccggtttcaaggtccgtcaaggccggttctccaattccccgtcggaagaattggccgttatttgaagaaaggaaggtacgcccagcgtgtcggtaccggtgctcccgtttacttggccgcagttctcgagtacctagctgctgaggtgcttgagttggctgggaatgctgcacgtgacaacaagaagaacaggattattccgagacatgtgctattggc

SEQ ID NO: 279237 - DNA, 290 bp, Glycine max
  unsure (1)..(290): unsure at all n locations
cngaattgttggaaaaagggggttatctgctcgtctgctggggaaccatgctcaaggagttgcattggctgccaagaggttgaattgcagtgcggtgattgctatgcctgtcaccactccagaanataaagtggaaatccgtggaggctctgggtgctacagttgtgctcgtgggggattcatatgatgaagcacaagcatatgctaagaagcggggggtagaggagggtaggacattcatacctccttttgatcatcctgatgtcatcatgggtcagggaacaattggc

SEQ ID NO: 279238 - DNA, 296 bp, Glycine max
  unsure (1)..(296): unsure at all n locations
ctccgactcnttctcttaatcccnaaagtcaacatgggctcaccttggaagatncaagtggcatgggaattcgagtatacctcaccctaagctncaatgaaagaattctgtcttctctgtcacggagaactgttgctgctcacccctggcacgatttagagattggggccaggagctccagctgttttcaactgtgtggttgaaattggcaaaggcagtaaggttaagtatgagctggacaagacaagtggacttataaaggntgatcgtattctttactcatcagttgtctaccc

SEQ ID NO: 279239 - DNA, 291 bp, Glycine max
  unsure (1)..(291): unsure at all n locations
cttggggagaagaggtcgagtttcacagcagcaatggtgtacacnaaggctcagaaatcaaaagcctacttcaagagatatcaagtcaagttcaagagaagaagagagggaaaaaccgattaccgtgccaggattcggttgattaatcaggacaagaacaaatataacactccgaaataccgatttgttgttcgctttagcaacaaggacattgttgcacaaataatatctgctagcattgctggcgatattgttcttgctgcagcatatgcacatgagctgccacgatat

SEQ ID NO: 279240 - DNA, 254 bp, Glycine max
tcttagatctcttctttctctacgccgcacgccgaaaccatggccggaaaaggagagggtcctgctatcggaatcgatctcggaaccacctactcttgcgtcggtgtgtggcaacatgaccgcgttgaaatcatcgccaacgaccaagggaacagaaccacgccgtcttacgtcggattcactgacaccgagcgtctcatcggtgatgcggccaagaatcaagtcgccatgaaccccatcaacaccgtcttcga

SEQ ID NO: 279241 - DNA, 294 bp, Glycine max
tgtctttgtcttggacgttgacgacactactctctctaatctccagtattttgctaaccatggatttggtgtggaaccacacaatacgacggcgtttaagaactgggttcttgatggcgaggcattcgcactgccagagactcttaaaatgtacaacaaactgttggctctcggcatcaagattgtattcttatcagaaagaccactgagtctaggggatgtaacagccaagaacttaaaggaggttggattcaacacatgggagaagttaattctcagggatccatctgagta

SEQ ID NO: 279242 - DNA, 293 bp, Glycine max
  unsure (1)..(293): unsure at all n locations
ggacaattcaattgttcccttgcatctaaattcatcaacacaaccctaccccaatgccaacttaaaggtggtgaagaatatgcccctcagattcttcctgtggagccaaacaagacctatagaatcaggattgccagcaccactgccctagcttcactcaacttagccatttcgaatcacaaacttgtagtggtggaagctgatggaaattacgtttcacnttttgcggttgatgatattgacatctattctggggaaagttatcagtgctccttcgcacagaccaagatcca

SEQ ID NO: 279243 - DNA, 291 bp, Glycine max
  unsure (1)..(291): unsure at all n locations
gtaagtgttcnaagagtgagcaacttcaaaacaccatagtgagaaatgacttccaagggtgcaattctcttgtgtctcaatgttctcttcttcactgtggttagttccacatatgttccatgcaacccaccccccaaaactcccaaacacccacctgtcccaaagccaccttccccaaagcaagtttcttgccccaaggacactgttaagtttggtgtgtgtgcngatgtgttaggtttgattaacgtgcaactagggaagccaccaaaaaccccatgctgcagnctcant

SEQ ID NO: 279244 - DNA, 287 bp, Glycine max
  unsure (1)..(287): unsure at all n locations
ctcactcacaaacgcacactgaattcaaaaacatcgaaaganagangcatggncgancaaaccttcatcatgattcaagccagatggcgttcaaagangcctattggcgagattattagcagatttnagaggaagggtttttacttgaaagggttgaaactcgttactgtggaccgtccttttgctgagaagcactatgctgatttgtctgcaaagcctttctttagtggtttggtggatacattgtcctggcccngttgttgccatgatctgggagggtaagaatg

SEQ ID NO: 279245 - DNA, 287 bp, Glycine max
  unsure (1)..(287): unsure at all n locations
gnataatcaaatttctcagatctatccgacgtcgtcgcagatccaccaaccgttatgggctgccttcagcggtgatgaaacggctccgtttttcggcttccttggagccgcagctgccctcgtcttctcctgtatggggagctgcctatggcacagcaaagagtggtgtnggcgtggcttccatgggtgtgatgagacctgagctggtgatgaagtctattgtccctgttgtcatggctggagttttgggtatttatggcctattattgctgttattatcagtaccg

SEQ ID NO: 279246 - DNA, 285 bp, Glycine max
tgaactcaaggagatggctctgggaagaggcagtgcagtggttctactactttgcttcttgctgcttcactctcagatggctcgtgctgccacctacacagttggagattctgggggttggacctttaacactgttgcctggcccaaaggaaagctctttcgggctggtgacacacttgctttcaattatagccctgggactcacaatgtggtggccgtgaacaaggctggatatgatagctgcaagactccaagaggagccaaagtgtataagtcagggacgga

SEQ ID NO: 279247 - DNA, 291 bp, Glycine max
  unsure (1)..(291): unsure at all n locations
ttgaaatctgaaagctaagtttcgttgccactgaggaatgaaatggnccaatggtaacaacattagtcatttcttcaagctcttgcttttcccttccaaactttccactcttgtctcgctgagattttcttccaagagagattcgaagatggatggaagagccgtngggtgctatccgattggaaaaggagcgagggaaaagcgggtaccttcaagcacacagcagggaaatggtctggggatcctgatgacaaaggtcttcagacatataatgacgccaagcatttcgcc

SEQ ID NO: 279248 - DNA, 299 bp, Glycine max
  unsure (1)..(299): unsure at all n locations
ccctacctctcctttcaagatgcagatcttcgtcaagaccctcaccggaaagaccatcacccttgangtggaaagctctgancaccatcgacaacgtcaaggccaagatccaggacaaggaaggaattcccccggatcagcaacgtctcatcttcgccggaaagcagctcgaggacggccgtaccctcgccgactacaacatccagaaggagtcaacccttcaccttgtccttcgtctccgtggtggcatgcagatcttcgtcaagactctcactggcaaaaccataacnctagaggtg

SEQ ID NO: 279249 - DNA, 295 bp, Glycine max
  unsure (1)..(295): unsure at all n locations
ctataagctagtttatcgtgaggngaatatgaagttgtttgttttctttgttgctgcagtagttttggtagcatggccatgccatggcgcaggctaccaaaggttccctctccgaatgaaaactggctatggtgagcgttcttcggaggtaaaatgcgcaagttttaggcttgctgtggaagcacacaacatccgagcctttaaaaccattcctgaagagtgcgttgaaccaacaaaggactacataatggcgaacaatttagatcagactctaaaacagttaaccaacaagctt

SEQ ID NO: 279250 - DNA, 291 bp, Glycine max
  unsure (1)..(291): unsure at all n locations
gncatcctcaaatgggaatccatcaaaccaactgttataactgtccctcgcaaagccttggccattgttataatcaacagncaaacccacgagatcttaattgatctaaaggcaaggcgcattgtctccgacaatattcactccgggaatggctccctaccctttccgttgatgaacaagtcgttgccatagagctgccactgaaatacggtccattcattgagtcagtgaacaagagagggctgaacctctctgaggtggtgtgttccacattcacaatggggtggtttg

SEQ ID NO: 279251 - DNA, 292 bp, Glycine max
  unsure (1)..(292): unsure at all n locations
attagacagcaagggtctcttgatagtggatcaccaactagccaatgacaagaggaccaagccttatgtgaagaaaatggccaagagccaagactatttcttcaaggngttctctagagccattaccttgctctcagagaacaaccctctcactggcacaaagggtgaggtcagaaagcagtgcaatgttgccaacaagcaccatgatcaggacccttgaattttcctccccttgtctatgatcgaggaagaaaatctgtaatatattatgcaaaanataattaaggtcttt

SEQ ID NO: 279252 - DNA, 290 bp, Glycine max
  unsure (1)..(290): unsure at all n locations
cnttggcctagccagctagcgcttcttctctcgcattccgtggagatctagtgctgccaaacctcgctgaaaattagggtttcgtttcggaggtagacgaagatgttcggaagggcaccgaagaaaagcgacagcaccaggtactacgaaatcctcggcgtttcgaagaacgcttcgccggatgatttaaagaaggcttacaagaaagccgccattaagaaccaccctgacaaaggcggtgatcctgagaagttcaaagagcttgcncaagcctatgaggttctgagtga

SEQ ID NO: 279253 - DNA, 288 bp, Glycine max
ttcgccatgtccggcgatgatgcaaaacggaatgtttccatttgaaaggttaccgcaaacattcgggcatcatggctcacatagatgctggaaagactactacaacggaacgcttttgtactatactggaaggaactacaaaattggagaggtgcatgagggaacagcaactatggactggatggaacaagaacaagagagggggattaccatacttctgctgcaaccatacttctggaacaagcaccggattcaacattattgatactcctggtcacgttgacttca

SEQ ID NO: 279254 - DNA, 283 bp, Glycine max
  unsure (1)..(283): unsure at all n locations
ggaagacatgggaaaagcttgggtaggcctggtggtattgctgtgtttgattgtcacggccatcgccgaacaatgcggtcgtcaagctggcgggcagacatgtcccaacaacctatgctgcagccagtacggttggtgtggaaacaccgaagaatactgttccccttctaagaactgccagagcaannnnnnnnnnnnnnnnnnnnnnnnnnnnnnnnnnnnnnnnnnnnaaagtgcttctaatgtccgcgccacatatcattactatgagccagagcaacac

SEQ ID NO: 279255 - DNA, 288 bp, Glycine max
ttcttggcacagttgttggaagaaactggagtggtgctccaaataatccatgccgtgtgaagaccattcctcgtcccattcctgagaagaaatggtacctcacaccatctgtagtttcgctgatgggaggactgcttccctttggcagcatattcatcgagatgtattttgtattcacttccttctggaattacaaggtgtactatgtctatggcttcatgctactggtttttctgattcttaccattgttactgtttgtgtgacaattgtggggacatactttttgt

SEQ ID NO: 279256 - DNA, 284 bp, Glycine max
  unsure (1)..(284): unsure at all n locations
gntagtttatcgtgaggngaataatgaagttgtttgttttctttgttgctgcagtagttttggtagcatggccatgccatgggcgcaggctaccaaaggttcccctctccgaatgaaaactggctatggtgagcgttcttcggaggtaaaatgcgcaagttttaggcttgctgtggaagcacacaacatccgagcctttaaaaccattcctgaagagtgcgttgaaccaacaaaggactacattaatggcgaacaattagattcagactctaaaacagttaacc

SEQ ID NO: 279257 - DNA, 289 bp, Glycine max
  unsure (1)..(289): unsure at all n locations
gaacaacaccacaacancaaacagngcaaaaaaagctccaccaatggngggttanagagccgacgacgactaggactacctcttcaaggtggncctgattcggngattccggcgtgggcaagtccaaccttcctctctcgcttcaccaagaacgagttcaacttggagtccaagtnccaccattggcgtcgagttcgccanccgcaccttgaacgtcgattcccaaagtcatcaaggcccagattntnggacaccgcaggccaagaaaggtatcgtgccatcaccagtg

SEQ ID NO: 279258 - DNA, 282 bp, Glycine max
  unsure (1)..(282): unsure at all n locations
gggccaagattccttctgttggggnaaggcacttggcaagctgagcctggtgntgtagccaaagctgtcaccacagccattctggttggatacaggcatattgattgtgctcaagcgtataacaatcaagcagagattggttctgctcttaagaagctttttgatgatggtgtggtgaagcgtgaggacttatggatcacctccaaactctggtgttcagatcatgcttcagaagatgtgcccaaagcatggataaaacattgcaggatttgcaacttgatt

SEQ ID NO: 279259 - DNA, 289 bp, Glycine max
  unsure (1)..(289): unsure at all n locations
ttcgctctttctttctcccctacacaaaacatggctttgcccaatcagcaaaccgtcgattaaccccagcttcaagcttgtcatcgtcggcgacggtggcacaggaaagacaaccttcgtgaagaggcatctcactggtgaattcgagaagaaatatgaaccgaccattggtgtggaggttcatccgttggattttttcacgaactgtggaaagattcgcttctattgttgggatactgctgggcaagagaagtttggtggcctcagagatgganattatatccatggg

SEQ ID NO: 279260 - DNA, 288 bp, Glycine max
gagaaatggaaaagtacgagaagctggagaaggtgggagaaggaacatacgggaaagtgtacaaggctcgggagaaggcgagtgggagcctggtggctctgaagaagacgcgtctggagatggacgaggagggtgtccctcccaccgcactacgcgaggtgtctctccttcagcttctctcccaatccatctacatcgtccgcctcctctccgtcgaacacgtcgacaaggtccccaagtcccagaaatcctcctccaaccccctcaccaagcccatcctttaccttg

SEQ ID NO: 279261 - DNA, 288 bp, Glycine max
caaactggggagtggcactcaaagtaacatgaatgctaacgaggttattgcaaaccgagcagcagagattcttgggccataagcgtggtgagaagtttgtgcacccaaatgaccatgtcaatagatcacagtcttctaatgatacattcccaactgtaatgcacattgcagccgcaacggaaataaactcaagactgatccccagccttaaaacgttacacgatactctaaactcaaagtcagttgaatttaaagatattgtcaagattggacgcactcatactcaag

SEQ ID NO: 279262 - DNA, 284 bp, Glycine max
  unsure (1)..(284): unsure at all n locations
gnatatgaagttgtttgttttctttgttgctgcagtagttttggtagcatggccatgccatggcgcaggctaccaaaggttccctctccgaatgaaaactggctatggtgagcgttcttcggaggtaaaatgcgcaagttttaggcttgctgtggaagcacacaacatccgagnantttaaaaccatcctgaagagtgcgttgaaccaacaaaggactacattaatggcgaacaatttagattcagactctaaaacagttaaccaacaagcnttctttatgcna

SEQ ID NO: 279263 - DNA, 283 bp, Glycine max
  unsure (1)..(283): unsure at all n locations
gngatgtcagatctcgagggntcccttgcgccctaagaggaagaaggtttnggtggactattttgttcagtttcnatggatccctgttatnttgtgggtccntccccatcctccttcaccatttatttccntacataccttggggatgtaagatccgagtggaagtccctataagangcgtcagaaggaacatgatgagaatgngaagaaggttatcaaacgtctcaaacagaggaatccatcaaaagatggtcttgtctgtactgctcgtaagcctggattg

SEQ ID NO: 279264 - DNA, 277 bp, Glycine max
  unsure (1)..(277): unsure at all n locations
cttcttctcttgcggctagggttttagcgcacttcttctagatntaaggaagatgggtaaggnaaaggttcacatcagtattgtggtcattggccatgtcgactctgggaaatccactaccactggtcacctgatttacaagcttggaggcattgacaagcgtgttattgagaggtttgagaaggaagctgctgagatgaacaagaggtcttcaagtatgcctgggtgctggacaaacttaaggctgagcgtgaaagaggaatcaccattgatattg

SEQ ID NO: 279265 - DNA, 289 bp, Glycine max
  unsure (1)..(289): unsure at all n locations
ctattatggaacacattttggaaggnagctcttacgtgaaagctgctaagaagttgcatgagattgatcctttacaaaagcctaaacaggaccgttatgctcttaggacttcaccacaatggcttggtcctctaattgaagtgattagattctctaccaagtcaattgagagggagattaactcagtcaatgacaaccctttgattgatgtgtcaaggaacaaggcacttcatggtggtaacttccaaggnactccnattggagtctccatggataatacacgtttggg

SEQ ID NO: 279266 - DNA, 286 bp, Glycine max
ataaacttgaacagagatctcatctcacttctcagagattctcaccagtggattggtgatggctcagccgcttgtgaagaaagacgatgaccgcgacgacgaagctgactattccccctttcttggaattgaaaaggggtctgttcttcaggaggccagggtttttaatgaccctcaactagatgctaggagatgttcacaggttattacaaaactcctatacctactgaatcagggagagacgtttacaaaggttgaagccacagaagttttctttgctgtgact

SEQ ID NO: 279267 - DNA, 283 bp, Glycine max
gtcgagcgcgtcaacaaacttgtctacgttcgcgcgttacgctccaggtataaacctgaggttggtgacattgttatagggcgtgttgttgaggttgctcagaagcgttggagattggagataaattacaatcaggatgcagttttgctgctctcttctatgaacatgcctgatggtgttcagaggcggaggacagctgtggatgagctaaacatgcgctgcattttcgaggagaatgatgttgtttgtgctgaagttcgtggtttccagcatgatggcttac

SEQ ID NO: 279268 - DNA, 284 bp, Glycine max
  unsure (1)..(284): unsure at all n locations
ctttcactagccgcagcagcctcaaggaggagaataaggatgtctcanangaagttcgagcacccaanggcacgggtcactgggatttctccccaggaagcgtgctgctcgtcacaggggaaaagtgaaggcatccccaaggatgacccatccaagggcacccaagctcactgcattcttgggttacaaggctggtatgactcacattgttagagaggtcgagaagccaggatcaaagcttcacaagaaggaaacatgtgagcctgttacaattatgagacccc

SEQ ID NO: 279269 - DNA, 282 bp, Glycine max
  unsure (1)..(282): unsure at all n locations
cttctttggaagcaaagcaaatggcanctactaccaccgtacctnttggtaccctcccctccggttccgtcaccggacgcttagcctccgtctacagtgangtccaaaagatgcgcgtggaccacgcgcnccctctcccctccgtcctcaagcatcccttcaccattctcganggtcctccaagctccgctgccggaaatccagacgagatcgcgaactgtttccgcatttgttcggacaaccttccgcggcattggcgccgagcggtgcggtgcagacgca

SEQ ID NO: 279270 - DNA, 282 bp, Glycine max
  unsure (1)..(282): unsure at all n locations
anctttgttcactcttcttctcttgcggctagggttttagcgcantttcttctagatttaaggaagatgggtaaggaaaaggttcacatcagtattgtggtcattggccatgtcgactctgggaaatccactaccactggtcacctgatttacaagcttggaggcattgacaagcgtgttattgagaggtttgagaaggaagctgctgagatgaacaagaggtctttcaagtatgcctgggtgctggacaaacttaaggctgagcgtgaaagaggaatcacc

SEQ ID NO: 279271 - DNA, 275 bp, Glycine max
  unsure (1)..(275): unsure at all n locations
gaattgggttttcactgaccaagcattaccagctgattctcgtcaagagaggattggcaattgaagatccctctgcaccccatggccttcgccttgtganagaggactacccttatgctgttgatggacttgaaatatgggatgctattaagacatgggttcatgaatatgtctcctgtattacccaacagatgcagcagttcaacaagatactgaactacaagcatggtggaaggaagctgtggagaagggtcatggtgacttaaaagaaaagc

SEQ ID NO: 279272 - DNA, 276 bp, Glycine max
  unsure (1)..(276): unsure at all n locations
cgaaacgctctttcgttatcttttctcagactccgcgggcgtagatccgaggagttcgggaaatcctaactcatcatctcaactcaagtcatggctggacttgcacctgagggatcacagttcgatgctcgtcaatatgattcnaaaatgagtgacttactttcatctgatggacaggacttcttcacatcctatgacgaggtttatgatagttttgacgctatgggtttgcaggaaaatcttctcaggggaattacgcatatggttttgagaagc

SEQ ID NO: 279273 - DNA, 277 bp, Glycine max
caagatggcttcttttcatatccaatattcattccttgtgcttgtgcttgctatggtgatcacattgatgaaccctaccaatgcaaccctctctccccatttctatgataaagtttgccctcaggcattgccagttataaagtcagtggttcaacgagcaattatccgtgagcgacgcatcggagcatctcttctgcgcttgcatttccatgattgtttcgtaaatgggtgtgatggatcaatattgctagatgacacccgaaacttcactggcgag

SEQ ID NO: 279274 - DNA, 301 bp, Glycine max
  unsure (1)..(301): unsure at all n locations
aaacctttagcatggagtcatttcactgctgaggggcgatgtcgagttcaagggcagtcctgtttgtaccacctaagggcacctcaagatttatacgagagctattataacgcaaacaaatccaacctgaagttgtatgttagacgtgtgttcattcagatgaatttaatgaactgttgcctaagtacctaaactttttgctgggtctgttgattctgacacattgccacttaatgtatcgcgaganatgctcagcnanatagtagtctaaagacatcaagaagaacttattaggaaagcc

SEQ ID NO: 279275 - DNA, 303 bp, Glycine max
  unsure (1)..(303): unsure at all n locations
aaanagaacaggggactcantctcttcgcagcggcactctcggtggctttcatcttctcggggtgagttgtcaagatgtacacatcgaggaagaaaattcacaaggataaggatgctgagccaactgaatttgaggaatcagttggacaggcattgtttgatcnagaaaataccaacaatgagctgaaaagtgatctgaaagatttatacataaactcagctgtccaaattgatgtttctggcaaccgaaaggctgtggttatccatgtcccctacagactaaggaaaggattccggaagatt

SEQ ID NO: 279276 - DNA, 302 bp, Glycine max
  unsure (1)..(302): unsure at all n locations
gtccgatcgaatccaatccaccaaatcggcgacgtcgcctttccgctacagatccgcgncggaaccaccgtatctgactatctccgattgatcttccgataaaagtggaccggaaatgccggttgccgcttccgccatttactttctcaacctccncggcgacgttctcatcaaccgcctctatcgcgacgatgtcgggggaaatatggtggatgcttttaggacgcatgttatgcaaacgaaggagcttggtacttgccctgtgaggcagattggtggatgctctttcttttacatgagga

SEQ ID NO: 279277 - DNA, 301 bp, Glycine max
  unsure (1)..(301): unsure at all n locations
ccaggcattaggttatgtgcatggagctcaagttgtccatgcatctgaaccaatccatggtcgttgagtgaagttgagcacaacggctgccagctttttcgtgatataccttctggnaaaaattatggattcaaggtggttcgatatcattcactggttatagattctgaatcacttcctgcagagctcattccaatagcatggacctcttccactagcacacttccatttattgggtccaaagattttggcnagtccaatactcatgaagctcagccagatcaaagcattccattgatcc

SEQ ID NO: 279278 - DNA, 302 bp, Glycine max
  unsure (1)..(302): unsure at all n locations
gggaaaatcatggtgaaaggtccaggcctctactctgacattggcaagagagctcgcgatcttctgntcaaggattatcagaatgaccacaagttcaccatcaccacttacacttccaccggagtggaaatcacttcaactggagtcaggaaaggtgagatatatttggccgatgtcagcactaaggtgaagaacaagaacatcacaactgatgtcaaagtggacactaactcaaatctgcgtacaatcatactgtgngatgaacctgcccctgggactcaagacaattttagcttaatttc

SEQ ID NO: 279279 - DNA, 305 bp, Glycine max
cccaaaatcgaagaggttgagacttgcattgagaggagccttttttccccttaggtttttaaaattgcctttgggaccttccttcccgctcgtttcacaatgaaatacgtgatcatcagcggcggagtggtcagtggcctcggcaagggcgtcaccgccagcagcataggcgtcgtgctcaaagcttgtggccttcgcgtcacttccatcaaaatcgatccgtacttgaacatcgacgctggcaccatgtctcccttcgagcacggtgaggttttcgttctcgacgacggcggagaggttgattt

SEQ ID NO: 279280 - DNA, 303 bp, Glycine max
gcaccgtatcgtgttttcattagacgctgcaatcgttcttctcttgagtttggttcgtctgggatcagatctgctctctccgtttggattcaattcgacactttcctcgcctcaaagattaagcgaacaacatggttgtccttgctgcatccattgtgagcaaatctgggaaagtgctagtttctagacagtttgtggatatgactcgcataagaattgaaggtctctagcagcatttcccaagttggtagggactggaaaacaacacacatatgttgagactgagaatgtgcgctatgtttt

SEQ ID NO: 279281 - DNA, 296 bp, Glycine max
  unsure (1)..(296): unsure at all n locations
cnttgttcactcttcttctcttgcggctagggttttagcgcannttcttctagatttaaggaagatgggtaaggaaaaggttcacatcagtattgtggtcattggccatgtcgactctgggaaatccactaccactggtcacctgatttacaagcttggaggcattgacaagcgtgttattgagaggtttgagaaggaagctgctgagatgaacaagaggtcttcaagtatgcctgggtgctggacaaacttaaggctgagcgtgaaagaggaatcaccatgatatgctttgtgga

SEQ ID NO: 279282 - DNA, 300 bp, Glycine max
  unsure (1)..(300): unsure at all n locations
cttccatcttcttctcttttcacgtcattatcctaaacttgcagattttcacatcccaagcaacatgaaggggaggttcatgtttctgtcggtgctcctttgtgccacctttcatgtctccttctccattactgacggcttagtagcaaacggcaacttcgagctgggtccgaagccctccgccctgaaaggaactgnngtgattggtggcagccactcgatcccagaatgggagatctctggcttcgtggagtacataaagtccggccagaagcagggcgacatgctgctcgtggtccc

SEQ ID NO: 279283 - DNA, 303 bp, Glycine max
ggacagagtatttcaactatgtgaatcaactgtgtgagagcctgcccaagtccatctggagagtcagtgataagctgtaatagtctttccaagatgccaaacattacgttcacaattggaaataaaccttttgtcctcacaccagagcagtatattctaagaactggagaaggcattacagaagtctgccttagtgggtttattgcttttgatgttcctcctccaaagggtccattgtggattcttggcgatgttttcatgagggcatatcacaccgtctttgactatggaaatctccaagtt

SEQ ID NO: 279284 - DNA, 299 bp, Glycine max
ttgtgagagagacagaggcacagagagaaaatggtttcggggtcaggaatctgcgcgaagagggtagttgtggacgcgcggcaccacatgctggggaggctggcatcgatcgtggcgaaggaacttctgaatgggcagaaggtggtggtggtgcgctgcgaggagatttgcatctccggtgggctcgtcaggcagaagatgaagtacttgcgtttcctccgcaagcgcatgaacaccaagccctctcacggccccatccattccgtgcacccggcaagatcttctggcgcaccgttcgt

SEQ ID NO: 279285 - DNA, 299 bp, Glycine max
ccaaagcatggcttcccttgcagcatccactgctgctgctttcccttgggcatgtcagaaatgcttggaaaccccatcaacctcagtggtgccacaaggccagctccatctgcctctagccctgcctccttcaagactgtggctcttttctccaaaaagaaggctgcacctccaaaaaaagctgcagctgctgctcctgccaatgatgagcttgccaagtggtatggtcctgacagaaggatcttcttgcctgagggtctcttggaccgatctgagatcccagagtacttgaccggaga

SEQ ID NO: 279286 - DNA, 300 bp, Glycine max
caccaagtaaaagtttccactggccattgatactggtgccttgggcagaatcattcccaccatcaaagggttccttcaaatctgattatagaggagcatatcttgatggtgtcatcagatttctagtgaacaataatgccccattaatggttaatgtgtactcttacttcgcttacactgcaaaccctaaggacattagtcttgactatgcactttttaggtctccttcggtggtagtgcaagatggttcacttggttaccgtaacctctttgatgcttcggttgatgctgtttatgctg

SEQ ID NO: 279287 - DNA, 293 bp, Glycine max
gtgaattaaaatatattcaattttgcgtttctctgcctaaaaggattgaaagatgggtcaagcatcggttgctaccaagtcgatcagtcaaatgtggctatcaaggagcattttggaaaatttgatgatgtcctagagcctggatgtcactgcctgccttggtgtcttgggtaccagattgctggtagtctgtcgctgcgagtgcagcaacttgatgttcgatgtgagacgaaaaccaaggacaatgtcttgtcaatgtggttgcactgtgcaataccgagctgtgtctgaga

SEQ ID NO: 279288 - DNA, 295 bp, Glycine max
acaggccaatcatcagaaaaaactgatgtgtttgggttcggaatcttgctgcttgaactgatcacaggccataaggctctagattttgggcgagcagcaaaccagaaaggtgtaatgcttgattgggttaagaagctccaccaggatggaagattgagtcaaatggtagacaaagatctaaagggcaactttgatctgattgaattagaagaaatggttcaggttgcactcttgtgtacacaattcaatccttcacaccgccccaagatgtcagaagtattaaagatgttggaag

SEQ ID NO: 279289 - DNA, 297 bp, Glycine max
atttggagtttggagcgactgaactaatcattaatttgcactcgctgtttcagctttcatcacccttcttttgcatcatttatatctcttgagaaatggcacaagaaacctttctattcacatctgaatctgtaaacgagggtcaccccgacaagctgtgcgaccagatctctgatgcagtacttgatgcgtgccttgaacaggaccctgacagcaaggttgcctgtgagacatgcaccaagaccaacatggtcatggtcttcggagagatcacaaccaaggccaacgtagactatg

SEQ ID NO: 279290 - DNA, 294 bp, Glycine max
gccctgagatcacattgaacaatggtgaaggctgtggccgttcttggcagcagtgagggtgtcactggaactatttcacttcgttcaggagggaagtggtccaaccaccgtaactggatctcttgctggtcttaagcctggtctccatggtttccatgtccatgcctgggggacactaccaatggttgcctctcaactggatcacatttcaatcctaataacaaggagcatggtgcccctgaggatgagaatcgtcatgctggtgatcttgggaatgttaatgtcggtgatgat

SEQ ID NO: 279291 - DNA, 293 bp, Glycine max
  unsure (1)..(293): unsure at all n locations
cttcttcttttacgttcattctgttttcatagtgaggatcttctnaagaaatggcaaatcaccctttgacacactctcactctttccgcgagaggtttgatgaaactctcactggtcacaggaatgaaattttggcccttttgtcaaagcttgaagccaagggcaagggaatcctgcaacaccaccaggtggttgcagagtttgaagaaatccctgaggagagcagaaagaaactccaaggtggtgtctttggagaagttttgagatctacacaggaagccatagtgctgcca

SEQ ID NO: 279292 - DNA, 292 bp, Glycine max
  unsure (1)..(292): unsure at all n locations
ggaaattaaaagacactactaaaaggaggatatagttttgaaagagctatgcatcaagaaagaagccttgagggagaagagaagtttgtgcaaaatccntgggaacagtaattggttttgccatttcaagctgggaaagaacattcaagtactttcaagttccttgtcaataagcaagaccaatacactgtggaaggagtgcagaatcttggagacaaagcagtgatgtgtcataggctaaatttcagaactgcagtatttactgccatgaagtccgtgaaacaacagcttt

SEQ ID NO: 279293 - DNA, 292 bp, Glycine max
  unsure (1)..(292): unsure at all n locations
tattttttgagataaggaagcagaagtatctggaggctttagataagcatgaccggtccaaggctgtagaaatattagtgaaggatttgaaagtgtttgctacatttaatgaagaattgttcaaggaaatcacacagcttcttacattggaaaatttcagggaaaatgagcaattgtctaagtatggtgatacaaaatctgcacgagcaatcatgttggttgagctcaaaaagcnaattgaagcgaatcccttatttcgtgacaaactgcaatttcccaaccttaaaaactc

SEQ ID NO: 279294 - DNA, 290 bp, Glycine max
  unsure (1)..(290): unsure at all n locations
agaggagttgccgttaaggatccatctgctccccatggagttcggcttttgattgaggactatccttatgcttctgattggctagagatatgggatgccatcaagtcctgggtgcaagaatatgtgtcattctactacaagtcagatgcagcaattcaacaagaccccgaactccaagcttggtggaaagaacttgtccaagtgggtcatggtgatttgaaagataagccatggtggcaaaagatgcaaacttgtgaagagttgattgaagcctcggncaccctcatatg

SEQ ID NO: 279295 - DNA, 291 bp, Glycine max
agaagcagcccctacaataaacaatataatcttctctctccaaaatggagttgctctaaattacctaaatggccactgtcactggagttctttctctaaccctcttctttttgtttttgtataatcccttcaaatttgcattaggtaaaaaagaggctcccaaagttgcaggtgcatggccaatacttggtcacctaccactattgagtggttcagagacaccccataaggttttggatgctttggctgataagtatggacccatattcaccatcaacaatagtgtcaaaa

SEQ ID NO: 279296 - DNA, 291 bp, Glycine max
aattaagtctctgcattattctcttcccttttctatctccctctgcaaaaacgaagtaaatgggtcggcttaatctcctacttgtgtggtcactctctttaacacttttccttaattatctacacccaacctctgcccagctcagtccaaaccactatgctaacatatgccccaaccttgaaagcatcgttagacaagccgttactaataagttccaacaaacctttgtcaccgtcccagccacccttcgcctattctttcacgattgctttgtccagggttgtgatgctt

SEQ ID NO: 279297 - DNA, 294 bp, Glycine max
caacctctcaagtccaacctacccctttttcttctcccaccaacttcaccgtcttcttcctcgattcatgtctcacttcaaggggcaagtaccatgatgagcttattgccaatgctgcttacattggcactcctggaaagggtattcttgctgctgatgagtcaacagggacaattggcaagcgtttggccagcatcagtgtagagaatgttgaatccaacaggcgtgctcttagggagctgcttttcaccgctcccggtgctcttaaatatctcagtggtgtcaacctcttga

SEQ ID NO: 279298 - DNA, 290 bp, Glycine max
ttctctcgtttcaatcgaaaaaaatcatggggcagaaaattcttcgtcggtggcaactggaaatgcaattgggaccactgaggaagtgaagaagattgttactactttaaatgaagctaaagtccctggagaagatgttgtagaagttgttgtgagccctccttttgtgttccttccttttgtaaaaagtttgctgcgccctgatttccatgtctcggcccaaaattgttggggtcgcaaaggtggtgctatactggagaggttagtgctgaaatgcttgttaattggga

SEQ ID NO: 279299 - DNA, 291 bp, Glycine max
  unsure (1)..(291): unsure at all n locations
ccgagggaaaaacttggcaacctacacacccagtgtggacatgggtgcgtttgtaattgtggtaaatgcagaaaaggttgctgtatctgggaaaaagaggacccaaaagctttacaggaggcantctggacgacctggtggtatgaccgtggagacatttgcccagctgcaaaacagaattcctgaaagaattattgaacacgctgttcgtggcatgcttccaaaaggaaggcttgggaggagactattcacccaccttaaggtttataaaggcncagatcatccacatgc

SEQ ID NO: 279300 - DNA, 287 bp, Glycine max
  unsure (1)..(287): unsure at all n locations
ctgaaaaggaaaaccctaagagatgaagagaactcctatcntgttccctctcttctttcttctttgtgccttcacctcatatctaccttcagccaccgctgatgatgatcatgtgtacgacactgacggcgataagcttcaatacggtgtcaattatttcgtgttgccagtgataagaggaaatggcggtggaatacaagtagcaaaagcaggaaacgaaacttgccctctgactgtggtgcaatctggcaacgagctctctgaggggttaccgataaagattgcat

SEQ ID NO: 279301 - DNA, 283 bp, Glycine max
  unsure (1)..(283): unsure at all n locations
aaacattgaagcctgttacactctcggcatgattcggttttactgcttgcaaaacagagggagcggcgcgtcgctgatggcgaaggcggcgatgaactctcacgcgccggcgctgtactcgctcgcggtgatacagttcaacggaagcggcggcaccaaaaacgacaaggaccttcgagcgggtgtggcgctttgcgcacgcgctgcgttcctcggtcatatcgacgcgctgcgtgagttggtcattgcttgcaaganggttacgcgttaagctaaacgtaac

SEQ ID NO: 279302 - DNA, 300 bp, Glycine max
  unsure (1)..(300): unsure at all n locations
ttctctgtctaagggggtgccctgagatcacattgaacaatggtgaanggtgtgggcgnttcttgggcagcaagtggagggtggtccactggaaactaattccacttcgttcaaggagggaagtgggtcccaaccaaccgtaaactgggatctcttgctggtcttaagcctggtctccatggttttccatgtccatgccttgggggacactaccaatggttgcctctcaactggatcacatttcaatcctaataacaaggagcatggtgcccctgaggatgagaatcgtcatgctggtga

SEQ ID NO: 279303 - DNA, 290 bp, Glycine max
  unsure (1)..(290): unsure at all n locations
acgaattcaaagaacgccttggaaattggtgtattcactggttactctctgntctccactgcccctggctcttccccctgatggaaagatcttggctttggatgtgaatcgcgaatactatgagttaggattgccaataattcaaaaagctggagtggctcacaagattgatttcagagaaggacctgctcttccgtttcttgacgagatgcttaaagatgaaaataaaaaggggtcgttggatttcgttttcgtggatgctgataaggacaattacttgaactaccacc

SEQ ID NO: 279304 - DNA, 285 bp, Glycine max
  unsure (1)..(285): unsure at all n locations
agaacaagtagttgagaactaagaaggagaagcaaatggcttcctcaatgatctcttccccagctgttaccactgtcaaccgtgccggtgccggcatggttgctccattcactggcctcaagtccatggctggcttccccaccagaaagaccaacaatgacattacctccattgctagcaacggtggaagagtgcaatgcatgcaggtgtggccaccagtnggcaagaagaagtttgagactctttcctacctgccagaccttgatgatgcacaattggcaaagg

SEQ ID NO: 279305 - DNA, 284 bp, Glycine max
attcttttttccacaaccttgaatgtttaccgccccgccggataaggagaaggagaaggaggatctgcgtcgcaggcactgttcatcgccatgtctcgggttgataacagaaattcctcagccaccaagcgtgctaggactgatggtagtcgtagggaagatgattggacatgccccagctgtggcaatgtcaatttctctttcaggacaacttgtaacatgcgtaattgcactcaaccaaggccggctgatcataattcgaaatctgctgccaagcctctaca

SEQ ID NO: 279306 - DNA, 279 bp, Glycine max
  unsure (1)..(279): unsure at all n locations
gtttctttggcagtgaaccgtcctctgcttggtcttcacgagaatgtaccattagctgttgctcatccccaattcctcccgttcaaatggccacccaagtccaaactcncctccgtcgtcggaattcgatgctcctcctcccctttcaacganaaaaccctcatttccatcacacctaacactttccanctcaatcccaaccctctcggttgtcgtttcacgttcccagtttggagaacaggagagcaacaaatagtggaagctatgctgtaggacgaa

SEQ ID NO: 279307 - DNA, 286 bp, Glycine max
  unsure (1)..(286): unsure at all n locations
cagcaacaataacaatggcagcctcactacaagctgcagctaccttcatgcaacccaccaaggtgggcatggccacttcgcaacctcaaatctacacaatgcatttctaaggcttttggcttggaacccgctgcagctaaactcatttgctcccttaagcccgatntcaaagattttgctcaaaaatgtgtcgacgccaccaaaattgcaggattcgcccttgccacctcagctctcgttgtttctggagcgagtgcagaaggtgttccaaagaggctaaccttcg

SEQ ID NO: 279308 - DNA, 255 bp, Glycine max
ttgttgtttgtgtgtttgttttttctctcacctgaaaatgtcttgctgcggtggtaactgtggttgcggaagcgcctgcaagtggcggcaacggctgcggaggctgcaagatgtacccagacttgagctacaccgagtcaaccaccaccgagaccttggtcatgggagtggcaccagttaaggctcaattcgagagtgctgaaatgggtgttcccgctgagaacgatggctgcaaatgtggagctaactgcacct

SEQ ID NO: 279309 - DNA, 295 bp, Glycine max
gggcgacgcaccggcattgccagagactcttaaaaaattacaacaagctggttggtcctcttgggcttccaagattggtattcttgtccaggaaagatatcttggaccaaaatgggccgtaacagaagcaaacctaaagaaggctggcttccacacatgggagcagttaattctcaaggatccacatcttatcactccaaatgcactttcatacaaatcagcaatgagagagaatctgttgaggcagggatacagaattgttggaatcattggagaccatggagcgatctgcttg

SEQ ID NO: 279310 - DNA, 286 bp, Glycine max
gttttgatggcaccaaaatgcacacaacattttcagtgaaactgaaagggggaaagaaagagagtgaaatgggggagctttacgcgatggagtcatctgcgatagctgcggagaaagctctctctcagcggctcaaggctgccaaagtgagatggcctggtttgtttgatggggtggattcagccacagaagattggattattgatcagatgcacacagtgcgaccagtagtagaaactggatatgaaaacgtttttacttgtgagattgttgcttgagagcagaa

SEQ ID NO: 279311 - DNA, 285 bp, Glycine max
aaggcagaaagcaagctcatcctagagttttaaaaatggcagcagcctccttccatgggctctctcttccccatccttggctggcaaggccgtgaagctgggcccatcagcccccgaagtcgggagggtcagcatgaggaagaccgtcaccaagcaggcctcctccggaagcccatggtacggcccagaccgcgtcaagtacttgggcccattctctggcgagcccccgtcctacctcactggcgagttcccaggtgactacggctgggacactgctgggctttc

SEQ ID NO: 279312 - DNA, 162 bp, Glycine max
gaaggaccctcgctgactacaacatccagaaggaatcaacccttcaccttgtcctccgtctccgtggggggttttaagctcgttgtgtaatgttggatgtgttcccaaaacatttgaagaactttgatgtttaatgggtctgtaataatgtcccttgaaaat

SEQ ID NO: 279313 - DNA, 284 bp, Glycine max
gcctcatcttcgccgggaagcagctggaggacggccgcaccctcgccgacttacaacatccagaaggagtccacgcttcacctgcgtcctccgcctccgtggcggcgccaagaagcgcaagaagaagacctacaccaagcccaagaagatcaagcacaagcacaagaaggtcaagctcggcattcttcagttctacaaggtcgacgattctggaaaagtccagaggctccgcaaggagtgccccaacgccgagtgcggcgccggcaccttcatggccaaccatt

SEQ ID NO: 279314 - DNA, 284 bp, Glycine max
gtggaagccttgatgaagatgcagcttctgtgagactgtttgtggcacgtgggcatcgaggttcttgtagctcaatcttacagtaaaaatctcggtctctatgctgaaaggattggagcaatcaatgtgatttcatcgtcaccagaatctgcagcaagggtaaagagccaactgaaaaggattgcccgaccaatgtactctaatccaccggtacacggggctaggatagttgccgatgttgttggaaacccagttctctttaatgaatggaaagcagagatgga

SEQ ID NO: 279315 - DNA, 279 bp, Glycine max
cataattggtcttggatcctcaattgcaggtgtgtttacaccaagtgatgacctggcaaaagaagtttttgatgcttctgaagcgagtggggagaaactatggaggttgccgttagaagaaagttactgggagtcaatgaaatcaggagtagctgatatggtgaacactggtggtcgaccaggtagtgctattactgcggctcttttcttaaagcagtttgttgacgagaaggttcaatggatgcatattgacatggctggtccggtgtggaatgaaaa

SEQ ID NO: 279316 - DNA, 279 bp, Glycine max
gcatggccactcgcaacctcaaatctacacaatgcatttctaaggcttttggcttggaacccgctgcagctaaactcatttgctcccttaagcccgatctcaaagattttgctcaaaaatgtgtcgacgccaccaaaattgcaggattcgcccttgccacctcagctctcgttgtttctggagcgagtgcagaaggtgttccaaagaggctaaccttcgacgaaatccagagcaagacatacttggaagtgaagggaactggaactgctaatcagtgcc

SEQ ID NO: 279317 - DNA, 282 bp, Glycine max
  unsure (1)..(282): unsure at all n locations
cagccacacacaccacgaagcaacgagccggggccctggaccttgctgattaacccntatgatactgtcccaaacaaggttgagcacctcttctttgctcagcagtaccatgacaggaagcaaagagaggagaggatgagaatgagcagggaagagagggcaaggaccccttatgttgattacttgaggccaatcatagctgatggcgacatggttttggtggtaccacagcaactgtcaagctttgcaagcnatttgtggagagaggtgctgccggaatcc

SEQ ID NO: 279318 - DNA, 282 bp, Glycine max
gcagtagcagcaaggacgcccaagaccttttccgcgctctttggtctgcttatgcttcaaccccaacaaatctcaagatcattgacctctacgtaatctatgccgtcttcaccgctctcatccaggttgtttacatggctttggtgggatcatttccatttaactccttcctatcaggagtactttcttgtgtaggaactgctgttcttgctgtctgtctcaggatccaagtgaataaagataacaaggaattcaaggatcttgcacctgagcgtgcttttg

SEQ ID NO: 279319 - DNA, 281 bp, Glycine max
gttcaaaggtaaggtaggttaacactcttcttcatcgtcgtcgcaatgggacgtgtgatccgtgcgcagcgtaagggagcaggctcggtcttcaagtcccacacgcaccaccgcaagggccctgcacgcttccggagcctggacttcggggagcgcaacggctacctcaagggcgtggtcaccgacgtcatccatgaccctggccgcggcgcgccgcttcgccaaggtcgccttccgccaccctttcagatacaagaagcagaacgagctcttcattgccg

SEQ ID NO: 279320 - DNA, 278 bp, Glycine max
atagcccaagccctatacaaccaaaccctaacacacacccatttgattcagtttccatggctagcctcaaggttgcatttttggctgcagtgctctgcatggttgtggtgagtgcacccatggcacatgcagctatcacgtgcgggcaggtgacgaatagcctgatcaattgcatcggttacctccagaacggaggaacgccgccgtcgggatgctgcaacggagtgaagagcctcaatgccgccgccaagaccaccgccgaccgccagacggcgtgc

SEQ ID NO: 279321 - DNA, 277 bp, Glycine max
catatgcacatgagctgccacaatatggtcttgaagtagggcttacaaattatgctgcagcttattgcactggtctcctgttggcccgaagagtcctcaatacacttgaaatggatgaggagtatgaaggaaatgttgaggctactggagaggattattccgtggaacctgctgagagcaggaggccattccgtgctctccttgatgttggtcttattaggactacaaccggtaaccgtgtgtttggtgcccttaagggagctctggatggggggtt

SEQ ID NO: 279322 - DNA, 243 bp, Glycine max
tggcgtcggggtggggaatcacaggaaacaaaggtcgctgctacgatttctggatggatttcagcgagtgcatgtctcgctgccgagagcccaaggactgtgctcttctccgcgaagactacctcgagtgcctccaccattccaaggagtttcaacgacgaaaccgaatttacaaggaggagcagcgcaaactaagggctgcttccaggaaaggccaggaggatggggttaatgaacatcatc

SEQ ID NO: 279323 - DNA, 275 bp, Glycine max
ggaaatttgcgttgtttttcgcggtacagctcacacacactgaacggtaagtatggcggacaaggctgttacaatccgaacccgaaagttcatgaccaacaggcttctttccaggaagcagtttgtcgttgatgttcttcatccagggagggcaaatgtttccaaggctgaacttaaggagaagctagctaggatgtatgatgtgaaagaccctaatactgtatttgtcttcaaattccgaacacattttggaggtggcaaatccatggattggt

SEQ ID NO: 279324 - DNA, 278 bp, Glycine max
  unsure (1)..(278): unsure at all n locations
gataattttgatgggcctgacagttggagaaatggctgttgaggctcagttatatgaggaagcatttgcaattttcaagaagttcaacttaaatgtccaagcagtcaatgtcttgctagataatattcatagcattgatagagctgtggagtttgcnttccgagttgaagaagatgctgtttggagtcaggtggccaaggctcaactaagggaagggctagtaagtgatgccattgagtcctttatacgagctgatgatgccacacaatttttagatg

SEQ ID NO: 279325 - DNA, 278 bp, Glycine max
  unsure (1)..(278): unsure at all n locations
cttcccttctccaacatgccaaacgacagcgttctgagtctttncttcttcgttaccctcttcacatggncttctctctgctaatttcccacgatgaccatattttcctaccgagtcaacttccatgacgatgactcagtgagttgcactgctaccgacncaaaccttaactacaagccggtgatcggnatcctgacccaccccggcgacggtgctctggccggctcagcaacgccaccggggtttcttaatcgccgctcctacgttaaattcgtgga

SEQ ID NO: 279326 - DNA, 276 bp, Glycine max
gcttgcatgacaaagcaagaaacagggtttacaagctcaatgatcaaacagcaaagctttttgtgcgaccaagaggttggcactaccggaggcacatattctgattgatggtgaacctgcaactggttgcctgttgattttggcctctatttctaccacagctactcagcattccggcgcactcaaggtgctggctttggccctttcttttatcttcccaagatggagcattcaagggaagctaagatttggaacaatgtgtttgagaaagctgag

SEQ ID NO: 279327 - DNA, 276 bp, Glycine max
  unsure (1)..(276): unsure at all n locations
ggtttgcttaaggngcagggattcaggggcttttttcgtggctgggtgcctaccttgcttggttatagtgctcagggtgcttgcaaatttggattttacgagttctttaagaagtactattctgatattgctgggcccagagtatgcaagcaagtacaagaccttgatctaccttgctggttcagcatctgctgaggttattgctgatatgctctttgcccatttgaggctgtgaagtccgtgtccaaactcagcctggttttgcnaggggntgtc

SEQ ID NO: 279328 - DNA, 281 bp, Glycine max
  unsure (1)..(281): unsure at all n locations
gnacaaaccatggcaatancactcaacaatggcttcaagatgcctatcattggattgggcgtgtggcgcatggnaggnaacganatcagggacctaattctcaattccatcaaaattggttatcgcnattttgattgtgctgctgacnacaaaaacgaagcagaagttggagatgcgcttaaggaggnttttgatagtngccttgtgaagagagnagatctcttcantaccaccaagcttggnattctgatcaaggccacgttctgaagcgngtnaagnnt

SEQ ID NO: 279329 - DNA, 278 bp, Glycine max
ggcacagaagaaggtattaaggagcctcaggcaactttttcagcttgttttggtgcagcattcattatgctacaccctacaaagtatgcagcaatgcttgctgaaaagatgcagaagcatggtgctactggatggcttgttaacactggttggtctgctggaagctatggtaatggaagccgtattaaactacaatacacaaggaaaatcattgatgctattcactccggaagtctcctgaatgcagagtacaagaagactgaaatttttgggcttga

SEQ ID NO: 279330 - DNA, 274 bp, Glycine max
  unsure (1)..(274): unsure at all n locations
gacaaggcaaagttcaacaatgtttttgtgaagaatctgtcagaatcaaccactgatgatgaattgaagaatgtttttggtgaatttggaactattactagtgctgtcgtaatgagggatggagatgggaaatcaaagtgttttggatttgtgaattttgagaatgctgatgatgctgctagggctgttgaggctctcaatggcaaaaagtttgatgacaaagaatggtatgttggaaaagctcnaaagaaatctgaaagggagaatgaattgc

SEQ ID NO: 279331 - DNA, 277 bp, Glycine max
gttctcgttctggtttatagatctttgcgaaggaggtttacagcgctcaaccaaagatgcagaacgaggaaggacagattcactgagctttacattcctaggaagtgctccgccacaaacagattgattaccgctaaggaccatgcttcggttcagatcaacattgggcatgtggatgagaatggcgtctacaatgggccatttctccactttgccctctgcggattcatccgtgctcagggtgatgctgacagtgctctagaccgcttgtggcaga

SEQ ID NO: 279332 - DNA, 282 bp, Glycine max
  unsure (1)..(282): unsure at all n locations
gccaagacgggtcgctctccaagggacaagcgcgtcgtcaaggatgatcttactaagaacgacctttggtggggaaagggttctcctaacatcgagatggacgagcacagtttcatggtgaacagagaaagagctgttgattacttgaactccttggacaaggtcttcgtcaatgaccaattcttgaattgggacacagagaacagaatcaaagtccggattgtatctgccagagcttaccattcattgttcatgcacaacatgtgtatccgcnccactcct

SEQ ID NO: 279333 - DNA, 283 bp, Glycine max
cagaaatgggcagtgcttctctgattccagtttcctggttgccttggcggccactttctccttttcaagggaacggtgaaaaccttggtcgcaaaaccatggctgaagaagattcagcaagcaagacccctcatttccgtggttaacaaggctgcctctctatcttcccccgtgacagcacccagcgtcggcgttcggtttcggctggacaatttggggccgcaaccgggttcgaggaagagggctaagagaaagggtagaggaatatccgcagggcaagggg

SEQ ID NO: 279334 - DNA, 278 bp, Glycine max
  unsure (1)..(278): unsure at all n locations
aatggngaccacacccggtttgtgtggcagtgtgttgttgagcacctcgttcctgaggaagcaggcaatggcatcagtgaacatgagaatgctgaaggctaatgctggtgtttttggctaangggagggcgtggagggcgtgtgagtgcgatggcaagttacaatgtgaagctgataaccccagaaggagaacaagaatttgaatgcccagatgatgttttcatcttgaaaaggctgaggaattggcattgaccttccctactcatgcaaggctggtg

SEQ ID NO: 279335 - DNA, 283 bp, Glycine max
  unsure (1)..(283): unsure at all n locations
caacctcgaggcatggggcgggttaatggatccgggtcacaactactacgagcggggcaacctagacatattccagtggtagaggccctgcttggaagcacccgtttgcgaggccaacctaacttctgacgggtcggggccccatcacggctggtacgttaattacgtcgaggtcaccaccactggggtccacgcgccttgttctcagcagcagttcacctttgagcagtggctcgccaccgatacgtcgccgtatcagctctgggntgtcaggaaaaactgt

SEQ ID NO: 279336 - DNA, 243 bp, Glycine max
  unsure (1)..(243): unsure at all n locations
ttctgaccatggctgcatcattatttatgccttcatccatagtggacgaagaagcgaggtttgaagccgaagtggcggaggtgcaagcatggtggaactctgagaggttcaggctaacaaaaagaccatacacagcaagagatgtggtgtccctncgaggcaacctcagacaaacctatgcctcgaacgagatggcgaaaaagctctggtgccttctgaagaaccaccaagccaacggnacag

SEQ ID NO: 279337 - DNA, 245 bp, Glycine max
ttgttgtttgtgtgtttgttttttctctcacctgaaaatgtcttgctgcggtggtaactgtggttgcggaagcgcctgcaagtgcggcaacggctgcggaggctgcaagatgtacccagacttgagctacaccgagtcaaccaccaccgagaccttggtcatgggagtggcaccagttaaggctcaattcgagagtgctgaaatgggtgttcccgctgagaacgatggctgcaaatgtggagcta

SEQ ID NO: 279338 - DNA, 282 bp, Glycine max
  unsure (1)..(282): unsure at all n locations
gnttaaaccctagcccctcttctcttcattcttcactcaggaaacaagcataatgggccttctgtaataaggttggaaatgtcttgaggcagggtgctgctcgcagcacacaagcacctgtttcatccatgcttaattacattcgctgcatgtcttcaagcaagctttttattggaggccttcatatggagttgacgatcagtctcttaaggatgcattttctggctttggagatgtggttgatgcaaaagttataactgacagagactctggaagatcaag

SEQ ID NO: 279339 - DNA, 279 bp, Glycine max
cacacacatagaaacccaacaacaagaatgaagaagatgattctaaccctcttcttcaatatcattttatctctcctctccctctcccacgcctccgtggtggatttctgcgtagagactacacaggccccaatggccccgcaggtactcatgcaagagcccagcaaaggtcacggtggacgacttcgtctactccggccttggcaccgccggcaacacctcaaacatcatcaaagccgcggtgacgccggcgttcgacgcgcaattccccggcgtcaa

SEQ ID NO: 279340 - DNA, 281 bp, Glycine max
  unsure (1)..(281): unsure at all n locations
gtgcggcgatcctagcactctcttctgcagctttcgccgacagctttcatttcacccatggctgagcaaaccgagaaggctttttgaaacaaccaaaagtgtttctcagctcgaagaaaactgggaagggaaananacccggaaaggtgggaacgcttttggaaatccattgggcttggatttaagactcccagggaagccatcgaaggaacctacattgacaagaagtgccccttcactggcaatgtttccatccgtgggccgtatcttggctgggaaca

SEQ ID NO: 279341 - DNA, 278 bp, Glycine max
gtttgcgaataaatggcaactaagaggagcgtgggaacgttgaaggagggtgatttgaaggggaagagggtattcgtgagggtcgatctgaacgtgcctttggatgacaaccttaacatcaccgatgacactagagtccgtgctgctgttctcaccatcaagtacttgactggttatggtgctaaagtgatcctttctagccatttgggacgtccaaaaggtgtaacacctaaatacagtttgaagcctcttgtgccaaggctgtctcaacttcttgg

SEQ ID NO: 279342 - DNA, 238 bp, Glycine max
ttgttgtttgtgtgtttgttttttctctcacctgaaaatgtcttgctgcggtggtaactgtggttgcggaagcgcctgcaagtgcggcaacggctgcggaggctgcaagatgtacccagacttgagctacaccgagtcaaccaccaccgagaccttggtcatgggagtggcaccagttaaggctcaattcgagagtgctgaaatgggtgttcccgctgagaacgatggctgcaaatgt

SEQ ID NO: 279343 - DNA, 280 bp, Glycine max
  unsure (1)..(280): unsure at all n locations
aacacttcctgcagtgtttcaaatgaatgaaattttgtatgaactgaangaccattcagtgggtttgaactgtgggcgtngggattacattttcagttatgttaagacnttccaagctcatccagatcgcctcttaccagatagggtcctagttggcatgactcaacacttcatgaaaagttattctgatcttctcatcaggacgtgccacaggcgcggcgtgcatgctatgggaggaatggcagcgcagattccaatcaaagaagatccagtggctaac

SEQ ID NO: 279344 - DNA, 277 bp, Glycine max
tattcattcaagattcagcaagtgcgttttggaagcagagaccgaaatacttcgagatggcccgtacaaagcaaactgctcgtaagtcaactggaggaaaagctcccaggaagcagcttgcaaccaaggctgcacgtaagtctgcaccaacaactggtggtgtgaagaagcctcatcgttatcgccctggaactgttgctcttcgtgagattaggaaataccagaagagcactgagctcctaatcaggaagcttcctttccagaggttggttcgtga

SEQ ID NO: 279345 - DNA, 273 bp, Glycine max
aggttgtttcaagcagggaccctcttaagcttccatgggctgagcttggaattgacattgttattgagggaacgggagtgtttgtggatggccctggggctggcaaacacatccaagcaggtgctaagaaggttatcatcactgctccagcaaagggtgctgatattccaacttatgttgtcggagtaaatgaaggggactacactcatgagatctctaacattataagcaacgcttcctgcaccacaaactgtcttgctccctttgtgaaga

SEQ ID NO: 279346 - DNA, 282 bp, Glycine max
  unsure (1)..(282): unsure at all n locations
tttgacaatgagattcgacatgctggggctggagaactaccccgggcgtgaagcgcatccaccatcaagcccccaaaccgacagatgggtcttccccgagaccaatgttcggcatcattgtctggccgagggtcgtttgatgaacttgggatgcgccacaggacaccctagttttgtgatgtcctgctcctttcaccaaccaggtcattgctcagcttgagttgtggaaggagaagagtaccggcaagtacgagaagaaagtttacgttttgcncaagcacc

SEQ ID NO: 279347 - DNA, 280 bp, Glycine max
  unsure (1)..(280): unsure at all n locations
aancgggagcactctctttcaggtccaccatctagactgcaatcatggctgatggaccacagcatccatcagttgttcagaagctagctggacagtcttacctggtgtccaggcttagccccaactttaactctaggaattattctgcaactggttcttacgtcaatggcggaatgcactcgcctgggttggctgttgtgtcanctgtatctccagttactgtgcatgctccagcagagaaaggagtgagtggatttctagtggattttctgatgggtgg

SEQ ID NO: 279348 - DNA, 249 bp, Glycine max
  unsure (1)..(249): unsure at all n locations
ttgttgtntgtgtgtttgttttttctctcacctgaaaatgtcttgctgcggtggtaactgtggttgcggaagcgcctgcaagtgcggcaacggctgcggaggctgcaagatgtacccagacttgagctacaccgagtcaaccaccaccgagaccttggtcatgggagtggcaccagttaaggctcaattcgagagtgctgaaatgggtgttcccgctgagaacgatggctgcaaatgtggactaactgc

SEQ ID NO: 279349 - DNA, 261 bp, Glycine max
  unsure (1)..(261): unsure at all n locations
cgagntggcacgtacgaaggnaaactgctcgtaagtcccacaaggaggaaagggcaccctaaggaagcagctccgcaaaccaagggctgcacgtaagtctgcaaccaactactggtggtgtgaagaaagccacatcgttatcgtcctggtaccgttgctctttcgtgagattaggaaatacccagaagagtaccgagcttttgatcaggaagctccccttccagaggctggttcgtgaattgctcaggacttcaagactgg

SEQ ID NO: 279350 - DNA, 240 bp, Glycine max
ttctgaccatggctgcatcattatttatgcctcatccatagtggacgaagaagcgaggtttgaagccgaagtggcggaggtgcaagcatggtggaactctgagaggttcaggctaacaaaaagaccatacacagcaagagatgtggtgtccctccgaggcaacctcagacaaacctatgcctcgaacgagatggcgaaaaagctctggtgccttctgaagaaccaccaagccaacggcac

SEQ ID NO: 279351 - DNA, 274 bp, Glycine max
  unsure (1)..(274): unsure at all n locations
cccttagccgttgctctgcttcaacattgcggaagcagaagaagcgccgcagctatggtgaagtactccagagaacccgacaatcccaccaagtcctgcaaggccagaggcgatnacctcagagttcattttaagaacactagggagactgcctttgccatcaggaagttgccccttgttaaagctaaacgatacttagaggatgttttggcccacaaacaggctattcctttccgacgcttttgtggtggtgttgggaggacggcccaggcta

SEQ ID NO: 279352 - DNA, 271 bp, Glycine max
tgcttttactctgctaccttgtgacaatggtgagggttagtgtgttgaatgatgctcttaagagcatgtacaatgctgagaaacgggggaagcgccaggtcatgattaggccatcctcaaaagtgattataaaattccttttggtgatgcaaaagcatgggtacattggagagtttgagtacgttgatgatcacagagctggaaaaattgttgttgaatgaatggtagactgaacaaatgtggggttattagtccgcgttttgatgttggt

SEQ ID NO: 279353 - DNA, 233 bp, Glycine max
  unsure (1)..(233): unsure at all n locations
ttgttgtttgtgtgtttgttttttctctcacctgaaaatgtcttgctgcggtggtaactgtggttgcggaancgcctgcaagtgcggcaacggctgcggaggctgcaagatgtacccagacttgagctacaccgagtcaaccaccaccgagaccttggtcatgggagtggcaccagttaaggctcaattcgagagtgctgaaatgggtgttcccgctgagaacgatggctgca

SEQ ID NO: 279354 - DNA, 273 bp, Glycine max
  unsure (1)..(273): unsure at all n locations
gggaaacatagttgctaatgcngagggggttgcagaggctacaattgtggataatcagataccactctctggccccaattcagtagttggaagagccttggtggtccatgagcttgaggatgaccttggaaagggtgggcatgaactcagtttgacaactggaaatgctggtggaagattagcatgtggtgtggttggtttgactccagcataatcagtgcagcgaattttttgtagcagtcgtgttatgttatcagatatatgttctctgtg

SEQ ID NO: 279355 - DNA, 274 bp, Glycine max
  unsure (1)..(274): unsure at all n locations
atacactctgctcgtagggtttctccacctagagggaaatggctcccaaaccgcctagtacgggtctgtttgttggactgaacaagggtcacgtcgtcaccaagaaggaattgcctccacgcccctcagatcgtaaggggaaaacaagcaagagggtgcactttgtgaggnacctcataagagaggtagccggttttgcaccctatgaaaagcgtataactgagttgctgaaggttgggaaggataagagggcactgaaggttgcaaagagaaa

SEQ ID NO: 279356 - DNA, 276 bp, Glycine max
  unsure (1)..(276): unsure at all n locations
catggcctcaaccaacgctctctcttcagcntccattctacgctctcccaaccgccagttctctgacccgaagagcgaaccataatggaagagtaaattaccggaaaccgaataaccgtttctccgtgaaagcntccgccaaagagattgcctttgaccagcattcccgctctgctatgcaggccggcattgacaagctcgccgacgctgttgggctcactcttgggcccagagggaggaatgttgtgttggatgagtttggaagtcctaaagtgg

SEQ ID NO: 279357 - DNA, 278 bp, Glycine max
  unsure (1)..(278): unsure at all n locations
gggaactccaaaaagaccctgaactcccaagcttggtggaaagaacttgtagaggtgggtcatggtgatttgaaagataagccatggtggcaaaagatgcaaactcgtgaagagttggttgangcttccgctatcctcatatggattgcttcagcccttcatgctgctgttaactttggacagtatccatatggaggtttaatcctaaacaggccaactattagcaggagattcatgcctgaaaaggggtctcctgaatatgatgcgttggctaagaa

SEQ ID NO: 279358 - DNA, 248 bp, Glycine max
  unsure (1)..(248): unsure at all n locations
tccgcgattncnctcttctcttggaaaaagtgaaaacccagaagtacgaacgaaaganaagagcgatttagaagtnaganaagatggggttgtcgttcacgaagctgttcagcaggttgtttgcgaagaaggaaatgaggattctgatggtaggtctcgatgctgctggtaagacaaccatcttgtacaagctcaagcttggagaaatcgtcaccactatccccaccatcggatttaatgttgagact

SEQ ID NO: 279359 - DNA, 266 bp, Glycine max
gctttttgtttggttttcccacaagatttggatctatggccgctcaatttaaagcattttttgatgcaactggaggcctttggcgtacacaggcactagcaggaaaggccgcaggttcttctatagcactagttctcaaggaggaggccaagaaactaccccgttgacatctattactcagcttgttcaccatggattgatctttgtccccattggatacacattggcggtggcagtttgagttggagaagtgaaagtggctcccc

SEQ ID NO: 279360 - DNA, 270 bp, Glycine max
  unsure (1)..(270): unsure at all n locations
aagccaccgtaccgtgttgcctctctgcaatctacagccaaaatgcctttcaagaggtacgttgagatcgggagggttgcccaaatcaactacggcaaggaatatggcaggctcgtcgtcattgtcgacgtcattgatcagaacagagctcttgncgatgcccctgatatggtgaggtcccaagtcaatttcaaaaggcttccctaaccgatattaagattgacattaagagggtccctaagaagaaagatcttgtcaaagccatggagg

SEQ ID NO: 279361 - DNA, 270 bp, Glycine max
  unsure (1)..(270): unsure at all n locations
ancatcctcatggaggaggtaatcaccagcatattggtcatgccagtaccgtcaggcgtgatgctcctcctggccagaaggttggtctcattgctgctaggaggactggtcgtcttagggggcaagctgctgctactgctgctaaagcggataagaccacctgaagagattgttagagnnnnnnnnnnnnnnnnnaagttctcaaattttgtttctctgatagtctatgctcatctgtttgggttctattttgatcaccattctgccata

SEQ ID NO: 279362 - DNA, 273 bp, Glycine max
  unsure (1)..(273): unsure at all n locations
gaaggcgaaggagaacaagtttcggattctgaagctccaaaatctcccagaaaaccccgagttcaagctcggagacgtcatggggatactgaatcagagggcaattgaggcatccgagaagcaaaggccaantccagacattaggactggggatattgtcgaaatcaaattggaggttcctgagaacaagcgtaggttgtccatttacaaagggattgtcatctcaaagcaaaatgctggtattcacacaactattcgaatccgaagaatcat

SEQ ID NO: 279363 - DNA, 268 bp, Glycine max
tagaaagagatgataccttgaggatccaaaggctcaggaagaaattttacttccactttcaagattatgttgatttgattatctggaaggtgcaattcttggaccgacaccatttactaatcaagtttggtagtgtagatggaggggtgtcccgaaatgctgatcaccacccagcttttgttgctgtatataacatggatacaactgaaatgtatcatttatcagaattcaccagacgagctttatctgttgtttgagcagttctgtg

SEQ ID NO: 279364 - DNA, 269 bp, Glycine max
  unsure (1)..(269): unsure at all n locations
gtttcccatccgttacattgcagcccaganggcgtcggtttcagcttagatgtgcggcaaaaccagagacagtgaagaaggtgtgtgacatagtcaagaagcaattggcactgccagatgaatcagctgttactggagagtctaaatttgctgcgcttggagctgattctcttgacacggttgagattgtgatgggacttgaggaggaatttggtattaccgtggaagaagaaagtgcccagagtatcaccaccgttcaagacgctgct

SEQ ID NO: 279365 - DNA, 267 bp, Glycine max
  unsure (1)..(267): unsure at all n locations
anattctcggtctgtttttgttggcaatgttgattatgcatgcacaccagaagaagtgcagcaacactttcagtcctgtggtactgtaaacagggtcactatcctgactgacaagtttggccagcctaaaggttttgcttatgtggaatttgttgaagctgaggctgttcaagaggctctcctgttaaatgaatctgaattgcatggccgtcaattgaaggttttgcctaagaggaccaatgttcctggaatgaaacaatatcgtcc

SEQ ID NO: 279366 - DNA, 230 bp, Glycine max
aacagaagaacaaccaccaccacacacaatgggtcgcgtgagaacaaaaacggtgaagaaatcctcccgccaggtgattgagcgttactactcgcgcatgaccctcgacttccacacaaacaaaaagcttctcgaagaagtggccatcatcccttccaagaggctgcggaacaagatcgcgggtttctccacgcatctcatgaagcgcatccagaagggtcccgttcgcg

SEQ ID NO: 279367 - DNA, 267 bp, Glycine max
  unsure (1)..(267): unsure at all n locations
tgccatataatttttttttatttgaaataatgtccgggatcatccacaagattgaggagaccctccatgnnggagggcacaagaaagaggagcacaaaggagaacaccatggtgagcacaaaggtgaacacaaaggagaacaccatggtgagcacaaaggtgaacacaaaggagaacaacaccatggggagcacaagganggacttgtggataagatcaggacaagatccatggtgatggcctgacaagggtgagaaaagaagaaga

SEQ ID NO: 279368 - DNA, 270 bp, Glycine max
atggcagcgtcactacaagcagcagctactttcatgcaacccaccaagttgagcaggagcaacactttgcagcaaaagtctactcagtccatttccaaggcttttggtttggaacctgttggagctaaaaaggtcacatgctcccttcaggctgatcttaaggacttggctcacaagtgtgttgatgctaccaaaattgcaggattcgcccttgccacctctgccctcgttgtctctggggcaagtgctgaaggtgttccaaagaggcta

SEQ ID NO: 279369 - DNA, 271 bp, Glycine max
gtgccacagtcgccggggttgattttcaacgaggattcgccgcagtggttgctgaagctggtggaggggtggtttccgtggtgttacttgcacgttggagaggagttgcagttggaccataagaaatccccgtttctcaaccctgacggggatgcttcctgcgcccataacttggaggctcacttgcacttgctagatggataccatgggaagaatcgtggatttgagcgaacaagtgagagggaccttgctctggtgaacaaggactgtg

SEQ ID NO: 279370 - DNA, 278 bp, Glycine max
agtgtttcgaatagattatcctaagtctttgggaatagtgctgcaatgggcttcaagtcaggaggaggtgacccttttgggagctactggaagcccatttgtgtgcagggttcatattgccctcaagttgaagggagttcaatacaaatatgtcgaagaaaatttgaggaacaagagtgaactgcttctcaaatccaacccagttcacaagaaggttccagtgtttattcacaatgagaagcccatagcagagtctcttgtgattgttgaatacattg

SEQ ID NO: 279371 - DNA, 277 bp, Glycine max
aataaacactatggtttctgctgcaatggtgcctcaaccacaaacaacacctacaaagaattatgcttcttattagctatgcacttaaggaaatctaaataaatatttttcattctaggtgatgtatcatgtatgtaccaaaatattttggtacgtaagtcttttaaaaagtttgcatctcctctttggttttccttagttctgaaagttatctcctaagaagacaatcatatgtactgtacgtagtgtgaagatatagtattgtatgctgcagaat

SEQ ID NO: 279372 - DNA, 274 bp, Glycine max
ggagattgtgcgtctgcagcttgcgaaagagcatggccttgttgatgaacctgttcctgtaccacttaatatattttggcaaattcctcagtatttcttattgggggcagcagaagtattcacattcatcgggcagctggagttcttctatgaccaatctccagatgccatgcggagtttatgtagtgctttggcacttttgactacttcacttgggaatacttgagctctttcattctcactgtaatgacttacttcactacacaaggtggaa

SEQ ID NO: 279373 - DNA, 273 bp, Glycine max
  unsure (1)..(273): unsure at all n locations
gaacgctgctgccgaaacccttcccgatccctaaggtaagtgagtaatcggtggttgagaatggtggagaaggcgangggtaggaaggaggaggtggttaccagagagtacaccattaacctccacaagcgcctccatggctgcacatttaagaagaaagctcctaaagctattaaggagataaggaaatttgcccaaaaggccatggggaccaatgatgtgagggtggatgtgaagttgaacaagtttgtctggagccagggaatcaggagt

SEQ ID NO: 279374 - DNA, 282 bp, Glycine max
  unsure (1)..(282): unsure at all n locations
antgcngntgccattgcctatggattggacaagaagggtggcgagaagaacattctagtctttgatcttggnggtgggacctttgatgtcantatcttgacaattgataacggtgtttttgaagttcttgcnacaaatggagatactcatcttngaggtgangattttgatcccaagaataatggagtacttcattaanttgattccgaaaaagcatggnaaggntattagcaaggncaacagagcacttggnaagctgnggagagangctgancgngcaaa

SEQ ID NO: 279375 - DNA, 277 bp, Glycine max
  unsure (1)..(277): unsure at all n locations
gaaaattagggtttgtagtgtagcaggaagaagcagcaatggcgccgaagataacacgtaaggttagcagaaaccctgaattgataaggggaatcggaaagtactcgaggtcgcagatgtaccacaagaggggcatttgggctatcaaggccaaaaacngtggcgttttacctcgccacgaccctaaacccaagcctgaagctcctgctgaaaaaccacccaaattttaccctgctgatgatatcaagaagccccttgtcaacaagcacaaaccgat

SEQ ID NO: 279376 - DNA, 272 bp, Glycine max
  unsure (1)..(272): unsure at all n locations
cttttaaatccttttgtaccctcaactccataagccactagnacctcacaatgcccattgtagcaacctctcttctcttctttcttcttaatttatgcctcagaggcacttatgctgactatggaggtggttggcaaggtggtcatgccacattttatggtggaggtgatgcatctggcacaatgggaggggctgtggatatggaaatttgtacagccaagggtatggcactaacactgcagcactcagcactgctctattcaacaatggca

SEQ ID NO: 279377 - DNA, 274 bp, Glycine max
  unsure (1)..(274): unsure at all n locations
atncagagtaggactggttaccacaacatgtacaaggagtaccgcgataccactctaaacggttcagttgaggcaatgtacaatgagatggcttctcgccacagggtcaggngcccatgcatccaaattatcaagantgcaaccatcccagctaagctttgcaagagggagagcaccaagcaattccacaactccaaaatcaagttcccattggtctccagaaagttagaccacctaccaggaagctggaagancacatncaaggcccgaaagc

SEQ ID NO: 279378 - DNA, 274 bp, Glycine max
  unsure (1)..(274): unsure at all n locations
ctnggctggggagtggaaccacacctctggtccantngaatnnnagacgctaatgacanaggtattcaaaccagtgaggattacagattctatgctatttcagctgagtaccctgaattcagcaacaagggtaaganactagtctttcaattttctgttaagcacgaacagaagcttgactgtggtggtggctacatgaagttgctcagtggggatgttgatcagaagaaatttggtcggggatactccttacagtattatgnttggnccagat

SEQ ID NO: 279379 - DNA, 282 bp, Glycine max
  unsure (1)..(282): unsure at all n locations
gnatggatgaagatacaagagcaatcattatgttaccatattgtagatcattgtgacaaaaaccaatctgttgatttccttgagataacaactccacaagcatatttatttcagcatctagattgtccaggccaaaatgatctacaatatggtaacataatgatggatgaagatncaagagcaatcactttaattgactatgaatatgccagttacaatcctattggatatgatctggcaaatngttctgnggaatggtggcaaattaccatagtgacgaac

SEQ ID NO: 279380 - DNA, 272 bp, Glycine max
gcaatggcacgcaagaagatcagagagtatgactccaagaggttgttgaaggagcactttaagagaatctctggccaggagttgcccatcaagtctgcacaggttgcagaatccaccaatttcagtgagctagcagagaaggaaccctggcttttatcttcaaaattggttgtgaaaccagacatgttatttggaaagcgtggcaaaagtggtttggttgccttgaatctagatttggcagaagttgattctttgtgaaagggcgtcttggc

SEQ ID NO: 279381 - DNA, 275 bp, Glycine max
  unsure (1)..(275): unsure at all n locations
ctgaaagcactcagtagggtttgcggtttcagagtttgtgangcacgcatccatggccaccaccaccaacgccgccgcagccccgccgcgccagttctcccagaaggaagccgacatccagatgatgttagccgccgacgtccacctcggcaccaaaaactgcgacttccaaatggaacgttacatcttcaagcgccgcaacgacgggatttacattattaaccttgggaagacatgggagaagcttcagttagcagctagggttattgttgcaa

SEQ ID NO: 279382 - DNA, 271 bp, Glycine max
  unsure (1)..(271): unsure at all n locations
aatgcagacagatcatgaagcccaaaggcaacataatgttgaattggtcaagatgcaagagcagtcttctttcagaaaggagcnggcaagacaggctactgaagaacagattcaatctcagcnnnnnnnnnnnnnnnnnnnnnnnnctgaaattgaaagagaaactattagagttaaggcaatggcggaggctgaaggccgagcccatgaagcaaaattgaccgaggatcataacaggagaatgcttatagaacgaatgcaaggtgaaaga

SEQ ID NO: 279383 - DNA, 270 bp, Glycine max
agatggcacaagttgaacttcgtgacgagcatgggaacccagttgaactaacagatgcatatgggaatccggtttggttaacggacgagaaaggcaacccggtgcacctcacggctgtggcaaccaatgcacacaaatctatgcttcagaatgacaccccacaagagcttcctcactccaagagttcaagctcgtctgaggatgaagggcatggagagaggatcaggaagggactgaaggataacatagaagaaaagttaccagctggag

SEQ ID NO: 279384 - DNA, 144 bp, Glycine max
ctcggctcttgcatcgatgaagaacgtagcgaaatgcgatacttggtgtgaattgcagaatcccgtgaaccatcgagtctttgaacgcaagttgcgcccgaagccattaggccgagggcacgcctgcctgggtgtcacacatcg

SEQ ID NO: 279385 - DNA, 274 bp, Glycine max
  unsure (1)..(274): unsure at all n locations
gnaaaaagaaaagcattttacgttcgaagtcgagtcgaagagttttgggagccaaatgggtcttctgagcatcataaggnaaatcangcggaaagagaaggaaatgcgaattctaatggtcggattggacaattctgggaaaaccacaatcgttctaaagataaacggagaggacacaagcgtcatcagtcccacgctcggcttcaacatcaaaaccataacttaccaaaagtataccctaaatatatgggatgttgggggccagaaaacaata

SEQ ID NO: 279386 - DNA, 273 bp, Glycine max
agcaacttgaggacgggcgcaccctcgccgactacaacatccagaaggaatcaacccttcaccttcgtcctccgtctccgtggtggcatgcagatcttcgttaagaccctcaccggcaagactataaccctagaagtcgagagctccgacaccatcgacaacgtcaaggctaagatccaggacaaggagggtatccccccagaccagcagaggctgatcttcgccggcaagcagctcgaggacggacgtacccttgctgactacaacatccag

SEQ ID NO: 279387 - DNA, 239 bp, Glycine max
  unsure (1)..(239): unsure at all n locations
gttctattcttcttccacaatgggtatctctcgtgattccatgcacaagaggcgcgccaccggcggcaagaagaagtcttggaggaagaagagaaagtatgagcttgggaggcagccagcaaacacaaagctatcaagcaacaagacggtgaggaggantagggttcgcggtggaaacgtgaagtggcgtgctttgaggcttgataccgggaatactcttgggggagtgaggctgtgac

SEQ ID NO: 279388 - DNA, 271 bp, Glycine max
gtgtgaataggcttcgcaacattaacccaaaggtagaaacctttgcagaagcccgggattgtcttcttccaatgggaattacttctgagaatgtagcgcaggtttatggtgtgacaaggctagagcaagatcaagctgctgttgagtctcatcagcgtgctgcagctgcaacagcagctggtaagttcaaagaagaaatcattccagtttctacaaagtttgtggaccctaaaactggagtggagaagaaaattgttgtttctgtcgatga

SEQ ID NO: 279389 - DNA, 277 bp, Glycine max
  unsure (1)..(277): unsure at all n locations
atcaaagaaaggggtggtgggngctttcgaagcttaatnattttgttaatttccaagaacntccatagttttcgcagcagcaaaactaaaccaaattactcatatcatataataagatggcccgttctctctcgcaagcncaaacgtattggtgtccttggtgctcaatctatctcccctaaattcccgttcatcggcgaggttacgcatgggcatccgatgtatcggtaagagttgggattgggtaatattgggcgaaggaatggaatcgtgggag

SEQ ID NO: 279390 - DNA, 267 bp, Glycine max
  unsure (1)..(267): unsure at all n locations
aacaaaaagtttacgttacaaatcgcataataaccgtcctaagtttattgagagaattttgcaagtgtgaganacatggcatctcgtcaaaacaacaagcaagagcttgatgaaagagcaaggcaaggngagactgttgtcccgggtggaactggtggcaagagcctggaggctcagcaacaccttgctgaaggaaggagcaagggagggcaaacaaggaaggaacagctgggtacagaagggtaccaggaaatgggacgcaaagga

SEQ ID NO: 279391 - DNA, 271 bp, Glycine max
agaggagggtacaaagcgggtgctctaaaagaaggcctaaaacgtaactatgtgaaacactgtgagtacgtggcaattttcgatgcagatttcaggccagagccagattttctcagacgttccattcctttcttggtgggcaaccccgacattgctcttgttcaagctcgttggagatttgtgaattctgacgagtgcttattgacaagaatgcaagagatgtccctggattaccatttcacagtagagcaagaagttggatcagccactc

SEQ ID NO: 279392 - DNA, 269 bp, Glycine max
  unsure (1)..(269): unsure at all n locations
gnctccaacaacaacacttccgctgcgaaaaatgtctctggtggcgaacgaggattccagcacattctgcgtgtgctgaacaccaacgtggatgggaagcagaagataatgttcgcaatgacctccatcaagggtattggaaggagattcgccaacatcgcttgcaagaaggctgatgttgacatgaacaaaagggctggtgagttgactgctgctgagttggatagtgtgatgactgtggtggcgaaccctaggcagttcaagatccc

SEQ ID NO: 279393 - DNA, 271 bp, Glycine max
ggtttgaatgacattcttagtttatcagataaaaaaccagataaagtatcagataaaaaacaagatatagttgaaggtgttcagggtatagtgaaattcgcaaaagagttcttggatcttattgatgctgcagatgctacagcacagagtgaaattgcccgtgaggctctcaagaggttagctgcagctggttcggtgaaaggtgctttagaaggtcatgaattgagaggattagcattacgccttgcaaatcatggagagttgactcggc

SEQ ID NO: 279394 - DNA, 269 bp, Glycine max
  unsure (1)..(269): unsure at all n locations
taattctgcgtggtgagtgaaaatggcggtacccttgctctccaagaggatcgngaagaagcgcgtcaagaagtttatacgcccccagagtgatcgcaagatctccgtcaagccaagctggcgcagacccaagggtattgattctcgtgtcaggagaaagttcaaaggatgcactttgatgcccaacattggttatggctcagacaagaaaacccgccattatctaccaaatggtttcaagaaatttgtcgtgcacaatgtgaaagacc

SEQ ID NO: 279395 - DNA, 266 bp, Glycine max
  unsure (1)..(266): unsure at all n locations
tcccctataacatgagtggatatgcattttttgttgtcgggatggattttggtgattggtctgagaatagcaggggtacatataacaagtgggatggnatagctcgcactacagcacaggtctatcccggagcatggacagcaattttggtttcccttgacaacgtaggagtttggaatctcagaacagaaaaccttgattcatggnatcttggtcaagaaacatatgtcagggttgtcaacccagaggtcaataacaagactgag

SEQ ID NO: 279396 - DNA, 266 bp, Glycine max
ggttttctcaacctattctgacaaccagcctggtgtgttgatccaggtttatgaaggtgagagaacaaggactagagataacaacttgttgggcaaatttgaactttctggcattcctccagctcccaggggtgttcctcaaatcacagtgtgctttgacattgatgccaatggtatcttgaatgtctctgccgaagacaaaactaccggccaaaagaacaagatcaccattaccaatgacaagggtaggttgtcaaaggaagaga

SEQ ID NO: 279397 - DNA, 267 bp, Glycine max
  unsure (1)..(267): unsure at all n locations
gtgtctctgaaacttcagangcggcttgccgctagcgttctcaagtgtggtagaggcaaagtttggctttgacccctaatgaggtcaatgaaatctccatggctaattctcgacaaaacataaggaaattggttaaggatggtttcattatcaggaagccaactaagattcattcccgttcccgtgctcgcagaatgaaggaggccaagaggaagggacgtcactctggttatggtaagcgtaagggtacaagagaggctaggctcc

SEQ ID NO: 279398 - DNA, 269 bp, Glycine max
  unsure (1)..(269): unsure at all n locations
aggattggatttgagtggcaacaataggaagaagaaggacaagaaagggtttgagagagttctgaagattgctgaaaagcttggnttgagtgtacaaagaagcatcaaaacatgatctgaatatggtggctgataaccgtccccatcagggtttggttttagacgcttcacagctagagatggtgaaagtaaatgaactggatcctgtttctattgatgaagggaagggttccctttgggtagccttggatgaggttactgatcctcag

SEQ ID NO: 279399 - DNA, 268 bp, Glycine max
ggtgaactgtggtattggagatgctgcgcaaaatgcaaagggtttggacgcggcaataagtgatctagcactgatcacagggcagagacctattaagactcgggccagggcttctcttgccacttttaagatcagggaaggtcaaccgcttgggattgctgtgacactaagaggaaatatgatgtattcattcctagaccgagttatcaacctgggacttcctaggacaagagatttccaaggtgtgaaccccaacagctttgatggg

SEQ ID NO: 279400 - DNA, 269 bp, Glycine max
  unsure (1)..(269): unsure at all n locations
gtacacacactcggttctgccttcacaaaaaaattatcgagatcccctttttctcctaaganaagccatggctaagggtcccggtctctactctgacatcggnaagaaagccagggatctgctgttcaaggnctaccacagtgaccagaagttcaccatcaccacctactcacccactggagttgctataacagcatcaggaaccaggaaaagtgaactgtttgtggctgatgtcaacacccngntgaagaacaaaaacatcactactg

SEQ ID NO: 279401 - DNA, 263 bp, Glycine max
cgggggccccggaaagagttatcttttctgtttaacagcctgcccaccctggaaacggctcagccggaggtagggtccagcggctggaagagcaccgcacgttcgcgtggtgtccggtgcgcccccggcggcccttgaaaatccggaggaccgagtgcctcccacgcccggtcgtactcataaccgcatcaggtctccaaggtgaacagcctctggtcgatggaacaatgtaggcaagggaagtcggcaaaatggatccgtaa

SEQ ID NO: 279402 - DNA, 263 bp, Glycine max
  unsure (1)..(263): unsure at all n locations
cgattttataaggactggtgtaaatctaaaaagaaggcttttaccaaatattcaaaaaatatgaaactgaggaaggaaaganagatattgaatctcagcttgagaaattgaagaagtatgcaactgtcattcgtgttctggctcatactcagataaggaagttgaagggtctaaaacagaagaaagcacatttgatggagatccaagttaatggtgggacagttgaccagaaggtggactatgcatatagcttcttcgagaag

SEQ ID NO: 279403 - DNA, 261 bp, Glycine max
  unsure (1)..(261): unsure at all n locations
ctcttaccttgggttcacagcaagcctgggttttatcttgtcttngggagctccaatgtggatgaagggttacgtggttacttgaccaagtatgattgcagctcagcagatataaatccaattggtagtataagtaagcaagaccttcgggcattcttgcaatgggcagccatccatcttggttactcatctttggcagatattgaagcagctccacccacagctgaactggagcctatacgttctaattacagtcagctt

SEQ ID NO: 279404 - DNA, 262 bp, Glycine max
  unsure (1)..(262): unsure at all n locations
gtgacaagagtgtgaactgcaaaggggcttctccagcctagtttgntctcagatcttcttccttccatggaccagtaacgagaaggtggagaagatnggcgagggacnatacggcgtcgtttacaaggntngcgacggcgcnaccaatgagacaatcgctctgaagaagattcgcntcgagnaggaggacgaaggcgttcccagnaccgcnattcgcgagatttctcttctcaaagagatgcngcataggaacattgttagg

SEQ ID NO: 279405 - DNA, 259 bp, Glycine max
aacgcttcgggctgctaccgcaagcaagaatagcaaggccagttactatactcttcacatgaatgcttcaggtcatttggagctacattgggaaagtggtgttatctactggacaagtgaaaacccttctgcttcaaatctccgtgctttccttacagccagtggagcactagagcttcaagaccgaagcttgaaacctgtttggtctgcatttggagatgatcacaatgattctgtgaagtacagatatcttcggctt

SEQ ID NO: 279406 - DNA, 259 bp, Glycine max
gcagaactggagagatctttatctgagactgatcgagctcgagcaatttttgagcttgcaatcgctcaaccagctttggacatgcctgagctgttgtggaaggcatacattaactttgagactgctgagggtgaatttgagagagcaagagcactttatgaaaggcttcttgatcgaacaaagcacttgaaggtatggttaagttatgcagaatttgaggcaacagctatggatatggacagtttagacttaccagaag

SEQ ID NO: 279407 - DNA, 258 bp, Glycine max
caagatcgttgtagagaaatccacagtcccggttaaaacagctgaggcaatagagaagattctgacccacaatagcaagggaatcagattccagattttatcaaaccctgaattccttgctgagggaactgcaatcaaagatctctttaacccagaccgtgttcttattggaggcagggaaaccccagagggccaaaaagctattcaagcattgaaggatgtttatgctcaatgggtccccgaagaaagaatactaac

SEQ ID NO: 279408 - DNA, 258 bp, Glycine max
  unsure (1)..(258): unsure at all n locations
cnaagaatcaaagaaaggggtggtggctgcttcgaaagcttaataatttgtttatttccagaacatcatagttttcgcagcagcaaactaacaaattactcatatcatataataagatggcccgttctctctcgcaagccaaacgtattggtgtcctgttgctcaatctatctccctaattcccgttcatcggcgaggttacgcagtgggcatccgatgtatcggtaagagttggattgggtaatattgggcgaagga

SEQ ID NO: 279409 - DNA, 257 bp, Glycine max
gggatgagactattgatgcagaagtactgaattccatggcagttacaaatgagcatttccagactgcccttggaacaagcaacccatcagctttacgtgaaactgttgttgaagtgcctaatgtcagctgggaagacattggaggccttgaaaatgtcaagcgtgaactgcaagagactgtacaatatccagttgagcacccagaaaagtttgagaagtttggtatgtctccatctaaaggagtacttttctatggt

SEQ ID NO: 279410 - DNA, 260 bp, Glycine max
aggactttaggtttggaattgggaattagggttgttcgcgtcacgaagatgatccgaggtggtgttgaacgttcgattgggggaagaaggtgcgcgtgaagtgcaacgacgatgacaccatcggcgacctgaagaagctggtggcggctcagacgggcacaagagccgacaagatccgcatccagaagtggtacaccatatacaaggatcacatcactctcaaggattacgagatccacgacggcatgggtctcgaactc

SEQ ID NO: 279411 - DNA, 261 bp, Glycine max
cctacctctccctttcaagatgcagatctttcgtcaagaccctcaccgggcaagaccatcaccccttgaggtggaaagctctgacaccatcgacaacgtcaaggccaagatccaggacaaggaaggaatccccccggaccagcaacgtctcattttcgccggaaagcaacttgaggacggccgtacccttgctgactacaacattcagaaggagagtactcttcacctcgtcctccgtctccgtggtggcatgcagatttc

SEQ ID NO: 279412 - DNA, 259 bp, Glycine max
gggagtgtcaagagataccaatgcccatcacaatgctcgaggagatgtagccagacccaataccacaagccctgcatgtttttctgtcagaagtgctgcaggaaatgcctgtgtgtgcccccggggtattatggtaataaagctgtgtgcccttgctacaacaactggaagaccaaggaaggaggacccaagtgcccttgaacttcaacttcatcaaattgttgctttcactatatttttatcatctcccttgggccaa

SEQ ID NO: 279413 - DNA, 256 bp, Glycine max
  unsure (1)..(256): unsure at all n locations
tgaagaatgtggaattggagttgacaattctggttctgagggnggcggttaacgttgggcagcatagggtcttgatattcgctcaacataaggctttcctggatataattgaaagagatttgtttcacacacacatgaaaagtgtcacatatttgcggttggatggatcagttgagccagaaaagcgttttgaaattgtcaaagctttcaattcagaccctaccattgatgtcttgctgcttacaacacatgtcgg

SEQ ID NO: 279414 - DNA, 255 bp, Glycine max
aagaaaaaagagaaacaaatggcagcactgggtggctttaccgacatcaccggagcacagaacagcatcgatatcgaaaatctcgctcgctttgctgttgatgaacacaacaaaaaagagaatgcagttctggagtttgtgagggtgattagtgcaaagaaacaagtggtttctggcaccttgtactatatcactttggaggcaaatgatggtgtgacgaaaaaggtttatgaaactaaggtgttggagaaacca

SEQ ID NO: 279415 - DNA, 255 bp, Glycine max
agaatcaaagaaaggggtggtggctgcttcgaaagcttaataatttgtttatttccagaacatcatagttttcgcagcagcaaactaacaaattactcatatcatataataagatggcccgttctctctcgcaagccaaacgtattggtgtccttgttgctcaatctatctccctaattcccgttcatcggcgaggttacgcagtggcatccgatgtatcggtaagagttggattgggtaatattgggcgaagga

SEQ ID NO: 279416 - DNA, 255 bp, Glycine max
gaagaaggctatggaagatgctggattacagaagagtcagattgatgagattgttcttgttggtggaagcacaaggattccaaaggtacaacaacttttgaaggactactttgatggaaaggagccaaacaagggtgtcaaccctgatgaagcagttgcctatggtgctgcagtgcaaggaagcattttgagtggagagggtggtgaagaaaccaaagatatccttctcttggatgtggctcccctcacccttgg

SEQ ID NO: 279417 - DNA, 252 bp, Glycine max
acaggatggtcaaccactttgttcaggaatttaagagaaagaacaagaaggatatcagtggcaaccccagagcacttaggaggttgaggactgcctgtgagagggcaaagagaactctatcttcaactgcccaaaccaccattgaaattgattctctctatgagggaattgatttctactccaccattactcgtgctagatttgaggagctcaatatggatctcttccgcaagtgcatggaaccagttgaga

SEQ ID NO: 279418 - DNA, 254 bp, Glycine max
cagatgcagggcttcttccactccttgagagttccgaggctggtttggttaaagtgaaccttagtggttgcacaaacattaccgacaaagtagtttcatccttggccaatctgcatggttggactcttgagaatctaaaccttgatggttgcaaaaatatcagtgatgctagcttgatggcaattgctgaaaactgtgcattgctatgtgatcttgatgtctccaagtgcacaatcactgatgctgggattgca

SEQ ID NO: 279419 - DNA, 258 bp, Glycine max
cgggagaagtaatcgagctttcagcaatggtgtacgtcaagggctcagaaatcaaaagcctactttcaagagatatcaagtcaagttcaagagaagaagagagggaaaaaccgattaccgtgccaggattcggttgattaatcaggacaagaacaaatataacactccgaaataccgatttgtggttcgctttgtatccttttcttatcgatatcttaattagcttaattcaggcatgaagaaatgatttgggagtgt

SEQ ID NO: 279420 - DNA, 256 bp, Glycine max
  unsure (1)..(256): unsure at all n locations
cactgagaggnagagggagtgagagagagtgttcttcgtttgctaccttctcccagaaatggttacgttcaggtttcaccagtaccaggtggtcgggagggctctcccaacggaagcagatcagcatccgaagatctaccgaatgaagctctgggccaccaacgaggttcgcgccaagtctaagttctggtattttttgaggaagctgaagaaggtgaagaagagcaatggtcaagttcttgctatcaacgagatt

SEQ ID NO: 279421 - DNA, 256 bp, Glycine max
  unsure (1)..(256): unsure at all n locations
gtaagagtgaaaaanccttctcttttccttctctcaagtctcaagagatttcatcatggctccaaagaaggacaaggctccaccaccttcctccaagcccgccaaatctggcggtggcnnnnnnnnnnnnnnnnnnnnnnnnnnnggaaagcaaaaggagaaggtgaataacatggtgctgtttgatcagggcacctatgataagctcctttctgaagctcccaaattcaagctcatcactccttccattctttct

SEQ ID NO: 279422 - DNA, 251 bp, Glycine max
  unsure (1)..(251): unsure at all n locations
ggnaacattgtatgtgcagaattcacataatcataagaacctggttcagtatctgcataactatgttgaaatgattgcagggaaatatactttctggaacagaactggaggcgctgatcattttcttgttggttgccatgattgggcccctggagaaactaaggttgacatggctaattgcatacgatccctttgtaatgctgatgtgaaagaaggattgtttttgggaaggatgcatctcttcccgagac

SEQ ID NO: 279423 - DNA, 254 bp, Glycine max
cgcacgccgaaaccatggccggaaaaggagagggtcctgctatcggaatcgatctcgggaaccacctactcttgcgtcggtgtgtggcaacatgaccgcgttgaaatcatcgccaacgaccaagggaacagaaccacgccgtcttacgtcggattcactgacaccgagcgtctcatcggtgatgcggccaagaatcaagtcgccatgaaccccatcaacaccgtcttcgatgccaagaggttgattggtcgtag

SEQ ID NO: 279424 - DNA, 250 bp, Glycine max
  unsure (1)..(250): unsure at all n locations
gnatttgattctcttatttcttagtttattgcgatggattcgagttcaacccaggaattcgaatatttgtttaagttgttgatgattggggactcaggtgttggcaagagtagtctcctcctctgtttcacatctgattcctttgaagatctttctcccacaattggtgttgattttaaagtcaagtatttgacaatggaaggtaaaaagctgaagcttgccatttgggatacagctggtcaagagagat

SEQ ID NO: 279425 - DNA, 252 bp, Glycine max
gtttgatgatgaggatgaggttgtggatttggaaacaatcgcgacttgctttccctacctgagccatttatctctgagttatgatgtgagggatggagtgctttactatggtttacaaggctcttcctatctggagagtgttgttgtcttggagcttggctggactgtgatcaatgatcttttctcccactgggttgagggtctgctcaagcgttgccccaatctgaagaagttggtcattcatgggattgt

SEQ ID NO: 279426 - DNA, 252 bp, Glycine max
ccacatacctttgtcattattagtcttgatccccctattcgaaagggacaaactttgtaccctcatattgtgatgcagtttgaaactgattatgttgttgaaagtgaattggcaataaatgaagatctttataacacaaagttcaaggacaagttggagctgtcttataagggtcttattcatgaagtgttcaccacaatattacgtggtttgtctggtgccaaagtgaccaagcccggaaaatttaggagt

SEQ ID NO: 279427 - DNA, 251 bp, Glycine max
ttttactacgaaatccttaactctcccgatcgtgcctgcaaccttgcaaaacaggcttttgatgaagctattgctgaattggatacactgggagaggagtcatacaaggatagcactctgatcatgcaactccttcgtgataacctcaccctttggacctctgacatgcaggatgatggagcagatgaaattaaagaagcagcaccgaaacaggatgaccagtaaaaatattttactgctaattagaattg

SEQ ID NO: 279428 - DNA, 248 bp, Glycine max
  unsure (1)..(248): unsure at all n locations
ccaagttgtgaanggcatggtctactcattaacattcagtgcctcacgcacttgtgctcaagaggagaagctcnacgtgtcagtggtgccatccaatgagaagagtgattggggagtgttcccattcaaactatgtatggaagcaatggttgtgactcttatgcatgtgggttccgagcagattaccctcgagtggaaattgtgatccataaccctggcgtggatgaggatcctgcttgtggtcctct

SEQ ID NO: 279429 - DNA, 247 bp, Glycine max
  unsure (1)..(247): unsure at all n locations
ctctcaacaacttcaccttcttcctcctcgatcatgtctcacttcaagggcaagtaccatgatgagcttatcgccaatgctgcgtacattggcactcctggaaagggnattcttgctgctgatgagtcaacagggacaattggcaagcgtttggccagcatcagtgtagagaacattgaatccaacaggcgagctcttagggagctgcttttcactgctcctggtgttcttcaatatctcagtggtg

SEQ ID NO: 279430 - DNA, 251 bp, Glycine max
cacccatcttgggaggtgaggattttgataacaggatggtcaaccactttgttcaggaatttaagagaaagaacaagaaagatatcagtggcaaccccagagcacttaggaggttgaggactgcctgtgagagggcaaagagaactctatcttcaactgcccaaaccaccattgatttctactccaccattactcgtgctagatttgaggagctcaatatggatctcttccgcaagtgcatggaaccagtt

SEQ ID NO: 279431 - DNA, 255 bp, Glycine max
  unsure (1)..(255): unsure at all n locations
gggtcactcnttcnttctcttgcgggctagggntttagcgcantttctttctagattttaagggagatgggtaaggaaaaggttcacatcagtattgtggttattggccatgttgactctgggaagtccactaccactggccacctgatctacaagcttggaggcattgacaagcgtgttattgagagatttgagaaggaagctgctgagatgaacaagaggtctttcaagtatgcctgggtgcttgataagctt

SEQ ID NO: 279432 - DNA, 249 bp, Glycine max
agaccacaaagtactactgcacagtcattgatgcccctggacatagggatttcatcaagaacatgattactggaacatcccaagctgactgtgctgttcttattattgattccaccactggtggttttgaagctggtatttccaaggatggacagactcgtgagcatgctctccttgcattcactcttggtgtgaggcagatgatttgctgctgcaacaagatggatgccactacacctaagtactcca

SEQ ID NO: 279433 - DNA, 248 bp, Glycine max
  unsure (1)..(248): unsure at all n locations
cgtgcgtgcgattctcctgatatccaaggtgaagcacngacaccggacctatctccggcgaatccccagtccccactttcttccttcgaaatgaatcccgagtatgattatctgttcaagctccttcttattggagactctggtgttggtaaatcatgccttcttctgagattttctgatgattcgtacatcgaaagctacataagcaccattggagttgattttaaaatacgtaccgttgagcaaga

SEQ ID NO: 279434 - DNA, 249 bp, Glycine max
caaatggcttctcacgacggcatctccgctgcttcttcagattccgtcttcaatcacctcgttcgtgctcccgaagatcctatcctcggggtaactgttgcttataacaaagatccaagtccagttaagctcaacttgggagttggtgcttaccgaactgaggaaggaaaacctcttgttttgaatgtagtgaggcgagttgagcagcaactcataaatgacgtgtcacgcaacaaggaatatattccg

SEQ ID NO: 279435 - DNA, 247 bp, Glycine max
gtttcacgatattggcaggagactggtacaagagaaatcacacagatttgagggctattttggatggtggaagtgaccttcccttcccagatgggattatcatcaatggacgtggttccaatgcctacacatttacagttgatcaaggcaagacgtacagattcaggatatcaaatgtgggactcacttcttccatcaactttagaatccaagggcataaaatgacaattgttgaggtggaagggac

SEQ ID NO: 279436 - DNA, 248 bp, Glycine max
cacccttctaatatcgaaacccccaagatctcttttggtgctaaggatgttgatgtgacggaatggaaaggggacattctggcagtgggtgttacggaaaaagatttggctagagatgcaaactcgaagtttgagaatgtgattttgagcaagattgactcaaagttgggtggtttattagctgaagcctcttctgaagaggatttctctggcaaagttggtcagtcaactgttcttagaattacagg

SEQ ID NO: 279437 - DNA, 245 bp, Glycine max
  unsure (1)..(245): unsure at all n locations
ccgtactgggcgtgcagganaagagggtacagccattttgttgtacaccagtagccagaggagaacagttagatcccttgagcgtgatgtagggagcaaatttgaatttgttagtccaccagctgtggaagagattttggagtcatctgctgagcaagttgttgctacactaaatagagttcatcctgagtctgttgaatttttcactgcaactgcacaaaaactggttgaaggaccaggggcca

SEQ ID NO: 279438 - DNA, 245 bp, Glycine max
gattagtgagcccaagaggccctctgacaagcccctcaggcttccccttcaggatgtgtacaagattggaggtattggaactgtgccagtgggacgtgttgagaccggtgtcttgaagcctggaatggtggtgacttttgcaccaactggactgacaactgaagtcaagtctgtggagatgcaccatgaatctcttacagaggcacatcctggtgacaatgtgggattcaatgttaagaatgttg

SEQ ID NO: 279439 - DNA, 246 bp, Glycine max
tcttcgacctcgcatcgcacctttcaacttaacctattccacttgtaatcgtaaacgctttgctagaagaagagacaaagtgtgtctgtgtgtgtgagagagagagcaatggctggctcgtgggcacgccgttctctgattgttctagccatcatttccttcggatgtctatttgcgatttccattgctaaggaggaagccaccaagttagggacggtcatcggcattgatcttggaacaactatt

SEQ ID NO: 279440 - DNA, 307 bp, Glycine max
cagcacaaacttttttgtcttctgatgttggaggagggtgaagaaagctataacttggaattagaagttccggttacaaatcgtccctacccccaccaccatcgtagaaagaaagtgttagctaaagatataccaaaagggtttttgccaatcaaggtagggcaggtgaagaacaacaaaaaattgtgatgcctattgtgtacctcaaccaccctttgttttctcagctactcaaggaggcagaggaagagtatggttttgatcaacaaggaaccataattatcccttgccatgtgaaggacttagg

SEQ ID NO: 279441 - DNA, 304 bp, Glycine max
  unsure (1)..(304): unsure at all n locations
gagantttcttgggcaccaagttcttctcggtggccaaaagtggaggttcaggcattgataaagcttcggacgagcatggatgagaagtatcaagagaatggaccaaaggntcctctctgggaggagatctcagcctcaatgaagaagctcgggtacaacgaaacgcgaaaaggtgcaaagagaaatgggagaacatcaacaagtacttcaagaaagtgaagganagcaacaagcggnagaccggaagattccaagacgtgccttatttccaccaantggacgcgctgtacaggcagangcaca

SEQ ID NO: 279442 - DNA, 306 bp, Glycine max
  unsure (1)..(306): unsure at all n locations
anggaccacatcaagggtcttgttgtcgactttttctcggcaggnacagactcnacagcggtggcaacagagtgggcattggcagaactcatcaacaatcctaaggtgttggaaaaggctcgtgaggnggtctacagtgttgtgggaaaggacagacttgtggacgaagttgacactcaaaaccttccttacattagagcaatcgtgaaggagacattccgcatgcacccgccactcccagtggtcaaaagaaagtgcacagaagagtgtgagattaatggatatgtgatcccagagggagcattg

SEQ ID NO: 279443 - DNA, 306 bp, Glycine max
atcaaagaaaggggtggtggctgcttcgaaagcttaataatttgtttatttccagaacatcatagttttcgcagcagcaaactaacaaattactcatatcatataataagatggcccgttctctctcgcaagccaaacgtattggtgtccttgttgctcaatcttctccctaattcccgttcatcggcgaggttacgcagtggcatccgatgtatcggtaagagttggattgggtaatattgggcgaaggaatggaatcgtgggaggtgtagaagagaagcctgatacaagagatggtcaaaagcc

SEQ ID NO: 279444 - DNA, 307 bp, Glycine max
  unsure (1)..(307): unsure at all n locations
atctttttagggtttcatttcatggactccgattcctggatttccacgcgcctctcttcntnttcacgccgccaccattatcgatctgatctgtacgcgcnngagagtgaagggaacgatgatttcagggcggagtttctatgccctttctgcgccgaggattacgacgtcgtttccctctgttgccacattgacgaccaccaccctatccaagccaaaaacggggtgtgtcccatttgtnggaagaaggtgggagtggatctcgttggacattttactacacaacatgggaattcttgagggtgca

SEQ ID NO: 279445 - DNA, 307 bp, Glycine max
  unsure (1)..(307): unsure at all n locations
gatctagagtcttcagtttctcctcgttgttcttcgctttcctgttttcaatttcgattctttcgntaatttaataagatgtntnnnagggcaccgaagaagagcgataatacgaggtactacgaaatcctcggcgtctccaagaacgcttcgcaggatgattgaagaaggcttacaagaaagccgccattaagaatcaccccgacaagggcggtgatcccgagaagtttaaagagctggcgcaacttatgaggttctgagtgaccctgagaagcgtgagatatatgatcagtatggtgaagatgcg

SEQ ID NO: 279446 - DNA, 309 bp, Glycine max
  unsure (1)..(309): unsure at all n locations
gagattgtgaagtagaaatcggtgcaaganattctccactttatctaaaaaaattcggtgagtttgtgaagacaaaaaatcactagctactcaaaaatggccacagtaggaaggaacgttgcagctcctttgctgtttcttaacttgatcatgtattttattgttcttggctttgctagttggtgcctcaacaggttcatcaatggccaaacttaccaccctagttttggtggaaaggtgcaaccatgtttttcttaaccttctccatactagcagctgttctgggcatcgtgtccaaacttttgggtg

SEQ ID NO: 279447 - DNA, 308 bp, Glycine max
cacttcaattcaaaggccatagtgatactagtgattaatgaaggagatgcaaacattgaacttgttggcattaaagaacaacaacagaagcagaaacaggaagaggaacctttggaagtgcaaaggtacagagctgaattgtctgaagacgatgtatttgtattccagcagcttatccatttgtcgtcaacgctacctcaaacctcaatttccttgcttttggtatcaatgctgagaacaaccagaggaacttccttgcaggcgagaaagacaatgtggtaaggcagatagaaagacaagtgcaggag

SEQ ID NO: 279448 - DNA, 301 bp, Glycine max
cttttttctctttaccctccgccatggctgaggataaggagatgttctcctctgtcaccaatgggcgatgattctctcactggccacatcatatctacaactattggaggcaaaaatggggaacccaaacagactattagttacatggctgaacgggttgaggaactggatcatttggaattgttttccaggcaaaatgtttggaaactggggaagcagtggccattaaaaaggttttacaagacagaagatacaagaatcgtgaactacagttaatgcgtgttttggatcatccaaatgt

SEQ ID NO: 279449 - DNA, 302 bp, Glycine max
  unsure (1)..(302): unsure at all n locations
cacaatcttcattcatcactgaaaccaaagccacaagctgcgacatcagaaagacattggcgagaatggaagacagtattgaccacttggctttcgagaggnacaaggcgcagttcgatgttgacgagatgaagatcgtttgggcgggttctcgtcaagatttgagctttccgatcggatttctcgccttgttgccagcgatccggccttcagaaaggatgacagaaccacgcttggtaggaaggagttgtttaaaaacaccttgagaaaagcagcttatgcatggaaaaggatcaacgagc

SEQ ID NO: 279450 - DNA, 305 bp, Glycine max
  unsure (1)..(305): unsure at all n locations
atttttgtcgtggttacgacggtgacactaacaagcaacatgatgctactggtgtttatncccggaatagacattggtagagatcatgggactaccggtgtttatggcctaaacaccgacagacatcatggaacttctggggtgaatcccgggatagacaccataaccaacaacatgggactaccgttggttatgctggtgacactggaaggcagcatgggaatacaggtggcctttactatggaaccgacaccgcggacacaggaaccggtcctanaagtggaaacaccggtggcaccggttat

SEQ ID NO: 279451 - DNA, 305 bp, Glycine max
  unsure (1)..(305): unsure at all n locations
ttganttctccagagagaagaagaaacttaatcgatcatcacttcacttcactaatacatcatgggcagacgagacccagaacaagtatgagagctctgaggttgaggtccaggatcgtggtgtttttgactttctcggtaagaaaaaggatgaagaagacaagcctcatcctcaggaggnggtcatcgccaccgagtttcaaaaagtcactgtctcagaccaaggagagaacaagcacagcctcttagaaaagcttcaccgatctgacagcagctctagctcttcaatnaggaggttgagaaga

SEQ ID NO: 279452 - DNA, 305 bp, Glycine max
  unsure (1)..(305): unsure at all n locations
cngccataagacgcctcacctatgatagctcagtggccatggttcccttcggacttactggaagttcgtgaggnagctcatcatgaacgaccttctcaacgccaccactgtaaacaagttgaggcctttgaggacccaacagatccgcaagttccttagggtatgggcccaaggcgcagaggcacagaagccccttgacttgaccgaggagcttctgaaatggaccaacagcaccatctccatgatgatgctcggcgaggctgaggagatcagagacatcgctcgcgagttcttaagatctttgg

SEQ ID NO: 279453 - DNA, 309 bp, Glycine max
  unsure (1)..(309): unsure at all n locations
caccagaattgttcaagctcttcctccaaacgcacgagggcaacttccttcaacacaaggttccaaacctcagccataagacgcctcacctatgatagctcagtggccatggttcccttcggaccttactggaagttcgtgaggnagctcatcatgaacgacttctcaacgccaccactgtaaacaagttgaggcctttgaggacccaacagatccgcaagttccttagggttatggcccaaggcgcagaggcacagaagccccttgacttgaccgaggagcttctgaaatggaccaacagcaccatct

SEQ ID NO: 279454 - DNA, 313 bp, Glycine max
atcacacacaactactacaagtacttccttacaatcaaaaccaacaacaaactatgggcaagttatcaaaagcactacgatgatcagggtcgcaaggttgacgagtatggcaacgttgagaagcaaaccgacgaatacggcaaccctgttcatgctgctagtgtcactatgtagccaccagaactgctgctggtggttacagtgatgacattaataagcaacatgataccaccaatgcctacggcgtagacactggtagacagcattctagtggtggctacgatggtgacactaataaacatcatgggaacta

SEQ ID NO: 279455 - DNA, 304 bp, Glycine max
  unsure (1)..(304): unsure at all n locations
aaagaggcttctgatcatgccaatgacatggctcggaagaccaaagactacgcccagtgnacactgctccagagaaccaaggaaaaactccaagacattgcatctgaggctggtcaatacagtacagagaaggccagagaaatgaaggatgcagcagcagaaaggctagtgacattgcaaaggctgcaaagcaaaaatcacaagagctgaaagacaaattaggtggacaacaccgggatgctgagctttgagaattgagacggtttttaatcactttgtaccttttantatgccacaatagttg

SEQ ID NO: 279456 - DNA, 303 bp, Glycine max
  unsure (1)..(303): unsure at all n locations
acacaactactacaagtacttccttacaatcaaaaccaacaacaactatgggcaagtttatcaaaagcactacgatgatcagggtcgcaaggttgacgagtatggcaacgttgagaagcaaaccgacgaatacggcaaccctgttcatgctgctagtntcactatgtagccaccagaactgctgctggtggttacagtgatgacattaataagcaacatgataccaccaatgcctacggcgtagacactggtagacagcattctagtggtggctacgatggtgacactaataaacatcatgga

SEQ ID NO: 279457 - DNA, 303 bp, Glycine max
  unsure (1)..(303): unsure at all n locations
caaaagtgttccacttgagtgaaaagtagtgtgttaagaactaaacaatttttccaatggcgtccaagaaacaagaggagcgagctgaggcagctgcgaaagttgctgccaaagaactcgaacaagtcaacagagaaagaagagaccgtgatttcggtntgttgctgnnnnnnnnnnnnnnnnnnnnnnnnnngatcaacaaaaacgtggtgtaatcgggtccatgtttaaggcggtgcaagacacctacgagaacgccaaggaagctgtcgttggcaaganagaagctactaataacgcgta

SEQ ID NO: 279458 - DNA, 298 bp, Glycine max
ttggaaactaaggcctaatcaaaatggtgaagttcacagctgaagagctacgtcgtattatggactataagcataatatccgtaatatgtctgtcattgctcatgttgatcacggaaaatcaaccctcactgattctcttgtggctgctgctggtatattgctcaagaagttgccggtgatgtccgtatgactgatacccgtgcagatgaagctgagcgtggtattaccatcaagtctacaggtatctcactctactatgaatgactgatgaagctcccaagagtttaagggagagcg

SEQ ID NO: 279459 - DNA, 295 bp, Glycine max
atcagttttttacttgaattttcttcatccttctctgttctcctagaacttgattacttgaacattccctatgacagatgaggtggttcttctggatttctggccaagtccatttgggatgagggtcaggattgcacttgctgaaaagggtatcaatatgagtacaaagaagaggacttgaggaacaagagtcctcttctcttacaaatgaacccggttcacaagaagattccggttctcatccacaatggcaaacccatttccgaatccctcatgctgttcagtacattgagga

SEQ ID NO: 279460 - DNA, 292 bp, Glycine max
  unsure (1)..(292): unsure at all n locations
gcgaggccagcngcgtcttcctcgacactttgcttgaattcgctgaggacgagaccatggagatcaaaattaccaaggagcaaatcaagggccttgttgtcgactttttctctgcagggacagattccacagcggtggcaacagagtgggcatggcagagctcatcaacaatcccagggtgttgcaaaaggctcgtgaggaggtctacagtgttgtgggcaaagatagactcgttgacgaattgacactcaaaaccttccttacattagggccattgtgaaggagacttccg

SEQ ID NO: 279461 - DNA, 299 bp, Glycine max
  unsure (1)..(299): unsure at all n locations
attccaaagcccttgtttcactttttccaatccgatatggccgccgcgaccgcncttgctccgctctctccgccgccgcgaccttccctcgtcttctctctccgcctttcgttcgttgacgagtggcacaaagacatcatatgtagggaacaagtgggcaagtttgtctcggccgttcagttcaaagcctgctggtaatgatgtcattggaattgatctgggtactaccaattcatgtgtttctgttatggagggaaagaatcccaaagttattgagaattctgaaggagctcgaacaa

SEQ ID NO: 279462 - DNA, 301 bp, Glycine max
ttcacccttggtgtgaaacagatgatttgctgctgtaacaaaatggatgctactacacccaagtattccaaggccaggtatgatgaaattgtgaaggaagtctcttcctacttgaagaaagtaggatacaaccctgacaagattccttttgttcctactctggttttgagggagacaacatgattgagaggtccacaaaccttgactggtacaagggtccaactctgcttgatgcacttgaccagattagtgagcccaagaggccctctgacaagcccctcaggcttccccttcaggatgt

SEQ ID NO: 279463 - DNA, 297 bp, Glycine max
  unsure (1)..(297): unsure at all n locations
tngacaacaatgtacgagaggttcgagccctgttaaacggggcacagaagctacttggtattttgatagctgttggtgaggcattgcctatgttctttcggggatgtatggcagtgtggggcaacttggagtagggaatgccatcctcatcatcaccagctatgttttgcgggtataattgtgatatgtctagatgagcttcttcaaaaaggatatggtctggggtctggaatatccctattcatgcaaccaatatctgtgaaaacattatatggaaggcattagtccaaccaccat

SEQ ID NO: 279464 - DNA, 300 bp, Glycine max
gttgtggttattggtgggggtgacacgggcacagattgcatagggacatccatttcggcatgggtgtagtagcattgtaaatctggaacttctccctcagccaccacaaactagggccccaggcaacccttggccacagtggcctcgcatataccgagtagattatgggcaccaagaaggtgcggcgaaatttgggaaagatccaagatcttatgaggtattgactaagcggtttgtgggagatgaaaatggagttgtgaagggacttgaagtaatacgtgttcgctgggagaaggatga

SEQ ID NO: 279465 - DNA, 300 bp, Glycine max
  unsure (1)..(300): unsure at all n locations
cnctgctaaagctattgaaggcgatttcaagcctggccaaagttgcttaatcattgaggatttggttaccagtngcacgtcagttttggaaactgcggcgccattgcgtgctgtgggattaaagatcagtgatgctgttgtgttgatcgatagagacaaggtggcagagaaaacttggaggagaatggcatcaagctgcatgcaattattaaattgactgaaatggtgaaaatttgggcaatcacgggaagcttgatgaagagatggtaggggntgttacgaattcttagaggataatcg

SEQ ID NO: 279466 - DNA, 302 bp, Glycine max
gtttgatgcggttcactttacctatgaagtgggtctggtggaaaagttccctcctgttcccttgttgaagtcttttctcaaggatgctaagaaagttgcggcttctattttggaagatcctaataatgcaggccgagctgcgtacctagctgcaaggaagagcagtctgcactcagggctgtgattaaatgcattgaagaatacaaacttgaggatgagttccctccagaaaatctgaagaagcgattgaccagttagagaaggtgaagaccgagaaaaggaaaccagtggcagttctgcca

SEQ ID NO: 279467 - DNA, 253 bp, Glycine max
  unsure (1)..(253): unsure at all n locations
ttgttgtttgtgtgtttgttttttctctcacctgaaaatgtcttgctgcggtggtaactgtggttgcggaagcncctgcaagtgcggcaacggctgcggaggctgcaagatgtacccagacttgagctacaccgagtcaaccaccaccgagaccttggtcatgggagtggcaccagttaaggctcaattcgagagtgctgaaatgggtgttcccgctgagaacgatggctgcaaatgtggagctaactgcacc

SEQ ID NO: 279468 - DNA, 296 bp, Glycine max
  unsure (1)..(296): unsure at all n locations
gnggaggctccagatgaagatgatgacgacgacgtgcaatggctgacagattacatcacttgatgctgcccgtgcaacgtatccaagaacagttaagtgctgtgacagctgatatggttatgctttctacagatgaaccagagaagaagaaaaaacaataagtaacagaaatggtggttctcacaatggtaactcaatgcactacgggaccctggttggtgaagtgaaagcaaatttcaagaaaggtgttggggcaaaggaattgctgtcccatcttgcagcattcctgcacctgc

SEQ ID NO: 279469 - DNA, 289 bp, Glycine max
  unsure (1)..(289): unsure at all n locations
tccaatctgcaaatccaactaacatgggaagccagcaagccgccgtgtcgttcctgacgaacctggcccgcnccgctttcgggctgggcgcctccgcgaccctattgagctcctccctctacaccgtcgatggcgggcagcgcgcntcctcttcgaccgtttccggggcatcctcgacgagaccgtcggcgaggggacccacttcctcatcccgtgggtccagaaaccctacatcttcgacatccgcncccgcncccacaccttctcctccgtctccggaacaaaagac

SEQ ID NO: 279470 - DNA, 297 bp, Glycine max
  unsure (1)..(297): unsure at all n locations
antatcaaaganaggggtggtggctgcttcgaaagcttaataatttgtttatttccagaacatcatagttttcgcagcagcaaactaacaaattactcatatcatataataagatggcccgttctctctcgcaagccaaacgtattggtgtccttgtgctcaatctatctccctaattcccgttcatcggcgaggttacgcagtggcatccgatgtatcggtaagagttggattgggtaatattgggcgaaggaatggaatcgtgggaggtgtagaagagaagcctgatacaagaga

SEQ ID NO: 279471 - DNA, 298 bp, Glycine max
tgaattccgaataaaattgacatgattgctctttcttttgttcgaaaaggttctgacctggtggaagtcaggaaagttctgggaaaacatgctaagaacattatgctcatgtctaaggttgaaaaccaagaaggggttgcaaattttgatgaaaccttgcaaattcagatgcatttatggtggcacgtggtgaccttggaatggaaattccaatagagaagatatttctcgcacagaaagtgatgatttacaagtgcaacatccaaggaaaaccagttgtcactgcaacccagatgtt

SEQ ID NO: 279472 - DNA, 301 bp, Glycine max
  unsure (1)..(301): unsure at all n locations
ggagtccttcccctcagaggagcactttccccttcctataatctngntctttgtaatcatccaaggagccgtagccccaaggaaaaggcatcgtgatgattacaaagatcgagattataggaggcgaagtcgcagcagaagttatgataggtatgaacggacaggcaccgtgggagagacaaagattatcgtcgcagaagcaggagccgtagtgccaatctgattacaaggtcgtggtaggggacgctatgatgatgagcgtaatagtagaagccggagcagatcagttgatacggctccc

SEQ ID NO: 279473 - DNA, 301 bp, Glycine max
  unsure (1)..(301): unsure at all n locations
tgcaatgtccgcntgcaagctctcctcctccgccgccatcttcctccttntcctcccgccgccgctccaacgccgtcgttctgtcgaggcgcagcgcgccgccagggtctccgccatggccaaggagttgcacttcaacaaagacggcaccgcaataagaagctccagagcggtgtgaacaagctcgcggatctggttggggtcacgcttggtcccaagggaagaaatgttgttctcgagagcaagtatggctcgccgaaaatcgttaacgacggtgtcatgtcgctaaagaggttgagtt

SEQ ID NO: 279474 - DNA, 294 bp, Glycine max
  unsure (1)..(294): unsure at all n locations
gtttgttgtaggnagaggaatcttgaganatggcaggggacagcaagagcaagatttctgttcatcggagggactggttacatcggaaaattcatcgtggaagccagcgccaaagctggccacccaactttccttttggtgagggagtccactctctccaaccccgcaaaatcacccctcatcgacaatttcaaaggcctcggtgtcaatcttgttttaggagatctatacgatcaccaaagtttggtgagtgctataaagcagtcgatgtggtaattctactgtaggacacct

SEQ ID NO: 279475 - DNA, 290 bp, Glycine max
ctttatcttggaacttccaagaagctctccctctccagaaatgttatatgctccaagtgcagtggcaagggttctaagtctggtgcttcgatgaagtgtgctggttgtcaaggaactggtatgaaggtttctataagacatcttggccatccatgattcagcagatgcagcatgcctgcaatgaatgtaagggtactggagaaactatcaatgacagagatcgctgcccacagtgcaagggagagaaggttgtgcaggagaagaaagtccttgaagttattgtagaaaag

SEQ ID NO: 279476 - DNA, 284 bp, Glycine max
cttattaacactttccttagttcaatatggggaagcccttcttcactctctctctttcttccctttgcttgctactcttgtcgagtgcatgctttgctattacctccagcaagttcaacgagtgccaactcaacaacctcaacgcgtggaacccgaccaccgcgttgagtccgaaggtggtcttattgaaacatggaactctcaacaccctgagctgcaatgcgccggtgtcactgtttccaaacgcaccctcaaccgcaaggcctccattgccatcttatcac

SEQ ID NO: 279477 - DNA, 290 bp, Glycine max
gcaaattttctcccccaaatcgtagatctacggttaaattggtgtagtgtggtaagatgggaggaggatttagagtgcttcacttagttaggccatttctctcgtttcttcctgaagttcaaactgctgacaggaaagtgccatttagaggaaggtcatatacactgtgatctctcttttcattttcctggtttgtagtcagctccctctatatgggatacactcaacaacaggtgctgatccattctattggatgcgtgttatctcgcttcaaaccgtggaactgtcat

SEQ ID NO: 279478 - DNA, 295 bp, Glycine max
  unsure (1)..(295): unsure at all n locations
anacaaagaaaagaagaaaggaaagaattgatcgttgaaaattcngggaggaaagaaagcgggagagtccattaaggaaacagctacaaacattggtgcttctgccaaggctggcatggagaagaccaaggccactgtccaagagaaggcagaagaatgacagcacgtgatccggtgcaaaaggagttggcaacccaaaagaaagaggcaaagatgaaccaggcggagctggacaagcaggcggcgcgtcacataacacggcggccaaacagtccgccaccacggctgggcactg

SEQ ID NO: 279479 - DNA, 294 bp, Glycine max
  unsure (1)..(294): unsure at all n locations
gctgaantcatgancaagattgacaggcgatntggcaaagagcttganaaggaacccaagtttttgaagaatggtgatgctggttttgntaagatgattccgaccaaacccatggtggttgaaactttctctgagtaccccccanttggtcgtttgctgtcagggatatgcgtcaaantgttgctgtgggagtcatcaagaacgtggagaagaaggatcctactggagccaaggtcaccanggctgcccanaagaagaagtgaatcgtgcggtttggttcatcaggggatgtcg

SEQ ID NO: 279480 - DNA, 297 bp, Glycine max
  unsure (1)..(297): unsure at all n locations
tnaaccttgctctatactacacagtacacacactagaagaataatgggttccatcntccactactttttagccctctctctttcttgctcttttcttttcttcttatccgactcagtcacccctacaaaaccaataaaccttgttgttctaccgttcaaaatgatggttccacagggctccattgggccaacctccaaaaaagaacccctctaatgcaagtaccagtcctggtggacctcaatggaaatcacttgtgggttaatgtgagcagcagtactcatcnaaaacgtaccaag

SEQ ID NO: 279481 - DNA, 317 bp, Glycine max
gttctgagcatatatggaaagtcattaaggagaacaaagatctcgatcttcctgcacataaggttatggttgctactgtacgatgtgaagaaatagccaacgagaaatatgtttcttttgttgcaaatgaggattggtgtcaattggaagaggctgtgcaatctggcctattcctggatttgggaaaaagctcagttcacttcttgatttgtttttcagagtatgatgctgaagccacctattttgacgaaggtgtgagatcttccaaacaaaagcaactacaagaaaaattgttccacttgtccaaccagcatcca

SEQ ID NO: 279482 - DNA, 276 bp, Glycine max
  unsure (1)..(276): unsure at all n locations
gaccganctagctagctagcaancnagcacagagatggaggcanagcgaggccatgccctcatgtgcttggcacgtgtttcactcttcctctgcgctctaaccctatccgctgctcacggaagcaccaggttcaagacatcgcgaganagttgaaactcggggacaacgagcttctgcgcacggagaagaagttcaaggttttcatggagaattacgggaggagctatccacagaggaggagtattgcgccgtttggggatttcgcccagaacatg

SEQ ID NO: 279483 - DNA, 316 bp, Glycine max
tgctgattcacaaaggcacagacttggaccaaactatctgcaacttcctgctaatgctcccaagtgtgctcaccacaataatcatcatgaaggtttcatgaatttcattcacagggatgaggaggtcaattacttcccttcaaggtatgatcctgttcgtcatgcagaaggttccccatacctcctgctatctgcagtggaaggcgtgaaaagtgtggaattgagaaggagaacaacttcaagcagcccggagagagataccggtcttgggcactgacagcaagatagatttgctcgccgatgggttgatgcttta

SEQ ID NO: 279484 - DNA, 314 bp, Glycine max
  unsure (1)..(314): unsure at all n locations
cgcttctcacgatggagggaggagtatcctacgcgcgcatgcctcgggtcaaaatccgcgagctgaaggacgactacgccaagttcganctccgcgacaccgacgcgagcatcgccaacgcgctgcggcgcgtgatgatcgcggaggtgccgacggtcgccatcgactcgtggagatcgaggtcaactcctcggtgctcaatgacgagtttatcgctcacaggctgggcctcatccccctcactagcgagcgcgccatgtccatgcgcttctcacgtgactgcgagcgtgcgaggtgacggacagtgcgagttt

SEQ ID NO: 279485 - DNA, 314 bp, Glycine max
gcaagacatgggagaagctccagctcgctgctaggattattgttgccattgagaacccacaggatatcattgttcagtctgccaggccttatggtcagagggcagttcttaagtttgctcaatacactggtgctcatgcaattgccggaaggcacactcctggaacttcactaatcagatgcagcaatcctacaatgagcctcgtcttctgattctaactgatccaagaacagatcatcagcctatcaaggagggtgctcttggaaatattccaactattgctttttgcgaccatgatctccaatgcggtatgt

SEQ ID NO: 279486 - DNA, 314 bp, Glycine max
  unsure (1)..(314): unsure at all n locations
anggcgtgcatgttcccatttacgacttcaagaagcaccaacgctcttccgatagttttcgccaggtgaatgcttctgatgtgattatattggaggggattcttgtgttccacgatcagcgcgtgcgggatctgatgaacatgaagatctttgttgacacagatgctgtgtgagacttgctcgtagaattaggcgtgacacaatggagagaggcagggatataaactctgttcttgaacagtatgcaaaatttgttaagcctgcattgatgatttgttctaccatcaaaaaagtacgctgacgtgatcatcctc

SEQ ID NO: 279487 - DNA, 312 bp, Glycine max
  unsure (1)..(312): unsure at all n locations
taactttgaggagactgttggcatcggaaagggagttactaaactctatgcaaccattgatctggaganaagcaagagtaggaaggactagaatcatagaaaatgaacatactaatcccagatggtatgagtctttcacatttattgtgctcatatggctcaaatanatattcactgtgaaagatgataatcctattggggcaactttaattggaagagcttatgtgcctgtttcggaggtcttggatggtgaggaaatagataggtgggntgaaatcttggacgaggaaaaaaaccatacaagaggtcaag

SEQ ID NO: 279488 - DNA, 312 bp, Glycine max
  unsure (1)..(312): unsure at all n locations
ttaagtgaganacaaagaaaggaaataattgatctttgaaaatncngggagganaganagctggagagtccatcaaggacacagctgcaaacattggtgcttctgccaaggctggcatggagaaaaccaaggccactgtccaggagaaggcagaaagaatgacggccgtgatccgatgcaaaaggagttggcaacccagaagaaagaggcaaagatgagccaggcagagctggacaagcaggcggcgcgtcacataacacggcggcgaacaggctgccacggcagggcnatgggacaaccatggggacctca

SEQ ID NO: 279489 - DNA, 311 bp, Glycine max
  unsure (1)..(311): unsure at all n locations
agttgcagaccgagctagctagctagcaagcaagcacagagatggaggcaaagcgaggccatgccctcatgtgcttggcacgtgtttcactcttcctctgcgctctaaccctatccgctgctcacggaagcaccacggttcaagacatcgcgaganagttgaantcggggacaacgagcttctgcgcacggagaagaagttcaaggttttcatggagaattacgggaggagctactccacagaggaggagtattgcgccgtttggggatttcgcccagaacatggtcagagcggcggacatcaggcgctgg

SEQ ID NO: 279490 - DNA, 310 bp, Glycine max
  unsure (1)..(310): unsure at all n locations
gcgatttggtgatcctgagtgccaggtcttaatggttcggttggagtctgatttggtacaagttctactttcagcatgtagaggagagttgagtgggttatcactgaactggtctcctgggtctgccatggttgtggtaatggcaagtaacggatatcctgganatatgagaagggaactgtgattgaaaaccttcaagaagctgagcttgctgctccaggtatcaagatatttcatgcaggaactgcttttgactctgaaggaaaatttatgcaaatggggggcgtgttcttggggttacagccaagga

SEQ ID NO: 279491 - DNA, 312 bp, Glycine max
  unsure (1)..(312): unsure at all n locations
tgaacatgtatgtcatgtaatcagtggtgatgaaaggntcgttgacagcaacaagttcaagtacgacaccgttcatggccagtggaagcattttgatgtgaaggtgaaggactctaagacccttctctttggtgagaagcccgtcaccgtttttggaatcaggaccctgaggaaattccatggggtgaggttggtgctgattatgttgttgagtcaactggtgtattcactgacaaggacaaggctgctgctcacttgaagggtggtgccaagaaggttgtcatctctgccccaagcaaagatgcaccatgt

SEQ ID NO: 279492 - DNA, 308 bp, Glycine max
  unsure (1)..(308): unsure at all n locations
gaaganagagttctgaccatggctgcatcattatttatgccttcatccatagtggacgaagaagcgaggtttgaagccgaagtggcggaggtgcaagcatggtggaactctgagaggttcaggctaacaaaaagaccatacacagcaagagatgtggtgtcccccgaggcaacctcagacaaacctatgcctcgaacgagatggcgaaaaagctctggtgccttctgaagaaccaccaagccaacggcacagcctcaaggattttggtgcattgatcctgttcaggtcatcaaatggccaagcattgg

SEQ ID NO: 279493 - DNA, 313 bp, Glycine max
catcaatcccttcaatacctttcaaataagcatggacctctcatgttcttgcagctgggttcaatacccaccttggtagtttcctctgctgagatggccagagagattttcaaaaaccatgactcagttttctctggcaggccttcgctatacgctgcaaaccgttaggatacggttcaaccgtgagttttgcaccgtacggtgagtactggagggaaatgaggaagatcatgatcttggagctgctgagtccgaaaagggttcaatcgtttgaagctgtgaggtttgaagaagtcaaacttctgcttcagac

SEQ ID NO: 279494 - DNA, 309 bp, Glycine max
tctacaacgagctccatgcttacttagcttcttgtggagtagatggagtgaaggttgatgtgcagaacattattgagacccttggtgcgggacatggtggccgagtgtcacttactcgcagctatcatcacgcgcttgaggcttccattgctagcaattttctgataacggatgcattgcgtgtatgtgtcacaacactgatggactttatagtgctaagcagactgctattgtgagagcttctgatgatttttaccctcgtgatcctgcttcccataccatccatattcttctgttgcatacaactca

SEQ ID NO: 279495 - DNA, 307 bp, Glycine max
tctacaacgagctccatgcttacttagcttcttgtggagtagatggagtgaaggttgatgtgcagaacattattgagacccttggtgcgggacatggtggccgagtgtcacttactcgcagctatcatcacgcgcttgaggcttccattgctagcaattttatgataacggatgcattgcgtgtatgtgtcacaacactgatggactttatagtgctaagcagactgctattgtgagagcttctgatgattttaccctcgtgatcctgcttcccataccatccatattctctgttgcatacaactca

SEQ ID NO: 279496 - DNA, 304 bp, Glycine max
tcttcttctcttgcggctagggttttagcgcagcttcttctagatttaaggaagatgggtaaggaaaaggttcacatcagtattgtggttattggccatgttgactctgggaagtccactaccactggccacctgatctacaagcttggaggcattgaaagcgtgttattgagagatttgagaaggaagctgctgagatgaacaagaggtctttcaagtatgcctgggtgcttgataagcttaaggctgagcgtgaaagaggaatcacaattgatatgccttgtggaatttgaaaccaccaagt

SEQ ID NO: 279497 - DNA, 304 bp, Glycine max
  unsure (1)..(304): unsure at all n locations
ctagaactagtcagcaaatatacgtggtggtggagaatatncgggaggaatggcataaatctggctcccttgcaaataagcaaaactgctttgatgatttcatttcagcagctgaataccttgtatctgctggttatacccaacccagaaagttatgtacgagggtggaagcaatggtggacttcttgttggcgcttgcataaatcagagacctgatctttttggttgtgccctggctcatgttggtgttatggacagttacggttccacaaattacaataggtcagcttgggccacagactat

SEQ ID NO: 279498 - DNA, 307 bp, Glycine max
  unsure (1)..(307): unsure at all n locations
cttcatagttcagtgtgtcgtttaaaaatgtcgcagttgctggataaagccaagaacttcgtgtcggagaaggtaaatgatatggccaagccggaggcgagtgtcactgacgtggacttcaagcgcgtgagcnaagataatgtcgagtacttggccaagtctctgttcgtaacccttattcaacttccatacccatttgtgagatcaactactctttcaaaagcgcatccagggagatagcatcagggaaaattccagacccaggatcgttgaaggcaaaggacacaacaatggtggatgtgccagt

SEQ ID NO: 279499 - DNA, 307 bp, Glycine max
  unsure (1)..(307): unsure at all n locations
cnaganagaacttccttataaccaaaaccaacaacaactatggcaagttatcagaagcactacgatgatcagggtcgcaaggtcgacgagtatggcaatgttgagaggcaaactgacgaatatggcaacccggttcatgccactagtgtcacttatgtnccaccaaaagtgttggtggctacaatgatgacgctaataagcaacatgatattactggngtctatcccgagaaagacaccggtagacatcattttggtcgtggttacgacggtgacactaacaagcaacatgatgctactggtgttta

SEQ ID NO: 279500 - DNA, 304 bp, Glycine max
gcaggtcctctttcagcacctcgtgaattcatagaggattgcactttaggtggctacaatgtcaaaaaaggaactcgtctaattacaaatctttggaagatccacacagatcttagtgtttggtcaaatccattagagttcaaaccagaaaggtttctaccacccataaagacattgatgttaggggacatcattttgagctattaccatttggtggtggtagaagagtgtgccctggaatatcctttagccttcaaatggttcatttgactcttgccagtctttgtcatctttttcatcttaa

SEQ ID NO: 279501 - DNA, 308 bp, Glycine max
aaattcttccaccaagttatgggtttccttgtgttgctttcttttctccctcttaggtctctcttctagttccagcatatcaactcatcgttccatattggaccttgacctaaccaagtttaccacacagaaacaggtgtcttcactgttccaactatggagagtgagcatggacgtgtctaccataaccacgaagaagaggcaaagagactgagattttcaagaataacttgaactatatcagggacatgaatgcaaacagaaaatcaccccattctcatcgtttaggatgaacaagttgctgacac

SEQ ID NO: 279502 - DNA, 306 bp, Glycine max
  unsure (1)..(306): unsure at all n locations
ggnagaacctcttggaccagaagacatgtggtactgtcctggctgtaaagaacatcgtcaagctagtaagaagttagatctttggagacttcctgaaattttggtcattcatcttaagaggtttcaatacagtcgttacttgaaaaacaagctggagcatatgttgacttccctgtagataatctcgatttgtcagcttatattacctatgggaatgatgagtcttaccattacacactttatgctgtcagtaaccattatggaagcatgggaggtggtcattataccgcatttgtccatcgaggc

SEQ ID NO: 279503 - DNA, 305 bp, Glycine max
  unsure (1)..(305): unsure at all n locations
cttcatagttcagtgtgtcgtttaaaaatgtcgcagttgctggataaagccaagaacttcgtgtcggagaaggtaaatgatatggccaagccggaggcgagtgtcactgacgtggacttcaagcgcgtgagcnaagataatgtcgagtacttggcaaggtctctgttcgtaacccttattcaacttccatacccatttgtgagatcaactactctttcaaaagcgcatccagggagatagcatcagggaaaattccagacccaggatcgttgaaggcaaaggacacaacaatggtggatgtgcca

SEQ ID NO: 279504 - DNA, 305 bp, Glycine max
cttttctcttctcttcttcctccaaaacaagtaaacaaacaacactctcacattcaccacaacacaaacacaaacacaaacaaagacaacaaccttgtttgtctgcaatcaaaacctttcaagctggcgttcgagaaccaagacacccctgtccgagaatcaagcccaagaaccggagaatcatgggtgctggaggccctgatgacgaggacaataggtggccaccatggctgaaacctcttctcaaagagagcttctttgttcaatgcaagcttcagctgattcgcacaagagcgagtgcaaca

SEQ ID NO: 279505 - DNA, 302 bp, Glycine max
gaatggtgctttcggaggaggaaatcggtcgtctataccgaataaggaagacggtgatgcagatgctgagggacagaaattttctggttggtgacttcgagatcaacatgtccaagcacgagttcaagtccaagtacggcgaacacatgaagccgaggacctcgtcatcaacaaatccaagaaggacaactccggcgaccagatctacgttttcttccccgacgaacccaaggtcggcgtcaagaccatgaagacctacaccaaccgcatgaactccgaaaacgtctacagagccatcctcg

SEQ ID NO: 279506 - DNA, 305 bp, Glycine max
  unsure (1)..(305): unsure at all n locations
ctggngaggagaatgtgccctggtgtcaatttggctacttcaggaatggcaacacttcttgcatctcttatccaatgctttgacctgcaagtgctgggccctcaaggacaaatattgaaaggtgatgatgccaaagttagcatggaagagagagctgcctcacagttccaagggcacatagtctcgtttgtgttccacttgcaaggatcggcgttgcatctaaactcctttcttaattaagataatcatcatatacaatagtagtgtcttgccatcgcagttgctttttatgtattcataatcat

SEQ ID NO: 279507 - DNA, 297 bp, Glycine max
cacagtacacacactagaagaataatggcttccatcctccactactttttagccctctctctttcttgctctttctttcttcttatccgactcagtcacccctacaaaaccaataaaccttgttgttctacccgttcaaaatgatggttccacgggctccattgggccaacctccaaaaaagaacccctctaatgcaagtaccagtcctggtggacctcaatggaaatcattgtgggttaactgtgagcagcagtactcatccaaaagtaccaagcaccttctgccatccaccaatg

SEQ ID NO: 279508 - DNA, 303 bp, Glycine max
ttttctctctcccttagtcaaagggattcatcgttcttcttcccaggttatttagaaaagcaaaatggtgaagatttgctgcattggtgctggatatgtggggggtcctactatggcagtcattgcacttaagtgcccatccattgaagtcgctgtgttgatatctctaaatcccgcattgcagcctggaacagcgaccagcttcctatctatgaacctggccttgatggtgttgtgaagcaatgccgtggcaagaacctcttcttcagcactgatgttgaaaagcatgtctttgaggctgac

SEQ ID NO: 279509 - DNA, 302 bp, Glycine max
  unsure (1)..(302): unsure at all n locations
gtgaaattcttggatttatgaaagacgaacaactgcgaaagcatttgccaaggatgttttcattaatcaagaacgaaagttgggggctcgaagacgatcagataccgtcctagtctcaaccataaacgatgccgaccagggatcagcggatgttgtttaggactccgctggcaccttatgagaaatcaaagtctttgggttccggggggagtatggtcgcaaggctgaaacttaaaggattgacggaagggcaccaccaggagtggagcctgcggcttaatttgactcnacacggggaactt

SEQ ID NO: 279510 - DNA, 300 bp, Glycine max
gtgaaatcattgcctggcgtcactattgatgaaaagaaagtcgtatcatcaacgggggctcttgctttgactgaaatccccaagagactcgtagtcattggggcaggctacattgggctggaaatgggctccgtatggggccgtcttggcacgagataacagttgttgaatttgcatcggagattgttccaaccatggatgcagaggtccgaaagcagtttcagcgttctcttgagaagcaaggcctgaaattcaagctgaagacaaaggtagttggagttgatacttctggggatggtg

SEQ ID NO: 279511 - DNA, 299 bp, Glycine max
  unsure (1)..(299): unsure at all n locations
tgaaaattgcagcactcaaggcccctgggtttggagatcgcaaganccagtaccttgatgatattgccatcttgactggaggtactgtaatcagagaagaggttggccttactttggacaaagctgggaaagaggttctcggatatgcctccaggtggttctcaccaaggatacaaccacaattgttggtgatggaagtacccaggaagcagtgaacaagagagttgcacagattaggaacctaattgaggctgctgagcaagagtatgaganagaaaagctgaatgagagattgctaa

SEQ ID NO: 279512 - DNA, 302 bp, Glycine max
caactcctcacatggttctccagcaatccgtgtaccaggctttcactcaggtgtttgctcagcagctaccaaagcaagcacaggtgaaatctgtggcaccatttgggttatgcttcaactccaacaagatcaatgcatatcctagcgtggacctttgatggacaagcccaatggtcctgtttggagaatctctggtgaggacttgatggtgcaggcacaacctggggtcacgtgtttgggtgttatgaatggaggaatgcaacctagagctgaaattaccttaggggcacgtcagtggaaga

SEQ ID NO: 279513 - DNA, 302 bp, Glycine max
  unsure (1)..(302): unsure at all n locations
cnagcttgttctttccctttgtttccttcttttcagtggctgcttcgctctgagagagcaggcacagcaaaatgagtgccagatccaaaagctgaatgccctcaaaccggataaccgtatagagtcggaaggtgggttcattgagacctggaacccaacaacaagccattccagtgtgccggtgttgccctctctcgctgcacccttaaccgcaatgcccttcgtagaccttcctacaccaacggtccccaggaaatctacatacaacaaggtaatggtatttggcatgatatccgggttgt

SEQ ID NO: 279514 - DNA, 356 bp, Glycine max
  unsure (1)..(356): unsure at all n locations
atcgagataactagaaacagtgtgatngaaaatgaaggtccttgttttcttcgttgctacncttttggtagcatggcaatgccatgcgtacgatatgttccctctccgaatgaacactggctatggtgcccgtactccggaggtgaaatgcgcaagttggaggcttgctgtggaagcacacaacatctttggctttgagaccattcctgtcgagtgcgttgaagcaacaaaggaatacatccatggcgaacaatatagatcagactccaaaacagttaaccaacaagcttacttttatgccagagaccncgaagtccatcccaaggacacattgtgttcagtatagatggcaccgt

SEQ ID NO: 279515 - DNA, 245 bp, Glycine max
  unsure (1)..(245): unsure at all n locations
ggctcaaaacctacaaggctaagttggttgtgttcccaagaagggcacacaaggtcaaggctggtgattctacccctgaagagctggctaatgccacncaagttcagggttcattcttgcccattgtgagggagaagccaactgttgaccttgttaaggtaacagatgaaatgaaggcattcaaagcttattataagcttcgtcttgaacgcaccaacaaacgccactacggtgcgcgcctaaag

SEQ ID NO: 279516 - DNA, 231 bp, Glycine max
  unsure (1)..(231): unsure at all n locations
gctcaaaacctacaaggctaagttggttgtgttcccaagaagggcacacaaggtcaaggctggtgattcnacccctgaagagctggctaatgccactcaagtccagggttcattcttgcccattgtgagggagaagccaactgttgaccttgttaaggtaacagatgaaatgaaggcattcaaagcttattataagcttcgtcttgaacgcaccaacaaacgccactacgg

SEQ ID NO: 279517 - DNA, 349 bp, Glycine max
  unsure (1)..(349): unsure at all n locations
tcttggggttctctgtactcgttggtgctagtgcttgggtggatctactggggatgattgctggtcatgcatattattttcttgaagatgtttatcctcggatgacgggtcgtaggccgctaaaaacaccatcattcatcaaagcactatttgcagatgacccagttgttgtggcacggcctgctaatgtcagatttgctcccccacctgctgaagaacttcaccaagattgaatgaatggcaatcaaaatgtttagaggattagcaacagaacagcaaagcggttgaccgtgtaatatatagattnaaacatctttttcgcgtgcatttggttaattatnaggattna

SEQ ID NO: 279518 - DNA, 355 bp, Glycine max
  unsure (1)..(355): unsure at all n locations
caagcaatcatagctgacaaaccagacatcgactctccattcagcgtcctcgatttgggcgtcgtaatgggcctcatggacaaatgggcctgcaagctccccacggtccagcccttctacgccgtcaagtgcaacccaaacctctccctcatcggcgcgctcgctgcactcggctccagcttcgactgcgccagcaaagccgagatcgannntgtcttgtccctcggagtctcaccggacagaatcatctacgcaaacccatgcaaatccgagtcccanatcaganacgccgcntccgtagtgtcaagtcacaanctacgantcnctcgacgaggtgagaaaatcgcaatgccac

SEQ ID NO: 279519 - DNA, 163 bp, Glycine max
  unsure (1)..(163): unsure at all n locations
gttttcccgaaattttctggagaggagtttgacaacttttctgccttagcagagaagttgcgtnctgactatgacttcggtcacactctgaatgcnaaacaccttccaagaggagagtcatcagtttctggtcccgtagttaggttgttcaagccattcgatg

SEQ ID NO: 279520 - DNA, 303 bp, Glycine max
  unsure (1)..(303): unsure at all n locations
atttgagtccaagtacaaggaaagtttgagtagggatgaaggcattaagctagttgttgaggcgatatgcgctggaatatttaatgacctaggaagtggaagtaatgttgacgtttgtgtgataaccaagggacacaaggaatatctcaggaaccaccttctaccaaatcctcgtacctatgtcaatcccaaaagncttgattcccccaaaaggccngnggcctctnacnaagntaccccgntnnaggganaggtgaattgttgaggngttctttggagggttaaatnctcccaaaaattttg

SEQ ID NO: 279521 - DNA, 307 bp, Glycine max
  unsure (1)..(307): unsure at all n locations
cgccacactcttcttaccatgggcctcctcgatcacttgtgggatgacaccgtcgccggtcctcgcccggagaacggccttggcaagctccgaaancaccacacctttcgctttccgatctgcctccggaaggaatcagacagcggaacgtgaaatcgtacggtgaagatttgccggaggatgcggtgagagtgacgcgaagtatcatgatcgtgaaaccacctggtggtaaccagagtccgagcggatccgctccggcttcccccgccggttctactcctccggtgtctcctttttcgggagtaga

SEQ ID NO: 279522 - DNA, 309 bp, Glycine max
  unsure (1)..(309): unsure at all n locations
ctagagtccgtgctgctgttcccaccatcaagtacttaactggtcatggagccaaagtgatcctttctagccacttgggacgtcctaaaggtgtaacacctaaatacagtttgaagcctcttgtgccaaggctgtctcnacttctcggaattgaggttacgatggcaaatgactctattggggangaagttgagaagttggttgcacaacttccagaaggtggtgttttgcttctagagaatgtgaggttctataaggaggaagagaagaatgaccctgagtttgcaaagaagttggcttctcttgctg

SEQ ID NO: 279523 - DNA, 302 bp, Glycine max
  unsure (1)..(302): unsure at all n locations
gaaaccactgagcttccctcgtcaggttgttgctttgtgccaagctccattcctacttgatgatcctaatgttggactgctattccctgctgatgcaattgcaagagctaaacactatctttcattgacctcgggcggtttaggcgcttatagtgactcccgcggccttccaggagtgangaaggaagtggctgagttcatactcaggcgtgatggttatccactgatccagaactcatatatctcatgatggtgccagcaaggggtgatgcagatattaatactatcatcagaggtcagag

SEQ ID NO: 279524 - DNA, 302 bp, Glycine max
  unsure (1)..(302): unsure at all n locations
ctagaactagtccttggatcttaccctcttgtttgctaatattctcattcttctgtctctgcttcttctccttctgaactaagagatggggttgtctttcaccaagctttttagccggctctttgctaagaaagagatgcgtattctcatggtaggtcctgatnntgctggtaagactaccatcttgtacaagctcaagctggggagaattgtcacaaccattcccacaattgggatcnatgtggagactgtgggatatagaatattactttactgtatgggatgtgggtggccaananaat

SEQ ID NO: 279525 - DNA, 138 bp, Glycine max
  unsure (1)..(138): unsure at all n locations
gagataactagaaacagtgtgatgaaaatgaaggtccttgttttcttcgttgctacaattttggtagcatggcaatgccatgcgtacgatatgttccctntccgaatgaacactggctatggtgcccgtactccggag

SEQ ID NO: 279526 - DNA, 352 bp, Glycine max
  unsure (1)..(352): unsure at all n locations
gttggaggcggcacacaactcgcatctcagtcagcatgtcttaatttacttggtgtcaagggtgccaataaagaatctcccggtgcaaattctaggctactggccaccattgtagccggttcagtcctagctggggaactatcactcatgtctgcaattgcagctggacaacttgttaagagccacatgaaatacaacagatctagcagggatatatctacaattgtccatgagctggccaaagtacaattaacttgtgttagagactaataagcgatcatcagataacgacaaaataactaaaaaaatggtattgatggtggganggggtaaaataaagtgatgantngcc

SEQ ID NO: 279527 - DNA, 273 bp, Glycine max
taacaacaaggacattgtgctgtggcacgttgtgggaattcatcatgttccagcacaggaagacttccccataatgccattattgagcactgcattcgagctcaggccaaccaatttcttcgagaggaatccggttcttaaaacactttctcccccggatgtccaatggctggttgccccaagtaaaactagctagccagccatttccattatattagtgtgttcgagtgctacaactagatgtgttccttggataatgtgaaatgcgtctgt

SEQ ID NO: 279528 - DNA, 337 bp, Glycine max
  unsure (1)..(337): unsure at all n locations
cacgcagtcgcagtgagtganaaggaaaaccctaattgcggtattctcagtgccttcgagagaaagaaaaaatggcagataatcttgttctccgtggagaccatgcgcgcccacaccgacgttgtgacggcgattgccactcccatcgacaactccgacatgatcgtcaccgcctcacgcgacaaatccatcatcctctggntttaccaaggaggacaagactacggtgtcnnccgccgccgctcacggccattctcattttgtccaggacgtgtcttcttctgacggccagttgcctatcggctctgggagggagtcgctctggacttgtgtgnac

SEQ ID NO: 279529 - DNA, 123 bp, Glycine max
  unsure (1)..(123): unsure at all n locations
gcctaactacgcacgcactcattcttgagaaagcncaatattcattcgtccatggcactctcttctcgtctcttttccaaatccaaatngatctatncgctgtcaaatacttctgcaaangga

SEQ ID NO: 279530 - DNA, 344 bp, Glycine max
  unsure (1)..(344): unsure at all n locations
gcgtcctcgatttggggcgtcgtaatgggcctcatggacaaatgggcctgcaagctccccacggtccagcccttctacgccgtcaagtgcaacccaaacctctncctcatcggcgcgctcgctncactcggctccagcttcgactgcgccagaaaagccgagatcgaatctgtcttgtccctcggagtctcaccggacagaatcatctacgcaaacccatgcaaatccgagtcccacatcagatacgcgnctccgtagtgtcaacgtcacaaactacgactcctcgacgaggtcnagaanatcggaattgccaccccagtgngattgtcttcggnntaancccg

SEQ ID NO: 279531 - DNA, 319 bp, Glycine max
  unsure (1)..(319): unsure at all n locations
ctacctctcctttcaagatgcagatcttcgtcaagaccctcaactggaagaccatcaaccttgaggtggaaagtctgacaccatcgacaacgtcaaggccaagatccaggacaaggaaggattcccccggatcagcaacgtctcatcttcgccggaaagcagtcgaggacggcgtacctcgccgactacaacatccagaaggagtcaaccttcacttgtcttcgtctcgtggtggatgcaatcttcgtcaagatctcatggcaaacataacctagagtgaagttganacatganagtnaggcagttcagaaagaggatc

SEQ ID NO: 279532 - DNA, 263 bp, Glycine max
  unsure (1)..(263): unsure at all n locations
tgaaggcacaatctatgggtgatgcatccagtttggaattcatgaggagcagaagggtgtttgagatcaaccctgaccattctattatcaggaacttggatgatgcatttaaaacaaatcccgatgatgaagatgccctaagagctattgatcttttgtatgatgctgctttggtttccagtngttttacgcctgataatccagcacaacttggagggaagatatatgagatgatgggtatggctctcactggtaaatggtcc

SEQ ID NO: 279533 - DNA, 320 bp, Glycine max
  unsure (1)..(320): unsure at all n locations
ccgaatgaaaactggctatggtgagcgttcttcggaggtaaaatgcgcaagttttaggcttgctgtgnaagcacacaacatccgagtnttaaaaccattcctgaagagtgcgtgaaccaacaaaggatacattaatggcgaacaattagatcagnctctaaaacagttaacaacaagcttctttatgtagtgaacgcgaagtcatcacnacgacatattatattcggcatgataacacgtactctctaatanccatatatgaaaacaggatnggggtggaggatttatgcacctatntgagaatgggtacagggcgcgnc

SEQ ID NO: 279534 - DNA, 343 bp, Glycine max
atcccaattgttctttgcggtaacaaggttgatgtcaagaatagggcaagtgaaggcaaagcaggttactttccacaggaagaagaatttgcagtactatgagatatctgctaagagcaactacaattttgaaaagccatttttgtacttggccaggaaacttgcaggcgatgctaacttgcactttgtagaatctcctgcattggctccaccagaagttcaaattgatttagctgcacaacaacagcacgagggctgagcttcttgcagctgctagtcagcccttccctgacgagatgatgatcatttgagtaggattgtgggctgtggatcattacttagt

SEQ ID NO: 279535 - DNA, 188 bp, Glycine max
  unsure (1)..(188): unsure at all n locations
gaganagcccatcctgatgtgttcaacatgatgcttcagatcctgggagatggancactancagacngtaagggcagnacggtnggatttcaagaacacacttcttataatgacatcaaatgttggaagcagtgtggttgatgaaagaggccgcnaaattggatttgatccggatnttatgagaggnt

SEQ ID NO: 279536 - DNA, 325 bp, Glycine max
  unsure (1)..(325): unsure at all n locations
tgcagtttttatgcagacatatgttggtggcgtctcatgcccatacatctgtgggaagcatttggatcatggggttcttctagttggttatggtgangtgcatatgctcccantcgttttaaaaacaaaccntacnggntcantnagaatcnnngggccagaacnngggaaagnatgggtataccagatnnncnaagtcngaacntgtgttgantaaatncanngnctccanggagcngctatataanccntccagccattaatccaagnttngncnnaatgnggttgnaaggnaaccngnccaaagggngtttgaaaaaaatta

SEQ ID NO: 279537 - DNA, 104 bp, Glycine max
  unsure (1)..(104): unsure at all n locations
gcttctttgctgattacgctgaggctcaccaaaagctttccgagcttgggtttgctgatgcctaagcaacgtttaggggattgttgaagangcatggtgcccat

SEQ ID NO: 279538 - DNA, 363 bp, Glycine max
  unsure (1)..(363): unsure at all n locations
gtctcaacttctgctcttccaactcctacaacgcttttctctgcactcatgggcaaggtcaagatcggaatcaacggatttggaagaattgggccgtttggttgccagantcgctctgcaaagagacgatgttgaactcgttgccgttaacgaccctttcattaccaccgattacatgacatacatgtttaaatacgacancgttcacggacactggaagcatcacgatgtcacggttaaggcnaagagncccntctnctcggtgacnaaggnagtaatgtttttggacacagaaacctgaagagatcccatgggggtcaactggagctgacatcattgttgagtccaccggagttttcaccg

SEQ ID NO: 279539 - DNA, 142 bp, Glycine max
  unsure (1)..(142): unsure at all n locations
tcattaattgcaagaatggcacttcgttgcttggtgatgtccctttctgttctcttcactcttggtcttgcgagagaaagccatgccaganacgaagatttttggcatgctgttggccaaatnctcccattccaagtncatg

SEQ ID NO: 279540 - DNA, 140 bp, Glycine max
  unsure (1)..(140): unsure at all n locations
attaattgcaagaatggcacttcgttgcttggtgatgtccctttctgttctcttcantcttggtctgcgagagaaagccatgccaganacgaagattttggcatgctgtttggccaaacactcccattccaagttcattg

SEQ ID NO: 279541 - DNA, 367 bp, Glycine max
cgaaaaacaaaagagtagtggcctttaggtggtgaagaacaagagctcaaatcaaatcgaatcgaaaaaagaaagaaagatcatattcatggcgatggcaagcctggctcgacggaagggttacgccgtcgttttgtcgtcgaggtcgtcgttttgtctgacaagctggaggggattcgcgtccggatctgacgaaaacgacgtcgtcgtcatcggcggcggtcccggcggctacgtggccgccatcaaagccgcgcactccggtctgaaaaccacttgcatcgaaaagcgtggcactctcggcggtacctgcctcaacgtcggatgcatcccttccaaggcattctgcattcttcccacatgtatc

SEQ ID NO: 279542 - DNA, 372 bp, Glycine max
  unsure (1)..(372): unsure at all n locations
ccaaagggactatccttcagaatcagaatggagagctagggctactgatggaacaatcttctgctatcaaatgccctaccatatcttatcatttggttggcaccaanaagattcaacaggaacttgcaaagcctggtgttcttgagaggtttgtagaaaacaaagaccacattgccaaattgcgtgcatgctttgcaggattgtggagtttggaagactcggatattgctaaaaaagcaattgaaaatccagagttatttgtgatgaagcctcaaagagaaggaggngganacaatatttntggtgatgagttgagggaaaccctccttaanttacgggaagcatgttctgaagaagtgcagcatactcctt

SEQ ID NO: 279543 - DNA, 155 bp, Glycine max
  unsure (1)..(155): unsure at all n locations
ctgatcaagatgaaggaaactgcggaancattcctcgggaagaaaattaatgatgctgtggtcgctgtcccagcttacttcaatgatgtcagaggcaggccaccaaggatgctggtgtcattgctggtctcaatgttgctagaattatcaacgaa

SEQ ID NO: 279544 - DNA, 379 bp, Glycine max
gcaaggatgacaagaaggtgaaaaaggtagcaaagcctactcttatcccagcagtagagattgatcccccaggctgctctttcaatccctcatatgaaagtcaccaggatacattggcttctgccgttgcagaagtaatgcaaaaaatctacaaaaatgaactgggccctgaacccgtgcctttaactgttcctggagaagctatcgccgaagaagatatgtattttcttgatgtggacaataggagtgacaacgatgaaagtactcctgaaaatgaggatgatgatgcattggagaaaaagcctattaaaactaagagagttactagagttgaatgaataagagagctaggcggaaagaacaacagagaaaagaagca

SEQ ID NO: 279545 - DNA, 363 bp, Glycine max
  unsure (1)..(363): unsure at all n locations
cacacagaaaaaatgggttcttcttcttctatgtggacggtgtgtgtgattttggcatcactggcctctgcagcactctgtgccaacccacgcaggcncagtggatgtacaatttggccgaaactacgtgcccacatgggcctttgatcacatcaaatatttcaanggtggttctgacattcagcttcatcttgacaagtacactggtactggcttccagtccaaagggtcttacttgtttggtcacttcagcatgtacataaagatggttcctggagattctgctggcacagtcactgctttctatttatcttcccaaaacgcggagcatgnatgagatagactttgagttcttggggaaca

SEQ ID NO: 279546 - DNA, 373 bp, Glycine max
  unsure (1)..(373): unsure at all n locations
agcggggaaaggaagattgggattctggggactttgacgttgtttcaattgtggtcgtgtcggtgcccgatctcaaacgacgatgtcatctttatatagaggagaatccaggaggtacaacaataaaccaagaggacgtcataatttgacaacgcagaagaagcaggagattaaggaagcctttgagttatttgatactgatggctcaggaactattgatgccaaagagctgaatgttgccatgagggcccttggatttgagatgacagaagagcaattaataaaatgatagaagagtggacaaggntggaantggagccattgattatgagaatttgggtnctgntnncncccaattgggnaangggcctta

SEQ ID NO: 279547 - DNA, 391 bp, Glycine max
  unsure (1)..(391): unsure at all n locations
ggaatgatgcatgctaccatcaaatcattagccattggctaagcactcatgcaattgttgagccatttgtcatagcaacaaacaggcaactgagtgtgnttcaccctatttacaaacttctgtttcctcactaccgtgacaccatgaatattaattcacttgcccggaaagccctggtcaatgcagatggtattatagagaaaacattcttgtggggtaggtactctatggaaatgtccgctgtcatttacaaggactgggttttcactgatcaagcattacctaatgatcttgtaaagagaggagttgctgttaaggacccatctgctccccatggagttcgcttttgattgaggactatccttatgcttctgatgggtagagatatggg

SEQ ID NO: 279548 - DNA, 146 bp, Glycine max
  unsure (1)..(146): unsure at all n locations
gnacctgcctctcttaaagtttgtatnnnttgagtgggtgggttgattgagagtactgtgcaagcnttggaactttgtcccaacctgctacttcaatggctactgangaggttaacaaacctcaatcacttcctccatacccngag

SEQ ID NO: 279549 - DNA, 370 bp, Glycine max
  unsure (1)..(370): unsure at all n locations
accactactactcactcactgcagatctcaattgcatcgctgtccatggctaccatcgttagcatcaaggcccgccagatcttcgacagtcgtggccatccaactgtcgaggtggatttgacttgctccgatggtacttttgccagagctgctgttccaagtggtgcatccactgggatttatgaggcccttgaattgagagatggaggatctgactaccttggaaagggtgtatcanaggctgttgacaatgtgaacaccgtcattggccctgctttgattggcaaggacccaactgagcagactgctattgacaacttaatggttcaacagcttgatggaactgttaacgatggggtcggtgcaagca

SEQ ID NO: 279550 - DNA, 359 bp, Glycine max
  unsure (1)..(359): unsure at all n locations
cggagataactagaaacagtgtgatgaaaatgaaggtccttgttttcttcgttgctacaattttggtagcatggcaatgccatgcgtacnatatgttccctctccgaatgaacactgggctatggtgcccgtactccggaggtgaaatgcgcaagttggaggcttgctgtggaagcacacaacatctttggctttgagaccattcctgaagagtgcgttgaagcaacaaaggaatacatccatggcgaacaatatagatcagactccaaaacagttaaccaacaagcttacttttatgccagagacctcgaagtccatcccaaggacacatttgtgttcagtatagatggcaccgtact

SEQ ID NO: 279551 - DNA, 141 bp, Glycine max
caggcaatagcaaaagacactcgcattcccctggtttcatttactggaagttcaaaggttggcttgatggtccagcaaacagttaatgagagatttggcaaatgcttgcttgagttaagtggtaacaatgcaataattgtc

SEQ ID NO: 279552 - DNA, 385 bp, Glycine max
  unsure (1)..(385): unsure at all n locations
ctttcttcaccgttcgctctttctttctcccctacacaaaacatggctttgcccaatcagcaaaccgtcgattaccccagcttcaagcttgtcatcgtcggcgacggtggcacaggaaagacaaccttcgtgaagaggcatctcactggtgaattcgagaagaaatatgaaccgaccattggtgtngaggttcatccgttggatttttcacgaactgtggaaagattcgcttctattgttgggatactgctgggcaagagaagtttggtggcctcagagatggatattatatccatgggcaatgtgcgattatccatgtttgatgttactgcccgtctaacatacnaaaatggcccctacctggcaccgtgatctttgccgggtc

SEQ ID NO: 279553 - DNA, 359 bp, Glycine max
  unsure (1)..(359): unsure at all n locations
tcngntcgaggaaagaatgnctccttcagctaccttctgacaaggcacttttgtctgaccctgtgttccgccctcttgttgagaaatntgcatcggacgaagatgccttcttcgctgattacgctgaggctcaccaaaagcttctgagcttgggtttgctgaagcctaagcaacgttttggggattgttggagaggcacggtgcccataatatttctctcataaattctatggtcatggtttctaatgcgccatgtgggttcctcaaatttttagatagcttttgaatgtattttgctggacgtggtgatgatgattggagttgggttgtttaattgtggtcgatccttttgttaaata

SEQ ID NO: 279554 - DNA, 350 bp, Glycine max
  unsure (1)..(350): unsure at all n locations
tttgatttgtgaaaggnaagcaaacatgcttgatcaggtccaacanccctacaatcanggacaaggttgctggccagctccatctccgttctggtgtttctggtattaggagttatgaaggagcctactgccaccccacaatgtaccaaagaccctcttttgggaattactcgaatgctgcattgcagtatcctgtgatgccctcatgcaaagctactatggatttgtctgctgctgcaacaatgcctcccccgtctttgttgctgctccagcagagaaaggccattttcttatagacnttctcatgggaggtgttcagcagctgtctcaaaaactgctgctgctcccat

SEQ ID NO: 279555 - DNA, 351 bp, Glycine max
  unsure (1)..(351): unsure at all n locations
ccgattgctagaatggaatttcgatgctcagtcatctcttttaccattctcttctctcttgctcttgcaggagagagccatgtccatgcatcgtacctgaggaagattattgggaagctgtttggccaaacactcccattcccactgcactgcgagagttctaaagcctctccctgcangtgttgaaatcgatgaactccctaagcaaattgatgatacacagtacccaaaaacattcttctataaagaagaccttcatccaggcnnaacaatgaaagtacaattcaccaagcgtccctatgcacaaccttatggtgtatatacatggttaacggatattanagacacctt

SEQ ID NO: 279556 - DNA, 356 bp, Glycine max
  unsure (1)..(356): unsure at all n locations
ctagttctgagtattctgatcgctccctgagaganctcgtcgcggcgggtancagaaagaagattgcaagatgaagttcaacatcgcgaatcccaccactggatgccagaagaagctcgagatcgacgacgatctgaaactgcgagcatttgggacaagaggatctcacaggaggtcatcggagatgcactcggtgaggaatttaagggctatgtcttcaaaattaccggagttgtgacaaacaaggattccaatgaagcagggagtgctgactcctggtcgtgttagacttttgcttcacaggggaactccttgcttccgtggatatggaaggcgtaatggagancgtaggagaa

SEQ ID NO: 279557 - DNA, 367 bp, Glycine max
  unsure (1)..(367): unsure at all n locations
ctttcttcaccgttcgctctttctttctcccctacacaaaacatggctttgcccaatcagcaaaccgtcgattaccccagcttcaagcttgtcatcgtcggcgacggtggcacaggaaagacaaccttcgtgaagaggcatctcactggtgaattcgagaagaaatatgaaccgaccattggtgtggaggttcatccgttggattttttcacgaactgtggaaagattcgcttctattgttgggatactgctgggcaagagaagtttggtggcctcagagatggatattatatccatgggcaatgtgcgattatcatgtttgatgttactgcccgtctaacatacaaaaatgccctaccnggcacgg

SEQ ID NO: 279558 - DNA, 374 bp, Glycine max
  unsure (1)..(374): unsure at all n locations
gtccatccaaatcttaaaaatattcagtgaagatcaacctcaatgggcatctcttggcgtgcgaccagttcttcccccctccattaacnttccatctccgacccacctcctcttttcgatggcaccaccaggttgtacatcagttattcttgcccctatgcacaacgtgtgtggatcgctaggaactacaaggggctacaagataagatcaatttggtcctattaaccttcaagacaggccagcttggtataaggagaaagtctaccctgaaaataaggtgccatccttggagcacaatggcaaggtgttgggagaaagtcttgatttgatcaaatatgtagatgcaaactttgaagggacacctttgtttccc

SEQ ID NO: 279559 - DNA, 337 bp, Glycine max
  unsure (1)..(337): unsure at all n locations
caagcaaaaagaaagaatcccangcgaggagaaagatggaggggaaggagcaggatgtgtcgttgggagcgaacaagttccccgagagacagccgattgggacggcggcgcagagccaagacgacggcaaggactaccaggagccggcgccggcgccgctggttgacccgacggagtttacgtcatggtcgttttacagagcagggatagcagagtttgtggcacttttctgttctctacatcaccgcttaaccgttatgggagtcgccggggtaatctaatgtagtacgtgggattcaaggatcgcttgggcttcggtgnatganctcgcctcgtt

SEQ ID NO: 279560 - DNA, 349 bp, Glycine max
  unsure (1)..(349): unsure at all n locations
agagaagctaagaggcgcagcnnagcaaaagctcgtggnattgctagcaatggcgaggatcaaggtttacgagctgaggcagaagacgaaggctgatctgctgaatcaactgaaggacctgaaggcggagttgccttgcttcgtgttgctaaggtcaccggtggtgcccctaacaagctttccaagataaaggtggtgaggttgaacattgcccaggttttgacggtgatttctcagaagcagaaggctgcgttgagggatgcctacaagaataagaagtacttgcctctcgatctccgccctaagaagaccagggctattcgcaggaggcttactaagcaccaggcat

SEQ ID NO: 279561 - DNA, 379 bp, Glycine max
ctctgctcgtagggtttctccacctagagggaaatggctcccaaaccgcctagtacgggtctgtttgttggactgaacaagggtcacgtcgtcaccaagaaggaattgcctccacgcccctcagatcgtaaggggaaaacaagcaagagggtgcactttgtgaggaacctcataagagaggtagccggttttgcaccctatgaaaagcgtataactgagttgctgaaggttgggaaggataagagggcactgaaggttgcaaagagaaagctcggaacacacaaacgcgcaaagaagaagcgtgaggaaatgtccagtgttctcaggaagatgagggctggtggtgctggagacaagaagaaataagtcttattactgt

SEQ ID NO: 279562 - DNA, 325 bp, Glycine max
  unsure (1)..(325): unsure at all n locations
tgcacgtncaaagtgggcaatgcnggaaccaaatcggntncaaagttctgggaagtgtatgngacgancacggcatcgaaccccaccggaaagtacaccggngagaagccttccganctncaactggagaggatcaacgtctactacaatgangctccggcggaangtacgttccccgggccgtcctcatggatctngagctcggcaccatggacagcatcagatccggcccatacggcaagatcttcaggcccgacaattcgtctttggcagtcggcgccgnaacaattgggccaaggccntacaccgaagtccgattgatgat

SEQ ID NO: 279563 - DNA, 363 bp, Glycine max
  unsure (1)..(363): unsure at all n locations
aattctccagagagaagaagaaacttaatcgatcatcacttcacttcactaatacatcatggcagacgagacccagaacaagtatgaganctctgaggttgaggtccaaggatcgtggtgttttgactttctcggtaagaaaaaggatgaagaagacaagcctcatcctcaggaggaggtcatcgccaccgagtttcaaaaagtcactgtctcagaccaaggagagaacaagcacagcctcttagaaaagcttcaccgatctgacagcagctctagctcttcaagtgaggaggaaggagaagatgganagaaaaggaagangaagaagaaggaaaagaaagggctgaaagagaagntcgaggg

SEQ ID NO: 279564 - DNA, 348 bp, Glycine max
  unsure (1)..(348): unsure at all n locations
gatnttctcttcacgtggtacttcttgaacgtgattttcaacatcctcaacaagaagatctacaattacttcnccnaccatacttcgtatcggtaatccattnattcgtgggagtngcgtactgtttggtgagctgggccgtgggccttccaaagcgtgctcctatagactccaacctactgaagttgctcattccagtggctgtgtgtcatgcattaggccatgtgaccagcaatgtctcatttgctgcagttgctgttctttcactcatacnattaaagtcttgaaccattcttcatgctgctgttcacagttcatattggtcaatcatccccncatttgtggtgc

SEQ ID NO: 279565 - DNA, 358 bp, Glycine max
  unsure (1)..(358): unsure at all n locations
gagagagagagaagagggtgtgagatatgcaacgtttcagcaacacggtgataggattcttgaacttnttcacgctcttggcatcaatacccatcatangtgcgggtctatggatggcaaggagcaccacaacatgtgaaaatttcttccaaaccccacttttggtgataggctttgttgtgcttgtgatttcgctagcgggtttcataggggcatgttttcatgtggcatgggcattgtgggtgtacttggtgatcatggtgttcattatagctgccctcttagggtttgccgtttttggctttgttgtgacggaacagggtgggggagtggaatgcctggtaggnttacaaagagt

SEQ ID NO: 279566 - DNA, 349 bp, Glycine max
  unsure (1)..(349): unsure at all n locations
cagacttancaacagcacaaagcgggtgactgtcntgttcaagctaccatctctctctctcttgcgnagtgnctncttgncagaagtaanangggccgannaaactttcctacnncanntntgantcnagtgnccnaggggcaccctgacaagctctnctgaccagatctccgatgctgtgctcgatgcatgcttggancaggaccctgacagcaaggttgcctgtgaaacctgcancaagaccaacatggtgatggttgcgganagatcacaaccaangccaacgtggactatgagaagattgtgcgtgacacatgcagganattggtntgtctctgatgatgttggc

SEQ ID NO: 279567 - DNA, 272 bp, Glycine max
  unsure (1)..(272): unsure at all n locations
gtgttcattccaactgcaanancaacaactcatnnaagagatnctctccggagccatggcagatctcaagtctacattcttgaacgtcattcagntctcaaatctgaantcctcnacgacccngcttcgagttctccgatgatgctcgccattgggtcgacnggatgctagactacaatgtgcctggaggaaagttgaaccggggactgtcagtcattganagtacagattgttgaaagaaggccaggcattaatgatgacgaaatttcttg

SEQ ID NO: 279568 - DNA, 335 bp, Glycine max
  unsure (1)..(335): unsure at all n locations
ccttnttgacagtgatgatgaggttcgtgatagggcaacactttacctgaaacacactcnggnngtgatggttcanttgttgagactgataaagatgtaaagganttcctgnttgggccatttgatgtcccacttgncaanctggagactagtttgaanaattatgagccttcagaagaagcttttganataactctgtgcctaaggaggtcaagttccagcctcttgcagaaaagaaagcccctggtaaaaagccaactggtttgggtgtccccaagtggtccccatcaattncagatgctatgagaggttntttcaaccatcnaggtgtgaac

SEQ ID NO: 279569 - DNA, 328 bp, Glycine max
  unsure (1)..(328): unsure at all n locations
gtgactataagtagtttatcgtgaggagaatatgaagttgtttgttttctttgttgctgccagtagtttggtagcatggccatgccatggcgcaagctaccaaaggtccctctccgatgnnaaactggcatggtgacggtcttcggaggtaaaatncnaagttttaggcttgctgtggaancacacaacatccgagtnttaaaaacnatcctgaagaggcgttgaacnaacaaaggctacataatggcgacnattagnncagacctaaaccagtaaccacaagcttctttatgctaggacgcgagncacacacgncntttatatcgga

SEQ ID NO: 279570 - DNA, 331 bp, Glycine max
  unsure (1)..(331): unsure at all n locations
gttttcgatgacaagctgggggcgctctgcatgcaatggttggaagacaaggtcttttcaatcagagatgctgccgctaacaacnngaagcgccttgcagaagagtttggtccagagtgggcaatgcagcatataatccctcaaggtgctggagaagtccacaaccccacactattatacggatgacgatctgcagnnatctccttgctantctgnaatgggtgcagagatccactgtcaaaagtgcttcaagcggcataattcttcgaaggcaaggttccaacancagtcatgtgcgaaagactacagnactgtacgncctnacnantgt

SEQ ID NO: 279571 - DNA, 330 bp, Glycine max
  unsure (1)..(330): unsure at all n locations
gctcaacgaagggagaagggactncnnttggcagaaatggtcttataaggttggtcttaaaggtgaaccttgagtcttcactctcttggtggaagtcgtcagtggagtggatccagggactttagtttctcaaaggcagccattgacntggtacaaaacaacatttgacgcgccagatgggactgcaccattggctttagacatgaacagcatgggcaaaggtcaagtgtggttaaatggacagaatcttggccgctactggcctgcttataaagcactggtacttgtgattactgtgntatgctggacttatancgagattaanncaga

SEQ ID NO: 279572 - DNA, 304 bp, Glycine max
  unsure (1)..(304): unsure at all n locations
attctccagagagaagaagaaacttaatcgatcatcacttcacttcactaatacatcatggcagacgagacccagaacaagtatgagagtctgaggttgaggtccaggatcgtggtgtttttgactttctcggtangaaaaaggatgaagatgacaagcctcatcctcaggaggnggtcatcgccaccgagtttcaaaaagtcactgtctcagaccaaggagagaacaagcacagcctcttagaaaagcttcaccgatctgacagcagctctagtcttcaagtgaggaggaaggagagatggag

SEQ ID NO: 279573 - DNA, 334 bp, Glycine max
  unsure (1)..(334): unsure at all n locations
agagtntgttgtgagctataagctagtttatcgtgaggagaatatgaagttgtttgttttcttgttgctgcagtagttttggtagcatggccatgccatggcgcaggcttaccaaaggttccctctccgaatgaaaactggctatggtgagcgttcttcggaggtaaaatgcgcaagttttaggcttgctgtggaagcacacaacatccgagcctttaaaaccattcctgaagagtgcgttgaaccaacanaggactacattaatggcgaacaatttagatcagctctaaaacagttaacnacaanttcttttatgtagtgangcgaagtcacc

SEQ ID NO: 279574 - DNA, 214 bp, Glycine max
  unsure (1)..(214): unsure at all n locations
attaattgcaagantggcacttcgttgcttggngaaggtccctttctgttctcttcactcttggtcttgcgagagaaagccatgccagagacgaagatttttgggcatgctgtttggccaaacactcccattccaagttcattgcgagatcttctaaagcctggccctgcaagtgttgaaatcgatgatcaccctatgcaaattgaagaaacac

SEQ ID NO: 279575 - DNA, 236 bp, Glycine max
agcaaacctaaagaaggctgggcttccacacatgggagcagttaattctcaaggatccacatcttatcactccaaatgcactttcatacaaatcagcaatgagagagaatctgttgaggcagggatacagaattgttggaatcattggagaccaatggagcgatctgcttggagaccacagaggcgaaagcaggactttaagcttcctaattccatgtactacattgagtagtacc

SEQ ID NO: 279576 - DNA, 332 bp, Glycine max
cgcatctgaactctcagtcgcttctcgaaccctactttcttccgcggtgattgcatttgaattcctgtaatggcgattgataatatttttaaaaatgaagctagtgaagaaaaaggagagcgtgccagaatggcttcttttgttggagccatggctattgctgacttagtgaagacaaccttggggccaaagggaatggataaaattttgcagtcaacaggtagaggacgtgaagttactgtcacgaatgatggcgctacaatcttgaagtccctccatattgataacccagctgctaaagtccttgttgacaatcaaaagttcaagatgat

SEQ ID NO: 279577 - DNA, 337 bp, Glycine max
cagaggtatcagatatagcaattgcagttcgtgaaggttctgatggaataatgttgtctggagaaacagctcatggaaagttcccactaaaagctgtgcaagtaatgcacacagtagcattgcggaccgaagccactataccaggtggtaaaatgccacctaacattggtcaagtgttgaagaaccacatgagtgagatgtttgcataccatgcaaccatgatgtctaacacccttggaacctcaactgttgtcttcactagaacgggtttcatgggctgtccttctgagtcactatcgtccttctggaaccatattgcttttacagatgagaagag

SEQ ID NO: 279578 - DNA, 334 bp, Glycine max
  unsure (1)..(334): unsure at all n locations
agcaaacctaaagaaggctggcttccacacatgggagcagtacaattctcaaggatccacatcttatcactccaaatgcactttcatacaaatcagcaatgagagagaatctgttgaggcagggatacagaattgttggaatcattggagaccaatggagcgatctgcttggagaccacagaggcgaaagcaggacctttaagcttcctaattccatgtactacattgagtagtaccttcacctctcnncaacaatctagctagagtttgctcctatctatatgtaataaggtatgctgatatgcactattcaatagngctttacctagtntnt

SEQ ID NO: 279579 - DNA, 334 bp, Glycine max
  unsure (1)..(334): unsure at all n locations
agcaaacctaaagaaggctggcttccacacatgggagcagtncaattctcaancgnccacatcttatcactccaaatgcactttcatacaaatcagcaatgagagagaatctgttgaggcagggatacagaattgttggaatcattggagaccaatggagcgatctgcttggagaccacagaggcgaaagcaggacctttaagcttcctaattccatgtactacattgagtagtaccttcacctctctcaacaatctagctagagtttgctcctatctatatgtaataaggtatgctgatatgcactattcaaatggagcattagctatgtttg

SEQ ID NO: 279580 - DNA, 327 bp, Glycine max
cgtcggagctgtctgtgcaaatttgcgttgttcttcgcggcacacctcactcactgaacggtaagtatggcggacaaggctgttacaatccgaacccgaaagttcatgaccaacaggcttctttccaggaagcagtttgtcgttgatgtccttcatccagggagggcaaatgtttccaaggctgaacttaaggagaagctggctaggatgtatgaagtgaaagaccctaatactgtatttgtcttcaaattccgaacacattttggaggtggcaaatccactggatttggtttgatttatgatacagtggagaatgccaagaagtat

SEQ ID NO: 279581 - DNA, 201 bp, Glycine max
gtggacacctgctagcaggaaccagtacaatctccgagatgcagttgcacgttgcaccacacaggtataccccttttcatggactgctatttatattgcccttgacaatgtgggaatgtggaacttgaggtctgagttttgggcacgacaataccttgggcaacagttatatttacgcgtttatacagcatcaacctcaat

SEQ ID NO: 279582 - DNA, 325 bp, Glycine max
  unsure (1)..(325): unsure at all n locations
gagtttgttgtgagctataagctagtttatcgtnnggagaatatgangttgtttgttttctttgttgctgcagtagttttggtagcatggccatgccatggcgcaggctaccaaaggttccctctccgaatgaaaactggctatggtgagcgttcttcggaggtaaaatgcgcaagttttaggcttgctgtggaagcacacaacatccgagcctttaaaaccattcctgaagagtgcgttgaaccaacaaaggactacattaatggcgaacaatttagatcagactctaaaacagttaaccaacaantttcttttatgctagtga

SEQ ID NO: 279583 - DNA, 319 bp, Glycine max
  unsure (1)..(319): unsure at all n locations
gccggtattcaggtcggaaacgcctgctgggagctctactgcctcgaacncggcattcagcctgatgggcagatgccaagtgataagactgttggtggaggtgatgatgctttcaacaccttcttcagtgaaacnggggctggaaagcacgtgcctcgtgcgatttttgtanatctcgagcctactgtgattgatgaagttaggactgggacataccgccaactatttcatcctgagcagctcattagcggaaaggaggatgctgcaaacaactttgcccgtggccactataccattggaaggagattgttgaactttg

SEQ ID NO: 279584 - DNA, 325 bp, Glycine max
  unsure (1)..(325): unsure at all n locations
ggttaagatgattccaaccaagcccatggtggttgaaactttctctgagtatcctccccttggtcgttttgctgtgagggacatgcgtcaaactgtggctgtcggagtcatcaagagtgttgagaagaaagaccccaccggagccaaggtcaccaaggccgctgccaagaagaagtgattgcatttgggcaattttgctagcacatgtgatcatcatcgnggttacncctttatagtagttttntccttgnagagtcttaggtgttttgttnaagttatattttnaagtttctgccgatttcatgtgccgtaactttcaaaacta

SEQ ID NO: 279585 - DNA, 318 bp, Glycine max
  unsure (1)..(318): unsure at all n locations
gccttcttgatttcatgagacaagtctcncgtctggactgtcactagtgaggcttgatatcaggcaagantcagantcgtcacactgatgtgctggatgccattaccaaacacttggaaattggctcgtaccaggaatggtctgaagagaaaagacaggaatggttgttgtctgagttaagtggcnaaaggcctctatttggacctgaccttcctcaaactgaagaaattagagatgttttggacacatttcatgtcatagcagaactaccaccagacaatttggagcctatatcatanaatggcaactgcaccatct

SEQ ID NO: 279586 - DNA, 245 bp, Glycine max
  unsure (1)..(245): unsure at all n locations
tctaaaagagatctttttctgctctttgaagaaagaagggtctttgcttgattttggagatgtctctgctctcagatctcatcaaccttaacctctccgataccaccgagaaggtgatcgcagagtacatatggatcggtggatcaggaatggacctgaggagcaaagcaaggctctcccaggaccagttagcgacccttcagagttcccangtggactatgatggtccagcnnnggtcagctct

SEQ ID NO: 279587 - DNA, 321 bp, Glycine max
  unsure (1)..(321): unsure at all n locations
caaggataagacactagtcttccaatnnngngtcagcgcatgaggcagaagcttgactgcggtggtggctacatgaagttgctcagtggtgaacttgatcagaagaaatttggtggggatactccttacagtattatgtttggcccagatatctgtggttacagtacaaagaaagtacacgctattcttacctacaatgacacaaaccacttgataaagaaggatgttccttgtgagactgaccaacttactcatgtttacacatttatcctccgtccggatgcaacctacagcatcctgatgataatgtggagaagcaaa

SEQ ID NO: 279588 - DNA, 313 bp, Glycine max
ctggcctttctgctggcatggctattggtattgtcggtgatgctggtgttagagccaatgcacagcagccaaaactttttgttggaatgattctcatcctcatttttgctgaagctcttgccctttatggtctaatcgttggtattatcctgtcttctcgtgctggccagtctagagctgactaagaaaggagttgtgctgcaaaatattctttgaccacccatctgttttaacctctttttagagggggtgagggaggtaattattagtttttccgagcttagcaatgttcaggagcattttcaggctttag

SEQ ID NO: 279589 - DNA, 160 bp, Glycine max
cttgctatttgtcgatgagttgcatggtcgcctggtgacccttcttggaggacgtgcagctgaagaagttgttttttctggtcgggtgtcaacaggtgcacttgatgacatacgacaagcaactgacatggcatacaaggctatagctgaatatggtctt

SEQ ID NO: 279590 - DNA, 149 bp, Glycine max
cactcattaattgcaagaatggcacttcgttgcttggtgatgtccctttctgttctcttcactcttggtcttgcgagagaaagccatgccagagacgaagatttttggcatgctgtttggccaaacactcccattccaagttcatgcgg

SEQ ID NO: 279591 - DNA, 345 bp, Glycine max
  unsure (1)..(345): unsure at all n locations
ggattcgaaaaagatgaaggtttcgagatgggtggtgagtttgatgttagtggggttactgcccgtntcaacaatgggncgattcgtggtggagaagaacagcctgagagtgacatcgccggaganataanagggacacacgacagtgccattngcaacttcggaatacctcaatacngtggtagcatggccgggaacgtaatttaccctaaggataacaaaaagggtgcnaanagtcgatgagttcgggatttccttcaaatcaacccccggtgctcttcccaacaattgttctactcgatcgcggaagtggctctntgctttgaagtctggaatgcccanaac

SEQ ID NO: 279592 - DNA, 359 bp, Glycine max
  unsure (1)..(359): unsure at all n locations
agacaactttcatagatggagagtgnaaagtccctcttctcaacaaagcggtttccgatcatcaaccccgctactgangacatcatagggcatattccagccgctactaaggaagatgttgaccttgcggtggatgctgctaaaagagccttttcccataacaaaggcaaagattggtcttcagctcctggcactgttcgtgctcgtatcttcgagccatcgttcaaagataacagagaaaaaggatgnactangaaagcttgaagcaattgattgtggaaaaccactagatgaagcactggcagactggatgatgtnattggttgtttaactactatgccgagcttgcagaangattg

SEQ ID NO: 279593 - DNA, 232 bp, Glycine max
  unsure (1)..(232): unsure at all n locations
gancagaagaagaaggtaatttcttatctgctgatgattttgaaccccctcttatccctcccaagacaatcccagatcctgatgataaanaacctgaggactgggatgagagagagnnaattccagactcaagtgcagtaaagccagatgactgggatgagaatgcanccttggaaattgttgatgaagaagctgagaaacctgaaggatgggacaatgaacctgaggagat

SEQ ID NO: 279594 - DNA, 187 bp, Glycine max
gctagtttatcgtgaggagaatatgaagttgtttgttttctttgttgctgcagtagttttggtagcatggccatgccatggcgcaggctaccaaaggttccctctccgaatgaaaactggcatggtgagcgttcttcggaggtaaaatgcgcaagtttaggcttgctgtggaagcacacaacatccg

SEQ ID NO: 279595 - DNA, 348 bp, Glycine max
  unsure (1)..(348): unsure at all n locations
gtgagctataagctagtttatcgtgaggagaatatgaagttgtttgtnttctttgttgctgcagtagtttggtagcatggccatgccatggcgcaggctaccaaaggttccctctccgaatgaaaactggctatggtgagcgttcttcggaggtaaaatgcgaagtttaggctgctgtggaagcacacaacatccgagctttaaaccattcctgaagatgcgttgaaccaacaaaggactacattaatggcgaacaattagatcagatctaaaacagtaaccacaagctttctttatgctagtgaacgcgaagtccatcacaaggcatntttntttnggnnggatacc

SEQ ID NO: 279596 - DNA, 166 bp, Glycine max
  unsure (1)..(166): unsure at all n locations
gaactcgttgccgttaacgatcctttcattaccaccgattacatgacatacatgtttaaatacgacagtgttcacgggcactggaagcatcacgatgnccaccgttaaggatgagaagacccttctcttcggtgacaagccagtcactgtttttggacacaggaac

SEQ ID NO: 279597 - DNA, 317 bp, Glycine max
  unsure (1)..(317): unsure at all n locations
taatcggatccaaatccaaatccaaatccagttcaaagaagatgcaatacaagaacctggggcgatctggcctgaaggtgagccagctctcctacggcgcgtgggtgancntcggaaccaagtgggacgtgaaggaggcganggccttcttaaagtgctgcggcgacnanggcgtcaanttcttcgacaacgccgaggtctacgccaacggccgcgccgaggaantcatgggccaggccatccgggagctcggctggaagcgctcgganatngtcgtctcnacnaagatcctctggggccggcangggcccaaagga

SEQ ID NO: 279598 - DNA, 354 bp, Glycine max
  unsure (1)..(354): unsure at all n locations
agagtntgttgtgagctataagctagtttatcgtgaggagaatatgaagttgtttgtnttctttgttgctgcagtagtgttggtagcatggccatgccatgggcgcaggctaccaaaggttccctctccgaatgaaaacnggctatggtgagcgttcttcggaggtaaaatgcgcaagtttaggcttgctgtggaagcacncaacatccgagcntttaaaaccattcctgaagagtgcgttgaaccaacaaaggnctacataatggcgaacaatttagatcagactctaaaacagttaaccaacaagctttcttttatgctagttaacgcgaagtccatcacaangacatnttt

SEQ ID NO: 279599 - DNA, 206 bp, Glycine max
  unsure (1)..(206): unsure at all n locations
gccacttaccanaaaacctgaagaaattggtgctgntgaccagggtcacatgtttggctatgccactgatgaaacccctgaattgatgccattgagccatgttcttgcaacaaaactcggtgctcgtctcaccgaggttcgcnagaacggtactggccttggctgangctgatggaagacccaagtgaccgttgagtatacaatga

SEQ ID NO: 279600 - DNA, 327 bp, Glycine max
  unsure (1)..(327): unsure at all n locations
ctccaagcttggtggaaagaacttgtagaggtgggtcatggtgatttgaaagataagccatggtggcaaaagatgcaaactcgtgaagagttggttgaagcttccgctatcctcatatggattgcttcagccctcatgctgctgttaactttggacagtatcatatggaggttaatctaaacaggcaactattagcaggagattcatgcctgaaaagggtccctgatatgatgcgtggctaagaacctgagaagagttttgaagctantactggcnagaggagacctcatgacctacagtatagnatntgtcaggccgantgatgnt

SEQ ID NO: 279601 - DNA, 308 bp, Glycine max
  unsure (1)..(308): unsure at all n locations
aatcatctccggcaaggaagatgccgccaacaactttgccagangccactacaccgttggcaaagagatcgtannnctgtgcttngatcgcgtccgaaagctcgcagacaactgcactggtctccagggcttcctcgtcttcaacgctgtcgncggtggcaccggttccggtctcggatctctcttgttagagcgtctctccgtcgattacggcaaaaagtccaaattagggtcaccatttaccttccctcagnttcaaccgnatngggagcctaaanaggtctttcaaccatcctttggaaaaacgg

SEQ ID NO: 279602 - DNA, 322 bp, Glycine max
gaaacagatagaagctttgggttgagaaatttcaggtacattgagccatcaaagaagctttggaaagagaatgccctggagttgtttcatgtgctgatatcctcgttctctctgccagagatggcattgtttcgctaggaggtccccatatccctcttaagactggaagaagggatggtagaaggagcagagctgatgtggttgagcagttcctcccagaccacaatgagtccatttctgcagttcttgacaagtttggtgccatgggaattgacacccctggcgtcgttgcatgcttggagcacacagtgttggtcgaacc

SEQ ID NO: 279603 - DNA, 312 bp, Glycine max
  unsure (1)..(312): unsure at all n locations
ggacaactgaggttgaaactgccaagactgaaaatgatgcaagataatacttgggttgagccctggtgagcttncagnngtgaatcctaacaagaaaacctctgttggaaatgatgtgggataccgtttgattccagcaatccccagctcatcctcttctcacagatgacgattatccacaaatacgtggcgctttaaccattccaatgtgtgggtcatccatacaataggactgagaagtgggctggtggatctacgttgatcacagccatggagatgatattagccgtttggaccaaaagatagagacat

SEQ ID NO: 279604 - DNA, 164 bp, Glycine max
  unsure (1)..(164): unsure at all n locations
gtgcttatggatctcgaacctggaaccatggacagcatcagatctggcccctacggcaagatcttccgcnccgacanattcgtcttcggccagtncggcgccggtaacaattgggccaaaggtcattatactgaaggcgccgagctgatcgactcnttctcgac

SEQ ID NO: 279605 - DNA, 286 bp, Glycine max
  unsure (1)..(286): unsure at all n locations
ggacaactgaggttgatactgccaagactganaatgatgcaagataatacttgggttgagccctggtgagctttcagtggtgaatcctaacaagaaaacctctgttggaaatgatgtgggataccgtttgattccagcaatcccagctcatcctctnctcacagatgacgattatccacaantacgtggcgctnttacnatttcatgtgtgggtcctccatacatnggctganaagtgggcggtggacctagttgtccnagccangngnnatcttngcggtgggac

SEQ ID NO: 279606 - DNA, 320 bp, Glycine max
  unsure (1)..(320): unsure at all n locations
gaactgtgaagaagagggtaactgcaaacaaagcaagcaaaaaaaagacgcagtgatggagaggatgaagagggtgcttctgctgcttctggccttcactgttcttctcatgttgccagaagcttctgctacaaagtttactgttggaaacaaccagttttggaaccccaatattaactacactgagtgggctaaaggcaaacatttctaccttggtgactggctctattttgtgtacgataggaaccaagcgagcntgttggaagtgaacaagacagattatgaaacatgtaactctgatcatccatcacaaattggac

SEQ ID NO: 279607 - DNA, 309 bp, Glycine max
gcaagtgttgaaatcgatgatcaccctatgcaaattgaagaacacagtacccgaaaaccttcttctataaagaagaccttcatccaggcaaaacaatgaaagtacaattcagcaagcctccctttcaacaaccatggggtgttggtacatggttaaaggaaattaaagacactactaaagaaggatatagtttgaagagtatgctcaggaaagaagccatgagggagagagagtttgtgcaaatccttgggaccagtattggtttgccatttcaaagctgggaagaccatccagtacttccagttcctt

SEQ ID NO: 279608 - DNA, 297 bp, Glycine max
  unsure (1)..(297): unsure at all n locations
gtttcccgaaattttctggagaggagtttgannacttttctgccttagcagagaagttgcgttctgactatgacttcggtcacactctgaatgccaaacaccttccaagaggagagtcatcagttctggtcccgtagttaggttgntcaagccattcgatgaacttttgnngacttccaggattcccattgtggaagctctagagaattggtgagaatctagtaccctgtgtactgtcttaacatgaccgagcatcaccttcgtgccaattcttcacagcccatgcaaggcatgtgt

SEQ ID NO: 279609 - DNA, 312 bp, Glycine max
  unsure (1)..(312): unsure at all n locations
gagaaagtttgtngcggacggagtgttctttgccgaactgaacgaggttctgacacgtgaatctggcggaggacggttactccggcgtcgaagttagggttacgccgatncgcaccgagatcatcatcagagccaccagaacccaagccgtctaagtgagaagggaaggagaataagggacttacntcagtgngcagagagtttcaaattccccgaaaacagcgtcgagtttatgctgagaaggtcaacaacagaggcctgtgtgccattgtcaggccgagtcgcttcgctacaagctttcggtggcctcgc

SEQ ID NO: 279610 - DNA, 314 bp, Glycine max
  unsure (1)..(314): unsure at all n locations
ctatactccggtagcccgctgtgttggtgagngagtngtggtgcttnggaaagatgaggccgattctgangaaaggtcatgagaggccattgacgttcctgaaatacaacagggacggcgatctcctcttctcctgcgccaaggaccanaacctaccgtcntggttgccgaaaacggcgaacgtttgggcanttatcgcggccacaacggcgccgttnggacctcggacgtctcaagagattcggttcgannatcacgggaantgccgtcagaccgccagctatgggacttnaaacggcctgnattatacactt

SEQ ID NO: 279611 - DNA, 307 bp, Glycine max
  unsure (1)..(307): unsure at all n locations
gtttccacactgcataccttaggtctnccgaattcgagttaatttgcaagatggctaaggaaaanggctcagatcaacattgtggtggttggtcatgtggaccctgaggaggcaaccaccattaacgagctgaagaagcctgttgtggagaaagaagctccagggcatgccatatgaagggcatgcacgtacggcctcggagggggaccagaaaatttgtaacaaaatatctggaaccctaatgtancatgtctcatcagtgtgtatttaactanctttgctaggttacgttcttgagatgagannt

SEQ ID NO: 279612 - DNA, 305 bp, Glycine max
  unsure (1)..(305): unsure at all n locations
gtgcttatggatctcgaacctggaaccatggaagcatcagatctggcccctacggcaagatcttccgcccngacaaagcacgtcttcggccagtccggcgccggtaacaattgggccaaaggtcattatactgaaggcgccgagctgatcgactccgtactcgacgtcgttcgcaaagaggctgaaaactgcgattgcttgcaaggttttcaagtttgccactctcttggaggaggcacaggtttggcatgggaacatgtngatatcaaaaattaggngtattccccaganatntgttgcctttt

SEQ ID NO: 279613 - DNA, 305 bp, Glycine max
  unsure (1)..(305): unsure at all n locations
acacgtatcaacttcaataatcgcatcgcaaaagcagtttccggtgcatctcaccgtctccgaaaatgaacgacgcagatgtctcgaagcaaatccagcagatggtgcggttcatccgccaggaagctgaggaaaangccaacgagatctctgtctccgccgaagaggaattcantatcgagaagctgcagntggtcgaagccgacangangaagatcaggcaagnatacgancgcaaagagcgccanntganatcgcaagaagattgngtacncaatgcagctgaatctctcggattannttct

SEQ ID NO: 279614 - DNA, 306 bp, Glycine max
  unsure (1)..(306): unsure at all n locations
atggtgttgaccctttgaagtttttgccatctggttcttggagaggaccaaggggcagggcttggttgtgcctttgtgggcaccccaggttcaggtgcttggtcacaggtcagttggggggttcttgagtcactgtgggtnnaattcgacgctcgagagtgtgctgcaggntgtgcctctgatcgcgtggcccctgtttgcagagcagaggatgaacgcaattctgctttgtgaggggctcaantgggactgtggcctagagtgaatgaaaatggcttggtggaaagaggggagacgctaaggtat

SEQ ID NO: 279615 - DNA, 311 bp, Glycine max
  unsure (1)..(311): unsure at all n locations
gagagagaaactgagagaaattcgcaaaccctatttcggaaagatcggcgatggctgcctccaaggatcgcgagancttcgtnctacatctncaagctcgccgaacaggccgagcgatacgaagagatggtggaatcaatgaagaatnttgcgaatctcgacgttgaactgactgtggaggagcggaatttactttctgttgggtacaagaatgtgattggtgctcggagancatcgtggaggatcctgtcttccattgagcaaaaggaagaaacanaagggacgagttgaatgcgaanggattaaggagt

SEQ ID NO: 279616 - DNA, 295 bp, Glycine max
  unsure (1)..(295): unsure at all n locations
gagtgtatgaatggtctggaaataatcccctgccccctgagatatgggctccttccatacatgcttccattcaatccaggaaggatgtggtgtcactgccggatggtctatttgccgatgtcctacttatatggcaagaggttgttggtcaatctcacaacagtatatcttgagaaaagagcttatacagtaccataccatgntatagatgggatcaggnngcanttgtgtgcanggaagnttgtactanntcacccattgtacaggatatcttggggcactntacacagtnctt

SEQ ID NO: 279617 - DNA, 297 bp, Glycine max
  unsure (1)..(297): unsure at all n locations
ccaacttcacagtctgagtgtacagctgagaggcttatcaatggagtgagggtcgtgcaatttttgctagtggaagtccatttgatcctgtagaatacaagggcaaagtgtactattctggccaggccaacaatgcttacattttcccgggctttggtctggggtggtaatctcaggagcaatcagagtgcatgatgatatgcttctagcagcttcggaancttggctaaactagtgtccaacgagactangaaagggttgattatccaccattctctaacatcagagatttcngnt

SEQ ID NO: 279618 - DNA, 305 bp, Glycine max
  unsure (1)..(305): unsure at all n locations
attaattgcaagaatggcacttcgttgctggtgatgtccctttctgttctnttcactcttggtcttgcgagagaaagccatgccagagacgaagatttttggcatgctgtntggccaaacactcccattccaagttcattgcgagatcttctaaagcctggccctgcaagtgttgaaatcgatgatcaccctatgcaaattgaagaaacacagtacccgaaaaccttcttctataaagaagaccttcatccaggcaaaacaatgaaagtacaattcagcaagcctccctttcaacaaccatgggg

SEQ ID NO: 279619 - DNA, 142 bp, Glycine max
aaagagtttgtggtttccttatctatgtttacttctgaataacatagactttatgcatgtctatgcgtaattattgcctgaacttctgcactattgtatttggatgctctcggttttcatataataaagtgtgtctcacttt

SEQ ID NO: 279620 - DNA, 304 bp, Glycine max
  unsure (1)..(304): unsure at all n locations
aagcnccactcaaccaccacaccactctctctgntctncttctacctttcaagtttttaaagtattaagatggcanagacattcctatttacctcagagtcagtgaacganggacaccctgacaagctctgcgaccaaatntccgatgctgtcctcgacgcttgccttgaacaggacccagacagcaaggttgctgcggaaacatgcaccagaccacttggtcatggtcttngaganatcaccaccaaggccacgttgactacgagangatcgtgcgtgacacctgcagaacatcggcttcgtt

SEQ ID NO: 279621 - DNA, 297 bp, Glycine max
  unsure (1)..(297): unsure at all n locations
cgatcatatttcttttgtttggatactgtccggagcctatttttgggtgcaggcttcaccgagctcgagctngattattgttgtgttaagtctgtaaatcgccagaaaggaaagtccatgcaaagagtgtgggttcacgggaagttccagaagcctgcactgagttgtcaataatctcccttggtgtgctgtgtgaagtcggatgaaaaagtacacttattcaagtttatcattgattgctttcagcaacacagaaaagtataaaagagaagcaggtagaaaagacaagaactctgg

SEQ ID NO: 279622 - DNA, 296 bp, Glycine max
  unsure (1)..(296): unsure at all n locations
atcaactcttcanaagggagaagaaaaggaaagaaaactctcaaaaaactattatagcaatggcagaacaaaaccaaaaccanacaactgaagctggaaggcaccaagaggttggtcacaagagccttctccagagtgatgctctttaccagtatattctggagacaagtgtctacccaagagaacctgaatccatgaaagaactgagagagttgacagcaaaacacccatggaacatcatgacaacctctgcagacganggcagttcttgaacatgctccttaagctcatcaatg

SEQ ID NO: 279623 - DNA, 196 bp, Glycine max
agcaaacctaaagaaggctggcttccacacatgggagcagttaattctcaaggatccacatcttatcactccaaatgcactttcatacaaatcagcaatgagagagaatctgttgaggcagggatacagaattgttggaatcattggagaccaatggagcgatctgcttggagaccacagaggcgaaagcaggacc

SEQ ID NO: 279624 - DNA, 351 bp, Glycine max
ccttttcagggaaggaccctaccaaggttgacagaagtggtgcctatattgtaaggcaggctgcaaagagtgtcgtggcaaatggccttgctagaaggtgcattgtgcaagtttcctatgccattggtgtccctgagcccttgtcagtgtttgtggacacttatggaactgggaagattcctgacaaggagattctgcaaattgtgaaggagaatttcgacttcagacctggaatgatcaccattaacttggaccttaagaggggtggtcataggttcctcaagacagtgcttatggacactttggaagggatgatgcagcttcactgggaagtgtgaaccactcaagtca

SEQ ID NO: 279625 - DNA, 210 bp, Glycine max
  unsure (1)..(210): unsure at all n locations
gaggaagttgtcgttncncagggcgattttctacattgtaatgcaatgcttgggtgctatttgtggcgctggcgtggtgaagggttcgaggggaaaacaanatacggtacgttgaatggtggtgccaactttgttgcccctggttacaccaagggtgatggtcttggtgctgagattgttggcactttcgtccttgtttacaccgttttc

SEQ ID NO: 279626 - DNA, 264 bp, Glycine max
  unsure (1)..(264): unsure at all n locations
aagagatctgcctcctttttatcaaatctatctcttcttcaagaatagttgaaaatggggctgtctttcaccaagttgttcagccgactgtttgncaagaaagagatgcgtatactgatggtgggtctcgatgctgcgggtaagaccaccattctgtacaagctcaagcttggagagattgtcaccaccattcccaccattgggtttaatgtggaaactgtggaatataagaacatcagcttcactgtctgggatgttggaggt

SEQ ID NO: 279627 - DNA, 235 bp, Glycine max
gatcgagataactagaaacagtgtgatgaaaatgaaggtccttgttttcttcgttgctacaattttggtagcatggcaatgccatgcgtacgatatgttccctctccgaatgaacactggctatggtgcccgtactccggaggtgaaatgcgcaagttggaggcttgctgtggaagcacacaacatctttggctttgagaccattcctgaagagtgcgttgaagcaacaaaggaa

SEQ ID NO: 279628 - DNA, 248 bp, Glycine max
  unsure (1)..(248): unsure at all n locations
aaccaatgtgacttccaacgctgttgtagagtgctatctcagttttgtcatcattgttgtccantgcacctganaattatgattgcctaggaaatcttgggatagcttatcttcaaattgggaatttggaattatctgcaaaatgttttcaagaattgattttaaaagatcanaaccatcctgcagctttggtcaattatgctgctctnctttgtgtaaatatgcttcggtgtagcaggncctggtgc

SEQ ID NO: 279629 - DNA, 178 bp, Glycine max
atcgcacggcctttgtgccggcgacgcatcattcaaatttctgccctatcaactttcgatggtgggatagtggcctaccatggtggtgacgggtgacggagaattagggttcgattccggagagggagcctgagaaacggctaccacatccaaggaaggcagcaggcgcgcaaattac

SEQ ID NO: 279630 - DNA, 291 bp, Glycine max
tcgcaagcaaaaagaaagaatcccaggcgaggagaaagatggaggggaaggagcaggatgtgtcgttgggagcgaacaagttccccgagagacagccgattgggacggcggcgcagagccaagacgacggcaaggactaccaggagccggcgccggcgccgctggttgacccgacggagtttacgtcatggtcgttttacagagcagggatagcagagtttgtggccacttttctgtttctctacatcaccgtcttaaccgttatgggagtcgccggggctaagtctaagt

SEQ ID NO: 279631 - DNA, 347 bp, Glycine max
atttgaagcgtggttatgttgcctcaaactcaaaggatgaccctgcaaaggaggctgctaacttcacagcccaagtcatcatcatgaaccaccctggtcagattggaaatggctatgcccctgtcctcgactgccacacttctcacattgctgtcaagtttgctgaactcatgaccaagattgacaggcgatccggcaaagagcttgagaaggagcccaagtttttgaagaacggtgatgctggttttgttaagatgattccaaccaaacccatggttgttgaaactttctccgagtatcctccacttggtaggttgctgttagggacatgcgtcaaactgttgctg

SEQ ID NO: 279632 - DNA, 287 bp, Glycine max
  unsure (1)..(287): unsure at all n locations
caaagtaatctaacaaagtaagcacaatgagggagatattgcacgtgcaaggtgggcaatgcgggaaccaaatcggttccaagttctgggaagtgatatgcgacgagcatggcatcgaccccaccggaaagtacaccggcgacgaggcctccgatctccaactggagaggatcaacgtctactacaatgnagcctccggcggaaggtacgttccccgggccgtcctcatggatctcgagcccggcaccatngacagcatcagatccggcccatacggcaagatcttc

SEQ ID NO: 279633 - DNA, 290 bp, Glycine max
ctttagccgaggtcaggaggagcactagctaagttcacaatttcaaaatggctaggggactaaagaagcatttgaaaaggctcaatgctcctaagcattggatgcttgacaaactgggtggtgcatttgcgcctaaaccctcatctggaccacacaaatcgagggagtgcctccccctcattcttattctgcgaaaccggctgaagtatgctctgacataccgtgaagtcattgctattctgatgcagcgccatgttcttgttgatggcaaagtcaggactgacaagact

SEQ ID NO: 279634 - DNA, 169 bp, Glycine max
  unsure (1)..(169): unsure at all n locations
ctgctcgtgcctctagggttatcatatctccatttccatttcctctctctcagtttccaagaatctnanngctatgggaaagtcttacccaaccgtgagcgctgattaccanaaggccgttgagaangcgaagaagaagctcagaggcttcatcgctgagaagagatgg

SEQ ID NO: 279635 - DNA, 170 bp, Glycine max
  unsure (1)..(170): unsure at all n locations
gccaaatacttgaagccctctgttgcatgnattcctaatgcagaaggagcttgattatctagttggggctgtgtcaaaccccaagagaccatttgctggctatttcggtggatcgaaggtgtcntccaagattggagtnattgaatccttgttngagaaagttaatgttc

SEQ ID NO: 279636 - DNA, 346 bp, Glycine max
attagcaggagattcatgcctgagaaagggtctgctgagtatgctgctttggctaagaaccctgagaaggagtttttgaaaactattactggcaagaaggagaccctcattgaccttacaattatagaaatcctgtcaaggcacgcatctgatgagttctaccttggggagagagatggtggtgacttctggacttctgatgctggtccactagaggccttcaagaggtttggaaagaagcttcaagagattgaacataagcttatacagaagaacaaggatgagacgttgagaaaccgcactgggccactaaaatgccttacactctgctctatccttctagtga

SEQ ID NO: 279637 - DNA, 170 bp, Glycine max
  unsure (1)..(170): unsure at all n locations
ggagggagacaacatgattgagaggtccacaaaccttgactggtacaagggtccaactctgcttgatgcacttgaccagattagtgagcccaagaggcctctgacaagccnctcaggcttccccttcaggatgtgtacaagattggaggtattggaactgtgccagtggg

SEQ ID NO: 279638 - DNA, 139 bp, Glycine max
  unsure (1)..(139): unsure at all n locations
gtgagctataagctagtttatcgtgaggagaatatgaagttgtttgttttctttgttgctgcagtagttttggtagcatggccatgccatggcgcaggctaccaanggttccctctccgaatgaaaactggctatggtg

SEQ ID NO: 279639 - DNA, 107 bp, Glycine max
gttcttctttcctcaaccttctttcttcttatatatcgaacatggctaagtatcattcaagtgggaaaagctcttccatgactgctatagccttcctgtttatcctt

SEQ ID NO: 279640 - DNA, 187 bp, Glycine max
gcgaagagaatggctcccaagggtttaatctttttggctgtgttatgcttctcagcactgtcacccagtcgttgtcttgcggaggataatggacttgttatgaacttctacaaggaatcatgccctcaggctgaagacatcatcaaagaacaagtcaagcttctctacaagcgccacaagaacactg

SEQ ID NO: 279641 - DNA, 340 bp, Glycine max
caactcagttcggtggtggtatccattctgagttgaacaagaaggtttacaagcttggcaaagctggagataaatctcactctgctcttactgagtttgataggaccgagaaagacattaccccaataggtggtttccctcactatggtgttgttaaggatgattatatcatggtcaagggatgctgcgttggtcccaagaaaagggttattacattgcgccaatccctccttaagcagacttctcgtgttgctctggaggagatcaagctcaagtttatcgacacctcttcaaagtttgggcatggtcgcttccagaccacacaggagaagcagaagtt

SEQ ID NO: 279642 - DNA, 347 bp, Glycine max
  unsure (1)..(347): unsure at all n locations
tggagttagttctaaacagcacaacaattggagttggagttgtttctctgatcctcctcttgtncttgtttttgcgtggtggttcatggaagagtggggaagagggtcctccaacagttgcaggtgcatggccaataattggtcacctcccattgttgcttggttcaaagacacctcataaaacattgggtgacttggctgacaagtatggacccatattctcgatcaagattggtgccaaaaacgcagtggttgttagcaactgggaaatggctaaagaatgctacaccacaaacgacatcgccgtttcctcctccccgatcttactccgtaactcttgtgtacaa

SEQ ID NO: 279643 - DNA, 335 bp, Glycine max
  unsure (1)..(335): unsure at all n locations
cattttcattccctttttccttcgcactactccctcattctgtgccatgtcttcctctntcgttcttccttccactcccttcttcgcccatggaacangaaccctccctctcactcgatctaggctttccatgaccgtctccgccggatctcagccttctctccncgacgctctgttcgccgattacaaggcctncacttcattcctcttccccggccagggtgctcaagctgttggaatgggggaagaagctcagaatgtgcctactgctgcggtttgttcaacaaggcaaacgacgtattggggttgatcttcttgatatatgcatcaatggg

SEQ ID NO: 279644 - DNA, 334 bp, Glycine max
  unsure (1)..(334): unsure at all n locations
tgattatgaggaggatctaaaacagatgaagaatctttcaaagcaggagttcgtgcacatacttcgccgccacagtaccggtttctcaaggggcagttcgaaataccggggagtgacacttcacaaatgtggccgttgggaagctcgaatgggacaattccttggcaagaagtatatatatcttgggctattcgacagcgaagtagaagctgcaagnngcttatgacaaggcagctatcaagtgcaatagaagagaggctgtcactaactttgagccaagtatatatgagagcgagatgaaacctgaagctattaatgaaggtggcagtcacga

SEQ ID NO: 279645 - DNA, 335 bp, Glycine max
  unsure (1)..(335): unsure at all n locations
ggatggtgtctctgaaacttcagangcggcttgccgtagcgttctcaagtgtggtagangcaaagtttggcttgaccctaatgaggtcaatgaaatctccatggctaattctcgacaaaacataaggaaattggttaaggatggtttcattatcaggaagccaactaagattcattcccgttcccgtgctcgcagaatgaaggaggccaagaggaagggacgtcactctggttatggtaagcgtaagggtacaagagaggctaggctccccaccaaaatcctttggatgaggaggatgcgtgtcctcagacgattgctccgcaagtacagggaag

SEQ ID NO: 279646 - DNA, 138 bp, Glycine max
  unsure (1)..(138): unsure at all n locations
tgattgaagaagatgccgatcnganacatcgccatcggaaggcctgaagaggctactcaccncgacacgttgaaggcggggttggctgagttcatctccaccttgatcttcgtgttcgcnggttcaggttccggcatg

SEQ ID NO: 279647 - DNA, 161 bp, Glycine max
cattaattgcaagaaggcacttcgttgcttggtgatgtccctttctgttctcttcactcttggtcttgcgagagaaagccatgccagagacgaagatttttggcatgctgtttggccaaacactcccattccaagttcattgcgagatcttctaaagcctg

SEQ ID NO: 279648 - DNA, 211 bp, Glycine max
gaatctcaagattctaagagagattttgctgctctttgaagaagggtgtttgcttgattttggagatgtcgctgctctcagatctcatcaaccttaacctctcagacactactgagaaggtgatcgcagagtacatatggatcggtggatcaggaatggacctgaggagcaaagcaaggactctcccaggaccagttagcgacccttcaaa

SEQ ID NO: 279649 - DNA, 346 bp, Glycine max
gaagccaacaaagctttcctggggctgtaaagtcaaattagcaatcaaagtatctggaattcactggtggtacaaagttgaaaatcatgctgcagagcttactgctggatattacaaccttaatgatagagacggataccgccccattgcaaggatgctgtctcgccatcatgccattttgaactttacatgtcttgagatgagggactcagagcaaccctcagatgccaaaagtggaccacaggagcttgttcagcaggtattgagtggaggttggagagaagacatcagagttgctggagaaatgcattccaagtatgatgccacagttacaaccaatcatact

SEQ ID NO: 279650 - DNA, 209 bp, Glycine max
  unsure (1)..(209): unsure at all n locations
gatttttcttcttcacgtggtacttcttgaacgtgattttcaacatcctcaacaagaagatctacaattacttcccctatccatacttcgtatcggtaatccatttattcgtgggagtggcgtactgtttggtgagctgggccgtgggccttccaaagcgtgctcctatagnctccaacctactgaagttgctcattccagtggctgtg

SEQ ID NO: 279651 - DNA, 210 bp, Glycine max
  unsure (1)..(210): unsure at all n locations
ggatagtaattaacctcactcaaactcgggatcacagaaaccaacaacagttcttgcactgaggtttcacgatgttgctggaacttgcacttggtttgtttgtgttagctttgtttctgcacttgcgtcccacaccaagtgcaaaancaaaagcacttcgccacctcccanaccctccaagcccaaagcctcgtctngcccttcattggc

SEQ ID NO: 279652 - DNA, 165 bp, Glycine max
  unsure (1)..(165): unsure at all n locations
tgagttccatcagccaaacctccactaggtgtttttnttgctgcagtggcccctcgtttacagcctcgttattattctatttcatcctctcctaggtttgctccgcaaagggtacatgtacttgtgcttggtgatggtccaactcccatggtagaattcacaagg

SEQ ID NO: 279653 - DNA, 214 bp, Glycine max
  unsure (1)..(214): unsure at all n locations
gctgttagggacatgcgtcaaactgttgctgtgggagtcatcaagaacgttgagaagaaggatcctaccggagccaaggtcaccaaggctgcccagaagaagaagtgaatcgtgcgggctggttcatcaggggatgttggttacaataatgttggtttctttctgtactcttgtgtctctttctaggtanttgtttnngacaaagttgaatccc

SEQ ID NO: 279654 - DNA, 287 bp, Glycine max
tagtgcctccttgccagaagttaaaatggcccaagaaactttcctattcacatctgaatcagtgaacgaggggcaccctgacaagctctgtgaccagatctccgatgctgtgctcgatgcatgcttggagcaggaccctgacagcaaggttgctgtgaaacctgcaccaagaccaacatggtgatggttttcggagagatcacaaccaaggccaacgtggatatgagaagatgtgcgtgacacatgcaggaacattggttttgctctgatgagttggcttgatgctg

SEQ ID NO: 279655 - DNA, 120 bp, Glycine max
taattctctctactactgctagctgtgacttgttttgagttcaatcaaatcgcattggtatctgaaatcaggaaagatggttagcgtactgagatcaggcaggcacaaagggcagaaggc

SEQ ID NO: 279656 - DNA, 262 bp, Glycine max
  unsure (1)..(262): unsure at all n locations
gtactttgaggtggagttgaaggaggtgaagctccgtgatgattactattggatggaccctgaaaaggccgtggaattggtggatgagaacactatttgtgttgctgctatccttggttcaacactaaatggagancttgaagatgtcaaacgcttaaatgatctcctaattgaaaagaataaaataactgggtgggacactcctattcatgttgatgcagcaatggtggctcattgccccatttctttacccagagcttga

SEQ ID NO: 279657 - DNA, 144 bp, Glycine max
  unsure (1)..(144): unsure at all n locations
tgattgaagatgatgccgatcagaaacatcgccatcggaaggcctgaagaggctactcaccccgacacgttgaangcggggttggctgagttcatctccaccttgatcttcgtgttcgccggttcangttccggcatcgctaca

SEQ ID NO: 279658 - DNA, 202 bp, Glycine max
gtgacagatggaagttcgaagaggaaaagctattggacaactgaggttgaaactgccaagactgaaaatgatgcaaagataatacttgggttgagccctggtgagctttcagtggtgaatcctaacaagaaaacctctgttggaaatgatgtgggataccgtttgattccagcaatcccagctcatcctcttctcacagatg

SEQ ID NO: 279659 - DNA, 328 bp, Glycine max
aatcttcctcctctctatattttggaatggaaccattgatggcactggatttcatgcaaagggaacaattttcagattgagtggaataccttctgctgtcagcttatatgccttctgctatagtgctcatcctatccttcccactctctacaattctatgagagacaaaagtcagttctctagggttctgtctatatgcttttcagtatgcaccctggttatgcagcagcaggtgttttgggctacttaatgtttggacaagaggttgatcacagtgactttgaacctcccacaggcagtccagtcacagtagcatatcataccttgg

SEQ ID NO: 279660 - DNA, 115 bp, Glycine max
  unsure (1)..(115): unsure at all n locations
gggtgttggtcgattaagacagcaggacggtggtcatggangnngaaatccgctaaggagtgtgtaacaactcacctgccgaatcnactagccccgaaaatggatggcgtaaagc

SEQ ID NO: 279661 - DNA, 177 bp, Glycine max
  unsure (1)..(177): unsure at all n locations
canaggactacattaatggcgaacaatttagatcagactctaaaacagttaaccaacaagctttcttttatgctagtgaacgcgaagtccatcacaacgacatatntatattcggcatagataacaccgtactctctaatatcccatactatgaaaaacatggatatggggtggagg

SEQ ID NO: 279662 - DNA, 250 bp, Glycine max
  unsure (1)..(250): unsure at all n locations
ctctgctctaagggttctccacctagagggaaatggctcccaaaccgcctagtacgggtctgtttgttggactgaacaagggtcacgtcgtcaccaagaaggaattgcctccacgcccctcagatcgtaaggggaaaacaagcaagagggtgcactttgtgaggaacctcataagagaggtagccggttttgcancctatgaaaagcgtataactgagttgtgaaggttgggaaggataagagggcactg

SEQ ID NO: 279663 - DNA, 258 bp, Glycine max
  unsure (1)..(258): unsure at all n locations
accgttcaggatcacacgcagtgtatcacagaagcggagaaatatggaccaaaaggccaaggaaaaacttttaacgttgcaactgccaagcctaataaggatagcaagcaaaggcctgaagttgatattaatgtggggttatctgatcggcctccttggttctgtagtctctgcaatacgaaagctacaagtaagcaaacacttcttctccatgcggtggaagaacacanngcaagntagagcatcatgttcaaanaa

SEQ ID NO: 279664 - DNA, 320 bp, Glycine max
  unsure (1)..(320): unsure at all n locations
accgttcaggatcacacgcatgtatcacagaagcggagaaatatggaccaaaaggccaaggaaaaacttttaacgttgcaactggccaagcctaataaggatagcaagcaaaggcctgaagttgatncgaatgtggggttatctgatcggcctccttggttctgtagtctctgcaatacgaaagctacaagtaagcaaacacttcttctccatgcggatggaaagaaacacagggcaaaggtagagcatccatgttcaaagcaaccaccatcgaggcagacaatctgccatgatgcaaaggttgtgtggagatgntcnta

SEQ ID NO: 279665 - DNA, 175 bp, Glycine max
  unsure (1)..(175): unsure at all n locations
gagtttgttgtgagctataagctagtttatcgtgaggagaatatgaagttgtttgtnttctttgttgctgcagtagttttggtagcatggccatgccatggcgcaggtaccaaaggttcctctccgaatgnaaactggtatggtgagcgtcttcggangtaaatgcgcagtttag

SEQ ID NO: 279666 - DNA, 180 bp, Glycine max
  unsure (1)..(180): unsure at all n locations
attaattgcaagaatggcacttcgttgcttggtgatgtccctttctgttctcttcactcttggtcttgcgagagaaagccatgccagagacgaagatttttggcatgctgtttggccaaacactcccattccaagttcattgcgagatcttctaaagcctggccctgcaagtgangaaat

SEQ ID NO: 279667 - DNA, 172 bp, Glycine max
  unsure (1)..(172): unsure at all n locations
cggggtggttctgttggatacatgggccagcatgtttgggatgagggnntaggattgcattagctgaaaagggtgttgagtatgaatacaaggaagaaaatctcaggaacaagagtctttgcttttgcaaatgaacccaattcacaagaaaattccagttctgatccataat

SEQ ID NO: 279668 - DNA, 148 bp, Glycine max
ggggaaacagattgtgccggtgaaatcagtgatctacgcgctctcccctttccagcagaagataatgccgggtctctggaaggacttgcccacaaagattcaccacaaggtctccgagaattggatcagcgccactctcttgttggtc

SEQ ID NO: 279669 - DNA, 135 bp, Glycine max
  unsure (1)..(135): unsure at all n locations
gtccanctctgcttgatgcacttgaccagattagtgagcccaagaggccctctgacaagcncctcaggcntccccttcaggatgtgtacaagattggaggtattggaatgtgccatgggacgtgttgagancggg

SEQ ID NO: 279670 - DNA, 189 bp, Glycine max
  unsure (1)..(189): unsure at all n locations
ccattctctctgtgtatttcnctacctctcccttcaagatgcagatcttcgtcaagaccctcaccggcaangaccatcaaccttgaggtgtgaagtctgacaccatcgacaacgtcaagggcaagattcaggacaaggaaggatcccccggancagnaacgtctcattttgnngggaagaattgaggng

SEQ ID NO: 279671 - DNA, 195 bp, Glycine max
cacaaattgctagcacacagaaaaatcgtgcagagggaaccaagaagtcaaacttggggaattcaaattcgaatggatttggagagcacatatttgtcgtgaagaacacaagtcaacaacggatgaccagccagtgccaatgtctttagagaagacagagccaatgcatagtgaatcagatcagtggaggaagtt

SEQ ID NO: 279672 - DNA, 195 bp, Glycine max
attccattctctctgtgtatttccctacctctcccttcaagatgcagatcttcgtcaagaccctcaccggcaagaccatcacccttgaggtggaaagtctgacaccatcgacaacgtcaaggccaagatccaggacaaggaaggaatccccccggaccagcaacgtctcattttcgccggaaagcaacttgagga

SEQ ID NO: 279673 - DNA, 138 bp, Glycine max
  unsure (1)..(138): unsure at all n locations
ctgaaganagcagttggggaacatattgtcctggggagtatctagtcctccccctgaatatgaaacctgcctgggtgacctgtacagtgttgcttggatggaagatagtgacatacacaatttgcgaacagaaacttt

SEQ ID NO: 279674 - DNA, 126 bp, Glycine max
cgcaccggcattgccagagactcttaaaaattacaacaagctgttgtctcttggcttcaagattgtattcttgtcaggaagatatcttgacaaaatggccgtaacagaagcaaacctaaagaaggt

SEQ ID NO: 279675 - DNA, 275 bp, Glycine max
  unsure (1)..(275): unsure at all n locations
cgaccggcggcgtgaagaagccgcacagattcaggccgggaaccgtggcgctgcgcgagatccggaagtatcagaagagcacggagctatcatccggaagcttccgttccagcgcttggtccgcgagatcgcgcaggacttcaagaccgactccggttccagagtccgncgtctccgcgctccaagagncgccgagcttattngtcgtctttcgaaacacgaacctctgcgcattatgccaacgtgttatatcatgcccaagacatcagtcgcca

SEQ ID NO: 279676 - DNA, 357 bp, Glycine max
  unsure (1)..(357): unsure at all n locations
gggtcagtatagaagactggtggagaaatgaacagttctgggttatcggtgggacatctgcgcatctctttgctgtgttccaggggcttctaaaagtgcttgctgggatcgatacaaattttactgttacatcgaaggcatcggacgaggatggggacttgccgagctttatgtgtttaaatggacatcacttctcatccctcctacaacagtgcttattgtgaattggttgggattgtggctggtgtatcctatgcccataaacagtggttaccagtcttggggtccatattggcaagctgtccttgctanctngggcaatggccatctataaccatctgaaggnctcttggcaag

SEQ ID NO: 279677 - DNA, 352 bp, Glycine max
  unsure (1)..(352): unsure at all n locations
aaaattctctatcgaccaaagatcttcaacaaaccggttaagtttgtgtagtttggtaagatgggtggtggatttagagtgcttcacttagttagaccatttctctcgtttcttcctgaagttcagactgctgacaggaaagtgccatttagagagaaggtcatatatactgtgatctctctgttcattttcctgtttgcagtcagcttcctctgtatggnatacactcaacaacagtgctgatccatctatggatgcgtgttatcttgcttcaaaccgtggaactgttatggagctgggatcaccccatgtgactctgggtggtaatgcactttggctggatnaagacatg

SEQ ID NO: 279678 - DNA, 367 bp, Glycine max
  unsure (1)..(367): unsure at all n locations
ccaagttccacanacnatannantcgantagctctctcttctctccgttcaccgtcaccggcgatctacnantgaacccgatccagccaatagatctcagaaatccaaatggagaacctaatctctttggtcaacaaaatccagagagcttgcaccgccttaggcgaccacggagaaaacagtgcactccccacactatgggactctcttcccgccatcgccgtcgtcggaggccagagctcaggaaagtctccgtcttggagagcgttgtcggcaaagatttcttactcgtggatcagtcgtcgtcgctctctctctgtttgcttaaatcgatgcttgtgattgaaacttatgcgtgcggaatcgt

SEQ ID NO: 279679 - DNA, 229 bp, Glycine max
  unsure (1)..(229): unsure at all n locations
atgaaaatgaaggtccttgtnttcttcgttgctacaattttgngtagcatggcaatgccatgcgtacgatatgttncctctccggatggaacaatgggctatggtgcccgtactccggaggtgaaatgcgcaagttggaggctangctgtggaagcacacaacatctttggcnttgagaccattcctgaagagtgcgncgaagcaacaaaggaatacatccatggcgaa

SEQ ID NO: 279680 - DNA, 195 bp, Glycine max
gagaacaaggcgtcggcggtgtcgctgcaggtgggagaacacgtgcagttggcttacacgcaccacaacgagtcaccgtggcatcccagatcatttgctgttaaggatgagatattctgcttgtttgagggggtctagacaattgggcagcctgagacaacagtatggattggcccaagtcagccaatgaatggt

SEQ ID NO: 279681 - DNA, 360 bp, Glycine max
  unsure (1)..(360): unsure at all n locations
tcttcttctcttgcggnaanggtttagcgcanttcttctagattaaggaagatgggtaaggnaaaggttcacatcagtaatgtgggcaatgggccnggtcgattctgggaaatccactaccactggtcacctgatttacaagcttggaggcattgacaagcgtgttattgagaggtttgagaaggaagctgctgagatgaacaagaggtctttcaagtatgcctgggtgctggacaaacttaaggcgagcgtgaaagaggatcacatgatatgctttgtggaagttgaaacaacaaatatatgcnattatgatgcgccggacataggattcatagatagatatgggcaccaactgctgtg

SEQ ID NO: 279682 - DNA, 337 bp, Glycine max
  unsure (1)..(337): unsure at all n locations
aatcaaattagttcattctctttgcgcagttcctacctctcctttcaagatgcagatcttcgtcaagaccctcaccggaaagaccatcaaccttgaaggtggaaagctctgnaaccatcgacaacgtcaaggccaagatccaggacaaggaaggaattcccccggatcagcaacgtctcatcttcgccggaaagcagtcgaggaggcgtaccctcgcgataaacatccagaggatcaacctttactgtcttcgttcgggggagagacttcgcaagattcatggaaacaaactagagtgaagtctgcacatgaaagtaagcagtcagcagaggatccc

SEQ ID NO: 279683 - DNA, 386 bp, Glycine max
  unsure (1)..(386): unsure at all n locations
caaaaaagacaacacagagagaagcgtcttaataaacgctcttctctgaaaaacctgatttcttctcttcttctcttctctttcggttcgaactcnancctcngaaaatgagagagtgcatttcaatccacatcggtcaggccggtattcaggtcggaaacgcctgctgggagctctacccctcgaacacggcattcagcctgatgggcagatgccaagtgataagactgttggtggaggtgatgatgctttcaacaccttcttcagtgaaatggggctggaaagcacgtgcctcgtgcgatttntgtagatctcgagcctactgtgattgatgaagttaggactgggacataccgccaactatttcatcctgagcagctcattag

SEQ ID NO: 279684 - DNA, 399 bp, Glycine max
  unsure (1)..(399): unsure at all n locations
agacactatatatatgtatatgtatatgtaagtnagttgtggaggtnanaaagagtggaaatggcaggttcanggangagggatngngaagccgaacaagaggttggcctacgnnttcaagttggtgctgatagggnactcggcggtggggaagtcgcagatactagctcggtttgcgaggaacgagttcagcttggactccaagtccaccatcggtgttgaatttcagaccaggaccttggtcatagatcacaagaccgttaaggctccagatctgggacactgctggccaagaacgatacagagcagttacgagtgcatactacaggggtgctgtgggggcaatgttggnnntatgacatcactaaacgccnaacctttgatcacataccacgttgg

SEQ ID NO: 279685 - DNA, 379 bp, Glycine max
  unsure (1)..(379): unsure at all n locations
cgncaatgtanaccntttantccnttactcggggagacctangaagctgactatccagataaaggacttaagtttttttctggaaaaggtaatccnccatccatgatttgtggctggtnactgtgagggaaggggatggaagttttgggcagattctaatttgaaaggaaattctgggggcgttctatccagttagatcctgtgggtgtcctcactctacagtttgaggatggtgaaacatttcagtggagcaaggtcaccacttcgatttacatatcatactaggtaaaatttatgtgaccactacggtaccancacatcaagggcatggcaactatcttgcaactgaaatcaagagcanctatatagcagaatccnc

SEQ ID NO: 279686 - DNA, 371 bp, Glycine max
  unsure (1)..(371): unsure at all n locations
gctcggcttcttgtattntacattacnagattatacagtgatgacaagtatagatatgaaatcaaggacatacttgaaatggnnatggangtttnaganctcntantnattaccnggttgtataccatcnataccgttcactatctccgttgcttcaggatgcaggtctgaatgatctaaacatgactcaactaacttgggggctgnagatgncacatacaagatggacctaattcttgtacatcctccgcattgattgtttagcttgcatatacattgctagtgtgctcagggagnaagacacantgcttggttgaagactttcgtntgtagaagnggtnaaacntgcatggagtatgattttnaannca

SEQ ID NO: 279687 - DNA, 200 bp, Glycine max
  unsure (1)..(200): unsure at all n locations
tccaccaacttcaccgtcttcttcctcgatcatgtctcacttcnacggcaagtaccatgatgagcttattgccnatgntggcttacatggcattctggnaaagggtatctngctnctgatgagtcaacagggacnattggcaagcgtttggcancatcagtgtagagaatgtngaatccaacaggcgtgctctnagggac

SEQ ID NO: 279688 - DNA, 371 bp, Glycine max
  unsure (1)..(371): unsure at all n locations
cactgttcctggaggagcaagtgttgcatgtagcacagccaaagctgttgagtgggatgctgcttggtctaacaacttgatccctctggtagagcaagancttggagtgcaatttcagcctatgaaaaccagaacaacaagggtgtagaaattgagaagataatacctatggatgctgctccccttggtgttgccatccagggctaatacaaagatgtgacaaagaataatttgggcgacaatgaagataactaagctaaaggtgatgaaaatttgcctgcagtgtatttcatctgggcaaagcttttatagttatagttataaggcttctaaaaagtgtgcgtatgtatacttgangctgtgattgagct

SEQ ID NO: 279689 - DNA, 373 bp, Glycine max
  unsure (1)..(373): unsure at all n locations
gttcttgcagattaaggaagatgggtaaggataaggttcacatcagtattgtggttattggccatgttgactctgggaagtccaataacanttggcaacctgntctacaagcttggaggcattgacaagcgtgttattgagagatttgagaaggaagctgctgagatgaacaagaggtctttcaagtatgcctgggtgcttgataagcttaaggcngagcgtgaaagaggaatcacaattgatattgccttgtggaagtttgaaaccaccaagtactattgcacagtcatgatgcccctggaccncaggatttcatcaagaacattgatcntgggacatcccaactgctgtgctgtctatcatgatccntact

SEQ ID NO: 279690 - DNA, 375 bp, Glycine max
  unsure (1)..(375): unsure at all n locations
ttccttctccaacatgccanacgacagccgttctgagtcttttnttcttngttaccctcttcacatgccttctctctgctaattcccacgatgaacatattttcctaccgantcaactccatgacgatgactcagtgagttgcactgctaccgacccaaaccttaactacaagccggtgatcggaatcctgacccaccccggcgacggtgcctctggccggctcagcaacgccaccggggtttcttacatcgccgctcctacgttaaattcgtggagtccggtggtgtagagttattcccttatctacaatgagtcanctgagaacttancaagaaantcgattggncanggatgtcttantggtggtggtgttc

SEQ ID NO: 279691 - DNA, 381 bp, Glycine max
  unsure (1)..(381): unsure at all n locations
tgatcgagataataganacagtgtgatgaaaatgaaggtccttgttttcttcgttgctacaattttggtagcatggcaatgccatgcgnaagatatgttccntctccgaatgaacactggctatggtgcccgtactccggaggtgaaatgcgcaagttggaggcttgctgtggaagcacacaacatctttggctttgagaccattcctgaagagtgcgtgaagcaacaaaggaatacatccatggcgaacaatatagatcagactccaaaacagttaaccaacaagcttacttttatgccagagacctcgagtccatcccaaggnacatttgtgttcatattagatggcacgtatctctaatatccatntacaaaaacatg

SEQ ID NO: 279692 - DNA, 368 bp, Glycine max
  unsure (1)..(368): unsure at all n locations
gagcgaagagaatggctcccaagggnntaatctttttggctgtgttatgcttctcagcactgtcactgagtcgttgtcttgcggaggataatggacctggtaatgaacttctacaaggatcatgccctcaggctgaagacatcatcaaagaacaagtcaagcttctctacaagcgccacaagaacactgctttctcctggctcagaaacatcttccatgactgtgctgttcagagttgtgatgcttcactgttgctggactccacaagaaggagcttgtctgagaaggaaacagatagaactttgggttgagaanttcagtacttgagaccatcaagaagctttggaagggatgccaggaggtgttcc

SEQ ID NO: 279693 - DNA, 370 bp, Glycine max
  unsure (1)..(370): unsure at all n locations
attcatttagcatcaaggttnnatctcagagaaaaagaaacatcgacaagcatgtctggaagaggaaaaggaagcaagggtctcngaaaagggagangccaaacganaccgtaagttctgagggataacattcagggaatcaccaagcccgcgattcgccgtctggccagacgtggtggcgtcaagcgtatcagtggtcttatctatgaagaaactcgcggtgttctcaagatctttctagagaacgtcattcgcgacgctgtcacctacactgaacacgctcgccgcaagaccgtcatgccatggacgttgtttacgcctcaagaggcagggaggacctctacggattggcggtagacaatggggtttc

SEQ ID NO: 279694 - DNA, 386 bp, Glycine max
  unsure (1)..(386): unsure at all n locations
gtggatatacggagtcgtgagtgctcttgtcgccgttggcagttgtatggcttaccttgtgcccatgctgctgctgcacttatttcttgtgggcaccatngccnacatgtttgctgaaccatgcttcactgtacaaagttacagaatgacttattcacagatgattaatcctataccagataagagccagtggagagatcagggagaaggagcagaaggcggaggaggtgcaagggttgatatcataattcgcccaccaaagactcgccggccgcctggaangcctaaaaagaagttctacgagtggagactttaagcgtcccaaaagagtttgttcatgtngtcgctgnatatgtaaggnattctcaaagaatgcnaatgccatt

SEQ ID NO: 279695 - DNA, 382 bp, Glycine max
  unsure (1)..(382): unsure at all n locations
ctcccaccaacttcaccgtcttcttcctcgatcatgtctcacttcaagggcaagtaccatgatgagcttattgccaatgctgcttacattggcaattcctggaaagggattcttgctgctgatgagtcaacagggacaattggcaagcgtttggccagcatcagtgtagagaatgttgaatccaacaggcgtgctcttagggagctgcttttcaccgctcccggtgctcttaaatatctcagtggtgtcatcctctttgaggaaactctctaccagagcacagctgcaggcaagccctttgtggaagtcttgaaggagctggtgtgcttctggcacaaggtgaccaaggcnagttgacttctggantaatggagaaccacat

SEQ ID NO: 279696 - DNA, 367 bp, Glycine max
  unsure (1)..(367): unsure at all n locations
tctctagctccgtccacgtgccgtcgtacgctctgaaatcttccgtcgtctctggcatctccgctgccagcttctgatctgtcataccaaattggccaacagggttcaaattcctaccaacaattcagcactcattgctatgattgcagatgaggatactgtagttggatttttgttggctggagtgggaaatgttgacatacgtaggaagacaaattacctcattgtggattcaaaaacaaccgtcaaacaaattgaggatgcttcaaagatttacnacaagggaggntgttgcattgtgctgattagccatatgtngcaatatgataggttttggntgnnagttatacagcccgttcctgcatct

SEQ ID NO: 279697 - DNA, 373 bp, Glycine max
  unsure (1)..(373): unsure at all n locations
gtgtgtcactcacttggaggaggcacgggttctggcatgggaacactgttgatatcgaagatcagggaggagtacccggacagaatgatgctcaacntcnccggttttcccatccccaaaggctctgacacggttgtggagccttacaatgctactttgtccgttcaccaactagtggagaatgcagatgagtgcatggttcttgacaatgaagcactctatgacatttgcttcangaccttaaaactcaccactcctagttttggtgatctgaaccacctgatttctgcgacaatgagtggagtgacatgttgctgaggttcccggacaatgaatccgactgaggaactagcagtgaactgaccattccacg

SEQ ID NO: 279698 - DNA, 342 bp, Glycine max
  unsure (1)..(342): unsure at all n locations
agctattgttgcattggctgtgttactgcttcttncagggactcttcannnaacctntcaaagaactctatccaggacatgtcccaacgttttcaacactgtaaaatctgtagttaaatctgctgttgtcagagaacctcgcattggggcatctattgttcgtctcttcttccatgactgctttgttcaaggctgtgatgggtcaatactacttgatgacactccaaccttccagggggaganaactgcagctgctaaccaacaattcagtgagaggctttgaagtaattgatgctatcaagctgaggtcgagaaantagccctggtgtggcncangtctga

SEQ ID NO: 279699 - DNA, 382 bp, Glycine max
  unsure (1)..(382): unsure at all n locations
gctagaagcataagatgaaatgaaagtgcttgttttgtttgttgctacagttttggtagcatatgaatgccatggctcangctaccaggaagttccctgntccaatggnaacctgggtttggtgggcatacagcaatgaggtggcatgtgccagttggaggcttggcgtggaagcaaacaacgtagtcaagtggcaaactgttcctgcagcttgcggagagtacatagctgactacgttctaggagaccaatatagatcagattccaaaacagttaaccaacaagcttatttctatgtaaatccctcanactcaccaacaagagncttgctttgacgttgcgaactatcctctatctcagtatttgctaccatggatttggg

SEQ ID NO: 279700 - DNA, 314 bp, Glycine max
  unsure (1)..(314): unsure at all n locations
ggagggtatccccccggaccagcaacgtctcatcttcgccggaaagcagctcgaggacgggccgcaccctcgccgactacaacatccagaaggnatcaaccttcactcgtctccgttccgtggtgggcatgcagatcttcgttaagancctcaccgnnaagactattaccctagangtcgaaagctcgacaccatcganaacgtcaaggctaagattcaggacaaggagggattccccccagaccagcagaggntgatctcgcggggaagnactcgaggaggagccctngtgatanacatcngaaggatcactt

SEQ ID NO: 279701 - DNA, 173 bp, Glycine max
  unsure (1)..(173): unsure at all n locations
gagaatggctcccaagggtttaacctttctggctgtgntaatatgcgcntcagcactgtcactgagtccttcngttgcgggggnagggcaaaataatggcttggtatgaacttctacaaggaatcatgccctcaggctgaagacatcatcacagaacaagtcaagcttctcta

SEQ ID NO: 279702 - DNA, 162 bp, Glycine max
  unsure (1)..(162): unsure at all n locations
aaagaatggcacttcgttgcttggtgatgtnctttctgttctcttcactcttggtcttgcgaganaaagccatgccaganacgaaganttttggaatgctgtttnggcaaaacactcccaatcccaagttcanngcngagatcttccnaaagcntggcctgg

SEQ ID NO: 279703 - DNA, 166 bp, Glycine max
  unsure (1)..(166): unsure at all n locations
gttgttgtgagctataantagtntatcgngangagnatatgaagttgtntgntttccttgttgctgnagtagtttggtagcatggcnatgncatggcgcaggcaaccaagggnccctctccgaatgaaanactggcaatggtgaccntncttcggaggnaaatcgc

SEQ ID NO: 279704 - DNA, 162 bp, Glycine max
  unsure (1)..(162): unsure at all n locations
cctggtcaatgcagatggtantatagagaaaacattcttgtggggtangntactctatggaaatgtccgctgtcatntacaaggacnggggntttcactgatcaagcattacccaaatgatctttgtaaagagagganntccctgttaaggaccccatcntc

SEQ ID NO: 279705 - DNA, 293 bp, Glycine max
  unsure (1)..(293): unsure at all n locations
agatcgtgcgtgacacctgcaggaacatcggcttcgtctcaaacgatgtgggacttgatgctgacaactgcaaggtccttgtaaacattgagcagcagagccctgatttggccagggtgtgcacggcaacttaaccaaagacccgaggaaatcggtgtggagaccagggtcactgtttgctatgcacggacgagaccccagattgngccatgagtcatgtncttncaataaactcggtgtcgtctaccgagntcgcaagacggnacttcccnggttgggctatggaanaccna

SEQ ID NO: 279706 - DNA, 163 bp, Glycine max
  unsure (1)..(163): unsure at all n locations
gtgagttgcactgctaccgacccaaacttaactacaagccggtgatcggaatcctgacccaccccggcgacggtgcctctggccggctcagcangcnaccggggttcttacatcgccgcctctagttaattcgtggagtccggtggtgctaaagttatnccct

SEQ ID NO: 279707 - DNA, 360 bp, Glycine max
ggggaatgcctgccactcatactcattttgcgaaaccggctgaagtatgctctaacataccgtgaagtcattgctattctgatgcagcgacatgtccttgttgatggcaaagtcaggactgacaaaacataccctgctggttttatggatgttgtatcaatccctaaaacaaatgagaacttccgcctgctgtatgacaccaaaggtcgattccgtctccactcagtcagggatgacgaggctaagttcaagctttgcaaagttcgctcagtgcagtttgggcaaaagggtatcccatacttaaatacctacgacggtcgcactatccgctacccagacctctcatcagggtaatgacac

SEQ ID NO: 279708 - DNA, 333 bp, Glycine max
cactcactcgcaagcaaaaagaaagaatcccaggcgaggagaaagatggaggggaaggagcaggatgtgtcgttgggagcgaacaagttccccgagagacagccgattgggacggcggcgcagagccaagacgacggcaaggactaccaggagccggcgccggcgccgctggttgacccgacggagtttacgtcatggtcgttttacagagcagggatagcagagtttgtggccacttttctgtttctctacatcaccgtcttaaccgttatggggagtcgccggggctaagtctaagtgtataccgttgggattcaaggaatcgcttgggcc

SEQ ID NO: 279709 - DNA, 258 bp, Glycine max
tgattgaagaagatgccgatcagaaacatcgccatcggaaggcctgaagaggctactcaccccgacacgttgaaggcggggttggctgagttcatctccaccttgatcttcgtgttcgccggttcaggttccggcatcgcctacaacaagctcaccgacaacggcgccgccactcccgccggcctcatctccgcttccatcgcccatgctttcgccctcttcgtcgccgtctccgtcggcgccaacatctccggcggc

SEQ ID NO: 279710 - DNA, 332 bp, Glycine max
gctagtttatcgtgaggagaatatgaagttgtttgttttctttgttgctgcagtagttttggtagcatggccatgccatggcgcaggctaccaaaggttccctctccgaatgaaaactggctatggtgagcgttcttcggaggtaaaatgcgcaagttttaggcttgctgtggaagcacacaacatccgagcctttaaaaccattcctgaagagtgcgttgaaccaacaaaggactacattaatggcgaacaatttagatcagactctaaaacagttaaccaacaagctttcttttatgctagtgaacgcgaagtccatcacaacgacatat

SEQ ID NO: 279711 - DNA, 282 bp, Glycine max
tcgtacctgttgcctcacttgcactctggatgggccgtcgatcaagcaatcctcgccgaagaggagcgtctcgtcgtcatccgtttcggccacgactgggacgaaacctgcatgcagatggacgaggtgttggcgtcagtggcggagacgataaagaactttgcggtgatatacctggtggacataacggaggtgccggatttcaacaccatgtacgagctctacgacccttccacggtgatgttcttcttcaggaacaagcacatcatgattgatctcgga

SEQ ID NO: 279712 - DNA, 331 bp, Glycine max
aagggtaagacactagtctttcaattttctgttaagcacgaacagaagcttgactgtggtggtggctacatgaagttgctcagtggggatgttgatcagaagaaatttggcggggatactccttacagtattatgtttggcccagatatctgcggttacagtaccaagaaagttcacgctattcttacctacaataacacaaaccacttgataaagaaggatgttccttgtgagactgaccaacttactcatgtttacacatttatcctccgtccggatgcaacctacagcatcctgattgataatgtggagaagcaaactggtagtctct

SEQ ID NO: 279713 - DNA, 328 bp, Glycine max
  unsure (1)..(328): unsure at all n locations
ggtcacattaacccagcggtgacatttgggctgtttttggctcgcaaggtgtctttgatccgagccatcatgtacatggtggctcagtgcttaggtgctatctgtggagttggtttggttaaggctttccaaaagtcttacttcaacaagtatggtggtggggctaattccctcgctgctgggtacagcacaggnactggattgggtgctgagattattggaacctttgttttggtctacactgtcttctctgccactgaccccaagaggaatgccagagattcccatgtgccggtttggctccacttcccatggattgctgtgttca

SEQ ID NO: 279714 - DNA, 336 bp, Glycine max
  unsure (1)..(336): unsure at all n locations
cttcncaaccactactactcactcactgcagatctcaattgcatcgctgtccatggctaccatcgttagcatcaagggcccgcacagattcttcgacagtacgtggcaatccaactgtcgaggtggatttgacttgctccgatggtacttttgccagagctgctgttccaagtggtgcatccactgggatttatgaggcncttgaattgagagatggaggatctgactaccttggaaagggtgtatcaaaggctgntgacaatgtgaacaccgtcattggccctgctttgattggcaaggacccaactgagcagactgctattgacaacttaatgg

SEQ ID NO: 279715 - DNA, 332 bp, Glycine max
caaaggttacatttctgagctgtttgtgccataccaagacccaacagatgatttttactataagactttctttgatgctggagagtttgggtttggtctctccacggtctcattggtgcccaaccgtgattgcccatcgaatgctcagttcctagatacatatgttcacgctgctgatggtactccgttactcatcaagaacgcaatctgtgtctttgaacaatatggcagcatcatgtggcgtcacaccgaaacaggcattcccaatgaatcgttcgaagaaacgagaaggaagtcaacttagtggtaagaactgttgttaccgtgggcaa

SEQ ID NO: 279716 - DNA, 333 bp, Glycine max
  unsure (1)..(333): unsure at all n locations
cncaaacgaggtggaaaggctccggctcttgccgctaagaagaagcctgagaaggtttcgaatccgttgttcgagaagcgtccaaagcagttcggaatcggaggggcgttgcctccgaagagagacttgactcggttcgtgaagtggccaaagaatgttcaaattcagaggaagaagaggattctgaagcagaggttgaaggttcctccagctttgaaccagttcaccaaaactcttgacaaaaacctagcaacaagtctgttcaagttacttctgaaatacaggccagaggacaaagcagaaaagaaggagaggctcttgaaaagggctcag

SEQ ID NO: 279717 - DNA, 330 bp, Glycine max
ctccaccctatttataaacttctttatcctcactaccgcgacaccataaatatcaatggacttgctaggcagtccctgattaatgcagatggcattatagagaaatcatttttgcccggaaagtactccattgagatgtcttcatccgtctacaagaattgggttttcactgaccaagcattaccagctgatctcgtcaagagaggattggcaattgaagatccctctgcaccccatggccttcgccttgtgatagaggactacccttatgctgttgatggacttgaaatatgggatgctattaagacatgggttcatgaatatgtctcc

SEQ ID NO: 279718 - DNA, 330 bp, Glycine max
  unsure (1)..(330): unsure at all n locations
ctcttcttctcttgcggctagggttttnccgcanttcttctagatttaaggaagatgggtaaggaaaaggttcacatcagtattgtggtcattggccatgtcgactctgggaantccactaccactggtcacacnganncacaagcttggaggcattgacaagcgtgttattgagaggtttgagaaggaagctgctgagatnaacaagaggtctttcaagnnatgcntgggtgctggacanacttaaggctgagcgtgaaagaggaatcaccattgatattgctttgtggaagtttganacaacaaagtattattgcacagttattgatg

SEQ ID NO: 279719 - DNA, 202 bp, Glycine max
  unsure (1)..(202): unsure at all n locations
aaagacccttacccttctctatcgctcgnnttccttgacgcttctgacccttgctttgtctgcgtcnnnnnnnnnnnnnnnnnnnnnnnnnnnnnngtcgtaatggctctcccagactcttcttcccgtcgcaactccctgatcccctccttcatctactcctcttcctccaaaacgctccctntcnaccacatgctcaana

SEQ ID NO: 279720 - DNA, 333 bp, Glycine max
  unsure (1)..(333): unsure at all n locations
ctgccatcatccccaacttcgntcacaaggttacaannnactanagagttgtgccaccatgtcggacgatgaaagggaggagaaagagttggatctctcttctgccgaagttgtcaccaaatacaaaaccgctgctgagatcgttaacaaggctttgaagcnngttatttcagaatgtaaaccaaaggcgaagattgtggatatttgtgagaaaggggattcatacattagagagcaaactggaaatgtgtacaagaatgtgaagaggaagattgagagaggtgttgcttcccaacatgtttatcaatcaacaacgttgtctgccattcncnc

SEQ ID NO: 279721 - DNA, 163 bp, Glycine max
  unsure (1)..(163): unsure at all n locations
atcaattataccatcagaacgtccagatcatatgatgtttgaggtatggaanccactaggaatagttggtgtaatcagtgctttcaactttccatgcgctgttctaggatggaatgcttgcattgctttagtctgtggtaactgtgttgtttggaagggtgct

SEQ ID NO: 279722 - DNA, 327 bp, Glycine max
ggcacccacctcacatggacactcgcctctcccatgcagattctgcgcatcctgatgaactggatgaagagtttgacacattcccaaccaccaggccttcagacatcgtgaggatgcgatacgaccgacttagaagcattgctgggaggatacagactgtggttggtgatttggccactcaaggggagaggctgcagtctttgctcagctggagagatccaagagccactgccctctttgtgattttctgtctggttgctgccattgtactctatgtcactcctttccaaattgtcgcacttttcactggaatctcatgtgttgaga

SEQ ID NO: 279723 - DNA, 329 bp, Glycine max
  unsure (1)..(329): unsure at all n locations
gatttgtgtgcggtgcgtctccggtgaagagaagaagatggcgaccgtaccaggacagctcatatgggaggtcgtaaagaagaacaactctttcttggtgaaagagttcggaaggngcactcagagcgtgcagttcagcagagagcccaacaatctctacaacctcaacactttcaagtactccggtttggcgaacaagaaaactgtcactgttcaacctgcgggtaaagaccagtctgtgnngctggcaacaaccaagacaaagaagcaaaacaagcctgctgctttgcttcacaaatctgtcatgaaaaaggagttccggaggatgg

SEQ ID NO: 279724 - DNA, 321 bp, Glycine max
ctctgctcgtggcctctagggttatcatatctccatttccatttcctctctctcagtttccaagaatcttaagctatgggaaagtcttacccaaccgtgagcgctgattaccagaaggccgttgagaaggcgaagaagaagctcagaggcttcatcgctgagaagagatgcgctcctctaatgctccgtttggcatggcactctgctggaacttacgacgtgagctcgaagaccggtggtcccttcggaaccataaagcacccctccgaactcgctcacggcgctaacaacggtcttgacatcgctgttaggcttttggag

SEQ ID NO: 279725 - DNA, 325 bp, Glycine max
cacaattggtattgcccattgttcatcaatttcaacccgtctatacaatttcacaggcaagggtgacacagacccaacaatagacaatggatatgcaaaaaatctcaagaccttcaagtgtaagaacattaatgataactcacttattgagatggaccctggaagtcgtgatacatttgatcttggatattacaaacaagtggttaagagaaggggtttgttccaatcagatgctgaattgcttactagtcctatcacaaggtctattatcgctagtcaacttcagtcaactcaaggattctttgcggaatttgccaagtctatg

SEQ ID NO: 279726 - DNA, 324 bp, Glycine max
  unsure (1)..(324): unsure at all n locations
gagggtttgggtttctcttcctcccttggagaaaaagaagagccaccgctgcgacgccnctcgtgcattttngaggtgccgctgtcatgtttgggcgtggtggaccaaggaggagtgataactccaaatattatgatattctcgggatttccaaaaatgccagtgaagatgaaatcaagaaggcctatagaaaggcggctatgaagaaccatccagataagggaggagatcctgaaaagtttaaggagttaggtcaagcatatgaagttttaagtgatcctgagaagaaagaactgtatgaccagtatggtggaagatgcctta

SEQ ID NO: 279727 - DNA, 322 bp, Glycine max
  unsure (1)..(322): unsure at all n locations
cgagggtttgggtttctcttcctcccttggagaaaaagaagagccaccgctgcgacgccgttcgtgcattttgaggtgccgctgtcatgtttgggcgtggtggaccaaggaggagtgataactccaaatattatgatattctcgggatttccaaaaatgccagtgaagatgaaatcaagaaggcctatagaaaggcggctatgaagaaccatccagataagggaggagatcctgaaaagtttaaggagttaggtcaagcatatgaagttttaagtgatcctgagaagaaagaactgtatgaccatatggtgaagatgccnta

SEQ ID NO: 279728 - DNA, 255 bp, Glycine max
gattattgttattgtttagaggactctgtctagttaaaatagttattgtgcttttgttttatcagacagttgtaaggcactgtgttctacatgtgtttgcagttgtctgcatgcattgttattttcaaagtccgctttatcaagctgacaagtcaaataaattattccctctctcctagtagtgggggaatagatttgttcctgtatctgatcgaggtttttataatcgtcataatataataacaatttacgttc

SEQ ID NO: 279729 - DNA, 321 bp, Glycine max
attgcttccctggttatggcagttgtagtcaatgacaatgaagaagatggggacactgatgctattcagccacaaaagaggaagagactttggggattggtagtttgccataacactactcccaggtttgttccctttcctctaaggtatgcttgtgagtttctggctcaagtatttgccatccatgttaacaaagaaatagagttggaatatcagattattgagaagaatatcctgcgcacccagacactctgtgtgatctggtgatgcgagatgcaccccgggaattgtgtcagagagccccaatataatggatctgtg

SEQ ID NO: 279730 - DNA, 317 bp, Glycine max
cttaagtctgggagatttagaaaaggcacaacttggtctggggcatagttacagcagagcaaaggtgaagtttaatgttaaccgtgttgacaacatggttattcaagctatcttccttcttgatacacttgacaaggatgttaattcgttctccatgagagtcagagagtggtattcatggcactttcctgagctggtgaaaattgtaaatgataattatctgtatgccaaagttgcaaaatttattgaggataaggcaaagttggctgaagacaagattccagccttaactgacatagttggagatgaagataaag

SEQ ID NO: 279731 - DNA, 319 bp, Glycine max
  unsure (1)..(319): unsure at all n locations
agagtttgttgtgagctataagctagtttatcgtgaggagaatatgaagttgtttgttttctttgttgctgcagtagttttggtagcatggccatgccatggcgcaggctaccaaaggttccctctccgaatgaaaactggctatggtgagcgttcttcggaggtaaaatgcgcaagttttaggcttgctgtggaagcacacaacatccgagcntttaaaaccattcctgaagagtgcgttgaaccaacaaaggactacattaatggcgaacaatttagatcagactctaaaacagttaaccaacaagctttcttttat

SEQ ID NO: 279732 - DNA, 319 bp, Glycine max
  unsure (1)..(319): unsure at all n locations
gatcgagataactagaaacagtgtgatgaaaatgaaggtccttgttttcttcgttgctacaattttggtagcatggcaatgccatgcgtacgatatgttccctctccgaatgaacactggctatggtgcncgtactccggaggtgaaatgcgcaagttggaggcttgctgtggaagcacacaacatctttggctttgagaccattcctgaagagtgcgttgaagcaacaaaggaatacatccatggcgaacaatatagatcagactccaaaacagttaaccaacaagcttacttttatgccagagacctcgaagtccat

SEQ ID NO: 279733 - DNA, 320 bp, Glycine max
  unsure (1)..(320): unsure at all n locations
cgacgctctgaaaaacnngncactctgaaaaaagtaaaaaccgctgcgaacaatggcaacgatcaaggccgtaaaagctcgccagatccttcgacagccgtggaaatccaaccgttgaagttgantctattctcagcgatggaaccttccacagagctgctgtccctagcggcgcttcaacaggtgtttatgaggctttggaattgagggatggaggctcagactacctcgggaaaggtgttcnaaggctgtggagaatgttaattcaattatagcacctgctctgcttggcaaggacccaaccaagcagactgaaattg

SEQ ID NO: 279734 - DNA, 303 bp, Glycine max
  unsure (1)..(303): unsure at all n locations
ttattattatcattccccacctcnacctaaangggcatgtacaccctccctactactaccacttnnnnnnnnnnnnnnnnnnnnnnnnnaccacctccttattattataaatcccctccaccaccatccccttctcctcctcccccctactactatcactctccaccannnnnnnnnnnnnnnnnnnnnnnnnnctactactaccactctccacctatctacaagtaagctcaaattgtgaaagcaccattcatgatgaatcatgttctagttttcatcgaggantcaaggcaagctctattt

SEQ ID NO: 279735 - DNA, 319 bp, Glycine max
atgcattcgatggaaatattttgagccttgagtttgataattttgctgaagtgcacaaactctatgaaggtggagttacactacctacaaactttcttagcaagatcgcccctataccagtgatcaaggaaatttttcgaactgatggcgaacagttcctcaagtatccaccacctaaagtgatgcaggtggataagtctgcatggatgactgatgaagaatttgcaagagaaacgattgctggtttaaatccaaatgtcattaagattatagaggagttcccactaagtagcaagctagatactcaagcctatggtga

SEQ ID NO: 279736 - DNA, 321 bp, Glycine max
tttcctagccgaaaccctagctagctctttcttaatccataatctctcttctcttcttctctttctatctgcaaaacaaaaatgtctcacttcggacgttcgggtcccccagacatttccgacacttactctcttctcgttctcaacatcaccttccgtaccaccgccgacgacctattccctctcttcgacaagtacgggaaggtcgtcgacatcttcatccccaaggatcgaagaactggtgagtcaaggggttttgcattcgtgcgttacaagtatgctgatgaggctcagaaggccgttgagaggctcgacgggaga

SEQ ID NO: 279737 - DNA, 327 bp, Glycine max
  unsure (1)..(327): unsure at all n locations
ggctaggaggaccctcgtggagcgtcncacttggaagaagagatgcaagaacagcaagccagagtgcagccaacagccaaatcccagggaccatcctcggacctctcaaccctaacatcaatgtttgcagccaaaggcctaacctcaagtgacttaaccgtgctctctggaggccacacaataggccaagcacaatgccagttcttcaggaaccgcatatacaacgaaaccaacatagacaccaattcgccaccaccagaaaagccaattgccctgccaccggtgggaacaccaacctggcccctctcgacaccctcacccccaacc

SEQ ID NO: 279738 - DNA, 325 bp, Glycine max
gataactagaaacagtgtgatgaaaatgaaggtccttgttttcttcgttgctacaattttggtagcatggcaatgccatgcgtacgatatgttccctctccgaatgaacactggctatggtgcccgtactccggaggtgaaatgcgcaagttggaggcttgctgtggaagcacacaacatctttggctttgagaccattcctgaagagtgcgttgaagcaacaaaggaatacatccatggcgaacaatatagatcagactccaaaacagttaaccaacaagcttacttttatgccagagacctcgaagtccatcccaaggacaca

SEQ ID NO: 279739 - DNA, 316 bp, Glycine max
  unsure (1)..(316): unsure at all n locations
cacctctcctcgttcacgctacccctttctgctcttcttctacctttcaagttttaaaagtataaagatggcagagacattcctatttacctcagagtcggtgaacgagggacaccctgacaagctctgcgaccaaatctccgatgctgtcctcgacgcttgcctcgagcaggacccagacancaaagttgcctgcgaaacatgcaccaaaaccaacttggttcatggtcttcggagaaatcacgaccaaggccaacgttgactacgagaagatagtgcgtgacacctgcaggaacatcggcttcgtctcaaatga

SEQ ID NO: 279740 - DNA, 314 bp, Glycine max
  unsure (1)..(314): unsure at all n locations
aaaagattaacaataaaagtgtggagtactgttgatagcaaagatgtttgggatcttcgacaaggggcaanagataaaggggacagtggtgttgatgccanagngcntgttggacttcaacgccataacctccatcggtaaaggtggtgttattgacacagccaccggcatcttaggccaaggcgtcacttagttggtggagnanttgatactgccacttccttcttaggccgtaatatctccatgcaattgatcagtgctactcagactgatggcagtggaaatgggaaagttggaaaagaagtctatttgga

SEQ ID NO: 279741 - DNA, 317 bp, Glycine max
gagcagcagtgcagggaagttggtgtgtgtcaccggtgctgccggttatattgcttcatggattgtcaagttcctacttgaacgtggttacactgtcagggccactgttcgaaacccaaatgatcacacgaaggtagaacatttgctaaaacttgaaggtgcaaaggagagactgcacctttttaaggcagatcttttgggtgaaaattcttttgactccattgttgagggctgtgatggcgtctttcatactgcttctccttttattatcaacgtcaaagacccacaggctgacctacttgacccagcagtgaagg

SEQ ID NO: 279742 - DNA, 359 bp, Glycine max
  unsure (1)..(359): unsure at all n locations
gaacaatatgggcagcatcatgtggcgtcacaccgaanacaggcattcccaatgaatcgttcgaagaaacgagaacggaagtcaacttagtggtaagaactgttgttaccgtggggcaactacgataacatcattgattgggagtttaaaacaagtggctcaatcaaaccctcgattgctctctcgggtatattggaaattaagggagtggatattaagcacaagagtgagatcaagagcgatcaacatggtatcttggtgtcgcaaacnacattggtgtttncacgccattctacnttncnanttgcctggaatggggggtnccacttttgggagaantttgagcttagggncngggg

SEQ ID NO: 279743 - DNA, 207 bp, Glycine max
caactggaaagttccatattggattgatccacgtgccggaattgtaatatcactggcatccatttatgatttggagaagcacaaatctcgtagagtgttatacaaagggtacattctgagtgttgtgccataccaagacccaacagatgatttttactataagactttctttgatgctggagagtttgggttggtctctccacggtc

SEQ ID NO: 279744 - DNA, 213 bp, Glycine max
  unsure (1)..(213): unsure at all n locations
ccttcaatcatatagcattctaaganatgaagagccctaccattttcattctctttctactttctgccttctacacctcactcctaccttcagccaccgctcaagtcgtggttgacatggaaggtaatgatcttcaaaatggtgggaaatattatgtgttgccagtaatagagtcatcatatggtggaataagagtagccgcaactggaaaag

SEQ ID NO: 279745 - DNA, 348 bp, Glycine max
  unsure (1)..(348): unsure at all n locations
gtgagccctccaccaccaaccaagtctccaccaccaccagtttacatttatgcttcccctccaccacccatctacaagtaagcttggaattaagaagcagcaacaataataagtcatgttctagtattcattgtggaataaatttccgttccatttggagcagagttaagcatataatttgttatacaagttctttgaataagagtctgagtgtatcacctctaagctacgatcttcatgactcatatgaggtgcttctatttatttggtggccattttcagtgtgtcttactagttcanggagcgcaatcaaaagntcagncaggagcagntagatgtgttcattng

SEQ ID NO: 279746 - DNA, 322 bp, Glycine max
  unsure (1)..(322): unsure at all n locations
atggctttgcccaatcagcaaaccgtcgattaccctagtttcaaactcgtcatcgtcggtgacggtggtacaggaaagacaacgttcgtgaaaaggcatcttaccggtgaatttgagaagaaatacgaaccgaccattggagtggaggttcacccattggatttcttcacaaactgtggaaagattcgcttctactgttgggatactgccggacaagagaagtttggtggcctcagggatggatattatatccatgggnatgcgccattatcatgttgntgtacncncgantacntaaaananctcctgctgggngggtttc

SEQ ID NO: 279747 - DNA, 157 bp, Glycine max
  unsure (1)..(157): unsure at all n locations
tgnangntgtcatgtngcnatnagtttgntagtgtgtactntgggcactncttctcgatccgtagaaatgaccgagaagcttctgagggcagggatgaacgttgntcgtttcaatttctctcatggcacccacgactatnancaggaataccctcaa

SEQ ID NO: 279748 - DNA, 338 bp, Glycine max
  unsure (1)..(338): unsure at all n locations
tgggttgnagggaaaaagaaaaataaaatgggttccgataataccaacttggagttcttgaaggagatcggtttgggctcctccaacattggttcttacattaatggccaatggaaagccactggttcttctgtcacttctgttaatccttctaacaatcagagcatagctcaagtgactgaagcgactttgcaagattatgaggagggatgcaagcttgcagtgaagcagccagacatggatgactattcggcacgaganagtgagatgtnagangatggtgagcatgagggccagtggnccttggganntggtgccctggagggaaaatcncccaa

SEQ ID NO: 279749 - DNA, 186 bp, Glycine max
  unsure (1)..(186): unsure at all n locations
aagctagtttatcgtgaggagaatatgaagttgtttgtnttctttgttgctgcagtagttttggtagcatggccatgccatggcgcaggctaccaaaggttccctctccgaatgaaaactggctntggtgagcgttcttcggaggtaaaatgcgcaagttttaggcttgctgtggaagcacacaac

SEQ ID NO: 279750 - DNA, 352 bp, Glycine max
  unsure (1)..(352): unsure at all n locations
atggaagcccaagtttaccattgagaaagaaaaacagaaggctgaagatgaggctgcaactggttcagatggtattgcaggcttccagaagaaggtatttgacctcttgtaacagattgcagacattccttcctgagcgaccacaaatctaagatatacgatctcattgagaaagctgagaaacagccaatctcactattggaattcttgtagcggttgtggttgtcttcgtgtcaattttcttcaggctcatatttggtggcaagaaacctgcaaagtggagaaagaaaccagaacgcacagaagcttccataaccaagtnttaagagatgagaaaccaagagaagaggag

SEQ ID NO: 279751 - DNA, 273 bp, Glycine max
  unsure (1)..(273): unsure at all n locations
atttgagggggtgtgtgatcgggtcctcaggtgaagatctgaggctgttggtgtctcnttcttttctccgagttccaaagatgagcgcttctaggttcatcaagtgcgtcactgttggggatggtgctgtgggcaaaacctgcttgcttatttcctacancagcaacactntcnccaccgattatgtgccgactgtctttgacaatttcagtgcaaatgtggttgtcaatgggaacatngagnangggggtttgggggaaanctggggnanaa

SEQ ID NO: 279752 - DNA, 250 bp, Glycine max
  unsure (1)..(250): unsure at all n locations
ctcttcttctcttgcngttnnggatgtagcgcanttctnctaganntaaggnagattngtaaggaaaangntcacatcagtactgtggtcantngccatgtcgactctgggaaatccactaccactggncactgattacaagcttcgangcattgacaagcgcgntntngagaggnntgacnaagaagctgcggagatgnccanaggtctttcaagnatncttggtgcnggacnaactanggctnanctg

SEQ ID NO: 279753 - DNA, 377 bp, Glycine max
  unsure (1)..(377): unsure at all n locations
atcaattagttcattctctttgcgcagttccctacctctcctttcaagatgcagatcttcgtcaagaccctcaccggaaagaccatcacccttgaggtggaaagtctgacaccatcgacaacgtcaaaggccaagatccaggacaaggaaggaattcccccggatcagcaacgtctcatcttcgccggaaagcagctcgaggacgccgtaccctcgcngactacaacatcnagaaggagtcaacccttcacttgtcttcgtctccgtggtggatgcagatttcgtcaagatctcatggnaaaacnataacctagaggtgaaagtttgacaccattgacaagtcaaggnaagatcaggnaggaggcctcccccagcct

SEQ ID NO: 279754 - DNA, 367 bp, Glycine max
  unsure (1)..(367): unsure at all n locations
caggaagaagcaataatggcgccgaagataacacgtaaggttagcagaaaccccgaattgataaggggaatcggaaagtactcgaggtctcaaatgtaccacaagaggggcatttgggtatcaggccaaaaacngtggcgttttacctcgccacggccctaaacccaaacctgaaactcccgtgaaaaaccacccaaatttaccctgctgacgatgtcaagaaaccccttgtcaacaagcacaaacccaaacccgcgantcagggctagccattatcccgggacatgttgttcttcttgcggtagatttaaggaaagaggtcgtttttgancacttcttctgggtgttctgnantggccttcanaaa

SEQ ID NO: 279755 - DNA, 373 bp, Glycine max
  unsure (1)..(373): unsure at all n locations
gggatgcctgccactcatactcattttgcgaaaccggctgaagtatgctctaacataccgtgaagtcattgctattctgatgcagcgacatgtccttgttgatggcaaagtcaggactgacaaaacataccctgctggttttatggatgttgtatcaatccctaaaacaaatgagaacttccgcctgctgtatgacacaaaggtcgattccgtctccactcagtcagggatgacgaggctaagttcaagctttgcaaagttcgctcagtgcagtttgggcaaaagggtatcccatacttaaatacctacgacggtcgcactatccgctacccagacctctcatcnggctatgncccataagtggnttggagga

SEQ ID NO: 279756 - DNA, 374 bp, Glycine max
gagtttgttgtgagctataagctagtttatcgtgaggagaatatgaagttgtttgttttctttgttgctgcagtagttttggtagcatggccatgccatggcgcaggctaccaaaggttccctctccgaatgaaaactggctatggtgagcgttcttcggaggtaaaatgcgcaagttttaggcttgctgtggaagcaacaacatccgagcctttaaaaccattcctgaagagtgcgttgaaccaacaaaggactacattaatggcgaacaatttagatcagactctaaaacagttaaccaacaagctttcttttatgctagtgacgcgagtccatcacaagacattttatatcggcattagttacaccgtctc

SEQ ID NO: 279757 - DNA, 373 bp, Glycine max
  unsure (1)..(373): unsure at all n locations
gcagatggttatcagccttatcttatatcccctgaaaagggattgagnatctctaatcaaaggtgttctagagcttgcgaaagagccgtcacgtctntgtgttgatgaagtgcatcgtgtcctgatagatattgnttcgtctgctgccaatgctacccgtggtntgggaagatacccacctttcaagagagaggtcgggctattgnaaccgccgcgctagaagggtttangnatgaatcnaagaaaatggtggntgcactagttgatatggagcgtgcttttgtcccaactcaacacttcatccgcttggtacaaaggaggatngaaangcaagtcganacgnggantgaangncgancntcaaaaaaaggca

SEQ ID NO: 279758 - DNA, 385 bp, Glycine max
  unsure (1)..(385): unsure at all n locations
tgttgatcgagataactagaaacagtgtgatgaaaatgaaggtccttgttttcttcgttgantacaattttggtagcatggcaatgccatgcgtacgatatgttccctctccgaatgaacactggctatggtgcccgtactccggaggtgaaatgcgcaagttggaggcttgctgtggaagcacacaacatctttggctttagaccattcctgaagagtgcgttgaagcaacaaaggaatacatccatggcgaacaatatagatcagactccaaaacagttaaccaacaagcttacttttatgccagagacctcgaagtccatcccaaggacacatttgtgttcagtatagatggcaccgtactctctaatattccatactacaa

SEQ ID NO: 279759 - DNA, 377 bp, Glycine max
  unsure (1)..(377): unsure at all n locations
caacttctttctttgttccgttctactttcccttcccaacaacaacaagaanatgccttctgcagaagcttcctccgaaaccatttgtgtcaccggcgctggtggcttcatcgcctcttggatggtcaaactcctcttggaaaaaggctacactgtccgaggaaccctcagaaatccagatgatcccaagaacgggacttgaaggagtttgaaggagcctccgagaggttaactctgcataaggttgacctccttcatcttgactccgttagatcagttattaacggttgccatggtgtctttcacactgcttctcccgtcaccgataaccccgaagaaatggtggagccagcggtgagtggagtaagaatgtgatc

SEQ ID NO: 279760 - DNA, 365 bp, Glycine max
  unsure (1)..(365): unsure at all n locations
cgtagatagccgatgtgcttgtcttagtgtgtcagtcattcctnatcctcaagtcaagctncgtagtgagcagatataatggncgttgaaaggtccggaattgccaaagatgttacggaattgattggtaaaaccccattagtatatctaaataaacttgcggatggttgtgttgcccgggttgctgctaaactgagttgatggagccatgctctagtgtgaagnnnggattgggtatagtatgattgctgatgcagaagagaagggacttatcacacctggaaagagtgtcctcatgagccaacaatggtaatatggcatggatagcctcaggcagcagcaggggttacaagctcataatacaa

SEQ ID NO: 279761 - DNA, 375 bp, Glycine max
  unsure (1)..(375): unsure at all n locations
agaatatgaagttgtttgtnttctttgttgctgcagtagttttggtngcatggnncatgccatggcgcaggctaccaaaggttccctctccgaatgaaaactggctatggtgagcgtncttcggaggtaaaatgcgcaagttttaggcttgctgtggaagcacacaanatccgagcctttaaaaccattcctgaagatgcgttgaaccaacaaaggactacattaatggcgaacaatttagatcagactctaaaacagttaaccaacaagctttctttatgctagtgaacgcgagtccatcacaacgacatatttatatcggcatagataacaccgtactctctaatatcccatactatgaaaaactggatatgg

SEQ ID NO: 279762 - DNA, 334 bp, Glycine max
  unsure (1)..(334): unsure at all n locations
atggctttgaccaatcagcaaaccgtcgattaccctagtttcaaactcgtcatcgtcggtgacggtggtacaggaaagacaacgttcgtgaaaangcatcttaccggtgaatttgagtagatatacgaaccgaccattggagtggaggttcacccattgatttctcacaaactgtggnaagatcgntctactgttgggatactgccggncnagagaagtttngttgcctcaaggangnatangatatccatgggcaatncgccattatcatgtntgatgntatncccgataacttannaaaatgtncctacctggnatggggattttggcgggg

SEQ ID NO: 279763 - DNA, 369 bp, Glycine max
  unsure (1)..(369): unsure at all n locations
attctatatgagctgaaagagcattcggtgggtctaaactgtgggcgttgggattacattttcagttatgttaaaaccttccagnntcacccagatcgtctactancaganagggtccaggttggcatgactcaacatttcatgaagagttactctgatctcctcatcaggacatgccacaggcgcggtgtgntnnnatgggaggaatggcagcacagattccaatcaaagatgacccagttgcaaatgaggcagcactggaacttgtaaggnaggacaagcttagagaagtgaaggcagccacgatggaattgggctgcanatcctggtctcatcnatnctgcatggnngtttcaacancaacatngg

SEQ ID NO: 279764 - DNA, 306 bp, Glycine max
  unsure (1)..(306): unsure at all n locations
gccanggttctctccaaaaccacctccgaatccgacgtctctgtccactcaaccttctcntctcgatatgtcagaacttcgcttcncaggtttaagatgccggaggagtcgataccaaaggnggcagcgtatcaaataataacgatgagttgatgttggatgggaacccaaggttgaacttggcatcatttgtgacaacctggatggagccagatgtgataaactcatcatggtgccattataagaacttgttgacatggagagtactgncaccatgngtacaaatcgtggtaacngatncncncc

SEQ ID NO: 279765 - DNA, 360 bp, Glycine max
  unsure (1)..(360): unsure at all n locations
actctcaagtccaacctacccctttntnttctcccaccaacnttcaccgtcngcttcctcgatcatgtctcacttcaagggcaagtaccatgatgagcttatngccaatgntgcttacattggcactcctggaaanggtattctngctgctgatgagtcaacagggacaattggcaagcgttggccagcatcgtgtagagaatgttgaatccaacaggcgtgctcttagggagctgcttttcaccgctcccggtgctcttaaatatctcagtggtgtcatcctctttgagganctctctaccagagcacantgcngcaacntttgnggaatctaaaagaggtggttcttctggatcaggt

SEQ ID NO: 279766 - DNA, 357 bp, Glycine max
  unsure (1)..(357): unsure at all n locations
gagagagcgagggggcanacacaattttttttatcttctattctntttnntgtnnnnnnnnnnnnnnnnnnnatgttggggatcttcagcagttcagtggtgtcgccgccggaggagctggtggccgctggcagcagaacgccgtcgccgaagacgacggcngggaactgctgaaccggttcgtggagacaaggcgtcggcggtgtcgctgcaggtgggggaacacgtgcagttggctnacacacaccacaacgaatcacgtggcatccagatcattgctgttaaggatgagaattctgcttgttgagggggtctacacaattgggcanctgaacaacatatggctgccagtcancc

SEQ ID NO: 279767 - DNA, 207 bp, Glycine max
  unsure (1)..(207): unsure at all n locations
ctggagtgggctccatcaacatggtgannnctttttggcacatcaacggttagcncatagttgatcctgcttctggggatcaacctctctttaacgaggacaaatccgtcattgttacggtaaatggagagatttacaaccatgaagagctcaggaaacagctgcctaatcacaacttccgaactggaagtattgtgatgttattcc

SEQ ID NO: 279768 - DNA, 366 bp, Glycine max
  unsure (1)..(366): unsure at all n locations
ccgagatcaaccccgacgaaggcaaggggtttttctcggcttcttcagatttctgaaatggcgcctgtttcagctttagccaagtataagctcgtcntcctgggtgaccaatccgtgggcaaaaccagcatcatcactcgcttcatgtatgataaattcgataacacctatcaggctacaattggtattattttctatcaaaaactatgtatcttgaagatcgaactgttcgactgcagttgtgggatacagctgggcaggaaagatttagaagtcttattccaagctacatcagggactcatctgtagctgttattgtatatgatgttgcaagccggcagactttctaaatactgctaagtggat

SEQ ID NO: 279769 - DNA, 350 bp, Glycine max
  unsure (1)..(350): unsure at all n locations
gattttggcggtgcagtccctcgtagaccagcagaagacttggcgttctcagttgcaagattcatacagaatggtggttcattcgttaactactatatgtaccatggaggaacgaactttggccggacatcaggtggcctcttcattgccactagctatgactatgatgcgccgcttgatgaatanggcttgaaaatgaaccaaagtatgagcattgagagctttgcataaagcaataaaacaaagtgaactgctttagtggctacagtcccaaagtgcatcgttggatataacttgaggcccagtgttctcggcccagtgntnngtgcatcatgctattagcaccaatc

SEQ ID NO: 279770 - DNA, 110 bp, Glycine max
  unsure (1)..(110): unsure at all n locations
tgcaagaatggcacttcgttgcttggtgatgtccctttctgttctcttcactcttggtcttgcgagagaaagccatgccagagacgaagattnttgnaatnctgtttngg

SEQ ID NO: 279771 - DNA, 353 bp, Glycine max
  unsure (1)..(353): unsure at all n locations
ccacccttctcacaatcctttaccaaaacaacataagcgggttgcaggttcaccgaaaaggcgtcgggtgggtgacggtgccaccactctccggcggacttgtgatcaatgtaggcgacctcctccacatattgtcgaacgggttgtaccgagtgtgctccaccgggtcttagtgaaccggatcagcgaaggctttcagttgcgtatttatgncngcccctccaaatgtggagatatgtccacatgcgaattagtgggcccaaataagcctcccctttataaggcagtgacttggatgagtaccttgggacaaagcaaagcatttaacaagcntctcactgntcgntttgtnc

SEQ ID NO: 279772 - DNA, 355 bp, Glycine max
  unsure (1)..(355): unsure at all n locations
gtaaatagggtgaaccacactcagttgcctcactaccgtgacaccatgaatattaattcacttgcccggaaagccctggtcaatgcagatgncattatagagaaaacattcttgtggggtaggtactctatggaaatgtccgctgtcatttacaaggactgggttttcactgatcaagcattnctaatgatcttgtaaagagaggagttgctgttaaggacccatctgctccccatggagttcgtctttgattgaggactatccttatgcttctgatgggctagagatatgggatgcatcagtcctgggtgcaagantatgctcatctactacaagtcagatgaggactccaaaa

SEQ ID NO: 279773 - DNA, 353 bp, Glycine max
  unsure (1)..(353): unsure at all n locations
agaggttgcagcaacaatngcagccatggctgcgcttcagagcncaatggtcggtctctccctctcctccaactctttcttagggcaacgcctttctcccatcaacctccctctcttcttcgggtaagtcaacagagaagcaatgtcctattgtaatgaggcttaaacgatgggaacggaagggtgtaaaccanacagccttcctatcttgcacaaaatgcatgttaaacttggagatacggtgcaagtcatatctggacgtgaaaggggtaanttggggagttataaaatcttcaagcataacagcactgtatagtgaagattaaattgagacaacctgtggagatagagaa

SEQ ID NO: 279774 - DNA, 110 bp, Glycine max
gtgaccccaatatacttagccatatctttacttcccaaaacttgctctacaatgagtttccttcgttcttttgcaagaaacaaggatatatcaaaagtaggacgcagagg

SEQ ID NO: 279775 - DNA, 271 bp, Glycine max
  unsure (1)..(271): unsure at all n locations
gacgacctcgttggttttcctttgtaagttgtaagcatttgggcaccagcaagccctgtcttcttcttcgntcagattagggcatttcatttctgcgatggccgcagcacccgctagagctcgtgccgattacgattacctcatcaagcttcttcttatcggcgacagcggtgtcgggaagagttgtctgcttttgagattttctgatggctcattcacaaccagttttatcaccaccantggtatcgatttnanataagaaccattgant

SEQ ID NO: 279776 - DNA, 277 bp, Glycine max
  unsure (1)..(277): unsure at all n locations
agaaacatggcttcgtcggttctctccgcagcttcgcacncctgtctcaccctcatgttcnctgtncaccacgcacaagggnaagcccatgantagagacaanactttgggattccacagaggacccaattccttctcnagttcaaggtntagaggtcggntctctatggctgttgcagttaacgnttctcgggttngaggcatacctatgggcgcctcctgatccaaattcttagggagtttctgaggnatntaaggtggaccaatagtggtgtnc

SEQ ID NO: 279777 - DNA, 273 bp, Glycine max
  unsure (1)..(273): unsure at all n locations
ggacgacctcgttggttttcctttgtaagttgtaagcatttggcaccagcaagccctgtcttcttacttcgatcagattagggcatttcatttctgcgatggccgcagcacccgctagagctcgtgccgattacgattacctcatcaagcttcttcttatcggcgacagcggtgtcgggaagagttgtctgcttttgagattttctgatggctcattcacaaccagttttatcaccaccattggtatcgatttaagataagaancattgaact

SEQ ID NO: 279778 - DNA, 275 bp, Glycine max
atggccaccgttccagggcagctcgtgtgggagatcgtcaagaaaaacaattccttcttggtcaagcagtttggaaggggcacccagagcgtcgaattcagcagagagagcaacaatctctacaacctcaattcgttcaagtactctggtttggcaaacaagaaaactgttactgttcagcctgagggcaaagatcaggctgtgttgttggctacaaccaagacaaagaagcaaaacaagcccgctgcattgctccacaaatctgtgatgaagaa

SEQ ID NO: 279779 - DNA, 268 bp, Glycine max
gtttgttgtgagctataagctagtttatcgtgaggagaatatgaagttgtttgttttctttgttgctgcagtagttttggtagcatggccatgccatggcgcaggctaccaaaggttccctctccgaatgaaaactggctatggtgagcgttcttcggaggtaaaatgcgcaagttttaggcttgctgtggaagcacacaacatccgagcctttaaaaccattcctgaagagtgcgttgaaccaacaaaggactacattaatgggcga

SEQ ID NO: 279780 - DNA, 266 bp, Glycine max
gcgcgggtgaggtagaacccttccactgtggtgactctgcgatgggtgcctacaagtatgtttcagagctatggcgcaagaagcagtctgatgtcatgcgcttcttgcagcgggtgaggtgctgggagtataggcagcaaccttccattgttcgtttgacaaggtctacccgccctgacaaggctcgtcgcttgggctcaaggctaagcaggggctatgtgatttaccgtgttcgtgttaggaggggtggccgaaagagaccattc

SEQ ID NO: 279781 - DNA, 270 bp, Glycine max
  unsure (1)..(270): unsure at all n locations
attcaagggtgtactatcagatggtgctgtgattgctgttaagcagctctcctccaaatcaaagcaagggaatcgtgaattcatcaatgaaataggcatgatatctgcttngcagcatccaaaccttgtgaaactttatggctgctgcattgaaggaaaccagctgctgctagtatatcagtacatggagaacaatagtcttgctcgtgcactttttggtaaagaacatgagaggnngcaattggactggcccagaagaatgcaaatttg

SEQ ID NO: 279782 - DNA, 266 bp, Glycine max
  unsure (1)..(266): unsure at all n locations
catttctccatttccattttctctctcacttttcaagaatcgtaagctatgggaaagtcttacccaactgtgagtgctgattaccagaaggccgttgagaaggcgnagaagaagctcagaggcttcatcgctgagaagagatgcgctcctctaatgctccgtttggcatggcactctgctggaacctttgacaagggcacgaagaccggtggacccttcggaaccatcaagcaccctgncgaactggctcacagcgctaacaacgg

SEQ ID NO: 279783 - DNA, 266 bp, Glycine max
  unsure (1)..(266): unsure at all n locations
actttttcttcttttggactcattctttcttgcaaaatagcaactgatgcttctggcctgtctaagggctatggttttgttcaattcgacagtgaagngtctgcacagaatgctattgacaagttaaatggcatgttgatcaatgataagcaggtctatgtaggccattttctgcgaaagcaagatagagagaatgctctcagtaagacaaaatttaataatgtctatgtgaaaaacttatcagagtcaaccacggatgaagagtt

SEQ ID NO: 279784 - DNA, 264 bp, Glycine max
atttgctactgggaaccaagacaaaacatgtcgtgtttgggatgttcggaacttgtcaaaatccgttgctgttcttaaaggcaatcttggagctatacgctcaatacgtttcacatctgatggacagttcatggcgatggccgagccagctgactttgtgcatgtgtatgacgcaaagcatggatttgagaaggagcaagagattgatttttttggggagatctctggtgtatcctttagccctgatacagaatcactctttat

SEQ ID NO: 279785 - DNA, 265 bp, Glycine max
gagtttgttgtgagctataagctagtttatcgtgaggagaatatgaagttgtttgttttctttgttgctgcagtagttttggtagcatggccatgccatggcgcaggctaccaaaggttccctctccgaatgaaaactggctatggtgagcgttcttcggaggtaaaatgcgcaagttttaggcttgctgtggaagcacacaacatccgagcctttaaaaccattcctgaagagtgcgttgaaccaacaaaggactacattaatg

SEQ ID NO: 279786 - DNA, 270 bp, Glycine max
  unsure (1)..(270): unsure at all n locations
ccaatttcatccactcgtaacatacccctatcggttttagaaaagccaagaaagtttgtgtccaccaacctctattttacacgagtctctcatactatgatactatagctacacttcccactgtgtctcagggtctgtgacacacacagactcacttcaagttcccagcttttgccatttttcccactgtttattgagaagaactgcagaacatggcacagattttggntccctctacgcaatggcagatgagaatctcaaaatcctctc

SEQ ID NO: 279787 - DNA, 272 bp, Glycine max
  unsure (1)..(272): unsure at all n locations
gatcgtgagaggggcagtagccgagattccgtgagttgcaaaaatgaagacgattctttccaccgagaccatgaacatcccggacggcntgagcatcaaagttcatgccaaggtcatcgaagttgagggcccccgcggaaaattggtgcgagacttcaagcatttgaatctcgattttcagctcattactgacgaaaacggtaaaagaaagctgaaaatcgacgcgtggtttggttctcggaaaacatccgccgccattcgcaccgccttga

SEQ ID NO: 279788 - DNA, 272 bp, Glycine max
  unsure (1)..(272): unsure at all n locations
cttctncttcaagactgcgacgacgatccangtgatagacactcgtcgcgatgnnacgcgtanctgatanccgancgaantctgtacccatacgtgactggatcntctgtagtcgntatcaaatacaaagatgggattctaatggccgctgacatgggaggttcgnatggatctaccctgcggtacaagagtgttgagcgtatcaagcctattggaaagcattctcttcttggtgctagcggggagataagngactttcaggagattctgcg

SEQ ID NO: 279789 - DNA, 264 bp, Glycine max
  unsure (1)..(264): unsure at all n locations
cagagagtggtttcagtgagtgatcggtgttcacttgatccttcataagtcnnnnnnnnnnnnnnnnnnnnnnnnnnntgattgaagaagatgccgatcagaaacatcgccatcggaaggcctgaagaggctactcaccccgacacgttgaaggcggggttggctgagttcatctccaccttgatcttcgtgttcgccggttcaggttccggcatcgcctacaacaagctcaccganaacggcggcgtcactcccgcnggcctc

SEQ ID NO: 279790 - DNA, 262 bp, Glycine max
  unsure (1)..(262): unsure at all n locations
agagaatggctcccaagggtttaacctttctggctgtgttaatatgcgtttcagcactgtcactgagtccttctgntgcgggggaagggcaaaataatggccttgttatgaacttcnataaggaatcatgccctcaggctgaagacatcatcacagaacaagtcaagcttctctacaagcgccacaagaacactgctttctcctggctcaggaacatcttccatgactgtgctgttcagagttgtgatncttcactgttgct

SEQ ID NO: 279791 - DNA, 357 bp, Glycine max
  unsure (1)..(357): unsure at all n locations
acaacttctgctacttcctactccaaccgcacttctgctccgcaattatcatggggcaaggtcaagatcggaatcaacggatttggaagaattggccgtttggtagccagagtggctctgcagagagacgatgttgaactcgttgccgttaacgaccctttcatcaccaccgattncatgacatactgtttaaatacgatatgntcatggacatggaagcatcacgtgtcacgttaaggacgagaagaccttctcttcggtgacaagccagtcatattttggacacagnaacctgaagagtccatggggcantggagtgcatcntgtgatccacgganttcacgtaaggcaaggcgc

SEQ ID NO: 279792 - DNA, 357 bp, Glycine max
  unsure (1)..(357): unsure at all n locations
canagaccgaggcttcccttttncgaatgctgaagggttcaccggatgtttatctgagtggccccatccgaaanctacatcatggacagaggnggcaggttccatcttangtggggatgcagagaactgctttatgacaaatctgctgatgggatannctgntacaggatttccatgtccaaggccatgccaagaaaattgtgaaagctgatgctatgttgctgcttgtgatgtnccctggaattaagagatactccatcagatggagggaacagganttttccataatatctatgaatagtggagtcctgantcacatgcaactcagatacatggttggtacanantgcagatcta

SEQ ID NO: 279793 - DNA, 366 bp, Glycine max
  unsure (1)..(366): unsure at all n locations
tncagagttgattccctgcttagatagacaccttatctatcaaatgaggntgaagctggacctgtctgtagatggagcactatgaaagacattgtcctcctgcggaaaggcggtacaattgcttgattcctctccatcaggatacaaggttcctattaagtggccacaaagcagagatgaggtgtggaaagcaaatatcccacatactcaccttgcacacgagnagtctgancagaattggatgactgttcaaagtgaaaaaatatgttcctggaagcgggatcatttcattatggagctgacaagnacatagcatccattgcnatatgcgtnacttttccaacnattatctnaacaatggaagga

SEQ ID NO: 279794 - DNA, 361 bp, Glycine max
  unsure (1)..(361): unsure at all n locations
caaagctgaagtgtctgcntcttccgattccggcacgcccccatcaccatggtgaacgttccgaaaacaaagaagacatactgcaagagtaaggngtgcaggaagcacaccctgcacaaggttacccaatacaagaagggtaaagatagcattgctgcccaaggaaaacgccgttacgatcgcaaacaatctggttnttggcggacaaataagcccgtcttcccacaagaagggtaagacccacnagnagatgttctgaaggtgccatgccaagggtgccagctgnttccaacacggtatttagaagtgccancncttganattgttgnnaccanaaaggccagggactcttgntttantg

SEQ ID NO: 279795 - DNA, 263 bp, Glycine max
ttcaagtttgcaccaagttttcctgagaaaatgtctggtcgtggaaagggtggaaagggtttgggaaagggaggtgccaagaggcacaggaaggttcttcgcgacaacattcagggcattacgaaacctgcgattcgtaggttagcgagaagaggtggcgtgaagaggatcagtggtttgatctacgaggaaaccagaggggttctgaagatattcttggagaacgtgattcgcgatgctgtgacttataccggcacgctagg

SEQ ID NO: 279796 - DNA, 271 bp, Glycine max
gcaaaggttgcctgtaacacagaattaaaggatctcaaatccattttccctcgtgttaaggatggagacgttccttatatatgcttagatcttgtatacgaatatacattgctcgttgatggatttggcatagatccgcagcaagagattacgttggtgaggcaagttgagtatcaagattctctcgtggaagcagcatggccactaggcagtgccatagaagccatatcatcattacctaaatttgagaaattaatgtattcatttaagc

SEQ ID NO: 279797 - DNA, 269 bp, Glycine max
agatctgtcttccgaagcaggaactaaatatggctgacttgttggaatggtcaaagcaagataagaaacgaatgcttcatgtcgtctaccgtgttggtgaccttgatcgcaccatcaaattttacacagaatgtttaggaatgaagcttttgaggcaaagagatatcccagaggagaaatatgctaatgcttttcttggatttggccctgaagaatcccattttgttgttgaattaacatataattatggggttacctgtatgacattg

SEQ ID NO: 279798 - DNA, 267 bp, Glycine max
tgctactctttgctctgctctgcttagggttccaacttcaaacccaacagcacttatcgttctcatgcaacaagggaaaatgaggcctattttctgtggaaattttgaatatgatgcccggcagtcagagctggagcggctttttagacgatatgggaaggttgatagggtggatatgaagtctggatttgcttttatctatatggaagacgagagagatgctgaggctgcaattcgtgctcttgatcgagtagaattggtcggaag

SEQ ID NO: 279799 - DNA, 270 bp, Glycine max; identical to SEQ ID NO: 188891

SEQ ID NO: 279800 - DNA, 269 bp, Glycine max
cgatcttttcctctgagaagacgtgtcggtagctgaagcattttataagcctccactttcctgaactagttttaacatacaatctttcaagtacacctccccagcttccatttaagaatggagatcactagaataggccaatggttaagtcttctgatatgtgtactactattactgcagacagaaggggttcctgtgggaatcacttttgttgaaaatgcagtggcaaaaggggctgtttgtttggatgggagtcctccagcttacca

SEQ ID NO: 279801 - DNA, 271 bp, Glycine max
ggctgacgaggatgttaggatgatatcagctgaagcaccagtcatttttgcaagggcatgtgaaatgttcatattagagttaaccctgcgctcttggaatcacactgaagagaacaaaaggcgaacacttcagaaaaatgatattgctgctgctatcacaaggactgacatctttgatttcttggttgacattgtgcctcgtgaggacttgaaagatgaagtgcttgcatcaatcccaagaggaacaatgcctgttgcaggcctgctgatg

SEQ ID NO: 279802 - DNA, 269 bp, Glycine max
cactctagcacacaaaacttgctatagcagtaagctataactcatttgaggctctgtgagaattgagaaatggctaaagatgttgaggttcaagagcaaggaggagagtactctgccaaagactaccatgaccctcctccagcacctttgttcgacccagaggagctcacacagtggtccttctatagagccctcatcgctgagttcatagcaacccttctcttcctttatgtcatgtgctcaccattattggctacaaaggcagatga

SEQ ID NO: 279803 - DNA, 272 bp, Glycine max
  unsure (1)..(272): unsure at all n locations
gagctctgcgagatcttcattcgcannantttaaaagatgagtaagcttcagagtgatgctttgcgtgaagccatttcaggaatcancgccgattccaaggagaagaatcgcaaatttgtggagaccatcgaactccaaatcgggttgaaaaactacgatccacagaaggacaagcgtttcagtggctctgtcaagctgccccacatccctcgccccaagatgaaaatttgcatgcttggtgatgctcagcatgttgaagagcggagaagat

SEQ ID NO: 279804 - DNA, 267 bp, Glycine max
  unsure (1)..(267): unsure at all n locations
ttatccctctaatcactctagctgttgcaaatttctactcattnttcaatggcttctgcagatgttgagttccgttgctttgttggtgggcttgcttgggtcaccggcaacgatgccctcgagaaagccttttcaatctacggcgacatcgttgaatcgaaggttatcaacgaccgtgagactggaaggtccagaggattcggatttgtgaccttcgcctcagagcagtcaatgaaagatgcgatcgcaggaatgacggccaggacc

SEQ ID NO: 279805 - DNA, 267 bp, Glycine max
aagaatagagagtgatggagtgcgtattcggattggtgggtaatggattcgcgatcgtggtggctgattcatcggcggtgcacagcatcctcgtccacaagtccaacgaggacaagatcatgcttctcgattcccacaaactcatcgccgctagcggcgagcccggagacagggttcaattcactgagtacattcagaaaaacgtcgccttgtatcagttccgtaacggcatccctctcaccaccgccgccgccgcaatttcacacg

SEQ ID NO: 279806 - DNA, 269 bp, Glycine max
  unsure (1)..(269): unsure at all n locations
gtttgttgtgagctataagctagtttatcgtgaggagaatatgaagttgtttgttttctttgttgctgcagtagtttnggtagcatggccatgccatggcgcaggctaccaaaggttccctctccgaatgaaaactggctatggtgagcgttcttcggaggtaaaatgcgcaagttttaggcttgctgtggaagcacacaacatccgagcctttaaaaccattcctgaagagtgcgttgaaccaacaaaggactacataatggcgaaca

SEQ ID NO: 279807 - DNA, 181 bp, Glycine max
tttgactcttcttcgtctcaaatctcttcgttccttcgattcgttccatttcttccaaaatggccaaagacccagttcgcgttctcgtcactggagctgcagggcaaattgggtatgctcttgtccctatgattgctaggggagtgatgttgggtcctgaccagcccgtgatcctccacat

SEQ ID NO: 279808 - DNA, 137 bp, Glycine max
cagaaaaaatgggttcttcttcttctatgtggacggtgtgtgtgattttggcatcactggcctctgcagcactctgtgccaacccacgcaggccagtggatgtacaatttggccgaaactacgtgcccacatgggcc

SEQ ID NO: 279809 - DNA, 264 bp, Glycine max
tcggttctgccttcacaaaaaaattatcgagatcccctttttctcctaagaaaagccatggctaagggtcccggtctctactctgacatcggcaagaaagccagggatctgctgttcaaggactaccacagtgaccagaagttcaccatcaccacctactcacccactggagttgctataacagcatcaggaaccaggaaaagtgaactgtttgtggctgatgtcaacacccagttgaagaacaaaaacatcatctgatatcaa

SEQ ID NO: 279810 - DNA, 267 bp, Glycine max
accagtcacaatccctcccattgttaatccaccagtgacagttccacccgttgtgcttccaccaatagtgaagcccccgggttttctccctccaattcttaacccaccaagtacaccaacaccgtcgccggggaagggagggaacactccatgtccaccaccaaagtctcctgcacaggctacatgccccattgacacgctcaaactaggtgcttgtgtggatcttcttggtggcttggttcacattggcttgggagacctgttgcg

SEQ ID NO: 279811 - DNA, 261 bp, Glycine max
gtcgttgcagagctgcgcgttgatctagaaaaatggcgaggataaaggtgtacgagttgaggaataagacgaaggcggagtactgaaccagctcaaggatctcaaggcggagtagccctgctccgcgtcgccaaggttaccggcggcgccccaaacaagctctccaaaattaaggtggtgaggctatcgatagcgcaggttttgacggttatttcccagaagcagaaagcggcgctgagagaggcttacagaagaagaagt

SEQ ID NO: 279812 - DNA, 262 bp, Glycine max
ggctgacgaggatgttaggatgatatcagctgaagcaccagtcatttttgcaagggcatgtgaaatgttcatattagagttaaccctgcgctcttggaatcacactgaagagaacaaaaggcgaacacttcagaaaaatgatattgctgctgctatcacaaggactgacatctttgatttcttggttgacattgtgcctcgtgaggacttgaaagatgaagtgcttgcatcaatcccaagaggaacaatgctgttgcagggc

SEQ ID NO: 279813 - DNA, 262 bp, Glycine max
  unsure (1)..(262): unsure at all n locations
ctgtgatcgcagactcaacactctcgctagacanttccttccgcaaatggcttctcacgacagcatctccgcttctccaacctccgcttctgattccgtcttcaatcacctcgttcgtnctcccgaagatcctatcctcggggtaactntngcttataacaaagatccaagtccagttaagctcaacttgggagttggtgcttaccgaactgaggaaggaaaacctcttgttttgaatgtagtgaggcgagtgaacagcaat

SEQ ID NO: 279814 - DNA, 264 bp, Glycine max
  unsure (1)..(264): unsure at all n locations
gatcgatctctttaccagttgccacactacaccgagatnccccctaaacccgtttgcgttgttgtttgcgaagaaatggcgactaagaggagcgtgggaacgttgaaggagggtgatttgaaagggaagagggtgttcgtgagggtcgatctgaacgtgcctttggatgacaaccttaacatcaccgatgacactagagtccgtgctgctgttcccaccatcaagtacttaactggtcatggagccaaagtgacctttctagcc

SEQ ID NO: 279815 - DNA, 261 bp, Glycine max
ctggaagttcaaaggttggcttgatggtccagcaaacagttaatgagagatttggcaaatgcttgcttgagttaagtggtaacaatgcaataattgtcatggatgatgcagacatcaaattggctgtacgctctattttgtttgctgctgtgggtactactggtcagcggtgtacaacttgtcgtagactgtttctgcatgaaagtatttatacagacgtactagaccaacttgttgaagtctacaaacagtcaaaattgg

SEQ ID NO: 279816 - DNA, 263 bp, Glycine max
  unsure (1)..(263): unsure at all n locations
catagttgtgggcatgggatttgcaatctgtttcctgtattggtgggtgaacaattatgttcctcttcctacacgtagcnnnnnnnnnnnnnnnnnnnnnnnnatgggaacaatggagagcattaagttcttggtgtcttcaaaatatataagggatcttgccactttagtggttgcatatggaattagcattaatcttgttgaggttacatggaaatcaaagctcaaagctcagtttccaagccccaacgatactcatcttt

SEQ ID NO: 279817 - DNA, 126 bp, Glycine max
gtgaccccaatatacttagccatatctttacttcccaaaacttgctctacaatgagtttccttcgttcttttgcaagaaacaaggatatatcaaaagtaggacgcagaggtatccattgcatgcag

SEQ ID NO: 279818 - DNA, 258 bp, Glycine max
  unsure (1)..(258): unsure at all n locations
gcagaggaaaaccctagctagtagtctcagttcgtttgagagagaaaaaatggcagagggtctcgttctccgcggaaccatgcgcgcccacaccgacgtcgtgacggcgattgccactcccatcganaactccgacatgatcgtgacggcgtcgcgcgacaaatccatcattctctggcacctcaccaaggaggacaagacctacggtgtcccccgccgccgcctcaccggacattctcacttcgtcaggacgtcgtc

SEQ ID NO: 279819 - DNA, 212 bp, Glycine max
  unsure (1)..(212): unsure at all n locations
tcaaataaactantattaaggagctagaggcaatgggaaagagcaaggttcttgttgtgggtggaactgggtatgttgggaggagaatagtgaaggcaagtttagaacaaggccatgaaacctatgttcttcaacgtccagagnttggtcttgacattgagaaggtgcagatgctgctttcattcaagaagcaaggtgctcaccttgtggag

SEQ ID NO: 279820 - DNA, 258 bp, Glycine max
agcacatcgagggagcaactaaatacctgctctctaagattaaagatttccaattttttgttggtgagagcatgggtgatgatgcttgcttggtctttgcctactacaaggacggcgctgctgatccaacattcctgtactttgcatatgccttaaaggaggtcaagtgctaagtgacttaatgtaccgagctatctactcattttatctagtttttttttacgttctgtcctaagttacttgaaactttgacctggt

SEQ ID NO: 279821 - DNA, 260 bp, Glycine max
acgtaatcaagaaatacatttcctcttcaacaaaccccacagccactcttgatttcaaaggtactatcttaggaatcaaaccggcaccggttatagcttctttctcagcgagaggacccaacggtttaaaccctcagatacttaaaccggatttcattgctcccggtgtcaacatcctcgccgcctggacccaagctgtcggcccgaccggtttggactccgataccaggagaaccgagttcaacatcttgtctggcatt

SEQ ID NO: 279822 - DNA, 258 bp, Glycine max
tcaaataaactagtattaaggagctagaggcaatgggaaagagcaaggttcttgttgtgggtggaactgggtatgttgggaggagaatagtgaaggcaagtttagaacaaggccatgaaacctatgttcttcaacgtccagagattggtcttgacattgagaaggtgcagatgctgctttcattcaagaagcaaggtgctcaccttgtggaggcttctgtttctgatcaccagagcttagtggaagcgtgaagcttgt

SEQ ID NO: 279823 - DNA, 249 bp, Glycine max
  unsure (1)..(249): unsure at all n locations
tttttcataagtgaagctaggaaatccacaaacacanctgatnctcaaaaagtgcgagataatctcatctacaattacaaacctactttnggtggaacggctgggaaaggatatgatcaagtgtatctctttgaataattctatctgtaggaggtgtccttgaatttgattttatgcacaataaattatgaactggggatgtagtttgaagaaataaaaatttgtgcacagtgatgtttgtaagatgct

SEQ ID NO: 279824 - DNA, 255 bp, Glycine max
catatgttcacgctggctgatggtactccgttactcatcaagaacgcaatctgtgtctttgaacaatatggcagcatcatgtggcgtcacaccgaaacaggcattcccaatgaatcgttcgaagaaacgagaacggaagtcaacttagtggtaagaactgttgttaccgtgggcaactacgataacatcattgattgggagtttaaaacaagtgggctcaatcaaaccctcgattgctctctcgggtatattgga

SEQ ID NO: 279825 - DNA, 247 bp, Glycine max
  unsure (1)..(247): unsure at all n locations
tgccacaaaagaatttctacngtctctgcatagtgcttgtgatgaagctggggcacttctcgtttttgatgaggttcaatgtggtttaggtagatcagggtttctttgggcccatgaggcatttggtnnttcccggatatgatgacccttgcaaagcctcttgctggaggcctacctattggagcagtcctagtgactgagagagttgcttcttctataaattatggtgaccatggaagcactttgc

SEQ ID NO: 279826 - DNA, 252 bp, Glycine max
  unsure (1)..(252): unsure at all n locations
ttcactcttcttctcttgcggctagggttttagcgcanttcttctagatttaaggaagatgggtaaggaaaaggttcacatcagtattgtggtcattggccatgtcgactctgggaaatccactaccactggtcacctgatttacaagcttggaggcattgacaagcgtgttattgagaggnttgagaaggaaactgctgagtgaacaaggggtctttcaagtatgcctgggtgctggacaaaattaaggct

SEQ ID NO: 279827 - DNA, 250 bp, Glycine max
  unsure (1)..(250): unsure at all n locations
ctttgcaacgtgttatcatatttggtgacatgggaaaggctgagcgtgatggttcaaatgaatatgctgattatcaaccgggttctctaaacaccacagaccaactcgtcaaggatttagaaaattatgacattgttttccacataggagacatgcgcttatgcaaatggatacatctcacaatgggaccaattcacagctcaagtgcaagatatttcgtcagcagtaccatacatgnttgcangtggac

SEQ ID NO: 279828 - DNA, 249 bp, Glycine max
  unsure (1)..(249): unsure at all n locations
gcatcatggcgacactgngattccgacgtgaccgtgtttccggccggcgaacntcccagcagcgccggtccttcttcgtccaccaagaagccgaagcgtttcgagatcaagaagtggaatgcggtttccctctgggcttgggatattgtcgtggataattgcgctatttgtcggaaccatatcatggatctctgtattgagtgccaaggccaaccaggctagcgccactagcgagggaatgcattgtag

SEQ ID NO: 279829 - DNA, 251 bp, Glycine max
  unsure (1)..(251): unsure at all n locations
ctgaanttgtatcattttatcagnantcagcagacgagctttatctgttgtttgagcagttctgtgaccacttccanccaacatcaagganttcaatgtatatgaatttcatatcttctcattcaaataatatccacgcactggaacagctacggagcataaaagataaggcaagcagctctgcacagtttntnaagaagatgcttgcctctttgcccttcagctgtcagtcacagagtcctctccttact

SEQ ID NO: 279830 - DNA, 243 bp, Glycine max
  unsure (1)..(243): unsure at all n locations
aacctacctctttttcttctctctcaacaacttcaccttcttcctcctcgatcatgtctnacttcaagggcaagtaccatgatgagcttatcgccaatgctgcgtacattggcactcctggaaagggtattcttgctgctgatgagtcaacagggacaattggcaagcgtttggccagcatcagtgtagagaacattgaatccaacaggcgagctcttagggagctgcttttcactgctcctg

SEQ ID NO: 279831 - DNA, 248 bp, Glycine max
  unsure (1)..(248): unsure at all n locations
gcctcttaatccttctaagaatcgcgaacaaatggttgagacgatgtttgagaagtacaattttgctggagtgtttatccaaatccaagctgttctaacattatatgctcaaggtttgctgactggattagttattgactcgggtgatggtgtcactcatgtggttccanttgttgatggctattctttccctcatctaactaaacgaatgnatgttgctggtcgacatataacctcctatcttgtng

SEQ ID NO: 279832 - DNA, 179 bp, Glycine max
  unsure (1)..(179): unsure at all n locations
tgttgatcgagataactagaaacagtgtgatgaaaatgaaggtccttgttttcttcgttgctacaattttggtagcatggcaatgccatgcgtacgatatgttccctctccgaatgaacactggctatggtgcccgtactccggaggtgaaatgcgcaagttggaggcttnctgtggaa

SEQ ID NO: 279833 - DNA, 335 bp, Glycine max
  unsure (1)..(335): unsure at all n locations
atagaagttgtgagttcacttatttgtccacacagatacttcacntcctgggaattgaaggaccaaaaacatcagacccgagcaaatatatccgttacatttataatagagtacatcttgagaatgcaattgttagggccagtgctgtgagcacactggcaaaatttggtgctgtngttgatgcgtaaagccccgcatatttgttctgctaaggcgatgctttttgacagtgatgatgaggtcgtgatagggcaacactnactgaacaccttggaggtgatggtccattgttgagctgataaagtgtaaggctcctgtttgggcattgangcccc

SEQ ID NO: 279834 - DNA, 273 bp, Glycine max
  unsure (1)..(273): unsure at all n locations
aaattacactctttgcctcgcaccttcaacttaaccttttctactcataatcttaacnacttgctagaagaagataaagaaagagaaaaagtgtgtgtgtgtgagagagagcaatggctggctcgtgggcacgccgttctctgattgttctggctatcattccttcggtgtttatttgcaatttccattgctaaggaggaagccacaaanttggggcnggcatcgggatgancctgggacgacctatccagtgntggtgttacaagaacggcc

SEQ ID NO: 279835 - DNA, 338 bp, Glycine max
caagagggaggcggagtcgatctcgaagagatcttctccggagcaacgcggagaagtttgagttccaagcggaagtgtcgcggcttatggatatcatcatcaattctctctacagtaacaaggatatcttcctcagagagttgatttccaatgcttctgatgctttggcaagattaggttcctctccctcacggataaggaggtgttgggagaaggtgataacaccaagcttgatattcagattaagttggacaaggaaaagaaaattctctcaattcgagacagaggtatcggtatgacgaaggaggatttgataaagatttggggacaatagcgaa

SEQ ID NO: 279836 - DNA, 339 bp, Glycine max
gcaaacaaagtgaagaaagagcttaaatgagtgagacagcgactcttcatgcacaaacaaggacacccatttcttctttggattcaatggctcatcaccacccgcattatcggtcacccttcggagacacaacgttcaccaaattgttcgttggaggactagcttggagactcccaccgaagaaatgcgcaaatatttcgagcagttcggtaacattcttgaagctgtcatcatcactgacaagaacaccggaaaatccaaaggctatggattcgtaacattctgtgatcaagaatcagctagaagggcatgtgctgatccaaacccaataatagatgg

SEQ ID NO: 279837 - DNA, 337 bp, Glycine max
gctagtttatcgtgaggagaatatgaagttgtttgttttctttgttgctgcagtagttttggtagcatggccatgccatgggcgcaggctaccaaaggttccctctccgaatgaaaactggctatggtgagcgttcttcggaggtaaaatgcgcaagttttaggcttctgtggaagcacacaacatccgagcctttaaaaccattcctgaagagtgcgttgaaccaacaaaggactacattaatggcgaacaatttagatcagactctaaaacagttaaccaacaagctttcttttatgctagtgaacgcgaagtccatcacaacgacatatttata

SEQ ID NO: 279838 - DNA, 337 bp, Glycine max
gagatgggaaaaattctcccagaaggaattggggaagttcaggaaattattgatatgtgtgattattgtgttggggctaagcagacaattgaatggaccaattataccatcagaacgtccagatcatatgatgtttgaggtatggaacccactaggaatagttggtgaatcagtgctttcaactttccatgcgctgttctaggatggaatgcttgcattgctttagtctgtggtaactgtgttgtgtggaagggtgctccaacaactcctttgataactattgctgtgacaaagctagtagctgaagttcttgagaggaacaaattacctggtgcaa

SEQ ID NO: 279839 - DNA, 338 bp, Glycine max
  unsure (1)..(338): unsure at all n locations
caagattctaagagagattttgctgctctttgaagaagggtgtttgcttgattttggagatgtcgctgctctcagatctacatcaaaccttaacctctcagacactactgagaaggtgatcgcagagtacatatggatcggtggatcaggaatggacctgaggagcaagcaaggactctcccaggaccagttagcgacccttcaaagcttcccaagtggaatatgatggttcnagcacaggccaagctcctggagaagacagtgaagtgattatatacccacaagccattttcaggatccattcagaaggggcaacaatatcttggttatctgtgata

SEQ ID NO: 279840 - DNA, 336 bp, Glycine max
tctcactgatctccattcccattccatggcttccactgaatcatcccctttcaagaaaattcagattcaaagggatgacactacatttgacgcatatgtggttggaaaagaggatgctcctggaattgttgtgattcaggagtggtggggtgtggattacgaaataagaaccatgccgtgaagatttctcagcttggtagtgggtttaaagctcttattccagatttatacagaggaaaggttggtctggatgttgctgaagctcagcatttgatggatggtctgattggcaaggtgctgtgaaggatattgctgcttcggttaactggcttaaag

SEQ ID NO: 279841 - DNA, 336 bp, Glycine max
cagcgatcgaagtttcacatcagccttatccagtttagggtttcggttccttaccctacctttgacgtatcgaaaccttaaatttgggattaggtctgagcaatctggttggtagaacctttggtcttagagagtcaagttttatgtctggattagacgatcaaatcctactgccttcgatccttttgctgatgcaaatgctgatgactcgggtgctgggtcaaaggagtatgtgcatattcgcgttcagcagcgaaatggtaggaaaagcctgacaaccgttcaggattgaaaaaagaattcagctataacaagatacttaaagacgttaagaaa

SEQ ID NO: 279842 - DNA, 336 bp, Glycine max
  unsure (1)..(336): unsure at all n locations
taggtttttacgcaccacgtatccctgagaaaagagaggaaccacactctctaagccaannnnnnnnnnnnnnnnnnnnnnatggttaaagacacaaagcctttagcctatgctgccaataatggataccaacaaaagggttcttcttttgattttgatcctagcgtcctccaccgtttaagattgcagaaatcagagcttcaataccaaaacattgctgggtcaagaatccatggagatccctcagttatgttctcagggatgtgcttgtaattgctgcattggtggctgcagcaattcacttcgacaactggcttctctggctaatctattgcc

SEQ ID NO: 279843 - DNA, 263 bp, Glycine max
  unsure (1)..(263): unsure at all n locations
gaggaaggctcaaacagtcttagtcaaagggcaggttgaagaggagaagggtggaatcaagaccgatgctttcttcaaaactaatctctccgatgtatatctgttggtgatgttgctactttccctttgaaattatacggtgaattgagaagagttgaacatgttgatcattctcgcaaatcggctgaacaggctgtgaaggccatcaaggcactgaggaaggaaaacagttgagnattgnntccttccaacatctatccngg

SEQ ID NO: 279844 - DNA, 337 bp, Glycine max
cagcctcaacaaccctaacgcgtgcagagcagagagagacgcagccatggggcgaagacccgcgaggtgttataggcaaattaagaacaaaccataccccaagtcacggttttgccgtggtgttcctgatcccaagatcaggatttacgatgttggtatgaagaagagggtgttgatgagtttcctttctgtgtccatctggttagttgggagaaggaaaacgtttctagtgaggccctggaagctgctcgtattgcttgcaacaagtacatggccaaatttgctggaaaggatgctttccattgagatcagggtgcacccatccatgttcttagga

SEQ ID NO: 279845 - DNA, 304 bp, Glycine max
  unsure (1)..(304): unsure at all n locations
gtgagctataagctagtttatcgtgaggngaatatgaagttgtttgtnttctttgttgctgcagtagttttggtagcatggccatgccatggcgcaggctaccaaaggttccctctccgaatgaaaactggctatggtgagcgttcttcggaggtaaaatgcgcattttaggttgctgtggaagcacacaacatccgagncttaaaaccatcctgaagatgcgttgaacacaaagctacataagggacanttagatcagctctaaacattaccacagcttcttnagcangnngattcnccacgc

SEQ ID NO: 279846 - DNA, 334 bp, Glycine max
  unsure (1)..(334): unsure at all n locations
aaaaagacaacccagagagcgcgtcttnaataaacgctcttctctgaaaacccccatttcttttcttctttcttcttctctttcgcttcttcgatcttcgatcttcgtcgctgaaaatgagagagtgcatttcaatccacatcggccaggccgggattcaggttgaaacgcctgctgggagctttactgcctcgaacacggcattcagcctgatgggcagatgccaagtgacaagaccgttggtggaggtgatgatgctttcaacaccttcttcagtgaaatggggcaggaaagcacgtgccccgtgcgatttttgtagatcttgagcccatgt

SEQ ID NO: 279847 - DNA, 338 bp, Glycine max
ctctttcgttctctctctttcactcgcgtcttcgagtttcacagcgaagtcgtaggagggtttcaaaagatggagaacatgcagagcttctggcaattgggcgatgaactccgtggacactcaaaagcatcggaggatcacaaatggttaatggttgcttcgaaatggcggaacagacaagattgaagggggagcgtgtgaacaaccttgatctttcaaagggccccattgaaacaaggtcaagggataaatttgggttccaggaagagaacaaatttgattctcttaacttaagcatgttgaacctggactctaaatttactgagaatgtgagcaaa

SEQ ID NO: 279848 - DNA, 333 bp, Glycine max
  unsure (1)..(333): unsure at all n locations
gggagggagccgtagcagcggaagctctagcttgggtagcgaatcacaatggcgagaggattaaagaagcatctgaagaggcttaatgccccaaagcattggatgcttgacaaactgggtggtgcatttgctcctaagccctcatctggaccacacaaatcgaggntgcctgccactcatactcattttgcgaaaccggctgaagtatgctctaacataccgtgaagtcattgctattctgatgcagcgacatgtccttgttgatggcaaagtcaggactgacaaaacataccctgctggttttatggatgttgtatcaatccctaaaacaaa

SEQ ID NO: 279849 - DNA, 333 bp, Glycine max
  unsure (1)..(333): unsure at all n locations
ctttacacccccctctctattttgcgttcattctgttttcttgaagtctttccctagccaatggccactgatcgtttgacccgggtnncacagtctccgtgagaggcttgatgaaaccctcactgccaacgggaacgaaattttggcccttctgtcaaggatcgagctaagggcaaggggatcctgcaacaccaccaggtcattgctgagtttgaggaaatccctgaggagaacaggcagaagcttactgatggtgcctttggagaagtcttgagatctacacaggaagccatagttttgccaccatgggttgctctggctgttcgtccaagc

SEQ ID NO: 279850 - DNA, 323 bp, Glycine max
  unsure (1)..(323): unsure at all n locations
gtagccagngagtgatacaatacagagtgcgttgttgctccttcgccacaactccctgccggcntgggtatctccagagattctatgcacnagaggcgtgccactggtggcaagaagaaggcatggaggaagaagagaaagtatgagctnngtcgccagcctgcaacactaagctgtcaagcaacaagacagtcaggaggatccgggttagaggtggaaatgtgaagtggagggcatgagatggatatggaaatatcctggggaagtgaagctgtaatcgcaaactctatntagatgtggttacatncnctcacacgngcnct

SEQ ID NO: 279851 - DNA, 337 bp, Glycine max
  unsure (1)..(337): unsure at all n locations
attttttgttctcaacagtgatgttatcagtgagtacccacttaaagaaatgattgaattccacaaaacccatggagtcagaggctaccataatggtgacaaaggtcgatgagccatcaaaatatggtgtggttgtgatggaggagactaccgggcaggttgagnatttgtagagaaaccaaagttgtttgttggcaacaaaatcaatgctggaatctacctattgaacccctcagttttggatcgaattgaactgaggcccacttctatcgagaaagaggtgtttccaaagattgcagcagagaaaaagctatatgcaatggtcctgccaggattc

SEQ ID NO: 279852 - DNA, 326 bp, Glycine max
  unsure (1)..(326): unsure at all n locations
cacttcccttctccaacatgccaaacgacagcgttctgagtcttttcttcttcgttaccctcttcacatgccttctctctgctaattcccacgatgaccatattttcctaccgagtcaactccatgacgatgactcagtgagttgcactgctaccgacccaaacttaactacaagccggtgatcggaatcctgacccaccccggcgacggtgcctctggccggctcagcaacgccaccggggttcttacatcgccgcctcctagttaattcgtggagtccggtggtgtagatnatcccctaatnaannannncctnnagaccttaa

SEQ ID NO: 279853 - DNA, 333 bp, Glycine max
  unsure (1)..(333): unsure at all n locations
attttttcttcctccatctgcattcncctttcgctcgacaaaccctagcgatttgatgctgtgcgatgcgactcgctgagttgaaccggataaagatctgagtcgcggtgatcggttcgacgccctcatgggtgctgcgggctccaagctcgagaaggctctcgcgaccaattccccgaaggagagcgttactttggcctcgagaatttggcaatacttgttactgcaacagcgttttgcaggnactatacttctgtgttccattcgagaacaatgctagaatattatgcaaataacaaaagcataacagatgcagaggaaaatcttttgact

SEQ ID NO: 279854 - DNA, 331 bp, Glycine max
gtaagaggtatagtgttctaagagtgagcaacttgtgagaaatggcttccaaggctgcacttctcttgtgtctcaatgttctctttttcactgtggttagttccacatatgtgccatgtaatccaccccccaaaactcccaaacacccacctgtcccaaagcaccatccccaaagctagcaagctgccccaaagacactattaagttcggtgtgtgtgctgatgtgttaggtttgattaatgtgcaattgggaagccaccaaagaccccatgctgcaacctaattcagggtcttgctgatcttgaagctgcagtgtgcctttgcatgctct

SEQ ID NO: 279855 - DNA, 333 bp, Glycine max
aaggacattcattcatctatggctacccttattgctcccagcaaccactctccccaagaagatgctgaagctctcagaaaggcttttgaaggatggggaactgatgagaacactgtcatagtaattttgggtcatagaactgtgtatcagaggcagcaaatcgaagagtttatgaggaaatttaccaggaggatcttgtgaagcgcctagagtctgagatcaaaggagactttgagaaagccgtgtaccgatggatactggaacctgcagatcgtgatgctgttttggccatgttgccatcaagagtggcaaaactacaatgtcattgtggaa

SEQ ID NO: 279856 - DNA, 331 bp, Glycine max
gtctcaaatctcttcgttccttcgattcgttccatttcttccaaaatggccaaagacccagttcgcgttctcgtcactggagctgcagggcaaattgggtatgctcttgtccctatgattgctaggggagtgatgttgggtcctgaccagcccgtgatcctcacatgcttgacattcctccggcagcagagtcattgaatggggttaaaatggaattggtggatgctgcattccctcttcttaaaggtgttgttgccacaactgatgtggttgaggcatgcactggggtcaatattgccgtgatggttggtggattcccaagaaaagaagg

SEQ ID NO: 279857 - DNA, 331 bp, Glycine max
gcgagcgaagatgtcgggtcgtggaaagggaggcaagggtttgggatagggaggagccaagaggcacaggaaggtgctttcgtgacaacatccagggtatcaccaaacccgcaattcggcgtttggctcgcagaggtggtgttaagagaatcagtggtctcactacgaggagacacgtggcgtcctcaagatcttcctcgagaacgttattcgcgacgctgttacctacaccgagcacgctagaagaaagaccgttaccgctatggatgttgtttatgctctcaagaggcagggcaggactctctacggtttcggtggttaatttctaggg

SEQ ID NO: 279858 - DNA, 330 bp, Glycine max
  unsure (1)..(330): unsure at all n locations
gattaacatgggaggggtcacagtagaagaggcacttagtactcagagattattcatattagattaccaagatgcattcatcccatatttgacgaggataaacagcctacctactgcaaaagcttatgccacanggacaatcctgttcttgaaagatgatgtactttgaagccacttgctattgaattaagcaaaccacatccagatggagataatttgggtcctgagagtatagtggtgttgctgcaactgaaggtgttgatagtacaatttggctattggccaaggctcatgttattgtgaatgactctggttatcatcagctcgtga

SEQ ID NO: 279859 - DNA, 330 bp, Glycine max
  unsure (1)..(330): unsure at all n locations
ctctatcgattgaaaacgtatcacgaagttattgatgagatctacaatcaagttgatcacgtggagccatggatgactgggaattgtcgcggtccttcaactgcattttgtcttctgtacaagttttttactatgaagctcaccgtcaagcaaatgcacggctgttaaagcaccccgattctccttacataagagcgnttggatttctctatctgagatattgtgctgatccgaagacactatggaattggtttgagtcatatgtaaaagatgatgaggaattttctcccggatctaatggtcgaatgactacaatgggtgtatatgtcc

SEQ ID NO: 279860 - DNA, 320 bp, Glycine max
  unsure (1)..(320): unsure at all n locations
ccaaaaatgagagaaatcatcagcatnncacataggtcaggccgggatccaggttggcaactcctgctgggaactctactgcctggaacatggcatccagcccgatggcatgatgccaagtgactcctccttcggtgtagcccncgacgcctnaacaccttcttcagcgnaaccggatccggcaagcacgtccctcgcgccgtcttcgtcgatctcgagcccaccgtcatcgacgaatccgttgtggcacttaccgtcaatcttccaccccgaacaatggactccggcaaggaagatgccgccaacaatttgccagaggc

SEQ ID NO: 279861 - DNA, 329 bp, Glycine max
gttttgatctgcggaaactcctctattctcaaaaccctaagccgacatcaccattcatccgatgagttcgagaggagcgaccgcggtgctatctcgtgccagcaggattcggtcgaagctgcaaacggcgctggaagccaccgttttggaggtggacgagtgtcgtaccagcacgcgggccacgccgccgtgaagggtagttccgacaaagaaacccacttcaacctcaacatcgtctcccccaagttcgagggccagagccttgtcaaacgacaccgtctcatctacgacctcctcgccgacgagctccagagcggcctccacgccct

SEQ ID NO: 279862 - DNA, 327 bp, Glycine max
  unsure (1)..(327): unsure at all n locations
caaaaaaagacaacccagagagcgcgtcttaataaacgctcttctctgaaaacccccatttcttttcttctttcttcttctctttcgcttcttcgatcttcgatcttcgtcgctgaaaatgagagagtgcatttcaatccacatcggccaggccgggatcangttggaaacgcctgctgggagctttactgcctcgaacacggcattcagcctgatgggcagatgccaagtgacaagaccgttggtggaggtgatgatgctttcaacaccttcttcagtgaaatggggcaggaaagcacgtgccccgtgcgatttttgtagatcttg

SEQ ID NO: 279863 - DNA, 329 bp, Glycine max
gtggcctatgctgcaaaagcttggggtcaccatgaaatctgaggagaaggacctaatgggcaaagcattgatgaagcgtgtcatgcaaacctggcttccagcaagtagtgcattactggaaatgatgatatttcatctaccctctccatcaacagcccagagtatcgtgtggagaatttgtatgagggtccccttgatgatcaatatgcttcggctatcagaaactgtgatcctgagggtcctctgatgctctatgtctcaaagatgattccagcatctgacaagggcagattttttgcttttggtcgtgtattctctggcagagtttc

SEQ ID NO: 279864 - DNA, 328 bp, Glycine max
gctatggaagcaacttcccacaaagggttcatcacagaggttcatccattgtttccatcaaggttaacccttcattgtcagctgccgtggaggttatgctacatggtttagcagcaaaaggagcgaccccaacctgctcactggtgctcttgttggtgacctgatgcatatgatgactttgctgatgaaagagataactatgagcagacagagccagcaacatataacaatgctcctcttattggtattctggcaagactaggtggaggtcatggtggctataaccagcttcttccagttgttgttccagctcctaagcctgctgtta

SEQ ID NO: 279865 - DNA, 365 bp, Glycine max
  unsure (1)..(365): unsure at all n locations
agacggacccgacccgatttggaacgctgtcaggggacgaagccaagctcgaggcggagaaggagccgattctgagtagcttcttgtacgctagcattttggcgcatgattgcttggagcaagcattggcgtttgtcgccgctaatcgtctccaaaaccctactctcttggccactcagcttatggatatcttctgcaatgtcattttgcatgacaaagctatccagcgatccattcgccttgatgttcaggcatttaaagatcgtaaccctgcttgtttgncgaattgctccgcgctttgtatangaagggttancatgctctgcaatacatcgggtagcccatacattatggcnccaggggng

SEQ ID NO: 279866 - DNA, 361 bp, Glycine max
  unsure (1)..(361): unsure at all n locations
agatggccaccgttccaggggcagctcgtgtggggagatcgtcaagaaaaacaattccttcttggtcaagcagtttggaaggggcacccagagcgtcgaattcagcagagagagcaacaatctctacaacctcaattcgttcaagtactctggtttggnaaacaagaaaactgttactgttcagcctgagggcaaagatcaggctgtgttgttggctacaaccaagacnaagaagcaaaacaagcccgctgcattgctcnacaatctgtgatgaagaagganttcaggaggatggcaaaagctgttgaaaaccaggtggccaaaattatacaggcctgtctcaaaaggngcccttgcaang

SEQ ID NO: 279867 - DNA, 356 bp, Glycine max
  unsure (1)..(356): unsure at all n locations
ttagcgcanttcttctagatttanggaagatgggtaaggaaaaggttcacatcagtattgtggtcattggccatgtcgactctgggaaatccactaccactggtcacctgatttacaagcttggaggcattgancagcgtgttattgagaggtttgagaaggaagctgctgagatgaacaagaggtctttcaagtatgcctgggtgctggacaaacttaaggctgagcgtgaaagaggaatcaccattgatattgctttgtggaagtttgaaacaacaaagtattattgcacagttattgatgcgcctggacatagggatttcattaagaatatgattactgggacatcccaagct

SEQ ID NO: 279868 - DNA, 356 bp, Glycine max
  unsure (1)..(356): unsure at all n locations
attttttcttcattgctttgataactccctttgctattttattctttatgcttatggcctcttcaagcaatgcctactggccaccttcacctggttacaggccaagttccaaattcaggcctgtgaacttctatagagggtttagaaatctttggggccctcagcaccaaagcatagaccanaatgcattaacaatatggcttgatagctcctcaggaagtggcttcaagtcaaatcgaccatttcgatccgggtactttggtgcttccattaagctccatcctggctatactgcaggagttataacagcttctatctttctaacaatgaggcacatccgggttccatgatgaagt

SEQ ID NO: 279869 - DNA, 359 bp, Glycine max
  unsure (1)..(359): unsure at all n locations
taaccggtggacagtttcttancctatcttgttnnacctcgcntttactggtgttccnggtacttggcgncggatgcttggtnnttctggtgtgcctgctgctgttcagtttgttctcatgctcttcctccctgaatcccccaagatggctttttgtcaagaataggaaaaatgaagccgttgatgtgctttctaagatctttgacgttnctcgcttagaagacgaatcgatttcctcactgctcaatccgagcaagagcgccaaagaaggtcaaatatcaaattctgggatgtttttagatccaaagaaatcagactggcattcctcgtcggtgccggacttctggcttttcagcagt

SEQ ID NO: 279870 - DNA, 358 bp, Glycine max
  unsure (1)..(358): unsure at all n locations
gacgaggtgatgaagatcatgcccgtccagnaaactctctgttattcctgtcaggagagggtattggggtaacaagatcggaaagccccacaacgttcctttcaaggttaccggcaagtgtggttctgttaccgttcgcatggtccccgctcctcgtgggtccggaattgttgctattagggttccaaagaaggtcttgcagttcgntggaatcgatggtgtcttcacttcctnaaggggttccaccaaaaccctcggaaanntcgtcaaggctattttgactgtttgctgaaaagctacggtttctaacactggattctggaaggagactcggttctccaaatcaccattccaagag

SEQ ID NO: 279871 - DNA, 359 bp, Glycine max
  unsure (1)..(359): unsure at all n locations
ggcgaagagaatgggctcncaagggtntaaatctttttggctgtgtcnntgcttctcagcactgtcantgagtcgttgtctngcggaggataatggacttgttatgaacttctacaaggtatcatnccctcaggctgaagacatcatcaaagaacaagtcaagcttctctacaagcgccacaagaacactgctttctcctggctcagaaacatcttccatgactgtgctgttcagagttgtgatgcttcactgttgctggactccacaagaaggagcttgtctgagaaggaaacagatagangctttgggttgagaatttcaggtacattgagnccatcaaagaagctttggaagggat

SEQ ID NO: 279872 - DNA, 350 bp, Glycine max
  unsure (1)..(350): unsure at all n locations
gtganaagcaagtattggggatgggactactatgggattttggnggttgacaggnatgcctcagntgaagagttgaagagagcctacagaaagcttgcaatnaaatggcaccctgataagaaccgaaccaataagaaagaggctgagattcaattcaaacagatatctgaatcctacgaggttcttagtgatcccccagaagagagcattttgatcggtatggagaagtggcttancggtggaatgccaacaccggatgaanggtgtggcttcattcttccgactggggatggtccaacagcatttaggttcaatcccagaaacgcaacacatttttcagagtgttgggg

SEQ ID NO: 279873 - DNA, 356 bp, Glycine max
  unsure (1)..(356): unsure at all n locations
ggagagaacaagcacagcctctttagaaaagcttcancgatctgacagcagctctagctcttcaagtgaggnggantgagaagatggaganntaaggaagaanncgnngaaggaaangaaagggtgaaancgaagatcgaggaganaatagagggtgtcatcatcatcacaaggatgaggacacaagtgtccctgttgagaaagttgaggttgttgaaacagcacatgctgaggaaaaganggggttcctcgacaagattaaggagaagctaccagggcacaagaagacagaggaggccacagctantactctcctccaccaccacctgttgcatcnttggngcatggtgangtgc

SEQ ID NO: 279874 - DNA, 355 bp, Glycine max
  unsure (1)..(355): unsure at all n locations
aaatcctcaaattcgatttgtaccaaattnnncttcacaaaatgtctggtcgtgggaaaggtggcaagggtttgggaaanggaggtgccaagaggcacagannnagttcttcgtgataacattcaaggtatcacgaaacctgcgattcgtaggttagcgagaagaggtggcgttaagaggatcagtggtttgatctatgaggaaacnntaggagttctgaagattttcttggagaacgtgattcgagatgctgtgacctacaccgagcacgctaggaggaagacggtgactgccatggatgtggtttatgcgctcaagaggcagggaggaccctctatggtttcggaggtgaatg

SEQ ID NO: 279875 - DNA, 349 bp, Glycine max
  unsure (1)..(349): unsure at all n locations
atcgagataactagaaacagtgtgangaaaatgaaggtccttgtnttcttcgntgctacaattttggtagcatggcaatgccatgcgtacgatatgttccctctnccgantgaacactggctatggtgcccgtactccggaggtgaaatgcgcaanttggaggcttgctgtggaagcacacaacatctntggctttnagaccattcctgangagtgcgttgaagcaacaaaggatacatccatggcgaacaatatagntcagactccacnacagtnaaccagcaactnntttatgccagagacctcgagtccancccaggccacattngtgttcagtatagtggcgccg

SEQ ID NO: 279876 - DNA, 350 bp, Glycine max
  unsure (1)..(350): unsure at all n locations
ggaataccaagattaccancacaaagcaatggggcggtatactttctgcgcttcttgggcggcgacnnnnnnnnnnnnnnnnnnnnncggaganttctacttctagagtctcctccttccactncgtcgncgcgcnancagctctacttcaacgagatcaaagataccgataagctcgttgtgatagattnctcggcgtcgtngtgcggtccttgcaattcatagagccagngattcacgcatggncganagttcaacgacgttnattcgtcaagatcgacgtcgangaattactgntgtggcgcaggagtttcaggtgcaggcgatgcgattttgtgttntggancaag

SEQ ID NO: 279877 - DNA, 350 bp, Glycine max
  unsure (1)..(350): unsure at all n locations
cacactgctgttgatcttgttaacgagaccaagttggatgacgagatcaagtcatggctagcatttgctgcacaaaaaattgttgaagttaacgcattggctaaggcattgtctggcaacaaggatgtggccttcttctctgctaatgctgcagctcaggcttcaaggaagtcctctccaagagtgaccaacgaggctgttcagaaggctgctgctgcattgaagggttcagatcatcgncgtgcaacaaatgtcagtgccagactggatgctcaacaaaagaagctcaaccttccatccttccaaccaccactattggatccttccctcagactgtagaactgaggagg

SEQ ID NO: 279878 - DNA, 352 bp, Glycine max
  unsure (1)..(352): unsure at all n locations
gagaaattgagtttctgagataaccacttttctctttgattcatcaatgggcaaccgcgaggaccgtgaaggatgtttcgcctcacgatttcgtgaaggcttacgcctcccatctcaagcgttccggcaagatggagcttcctgagtggactgatattgtaaaaacagcaaaatttaaggaannggctccatatgatcctgactggtattatgttagggctgcctcaatggcaagaaagatttatttgagaggcggtcttggtgttggggcttccagaggatctatggtggaagcaagagaaatggaagccgtcccccacatttctgcaagagcagtggggctattgcaaga

SEQ ID NO: 279879 - DNA, 340 bp, Glycine max
  unsure (1)..(340): unsure at all n locations
atcgaaacgaggtcgttttgtgttccgncgaatgnncgngnggttgtancaggctagcagctatggattngcgcatccaatctcggtggcaagattgacaaagccgncnttctctntgcngttcagcagnatgagaagtatcatgtctnntatggaggncaagntgnagagangcnngctaantatnccgatntggncaatnattactacgatcttgnanccagctntatganntcggctggggggatcttgccatgntncacccanatgnaccgggatctcntcgagagacatccacgacatgccactnccttccaannaattggatgagcnaggccga

SEQ ID NO: 279880 - DNA, 346 bp, Glycine max
  unsure (1)..(346): unsure at all n locations
gtgagctataagctagtttatcgtgaggagaatatgaagttgtttgtnttctttgttgctgcagtagttttggtagcatggccatgccatggcgcaggctaccanaggntccctctccgaatganaactggcnatggtgagcgttcttcggaggtanaatgcgcaagtttnaggcttgctgtggaagcacacaacatccgagcctttaaaaccatcctgaagantgcgtngaaccatcaaaggactacattaatggcgaacatttagatcagactctaaaacagttaaccaacnagcttnctattatgctagtgaacgcggagtccatcacggcggcctntttttt

SEQ ID NO: 279881 - DNA, 333 bp, Glycine max
  unsure (1)..(333): unsure at all n locations
gagtgtgcagaagagcgtcgcagtcgcaaccctaatcagaagaagcgcanttcaagcgagtggacagccaccagccatgggtcgtatgcacagccgcggtaagggtatatcctcttctgctttgcctacaaaaggacactcctagctggtcaagatctcttcgcaagatgtcgaagaaatatctgcaagtttgcgaagaaaggttgaccccgtctcagattggtgtcattctcagagattctcacggtattgctcaggtcaatagcgtcatggcagcaaatccttcgnatctcaaagctcacggattncgcctnaattcagaggactgtacnt

SEQ ID NO: 279882 - DNA, 363 bp, Glycine max
  unsure (1)..(363): unsure at all n locations
ctccttgctcttagccctcctcctcttcgccgcgtccgacgccgacgacatcctgatccgtcagtggtgccagatgttggcgaacgaaagaggaggacaacctgctgaacgccgagcaccacttcgcgagcttcaaggccaagttcgccaagacctacgccaccaaggaggagcacgatcatcgcttcggcgtcttcaagtccaacctccgcagagccaggctgcacgccaagctcgacccctccgccgtccacgggtcacaaattctccgatctaactccggccgagttccgccgccagttcctcgggctcaagccgtccgttnccggcgcagcccagaagnggccatcttcccaacaaagg

SEQ ID NO: 279883 - DNA, 359 bp, Glycine max
tctctctctcctcttgaagccctcaaaggctcaaacacaaacactaacactaacactagcattcactcaagagatcaataatgggatctggggccggcaatttcctcaaggtgcttctcaaaaacttcgatgtgcttgctgggcctgtcattagtcttgtttatcctctatatgcttcaattagggcaattgagagcaagtctcctattgatgatcagcagtggctcacttactgggttctctactccttgatcaccctctttgaacttacttttgctaaagtccttgagtggattccaatatggccctatgcaaagctgattgcaacctgctggttggtccttccttactttagcggt

SEQ ID NO: 279884 - DNA, 367 bp, Glycine max
  unsure (1)..(367): unsure at all n locations
ataagctagtttatcgtgaggagaatatgaagttgtttgttttctttgttgctgcagtagttttggtagcatggccatgccatggcgcaggctaccaaaggttccctctccgaatgaaaactggctatggtgagcgttcttcggaggtaaaatgcgcaagttttaggcttgctgtggaagcacacaacatccgagcctttaaaaccattcctgaagagtgcgttgaaccaacaaaggactacattaatggcgaacaatttagatcagactctaaaacagttaaccaacaagctttctnttatgctagtgaacgcgaagtccatcacaacgacatatttatattcggcatagataacaccgtactctc

SEQ ID NO: 279885 - DNA, 367 bp, Glycine max
  unsure (1)..(367): unsure at all n locations
cgagggagacacaccttcagcagcagcagccatggttctcaaaaccgaactatgccgattcagcggtgccaagatctacccagggaaaggcatcagatttgttcgtggtgattctcaggttttcctgtttgctaactcgaaatgtaagaggtatttccacaacaggttgaagccatcaaagctcacctggactgcaatgtacagaaagcaacacaagaaggacattgctcaagaagctgtgaagaaaagaagacgtgctgccaaaaaagccttactccaggtccattgtcggtgccactttggaagttatccagaaaaagagagctgagaagccagaattcgagatgcaaatagggaantgcccttc

SEQ ID NO: 279886 - DNA, 367 bp, Glycine max
cggaggagtttttcgttggatagttccatagggaactttaacattgaagatggattgcctaagcttcctccttcgaaaaatcaaatgggtcagcactcacctagcaattcgatggacggcaaaatgtcagaaacctccacggagtttggaaatggcgaatttagtgcagaggaggtaaagaaaataatggaaagtgataaactagctgaaattgcttcgactgatcccaaacgtgcaaaaaggattttggctaatcgtcaatcagctgctcgttcaaaggagaggaagatgcgatacattgctgaattggaacacaaagtgcaaactcttcagacagaaacaaccacattgtctactcagtttacca

SEQ ID NO: 279887 - DNA, 355 bp, Glycine max
  unsure (1)..(355): unsure at all n locations
gaaaagattaacaataaaagtgtggagtactgttgatagcaaagatgtttgggatcttcgacaaggggcaaaagataaaggggacagtggtgttgatgccaaagaatgtgttggacttcaacgccataancctccatcggtaaaggtggtgttattgacacagccaccggcatcttaggccaaggcgtcanttagttggtggagtaattgatactgccacttccttcttaggccgtaatatctccatgcaattgatcagtgctactcagactgatggcagtggaaatgggaaagttggaaaagaagtctatttggaaaaacatcttccgaccttgccaacgttgggacaaggcag

SEQ ID NO: 279888 - DNA, 362 bp, Glycine max
  unsure (1)..(362): unsure at all n locations
aagctagtttatcgtgaggagaatatgaagttgtttgttttctttgttgctgcagtagttttggtagcatggccatgccatggcgcaggctaccaaaggttccctctccgaatgaaaactggctatggtgagcgttcttcggaggtaaaatgcgcaagttttaggcttgctgtggaagcacacaacatccgagccttanaaaccantcctgaagagtgcgttgaaccaacaaaggactacattaatggcgaacaatttagatcagactctaaaacagttaaccaacaagctttctttatgctagtgaacgcgaagtccatcacaacgacatattatatccggcatagatacaccgtactctc

SEQ ID NO: 279889 - DNA, 360 bp, Glycine max
  unsure (1)..(360): unsure at all n locations
ctacagcatactcttcattgtcttcattattctgttgattgtcactgctttcatcactgtggctttgacgtacttccaacttgcagctgaggatcatgaatggtggtggaggtctttcctttgtggtggatcaactggcttgttcatctacggctattgcttgtattactactatgcacgatcagatatgtctggttttatgcaaacttcgttcttcttcggttacatggcctgcatctgctatggcttcttcctcatgcttggtagtgtaggttccgtgctctctgctctttgntcgtcacatataccaggccatcaagtgcgagtagatgggagtgaacgtgttggtaaagtcatatt

SEQ ID NO: 279890 - DNA, 361 bp, Glycine max
  unsure (1)..(361): unsure at all n locations
tggaatccaaaaatgagagaaatcatcagcattcacataggtcaggccgggatccaggttggcaactcctgctgggaactctactgcctggaacatggcatccagcccgatggcatgatgccaagtgactcctccttcggtgtagcccacgacgccttcaacaccttcttcagcgaaaccggatccggcaagcacgtcnctcgcgccgtcttcgtcgatctcgagcccaccgtcatcgacgaagtccgttgtgggcattaccgtcaactcttccaccccgaacaactcatctccggcaaggaagatgccgcaacaacttgccagaggcactacaccgttggcaaagagatcgtagatctnt

SEQ ID NO: 279891 - DNA, 352 bp, Glycine max
  unsure (1)..(352): unsure at all n locations
gagaaatacctgttatatgcaatgcctatgcttcagagtgccgcagagctntctgctcatacatctggtgctgatgacgatatgacagaatacactaattctttgagaaatggaattctagaggcatactcagggatcttccaagggtttaaaggttccccaaagacccagcttctgatgccatatgctcctcatgtgctgcaattcttggatagtttgtataatgagaaggacatggatgatgttgtgactaagacagcaattggcgtgcttggagatttagctgatactttgggtagtaacgctggcccgttgattcagcaatctgtgtccagcaaagacttccttaaag

SEQ ID NO: 279892 - DNA, 340 bp, Glycine max
  unsure (1)..(340): unsure at all n locations
gtttctccctcaacacaacacaacatgttcctctttgactggttctatggcattctcgcttccctcggtctctggcagaaagaagccaaaattctcttcctggtctcgataatgccggcaaaaccaccctccttcacatgctcaaagacgagagattagttcagcaccagccgacgcagcaccccattcggaggaattgagcattgggaagatcaagtttaaggtttcgatttggggggcatcaagttgctcgcaggtctggaaagatattatgccaggtggatgctgtcgtgtactggtgagcttcgataaagagagtcgcgattaagaagantcgtgc

SEQ ID NO: 279893 - DNA, 360 bp, Glycine max
gatgcttctgtcctctccacatgagtctttttgggctacttttagatactgggatacaaggcagtcaaatccagtgcacacacagcaactcccagagcgctgctatgctatgacagtgagacatcctctgatggttgttggcactgctgatagaaatcttattgtttacaacttgcaaaaccctcaggttgaattcaagagaattgtttcacccttgaagtatcaaacaaggtgccttgctgcattccctgaccaacaaggttcttggttggatcaatagaaggaagagttggggtgcatcatttggacgatagtcagcatggtaaaaacttcacttttaaatgccatagagagggcaat

SEQ ID NO: 279894 - DNA, 359 bp, Glycine max
  unsure (1)..(359): unsure at all n locations
tagatgactacccttatgctgttgatggactagagatatggagtgctatccagacatgggttaaggactacgtctccttgtactatgccacggatgatgcagttaagaaagactcagaactccaagcttggtggaaggaagctgttgagaagggtcacggtgacttgaaagacaagccatggtggcctaagttgaacactcttcgagatctgattcacatttgctgcattattatatggactgcttcagcactccatgcagctgtgaatttcggacaatacccttatggcggtttcatcctaaatcgtccaactctaaccagaagattgctcccagagccaggaaccanagaatatggt

SEQ ID NO: 279895 - DNA, 353 bp, Glycine max
  unsure (1)..(353): unsure at all n locations
ggganaatggcgggtacggtttcgacttgtttcttcttcgtgtttcttctttctctccttcttccttttcagatctccgctgaggaatcctcggagaaggagttcgtactcacattggatcactctaactttcacgacactgtcagcaagcacgatttcatcgtcgtcgagttctacgccccatggtgtggtcactgtaagaagcttgctccggagtatgagaaagctgcttctatcttgagtagtcatgatcctcctattgttttggctaaagtagatgccaatgaggagaagaacaaagaccttgcatcacaatatgatgttaagggttcccaacaattaatatctgagaa

SEQ ID NO: 279896 - DNA, 355 bp, Glycine max
  unsure (1)..(355): unsure at all n locations
ccatcgatcaattaatttccaatggccgatcagctcaccgacgaacagatctctgagttcaaggaagcctttagcctcttcgacaaggacggcgatggttgtattaccaccaaggaacttgggactgtgatgcggtcgcttgggcagaacccaactgangctgagctgcaggacatgataaatgaggttgatgctgatgggaatggtaccattgatttcccagaattcctcaatctcatggcgcgcaagatgaaagacactgattcagaggaagactgaaggaggtttccgtgtgtttgacaaggatcagaatggtttcatctctgccgcagagctccgccacgtatgaccatct

SEQ ID NO: 279897 - DNA, 354 bp, Glycine max
  unsure (1)..(354): unsure at all n locations
tttggggtttctctcttcaaactagggttttacagaatataagntctctctatctttggttttcgtcattcaaatccaatccaatatcaaatatgagtcgtcatcccgaggttaagtgggctcagagacttgacaaggtctatatcacggtgcaattggctgattcaaaaaatgccaaggtggatcttacaccagatggtatttttaccttctctggtagtgctggtgctgaagaccatcagtatgagctaaaactggagctctttgacaaggttaatgtagaggagagcaaaattaatgtaggagtgcgaanatattctgtgtagtgcagaaggcagaggatggatggtggaa

SEQ ID NO: 279898 - DNA, 356 bp, Glycine max
ccatcgatcaattaatttccaatggccgatcagctcaccgacgaacagatctctgagttcaaggaagcctttagcctcttcgacaaggacggcgatggttgtattaccaccaaggaacttgggactgtgatgcggtcgcttgggcagaacccaactgaggctgagctgcaggacatgataaatgaggttgatgctgatgggaatggtaccattgatttcccagaattcctcaatctcatggcgcgcaagatgaaagacactgattcagaggaagagctgaaggaggctttccgtgtgtttgacaaggatcagaatggtttcatctctgccgcagagctccgccacgtaatgaccat

SEQ ID NO: 279899 - DNA, 349 bp, Glycine max
tctctctctcctcttgaagccctcaaaggctcaaacacaaacactaacactaacactagcattcactcaagagatcaataatgggatctggggccggcaatttcctcaaggtgcttctcaaaaacttcgatgtgcttgctgggcctgtcattagtcttgtttatcctctatatgcttcaattagggcaattgagagcaagtctcctattgatgatcagcagtggctcacttactgggttctctactccttgatcaccctctttgaacttacttttgctaaagtccttgagtggattccaatatggccctatgcaaagtgattgcaacctgctggtggtcttccttactt

SEQ ID NO: 279900 - DNA, 353 bp, Glycine max
ggcaaagttgaatctggcagtgttcgtgagggagattccttgttggtcatgccaaataaggatccagtgaaagttgttgccatatttattgatgaagatcgtgttaaacgtgctggacctggtgaaaatttacggattagattatctggtgttgaagaagaagacatattgtctgggtttgttctatctagtgttgctaatccaataccagcagttaccgagtttgttgctcagttggtgatcctgaattgctagacaatgctattttactgctgggtacaaggctgtctgcacatccactctgtggttgaggaatgcgagattgttgaactcttgcagcaaatcgatacaaa

SEQ ID NO: 279901 - DNA, 351 bp, Glycine max
  unsure (1)..(351): unsure at all n locations
gctctctctaactccagtagtagccacggcaattccttcctcaagatgcccgccatcaagtttaccaagctcttcatcaatggagattttgttgattccatatcaggaaggacatttgagactatagaccccagaaaagaagaggtaattgcaagagttagtgagggagataaagaagacattgatattgctgttaaagcagcacgtcaggcatttgactcgggtccatggcctcgttgccaggctctgaaagggcaaaaattatgatgaaatgggcagactagttgatgaaatatagaagacctagcagcattagataccatgatgctggnaagctatactatatnatag

SEQ ID NO: 279902 - DNA, 349 bp, Glycine max
tcaaagatgaagatgatccacgttcttttcctctttgctcttgtctcgttcacttcccatgcttctgtcaatgatttctgtgtagcagacctaaaaggtccagatagcccttcaggctatcagtgcaagccacctaacacagtcacagtggatgactttgtgttctctggctttgtagctggaaacaccacaaacactttcaatgctgcattaacctccgcatttgttactgattttccaggtgtgaatggtcttggtgtatctgtggcacggttagacatagccaaaggtggatcaatcccaatgcacacacaccctgctgccactgaacttctaataatggtggaag

SEQ ID NO: 279903 - DNA, 359 bp, Glycine max
  unsure (1)..(359): unsure at all n locations
ctaagaccctctctctctcgtacttcatcggaaccgaaacccttcgccgcaaaaaatgcctcccaaatctgccaaatccaaggaagctccagctgagcgacccatcctcggtcgattctcttctcacctcaaaattggcattgttggcttgccaaatgttggaaagtctactctctttaatactctcaccaagttggcaatacctgctgagaacttccccttttgcaccattgagcctaatgaggcacgggtcaatgtacccgatgaacggttcgagtggcttgncaattattcaagccaaaagtgaggtctcggtttcttagaaatccatgacatagctggattgtcgaggtgctcat

SEQ ID NO: 279904 - DNA, 357 bp, Glycine max
ggctagagatgaaacatttttggacttgagtcttgatattgagcaaaacagttcaattacaagctgtttgaaaaatttcagttccaccgagacactgaatgctgaagacaaatttttttgcgacaaatgctgcagtttgcaagaagctcagaagaggatgaagataaagaaaccacctcacatcttggtcatccatcttaagcggtttaagtacatggaacagctaggccgctacaagaagctgtcctaccgggttgttttcccccttgagctgaagttgagtaacacagttgaagatgcggatattgagtattctctatttgcagtagttgtccatgttgggagtgggcccaccac

SEQ ID NO: 279905 - DNA, 355 bp, Glycine max
  unsure (1)..(355): unsure at all n locations
tgttactgctgctcttttctcttttcttttctctttagttctctcttcccctnnnnnnnnnnnnnnnnnnnnnnnnngagcttgtttaagcttttcttccattaacatattatcacaatgtgtggtattcttgctgttcttggttgttctgatgactctcgagccaaaagggtccgcgtgcttgagctctctcgcagattgaagcaccgtggccctgactggagtgggctccatcaacatggtgactgctttttggcacatcaacggttagccatagttgatcctgcttctggggatcaacctctctttaacgaggacaaatccgtcattgttacggtaaatggagagattacna

SEQ ID NO: 279906 - DNA, 300 bp, Glycine max
  unsure (1)..(300): unsure at all n locations
cgccaagtgaaagtgaganaaaataaaaatcaaagagcataatgtcagggatcattcacaagattggggagacccttcatgtgggagggcacaagaaggaggaggagcataagggtgagcaccatgctggagaatacaaaggggagcaccatggtgaacacagtagtgagtacaaaggagagcatcatggtgaacacaaagctggagagtaccatggtgagcacaagccagagcacaaagaggggttcctagacaaagtcaaggacaagatccatggtgaaggcggcgccgccgagggcg

SEQ ID NO: 279907 - DNA, 352 bp, Glycine max
  unsure (1)..(352): unsure at all n locations
tgaaaacccaaagtgcttctctcctctgtctttttctctctcttgctatccttttggctagtncgcactgctgcaagtggcaactccaagaagcgcagtgccaagccaccatgtttcaacattcaacagaagcctttttccttccacttttctctttggaattggttcttctgcttaccaggcagaaggagcagcaagtgtagatgggagaggaccaagcatatgggacacctacactagacagcatactgaaaagatttgggatcatagcaccggtgacatgggagctgatttttatcatcgatacaagggtgacataaaaatagcgaaagaaattgggtggactcttcaa

SEQ ID NO: 279908 - DNA, 353 bp, Glycine max
tgaaaactggctatggtgagcgttcttcggaggtaaaatgcgcaagttttaggcttgctgtggaagcacacaacatccgagcctttaaaaccattcctgaagagtgcgttgaaccaacaaaggactacattaatggcgaacaatttagatcagactctaaaacagttaaccaacaagctttcttttatgctagtgaacgcgaagtccatcacaacgacatatttatattcggcatagataacaccgtactctctaatatcccatactatgaaaaacatggatatggggtggaggaatttaatgaaaccttatatgatgaatgggttaacaaggcgacgcaccggcattgccaa

SEQ ID NO: 279909 - DNA, 348 bp, Glycine max
  unsure (1)..(348): unsure at all n locations
cagaaaatggangtncgccggcgagtcctccgtcccgctcccgccggcgaacccttgaagcccaaacaggacccacacccacactcccagcagcaatcgtacctcaccaacgccgtgttcntcgggctgttcttctcgctggcgtacttcctcctccaccgatggcgcgagaagatccgcacctccactcccctccacgtcgtcacgctctccgagatggctgccatcgtctccctcatcgnctccttcttctacctcatggccttcttcggcattacttcatcctcnaaccattccntaatacgctcttcccccgaggacgactcgaccttcaatttcnaaactgtg

SEQ ID NO: 279910 - DNA, 352 bp, Glycine max
atgcaaataagctcaatcgcattcttcagctcactggattcagtgatcctgtttatgctgaagcatatgtcacagtgcatcactatgacattgtccttgatgttactgtcatcaaccgaaccaaggaaactcttcagaatttatgtttggagttagcaaccatgggtgatctcaaacttgttgagcgtccacaaaactatacgcttgctccagaatcaagcaaacaaattaaagccaacattaaggtttcatcaactgaaacaggagttatatttggtaacatagtctatgagacatcttctaatgttcttgagagaacagttattgttctaaatgatatccatattgacat

SEQ ID NO: 279911 - DNA, 346 bp, Glycine max
  unsure (1)..(346): unsure at all n locations
agaaatttaactcgaccttgtatgatgaatgggttaacaagggcaatgcaccggcactgcccgagactcttaagaattacaacaagctggtgtctcttggcttcaagattatattcttgtcaggaagaacactggacaaacaggccgtaacagaagcaaacttaaagaaggctggctaccacacatgggaaaaattaattctcaaggatccacaagatccttccactccaaatgcagtttcatacaaaacagcagcgagagagaaactgataaggcagggatacaacatgttgggatcatggagaccatggagcgtctcctcggaggccacagaggcgaaancagg

SEQ ID NO: 279912 - DNA, 338 bp, Glycine max
  unsure (1)..(338): unsure at all n locations
atttcgctgcattccctctgcgttctccaacgaggaaactcatgtcgcacactcttgcacgtgccactcttggtctcacacacccttctaatatcgaaacccccaagatctcttttggtgctaaggatgttgatgtgacggaatggaaaggggacattctggcagtgggtgttacggaaaaagatttggctagagatgcaaactcgaagtttgagaatgtgattttgagcaagattgactcaaagttgggtggtttattagctgaagcctcttctgaagaggattctctggcaaagttgtcagtcaactgtctagaatacagncttggatcaaaaggt

SEQ ID NO: 279913 - DNA, 338 bp, Glycine max
  unsure (1)..(338): unsure at all n locations
ctcgttgctatcaagttactgtggtgcacaaatatttgaagtctatggattagggaaggaagttgttgatcttgcattcagaggaagtgtgtcgaaaattggtggattaacttttgatgaggtggcaagagagactttgtctttctgggtgaaggcattctctgaagatacagctaaaaggttggaaaattttggatttatacagttcagaccaggaggggagtatcatgcaaataacccagaaatgtcaaagttgctccacaaagctgttcgtcagaaagtcaagtgcctttcagtttatcacaatattggntatcgacctgtgatgtctcgngact

SEQ ID NO: 279914 - DNA, 340 bp, Glycine max
  unsure (1)..(340): unsure at all n locations
ccatggttgaggccatgacttgcggcttgccaacattcgccacatgcaatggtggtcctgctgagatcattgtgcacggcnagtctggcttccacattgacccttaccatggtgaccgtgctgctgatctcctgttgacttctttgagaagtgcaagcttgacccaactcactgggacaagatctcaaaggctggtctccagcgtattgaagagaagtacacatggcaaatttactctcagaggttctcatctcaacggtgtctatggttctggaagcatgtgtctaacttgaacgcgtgagancgcgtatctgagagtctagtctcagtacgnaatggt

SEQ ID NO: 279915 - DNA, 358 bp, Glycine max
cgtcgtcgttagggtcgtcttcggatcggtggaacttgactgcgccggcgtgaattccgacgctgcgagtggcaccgaattgcgatagcggtgacgaatatgaaggttttcgttaagactctcaaaggcactcacttcgaaatcgaagtgacgccgcaagacacggtttctgaagtgaagaaaaatatagaaactgttcagggtgcagatgtctatcctgctgcacagcaaatgctaattcatcaagggaaagttcttagggatgcttctaccttggaggagaataaagtagttgaaaatactttcattgtaattatgctatcaagagtaagagccatccggtgaaggtctactactc

SEQ ID NO: 279916 - DNA, 355 bp, Glycine max
attgccctctgcaatccatgtcaaacgcattgctaacgatcctgctgaacagactggggaatctgtgcttctcattaagggtcctcagggaagaataaatagggctatttggggacctctcaacagaaccattattagtgccggtgaagatgctgttattcgtatttgggattctgagacgggaaaactgcttaaagagtcagacaaggaatctggccataaaaagaccgtgacatcacttgctaagtctgcggatggttcgcatttccttactggctcccttgacaagtctgctaggctttgggatactagaacattgactctatcaagacatatgtcacagaacggcggtcaa

SEQ ID NO: 279917 - DNA, 333 bp, Glycine max
  unsure (1)..(333): unsure at all n locations
gccatggttctctccaaaaccaactccgaatccgacgtctctgtccactcaaccttcgcttctcgatatgtcagaacttcgcttcccaggtttaagatgccggaggagtcgataccaaaggaggcagcgtatcaaataataaacgatgagttgatgttggatgggaacccaaggttgaacttggcatcatttgtgacaacctggatggagccagagtgtgataaactcatcatggctgccattaataagaactatgttgacatggacgagtatcctgtcaccactgagttacagaatcgatgtgntaacatgatagctcatcttttcaatgna

SEQ ID NO: 279918 - DNA, 330 bp, Glycine max
  unsure (1)..(330): unsure at all n locations
ctcaaacttggcatggtatcagaccntcttacttcagatcntctatggccttattggaanctggactgcttatctagtcagtgtcctctacatagagtaccgcaccaggaaggaaaaggaaaatgtcagcttcaagaaccacgttattcagtggttcgaggtccttgatgggttacttggtcgatattggaaagcagtggggctagccttcaactgtactttcctcctatttggatctgtgatacagcttatagcatgtgcaagtaacatctattacataaacgacaaattgtataaacggacatggacttatattttggagcttgctgt

SEQ ID NO: 279919 - DNA, 337 bp, Glycine max
cagaaccctcgatcactcccacgcgctcctatatcctctccttcaccgtcgctctctccaacgatcacaacaacatcgtcatcccatggcaaacgccgcatctggtatggcagtccatgatgactgcaagttaaggtttttggagctgaagacaaagaggacacaccgtttcatagtttttaagattgaggagcagcagaagcaggtcattgtggagaagcttggtgagccagcccaaggtatgaagattcactgccagccttcctgctgatgagtgccgttatgtgttatgattgagtactgatgaaggaatgtcctaaagcagatttttcatgct

SEQ ID NO: 279920 - DNA, 290 bp, Glycine max
tagtgcctccttgccagaagttaaaatggcccaagaaactttcctattcacatctgaatcagtgaacgaggggcaccctgacaagctctgtgaccagatctccgatgctgtgctcgatgcatgcttggagcaggaccctgacagcaaggttgcctgtgaaacctgcaccaagaccaacatggtgatggttttcggagagatcacaaccaaggccaacgtggactatgagaagattgtgcgtgacacatgcaggaacattggtttgtctctgatgatgttggtcctgatgc

SEQ ID NO: 279921 - DNA, 344 bp, Glycine max
  unsure (1)..(344): unsure at all n locations
ggattgagancccaaaatgtgaagcagcccccggttgtggtgagtggaagaggccaatgaagaggaatccagcttacaaaggaaaatggcatgccccactaattgaaaatcctgcttataagggaatttggaagcctcaggacattccaaaccctgactactttgaaattaaaaaacctgattttgagcctattgctgctattggtattgagatttggacaatgcaagatggtatattgtttgacaacatcttgatagctaaagatgataaaattgccgagtcctaccgggagactacatggaagccagtttaccgtcgagaaagaaaacagaaggagaagatc

SEQ ID NO: 279922 - DNA, 205 bp, Glycine max
ggacattcattcatctatggctacccttattgctcccagcaaccactctccccaagaagatgctgaagctctcagaaaggcttttgaaggatggggaactgatgagaacactgtcatagtaattttgggtcatagaactgtgtatcagaggcagcaaatcagaagagtttatgaggaaatttaccaggaggatcttgtgaagcgc

SEQ ID NO: 279923 - DNA, 338 bp, Glycine max
atttcttggcccgggacttaacattccaaaacacagcgggcccatcaaagcaccaagctgtggccctaagggttggtggggacctctcagcattcttcaattgtgacatcctagcattccaagacaccctttatgtccacaacaatcgccaattctttgtgaagtgcctaattgctggcacagtggatttcatctttggcaactctgcagtggtgttccaagactgtgacatccacgccaggcttcctagctcgggccagaagaacatggtcacggcccaaggaagagttgacctaaccaaaacatggcattgtgatccagaagtgtaggatgtgcat

SEQ ID NO: 279924 - DNA, 345 bp, Glycine max
  unsure (1)..(345): unsure at all n locations
cttgtttgactagattggatcacaacagggcattgggccaaatctctgaaagactgaccgttcaggtttctgatgtaaagaatgtcattatctggggcaatcactcatcaacccagtatcctgatgttaatcatgcaactgttgcaacctcagctggggagaagcccgtccgtgagcttatagctgatgatgcctggttgaatggggaattcattactactgttcaacaacgtggcgctgcaattatcaaagctagaaagctttcaagtgcactatcagctgctagtgctgcttgtgaccatattagagactnggttcttnggactcctcagggcacttgggtat

SEQ ID NO: 279925 - DNA, 204 bp, Glycine max
tcttcataaacgcctttcttctccgtttccgtttcctcgttcgaattcgctttttgatctgcgaaaatgagagagtgcatctcgatccacattggtcaggctggtatccaggtcggaaatgcttgctgggagctctactgcctcgagcacggcatcgggcccgatgggcaaatgccaagtgacaagacagttggcggtggtgat

SEQ ID NO: 279926 - DNA, 352 bp, Glycine max
tttctttcttcaacgtttccatcatacacagatcccaatcctctctcaagccctaatttcccctcatttccatggccacagaagagcccactgtcgcggtggaacccgctcccgaacctgcctccgccgatcctcccccggaggagaaggaggagaccaaacctgaagccaaggctaagaaaaccaaggagcccaaacctaaaaaggtttccagacctcgcaaccctcccactcatccttcctacgaagagatggttaaagatgcaattacctcgctgaaggagaaaaccggttcgagccaatacgcgattgcgaattcatcgaggagaagcacaagcagtttccaccgaat

SEQ ID NO: 279927 - DNA, 196 bp, Glycine max
  unsure (1)..(196): unsure at all n locations
gtttgttgtgagctataagctagtttatcgtgaggagaatatgaagttggttgtttcttggtgcngcagtagttttggtagcatggccatgccatggcgcaggctaccaaagggtccctncncggatggaaactggntanggtgaacgttcttcggaggtaaaatgcgcaagttttaggcttgctgtggaagcaca

SEQ ID NO: 279928 - DNA, 348 bp, Glycine max
cgctcaaaccctaacctaactcctctcgtcgtcacaaaaagtcttcttctccgatcgttacgatgttggaactccgtctcgtgcaaggttcccttctgaagaaggttctggaatcgatcaaggagctcgtaaacgacgcgaacttcgactgctcctccaccgggttctccctccaggccatggattccagccacgtcgccctcgttgcgctcctcctccggtccgagggctttgagcactaccgctgcgaccgcaatacctccatgggcatgaacctcaacaacatggccaagatgctcaagtgcgccggcaatgacgacatcataaccatcaaggccgacgaggcag

SEQ ID NO: 279929 - DNA, 198 bp, Glycine max
cgagtttgtgacaatagtgatagactctacaattttgtacttcggagtattgccctggttttggaagatatcaggagattttatgacaatagccagtctcaatgctgagaatgaaatactgcatacccttgcctttttagctggggtgatgatttggtcacagataactgatttgcccttttctctgtactcaacttt

SEQ ID NO: 279930 - DNA, 340 bp, Glycine max
  unsure (1)..(340): unsure at all n locations
gaaaaaatgggttcttcttcttctatgtggacggtgtgtgtgattttggcatcactggcctctgcagcactctgtgccaacccacgcaggccagtggatgtacaatttggccgaaactacgtgcccacatgggcctttgatcacatcaaatatttcaatggtggttctgacattcagcttcatcttgacaagtacactggtactggcttccagtccaaagggtcttacttgtttggtcacttcagcatgtacataaagatggntcctggagatctgctgggcacagtcatgcttctaatnatcttcccaaacgcgganatgatgagatagatttgagttc

SEQ ID NO: 279931 - DNA, 342 bp, Glycine max
cacacactactacttctccctctctccctctctaatagtaacagtaatagtaatatacataacataaccaatggaagcacgtgcaggagccaatcaacgtattgcaagaatctctgctcatcttcagccttcaaatttccaggaagggagtgatgttcttcttaagagaggtgagtgcagagcaaaaggtggggcacctggattcaaagttgcaattttgggggctgctggaggaattggtcaatcccttctttgctgatgaagatgaacccattggtttcagttcttcatcttatgatgttgtcaacacccctggtgtcacagctgatgttagccacatgg

SEQ ID NO: 279932 - DNA, 340 bp, Glycine max
acaagatggcttcttttcatatccaatattcattccttgtgcttgtgcttgctatggtgatcacattgatgaaccctaccaatgcaaccctctctccccatttctatgataaagtttgccctcaggcattgccagttataaagtcagtggttcaacgagcaattatccgtgagcgacgcatcggagcatctcttctgcgcttgcatttccatgattgtttcgtaaatgggtgtgatggatcaatattgctagatgacacccgaaacttcactgggcgagaagactgcattgccaaatcttaatcagtcagaggttttctgtggttgatgaatccaagctg

SEQ ID NO: 279933 - DNA, 337 bp, Glycine max
  unsure (1)..(337): unsure at all n locations
cgagcacttggagattatctaggtgtgaaggttcatgcttgtgtgggaggtaccagtgtgcgtgaagaccaacgcattctatctagcggtgttcatgttgtggttggtacccctggtcgtgtgtttgatatgctgcgcagacagtcacttctgccagatcacatcaagatgtttgtattggatgaggctgatgaaatgctttcccgaggttttaaggatcagatctacgatatatttcagctgctgccatctaagattccagtgggagtttctctgctacaatgnctcctgaaggccttgagatcactaagnagttatggacnaaccggtagganct

SEQ ID NO: 279934 - DNA, 350 bp, Glycine max
  unsure (1)..(350): unsure at all n locations
gcaaaggagtgatttggagtttggagcgactgaactaatcattaatttgcactcgctgtttcagcttcatcacccttcttttgcatcatttatatctcttgagaaatggcacaagaaacctttctattcacatctgaatctgtaaacgagggtcaccccgacangctgtgcgaccagatctctgatgcagtacttgangcgtgccttgaacaggaccctgacagcaaggttgcctgtgagacatgcaccaagaccaacatggtcatggtcttcggagagatcacaaccaaggccaacgtagactatgaaagattgtccgcgacactgcgcgaantnggntcatctctgat

SEQ ID NO: 279935 - DNA, 353 bp, Glycine max
  unsure (1)..(353): unsure at all n locations
caaagatagcaaaatatcttgaagaaaggtgctacaaagaactcagatatgagcacatcaaactggtcaatattatagcagaatccttcaacaagttgctttccatttgtaaggtgcagatagcgtattttgctgttgatgtgcttaatgtaattttggagctcttgagctattctaaggatgagaccattcagacacttggttgccagtgcttatcaaagttcatctactgtcagatggatgctacttatactcataacantgaaaagttggtgccgaaagtgtgcatgctatcacgggaacatggtgaagcatgtgaaaagcgctgcttgagggcatcaagcttgcaatgc

SEQ ID NO: 279936 - DNA, 337 bp, Glycine max
  unsure (1)..(337): unsure at all n locations
caggcatggaatttagtcaagaccctgtgattccaatatattcagcaaaacctgatctggtaaagaaagccttgaagtatgtacattctgctgtacttgataaacttggtgggaaagaactagagttgttgattgccattcttccagacaacaatggctcnctgtatggcgatctcaaaagaatctgtgaaaccgatctggggttgatttctcagtgctgtcttacaaaacacgtattcaagatcaataggcagtatttggccaatgtggcactaaagatccatgtcaagatgggaggnaggacacagtactttggatgncctaagntggangatcc

SEQ ID NO: 279937 - DNA, 194 bp, Glycine max
  unsure (1)..(194): unsure at all n locations
gtggtaacacccccatattggttgccaccgatgtngctgcacgtggtcttgatattccccatgttgctcatgtggtcaactttgacctgccaatgacattgatgattatgtacaccgaattggaagaacagggcgagctggaaagaaaggtcttgcaactgcattctttaatgacaacaattcatcactagctg

SEQ ID NO: 279938 - DNA, 325 bp, Glycine max
  unsure (1)..(325): unsure at all n locations
cgagttttggttcgaaaaagcaggaaacaagctgagcagtatcatcggttatataaagaacccattcctgtcactcaacttgttagggaagttgccgctgtaatgcaggaatttactcagtctggtggtgttaggcctttggagtgtcactgcttgttgctggatttgatgataatggaccacaattatatcaggtggatccatcgggttcatattttcttggaaacttctgctatggggaaaatgttcgaatgcaagacgttctgagaggtacacagatgatatgactgatgatcagccaccaccatatgcttgaaggaggnta

SEQ ID NO: 279939 - DNA, 337 bp, Glycine max
  unsure (1)..(337): unsure at all n locations
agggttgggtttctcttcctcccttggagaaaaagaagagccaccgctgcgacgccgttcgtgcatttttgaggtgccgctgtcatgtttgggcgtggtggaccaaggaggagtgataactccaaatattatgatattctcgggatttccaaaaatgccagtgaagatgaaatcaagaaggcctatagaaaggcggctatgaagaaccatccagataanggaggagatcctgaaaagtttaaggagttaggtcaagcatatganagtttaagtacctgagagaaaagactgtangaccatatgntgaagttgcccttaagaagggngggggaagaag

SEQ ID NO: 279940 - DNA, 329 bp, Glycine max
  unsure (1)..(329): unsure at all n locations
ggggaagattcttgaagtattgaaaaactggcctgagaaaagtattcaagttattgttgtaacagatggtgaacgaattttgggacttggggatcttggatgtcaggggatgggaattcctgttggtaaattggccttgtacacagcactaggaggagttagaccatcagcatgtttgcctattacgattgatgtggggacaaacaatgaganattactaaatgatgagttttacattgggcttagacaaagagggcaactgggcagaatatctgaacttttgcacgagtccatgactgctgtcancaantacggagaanagtcttgtt

SEQ ID NO: 279941 - DNA, 336 bp, Glycine max
  unsure (1)..(336): unsure at all n locations
gaatatgatgcgttantaagaaccctgagaaggagtttttgaagactattactggcaagaaagagaccctnnattgaccttacaattatagaaattttatcaaggcacgcatctgatgagttctaccttgggcagagagatggcggtgactactggacttctgatgccgggccattagaggcctttaagaggtttggaaagaatcttgaagagattgaaaagaagcttatagagaagaacaataatgagacattgagaaaccgctatggccggctaaaatgccttacactttgctctatccttctagtgaggagggttgactttcagaggaattcc

SEQ ID NO: 279942 - DNA, 335 bp, Glycine max
  unsure (1)..(335): unsure at all n locations
tgaatatgatgcgttantaaagaaccctgagaaggagtttttgaagactattactggcaagaaagagaccctcattgaccttacaattatagaaattttatcaaggcacgcatctgatgagttctaccttgggcagagagatggcggtgactactggacttctgatgccgggccattagaggcctttaagaggtttggaaagaatcttgaagagattgaaaagaagcttatagagaagaacaataatgagacattgagaaaccgctatgggccggaaaatgcctacntttgctctatcctctagtgaggaggntgctttcagaggattcccacag

SEQ ID NO: 279943 - DNA, 196 bp, Glycine max
  unsure (1)..(196): unsure at all n locations
aaaagattaacaataaaagtgtggagtactgttgatagcaaagatgtttggggatcttcgacaaggggcaanagataaaggggacagtggtgttgatgccaaagaatgtgttggacttcaacgccataacctccatcggtaaaggtggtgttattgacacagccaccggcatcttaggccaaggcgtcacttagtt

SEQ ID NO: 279944 - DNA, 177 bp, Glycine max
gttcagtctttcttggaactttgttactctcacacatgtctcgctccgtgcctttggtttcaaccatttttgtcttgcttctgcttctggtggccactgagatgatggggccaacaatggtggcagaagcaagaacttgtgagtctcagagccaccgtttcaaggggccatgtttga

SEQ ID NO: 279945 - DNA, 338 bp, Glycine max
ggcacaagtcatgggtttcgtatctataattgtgagccttgcaaagaaactttcagacgtgatttaaaaagtggtggttttaaaattgtagagatgctgttccgatgcaatattctagcacttgttggtgctgtagctaattctcactatccaccaaataaagttttgatatgggatgatcatcagagcaggtgcattggtgaatttacatttaggtctgatgttcgtggagtgaaattaagacgcgatcgaattgtggttgttcttgagcaagatatatgtttataacttcacagatttgaagcttcttcatcagattgagctctggcaaatcctag

SEQ ID NO: 279946 - DNA, 330 bp, Glycine max
  unsure (1)..(330): unsure at all n locations
ggcacaagtcatgggtttcgtatctataattgtgagccttgcaaagaaacncttcagacgtgatttaaaaagtggtggtttaaaattgtagagatgctgttccgatgcaatattctagcacttgttggtgctgtagctaattctcactatccaccaaataaagttttgatatgggatgatcatcagagcaggtgcattggtgaatttacatttaggtctgatgttcgtggagtgaaattaagacgcgatcgattgtggttgtcttgagcnagatatatgttataacttcacagattgaanttctcacngatgagatcnngcaaacctaga

SEQ ID NO: 279947 - DNA, 350 bp, Glycine max
gttggttctgccggaacaacaaacaaaaccgtcaaaatgcctaaaaattttaccctcaaagcaccgggacctggctatacttgtggtcctgccaaagttgtgaaaccaactgtatttattaccaatgacaagaggagaaccacccaagccatgatgacctggaatattacctgcacttattctcaattcctggctcaaaaggcaccaagttgctgtgtttccctctcatccttctataatgacacagtagtaaactgcccaacctgcacctgtggttgccgaacaaaacagaacctggcagtgtgtagatccaaattcgccacatttagttcagttgtatcagcatcagg

SEQ ID NO: 279948 - DNA, 332 bp, Glycine max
  unsure (1)..(332): unsure at all n locations
gtttgtttnactnntaagatgggtgagangagcaacgttngcggcgacggattaacacgacactgcttcacgggaagtacgagctgggccggctgttangccacggaaccttcgcgaaggtgtaccacgcgcgccacctgaagacggganagagcgtggcgatgaangtggtnggcaaagagaaggtggtgaaggtaggcatgatggagcagatcangaganagatctcagccatgnacatggtgaagcacccaaacatcgtgcattcacgangtcatggcgagcaagtccangatctacatcgccatngagtcgtccgcggcggcgaactt

SEQ ID NO: 279949 - DNA, 324 bp, Glycine max
gagaaaacattcttgtggggtaggtactctatggaaatgtccgctgtcatttacaaggactgggttttcactgatcaagcattacctaatgatcttgtaaagagaggagttgctgttaaggacccatctgctccccatggagttcgtcttttgattgaggactatccttatgcttctgatgggctagagatatgggatgccatcaagtcctgggtgcaagaatatgtctcattctactacaagtcagatgaggaactccaaaaagcctgaactccaagcttgtggaagaacttgtagagtggtcatgtgattgaagataagcca

SEQ ID NO: 279950 - DNA, 185 bp, Glycine max
gaatttcatggacatggtggcttccatgcccgccatgaagctcgataagctctatgaaaacggattcatctgtgaagctattctcaggtctcttctgcctcttgcgaagaaatacgtcatacagatgctgcatattgatgtgtcagtggcagctaaattgttggaggaatgggtgcttccgggtg

SEQ ID NO: 279951 - DNA, 352 bp, Glycine max
tatgagtaagaattgtaggttgtgtggctataaataccatccctccctatgccataaaccgcatcacaaactaattaaagtgtgttatattattcatataccactctccttatcttgtagtattagttaatttgcattcttttgtttctctatcgatcatgggtgtttttgcttacgatgaagaaaactcctccaccgtggctccggttactctctacaaagctctgacgaaagatgccgacaccatcatcccaaagattattggtgccatccaaagtattaaattgttgaaggaaatggaggacccggaaccgtcaagaagataaccgctaatgaaggtcaactcgtcctg

SEQ ID NO: 279952 - DNA, 189 bp, Glycine max
cgcaatctgtgtctttgaacaatatggcagcatcatgtggcgtcacaccgaaacaggcattcccaatgaatcgttcgaagaaacgagaacggaagtcaacttagtggtaagaactgttgttaccgtgggcaactacgataacatcattgattgggagtttaaaacaagtggctcaatcaaaccctcgat

SEQ ID NO: 279953 - DNA, 363 bp, Glycine max
  unsure (1)..(363): unsure at all n locations
tccaatatattccattctctctgtgtatttccctacctctccctttcaagatgcagatcttcgtcaagaccctcaccggcaagaccatcacccttgaggtggaaagctctgacaccatcgacaacgtcaagggccaagatccaggacaaggaaggaatccccccggaccagcaacgtctcattttcgccggaaagcaacttgaggacgggccgtacccttgctgactacaacattcagaaggagagtactcttcacctcgtcctccgtctccgtggtggcatgcagatcttctaagacactcaccggcaagaccataacctagangttgaaagctccgacaccatcgataagtcaaggccaag

SEQ ID NO: 279954 - DNA, 303 bp, Glycine max
  unsure (1)..(303): unsure at all n locations
tttgtaccattgaggagtctggtgaacacattgttgctggtgcaggggagcttcatcttgagatctgtntgaaggacttgcaagatgnnttcatgggtggagcngagattatcananctgaccctgttgtgtcattcnnggagactgtttggagagatcatgccgcaccgtgatgagcaaatcagccaacnagcatacgtctgtncttgtacaagacattgaagnagtcttctnagccatgttatgcaattgaccagataccccagttctcaagactgctnanatcgttgacagattncaaaa

SEQ ID NO: 279955 - DNA, 336 bp, Glycine max
  unsure (1)..(336): unsure at all n locations
gcagaanaaccaagccacccactaacttgtttggtccaagacatggctctgatcctgcatgctaccaaaacaaacaagaatgccttcaagactctgattgcggcagagtacagtggcgtccaagtggaattggcccctaatttcgagatgggtgtctctaacaaaactcctgaatttctcaagatgaatcctattggaaaggttcctgttttggaaacgcccgatggtccagtctttgagagcaatgcaatcgctcgttacgttgctgactaaagggtgacaacgctttgttctcatcttctgccattgataatgcccacattgacccagtggatg

SEQ ID NO: 279956 - DNA, 320 bp, Glycine max
  unsure (1)..(320): unsure at all n locations
cacttctttcatcgcttcggatcttcaatctcatctccgatntcaaaatgcccgctgtttatggagctcgcttgaccaccttcgaagactccgagaaggagagtgaatacggttacgttcgcaaggtttcaggacccgtcgtcgttgcggatggcatggctggtgctgctatgtatgaactcgtgcgtgttggtcatgataatctcattggtgaaattattcgtctcgaaggggatctgctacatccaagtttatgaggaaatgctggttgatggtaatgatcggtcttangacgcacagctttgtcgtggagttggtct

SEQ ID NO: 279957 - DNA, 316 bp, Glycine max
ccaatccaaaaccctaataccttcaaagaacctagtagtgaatcagtgatggcacctaaggcagagaagaagccagcggagaagaagccggtggaggagaagaagtcgacggtgggagacaaggctccggcggagaagaagccgaaggcggaaagaagcttccgaaggagggaggagccggcggagaaggggggaagaagaaaaagaggaacaagaagagcgtggagacatacaagatatacatattcaagtctgaagcagtccaccctgacattggtatctcaagcaaggccatgggaatcatgaacagcttcat

SEQ ID NO: 279958 - DNA, 328 bp, Glycine max
  unsure (1)..(328): unsure at all n locations
atgcttatagaatggaagttacgcagagacctcccatggctgtgactaatgccgtgtcgtggcgcangaagggataaactataagaaaaatgaggttttcttggatgtggtggagagtgttaatatacttgtcaatagcaatggacaaataattagatctgacgtcgttggggctttgaagatgagaacgtatttgagtggtatgcctgagtgcaaacttggtttaaatgatagagtattgttagaggcgcaaggtagaacancaagggaaaggctattgacttggaagacataaaatttcatcagtgtgtgcgttggctcgattgaa

SEQ ID NO: 279959 - DNA, 341 bp, Glycine max
cataaatcacatagctagttgtttaaagtaagagagaagaaagaagcaaatggcaaactttccagttgttgacatggggaagcttaacaccgaagagagacctgcagccatggagattataaaagatgcctgtgagaactggggtttctttgagttggtgaaccatgggatatccattgagcttatggacacagtggagaagctcacaaaagagcattacaagaagactatggagcaaaggttccaaagaaatggtgaccagcaaaggtcttgatcagttcagtcagaaatccatgacttggactgggaagcaccttttcctgcgccatcttccactctcc

SEQ ID NO: 279960 - DNA, 339 bp, Glycine max
aaaccctcttttttctctctcttgcaaaacctaattttcatttcttccctcaaatttcaaaatgcgtgagatccttcacatccagggtggccaatgcggcaaccagatcggcgccaagttctgggaggtggtttgcgcggacacgggatcgaccctaccggaaggtacggtggggactcggagttgcagctcgagaggatcaatgtctactacaacgaggccagttgcggtcggttcgtgccgcgcgcggttctcatggacctcgaacgggcacatggacagcgtccggtccgggccgtacggcagatcttcaggccgacaactttgtgtttgggcatc

SEQ ID NO: 279961 - DNA, 178 bp, Glycine max
gcaccagtttcaccgcacgaatatcttgttgtctggagcgatccgagaaaaactctgtaaacatgttggtttaccaggactccttacaggtgatgagcttctctctgactccttccgttacaaggaaattgagaatggaatgctgtgggaagttgaggggaagtgggttgttaaagga

SEQ ID NO: 279962 - DNA, 181 bp, Glycine max
catgtttgttgttggtgtcaacgagcacgagtacaagccagagcttgatattatttccaatgctagctgcacaaccaactgccttgccccacttgccaaggttatcaatgacaggtttggcattgttgagggtttgatgaccactgttcattccatcaccgctacccagaagactgttgat

SEQ ID NO: 279963 - DNA, 345 bp, Glycine max
gtgggatggagagatgctatttactttgggccttgctcgtttatcactctcatggtgtagcaagaacatgaataacttggtcctatctcttgttcctaaattcgcaaaactgcaaactctaatcctccgtcaagacaagcctcaactagaggataatgctgttgagactattgcaaaatgctgtcatgaactgcagatcctggacctcagcaaaagtttcaagctaactgatcgttcactctatgagctcgcccttggttgtcgcgatcttacaaaacaacatcagcgggtgttcagcatttagtgacaatgctctggcttaccttgccagttctgcagaaaatg

SEQ ID NO: 279964 - DNA, 348 bp, Glycine max
  unsure (1)..(348): unsure at all n locations
atcgtcaccatcgccgccgctgaaggggtgcaggaccgcgtccaagcagccgccgaacgctctggccgtaatgtgcaagagattcgtgtagtggctgcgagcaagacgaagccagtttctgctctccgtgaggtatacgacgccggccttagatgcttcggcgagaactacgttcaagaactccttacaaaaggcaccacagcttcccgacgatatccagtggcatctcatcggaaatttncagancaacaaagtcaagcctcttatcgctgctgtgcccaccttgttgtgtngcaatgtggatgttagnagatagcaaattttcttgatcgtgctgtagccaatgtt

SEQ ID NO: 279965 - DNA, 181 bp, Glycine max
cgcagagaagaacagagagagatccatccatcaattccaatggccgatcagctcaccgacgaacagatctccgagttcaaggaagccttcagcctcttcgacaaggacggggatggttgtattaccaccaaggaacttgggaccgtgatgcggtcacttggccagaacccaactgaggcag

SEQ ID NO: 279966 - DNA, 355 bp, Glycine max
cggagtttcaacattcaacaatggtacctcaagctttgtcagtgcctgcgagtgccagcttcactatcgcttctcgcaccagaagtccctcccacctcgtattttctcacagttatggtgcaattgaagccaaggggaatccaccaataacacccgcagtgatgactcctggaggacctcttgatctctcactgttttgtttaggaatcgtataatattcataggacaaccagtcaattcacaagtggctcagagagttatatcccagcttgtgactctagctactattgatgaaaatgcagatatactggtatatataaattgccctggtggaagcacatattctgtgttggca

SEQ ID NO: 279967 - DNA, 340 bp, Glycine max
  unsure (1)..(340): unsure at all n locations
gtcaggaccattattaaggcctcagtttgttatgttcggttcttccattgttcagtatggtctttatgatgaaggttggatggctgatctttctcacttgtatgctcgcaaggttgatatagttttgcgaggatatgctggttggaattcaaggcgtgctctgcaggttctggataaaatctttccaaaggatgcncctgtacaaccttcattggtcattgcctactttggtggtaatgattcttctactccccatcatcaggcctaggtcctcatgtgcctctccaagaatacattgaaaattgaggaagattgttaaccactcaagtatttgtttcac

SEQ ID NO: 279968 - DNA, 131 bp, Glycine max
gcactattcaaataggagcattagctatgtttgttaatgtcactttatgtaatgtggggtaagtcacctaagacatccacgtacctacttgttgtctcttacgcggctttaataaatcttctgcccttgtt

SEQ ID NO: 279969 - DNA, 337 bp, Glycine max
  unsure (1)..(337): unsure at all n locations
gttagttttgcattgtttgttgtttggcttgcaatcttgttgcatgctggtgttggtgttggtgtcccaattcactctcaaatttcagggttcttagaactactaggaccttgccaccaccatggctgccaaaaaggcatgtgagacattctcaaagtcattgattgaggaagtgaatagatgggttgcttgaagcagacaggggtgagtctcaggtacatgatggaattcgggtccaaacccactaacaagaatttgctgatctctgcccagtttcttcacaaggaacttgccatcagattgccagaaggcgttnacttgagacctcctatggttg

SEQ ID NO: 279970 - DNA, 357 bp, Glycine max
ccaccacacctctcctcgttcacgctacccctttctgctcttcttctacctttcaagttttaaaagtataaagatggcagagacattcctatttacctcagagtcggtgaacgagggacaccctgacaagctctgcgaccaaatctccgatgctgtcctcgacgcttgcctcgagcaggacccagacagcaagttgcctgcgaaacatgcaccaaaaccaacttggtcatggtcttcggagaaatcacgaccaaggccaacgttgactacgagaagatagtgcgtgacacctgcaggaacatcggcttcgtctcaaatgatgtgggatggatgccgacaactgcaaggtcctcgtca

SEQ ID NO: 279971 - DNA, 359 bp, Glycine max
gattcggtcacactatctcagaagattcaacagagaaggtgtcttgcttttacgtggattggattcgaggctaacaaaggatcttcctcccgatcttcagaagcttcgatgcaaggttgcttttcaggcattaaggtttgcaaagcctgttcaggaactcggtaacgatattgctgagcaaatgaaaagcaaggaccctaccttgctcttcatctacggatggaaaaggatgtctgggtgagaactggttgtctacccggtttgagtcctgagtatgatgagattgttaacaacgagaggataaaacggcctgaactcttgacagcaaatccaacatgacttaccatggaaggaaactg

SEQ ID NO: 279972 - DNA, 354 bp, Glycine max
  unsure (1)..(354): unsure at all n locations
gaatgttgcagtcaaggatctcaagcgtggttttgttgcatccaactccaaggacgaccctgccaaggaagctgccaacttcacatcccaagtcattatcatgaaccatcctggccagattggtaatggatacgcaccagtccttgactgccacacttctcacattgctgtgaagttttctgaaatcttgaccaagattgacaggcgatctggtaaggagcttgagaaggagcccaaatttttgaagaatggtgatgctggtatggttaagatggttccaaccaagcccatggtggntgaaactttctctgagtatctccccttgggcgtttgctgtganggacatgcgtcaga

SEQ ID NO: 279973 - DNA, 339 bp, Glycine max
  unsure (1)..(339): unsure at all n locations
atttccgttgagtacagtctcgaggattatgcagtcgcggttgttcacgcggttcagtgtgtgtgcgaccgaagtccgtgaaacacccagttatctgcagcgagagtgggagagccatcgtgtctcatcattcgctcttgattttcgaggcggttggcaccagcagcaccaccgggggaggagcttcccctgcattgtccgctcaatatctggcggaggagctgtcggaggattaccgcaatctgtcggagctggcttttagangggaatatgaaacgtgtctggtgtacacggaggagatgaaggagcgatgctggaacagttcnagcaggggacggt

SEQ ID NO: 279974 - DNA, 342 bp, Glycine max
  unsure (1)..(342): unsure at all n locations
gacaggtttggcattgttgagggtttgatgaccactgttcattccatcactgccacccagaagactgttgatgggccatcagccaaagactggagaggtggaagagctgcttcatttaacatcattcctagcagcactggagctgccaaggctgttggaaaagtccttcctgctttgaacggaaattgactggtatggcattccgtgttcccaccgtggatgtctctgttgttgacctcacagtgaggctggagaaggaagcctcctacgatgaaattaaaaatgctatcaaggaggaatcagagggcaagttgaanggnattcttngttacactgaagatg

SEQ ID NO: 279975 - DNA, 346 bp, Glycine max
  unsure (1)..(346): unsure at all n locations
gtgcagcatcgtagagaaataagggaaaaatggtgtcgctgaaactgcagaagcgcctctccgcaagcgtgctcaagtgcggcagaggaaaggtttggcttgaccccaatgaagtcaacgaaatctccatggccaattctcggcaaaacatcaggaagttggttaaggatgggtttatcatcaggaagccaaccaagattcactcccgctcacgtgctcgtaggatgaaggaggcaaagaggaagggccgccactccggttatggtaaacgtaagggtacaagggaggcaagnttcccaccaagatactctggatgagaaggatgcgtgtgctcagacggttcttc

SEQ ID NO: 279976 - DNA, 242 bp, Glycine max
tgacttgttggaatggtcaaagcaagataagaaacgaatgcttcatgtcgtctaccgtgttggtgaccttgatcgcaccatcaaattttacacagaatgtttaggaatgaagcttttgaggcaaagagatatcccagaggagaaatatgctaatgcttttcttggatttggccctgaagaatcccattttgtgttgaattaacatataattatggggtacctcgtatgacattggcgatggc

SEQ ID NO: 279977 - DNA, 263 bp, Glycine max
  unsure (1)..(263): unsure at all n locations
aagattttatccaattgaaattttaaaaatgantggggataaacttaagaattcaattattgaaattgaataagtaaacaatttaattggattggtcgaatggtatcaaaaaaatggagtactaactcccatttcttatttattattgaattaaccgatcaacttgcttgttatcgaacatttctttttgatttcaaaattttccggaaaaaattgaatctatttttatatgcgaatcaatcctactacttctggtcctgagg

SEQ ID NO: 279978 - DNA, 258 bp, Glycine max
gaagaagtttggggcaatcatctgttttcatagcttcaacactcttggaagatgggggtgttccaaaagcagcaagttccgcaacactcttgaaagaggccatccatgtaattagttgtggttatgaagataagacagaatgggggaaagaggttgggtggatatatggctcagttacagaagatattttacaggtttcaagatgcattgtcatggttggagactgtgtactgcatgccaaaaaggcctgcttttaag

SEQ ID NO: 279979 - DNA, 336 bp, Glycine max
  unsure (1)..(336): unsure at all n locations
cgttgtttacaatgaaggctactctgaagggaaagtacgatgtcgacaaaaacggcgctgcctttgccaacatcgccgtcaacgccggcgacgtcaagttccgagcctccgtaacggaagccactttcattaacggtcccagcttcaccggcttggcgctcgccgtcgagaaacccggttccttcatcgtcgactacaacgttcccaaanaggactttcggtttcagtttatgaacacggttagggttggggagaggccgttgaatttgacctacgcgcacagcaggggcgacaacaggaccgtcttggatggaacctttgtgtatgattctgcga

SEQ ID NO: 279980 - DNA, 336 bp, Glycine max
tcaaccgctacaagcactccttggaagaagatgttgcagctcatacctctggccatctacgccagcttttagtggggttggtgaccgcattcaggcatgttggtgatgagatcaatccaaaattggcacaatctgaggctgaaattcttcatgatgctgtaaaagagaagaagggagctatgaagagaccattagggtcttgactacaaggagcaggaccccaacttgttgcaactttcaaccgctacagagagatccatggcacttccatctctaagaaattggtggatgaaggatctgatgagttcagagggcattgtacactgcccattcgtg

SEQ ID NO: 279981 - DNA, 338 bp, Glycine max
cgagggagttaccctttcttttcttttttcttttttctctttcctcattctacttaaaactcccaccagtgatggcaggtttggctccagagggaacacaattcgatggtcgccaatatgatgctaagatgagtgaattgctttccactgatgggcaagaattcttcacctcttatgagaagtgtatgacagctttgatgcaatgggattgcaagagaatcttctgcgaggcatatatgcttatggttttgagaggccttctgctatacagcaaaggggaattgttcctttctgcaaaggactggatgtgattcaacaggctcagtctggaacaggaa

SEQ ID NO: 279982 - DNA, 332 bp, Glycine max
  unsure (1)..(332): unsure at all n locations
ctgagatccgatcgcattttcattcagaaaggaaactcgtgtgactgatttatgcgctaattgcaattgcactgcgagcgtccctgtgccgaatcggaagatgggattagtgtttaccaaattgttttcctctcttttcggtaacaaggaagctcgaatcctcgttctcggcctcgacaatgccggcaaaaccactattctctatcggcttcagatgggcgaagttgtctccaccattccaacaattggggttaatgtcgaaacagtgcagtataacaacattaaatttcnagtctgggattaggtgggcaaacaagtatcaggccatattg

SEQ ID NO: 279983 - DNA, 314 bp, Glycine max
  unsure (1)..(314): unsure at all n locations
caagtccaacctacccctttttcttctcccaccaacttcaccgtcttcttcctcgatcatgtctcacttcaagggcaagtaccatgatgagcttattgccaatgctgcttacattggcactcctggaaagggtattcttgctgctgatgagtcaacagggacaattggcaagcgttggcccagcatcagtgtagagaatgttgaatccaacaggcgtgctcttagggactgcttttcaccgtcccggtgtcttaaatatctcagtggtgtcatctcttgaggaactctctacaganacantgaagcaagccttg

SEQ ID NO: 279984 - DNA, 247 bp, Glycine max
aaacaaccttctttctttttctgtgagcctttctttcaggttcttaacttgatcagtgtgcagtgtccaaatcataagggtagttgcaaattgcaatggctaagcatgatgttgagggtggttccttctctgcaaaggactaccatgatcctcctccagcaccgttgattgatgctgaggactcacacagtggtccttctacagggctttgattgctgagttcattgccacaatgctcttcctttac

SEQ ID NO: 279985 - DNA, 339 bp, Glycine max
  unsure (1)..(339): unsure at all n locations
tgaatgacaaatcatctacctcaaatttgaaaattgaagccctaacatttacaagattggtattatcttcacattctcctgatgttttcacccttacatcnaggctctttctgcccctgttctatcagctgtnngtgagcgttattacaaggtcactgcagaggccttgagagtatgtggagaacttgttcgtgttgtgcggccaaacattgaggggtctggttttgatttcagaccatatgttcatcccatatataatggcattatgtcacgcttaataaaccagatcaggatcaggaggttaaggagtgtgtatctcctgcatgggctcattgtgtc

SEQ ID NO: 279986 - DNA, 319 bp, Glycine max
  unsure (1)..(319): unsure at all n locations
ctcaacttgggcatggtatcaggnnatcttacttcagatactctatggccttattggangctggactgcttatctagtcagtgtcctctacatagagtaccgcaccaggaaggaaaaggaaaatgtcagcttcaagaaccacgttattcagtggttcgaggtccttgatgggttacttggtcgatattggaaagcagtggggctagccttcaactgtactttcctcctatttggatctgtgatacagcttatagcatgtgcaagtaacatctattacataaacgacaaattgtataaacggacatggacttatattttt

SEQ ID NO: 279987 - DNA, 322 bp, Glycine max
  unsure (1)..(322): unsure at all n locations
aagattttatccaattgaaattttaaacatgactgggataaacttanganttcaattattganattgaataagtacacaatttaattggattggtcgaatggtatcanaaanatggagtactaactcccatttcttatttatgattgaattaaccgatcaacttgctttgttatcgacatttcntttgattcaaaaattntccgggaaaatttgaatctattnngatatgcgaatcagtcntactacttctggtcctgaggtnctgcgctganaaaaaaatctgggcgtaccgccaatattggtccggcctcgagtgcttcc

SEQ ID NO: 279988 - DNA, 338 bp, Glycine max
ccgaggagttaccctttcttttcttttttcttttttctctttcctcattctacttaaaactcccaccagtgatggcaggtttggctccagagggaacacaattcgatggtcgccaatatgatgctaagatgagtgaattgctttccactgatgggcaagaattcttcacctcttatgataagtgtatgacagctttgatgcaatgggattgcaagagaatcttctgcgaggcatatatgcttatggttttgagaggccttctgctatacagcaaaggggaattgttcctttctgcaaaggactggatgtgattcaacaggctcagtctggaacaggaa

SEQ ID NO: 279989 - DNA, 341 bp, Glycine max
  unsure (1)..(341): unsure at all n locations
aaagaagtagccttgtagaagatatggtttgtgataagggtttgcgcttgtgtgattctattgattacagacttctgactattcctttttctaaatgtatattcttttgatacagtcagcagagttgcagatatatactgacttcttgaggcttgtactagaaattataaatgcaattcgacttatgtactgcctcaaaatcctgaggtggtgtatgcaataatgcacaagcaggaagtctttcagcctttcaagaatcanccccgtttcgatgagcttgttgaaaacatctacactgtggtagatttttttaatagtcgcatggatgccccaagaatgaa

SEQ ID NO: 279990 - DNA, 348 bp, Glycine max
  unsure (1)..(348): unsure at all n locations
cccaaagaaagagaaaataaaaagcaatgggtagccttgaagcggaaagaacaacagtaggattggcagcaagagacccttcagggattctctccccatacacctacaatctaagaaacacaggccctgatgatgtttacataaaagttcactactgtggaatttgccattctgatctccaccagttaaaaatgatcttggcatgtccaactatcccatggtcccaggacatgaagtggttggtgaggtactggaggtggggtcagacgttagcaggttcagagtgggagagttggtgggagttggactcctcgtangttgctgcaaaaactgccagccatgccaaca

SEQ ID NO: 279991 - DNA, 341 bp, Glycine max
cattaattgcaagaatggcacttcgttgcttggtgatgtccctttctgttctcttcactcttggtcttgcgagagaaagccatgccagagacgaagatttttggcatgctgtttggccaaacactcccattccaagttcattgcgagatcttctaaagcctggccctgcaagtgttgaaatcgatatcaccctatgcaaattgaagaaacacagtacccgaaaaccttcttctataaagaagaccttcatccaggcaaacaatgaaagtacaattcagcaagcctcctttcaacaaccatggggtgttgtcatggttaaaggaataaagcctataaagaag

SEQ ID NO: 279992 - DNA, 324 bp, Glycine max
  unsure (1)..(324): unsure at all n locations
gagattgttgagctttgcttggaccgcatcagaaagcttgctgacaactgcacaggtctccaaggttttctggttttcaatgctgtgggtgggggaactggctctggacttggttcccttttgctggaacgcctttcagtggactatggcaagaagtccaagcttggtttcatgtctatccttcacccaagtttcgacctctgttgttgagctacacagtgcctctcactcatcctctganaactgatgtggtgcctgtcgacatgaagcattatgaanctgaagcgtcatgacatgagagncacctacacaacttaangttag

SEQ ID NO: 279993 - DNA, 332 bp, Glycine max
actcatcaatctcgtttgttctcactaactattacttcatcatgtcgtcgagcacagttggtcaagtcatcaaatgcaaagctgcggtttcatgggaggcagggaagccacttgtgattgaagaagtagaggtggcaccaccacaagctggtgaagtgcgtttgaagatcctctacactctctttgccacactgatgtttacttctgggaagccaagggccaaactccattgtttcctcgtatatttggtcatgaactggagggattgtggagaccgtagtgagggtgtgactcactcaaccaggggccatgcctcccatgttacggggagt

SEQ ID NO: 279994 - DNA, 341 bp, Glycine max
aactctttcaaaagggagaagaaaaggaaaggaaacaaaacgcacaaaggattattatagcaatggcagaacaaaaccaaaaccagacaactgaagctggaaggcaccaagaggttggccacaagagccttctccagagtgatgctctttaccagtatattctggagaccagtgtctacccaagagaacctgaatccatgaaagaactgagagagttgacagcaaaacacccatggaacatcatgacaacctctgcagacgaagggcaattcttgaacatgctccttaagctcatcaatgccaagaacaccatggaaattggtgtctacactggatattca

SEQ ID NO: 279995 - DNA, 334 bp, Glycine max
caaagttgattctttctctctttatctttctttccccaatttgtgagtgttactgttgaatcgattggattggcattaggttgatctgaaatacgcaattgacatggcgagcgcgatggtagaggacgcgaacttcgaagatgaccaactagccaatatgaccaccgacgacatgtcagagcttctcgtcttctcgacaacgagattcgcatcctcaaggaagagttgcagaggaccaatttggaattggaatcgtacaaggacaagatcaaggagaatcaggagaagattaagctcaataagcagttgccctacctcgttggcaacattgttg

SEQ ID NO: 279996 - DNA, 331 bp, Glycine max
cttcagcccactattgtttctgcctcgtgggaccgcaccgttaaggtttggaacctgacaaactgcaagttgaggaacacgcttgctggacacaatggttatgtgaacactgttgctgtttcccctgatggctctctgtgtgccagtggtggcaaagatggggttattcttctgtgggatttggctgagggtaagcgtctttactccctcgatgctggttctatcatacatgcgctctgcttcagccccaacaggtactggctttgcgccgccactgaacagagcatcaagatctgggatttggagagcaagagtatcgttgaagatttga

SEQ ID NO: 279997 - DNA, 333 bp, Glycine max
  unsure (1)..(333): unsure at all n locations
anattgtagaccantanacatatgtnatattnggtgatggntgtcaaatggagggantntcaaatgaagcatgctcacttgccggtcactggggtctagggaagcttatngcttnatatgatgacaaccacatttccattgatggggacactgagattgcattcactgagaatgttgatcaacgttttgaggcacttgggtggcatgtaatttgggtgaagaatggaaatactggatatgatgaaattcgtgcagccattaaggaagcaaaggctgtcaaagacgaacccactatgatccaggtaaccactaccattggattggttctccaaa

SEQ ID NO: 279998 - DNA, 332 bp, Glycine max
  unsure (1)..(332): unsure at all n locations
cgagtttgtgacaatagtgatagactctacaattttgtacttcggagtattgccctggttttggaagatatcaggagattttatgacaatagccagtctcaatgctgagaatgaaatactgcatacccttgcctttttagctggggtgatgatttggtcacagataactgatttgccctttctctgtactcaacttttgtgattgaggcccgtcatggtttaacaagcaaacaccatggttatcttagggacatgatttaaagaatttccttctgtaataattggccactatagtgctncataatgtatagacagaaggaggccaactttgc

SEQ ID NO: 279999 - DNA, 341 bp, Glycine max
  unsure (1)..(341): unsure at all n locations
aaaggcgtcttcataaacgcctttcttctccgtttccgtttcctcgttcgaattcgctttttgatctgcgaaaatgagagagtncatctcgatccacattggtcaggctggtatccaggtcggaaatgcttgctgggagctctactgcctcgagcacggcatcgggcccgatgggcaatgccaagtgacaagacagttggcggtggtgatgatgctttcaatactttcttcagcgagactggtgctggaaagcacgtgccacgtgcagtgtttgtagatcttgagcccactgttattgatgaggtgagaaccggaacttaccgccacttttccacccagag

SEQ ID NO: 280000 - DNA, 327 bp, Glycine max
ggaagtttgctgctggtgtctcaatggttacttcactttcattggctatttcatatccaacacttgctgcagcaccacacatgtttgtcaatgcctacaagaatgttcttgctgttgcggttgagacagattattctttcccggaggcagacaaggtcaaggagtatctgaaggacccaagtaaatttgccgttgccgccgttgctgctcctgctgctgcatctggtgctccagcggctgcagccaaggaggaggaaaagaaggaagaaccactgaagagtctgacgatgacatgggttcagctgttgactaattaagtaatacttt

SEQ ID NO: 280001 - DNA, 329 bp, Glycine max
  unsure (1)..(329): unsure at all n locations
ttctccattccctctctcactcctccatctacgtttcttaaatcatttccttctttctctctttctttatcttctcattttcctcattacactnttttttttctctcaacttttctcttattaaccatagttcacatattatatcatcacatatcatagtgatatattatatcatatcacaatgtgtggcatacttgctgtgcttggttgctctgattcatctcaagccaaaagggttcgcgtccttgagtttctcgcagattgaagcaccgtggtcctgactggagtgggctccaccatatggtgataatatttggctcatcaaaggt

SEQ ID NO: 280002 - DNA, 339 bp, Glycine max
  unsure (1)..(339): unsure at all n locations
agaaaatgcagcagcaacccttttcagcttgtcacttgcagatgagaacaagataattattggcgcctcaggagctataccggctttagtggaattgctccaaaacgggagtcctagaggaaagaaggatgcagcaacagcattgttcaatttatgcatttatcaagggaacaagggcaggccattagggcaggtatcatcacagcattgttgaagatgcttacagattcaagcaaatcgatggttgatgaagcctaacgataatgtcagttcttgcaagccaccagaggcaaagtgccatagtaaaagccanactataccagtttgatagtctttgag

SEQ ID NO: 280003 - DNA, 368 bp, Glycine max
  unsure (1)..(368): unsure at all n locations
attgtattcgcatgcagtgttggggttcacacaatctccgaactaagagcaatgcaggnggaggatggaatcttctcagctcaaaacttacaatctcacagaaagtgacttggtgaaagaccacttgcggtacttgatggggaggcgatnaaccgttnagaatgaggtcttggtcgctcacctttccagaaagacctggtgctttgatgaaatttttggactccttcagtccacgttggaatattagtttattccattaccgaggggaggtgggaatttttactttccttactttatcaaacacactgcatgtggtttatgcacagacaaaactcaaatgcaggtccttangttgtttggtgtgtctc

SEQ ID NO: 280004 - DNA, 135 bp, Glycine max
  unsure (1)..(135): unsure at all n locations
ggcatagatgccatcgaagatgtgatctatcacattgagacatatgatgtgacaacaattagagcaagcattcccatgtttctnatgtctcgtaagatcaagtcttgggagtcaaatggtatctctggagaaggt

SEQ ID NO: 280005 - DNA, 114 bp, Glycine max
gtgatgcctacactcctgctggagaacctattcccactaacaagaggcacgctgctgccaaggttttcagccatcctgatgttgttgctgaagtgccatggtacggtattgaac

SEQ ID NO: 280006 - DNA, 396 bp, Glycine max
  unsure (1)..(396): unsure at all n locations
aactcatctccggcantgnagatgccgncaacaactttcgccagaggccactacaccgttggcnaagagatcgtagatctgtgcntggatcgcgtccgaaagctcgnagacaantgcactggtctccagggcttcctcgtcttcaacgctgtcggcggtggcaccggttccggtctcggatctctcttgttagancgtctctccgtcgattacggnaaaaagtccaaattagggttcaccatttacccttccnctcaggtttcanccgcagncgtggagccctacaacagcgtcctctccacncactcncntctggaacacaccgacgtngctgttctcttggacaacgangccatctacgacatctgtagganatctctcgacntcgagaggcca

SEQ ID NO: 280007 - DNA, 388 bp, Glycine max
cgatcttcgatcttcgtcgctgaaaatgagagagtgcatttcaatccacatcggccaggccgggattcaggttggaaacgcctgctgggagctttactgcctcgaacacggcattcagcctgatgggcagatgccaagtgacaagaccgttggtggaggtgatgatgctttcaacaccttcttcagtgaaatggggcaggaaagcacgtgccccgtgcgatttttgtagatcttgagcccactgtgattgatgaggttaggactgggacataccgccaactattccatcctgagcagctcattagtggaaaggaggatgcagcaaacaactttgcccgtggccactataccattggaaaggagattgttgagctttgcttggaccgca

SEQ ID NO: 280008 - DNA, 350 bp, Glycine max
  unsure (1)..(350): unsure at all n locations
ctcaagtccaacctacccctttttcttctcccaccaacttcaccgtcttcttcctcgatcatgtctcacttcaagggcaagtaccatgatgagcttattgccaatgctgcttacattggcactcctggaaagggtattcttgctgctgatgagtcaacagggacaattggcaagcgtttggccagcatcagtgtagagaatgttgaatccaacaggcgtgctcttagggactgttttcacgtcccgggctctaaatattcatgggtcacncttgagaatcctacaagacagtgcagcaagccttgtgagctgaagagtggttgttctgacaagtgnaaggnatgacttct

SEQ ID NO: 280009 - DNA, 398 bp, Glycine max
gtttgttgtgagctataagctagtttatcgtgaggagaatatgaagttgtttgttttctttgttgctgcagtagttttggtagcatggccatgccatggcgcaggctaccaaaggttccctctccgaatgaaaactggctatggtgagcgttcttcggaggtaaaatgcgcaagttttaggcttgctgtggaagcacacaacatccgagcctttaaaaccattcctgaagagtgcgttgaaccaacaaaggactacattaatggcgaacatttagatcagactctaaaacagttaaccaacaagctttctttatgctagtgaacgcgagtccatcacaacgacatatttatattcggcatagataacaccgtactctctaatatcccatactatgaaa

SEQ ID NO: 280010 - DNA, 401 bp, Glycine max
cagggactcactctcttcgcagcggcactctcggtggctttcatcttctcggggtgagttgtcaagatgtacacatcgaggaagaaaattcacaaggataaggatgctgagccaactgaatttgaggaatcagttggacaggcattgtttgatctagaaaataccaacaatgagctgaaaagtgatctgaaagatttatacataaactcagctgtccaaattgatgtttctggcaaccgaaaggctgtggttatccatgtcccctacagactaaggaaaggattccggaagattcatgtcaggcttgtgagagaacttgagaaaaagtttagtggaaaagatgtatcttgattgccaccaggaggatataaggccaccaaagaaaggttctgtgttcagcc

SEQ ID NO: 280011 - DNA, 397 bp, Glycine max
  unsure (1)..(397): unsure at all n locations
ggaagaagatggtgtccttgaagcttcagaagcncctcgccgctagcgtcctaaagtgcggcaagggcaaggtctggcttgatccaaatgaagtcaatgaaatctccatggccaattctcgacaaaacataaggaagttggttaaggatgggtttattatcaggaagccgactaagattcactctcgctcccgtgctcgtcgaatgaaggaggccaagagaaaggggcgtcactctggttatggtaagcgtaagggtacaagggaggcaaggcttcccaccaaaatcctttggatgaggaggatgcgtgtcctcaggcgcttgcttcgcaagtacagggatcaaagaagatgacaagcacatgtaccatgacatgtacatgaaggtgaaaggtaatt

SEQ ID NO: 280012 - DNA, 320 bp, Glycine max
  unsure (1)..(320): unsure at all n locations
tgaagccatcgatgctcagatctctccactccgccgccacccgcggcgcctctcatctcttccgccgtgggtacgcctccgagccggtgccggagcgcaaggtagccgttctcggcgccgcggcgggatcgggcagcctctctcccttctcatgaagctcaatcccctcgtttcgagcctctcccttnacgatatcgccggaactcccggcgtcgccgccgatatcagccacataaacaccagatctgaggtagtggggtaccaaggtgatgaagagttggaaaagtttggagggtgccgatgttgttataatcctgtgg

SEQ ID NO: 280013 - DNA, 360 bp, Glycine max
  unsure (1)..(360): unsure at all n locations
gaacacttgtttagcacagcttcaaacattctcagttcagcaagggagtgtgatgaacctgaaacttggttctttcactgtgcctgcaccatccattccagttatcccccttcttttcatgtccatcctgattcccctctatgaatntttctttgttccattcgcaagaaagatcactcaccacccttctggggttacacagcttcaaagagttggcgttggactagtactttctgccattcaangcaatagctgggatatagaagtgaaagaaggacaggaaggaaggaccttcaaggcattagtcttttggtanctccatagtatattggagtnagnatgtcatctgtggntctagaa

SEQ ID NO: 280014 - DNA, 383 bp, Glycine max
  unsure (1)..(383): unsure at all n locations
gcacatcttnctcagttctacgatggagttttggggtgccgaggttaaggttggagagtctgttaaggtagacncagccgaatttgaggcatgcatacacctttctcaggctgctcttggtgaggcnaagaaagataagcctgaaccggtggttctctacatgaaagttggtgaacagaaatttgtcttgggaaccctttccagggagaaaatccctcaaatatctctggaattggttttggaaaaggagtttgagctttcccacagttcaaagagtgccagtgttcatttctgtggatacaaggcatattacgatgccgataatagtgacgaggatgatttactgatagcgatgaggatgatgaggnnttccttgattaaca

SEQ ID NO: 280015 - DNA, 386 bp, Glycine max
caagttcgctcccgaagatatcatgcaaaccgttgattagtctcttttgcccccttatcatacaagggtcgcgaggggaaggtgactcaggtctaccgtcgaaagtgggtgattcacattgagcgcataacccgcgagaaggtgaatggttccaccgtcaacgttgggattcacccctccaaggttgtgctgaccaagctcaaattggacaaggaccgtaaggccattctcgatcgcaaggccaagggtcgcgccgccgccgataaggagaagggtacaagttcgctcccgaagatatcatgcaaaccgttgattagtctcttttgccccttatcatacaaacaaatttctctatgggtttgctacctttttctatgcaggatttg

SEQ ID NO: 280016 - DNA, 386 bp, Glycine max
  unsure (1)..(386): unsure at all n locations
gtgaggcttcaatttctaattagggtttcgcttagagtaaccaataaccatgggagtcttcacctttgtcgtccgcaaatccggcagcgaatggagcgccaagcaacattccggcgacatcgaggcctccgccgattccaccttcgatctccaacggaagctcgtgcaagccgctctcgccgttgattcctccggtggagttcagtcctctttctctcccgtgtctcctacctccgctgtgttccagtgatagtgggtggtgcatatcnnnnnnnnnnnnnnnnnnnnnnnnncagctgcacctgcagtggtgctgccgcagctgatgtgccccagctgctgagaaaaaggaagaaaagtggangaagatccgatgatgatatggg

SEQ ID NO: 280017 - DNA, 389 bp, Glycine max
ctccgaattagggttttccaattcgcagagcaactcaacacaacgaaccaaaccaacaatgtcgcagccgcagcctcagtcgcagccgcaacacgggcaagcggcgctggagcaggtgcagtgcttcggtcgcaagaagacggcggtggccgtgacctactgcaagcgcgggcgcggcctcatcaagatcaacggctgccccatcgagctcgtcgagccggagatcctccgctttaaggccttcgagcccatcctcctgttgggaaagagccgcttcgccggcgtcgacatgcgcatccgcgtcaagggcggcggccacacctcccagatctacgccattcgccagagcatcgccaaggcgctcgtcgcgttctaccagaagtacgttg

SEQ ID NO: 280018 - DNA, 380 bp, Glycine max
ctggttctttaagagttgggggtgaatttttggctaaacactatcaccaacggactatatacttgccaacaccaacttggggcaatcacccgaagttttcaacttagcaggcttgtctgtcaaaacataccgctactatgctccagcaacacgaggacttgactttcaaggacttctggaagaccttggttctgctccatctggatctattgttttgctacatgcatgcgcacataaccccactggtgtggatccaacccttgagcaatgggagcagattaggcagctaataagatcaaaagctttgttacctttctttgacagtgcttatcagggttttgctagtggaagtctagatgcagatgcccaacctgttcgtt

SEQ ID NO: 280019 - DNA, 381 bp, Glycine max
gttgcgactaagagttgctgcttcttccgccactcagcacttcgctccctctgtgcttcaccaaccatggccgaaatcgaagctaccgttccagatccctctcaaatcgacgtcaaacttttcaaccgctggagcttcgacgacgttgaggttactgatatgtctctggctgattacattggagtgtccccgtcaaagcatgctacatatgttcctcacactgctggtaggtactcagtgaagaggttcaggaaggcgcagtgccccattgttgagagactcaccaactctctcatgatgcacggaaggaacaatggaaagaagctcatggctgtcaggattatcaagcatgcaatggaaattattcacttgctcactgac

SEQ ID NO: 280020 - DNA, 384 bp, Glycine max
  unsure (1)..(384): unsure at all n locations
gatcgagataactagaaacagtgtgatgaaaatgaaggtccttgttttcttcgttgctacaattttggtagcatggcaatgccatgcgtacgatatgttccctctccgaatgaacactggctatggtgcccgtactccggaggtgaaatgcgcaagttggaggcttgctgtggaagcacacaacatctttggctttgagaccattcctgaagagtgcgttgaagcaacaaaggatacatccatggcgaacaatatagatcagactccaaaacagttaaccaacaagcttacttttatgccagagacctcgaagtccatcccaaggacacatttgtgntcagtatagatggcacgtactctctaatatccatactacaaaaaaca

SEQ ID NO: 280021 - DNA, 379 bp, Glycine max
  unsure (1)..(379): unsure at all n locations
gttncacactgcataccttangtcttccgaattcgaagtttncttgcaanntggctaaggaaaaggctcagatcaacattgtggtggttggtcatgtggacctgaggaggcaaccaccattaacgagctgaagaagcctgttgtggagaaagaagctccagggcatgccatatgagggcatgcacgtacggcctcggaggggaaccagaaaattatgttaacaaaataatctggaaccctaatgtatcagtgtcatcatcagtgtgtagtttaagctagctttgctatggttacgtctttgagatgagagcttgatgaacagtaccattctgatgtatgctttccttgaagttaatgcatcttcttacttctgctagct

SEQ ID NO: 280022 - DNA, 380 bp, Glycine max
  unsure (1)..(380): unsure at all n locations
gaacaatgatgagctacatgtggttatgttcccattccttgcatttggccacattagtccatttgttcagctctccaacaagttgttctctcatggtgttcatgtcactttcttgtcagctncatccaacattcccagaatcagatcaactcttaatctcaatccagccatcaatgttatctcactaaagttcccaaatggtataaccaacactgctgaattgccacctcacttagctggaaatctcatacacgcccttgacctcactcaagatcaggtgaagtccctttgttggaactcaaaccccactatgtttctttgactttgcacaacattggctcccaaaattagcttctgaagttggcatcaagtctgntcat

SEQ ID NO: 280023 - DNA, 333 bp, Glycine max
  unsure (1)..(333): unsure at all n locations
ttctattccatcatcaatggagaacaccgagggatccggatctgcgacgaacggggtgctggctccgccgcgcaaggtggcattgataaccggaattaccggacaagacggttnntacctgacggaattcctcctggacaaggggtacgaggtgcacggcctgatccgccgctcgtcgaacttcaacacgcagcgcatcgacacatatagtggatcccaaagccaaagccgcatgaagtccatagccgattctcgagctctcctcgccgtggtcgacacactcccgagagttaaactgcgccatccagtgcgttatgagtcccgataacgcga

SEQ ID NO: 280024 - DNA, 379 bp, Glycine max
gtgattcctgtgccttttcctcctccagcaggagatttcaccatattggctggagactggtacaagagaaatcacactgatctgagggccattctagatgggggaagtgatcttcctttccctgatggccttatcatcaatggtcgtggttccaatgcttacgcattcacagtggatcaaggcaagacttacagattcaggatatcaaacgttgggctcacaacttccatcaatttcagaatccaagggcataagatgctgctagttgaggtggaaggaatccatactctccaaaacactttatgattcccttgacatcattggggcagagttactcggtgttagtaatgctgatcaaccacctcaagactattatatt

SEQ ID NO: 280025 - DNA, 391 bp, Glycine max
tgaagactcttacgggtaagactattaccctcgaggtggagagctctgacaccattgacaatgtgaaggccaagattcaggacaaggaaggcatcccaccggaccagcagaggctgatttttgctggcaagcagctcgaggatggaaggaccctcgctgactacaacatccagaaggaatcaacccttcaccttgtcctccgtctccgtggggggttttaagctcgttgtgtaatgttggatgtgttcccaaaacatttgaagaactttgatgtttaatgggtctgtaataatgtcccttgaaaataagttcggtttgtgttgaactccattgtgtcccattaataatagtactctaatatcccacctacgtttgttatgaatgtgtgaaa

SEQ ID NO: 280026 - DNA, 381 bp, Glycine max
  unsure (1)..(381): unsure at all n locations
gtgcaaggcactacccacaacattgtggtcttagtcataatcttcaccaaacttctgtgtatatggctgtactgtagaagacttctgcaaccatatacacagaagtttggtgaaggatgtgaagtatgttctggtctggggtattagtgcaaggcactacccacaacattgtggtcttagtcataatcttcgtgacgaagatgtggttcagattgttaagnncaaggaaaaggaagagggaggaaggggacgatttaaatcacattccaatgctcctgctaggatatctgacagagagaagaaggcaccactgaagacataattatatgacactgcctgtgatatcatgatttttgcctggtggtgggaaaaatgatggag

SEQ ID NO: 280027 - DNA, 380 bp, Glycine max
  unsure (1)..(380): unsure at all n locations
gtaccagggctcttcatcaatgaactccaatggttaccctgcttcctccttcaaaatccccaccgtcaagttcaccaagctcttcatcaatggacatnttgttgattcactttcaggaggagaatttgagacaatagacccaagaaccggagaggtgattgcaaggattgcagagggaaccaaagaagacattgaccttgccgtcaaagcgtctcgtctggctttcgaccatggtccatggcctcgtatgcctgccgtagaaagagcaagaattatgatgaaatgggctgacctaattgaccaacacgtagaagaaattgcagcactggatgccatgatgctggaaagttgtaccatatgcttaaggctattgaaattcc

SEQ ID NO: 280028 - DNA, 374 bp, Glycine max
  unsure (1)..(374): unsure at all n locations
aggatttggaattgagaatttccatggcggcggcgacgaacttgttagcaacactgggggatctggagagggactccttcgtggctcttctttcgaagctgatcgctgaatcgaagtacgtccagaacaacccgccggagctcattccccaagaggacagagtggtgaagcacgtcttggacgttctgttaccgttcagcaccaccaccggcggtggacccttgctcgtaaaccacgtcacctaccacgccggcagagggaactcatcgtggagtaccccggcaccgttcccggcaaaatcctctcgttcgtcggatgccacatggacgtcgtgaccgccatcccaacgattgggatttcgatccatnttcgtt

SEQ ID NO: 280029 - DNA, 370 bp, Glycine max
  unsure (1)..(370): unsure at all n locations
gtgaaagagaatccgaggcgaagagaagagaaaaattaagatggaggggaaggagcaggatgtgtcgctgggagcgaacaagttcccggagagacagccgattgggacggcggcgcagagccaagacgacggcaaggactaccaggagccggcgccggcgccactggttgacccgacggagtttacgtcatggtccttttacagagcagggatagcagagtttgtggccacttttctgtttctatacatcactgtcttaaccgtcatgggatcgccggggctaagtctaagtgcataccgttgggattcaaggaatccttgggcttcggtggcatgatcttcgcctcgtttactgcacgttggcanctca

SEQ ID NO: 280030 - DNA, 337 bp, Glycine max
gtgatttcagtgagtgatcggtgttcacttgatctcatcataatcgtcagcgtcaattgaagaagatgccgatcagaaacatcgccgtcggaaggcctgaagaggcgactcaccccgacacgttgaaggcggctttggctgagttcatctcaaccttcatcttcgtgttcgccggctcaggctccggcatcgcctacaacaagctcaccgacaaggcgctgccacccctgccggctcatctccgctccatgcccagcatcgcctcttcgtcgcgttcgtgggcaaactcggggcagtaaccgcgtacttgggcttgtggggaaatacttctcgggat

SEQ ID NO: 280031 - DNA, 366 bp, Glycine max
  unsure (1)..(366): unsure at all n locations
gaacacttgtttagcacagcttcaaacattctcagttcagcaagggagtgtnatgaacctgaaacttggttctttcactgtgcctgcaccatccattccagttatcccccttcttttcatgtccatcctgattcccctctatgaatttttctttgttccattcgcaagaaagatcactcaccacccttctggggttacacagcttcaaagagttggcgttggactagtactttctgccatttcaatgacaatagctgggataatagaagtgannnnnnnnnnnnnnnnnnnnnnnnnccttnanggccaatgatctttngggtaccctccaanatgcatatgggngtgcaacagtncnccttgggg

SEQ ID NO: 280032 - DNA, 375 bp, Glycine max
  unsure (1)..(375): unsure at all n locations
atttatntacaacaacaatgggcttctgtgcctcaaccaaaaatctcccttctaacttattcttcttctcgtccttcaccatcattgcgcatgcaattgttcctcaaaacgaaaccttncaaatttgagaactcaggtgaacttggaccctacatcgttgagtacggtgcagattacagaatgataagcatcttcaactctccattccaagttggtttctacaacaccaccccaaatgccttcactctagctttgcgtgtagggctccaacgctcggagcagctatttcgttgggtttgggaggccaatagggccaacccagttggagaaaatgccatttttcattggcactgatgggaacttgtgttggcagat

SEQ ID NO: 280033 - DNA, 381 bp, Glycine max
  unsure (1)..(381): unsure at all n locations
gtgcaaggcactacccacaacattgtggtcttagtcataatcttcaccaaacttctgtgtatatggctgtactgtagaagacttctgcaaccatatacacagaagtttggtgaaggatgtgaagtatgttctggtctggggtattagtgcaaggcactacccacaacattgtggtcttagtcataatcttcgtgacgaagatgtggttcagattgttaagtcnaaggaaaaggaagagggaggaaggggacgatttaaatcacattccaatgctcctgctaggatatctgacagagagaagaaggcaccactgaagacataattatatgacactgcctgtgatatcattgatttttgcctggtggatgggaaaaatgactg

SEQ ID NO: 280034 - DNA, 371 bp, Glycine max
  unsure (1)..(371): unsure at all n locations
caggcttgcactgaggtatgatcgggaaggagaaccgtcacaactagctgctgttgacatttttgtcagtactgttgatccattaaaggagcctccacttgtgactgccaataccgnactatctattcttgcagttgactatccagtggataaggtctcctgctatgtgtctgatgatggtgctgctatgttgacatttgaagcacttgctgagacatcggaatttgcaaggaaatgggttcctttagcaagaagtatagcattgaaccccgtgcgcctgagtggtantttctcaaaagattgactacttgaaagataaggtccatccatcattgtcaangatctagagcaatggagagagaatatgaggt

SEQ ID NO: 280035 - DNA, 373 bp, Glycine max
  unsure (1)..(373): unsure at all n locations
attattagggttggcnattcagagaganagagnaatgggagaangnnaaggaatcccaattgctctggggctcttggcgatgctcctcttcttcattgcttcttcctcttcctcttacctcgttcgtgcttccgatgacgccgacgacgcgatcttctacgagtcattcgacgaggattttgacggacggtggattgtgtccgacaaggaggattacaacggtgtctggaagcatgctaagagtgatgggcatgatgattatggacttcttgttagtgaacaagcccggaaatatgctatagtcaaaaaacttgacgagcctgtcagtcttaaggatggaacantgtncntntctttgagattcgccttcaga

SEQ ID NO: 280036 - DNA, 369 bp, Glycine max
  unsure (1)..(369): unsure at all n locations
atggtactccgttactcatcaagaacgcaatctgtgtctttgaacaatatggcagcatcatgtggcgtcacaccgaaacaggcattcccaatgaatcgttcgaagaaacgagaacggaagtcaacttagtggtaagaactgttgttaccgtgggcaactacgataacatcattgattgggagtttaaaacaagtggctcaatcaaaccctcgattgctctctcgggtatattggaaattaagggagtggatattaagcacaagagtgagatcaagagcgatcaacatggtatcttggtgtcggcaaacagcttggtgtttaccacgaccacttctacatttaccatcttgacttgacattgtngnggtg

SEQ ID NO: 280037 - DNA, 326 bp, Glycine max
  unsure (1)..(326): unsure at all n locations
tggccctatttggtgcatttgtgagcagagctggaattttgactgttgatgtcttgactcccaaggtctttattggactcatagttggtgccatgcttccttactggttttctgccatgaccatgaagagtgttggaagtgcagctttgaagatggttgaggaggttcgtaggcagttcaacaccattccaggactgatggaggtcagccaagcctgatatgccactgcgtcaaattctactgagcaccacaagagagatctcggtgccttgcagtcaacatcatgtgganctctcgggtgaaattcaggtctcgggtnattctgt

SEQ ID NO: 280038 - DNA, 372 bp, Glycine max
  unsure (1)..(372): unsure at all n locations
gttaaaatggcccaagaaactttcctattcacatctgaatcagtgaacgaggggcacctgacaagctctgtgaccagatntccgatgctgtgctcgatgcatgcttggagcaggacctgacagcaaggttgcctgtgaaacctgnaccaagaccaacatggtgatggttttcggagagatcacaaccaaggccaacgtggactatgagaagattgtgcgtgacacatgcaggaacattggttttgtctctgatgatgttggtcttgatgctgacaactgcaagtcctcgtcaacattgagcaacagagtcctgatattgctcaaggtgtgcacggccactcacaaagaggcctgaggagattggtgtggtna

SEQ ID NO: 280039 - DNA, 352 bp, Glycine max
actgattataaatacctgaggtaccaagtaattgatacgccagggattttggacaggccttttgaagatcgtaatattattgagatgtgcagtatcactgctctagcacatttgagagctgcaatcttgtttttcttggacgtctctggatcttgtggttacagtattgctcagcaggcagcgctgtttcacagcattaagtctttgtttatgaacaagccgttgattatagtctgcaacaagactgacttgcagccactggaggggatatcagaggaagacatgaagttggtcaatgagatgaaagctgaagccttgaagactctagttggtcaaggaggtgagcctacag

SEQ ID NO: 280040 - DNA, 349 bp, Glycine max
gggcgacgcaccggcattgccagagactcttaaaaattacaacaagctgttgtctcttggcttcaagattgtattcttgtcaggaagatatcttgacaaaatggccgtaacagaagcaaacctaaagaaggctggcttccacacatgggagcagttaattctcaaggatccacatcttatcactccaaatgcactttcatacaaatcagcaatgagagagaatctgttgaggcagggatacagaattgttggaatcattggagaccaatggagcgatctgcttggagaccacagaggcgaaagcaggacctttaagcttcctaatcccatgtactacattgagtagtac

SEQ ID NO: 280041 - DNA, 345 bp, Glycine max
  unsure (1)..(345): unsure at all n locations
ctcgagcggttttgtttatttgaaattaacaagtagcaaagatgtttggaatcatcggaggaaacaagggtcacaagataaaggggaacttggtgattatgcgaannaatgtgttggatatcaacagcattaccagtgttaagggtgtcatcggaaccggcattaacatcattggaggagtcgtcgacaccgttactgctttggcgtcccacatctccatccagctcattagtgccaccaaggctgatggacatgggaaaggaaaagttggaaaggctacaaatttaagaggacaagtgtctccaccaaccttgggagctggcgaagatgcatacgtgtttcatt

SEQ ID NO: 280042 - DNA, 341 bp, Glycine max
  unsure (1)..(341): unsure at all n locations
cgacaccataaatatcaatgggacttgctaggcagtccctgattaatgcagatggcattatagagaaatcatttttgcccggaaagtactccattgagatgtcttcatccgtctacaagaattgggttttcactgaccaagcattaccagctgatctcgtcaagagaggattggcaattgaagatccctctgcaccccatggccttcgccttgtgatagaggactacccttatgcggtgaagacttgaaatagggatgctattaagacatgggttcagaatatgtccccctngtattacccaacagatgcagcagttcaacaagatctgantacagcatgg

SEQ ID NO: 280043 - DNA, 339 bp, Glycine max
  unsure (1)..(339): unsure at all n locations
cgacaccataaatatcaatggacttgctaggcagtccctgattaatgcagatggcattatagagaaatcatttttgcccggaaagtactccattgagatgtcttcatccgtctacaagaattgggttttcactgaccaagcattaccagctgatctcgtcaagagaggattggcaattgaagatccctctgcaccccatggccttcgccttgtgatagaggactacccttatgctgttgatggacttgaaatatggatgctataagacatgggttcatgaatatgtctcctgtatatnnccnaanatctgcagntctacaagatctgnataccagcang

SEQ ID NO: 280044 - DNA, 346 bp, Glycine max
cgacaccataaatatcaatggacttgctaggcagtccctgattaatgcagatggcattatagagaaatcatttttgcccggaaagtactccattgagatgtcttcatccgtctacaagaattgggttttcactgaccaagcattaccagctgatctcgtcaagagaggattggcaattgaagatccctctgcaccccatggccttcgccttgtgatagaggactacccttatgctgttgatggactgaaatatgggatgctattaagacatgggttcatgaatatgtctccttgtattacccaacagatgcagcagttcaacaagatactgaactacaagcatggt

SEQ ID NO: 280045 - DNA, 345 bp, Glycine max
cgacaccataaatatcaatggacttgctaggcagtccctgattaatgcagatggcattatagagaaatcatttttgcccggaaagtactccattgagatgtcttcatccgtctacaagaattgggttttcactgaccaagcattaccagctgatctcgtcaagagaggattggcaattgaagatccctctgcaccccatggccttcgccttgtgatagaggactacccttatgctgttgatggacttgaaatatgggatgctattaagacatgggttcatgaatatgtctccttgtattacccaacagatgcagcagttcaacaagatactgaactacaagcagg

SEQ ID NO: 280046 - DNA, 343 bp, Glycine max
  unsure (1)..(343): unsure at all n locations
cctgctttgattggcaaggacccaactgagcagactgctattgacaacttaatggttcaacagcttgatggaactgttaacgaatggggttggtgcaagcaaaagctaggagcaaatgccatattggcagtgtctcttgcagtctgcaaagctggtgctagcgtcctgaaaattcctctttacaagcatattgctaatatcgcgggtaacaaaaagttggttttgcctgttcctgctttcaatgtcattaatggtggatcacatntgganacaaacttgctatgcaggggttaatggttctttcctgtgggagcttcctcgttcaaggaagccatgaagttgg

SEQ ID NO: 280047 - DNA, 339 bp, Glycine max
  unsure (1)..(339): unsure at all n locations
gttgaacaagggtttctctgtctgcttcttcactttctctcgtttcaatcgaaaccaaaacaaaaacatgggcagaaaattcttcgtcggtggcaactggaaatgcaatggggaccactgaggaggtaaagaagattgttactactttgaatgaggctaaagtccctggagaagatgtcgtagaagttgttgtgagccctccttttgtgttccttcctgttgtaaaaagtttgctgcgccctgattccatgtttcggcacaaaactgttgggttcgcaaagtggtgcttataccggaggttagtgctgaaatgctgttaattgggaatcccctngggaa

SEQ ID NO: 280048 - DNA, 340 bp, Glycine max
  unsure (1)..(340): unsure at all n locations
aagaagctgagtctgatcgactcaacctcaacctgcttcctgcattgctctctccaaatttctagggtttggttcagagagagaggaacctaaaatgtctcaaaacgggaagctgatgccaaatctagaccagcacagcaccaagctnctcaatctcactgttctccaacgaatcgaccccttcgttgaagaaattctcatcaccgccgcacatgtcaccttctacgagttcaacatcgacctcagtcaatggancgcaagacgttgaaggatctctcttgntgtaagagggaacacanaacctcgatttcagttttattgtgatgaaccgtcgcaatac

SEQ ID NO: 280049 - DNA, 298 bp, Glycine max
  unsure (1)..(298): unsure at all n locations
gagctccacaagaatgaaatgggtctccatcttcacactttctattcctctcccactcgcccctcacaaccttcgcagaagatgggctagtggcgaatggagattttgaggttagcccatcaagtgggttccctaacgaggcgattgtggagggccccagcgaggtcccaaactggaagtcaaacggcaacgttgagctagtggaatcggggcaaaaacagggtgggatgatcctcattgtaccgcaggtagacacgcggtgaggctcggcaacgacgctgagatnancangagctac

SEQ ID NO: 280050 - DNA, 342 bp, Glycine max
gtgatttcagtgagtgatcggtgttcacttgatctcatcataatcgtcagcgtcaattgaagaagatgccgatcagaaaacatcgccgtcggaaggcctgaagaggcgactcaccccgacacgttgaaggcggctttggctgagttcatctcaaccttcatcttcgtgttcgccggctcaggctccggcatcgcctacaacaagctcaccgacaacggcgctgccacccctgccggcctcatctccgcctccatcgcccatgcattcgccctcttcgtcgccgtctccgtcggcgccaacatctccggcggccagtcaaccccgccgtcaccttcggcggct

SEQ ID NO: 280051 - DNA, 341 bp, Glycine max
  unsure (1)..(341): unsure at all n locations
aaagaacgaatcgaaaaaagaaagatcatggcgatggcaaacttggctcgacggaagggttacgccgtcgttttgtcgtcgaggtcgtcgctttgtctgacaaggtggagggggttcgcgtccggatctgacgaaaacgacgtcgtggtcatcggcggcggtcccggcggctacgtggcggccattaaagcggcgcantgggtctgaaaaccacttgcatcgaaaaacgtggcactctcggcggtacctgcctcaacgtcggatgcatccttccaaggcattttgcattcttcccacatgtatcatgaggctaaacatgcattgccaaccatggggtcaag

SEQ ID NO: 280052 - DNA, 286 bp, Glycine max
  unsure (1)..(286): unsure at all n locations
agatcttgtagcaatggcgagcgctcccactccacgcgaagagttcgtgtacatggcgaantggcggagcaggccgagcgctacgaggagatggtggagttcatggagaaggtctccgcctccgccgagagcgaggagctgaccgtggaggagcgtaacctcctctccgtcgcctacaagaacgtgatcggcgctcgccgcgcctcctggcgcatcatctcctcaatcgagcagaaggaggagagccgcggcaacgaggaccacgtcgccgtcatccgcgataccg

SEQ ID NO: 280053 - DNA, 339 bp, Glycine max
  unsure (1)..(339): unsure at all n locations
gctacatcttctttccaaatcccaactactactcacactcactgcagatctcaatccatggctaccattgttagcatcaangcccgccagatctttgacagtcgtggcaatccaaccgtcgaggtggatttgacatgctccgatggtacttttgctagagctgctgttccaagtggtgcatccactgggatttatgaggcccttgaattgagagatggaggatctgactaccttggaaagggtgtatcaaaggctgttgacaatgtgaacaccattattgcccctgctttggttggcaaggacccaactcagcagactgctattgacaacttaatggtt

SEQ ID NO: 280054 - DNA, 331 bp, Glycine max
  unsure (1)..(331): unsure at all n locations
acgatatacttcaactttctaagggtgcgtcggacgaacagataaagagagcgtataggaagctagcattgaagtaccatcctgataagaacccgggcaatgaagaggctaataagaaatttgcggagattagcaatgcgtatgaagtgttgtctgatagcgagaagaggaatatttacgataggtatggtgaagagggtttgangcagcatgctgctagtggaggcagaggtggtggaatgaacttccaagatatttttagcactttctttggtgggggaccatggaggaagaagagaaattgtaaaaggagatgcttggtttgattgga

SEQ ID NO: 280055 - DNA, 302 bp, Glycine max
  unsure (1)..(302): unsure at all n locations
tctcattctccttctgttcaaacactctctctcatggcatcagataagaagattaggatcggcatcaacgggtttggaaggattggccgtttggtggccagggttgcccttcaaaggaatgatgttgaacttgttgctgtcaacgatcctttcatcaccactgattacatgacatacatgttcaagtacgacaccgttcaggcagggaacatttgattgaagtgaagctctaagacctccttggtgagagccgtcacgtttggatcaganctgagaattcaggtagtgtctgatagtgtgnt

SEQ ID NO: 280056 - DNA, 333 bp, Glycine max
  unsure (1)..(333): unsure at all n locations
acgcgatctctctctattctttgaaaccaaagttcaaactctgtcttccctgggttctatttcgaaatcaacgacgatgagttccacagaggcagcagccacagagaagaaaggtggaagagggaaaccgaagacttcaaagtccgtttcccgttcctccaaagctggccttcagtttcccgtcggccgtgtcgctcgctacctcaaggccggtcgctacgcccagcgcgttggctccggttcccctgtttatctctccgcggttctcgaatacctcgctgccgagtttggagttgcggggangtgcgaggacaacaagaagagaggatcgtt

SEQ ID NO: 280057 - DNA, 337 bp, Glycine max
cattaattgcaagaatggcacttcgttgcttggtgatgtccctttctgttctcttcactcttggtcttgcgagagaaagccatgccagagacgaagatttttggcatgctgtttggccaaacactcccattccaagttcattgcgagatcttctaaagcctggccctgcaagtgttgaaatcgatgatcaccctatgcaaattgaagaaacacagtacccgaaaaccttcttctataaagaagaccttcatccaggcaaaacaatgaaagtacattcagcaagcctccctttcaacaaccatggggtgttggtacatggttaaaggaattaaagaca

SEQ ID NO: 280058 - DNA, 333 bp, Glycine max
  unsure (1)..(333): unsure at all n locations
ctgggaagatgaccaaggatttggcacttattcttcatggatccaagctttcaagggagcattatttgaacacagaggaattcattgatgccgtggcagccgagcttagtgctaagctttctacatagacttgatttaagacaggcggaaaagaagacgatagcaacaaggagcgtgcgtgcgtgcgtatgctgctctctatattcagaagaaataagaaagggaaaaagaagcattggtccttaccttagccccttttccttcatttgtttgttggttgggaganaggtgctgttcttctccatattggttgtgaactgatttgtcctttga

SEQ ID NO: 280059 - DNA, 339 bp, Glycine max
cggcatcggaatcgtcatcggcgcctccaacggcgacattgcgagtctcgccggcgatcccaacgcggccacccagtgggttaacgcgaacgtcttgccctactacccggcgagcaacatcactctgatcaccgtcggaaacgagattttgaccttagccgaccagggtcttaagtcgcagctcgtcccggcgatgcgaaatgtccaaaatgccctcggcgcggcctcgctcgggcggcaagatcaaggtctccacagtgcactcgatggccgtgttgactcagtcggacccgccctcgtccgggttgttcaacccggcgctgcaagacacgctcaaac

SEQ ID NO: 280060 - DNA, 337 bp, Glycine max
gtttgttgtgagctataagctagtttatcgtgaggagaatatgaagttgtttgttttctttgttgctgcagtagttttggtagcatgggccatgccatggcgcaggctaccaaaggttccctctccgaatgaaaactggctatggtgagcgttcttcggaggtaaaatgcgcaagttttaggcttgctgtggaagcacacaacatccgagcctttaaaaccattcctgaagagtgcgttgaaccaacaaaggactacattaatggcgaacaatttagatcagactctaaaacagttaaccaacaagctttcttttatgctagtgaacgcgaagtcca

SEQ ID NO: 280061 - DNA, 338 bp, Glycine max
ctgggaagatgaccaaggatttggcacttattcttcatggatccaagctttcaagggagcattatttgaacacagaggaattcattgatgccgtggcagccgagcttagtgctaagctttctacatagacttgatttaagacaggcggaaaagaagacgatagcaacaaggagcgtgcgtgcgtgcgtatgctgctctctatattcagaagaaataagaaagggaaaaagaagcattggtccttaccttagccccttttccttcatttgtttgttggttgggagagcaagggttgactgtttcttctccatattggttgtgaactgatttgtcctttg

SEQ ID NO: 280062 - DNA, 335 bp, Glycine max
tcagtgaaacactagctagggtattggggagctctcgttgtttcggagttagggaccttacgcagccatgggccactgctacgaatgccgccgccgccccaccacgccagctctcccagaaggaagctgacatccagatgatgttggccgccgacgtccacctcggcaccaagaactgcgacttccaaatggaacgttacatcttcaagcgccgcaacgacgggatttacattattaaccttgggaagacgtgggagaagcttcagctagcagctagggttatagttgcaattgagaacccccaggatatcattgttcaatctgcaaggccttat

SEQ ID NO: 280063 - DNA, 335 bp, Glycine max
  unsure (1)..(335): unsure at all n locations
agagtttgttgtgagctataagctagtttatcgtgaggagaatatgaagttgtttgtnttctttgttgctgcagtagttttggtagcatgggccatgccatggcgcaggctaccaaaggttccctctccgaatgaaaactggctatggtgagcgttcttcggaggtaaaatgcgcaagttttaggcttgctgtggaagcacacaacatccgagcctttaaaaccattcctgaagagtgcgttgaaccaacaaaggactacattaatggcgaacaatttagatcggctctaaaacagttaaccaacaagctttcttttatgctagtgaacgcggaa

SEQ ID NO: 280064 - DNA, 289 bp, Glycine max
  unsure (1)..(289): unsure at all n locations
tgaagccatcgatgctcagatctctccacttccgccgncacccgcggcgcctctcatctcttccgccgtgggtacgcctccgagccggtgccggagcgcaaggtagccgttctcggcgccgccggcgggatcgggcagcctctctcccttctcatgaagctcaatcccctcgtttcgagcctctccctttacgatatcgccggaactcccggcgtcgcgccgatatcagccacataaacaccagatctgaggtagtggggtaccaagtgatgaagagttggaaaagctt

SEQ ID NO: 280065 - DNA, 336 bp, Glycine max
ggtgttatggttgggatgggtcaaaaggatgcctatgtaggtgatgaagcccagtcaaaaagaggtattcttactttgaagtacccaattgagcatggtatagttagtaactgggatgacatggaaaagatctggcatcacacattttacaatgaattgcgtgttgctcctgaggagcacccagtgcttctgactgaggctccactcaacccaaaggccaacagagaaaaaatgacccaaatcatgtttgagaccttcaatgtgcctgccatgtatgtggccatccaagctgtcctctccctatatgcaagtggtcgcacaactggtattgttttg

SEQ ID NO: 280066 - DNA, 335 bp, Glycine max
cttgaattaaacctttctgatgttgaaccatgcatttcaggaccaaagagaccacatgatcgggtacctttgaaagaaatgaaggccgactggcatgcttgtcttgataacaaagttgggtttaagggatttgctataccaaaagaggcacaaggaaaagttgcaaaatttgatttccatgggcagccagcagagctcaagcatggcagtgttgtgattgctgcaatcacaagctgtacaaatacatcaaacccaagtgtaatgcttggtgctggtcttgttgcaaaaaaggctcatgagcttggtttgaaggtcaagccttgggttaaaacaag

SEQ ID NO: 280067 - DNA, 333 bp, Glycine max
gagggtatccccccggaccagcaacgtctcatcttcgccggaaagcagctcgaggacggccgcaccctcgccgactacaacatccagaaggaatcaacccttcacctcgtcctccgtctccgtggtggcatgcagatcttcgttaagaccctcaccggcaagactattaccctagaagtcgaaagctccgacaccatcgacaacgtcaaggctaagatttcaggacaaggagggaatccccccagaccagcagaggctgatcttcgccgggaagcagctcgaggacggacgcacccttgctgactacaacatccagaaggagtcaatctccac

SEQ ID NO: 280068 - DNA, 309 bp, Glycine max
  unsure (1)..(309): unsure at all n locations
ataagctagtttatcgtgaggagaatatgaagttgtttgttttcttgttgctgcagtagttttggtagcatggccatgccatggcgcaggctaccaaaggttccctctccgaatgaaaactggctatggtgagcgttcttcggaggtaaaatgcgcaagttttaggcttgctgtggaagcacacaacatccgagcctttaaaaccattcctgaagatgcgttgaaccaacaaagactacattaatggcgacattaatcagctctaacattacaccaacttctttttnngtatgacggagccatcaacga

SEQ ID NO: 280069 - DNA, 330 bp, Glycine max
  unsure (1)..(330): unsure at all n locations
cacacgtaacttcatctgggtttcaggaaaaaagaaaaagganaacaatgggttccgataatcaccagaacttggagttcttgaaggagatcggtttggggctcttccaacattggctcttacattaatggccagtggaaagccactggttcttctgtcacttctgttaatccttctaacaatcagagtatagctcaagtgaccgaagcaactttgcaagattttgaggaggggttgcgagcttgcagtgaagcagctaagacatggatgactataccggcaccgaagagagntagattgtgagacagattgcngagcattgagggccaa

SEQ ID NO: 280070 - DNA, 366 bp, Glycine max
cgacgatccccttctccttctctctctctttttcgcctcattccattttcatctatcaatggctccagtagcagcagcatcttcagattcaatcaagccaagagatgtttgcatcgttggtgttgcacgtacaccaatgggtggatttcttggtactctgtcatctctatctgccaccaagctaggctctatagctattgaagctgctcttaaaagggccaatgttgatccatcccttgtggaagaagtattttttgggaatgttcttagtgctaatttggggcaagctcctgcaagacaagctgctcttggagcaggaatatccaattcagttatctgcactaccgttaacaaagttgtgcatca

SEQ ID NO: 280071 - DNA, 362 bp, Glycine max
agaggattagagggtcgccacgtttagcaataaccaaaccctctctactcttttttcttctccttctcttcgctagggttttagcttcttcctcttcacttcgttctttttcgcctctacaatgagcaacgacaaggacacattcaacgtcgccgatctcacttctgctctcaacgaggacaatagagcagaccttgtcaatgctcttaagagcaagatacagagtttggctggacaacactcggatattctagagtctctgtcgcccaatgtccgaaagcgtgttgaggttcttagagagatccagggccaacatgatgaattagaggctaaatttttgaagagagagcagctctcgaggc

SEQ ID NO: 280072 - DNA, 361 bp, Glycine max
ctcgcccatttggagtttctctcctcattgctggccatgatgagaatggacctagcttatactacactgatccatcgggcacattttgggcaatgcaatgcaaaagctattggttcagggtccgaaggcgcagacagttctctacaagaacaattcaacaaggacctaacccttcaagaagccgagacaattgctttatccattttgaagcaagttatggaagagaaggtcactcccaacaacgttgacattgccaaggtggctccaacatatcatctttataccccctctgaggtggaagctgtgataagccgtctatgatttctttttcatgattttctctattcagcattctttctat

SEQ ID NO: 280073 - DNA, 357 bp, Glycine max
gccaaggagaagaaaggtatattagaaaagataaaagagaagcttcctggttatcactccaagacagaggaggaaaaggaaaaggaaaaggagagtggtgctcattgatatttaagattgagacaaggcttttttgttggttggagatgcatgattgtggtgtgctttgttttcatttcatcatatgacagccttgtgggtttctttggtgtttcttgatgcatacttaatttactttattattgtgtatttatctcttccatttacaaaaaaaaaagtttgtgtaggtttccttctttgaagtaaaaagaattaaatatgtactgaaaatggaataatagtgtgtttatttgtgtt

SEQ ID NO: 280074 - DNA, 353 bp, Glycine max
cgattgggctcttcaagacttgcttctttaccatttcattcctaaaaccactattcttcttcgctcattcatcagcactgccatcagccccaacctccccacaaggtcacagggactaaagaggtgtaccaccatgtcggacgatgaaagggaggagaaggagttggatctctcttctgcagaagttgtaaccaaatacaaaaccgcggctgagatcgttaacaaggccttgaagctagttatttcagaatgtaaaccaaaggcgaagattgtggatatttgtgagaaaggggattcatacattcgagagcaaactggaaatgtgtacaagaatgtgaagaggaagattgaga

SEQ ID NO: 280075 - DNA, 362 bp, Glycine max
  unsure (1)..(362): unsure at all n locations
tgannnactattcaatgttgtactccatttcagataaaaatgtacaagagattaagatcagcccagggatcatgttgtngatttntgctaaatcaagtagccatgtccctcttnaaatccnctcaatagaagatggcactgntttganatcattcaaccatctccttcatcggaataagaaggtggatttcattgaacaattcantgaaaagcttcttgttaaacaagaacatgagaatctccaaattcttgatgtaaggacttttgagcnancagaagttagcagaagtgaattcatgacaccgtctgcattnatatttctatatgagantcaattattcctgacatttcgagaccaaact

SEQ ID NO: 280076 - DNA, 353 bp, Glycine max
ggttgctgggattccagtgggcatcaaaagaaggtgctttggccgaagaaaacatgagagccatttgctttgaagtatgtgatgttgttctgcacgctgatgctatccacagaggaggtggtcaaatcatccctactgccaggagagtcttctatgcttcccagattactgccaaacccaggcttcttgagcctgtctacctggttgaaatccaggctcctgagcaagctcttggtggaatctacagtgttcttaaccagaaacgtggacatgtgttcgaggaaatgcagaggctggtaccccactttacaacatcaaagcatacctcctgtcatgagtcctttggttctcga

SEQ ID NO: 280077 - DNA, 350 bp, Glycine max
  unsure (1)..(350): unsure at all n locations
caaccccacccattcccttatccccacttcaccacactctatcagatccaattctggtcatgcttctctctccgttcgcgcctccatcgccgtggaaacccccacggagacggtgaagctgaacaagtacagctcccgcatcaccgagcccaaatcgcagggcgcctcccaggccgtgctctacggcgtcggtctctccgaggacgacatggccaagccccaggtcggcgtctcctcggtctggtacgagggcaacacctgcaacatgcacctcctccactctccgaggccgtgcgtgacggcgttgtgctgctggatggttccttccgttcaacacgttggcgtcanga

SEQ ID NO: 280078 - DNA, 359 bp, Glycine max
aaagacgccataagaaagagcaagtcgaaaagttcatctctccctctctctcacacatcccagccatgagcctcttcggtataggcagaaaccagagaacattccgcccgaaaaaaagtactccttctggaagtaagggagctcaacttagaaaacatattgatgccacgttgggtagtggaaatctgagggaagcagtaaagctacctcctggggaggatttaaatgagtggctagctgtcaacactgttgatttcttcaaccaggtgaatctgctttatggtaccttacagagttctgtactcctgagaattgtcggacgatgtctgcaggacccaagtatgaatatagatgggcag

SEQ ID NO: 280079 - DNA, 302 bp, Glycine max
  unsure (1)..(302): unsure at all n locations
gcctaaagaatcaagaagcttttgttaatttgggcgtcgtacttaataaagccatgactggttcagaaacagagaaggttcctttggtttctttgctcggaatggcaagtatgtagaatgcctgctttctgtgagtaagaaattggacgtagagggctagttactggggtcttctgcttcttacagctagctagccagagctccaacaanatcatatcacgctactganaatgtcgagagatgatnataagtcnganagagncagacttggtgatgattccggaagtgagnntgctggnaac

SEQ ID NO: 280080 - DNA, 361 bp, Glycine max
ctataagctagtttatcgtgaggagaatatgaagttgtttgttttctttgttgctgcagtagttttggtagcatggccatgccatggcgcaggctaccaaaggttccctctccgaatgaaaactggctatggtgagcgttcttcggaggtaaaatgcgcaagttttaggcttgctgtggaagcacacaacatccgagcctttaaaaccattcctgaagagtgcgttgaaccaacaaaggactacattaatggcgaacaatttagatcagactctaaaacagttaaccaacaagctttcttttatgctagtgaacgcgaagtccatcacaacgacatatttatattcggcatagataacacc

SEQ ID NO: 280081 - DNA, 356 bp, Glycine max
  unsure (1)..(356): unsure at all n locations
agctagtttatcgtgaggagaatatgaagttgtttgttttctttgttgctgcagtagttttggtagcatggccatgccatggcgcaggctaccaaaggttccctctccgaatgaaaactggctatggtgagcgttcttcggaggtaaaatgcgcaagttttaggcttgctgtggaagcacacaacatccgagcctttaanaccattcctgaagagtgcgttgaaccaacaaaggactacattaatggcgaacaatttagatcagactctaaaacagttaaccaacaagctttcttttatgctagtgaacgcgaagtccatcacaacgacatatttatattcggcatagataacacc

SEQ ID NO: 280082 - DNA, 349 bp, Glycine max
  unsure (1)..(349): unsure at all n locations
tcttaagtctggagatttagaaaaggcacaagntggtctggggcatagttacagcagagcaaaggtgaagtttaatgttaaccgtgttgacaacatggttattcaagctatcttccttcttgatacacttgacaaggatgttaattcgttctccatgagagtcagagagtggtattcatggcactttcctgagctggtgaaaattgtaaatgataattatctgtatgccaaagttgcaaaatttattgaggataaggcaaagttggctgaagacaagattccagccttactgacatagttggagatgaagataaagcaaaggagattgtggaactgccaaagcctccat

SEQ ID NO: 280083 - DNA, 328 bp, Glycine max
  unsure (1)..(328): unsure at all n locations
gaaaaagacaggaaactgtggaagatgtcccctgtggtaacactgttgctatggttggtttggatcagttcataacaaagaatgctacttgactaatgaaaggaagttgatgcccatcccattcgagctatgaagtttctgtctcaacctgttgtcgtgttgctgttcatgtaggtgcatcagatcttcccaagcttgttgaaggcttaagcggttggccaagtcagatccatggtgttgtaccatgaggagctggtgaacacattgttctggtncaggaganttcacttgagactgttgaaganttgcaggngattcatggtganga

SEQ ID NO: 280084 - DNA, 351 bp, Glycine max
  unsure (1)..(351): unsure at all n locations
gtgttctaagagtgagcaacttcaaaacaccatagtgagaaatgacttccaagggtgcaattctcttgtgtctcaatgttctcttcttcactgtggttagttccacatatgttccatgcaacccacccccnaaaactcccaaacacccacctgtcccaaagccaccttccccaaagcaagtttcttgccccaaggacactgttaagtttggtgtgtgtgctgatgtgttaggtttgattaacgtgcaatagggaagccaccaaaaaccccatgctgcagcctcattcagggtcttgctgatcttgaagctgcagtgtgctttgcatgctctcaagctatgtgttgggcaca

SEQ ID NO: 280085 - DNA, 357 bp, Glycine max
  unsure (1)..(357): unsure at all n locations
tganggtgctgnatcgaatcgnatctccgnngatggccgngancgatcgcacagtgttgcaattctcttcatcatctgtctctctgcgcagagcttgtccgcgaaggtccancctctggtcatcttcancatctgcgattgntacgtncgacgcnctgaccaagncgatcgcgnnatcggaancctantcggntccgtccntcccgntggnagcgncgagatccgnnattcntatgcngntcctcacaangnatntanngaacaggttgcgttggatatagagtaccaccacaatatgttaatatcccaccanaaagtgaatccaaaggaaatcatagtaggatggtattcaaccgg

SEQ ID NO: 280086 - DNA, 357 bp, Glycine max
  unsure (1)..(357): unsure at all n locations
cttcatcaaaaaacccgggattgtcgcaaataatggcacgggagaagtttctgttgatcagtaccatcgctacaaagaagatatagatctcatggccagcctgaattttgatgcctaccggttctcaatctcgtggtccagaatttttccaaatggaactggccaagtaaattggaanggtgtagcatactacaataggttgatcaattacttgctagagaaaggtattactccatatgcaaatctctaccattatgatcttcctttagcacttgaggagaggtacaacggattattgagtcgccaagttgtgaaagattttgcagattatgcagaattttgtttcaagacttttgg

SEQ ID NO: 280087 - DNA, 353 bp, Glycine max
  unsure (1)..(353): unsure at all n locations
anaaaagacaacacagagagaagcgtcttaataaacgctcttctctgaaaaacctgatttcttctcttcttctcttctctttcgtttcgatcttcgatctctgaaaatgagagagtgcatttcaatccacatcggtcangccggtattcangtcggaaacgcctgctgggagctctactgcctcgaacacggcattcagcctgatgggcagatgccaagtgataagactgttggtggaggtgatgatgctttcaacaccttcttcagtgaaatggggctggaaagcacgtgcctcgtgcgatttttgtagatctcgagcctactgtgattgatgaagttaggactgggacatc

SEQ ID NO: 280088 - DNA, 300 bp, Glycine max
  unsure (1)..(300): unsure at all n locations
gctcagcgataagcagaaagtggaaatcgcgaaatggttcctcctcaatnctcctcccggagaaatccnatacgttgccaaagatgtgaaatccattctcaacaacgacgatttgtacaaggaagccgcttccgaggcttttctcttttacaacaaatcgcacttgatttcccttccaatgtccaaccgaagcggagacgtactggttacttcttttggtgagcttgagggtaatgcatttcttgaacctaggactgcgcaagtagcaattgttgatcatgttaaacaagtttgtacaga

SEQ ID NO: 280089 - DNA, 293 bp, Glycine max
  unsure (1)..(293): unsure at all n locations
agatcttgtagcaatggcgagcgctcccactccacgcgaagagttcgtgtacatggcgaantggcggagaggccgagcgctacgaggagatggtggagttcatggagaaggtctccgcctccgccgagagcgaggagctgaccgtggaggagcgtaacctcctctccgtcgcctacaagaacgtgatcggcgctcgccgcgcctcctggcgcatcatctcctcaatcgagcagaaggaggagagccgcggcaacgaggaccacgtcgccgtcatccgcgataccgctccaaga

SEQ ID NO: 280090 - DNA, 354 bp, Glycine max
acgcgatctctctctattctttgaaaccaaagttcaaactctgtcttccctgggttctatttcgaaatcaacgacgatgagttccacagaggcagcagccacagagaagaaaggtggaagagggaaaccgaagacttcaaagtccgtttcccgttcctccaaagctggccttcagtttcccgtcggccgtgtcgctcgctacctcaaggccggtcgctacgcccagcgcgttggctccggttcccctgtttatctctccgcggttctcgaatacctcgctgccgaggttttggagcttgcggggaagctgcgagggacaacaagaagacgaggatcgttccgaggcacattcaa

SEQ ID NO: 280091 - DNA, 351 bp, Glycine max
gttctttgtctcgcaatcttcactattttcaccgagcatttgcattccacattgaatatggctgaggctacacaatctaatgctgagttattggagtggcctaagaaagataagcgccgcttcctgcatgttgtgtatcgtgttggtgatcttgatcgcaccattaagttttatactgaatgttttgggatgaagcttttgaggaaaagagatattccagaagagaaatatgccaatgcttttcttggatttggccctgaacaatcccatttgttgtggaattaacatataattatggggtgacctcatatgatattggaactggcttggacattttgctatcgcaactcc

SEQ ID NO: 280092 - DNA, 356 bp, Glycine max
gggaccacagaagttataataaacatcagtgtacaaaagctgacaagcaagatgtcacagtagttatatgtccactttgtgccaaaggagttcgcctagttcctgatcaagatccaaacataacttgggagaatcatgtcaacaccgagtgcgacccatcgaattatgagaaagtcacaaagaagaaaaaatgccctgtccctgggtgcagagtgatattagtattctcaaacacaattaagtgcagggactgcacagtagagcattgtttaaagcatcggtttggacctgatcataaatgtcctggtcccacaaaggtggaatcaagtttttcattcatgaatcttttgaatggg

SEQ ID NO: 280093 - DNA, 296 bp, Glycine max
  unsure (1)..(296): unsure at all n locations
cgcgataactccctttcgcggttcagggcagcaaacggattggaacagcgaagagactcaacatggaaatggggttcgccgcagagttcttctgagtttcaaagagaagccctcaggaagtaacgttacctttgaatgtactccttcgggtccttgtgtgccctgtctctactctgagaagggtgatgagaaatatcgatgcagtgagactggctaccgaattccattcaaatgtttagagattaaagattcaacgaaggatgcaaaganaacaaagtctcaaaaaggcggttgtc

SEQ ID NO: 280094 - DNA, 352 bp, Glycine max
catttttttgttttgcaactacattgtagcaatcgacaaaacacaacacggagtaatggggaggttgtttgtggtgaatctggaaggaaagatctatagctgcaaacactgccatacccatcttgcgctttacgatgacatctactccaggacattccattgcagacatgggaaagcttatctcttcaataatgttgtgaatgtttctgttggcgaaatggaggacagaccgatgatgactgggttacatacggtggctgacattttctgtgtgggttgtggatcgattgtgggttggaaatatgaaactgcatatgaaaaaaaccagaagtacaaggaaggaaaatcggtc

SEQ ID NO: 280095 - DNA, 348 bp, Glycine max
atttagccatggagtcacactgcgcggtttgtaaggaagctttcgaattaggaactgcagttagagaaatgccatgcaagcacatatatcatcctgaatgcatattaccgtggctcgcacttcacaactcttgccccgtttgtcgccacgagttacccgctgataccccgaatccaaatcaaaatcaaaatccgtctcaaaatgttgccttgaacgaggaggagaatgtggggttgacgatttggaggttgcctggtggagggtttgcggtgggtagattctccggtgggagaagaggtgctgagagagagcttcctgtggtttacactgaaatggatggtgggttaa

SEQ ID NO: 280096 - DNA, 349 bp, Glycine max
gttcttttgcatcctcttcaactacaccatcttaagggacacaaaagatgtgttggttgtgacggccagaggaagcagtgctgagatcataccgtttcttaaaacctgggtgaaccttccaatggccattgggttcatgttattgtacacaaagttggctaatgtgttgtcgaagcaggctctcttctactctattattcttcccttcattgcattctttggggcctttggttttgttttgtaccctctcagcaactatattcaccctgaggcttttgcggataagcttcttaacatccttggcccgcggttccttggccctcttgcaattatgagaatatggagcttc

SEQ ID NO: 280097 - DNA, 352 bp, Glycine max
gcgtgagttaattgttccaggaccccacactgttcgatcgtgtgatctcaggatcgaacagttgaggcgacgccacgtcagtgcacgcgccgtagccgagtcgagaaagtgtgtggctcgcaacgatgtgtctggcgcgcttcagttgctatcatcggctcgagcctctgtgagccgcgaacagggtgatgagtgcttgcgctggctcgaagccaaacaagccgagctgaggaaccaaaagttgagaagtagtaataataattgcttggaggaaaagggggagccgcttacgccgatgtcggcttggagagtagctgagagactggctaaagtggctattatgagaaagtct

SEQ ID NO: 280098 - DNA, 352 bp, Glycine max
ctccgcaccagtttcaccgcacgaatatcttgttgtttggagcgatccgagaaaaactctgtaaacatgttggtttaccaggacctccttacaggtgatgagcttctctctgactccttccgttacaaggaaattgagaatggaatgctgtgggaagttgaggggaagtgggttgttaaaggagcagttgatgtagacattggtgcaaacccttctgctgagggtggaggagaagatgagggagttgatgatgcagctgttaaggttgttgacattgttgacacattcagacttcaggagcaacccgcattcgataagaagcagtttgttaccttcatgaagaggtttatca

SEQ ID NO: 280099 - DNA, 345 bp, Glycine max
atcacttcacgcacactgtcacaggtgtagcggcgaaactgaggtcgtagaaagaatggcgaaaacgacgtcgttgttgctctttacactgctcctcttcggaaccttagctctcatccaggcgaagaaatcgaaggaggatttgaaggaagtgacccacaaggtttactttgatgttgagattaatggaaaagaagcaggtcgtattgtgatgggtctttttggaaaggctgttccaaaaactgcagaaaactttcgagctctttgcactggggaaaagggaactggtaaaagtggcaagcctctccattacaaaggtagctcattccatagaattattcctag

SEQ ID NO: 280100 - DNA, 338 bp, Glycine max
  unsure (1)..(338): unsure at all n locations
gagaaggtatgctatgggaaggacgcgctacatgataacatctttgactgcacatttgactagaattgcagttggtgattgtcgtgatggtatccttttatattcttatcatgaggaagcaaaaaaattggagctactttacaatgacccatcacanaggatagttgntgattgcattctcatggatgctgatactgctgttgtttcggatcgtaaaggaagcattgctgttttatgttcagatcattggaagcatcagacaatgcaggtgcacaatgcnnnatgacactaagctgcgttatttcatggctgagatagtagancacaagaaggtcnta

SEQ ID NO: 280101 - DNA, 346 bp, Glycine max
gtgaagttaaggaaatcaattatggctcaaccctcaacaagaatagggccttgctggactggctgttatgggccaaaatctagcactcaatattgctgagaaaggctttcccatttctgtttataaccgaaccacttccaaggttgatgagactgtagaacgagcaaaacaagaaggaaatcttccagtttatggctaccatgaccccgaagcttttgttcattccattcaaaagcctagggtgataataatgcttgttaaggctggggcatctgttgaccagaccattaagaccctatctgcatacatggaaaaaggtgactgcataattgatggtggtaacgaa

SEQ ID NO: 280102 - DNA, 340 bp, Glycine max
gagggttatgcactcccacatgccatccttcgtcttgatctggccggtcgtgacctcactgatttcttgatgaaaattttgactgagcgtggttattccttcaccacctcagccgagcgggaaattgtaagggatgtgaaagaaaagctgtcttacattgcccttgactacgagcaagaactggagacagccaggaccagctcatccgtcgagaagagctacgagttgcctgatgggcaggtcatcactattggcgatgagcgtttcagatgtccagaggttctgttccaaccatccatgatcggaatggaagcttcaggcattcatgagacaacataca

SEQ ID NO: 280103 - DNA, 291 bp, Glycine max
  unsure (1)..(291): unsure at all n locations
cttagatcaccatgactatctcattccttatttgaggaaaatnaatgcaaataccacaaagacttatgctacaagaaccatatttttcttgaaagatgatggaactttgacaccattggccattgagttaagtaagccacatcctcagggtgaagaatatggtcctgttagcgaagtctacgtgcctgccagcgaggagtggaacttatattgttctggcaagtagtgtgtgatgtctgtacacaanatagcatgtagcnnnncatgtggcatgcannacacagcatgggg

SEQ ID NO: 280104 - DNA, 340 bp, Glycine max
  unsure (1)..(340): unsure at all n locations
gggaatgcctgccactcatactcattttgcgaaaccggctgaagtatgctctaacataccgtgaagtcattgctattctgatgcagcgacatgtccttgttgatggcaaagtcaggactgacaaaacataccctgctggttttatggatgttgtnncaatccctaaaacaaatgagaacttccgcctgctgtatgacaccaaaggtcgattccgtctccactcagtcagggatgacgaggctaagttcaagctttgcaaagttcgctcagtgnctttgggcaaaagggtatcccatacttaaatacctacgacggtcgcactatccgctacccagacctc

SEQ ID NO: 280105 - DNA, 340 bp, Glycine max
  unsure (1)..(340): unsure at all n locations
gaaagtagcaaagatgtttcctttcgggcaaaagggtcaaaagataaaggggactatggtggttatgcagaagaatgtgttggatatcancngcatcaccagtgttggagggatcgttgacnaaggcttaggctcataggcagtgcagtcgatgcacttacttttgcagccaccanaatctccatccagttgattagtgctaccaaggctgatggtgggaaaggaaaaattggaaagagtacaaatttaagaggaaagataacattaccaaccttgggagctggcgaacaagcatacgatgttaattntgaatgggacagtgacttcggaatccggtgca

SEQ ID NO: 280106 - DNA, 342 bp, Glycine max
ttcattttccctcactttctcgctcgccaaacgcccctctctctcctccaatggccgaccagctcaccgacgaccagatcgccgagttcaaggaggccttcagcctcttcgacaaggacggcgatggttgtattactactaaggaacttgggactgtgatgcggtcactagggcaaaacccaactgaggcagaactgcaggatatgattaatgaggttgatgctgatggcaatggaaccatcgacttcccagagttcctcaacctgatggctcgcaagatgaaagacaccgactccgaggaggagcttaaggaggtttccgtgtgttcgacaaggatcagaa

SEQ ID NO: 280107 - DNA, 338 bp, Glycine max
  unsure (1)..(338): unsure at all n locations
caaacctcttcgttccttcgattcattccatttcttccaaaatggccaaagacccagttcgcgttctcgtcactggagccgagggcaaatggatatgtcttgtccctatgattgctaggggantgatgctgggtcctgaccagcccgtgatcctccacatgcttgacattcctccagcagcagagtcnttgaatggggttaanatggaattggtggatgctgcattccctcttcttaaaggtgttgttgctacaaccgatgtggttgaggcatgcactggggtcaatattgcagtgatggttggtggattccctagaaaagaagtatggagaggaagg

SEQ ID NO: 280108 - DNA, 343 bp, Glycine max
agcgtatgtggatgatcacctactgtgtgaaatcgaaggtaaccacctcactcacgccgctatcatcggccaagacggaagcgtttgggctcagagcaccaacttccctcagttcaaacctgaggaaataactgccatcaataatgactttaatgagcctggatcacttgctccaactggattgtatatcggtggcaccaaatacatggtcatccagggtgagcctggtgctgtcattcgagggaagaagggtcctggtggtgttactgtgaagaagaccggtgcggccttgatcattggcatttatgatgaaccaatgactccaggtcaatgcaacatggta

SEQ ID NO: 280109 - DNA, 341 bp, Glycine max
cacaaaacttgctatagcagtaagctataactcatttgaggctctgtgagaattgagaaatggctaaagatgttgaggttcaagagcaaggaggagagtactctgccaaagactaccatgaccctcctccagcacctttgttcgacccagaggagctcacacagtggtccttctatagagccctcatcgctgagttcatagcaacccttctcttccttatgtcactgtgctcaccattattggctacaaaaggcagactgatacaacggtaggtggcaccgactgtgatggggttggcattttgggcatcgttgggccttggtggcatgatcttcatcctg

SEQ ID NO: 280110 - DNA, 340 bp, Glycine max
  unsure (1)..(340): unsure at all n locations
atttccgtcgcggaaggcgaatcccccaacagcttgttcaacatcgttggcaacttgctcttccccttgctcgcgttcgcgggtttgttctnnctctnccggagagctcaaggcgggcccggtgggcttggcgggatgggtgggcccatggactttggacggaacaagtccaagttccaggaagtccccgaaaccggtgtgagcttcgctgacgttgcgggcgcggaccaagcgaanttgaagctccaagaggttgttgatttcttgaagaatcccgataagtacaccgcgttgggcgcgaagattccgaagggtgtcttttggtggggccacgggaacg

SEQ ID NO: 280111 - DNA, 266 bp, Glycine max
  unsure (1)..(266): unsure at all n locations
tgattgaagaagatgccgatcagaaaacatcgccatcggaaggcntgaagaggctactcaccccgacacgttgaaggcggggttggctgagttcatctccaccttgatctcgtgttcgccggttcaggttccggcatcgcctacaacaagctcaccgacaacggcgccgccactcccgccggcctcatctccgcttccatcgcccatgctttcgccctcttcgtcgccgtctccgtcggcgccaacatctccggcggccagtcaac

SEQ ID NO: 280112 - DNA, 341 bp, Glycine max
  unsure (1)..(341): unsure at all n locations
cttcttctatgtggacggtgtgtgtgattttggcatcactgggcctctgcagcactctgtgccaacccacgcaggccagtggatgtacaatttggccgaaactacgtgccaantgggcctttgatcacatcaaatatttcaatggtggttctgacattcagcttcatcttgacaagtacactggtactggcttccagtccaaagggtcttacttgtttggtcacttcagcatgtacataaagatggttcctggagattctgctggcacagtcactgctttctatttatcttcccaaaacgcggacatgatgagatagactttgagttcttggggaacagaa

SEQ ID NO: 280113 - DNA, 338 bp, Glycine max
  unsure (1)..(338): unsure at all n locations
aggaccatgccgccgccgccatcgcccgcgacaggcctccgtcttcgcctggaagggtgagaccctccaggaatactggtggtgcaccgagcgcgcctcgactgggnnccccggcggcggcccgatctcatcgtcgacgacggcggcgacaccactcttctcattcacgagggcgtcaaggccgaggagatctttgagaagaccggccagttccccgacccggcttcctccgacaatgcggattcncgatcgtgctgagcatcatcagggatggttgaagaccgatcccaagaggtaccacaagatgaagacagaatcgtcggtgtctccgaagaaac

SEQ ID NO: 280114 - DNA, 341 bp, Glycine max
  unsure (1)..(341): unsure at all n locations
agagaacaagaacataagggaaccacagcgggcggtaacagaagaacaagcagagaatgggtcgagtgagaacgaagacggtgaagaaatctctcggcaggtgatagagcgtcactactcgcgcatgaccctggacttccacacgaacaagaagnncctggaggaagtggcgataatcccgtcgaagaggctaaggaacaagatcgcggggttctcgacgcacctgatgaagcgcatccagaagggccctgtgcgcggcatctccctcaagctccaggaggaggagcgcgacgccgcatggattcgtccccgacgtctccgccatcaacacgaccacatcg

SEQ ID NO: 280115 - DNA, 341 bp, Glycine max
  unsure (1)..(341): unsure at all n locations
gggtgacaacatgattgagaggtccaccaaccttgactggtacaagggaccaactctccttgaggctcttgaccaaatcnatgagcccaagangcctcagacaagccactcaggcttccattgcaggatgtctacaaaattggtggtattggtaccgtgccagtgggacgtgttgagactggtgtcgtgaagcccggtatggtggtgacttttggtcccactgggctgacaactgaggttaagtctgttgagatgcaccatgaggctctcacagaggctcttccaggtgacaatgttggctttaatgtgaagaatgttgcagtcaaggatctcaagcgtgg

SEQ ID NO: 280116 - DNA, 340 bp, Glycine max
  unsure (1)..(340): unsure at all n locations
gctagtttatcgtgaggagaatatgaagttgtttgttttctttgttgctgcagtagnnttggtagcatggccatgccatgggcgcaggctaccanaggttccctctccgaatgaaaactggtatggtgagcgttcttcggaggtaaaatgcgcaagttttaggcttgctgtggaagcacacaacatccgagcctttaaaaccattcctgaagagtgcgttgaaccaacaaaggactacattaatggcgaacaatttagatcagactctaaaacagttaaccaacaagctttcttttatgctagtgaacgcgaagtccatcacaacgacatatttatattc

SEQ ID NO: 280117 - DNA, 340 bp, Glycine max
  unsure (1)..(340): unsure at all n locations
gaaaaaatgttcttcgaaaagagccaatgagcaaggacatagctgaggatgatgcattcttctttaatgacaaattcaccagtaagttcttcaaggtaaagatagggactgttgttgctcagagggagtctgaaccagaaaacctagaaactaggcaaagagtggaagaagacagaaagccacagatcgaagcagccattgtgaggataatgaanncctaggcggactctagatcataataatattgttgctgaggtcacaaagcagctgcagtcacggtttttgcctaatcctgttgttattaagaaaaggatgaatccctattgagcgtgagttttgg

SEQ ID NO: 280118 - DNA, 339 bp, Glycine max
  unsure (1)..(339): unsure at all n locations
aacaaaaatatgacagaagacaagcagatgtgaactcacttatgctgttgttgggattgttgtgctacttgcttccaatgctgttcanatacagtggtgcctcagtgctctcactgtagacccttcactccacttgtcaagagcttctagcattgtgatgttgattgcatatgtagtctacattgtctttcaactgtggacacacaggcagttatttgaagccgaagatgagggtgaggatggtgaggacggtgaagaagaacaagctgtgattggattatggagtggcattgcttggttggtagggatgactgtgttcatgctgtgttgtctgaatat

SEQ ID NO: 280119 - DNA, 280 bp, Glycine max
  unsure (1)..(280): unsure at all n locations
cctctatcttgggaagggtttctcccatcgcaaatgtctcccagtnatcacattcacaactgcattgacgaatcctatgcagttatcttcgatgctggtagcacgggaagccgtgtacatgtctatcgttttaaccaacaattagatctccttcgcattggccaagaccttgagntgtttgtcaagactatgccaggtttaagtgcttacgctgagaatccacaagatgctgcagaatctcttattccacttttggaggaagcagaagctgctgttcctc

SEQ ID NO: 280120 - DNA, 339 bp, Glycine max
  unsure (1)..(339): unsure at all n locations
gaaacttgggaaacctttccctacctgcgggagtgcaagtttccttaccaatactattgattnaccaggatcgtgatatttggggtgatgatgctacaganttcaacccagaaagatttgctgaaggagtagcaaaggcaacaaaaggccaagttgtgtttttcccatttggatggggtcctagagtgtgcttaggccaaaattttgctttattagaagcgaagttggttttgtcattactcttacaacgcttctcatttgagctttctcctacctatgcacatgctccagtcactgtgctcactcttaatccaaaantggtgctcatatcacttacat

SEQ ID NO: 280121 - DNA, 333 bp, Glycine max
  unsure (1)..(333): unsure at all n locations
tcgagcgctgatttcattgcatgtgctgagtatttgattgnncaaaaattctgttntaaggaaaaactgtgncatcgaaggaagaagtgctggtggtttgctattggtncagtcttaatatgagaccagatttattcaaggctgctgttgctggagtaccttttgtggatgttgtaacaacaatgcttgatccaactattcctctcactacctcagaatgggaggaatggggtgatcctagaaaggaggaattctacttctacatgaaatcatattcccccgttgataacgtgaaggcacagattatccacacatcttgttacagccagataa

SEQ ID NO: 280122 - DNA, 338 bp, Glycine max
  unsure (1)..(338): unsure at all n locations
taaacgactctatctctcttcgttttgttcttccttgcgctcctcctcgttcgttcgttctccctcgcgtagatcggcaatggcggagaccgagacgttgctttcaggntgggatcanccagctcctcagtctcatcatnaacaccttctactccaacaaggaaatcttccttcgtgaactcatcagcaacgcctctgatgctttggacaagattagatttgagagtttgacggacaagagcaagctcgatgctcagccagagttgttcattcatattattcccgacaagactaacaattcgctgaccattgttgacagtggcattggcatgaccaaa

SEQ ID NO: 280123 - DNA, 345 bp, Glycine max
  unsure (1)..(345): unsure at all n locations
aaaagaangaggnaaccctagctggataggtcaaacatcatcatgtcggacgaagagcaccatttcgngtccaaggcagacgccggtgcctcnanaaaccnancnnngncaagccggtaccattcgcangancggcnncatcgtcatnncaggangcccctgcaaggttgtggaagtttcgactncccaaaactggnaagcacngtcacgccaagtnccactntgttggnattgatatttntcactgccaagaaacttgaggatattgtgccctcttctcacaactgtgatgttcctcatgtgaatcggactgattaccagctncattgatattgctgaggatgg

SEQ ID NO: 280124 - DNA, 340 bp, Glycine max
  unsure (1)..(340): unsure at all n locations
agagaacaagaacataaggggaaccacagcggcggtaacagaagaacaagcagagaatgggtcgagtgagaacgaagacggtgaagaaatcctctcggcangtgatagagcgtcattactcgcgntgaccctggacttccacacgaacaagaagnacctggaggaagtggcgataatcccgtcgaagaggctaaggaacaagatcgcggggttctcgacgcacctgatgaagcgcatccagaagggccctgtgcgcggcatctccctcaagctccaggaggaggagcgcgacgccgcatggacttcgtccccgacgtctccgccatcaacaccgaccaca

SEQ ID NO: 280125 - DNA, 338 bp, Glycine max
  unsure (1)..(338): unsure at all n locations
gtgaatgactctggttatcatcagctcgtgagccattggttaaatactcatgcagtgatggaaccatttggccatagcaaccaataggcatctcagtgtgctccaccctatttataaacttctttatcctcactaccgcgacaccataaatatcatggacttgctaggcagtccctgattaatgcagatggcattatagagaaatcatttttgcccggaaagtactccattgagatgtcttcatccgtctacaagaattgggttttcactgaccaagcattaccngctgatctcgtcaagagaggattgggcaattgaagatccctctgcaccccatg

SEQ ID NO: 280126 - DNA, 335 bp, Glycine max
  unsure (1)..(335): unsure at all n locations
gcaactgaaatcaaaacaaatctagcaagcaacaaaaccttctatactgattccaatggacgtgatttcattgaacgtgttcgagactatagaaaagactggcacttggaagtaaatcaacctgtagctggaaattattaccctatcaaccttgggatttacctgaaagataaaagcaaagagttttctatattggtagatagagctgtggggggctccagcatcatagatgggcaattggagctaatggttcataggaggttacttcaggatgattcccgaggtgttgcagaggcntgaatgaaacagtttgcatccatgataagtgcaccggg

SEQ ID NO: 280127 - DNA, 336 bp, Glycine max
  unsure (1)..(336): unsure at all n locations
anagtttgttgtgagctataagctagtttatcgtgaggagaatatgaagttgtntgtnttcttnnttgctgcagtagttttggtagcatggccatgccatgggcgcaggctaccaaaggttccctctccgaatgcnaactggctatggtgagcgttcttcggaggtaaaatgcgcaagttttaggcttgctgtggaagcacacaacatccgagcntttaaaaccattcctgaagagtgcgttgaaccaacaaaggctacattaatggcgaacatttagatcagactctaaaacagttaaccaacaagctttctttatgctagtgacgcgagtccat

SEQ ID NO: 280128 - DNA, 331 bp, Glycine max
  unsure (1)..(331): unsure at all n locations
gttcttctcggtggccaaaagtggaggttcaggcattgataaagcttcggacgagcatggatgagaagtatcaagagaatggaccaaagggtctctctgggaggagatctcagcctcaatgaagaagctcgggtacaaccgaaacgcgaaaaggtgcaaagagaaatgggagaacatcaacaagtacttcaagaaagtgaaggaaagcaacaagcggagaccggaagttccaagacgtgcccttatttccaccagctggacgcgctgtacaggcagaagcacaggggcgaagagagccccgcgcggtggaggcgaacgnagacgcgtggcg

SEQ ID NO: 280129 - DNA, 337 bp, Glycine max
  unsure (1)..(337): unsure at all n locations
cacacactaaaccaaagtaagaggtatagtgtnctaagagtgagcaacttgtgagaaatggcttccaaggctgcacttctcttgtgtctcaangttctcttttcactgtggttagttccacatatgtgccatgtaatccaccccccaaaactcccaaacacccacctgtcccaaagccaccatccccaaagctagcaagctgccccaaagacactattaagttcggtgtgtgtgctgatgtgttaggtttgattaatgtgcaattgggaagccaccaaagaccccatgctgcaacctaattcagggtcttgctgatcttgaagctgcagtgtgcctt

SEQ ID NO: 280130 - DNA, 330 bp, Glycine max
  unsure (1)..(330): unsure at all n locations
ttgtgagctataagctagtttatcgtgaggagaatatgaagttgtttgtnntctttgttgctgcagtagtnttggtagcatggccatgccatggcgcaggctaccaaaggttcnncncccgaatgaaaactggctatggtgagcgttcttcggaggtaaaatgcgcaagttttaggcttgctgtggaagcacacaacatccgagccttaaaaccattcctgaaganngcgttgaaccaacaaaggactacattaatggcgaacatttagatcagactctaaaacagttaaccaacaagctttctttatgctatgacgcgagtccatcaca

SEQ ID NO: 280131 - DNA, 338 bp, Glycine max
  unsure (1)..(338): unsure at all n locations
atccgatcctctgtcctctcgaagctttcatcgttcaacatattctcaccatctcagtcatgggcctgctatcttgttttaggtcnaccgtccctgagaaaatgtttccaaaggaagctctggcatgtcaagattcctgtatacgaacaattttcaacgaaacttgatttcgtctggtggcaatgaatcgtattatgggtattttaacaggagatcatacacttcactttatatgggaactggaactgtgggtgggattacaagtgctannatcagggtgccaaatgtaggatgtgaaggattcatgtgctcaagtcatctgtcaatcactcaaagaa

SEQ ID NO: 280132 - DNA, 268 bp, Glycine max
ggctgccgaagaagagaacgttcaagaagttcagttttcgaggcgtggatctcgatgcacttctcgacatgtccaccgatgaactcgtcaagatgttcagtgcccgcgctcgtagaaggttccagagaggcctcaccagaaagcccatggccttgatcaagaagctccgtaaagcgaaaagggaagctccaccaggtgagaagccagaaccagtacgcacccacctccgcaacatgttattgtgcctgagtgatggtacattattgga

SEQ ID NO: 280133 - DNA, 337 bp, Glycine max
ctcaagtccaacctacccctttttcttctcccaccaacttcaccgtcttcttcctcgatcatgtctcacttcaagggcaagtaccatgatgagcttattgccaatgctgcttacattggcactcctggaaagggtattcttgctgctgatgagtcaacagggacaattggcaagcgtttggccagcatcagtgtagagaatgttgaatccaacaggcgtgctcttagggagctgcttttcaccgctcccggtgctcttaaatatctcagtggtgtcatcctctttgaggaaactctctaccagagcacagctgcaggcaagccctttgtggaagtct

SEQ ID NO: 280134 - DNA, 348 bp, Glycine max
cttataagctagtttatcgtgaggagaatatgaagttgtttgttttctttgttgctgcagtagttttggtagcatggccatgccatggcgcaggctaccaaaggttccctctccgaatgaaaactggctatggtgagcgttcttcggaggtaaaatgcgcaagttttaggcttgctgtggaagcacacaacatccgagcctttaaaaccattcctgaagagtgcgttgaaccaacaaaggactacattaatggcgaacaatttagatcagactctaaaacagttaaccaacaagctttcttttatgctagtgaacgcgaagtccatcacaacgacatatttatattcg

SEQ ID NO: 280135 - DNA, 208 bp, Glycine max
  unsure (1)..(208): unsure at all n locations
gacgtacacttgctgattacaacatccaaaaggagtcanntcttcacttggtgctccggctccgtggtggaatgcaaatctttgttaagacattgancggaaagacaatcacccttgaggtcgagagctctgacaccattgacaatgttaaggctaagattcaggacaaagagggtatcccaccagaccaacaaaggcttatctttgc

SEQ ID NO: 280136 - DNA, 363 bp, Glycine max
  unsure (1)..(363): unsure at all n locations
gttcttctcggtggccaaaagtggaggttcaggcattgntaaagcttcggacgagcatggatgagaagtatcaagagaatggaccaaagggtctctctgggaggagatctcagcctcaatgaagaagctcgggtacaaccgaaacgcgaaaaggtgcaaagagaaatgggagaacatcaacaagtacttcaagaaagtgaaggaaagcaacaagcggagaccggaagattccaagacgtgcccttatttccaccagctggacgcgctgtacaggcagaagcacaggggcgaagagagccccgcggcggtggaggcgaacggaagagcgcggtggcgccgttgatggtgcagccggagcagcaa

SEQ ID NO: 280137 - DNA, 351 bp, Glycine max
gcgcattcttctgttatagtcttcctctgcactctccttctcttcttttctccgtcaattcgtgcctccgacgatgacgtggcgctgcacgcgaagaagctcatcagagacctcaacttgttccccgacgctgacgtcaacatcgttcccgttgctaattgcaccctccaaccccgcaggatcgtcgagaagcgcctgaggttcccgaagctgctagcttcggattccgagccttcggttgaggatttgggtcaccacgctggctattaccccattcagcattcacatgccgcaaggatgttctatttttcttcgaatcacgcaataggaaggaggatcctgtcgtaattt

SEQ ID NO: 280138 - DNA, 209 bp, Glycine max
ctaaacaggccaactattagcaggagattcatgcctgaaaaggggtctcctgaatatgatgcgttggctaagaaccctgagaaggagtttttgaagactattactggcaagaaggagaccctcattgaccttacagttatagaaatcttgtcaaggcacgcatctgatgagttctaccttgggcagagagatggtggtgactactggac

SEQ ID NO: 280139 - DNA, 254 bp, Glycine max
cactcagccgctgcgaggcgaacagagagacccgaagccagatttcaagatgaagttcaacattgcgaatcccaccactggttgtcagaagaagctggagatcgatgatgacctgaagctacgagcattttgggacaagaggatctcacaagaggttgttggtgatgctctgggtgaggaattcaaaggctatgtcttcaaaattactggaggttgcgacaagcaaggatttccaatgaagcaaggagtgttga

SEQ ID NO: 280140 - DNA, 155 bp, Glycine max
  unsure (1)..(155): unsure at all n locations
atnagcaggagattcatgcctgagaaagggtctgctgagtatgctgcttnggctaagaaccctgngnaggagtttntgacaactattactggcatgnaggngaccctcattgaccttacaattatagaaatcctgtcaangnacgcatctgatga

SEQ ID NO: 280141 - DNA, 350 bp, Glycine max
gggggaaatgagtatattgacatggcagaaacactatgtcaaaaacgtgccttggaagcatttcggttggatccggctaaatggggagtgaacgtgcagcctctgtctggttcttctgccaattttcaagtttacactgcattgctaaaacctcatgatagaatcatgggacttgatctaccacatggagggcatctttctcatggataccagactgacaccaataaggtatctgcagtctccttattttttgagacaatgccatatagactgaacgaaaacacgggacacattgactatgatcagttggagagtacggcgaaactcttcaggccaaaattaatagttgc

SEQ ID NO: 280142 - DNA, 348 bp, Glycine max
  unsure (1)..(348): unsure at all n locations
tatctccgcagtggatcaaatcaaacaaacacttccatccatcaccctttcnctctgcttagggttttgatcgcatcggatcttcactctcttctccgatctcaaaatgcccgccgtttatgganntcgcttgaccaccttcgaagactccgagaaggagagtgaatacggttacgttcgcncggtatcaggaccantcgtcgttgcagatggcatggctggggctgctatgtatgaactcgtgcgtgttggtcatgataatctcattggtgaaattattcgtctcgaagggaattctgctaccatccaagtntatgaggaactgctggttgatggttaatgatcggt

SEQ ID NO: 280143 - DNA, 205 bp, Glycine max
attagcaggagattcatgcctgagaaagggtctgctgagtatgctgctttggctaagaaccctgagaaggagtttttgaaaactattactggcaagaaggagaccctcattgaccttacaattatagaaatcctgtcaaggcacgcatctgatgagttctaccttggggagagagatggtggtgacttctggacttctgatgctg

SEQ ID NO: 280144 - DNA, 297 bp, Glycine max
gctgttcttgcgcgtgaacaagcctcaggtaagccaaaaccatggttaagcataacaatgttatcccaaacggacacttccgtaagcactggcagaactatgtgaagacttggttcaatcagccagcacggaagacaaggagacgattggctcgtcagaagaaagctgtgaagatattccccagacctacggctggacctctcaggcccattgtacatggtcaaactttgaaatacaacatgaaagtgagaggtggaaggggatttctcttgaagaactcaaggcagcagggttccc

SEQ ID NO: 280145 - DNA, 345 bp, Glycine max
gcaactaccatggctaccgctccttcgcttctacactcatctgggtcctcttttttctctcaatttcgtgcctttcaattctcttcttcttcgctgtttcctcatggaaacaggcatgggaatgccgtggtctctgtgaaggcctctgcttctggggttgtgttggtggagaagtctgaggcagagaaggccaataggctcaaaacagcttacactgagaaaattattcccttgctcatggaagagttctcttacaccaacaaacaccaggtgcctaaaattgagaagattgtggtgaactgtggtattggagatgctgcgcaaaatgcaaagggttggacgcgg

SEQ ID NO: 280146 - DNA, 340 bp, Glycine max
  unsure (1)..(340): unsure at all n locations
caaaaactatctttaccgatatactactccctacttggcctccaatagctccagtcccctctggtatgcagttaggcgtgcgtctgctcatataattgtgctatccagctattcaccatttgtgaaatacactcctcaatacatgtggcttaaagaagagctgaagcgagttgagagggagaagactccttggctcattgtgctcagcacgtgccgctctacaatagtaatggagctcatatatggagggtgaaagcagcgatctgtttttgagagtggttcatcgagtacaaagtgagtgatctttgctggccantcatgttatgaaagacattcganc

SEQ ID NO: 280147 - DNA, 265 bp, Glycine max
  unsure (1)..(265): unsure at all n locations
ctctaaaccctagacaactctttctcttcttccttcgctcgttgttctccctcgcgtagatcgacaatggcggagacagagacgtntgctttccaggctgagatcaaccagctcctcagtctcatcatcaacaccttctactccaacaaggagatnttccttcgtgaactcatcagcaacgcctccgatgctttggacaagattcgatttgagagtttgacagataagagcaagctcgatgctcagccagagttgttcattcata

SEQ ID NO: 280148 - DNA, 153 bp, Glycine max
  unsure (1)..(153): unsure at all n locations
gcaaaggattctacccgccgctcgatgggaattgcgcttcaaggcgtctcgtagggctaatccgcctcacgagggtcaccaacggcacgtgcctttggggggccgnngccccctactgctggtcggcaaacggacggcgggcgcacgcgtcgt

SEQ ID NO: 280149 - DNA, 199 bp, Glycine max
  unsure (1)..(199): unsure at all n locations
gtcttcataaacgcctttcttctccgtttccgtttcctcgttcgaattcgctttttgatctgcgaaaatgagagagtgcatctcgatncacattggtcaggctggtatccaggtcggaaatgcttgctgggagctctactgcctcgagcacggcatngggcccgatgggcaaatgccaagtgacaagacagttggcggt

SEQ ID NO: 280150 - DNA, 350 bp, Glycine max
  unsure (1)..(350): unsure at all n locations
cttctcttccctgctattaatgtcaatgactctgtcaccaanagcaagtttgacaacttgtatgggtgccgtcactctctccctgatggtctcatgagggtaccgatgtnatgattgctggaaaggtggctgttgtggctggatatggtgatgttggcaagggttgtgctgctgcaatgaagcaggctggtgctcgtgtcatcgtgaccgagattgatcccatctgtgcccttcaggctctcatggaaggccttcaggttctgaccttggaggatgttgtttctgaggctgatatctttgtcaccaccaccggtaacaaggacatcatcatggttgaccacatgaggaaa

SEQ ID NO: 280151 - DNA, 200 bp, Glycine max
  unsure (1)..(200): unsure at all n locations
cggantatgggcgcaagaagcagtctgatgttatgagattcttgcagcgggtgaggtgctgggagtaccgccagcaaccttctattgtccgtttgacaaggtctactcgcccagacaaggctcgccgcttgggtttcaaggctaagcagggttatgtgatttaccgtgttcgnctacgaaggggtggccggaagagacca

SEQ ID NO: 280152 - DNA, 243 bp, Glycine max
gtttgttgtgagctataagctagtttatcgtgaggagaatatgaagttgtttgttttctttgttgctgcagtagtttggtagcatggccatgccatggcgcaggctaccaaaggttccctctccgaatgaaaactggctatggtgagcgttcttcggaggtaaaatgcgcaagttttaggcttgctgtggaagcacacaacatccgagccttaaaaccattcctgaagagtgcgttgaaccaa

SEQ ID NO: 280153 - DNA, 305 bp, Glycine max
  unsure (1)..(305): unsure at all n locations
agagtttgttgtgagctataagctagtttatcgtgaggagaatatgaagttgtttgttttctttgttgctgcagtagttttggtagcatgggccatgccatggcgcaggctaccaaaggttccctctccgaatgaaaactggctatggtgagcgttcttcggaggtaaaatgcgcaagttttaggcttgctgtggaagcacacaacatccgagcctttaaaaccattcctgaagagtgcgttgaaccaacaaaggnctacattaatggcgaacnttttagatnagctctaaacnttaccaaagtt

SEQ ID NO: 280154 - DNA, 311 bp, Glycine max
  unsure (1)..(311): unsure at all n locations
cagcaccaagccagtnggatcttgtntctgataagcaaatgatgcaggaagagcagcctcttcangtggcacgatgcacaaagatcataaatccaaactctgaagatgccaaatatgttatcaatgtgaagcagatagcaaagtttgttgttnnccgaanganacaaggtttcccccactgacattgaggaagggatgcgtgttggggttgatagaaacaaatatcagattcagattcctttgcctccgaaaattgatccaagtgtaaccatgatgacggncgaagagaagccagatgtgacatataatga

SEQ ID NO: 280155 - DNA, 313 bp, Glycine max
cgttcttggtggttcagccttaccttaccctcgcagaggaaagaaccggaagaggaaaaactagaaaagatcccaacagtgagaagccgagcgattttgtttaccttccaagagatgaagcatttggtcacttgaagtcatcagattttctcgcttatggaatcaaatctgtatcccaagatgtcttgcctgtcttgactgatgcattcgatggaaatattttgagccttgagtttgataattttgctgaagtgcacaaactctatgaaggtggagttacactacctacaaactttcttagcaagatcgcccc

SEQ ID NO: 280156 - DNA, 314 bp, Glycine max
  unsure (1)..(314): unsure at all n locations
acttcatctgggtttcaggaaaaaagaaaaaggaaaacaatgggttccgataatcaccagaacttggagttcttncaaggagatcggtttgggatcttccaacattggctcttacattaatggccagtggaaagccactggttcttctgtcacttctgttaatccttctaacaatcagagtatagctcaagtgaccgaagcaactttgcaagattttgaggaggggttgcgagcttgcagtgaagcagctaagacatggatgactataccggcaccgaagagaggtgagattgtgagacagattggtgaagcat

SEQ ID NO: 280157 - DNA, 314 bp, Glycine max
  unsure (1)..(314): unsure at all n locations
ctcgagcgtgcgcgtgaacaagcctcaggtaagccaaagccatggttaagcatnacaatgttatccccaacggacacttccgtaagcactggcagaactatgtgaagacctggttcaatcagccagcacggaagacaagaagacggttggctcgtcagaagaaagctgtgaagattttccccagacctacagctggacctcttagacccattgtacatggtcaaactttgaaatacaacatgaaagtgagagctggaaggggattttcccttgaagaactcaaggcagcagggattcccaaaaagcttgcacca

SEQ ID NO: 280158 - DNA, 310 bp, Glycine max
  unsure (1)..(310): unsure at all n locations
ataacatagcatagagtgagaagtgagaagagaaaaatggcaatctccatacccagtagacaacttttcatagatggagagtngaaagtccctcttctancacaatcggtttccgatcatcaaccccgctactgaagacatcatagggcatattccagccgctactaaggaagatgttgaccttgcggtggatgctgctaaaagagccttttcccataacaaaggcaaagattggtcttcagctcctggctctgttcgtgctcgctatcttcgagccatcgcttcaaagataacagagaaaaaggatgaa

SEQ ID NO: 280159 - DNA, 309 bp, Glycine max
  unsure (1)..(309): unsure at all n locations
cgccgaagaaggttcatccaatccccgaagcccttcaccgcattgcaaccatgtcgaggagaaaggtcagagagccaaaggaanaaaacgtgactctgggcccagctgttagagatggtgaacatgtctttggcgtcgctcgcatctttgcctccttcaatgataccttcattcatgtcactgatttgtctgggagggaaacgcttgtccgcatcactggtggaatgaaggttaaggctgacagagatgaatcgtctccttatgctgctatgcttgcagctcaggatgttgctgccagatgcaaggaat

SEQ ID NO: 280160 - DNA, 309 bp, Glycine max
ctgcactcttcatcaagctccgctccaacacaggggaaaatgagggagatccttcacgtgcagggagggcaatgcgggaaccagatcggttccaagttctgggaagtggtgtgcgacgagcacggcatagatccgacggggaagtacgtcggaaactcagatctgcaactcgagcgcgtgaacgtctactacaatgaagcctcgtgcgggcgcttcgtgccacgcgcggtgctgatggacctggagcccggaaccatggacagcgtgcggaccgggccgtacgggcagatcttccgccccgacaattcg

SEQ ID NO: 280161 - DNA, 311 bp, Glycine max
gattattcctcttcccattctagggttcccaaatggacgctggcggaaagatcaagaagggcgccggaggaagaaagggcggcggccctaagaagaagccggtttcaaggtccgtcaaggccggtctccaattccccgtcggaagaattggccgttatttgaagaaaggaaggtacgcccagcgtgtcggtaccggtgctcccgtttacttggccgcagttctcgagtacctagctgctgaggtgcttgagttggctgggaatgctgcacgtgacaacaagaagaacaggattattccgagacatgtgctg

SEQ ID NO: 280162 - DNA, 311 bp, Glycine max
ctgccatctttatagccactggccaagatccagctcaaaatgttgagagttcccattgcttaaccatgatggaagccgtcaatgacgggagggaccttcacatctcagtgaccatgccttccattgaggtgggtactgttgggggtgggactcaacttgcatcccaatctgcttgcttgaatttacttggtgtgaagggtgctagcaaggagtcaccaggatcaaactcaagactcttggccaccattgttgctggatctgttttagcaggagagctgtctctgatgtctgccattgcagcagggcagcta

SEQ ID NO: 280163 - DNA, 311 bp, Glycine max
tgttactccttctctcgttgattcggatctagagtcttttttcactcttcagttctcgttgttgttcttcgctttcctgaaactagggttttcaatttcgattcattcgttaataattaaagatgtttgggagggcaccgaagaagagcgataatacgaggtactacgaaatcctcggcgtctcgaagaacgcttcgcaggatgatctgaagaaggcttacaagaaagccgccatcaagaatcaccctgacaaggcggtgatcccgagaagtttaaagagctggcacaagcatatgaggttctgagtgacc

SEQ ID NO: 280164 - DNA, 232 bp, Glycine max
  unsure (1)..(232): unsure at all n locations
tatgtctctgatttggtggagggtctaatccgccttatggaaggagaacacgtgggacctttcangcttggaaatccgggagaatttacaatgctanaacttgccaaggtggttcaagaaacaatcgaccctgatgctaggatagagtacaggccgaacacagaggatgatccgcacaagagaaagcctgatataagtagggctaaggatcaacttggctgggaacccaagg

SEQ ID NO: 280165 - DNA, 306 bp, Glycine max
cttgatcgtttatctctaagatatgaaaaagaaggaaagccatctctgttagctgatatagacgtgttcgttagtacagtggaccctatgaaggaacctccactcattactgcaaacacagttctgtctatccttgctgtggattatccagtggacaaggttgcatgctatgtttcagatgatggagctgccatgcttacatttgaagcactttccgagacttctgagtttgcaaggaaatgggttccattctgcaagaagttctgcattgaaccacgggctcctgaatggtattttgctcagaag

SEQ ID NO: 280166 - DNA, 306 bp, Glycine max
caaccactactactcactcactgcagatctcaattgcatcgctgtccatggctaccatcgttagcatcaaggcccgccagatcttcgacagtcgtggcaatccaactgtcgaggtggatttgacttgctccgatggtacttttgccagagctgctgttccaagtggtgcatccactgggatttatgaggcccttgaattgagagatggaggatctgactaccttggaaagggtgtatcaaaggctgttgacaatgtgaacaccgtcattggccctgctttgattggcaaggacccaactgagcaga

SEQ ID NO: 280167 - DNA, 307 bp, Glycine max
atactacactatacttgtcaaccctttgagagttagaatggctgctgctattgaaatccccacaatagtgtttccaaactcctctgcccaacagaggatgccagtggttggaatgggatctgcccctgacttcacatgcaagaaagacacaaaggaggctatcattgaggccgtgaaacagggttacagacacttcgacactgctgctgcttatggctctgaacaggctctcggtgaagctctcaaggaagctatccatcttggcctcgtctcccgccaagacctctttgtcattccaagctttggg

SEQ ID NO: 280168 - DNA, 307 bp, Glycine max
  unsure (1)..(307): unsure at all n locations
gtacgttcatcttcttcctttcaccaaaggcgaagatcgatcggttactattcggttctggttttttgttttcgtgctgtttttgtttcagatctgatggtttttcgtgttttatgttcagattatcaacgatcgtgagactggaagatccaggggttttggatttgtgaccttcgcctcggagcagtgccatgaaagacgccatcgaagggatgaacggccaaaaccttgacggccgtaacatcactgttaacgaagctcagtcccgtggtggcggtggcggnggangcggtggaggtggtggata

SEQ ID NO: 280169 - DNA, 165 bp, Glycine max
  unsure (1)..(165): unsure at all n locations
caccgattgctagaatggaatttcgatgctcagtcatctcttttaccattctcttctctcttgctcttgcaggagagagccatgtccatgcatcgctacctgaggaagattattgggaagctgtttggccaaacactcccattcccactgcttgcgagatcntct

SEQ ID NO: 280170 - DNA, 215 bp, Glycine max
attaattgcaagaatggcacttcgttgcttggtgatgtccctttctgttctcttcactcttggtcttgcgagagaaagccatgccagagacgaagatttttggcatgctgtttggccaaacactcccattccaagttcattgcgagatcttctaaagcctggccctgcaagtgttgaaatcgatgatcaccctatgcaaattgaagaaacacagt

SEQ ID NO: 280171 - DNA, 297 bp, Glycine max
aaggttttggatttgtcagatacaacactcatgacgaagctgcactggccattcagatggctaatggaagacttgttcgtgggaagaatatgaagtgttcatggggtagtaaaccaactccacctggaacggcttcaaacccactacctcctcctgctcaaccatatcaaatacttcccactgcagggatgaaccaagggtattctcctgcggagttgttggcttatcagcgccaactggccttgagtcaggctgctgtatctggtctttcaggtcaaatcttctgcaaatgatgga

SEQ ID NO: 280172 - DNA, 303 bp, Glycine max
  unsure (1)..(303): unsure at all n locations
gctcgctatcttcgagccatcgcttcaaagatnnacagagaaaaaggatgaactaggaaagcttgaagcnattgattgtggaaaaccactagatgaagcactggcagacctggatgatgttattggttgttttaactactatgccgagcttgcagaaggattggacgcaaagcaaaatgctcctgtatcccttcctatggaaaccttcaagagttatgttctcaaggagcccatcggagttgttgcattaattactccatggaactatcctctattgatggctacatggaaagttgctcctgc

SEQ ID NO: 280173 - DNA, 304 bp, Glycine max
  unsure (1)..(304): unsure at all n locations
gcaaagaaacacacagttagcaccgtcaacctctgcaaccaccgattccaaccatgcttcccctttcccttctcaagactgcccaagggccaccccatgctggtggaactgaaaaatggggagacttataacgggcacttggttaattgtgatacatggatgaacatccatctccgagaagtcatttgtacctctaaagatggagatagattttggcgtatgcctgagtgctacattcgtggcaataccattaagtaccttcgggtangagatgaggttattgacaaagtccaggaagaaacaa

SEQ ID NO: 280174 - DNA, 306 bp, Glycine max
  unsure (1)..(306): unsure at all n locations
aaacccctncaagatggtggcaanaacttcgacgatgatggacgagtncaaaagaactgnngacatggataaactgcgagtgcccatatcataacggcatgataggttctggagtgttgtcacttgcatgggcaattgcacaaatgggttgggtngcaggccctgcggttctctttgccttctctttcatcacatacttcacctnncactcttcttgccgactgttatcgttcacctgaccctgttcatggcaagcgaaactacacctattcagatgttgtcagatccgtgttaggaggtaggaaa

SEQ ID NO: 280175 - DNA, 304 bp, Glycine max
atgggttcttcttcttctatgtggacggtgtgtgtgattttggcatcactggcctctgcagcactctgtgccaacccacgcaggccagtggatgtacaatttgggccgaaactacgtgcccacatgggcctttgatcacatcaaatatttcaatggtggttctgacattcagcttcatcttgacaagtacactggtactggcttccagtccaaagggtcttacttgtttggtcacttcagcatgtacataaagatggttcctggagattctgctggcacagtcactgctttctatttatcttcc

SEQ ID NO: 280176 - DNA, 299 bp, Glycine max
  unsure (1)..(299): unsure at all n locations
gttctgttctacttgctctcaagtttcatcttgggctgtaggctgtancataccatgaccaccaaggatccaaaatccgtgtacgactttgttgtcaaggatgctaagggagatgatgtagatctctccttttacaagggaaaagtccttctgattgtcaatgttgcttctcaatgcggcttgaccaactccaattatacggagctgaatcaattgtatgacaagtataaagaccaaggcctggagattctggcatttccatgtaatcaatttggtaagcaagaaccagaaagcaatga

SEQ ID NO: 280177 - DNA, 301 bp, Glycine max
  unsure (1)..(301): unsure at all n locations
gtcaccttgttgaacatgcatataaaaaaagaggtgagctggtctgggctgtggtagtggggcagcancagcaatacgtatcattgaggaagtttcctgtggatcgtctccgaaaatgaacgacgcagacgtctcaaagcaaatccagcagatggttcggttcatccgccaggaagctgaggaaaaagccaatgagatctctgtctccgccgaagaggaattcaatatcgagaagctgcagttagtcgaagccgagaagaagaagaccaggcaagagtacgaacgcaaagaacgccaagtc

SEQ ID NO: 280178 - DNA, 298 bp, Glycine max
  unsure (1)..(298): unsure at all n locations
cggantatggcgcaagaagcagtctgatgttatgagattcttgcagcgggtgaggtgctgggagtaccgccagcaaccttctattgtccgtttgacaaggtctactcgcccagacaaggctcgccgcttgggtttcaangctaancagggttatgtgatttaccgtgttcgtgtacgaaggggtggccggaagagaccagttccaaaaggtattgtttatggtaagcccaccaaccaaggtgttactcaactgaaatttcagcgcanaagaggtctgttgccgaggagcgagctggaa

SEQ ID NO: 280179 - DNA, 300 bp, Glycine max
gtcgcagcgatcgaagtttcacatcagccttatccagtttagggtttcggttccttaccctacctttgacgtatcgaaaccttaaatttgggattaggtctgagcaatctggttggtagaacctttggtcttagagagtcaagttttatgtctggattagacgatcaaattcctactgccttcgatccttttgctgatgcaaatgctgatgactcgggtgctgggtcaaaggagtatgtgcatattcgcgttcagaagcgaaatggtaggaaaagcctgacaaccgttcagggattgaaa

SEQ ID NO: 280180 - DNA, 301 bp, Glycine max
  unsure (1)..(301): unsure at all n locations
gggcgagctctggactttatgtttggntggtttgctaatcccattacatntggtgactatcctgagagtatgagatcttgagttggttctagactccccacattcaccanagtgcaatctgaaagtctcaanggttcatatgattttnttggtataaattattacacctcaaatttcgtggaatatgctccaccaaccaccactaacaagacctatttcactgatatgctagccaaactttcttcgaccaggaatggtgtacccattggcacaccgactcctctgagctggctctttatct

SEQ ID NO: 280181 - DNA, 302 bp, Glycine max
ctcaaacattgtttgttgtaggaagaggaatcttgagaaatggcaggggacagcaagagcaagattctgttcatcggagggactggttacatcggaaaattcatcgtggaagccagcgccaaagctggccacccaactttccttttggtgagggagtccactctctccaaccccgcaaaatcacccctcatcgacaatttcaaaggcctcggtgtcaatcttgttttaggagatctatacgatcaccaaagtttggtgagtgctataaagcaggtcgatgtggtaatttctactgtaggaca

SEQ ID NO: 280182 - DNA, 290 bp, Glycine max
gagaaaccagtgactgacttttcgagaaagaaaaacaaaaatgagtttccgtcattccatcatgaacgctcttcccattctcctcttcttcctcttcgtttctgcattagtttctgcgaagaaaactggtgatgtgacggagctgcaaattggcgtgaagcataaaccagtatcatgtgaagttcaggcacacaaaggtgacagagtcaaagtacactataggggaaaactcactgatggaactgttttcgattctagctttgaaagaaataatccaattgaatttgagc

SEQ ID NO: 280183 - DNA, 290 bp, Glycine max
tgttgttctaaaacgtccacacattctccgtcgccacaacaacaatggctccgaagaaaggtgtgaaaggttccgttgtagcagcgaagaagaaggttcaggagaaggtgacgaatcctttgttcgagaagcgtccgaagcagttcgggatcggaggcgcgctgccgccgaagcgggacctgacgcggttcgtgaagtggccgaagaacgtccaaatccaacgcaagaagcgcatcctcaagcagaggctcaaggtccctcctgcactcaaccagttcaccaaaacccta

SEQ ID NO: 280184 - DNA, 196 bp, Glycine max
  unsure (1)..(196): unsure at all n locations
aaggtcttcaacttcacccattcatacgtggtgttgttactgctgctcttttctcttttcttttctctttagttctctcttcccctttcnttntctgttactcttcttctgagcttgttnaagcttttcttccattaacanattatcacaatgtgtggnattctngctgttcttggttgtnctgatgactctcgag

SEQ ID NO: 280185 - DNA, 284 bp, Glycine max
ctctgctcgtgcctctagggttatcatatctccatttccatttcctctctctcagtttccaagaatcttaagctatgggaaagtcttacccaaccgtgagcgctgattaccagaaggccgttgagaaggcgaagaagaagctcagaggcttcatcgctgagaagagatgcgctcctctaatgctccgtttggcatggcactctgctggaacttacgacgtgagctcgaagaccggtggtcccttcggaaccataaagcacccctccgaactcgctcacggcgct

SEQ ID NO: 280186 - DNA, 227 bp, Glycine max
gtgagctataagctagtttatcgtgaggagaatatgaagttgtttgttttctttgttgctgcagtagttttggtagcatggccatgccatggcgcagctaccaaaggttccctctccgaatgaaaactggctatggtgagcgttcttcggaggtaaaatgcgcaagttttaggcttgctgtggaagcacacaacatccgagcctttaaaaccattcctgaagagtgc

SEQ ID NO: 280187 - DNA, 177 bp, Glycine max
gcttgaacacaccgcgtttcggagagagacgtcgcaatggggaggaggcctgcaaggtgttatcggcagataaaaaacaagccatacccccaaatcacgcttttgccgtggtgttcctgatcctaagatcagaatttatgatgttggtatgaagaagaaaggtgttgatgagtttcc

SEQ ID NO: 280188 - DNA, 354 bp, Glycine max
  unsure (1)..(354): unsure at all n locations
gtggcacagcactagatcatggtgtcgtggctgttgggtatggaacagctaaaggtcatgattattggatcgtaaggaattcatggggttctagctggggagaggatggctacatcagattagaaagaaatcttgctaacagcagatcaggcaagtgtggaattgcaattgagccatcttatccccttaagaatggtccaaatccccctaatcctggaccatcacccccttcacctgtgaagccgccaaatgtctgtgacaactactacagctgtgctgatagtgctacttgttgctgtatttttgagttcggaaatgcttgcttcgagtggggttntgtcctcttgagggtgc

SEQ ID NO: 280189 - DNA, 181 bp, Glycine max
  unsure (1)..(181): unsure at all n locations
ccttttccttctctctggctttcctttgacgcttctgacactgctccttttctttctctccgtgtcctaatggctcngcccgactcttcttcctgccgcaactccctgatcccctccttcatctactcctcttcctccaaaacgctccctctacaccacatgctcaantccgcctccgcng

SEQ ID NO: 280190 - DNA, 179 bp, Glycine max
ctccgacaagcctctaaggcttccattgcaggatgtctacaagattggtggtggtggttaagtctgttgagatgcaccatgaggctctcacagaggctcttccaggtgacaatgttggatttaatgtgaagaatgttgcagtcaaggatctcaagcgtggttttgttgcatccaactcc

SEQ ID NO: 280191 - DNA, 264 bp, Glycine max
  unsure (1)..(264): unsure at all n locations
gtagagcacactttgtcccttaccgaggccttgtgtggcttccaatttgngctgactcacttggatagccgtnagcttcttattaaatcaaatcccggggaagttgtgaagcctgattcatacaaggctataaatgatgagggaatgcccatgtatcagaggccattcatganggggaaactttacattcacttcactgnggagtttccagattctctaaaccctgatcaagttaaggcttggaggctgttctgccaccaaagc

SEQ ID NO: 280192 - DNA, 236 bp, Glycine max
  unsure (1)..(236): unsure at all n locations
gccggnattcaggtcggatacgcctgctgggagctctactgcctcgaacacggcattcagcctgatgggcagatgccaagtgataagactgnnggtggangtgatgatgctttcaacaccttcttcagtgaaacnggggctggaaagcacgtgcctcgtgcgatttttgtagatctcgagcctactgtgattgatgaagttagnactggganataccgccanntatttcatctgag

SEQ ID NO: 280193 - DNA, 280 bp, Glycine max
gtgggatgagaagctttgttatcagattctgcacgagtacaagattcacaatgcagagatccttttccgtgaggatgctacagtggatgatctcatagatgtcattgaaggaaaccgaaaatacatgaagtgtgtatatgtctacaacaagatagatgttattggtattgatgatgtggacagattagcccgtcaaccaaattctgttgtcattagctgcaatttgaagctgaacttagacagactgcttgcaaggatgtgggatgaaatgggtctggtt

SEQ ID NO: 280194 - DNA, 359 bp, Glycine max
  unsure (1)..(359): unsure at all n locations
cttcgccgctgtgntcaccgccgcgatggcgtngcngcncacanacgccgacgacatcntngatccgtcangnntgtgcctagatgttggacgnaancnggnaangangacnacnctggctgnacgccgagcaaccacttcgcgagcttcaagggccaagttcgccaagacctacgccancaaggaggagcacganatcgcttcggcgtcttcaagtccaacctccgcagagccaggctgtacgccaagctcgaccccnccgccgtccacggcgtcaccaaattctccgatntaatccggccgagttccgccgccagttcctcggntcnaagccgctcngcttcncggcgcacgcccag

SEQ ID NO: 280195 - DNA, 345 bp, Glycine max
  unsure (1)..(345): unsure at all n locations
tgagatctttagttggttctagactccccacattcaccaaagctcaatctgaaagtctcaaaggttcatatgattttgnntggtatagattattacacctcaaatttcgtggaatatgctccaccaaccaccactaacaagacctatttcactgatatgctagccaaactttcttcgaccaggatggtgtacccattggcacaccgactcctctgagctggctctntatctatccggagggaatttataagctcatgacatacataagggacaatacaataatccaccagtgtacattaccgagaatggcgttgcggaatcanagaatgactcacttgcaatcat

SEQ ID NO: 280196 - DNA, 344 bp, Glycine max
  unsure (1)..(344): unsure at all n locations
gtcactcacttggaggaggcacgggttctggcatgggaacactgttgatatcgaagatcagggaggagtacccggacagaatgatggcttactttctctgtttttccatctccaaaggtctctgacacggttgtggagccttacaatgctactttgtccgttcaccaactagtggagaatgcgatgagtgcatgcactcttgacaatgaagcactctatgacatttgcttcaggaccttaaanctcaccactcctagttttggtgatctgaaccanctganatctgcaacaatgagtggagtgacctgttgcttgaggttccctggacaactgaactccgacct

SEQ ID NO: 280197 - DNA, 340 bp, Glycine max
  unsure (1)..(340): unsure at all n locations
gttcgcaccaaattttcctcccaaaatgtcaggccgtggaaaaggtgggnagggtttgggaaagggaggagctaagnaggcanaagaaaggttcttcgtnanancattcaaggaatcacgaaacctgcgattcgtaggttagcgagaagaggtggcgtgaagaggatcagtggtttgatttacaggaaaccagaggagttctgaagatattcttggagaacgtgattcgcgatgctgtaacctacactgagcacgctaggaggaaaactgttactgctatggatgtcgttatgctctcaagagacagggaaggacctctatggcttggaggtaaagatag

SEQ ID NO: 280198 - DNA, 344 bp, Glycine max
  unsure (1)..(344): unsure at all n locations
ttgcacctcgcaaccatgatcatcccggagaagaaccgcaaagagatctgcaaatacctcttccaanagggagtttgtttcgcgganaaggncttcaatttgngccaagcaccctgagatcgacgtgccgaatctgcaggtgattaagctgatgcagagtttcaagtctcgcgagtacgtgaagaaacttttgcttggatgcactattactggttcctcaccaacgatggcatcgagtttctcagaacttacctnaancttccttccgaaattgtccctnctactttgaagaagcaagccaagccacctggnaggcnctttggaggccatccggtgatcgccct

SEQ ID NO: 280199 - DNA, 345 bp, Glycine max
  unsure (1)..(345): unsure at all n locations
gcagtattgcatgaaccatccagaaganatgagtaaactatcaaaattgaaggctcaaataactgaggtcaagggggataatgatggacaatattgagaaggttttggatcgtggagagaagattgaactgctggtggacaaaacagaaaacttacagttccaggctgacagcttccagaggagggcaggcagctgagaaggaagatgtggctgcagantctccaaatgaagctgatggtgggaggaggaatccttatcttaattataattctgtgggttattgcttgtgggggttcaaatgttgatggagacactngaagtttaagtctgtataaggcaanaga

SEQ ID NO: 280200 - DNA, 345 bp, Glycine max
  unsure (1)..(345): unsure at all n locations
accattctttctattccacaaggactgagcacatcttcccttcggagattgtgcaaagcctgatccagaantgaanggagacactgaaangaattttgctgagctattggcagaagaactcaagctacgggagaaccaagccgtggaaaatcagcaacatgctgacatggcattgcttgagcaaagaagattgcatctcagtatcagaaggaagcagacaagtgcnattcagggatggaaacgtgcgaggaggctagggagaaggctgagttgacattagtcacgcagaagaagctaactgcattatgggaacttagagcgcgcaaganagggtggaaggaaggg

SEQ ID NO: 280201 - DNA, 340 bp, Glycine max
  unsure (1)..(340): unsure at all n locations
atggaagcccaagtttaccattgagaaaganaaacagaagngctgaagatgaggctgcaactggttcagatggtattgcnggcttcccagaagaaggtatttgacctcttgtacaagattgcagacattcccttcctgagcgaccacaaatctaagatatacgatctcattgagaaagctagaaacagccaaatctcactattggaattcttgtagcggttgtggttgtcttcgtgtcaattttcttcaggctcatatttggtggcaagaaacctgcaaaggtggagaagaaaccagaacgcacagaagttccaataaccaaggtggtgcagagaatgaa

SEQ ID NO: 280202 - DNA, 337 bp, Glycine max
  unsure (1)..(337): unsure at all n locations
gccttatgatagatttgcttgccactatgacccanatggtcccatttactctgancgtgaacgacttcaaatatatatatcagatgcaggagtncttggcagtatgctatggccttttccgtcttgccatggcaaaaggacttgcctgggtggtgtgtgtttatggagttccattgcagtggtcaatggatttttggtgttgattacattcttgcagcatactcaccctgcattgccacattacacttcctctgagtgggactggttgagaggagctttagcaacagtgggatagagatatggaatcctgaacaaggtcttccataatattacagac

SEQ ID NO: 280203 - DNA, 343 bp, Glycine max
  unsure (1)..(343): unsure at all n locations
ggaaantcntaanagctcacaacattgacatggtgactatcnacccagcaatggtgataggacctctctcncnaaccangtnccnaaanacaagtnctggctgtcaattntaaacgtaatnaatggtgcacaaacatttccaaatgcatcttttggttgggtcaatgtgaaagatgtngcaaancccatattctagcatatgagaatgcttcanctaatggaaggtattgtttggtggagagagtggcacactactcagaaattgtgaagatttacgtgatttgtacncgacatgactacttccagagaagtgtgcagatgataacccanatggccaatatat

SEQ ID NO: 280204 - DNA, 343 bp, Glycine max
  unsure (1)..(343): unsure at all n locations
aggagtttccagtacagntcatcgnangaagaatactgtcttctttaagagatcanaaaaattgtgaagatcataatggcancgaggtagaacctcaagaagaaaaccagtcaaaggcttcccacatagcccaattccttccaacttctcgacntattgtccagttttcaaatggcaaggtcctggaccaaatgcacgtattgtatacattgatggggcatttgatctcttccatgccggccatgttgagatacttaagagggctagggagcttggtgactttcttctagttggtatccactcagatgagacagtgagtgagcatagaggaaatcactatcca

SEQ ID NO: 280205 - DNA, 336 bp, Glycine max
  unsure (1)..(336): unsure at all n locations
ctgggttgcagggaaaaaganaaataaaatgggttccgataataccaacttggagttcttgaaggagatcggtttggggctcntcccntnattggttcttacattaatggccaatggaaagccactggttcttctgtcacttctgttaatccttctaacaatcagagcatagctcaatgactgaagcgactttgcaagattatgaggagggattgcaagcttgcagtgaagcagccaagacatggatgactattccggcaccgaagagaggtgagattgtgagacagattggtgaagcattgagggccaagttggatccttgggtagactggtgtc

SEQ ID NO: 280206 - DNA, 332 bp, Glycine max
  unsure (1)..(332): unsure at all n locations
tgaatcactcattcatatttggttttaagaaaggcactgacttaagctaccatcaagtctttttntttagttttgtcttgggcagcattggcantaaccagtgtcctagcgaatctagacatgcaaatagatccagagacaaaagaatacaaagcgttcactgaacttttgccactatcctggttctagttctgattgccattttattatgcccattaaacatcgtttatcggtcaagccgtatnntcttccttacatgtctgattcactgcatctgtgctcccctgtacaaggtacactgccagattctcatgggcgatcagttactaggc

SEQ ID NO: 280207 - DNA, 334 bp, Glycine max
  unsure (1)..(334): unsure at all n locations
gaatatnaattcacttgcccggacngtcctggtcaatgcagatggtattatagagaaaacattcttgtggggtaggtactctatggaaatgtccgctgtcacnnacaaggactgggntttcactgatcaagcattacctaatgatcttgtaaagagaggagttgctgttaaggcccatctgctccccatggagttcgtcttttgattgaggactatccntatgcttctgatgggctagagatatgggatgccatcaagtcctgggtgcaagaatatgtctcattctactacaagtcagatgaggaactccaaaagacctgaactccaagcttgg

SEQ ID NO: 280208 - DNA, 334 bp, Glycine max
  unsure (1)..(334): unsure at all n locations
cttcccaaccactactactcnctcactgcagatctcaattgcatcgctgtccatggctaccatcgttagcatcaaggcccgccagancttcgacagtngtggcaatccaactgtcgaggtgganntgacttgcnccgacngtacttntgncagagctgctgttccaagtggtgancatntgggatttatgaggcccttgaattgagagatggaggatctgactaccttggaaagggtgtatcaaaggntgttgacaatgtgaacaccgtcattggccctgctttgattggcaaggacccaactgagcagactgctattgacaacttaatggttc

SEQ ID NO: 280209 - DNA, 335 bp, Glycine max
  unsure (1)..(335): unsure at all n locations
cacaaggcngaagaagatggtgttgcttgtgttgagtacatagctggtaaggttggtcatgtggattatgacaaagtccctgggcgttgtctatacaatgcccgangttgcatctgttgggaagacagaggagcaggtgaaggaacttggagttgaataccgtgttggcaagtcccattcctggctaatagcagagctaaggcaattgacaatgctgaaggactggtgaagatattggctgaaaaggagacagacaagatattggggagtgcacattatggcgcccaatgcaggagagcttattcatgaagctgcaatagcactacagtatgatg

SEQ ID NO: 280210 - DNA, 336 bp, Glycine max
  unsure (1)..(336): unsure at all n locations
atcgagananctaganacagtgtgatgannatgaaggnccttnnnttcttcgttgctnacaattttngtagcatggcaatgncatgcgtacgagatgtnccctctccgaatgancactggctatngtgcnccgtactccggaggtganatgcgcaagttggaggcttgctgtggagcacacaacatcnttggctttgagaccattcctgaagagtgcgttgnagcaacaaaggaatacatccatggcgaacaatatagatcagactccaaaanagtnaaccaacaagcttacttttatnncaganagctcgaagtcnntccnaaggnnacatttgt

SEQ ID NO: 280211 - DNA, 337 bp, Glycine max
  unsure (1)..(337): unsure at all n locations
atanantgtgggtgggtgtanttaagcagagagagatgccattgctcgtatccaattggcgctaaatnctttatncttctccacggcncncnaagtccaagcaaatgtcccgtcaagctcccggcgtcgtcaaaacgcgcctgtggggcgtcgttttcgacatggacggcaccctgaccgtcccggtgatcgattttccngcgatgtacagggcggtgctgggcgacgangagtacctgaggctcaaagcggaaaacccttccggcatcgacattttgggccacatcgacggctggccacctcacaaacagcgcaaggcattcgacgcnattgctga

SEQ ID NO: 280212 - DNA, 299 bp, Glycine max
  unsure (1)..(299): unsure at all n locations
ggatcgagataactagaaacagtgtgatganaatgaaggtccttgttttcttcgttgctacaattnnggtagcatggcantgccatgcgtacgatatgttccctctccgaatgaacactggctatggtgcccgtactccggaggtgaaatgcgcaagttggaggcttgctgtgaagcacacaacatctttggctttgagaccattcctgaagagtgcgttgaagcaacaaaggaatacatccatggcgaacaatatagatcagactccaaaacagttaaccaacaagcttacttttatg

SEQ ID NO: 280213 - DNA, 334 bp, Glycine max
ctcccttcttccttgtctctttctcttctcaacaacatgcagatcttcgtcaagactttgactggcaagaccatcaccctcgaaggtcgagagtagcgacaccatcgacaacgtcaaggccaagatccaggacaaggaaggtatccctcctgaccagcagaggttgatttttgtggtaagcagctggaagatggtcgcactcttgctgattataacatacaaaaggaatcaacacttcacttggtcttgaggctcaggggaggaaccatgattaaagtgaagactctaactggaaaagaaattgaaattgacattgagccaactgatacaatcg

SEQ ID NO: 280214 - DNA, 332 bp, Glycine max
  unsure (1)..(332): unsure at all n locations
agngaagacgagtccgtggcggtgaactccgtcttcgagtttcacaagctcctcgcccgcaccggcgcggtggaganagtctctccgtcgttcggcagattcggcctgagatcctcaccgtcgtcgagcaagaagcgaaccacaacggactgagttttgtcgaccggttcacgagtcactgncactattattcaactctattcgactcgctggagggttcgcctgtgaacccgaacgacaaggccatgtcggaggtttacttagggaagcaaatctgcaacgtngtggcgtgcgagggaatggaccncgtgganaggcacgagacgctgaac

SEQ ID NO: 280215 - DNA, 325 bp, Glycine max
  unsure (1)..(325): unsure at all n locations
ccacaggacatttgcaggagatctcttgacatcgaacgccctacatncaccaantgaacngtctcgtttnccaggtgatatcatccctcantgcctccttgaggtttgatggagcactgaatgttgatgtgactgagtttcaaaccaacttggttccttacccaagatccatttcatgctttcctcgtatncccctgttatctctgccgagaaagcataccatgagcagctttccgttgctgagatcaccaacagtgccttcgagccatcctccatgatggcaaagtgtgacctcgccacggcaagtacatggcgtgttgtttga

SEQ ID NO: 280216 - DNA, 333 bp, Glycine max
agtatgtatgggaatcaaaagctgatggagcatttgcaatttcagaagatacatggaatgaacctctagggcgtggaactgagattagattacacctcaaggaagaggctggggagtacttgcaggagtctaaactgaaagaattggtgaagagatactctgaatttattaattccctatctatatttgggcaagcaaagaggttgatgtggaggttcccgctgatgaagatgattccagtgatgaagaggattcatctgaaagcagctccaaggaggaaagcgaagatgaagatgctgataaaagtgaagacgaagaaaaaaagcccaagac

SEQ ID NO: 280217 - DNA, 349 bp, Glycine max
  unsure (1)..(349): unsure at all n locations
tgctgatcgcaaggcagcaaggcgagctctgggactttatgtttggctggtttgctaatcccattacatttggtgactatcctgagagtatgagatctttagttggttctagactccccacattcaccaaagctcaatctgaaagtctcaaaggttcatatgattttcttggtataaattattacacctcaaatttcgtggaatatgctccaccaaccaccactaacaagacctatttcactgatatnctagccaaactttcttcgaccaggaatggtgtacccatgggcacaccgactcctctgagctgggctctttatctatccggagggaatttataagctcatga

SEQ ID NO: 280218 - DNA, 343 bp, Glycine max
  unsure (1)..(343): unsure at all n locations
cacaacacaacaccttttccttttcccttccgttggtgccattcgtgcagcaccggatcctctcatttctccggcgataactctcccttttccggcgaattcaccgcttcctcgatatgaatcccgagtatgactatctgtncaagctccttctgattggagactctggtgttggtaaatcatgccttcttctaagatttgctgatgattcatacattgagagctacataagcaccatcggagttgattttaaaattcgcactgttgagcaggatgggaagacaattaaactacagatttgggatactgctggacaagaacgatttaggacaataactagtag

SEQ ID NO: 280219 - DNA, 124 bp, Glycine max
atcgagataactagaaacagtgtgatgaaaatgaaggtccttgttttcttcgttgctacaattttggtagcatggcaatgccatgcgtacgatatgttccctctccgaatgaacactggctatg

SEQ ID NO: 280220 - DNA, 125 bp, Glycine max
  unsure (1)..(125): unsure at all n locations
gagagattccgttgccctgaagnnccttttccagccttctnngattggaatggaagctgcnggaattcacgagaccacctacaactccatcatgaagtgtgatgtggatattaggaaggatctgt

SEQ ID NO: 280221 - DNA, 344 bp, Glycine max
  unsure (1)..(344): unsure at all n locations
gagagagagtgagggagagagagtgaggcntcttctacccagatttgtttcattttaaccaaagaagaatctctcacaaatggcgtcaagagcaattgttcaacaacaacaagccagaggtgaagcagtagtagggggaggaaaacagcagaagaagaacggtgttgcggatggaaggaaccgcaaggcattgggtgacattgggaatttggccaatataagaagtgccgttgaagtcaagccaaatcgccctatcacaaggagttttggtgcgcaattacttgccatgcacaagcggcacagctgctgggataacaagaagcaacttgtgctatgtngctgtc

SEQ ID NO: 280222 - DNA, 357 bp, Glycine max
  unsure (1)..(357): unsure at all n locations
aaaaaaacaagtagtgttccgaaaaganggctcagcaggaagtggtagaagggttcaagttcgaacagaggcacgggaaagagcgngtgagagtggcgcgcgtgtggaagacgaggcaggggcagcacttcgttgtggagtggcgcgtgggcatcactctcttctcagactgngtcaactcgtatctccgcgatgacaactctgacatcgttgctactgataccatgaaaaacacagtgtatgcaaaagcaaaggaatctcagacatactctctgctgnggactttgctatttgcttgctaagcactttgtatcattttacaagaaggttactggtgctatgntaatattgtggaaa

SEQ ID NO: 280223 - DNA, 341 bp, Glycine max
  unsure (1)..(341): unsure at all n locations
gtggttttgataagaaaatcctctttatttgtggggattacatggaagattatgaggtcaaggttccttttcagtcccttcaggctttaggatgccatgttgatgctgtttgcccctcaaagaaggccggtgacacttgcccaaccgctgttcacgattttgaaggggatcaaacttacagtgagaaaccaggacatacttttgctttaacagctacctttgatgatgtggatccctcaggttatgacgctcttgtcatccctggaggtcgagcacctgagtatttggcatngaacgantcagtcattgccttgggaatattctttgaaaacaagaagcca

SEQ ID NO: 280224 - DNA, 338 bp, Glycine max
  unsure (1)..(338): unsure at all n locations
gccagaggaaactctggtggaggcccgcagcgatactgacgtgcaaatcgttcgtctgacttgggnatagtggcgaaagactaatcgaaccgtctagtagctggttccctccgaagtttccctcaggatagctggagcccgcgggcgagttctatcgggtaaagccaatgattagaggcatcgggggcgcaacgccctcgacctattctcaaactttaaataggtaggacggtgcggctgctctgttgagccgcgccatggaatcgagagtccaagtgggccatttttggtaagcagaactggcgatgcgggatgaaccggaactgggtacggtncca

SEQ ID NO: 280225 - DNA, 340 bp, Glycine max
gggaggatgctgctgcttctgctaatgctgcagaggatagagaaaacaagttcctaactatggcaattgaagaagcatataaggcggttgaaagtggccatggtcgcccattaggtgcagttattgttcgaaacgatgaaatactttcaagctgtcataacatggttgtaagaaatgctgatcccactgcccatgctgagattactgctataagagaggcttgtcgaaagctgaatcaagttgaacttgctgactctgaaatctatgcttcttgcgagccttgtccatgtgccttagtgcaattcattttccaaattaagaactggttatggagtaaagc

SEQ ID NO: 280226 - DNA, 338 bp, Glycine max
  unsure (1)..(338): unsure at all n locations
attaattgcaagaatggcacttcgttgcttggtgatgtccctttctgttctcttcactcttggtcttgcgagagaaagccatgccagagacgaagatttttggcatgctgtttggccaaacactcccattccaagttcattgcgagatcttctaaagcctggccctgcaagtgttgaaatcgatgatcaccctatgcaaattgaagaaacacagtacccgaaaaccttcttctataaagaanaccttcatccaggcaaaacaatgaaagtacaattcagcaagcctcctttnaanaaccanggggtntnggncgggttaggggatttaaanncnctcc

SEQ ID NO: 280227 - DNA, 334 bp, Glycine max
  unsure (1)..(334): unsure at all n locations
ggtccagatagcccttcaggctatcagtgcaagcnacctaacacagtcacagtggatgactttgtgttctctggctttgtagctggaaacnccacaaacactttcaatgctgcattaacctccgcatttgttactgattttccaggtgtgaatggtcttggngtatctgtggcacggttagacatagccaaaggtggatcaatcccaatgcacacacaccctgctgccactgaacttctaataatggtggaaggtcaaatcactgctggtttatgacccactgcntttataccagacctgaactggagatattatggttttccacaagncagtg

SEQ ID NO: 280228 - DNA, 339 bp, Glycine max
  unsure (1)..(339): unsure at all n locations
gatggcttcttttcatatccaatattcattccttgtgcttgtgcttnctatggtgatcacattgatgaaccctaccaatgcaaccctctctccnnattnctatgataaagtttgccctcaggcattgccagttataaagtcagtggttcaacgagcaattatccgtgagcgacgcatcggagcatctcttcngcgctgcatttccatgattgtttcgtanntgggtgtgatggatcaatattgctagatgacacccgaaacttcactggcgagaagatgcatgccaaatcttaattcagtcagaggttttctgggtgatgaaatcaaagtgcggtggaa

SEQ ID NO: 280229 - DNA, 348 bp, Glycine max
  unsure (1)..(348): unsure at all n locations
gtgctgttggcagatatggcacacatcagtggattagttgcagctggtgttatnncttcaccttttgattatgcnaatgtagtgactanccacaactcacaaatcactcngtggccctcgcggagtatgatctncttcaggaagggggtaaaagaaattaacgaaaaaggagaagaggtnatgtatgactatgaagacaaaatcatagannnnngtttcctggactgcaaagtggtcctcacttccactctattactggtttagctgttgcattgaagcaggctacaactccaaactatagagcataccaagagcaggttctccgtaattgctcaaaatttgcacagg

SEQ ID NO: 280230 - DNA, 198 bp, Glycine max
gggattgactttcagaggaattcccaacagtatctctatctaaggaccctatggttgcttaagtactgttcctggttttaaataaatgtgaaattgaaggaaccagattccttaatcagttgtgtatgcttaagtcatgtatttggagtggctgaatgtatttgtatttgtcattaataaagagagttgtgttagtat

SEQ ID NO: 280231 - DNA, 339 bp, Glycine max
  unsure (1)..(339): unsure at all n locations
gtgtaacccaaaaccctagcggcgccngctttcttcgttcgtcttttgcatcagccatcaggatggagtctcaggtgaagcatgctcttgttgtcaaagttatgggtcgtactggatccagaggacaggtgactcaggttagagtgaagtttttggatgatcagaaccgtcatatcatgaggaatgttaaaggaccagtgagagaaggagacattctcaccctactcgagtctgaaagggaagcaagaaggttgcgctagagggtatttttttctngatctttatggtagttagttggtgctaaaggttatagcaccctgtctgttgtcttggattatt

SEQ ID NO: 280232 - DNA, 332 bp, Glycine max
  unsure (1)..(332): unsure at all n locations
ctacgacatttgcaggagatctcttgacatcgaacgccctacctacaccaacctgaaccgtctcgtttcccaggtgatatcatccanacactgcctccttgaggtttgatggagcactgaatgttgatgtgactgagtttcaaaccaacttggttccttacccaaggatccatttcatgctttcctcgtatgcccctgttatctctgccgagaaagcataccatgagcagctttccgttgctgagatcaccaacagtgccttcgagccatctccatgatggcaaagtgtgaccctcgccaggcaagtacatggcgtgttgttgatgtaccgg

SEQ ID NO: 280233 - DNA, 338 bp, Glycine max
  unsure (1)..(338): unsure at all n locations
cttcaacataacatgcactatacaattgcctcatgaatcatcattagtcagggtttatcctctaagaaaataaacatactatagcaatgagtgcgtccaggttcatcaagtgtgtcactntgggtgacggtgccgttggcaagacttgcatgctcatctcctacaccagcaacacttttcctacggactacgtgccaactgtctttgacaatttcagtgcaaatgtcgttgtggatggaagcactgtgaatcttgggttgtgggatactgctggccaagaagattacaatagattgagaccttntnctatcgtggagcagatgtattcctgcttgctt

SEQ ID NO: 280234 - DNA, 339 bp, Glycine max
gttgtcgagcctgccgatatcatacagaagactggattagcttatccacacacatctcactgtcttgcttctggtgatataatgatctcgtgtcttggagataaagatggaaatgctgcaggaaatggatttcttcttcttgattctgagtttaatgtgaagggaaggtgggagaaaccgggtcacagcccactatttgggtatgacttttggtaccaaccacgtcacaataccatgattagcacatcatggggtgctcctagtgcttttacaaaaggtttaacttacagcatctctctgatggattatacgggaggcatctccatgtatatagctggc

SEQ ID NO: 280235 - DNA, 347 bp, Glycine max
  unsure (1)..(347): unsure at all n locations
gagaaattgagtttctgagataaccacttttctctttgattcatcaatggcaaccgcgaggaccgtgaaggatgtttcgcctcacgatttcgtgaaggcttacgcctcccatctcaagcgttccggcaagatggagcttcctgagtggactgatattgtaaaaacagcaaaatttaaggaattggctccatatgatcctgactggtatatgtagggctgcctcnatggcaagaaagatttatttgagaggcggtcttggtgttggggcttccagangatctatggtggnaacaagagaaatngaagccgacccccacatttctgcaagagcantggggtattgcaaa

SEQ ID NO: 280236 - DNA, 334 bp, Glycine max
  unsure (1)..(334): unsure at all n locations
gccttttcagggaaggaccctaccaaggttgacagnagtggtgcctatattgtaaggcaggctgcaaagagtgtcgtggcaaatggccttgctagaaggtgcattgtgcaagtttcctatgccattggtgtccctgagcccttgtcagtgtttgtggacacttatggaactgggaagattcctgacaaggagattctgcaaattgtgaaggagaatttcgacttcagacctggaatgatcaccattaacttggaccttaagaggggtggtcataggttcctcaagacagctgcttatggacactttggaagggatgatgcagacttcacctggg

SEQ ID NO: 280237 - DNA, 332 bp, Glycine max
  unsure (1)..(332): unsure at all n locations
tggctcttcttggatttcttcngggacttttctacatgatctcacatgtcaaggggtatggttttggaggttggaccaatgcacatgccaccttctatggagggggtgatgcttctgggacaatgggtggggcttgtggttatggaaatctgtatagccaaggttatggaactgatacaacagcactgagcactgcactgttcaacaatggcttaagctgtggtgcatgctttcaaattaaatgtgcgaatgacccacaatggtgccttcctggctccatcatagtcatgccacnaatttctgtccacctggtggttggtgtgacctcccaa

SEQ ID NO: 280238 - DNA, 344 bp, Glycine max
  unsure (1)..(344): unsure at all n locations
ctacaacgcctcgaatccacacagttctactctnccgctctaaaccctctctctgctctctctctcgatcnatcatggctttgcccaatcagcaaancgtggattaccctagtntcaaactcgtcatcgtcggtgacggcggtacaggaaagacaacgttcgtgaaaaggcatcttaccggtgaatncgagaaaaaatacgaaccgaccattggagtggaggttcacccattggatttcttcacaaatgcgganagattcgcttctactgttgggatactgctgnacaagagaagtttngtggcctcagagatggatattatatccatgggcaatgtgcgatta

SEQ ID NO: 280239 - DNA, 331 bp, Glycine max
  unsure (1)..(331): unsure at all n locations
cacgatgcacaaagatcataaatccaaactctgaagatgccaaatatgttatcaatgtgaagcagatagcaaagtttgttgttgggctaggagacaaggtttcccccactgacattgaggaagggatgcgtgttggggtngatagaaacaaatatcagattcagattcctttgcctccgaaaattgatccaagtgtaaccatgatgacggttgaagagaagccagatgtgacatataatgatgttggcggttgtaaggngcanattgagnngatgcgtgaagttgttgaacttcccaggtttcnnctggggaatttttcaacttggggttg

SEQ ID NO: 280240 - DNA, 199 bp, Glycine max
  unsure (1)..(199): unsure at all n locations
ctcattaattgcaagaatggcacttcgttgcttggtgatgtccctttctgttctcttcactcttggtcttgcgagagaaagccatgccagagacgaagattnctggcatgctgtttggccaaacactcccattccaagttcattgcgagatcncctaaagcctggccctgcaagtgttgaaatcgatnatcaccctatg

SEQ ID NO: 280241 - DNA, 332 bp, Glycine max
  unsure (1)..(332): unsure at all n locations
atcttccngtccaagttctttgaataanagtctgaatgtgtcatctctgcactacaatatttgtgattctgaccaagttggttctatttgtttgatggccatcttgcacgtcctgatcttattgtgttcaagtgacagacaaatcagaacagggaagagagatttgaaatgtaaatgccaagtctcgagtgaaaagtacagtccagttttagtgatctctttaatttatttgttcatagattaatatgatggtgtatgattgcttttctatttattgggccattttgtgttgtaccctgttgttgtgtttgcaataagtattagtaataaag

SEQ ID NO: 280242 - DNA, 339 bp, Glycine max
caccaatccgcaaagtgcaaatttctaatctttcacgtattgggttcttctcttttccctcttcgtctccgatcgatccaattctcttcccatggctacgatcggacacaacaatctcaatgccaaattggttcttctcggggacatgggtgctgggaaatccagcctcgttttgcgctttgtcaagggtcaatttctcgaatttcaggaatcaacaataggggcagcgttcttttcacagacgctggcagtaaatgatgcgacagtgaagtttgagatttgggacacagcaggacaagagaggtaccatagcttggctcccatgtattacagaggcgc

SEQ ID NO: 280243 - DNA, 333 bp, Glycine max
  unsure (1)..(333): unsure at all n locations
gttgatcgagataactagaaacagtgtgatgaaaatgaaggtccttgttttcttcgttgctacaattttggtagcatggcaatngccatgcgtacgatatgttcnctctccgaangaacactggctatggtgcccgtactccggaggtgaaatgcgcaagttggaggcttgctgtggaagcacacaacatctttggctttgagaccattcctgaagagtgcgttgaagcaacaaaggaatacatccatggcgaacaatatagatcagactccaaaacagttaaccaacaagcttacttnnatgccagagacctcgaagtccatcccaaggaca

SEQ ID NO: 280244 - DNA, 333 bp, Glycine max
  unsure (1)..(333): unsure at all n locations
ctctttcgttctctctctnncactcgcgtctncgagtttcacancgaagtcgtaggagggnttcanaagatngagaacatgcnnagcttctggcaattgggcgatgaactccgtggacacncaaaagcntcggaggatcacaaatggttaatggttgcttcgaaattggcggaacagacaagattgaagggggagcgtgtgaacaaccntgatctttcaaagggccccattgaaacaaggtcnagggatnaatttgggttccaggaagagaacaaatttgattctcttaacttaagcatcntgaanctggactctaaatttactgagnatgtg

SEQ ID NO: 280245 - DNA, 200 bp, Glycine max
  unsure (1)..(200): unsure at all n locations
ctctgatgaatttcctaagtaacattcttagggaagaaggtggctttgattacaagaaagcaattgtagattcaattgtgattcttattagagatatccctgangcnaaggaaagtgggttgcttcatctttgtgagtttattgaagattgtgaattcacttatttgtccacacaacatacgngnntcacnannngggaa

SEQ ID NO: 280246 - DNA, 344 bp, Glycine max
  unsure (1)..(344): unsure at all n locations
gtagccagagagtgatacaatacagagtgcgttgntgctccttcgccacaactccctgccaacatgggtatctccaganattctatgcacaagaggcgtgccactggtggcnagaagaaggcatggaggaagaagagaangtatgagcttggtcgccagcctgctaacactaagctgtcaagcaacaagacagtcaggaggatccgggttagaggtggaaatgtgaagtggagggcactgagattggatactggaaantactcctggggaagtgaagctgtnactcgcaagactcgtatactagatgtngttacaatgcctcaaacaacgagcttgtgcgtact

SEQ ID NO: 280247 - DNA, 334 bp, Glycine max
  unsure (1)..(334): unsure at all n locations
atctctatctacgaaggagcggaataaaacccttctctctgtgattaagagaatggcttcagatcggaaacttcacacttttgaggaggtggcaaagcacaaccagaccaaggattgctggctcatcatttctggcaaggtgtatgatgtcacccctttcatggaggatcatcccggaggtgatgaggttttgttatctgcaacagggaaagatgcaaccaatgactttgaagatgtggggcacagtgattctgctagagatatgatggaaaaatactacattngtgagattgatgcatcaaccgtcccataaaaccggactacattccactca

SEQ ID NO: 280248 - DNA, 332 bp, Glycine max
tacacccaagaggatattctttttgaagaaaccgctaagaaagagggtttgacctggtcagttcacagaccccaagtaatctttgggttttcgccttacagtttaatgaacatgattgggacgctcagcgtgtacgccgcaatttgcaagcacgagggtgttccgttgagattccccggcacgagaggcgcgtgggagagttattcttgtgcctccgatgcggatttgattgcggacagcacatttgggccgcggttgatccctacgcgcggaacgaggcgtttaactgctccaatggagacgtgttcaggtggaaccatctttggaaggtc

SEQ ID NO: 280249 - DNA, 305 bp, Glycine max
  unsure (1)..(305): unsure at all n locations
attaagctggatctggaggaaaacaagattgttgattttatcaaatttgatgttgggaatgtagttatggtaacaggtgggagaaacagggggcgtgttggagtgatcaagaacagggagaagcataagggtagctttgagacaattcacgtgcaggattccactggacatgaatttgctactcgcatgggcaatgtgttcacnattggcaagggcacaaagccatggatatcatgccaaggtaaggtataactatcatcatgaagaactaggaaagatgcgccacaacactctctaacccnttg

SEQ ID NO: 280250 - DNA, 202 bp, Glycine max
  unsure (1)..(202): unsure at all n locations
cactcattaattgcaagaatggcacttcgttgcttggtgatgtccctttacgttctcttcactcttggtcttgcgagagaaagccatgccagagacgaagatttttggcatgctgtttggccaaacactcccaactccaagttcattgcgaganccttctaaagcctggccctncaagtgttgaaatcgntgatcaccctat

SEQ ID NO: 280251 - DNA, 203 bp, Glycine max
cttatgggggcttaatcctgaaccgtccaactctagccagaaggtttatcccagctgaaggaaccccagagtatgatgagatggtgaagaatcctcaaaaggcttatctgagaacaatcacacccaagtttgagacccttattgatctttcagtgatagagatattgtcaaggcatgcttctgatgagatataccttggagag

SEQ ID NO: 280252 - DNA, 328 bp, Glycine max
  unsure (1)..(328): unsure at all n locations
gtctatattcctcgtggtgtctctgtnccagcactcgacaaagnggnactntgggaanntnnanctaagaaaattggtgaaggtgaccttntaactggtgganatttatatgctactgtntttgagaacagtctaatgccaacaccatattgcacttcctcctgataacatgggaaanattacctacattgcaccacctggccaatattccttacaggatactgtattggaacttgagtttcaaggtgtcaaaaagaaattcactatgcttcagacttggcctgtacgtacacccangcctgttgcatcaaaacttgcagctgatact

SEQ ID NO: 280253 - DNA, 329 bp, Glycine max
  unsure (1)..(329): unsure at all n locations
taagcttgctactgagtttccacactgcataccttangtcttccgaattcgaagttaatttgcaagatggctaaggaaaaggctcagatcaacattgtggtggttggtcatgtggaccctgaggaggcaaccaccattaacgagctgaagaagcctgttgtggagaaagaagctccagggcatgccatatgagggcatgcacgtacggcctcggaggggaaccagaaaattatgttaacaaaataatctggaaccctaatgtatcagtgtcatcatcagtgtgtagtttaagctagctttgctatggttacgttctttgagatgagagt

SEQ ID NO: 280254 - DNA, 202 bp, Glycine max
  unsure (1)..(202): unsure at all n locations
cagaagagagctcttgtgataggaggaggcatagccaactttactgatgttgctgccacatttagtggtataattcgggcattgaaggagaaggagtcaaaattgaaagcagcaaggatgcacatctttgtgaggagagggggtcccaactaccagaagggtctagctttgatgcgagcgcttggagaggatatggncancc

SEQ ID NO: 280255 - DNA, 345 bp, Glycine max
  unsure (1)..(345): unsure at all n locations
gacaatgtatgcacactcagggttcgcatgccaatttcatctgacctgagcaacccacgcaacttcataacgaagatttctcgttanaacaaagtagtcaacattccaaacagtatgactatngggcgatgaacttctgcctatctcaattgagatggcaaagaggaacttgaggggaatctggaacttcacaaatccaggggttgtgagccncatgagatccntgagatgtacagggattacattgaccccaacttcaagtgggcnaactncacccttgaagaacaagcgaaggtgatcgttgctcctcgaagcaacaacgagatggatgcatccaattgaaga

SEQ ID NO: 280256 - DNA, 336 bp, Glycine max
  unsure (1)..(336): unsure at all n locations
attggaaactatgaaggcattccttgtaactatatatcccccttgcaaaccctaacagccttagttcctacgagctatgctgccggctgtcccaatgtgcaatgtgcgaatgcagagttagatgatgccacacagatagcagcatctgcagatgcaacggtgattatagttggtgcaagtctagctatagaggcagaaagtcttgacagaattaacattcttcttccaggacaacagcaacttctagtgagtgaagttgctaatgcatccaagggacctgtgattctngtcataatgtctggtgggggatggacgtgtcctttgcnaaatctaang

SEQ ID NO: 280257 - DNA, 333 bp, Glycine max
  unsure (1)..(333): unsure at all n locations
cttatgggggcttaatcctgaaccgtccaactctagccagaaggtttatcccagctgaaggaaccccagagtatgatgagatggtgaagaatcctcaaaaggcttatctgagaacaatcacacccaagtttgagacccttattgatctttcagtgatagagatattgtcaaggcatgcttctgatgagatataccttggagagagggagactccaaattggactactgataagaaggcattagaagctttcaaaaggtttggaagcaaactgactggaattgaaggaaaaatcatgcaaggaacagttgatccaagnctgagaaccggntggg

SEQ ID NO: 280258 - DNA, 326 bp, Glycine max
  unsure (1)..(326): unsure at all n locations
gcttaacctctctcattccccatttcctcacctccttcaaccgctgctaaattctagggttccgaaatggacgctggcggaaagatcaagaagggcgccggaggtagaaagggcggcggcccaaagaagaagccggtttcaaggtccgtcaaagccggtctccaattccccgtcggaagaattggccgttatttgaagaaaggaaggtacgctcagcgtgtcgntaccggtgctcccntatacttggctncaantctcgaatnactagntgccaagtgttaagttggcnngnaatgccgntgggacaacangangaacnggttntt

SEQ ID NO: 280259 - DNA, 328 bp, Glycine max
  unsure (1)..(328): unsure at all n locations
attaaggnaaaagggcaatgcattagaagttgttttcatctcaagtgacagagatcaaacctcctntgatgaattctttgcgggaatgccatggttggcacttccctttggggactcgaggaagaaattcctgagtcgcaaattcagggtatctggcatccccatgcttgtggccattgcatcaagtggtcagacattgacaacaaaagctcgagatctggtttcactctatggagcagatgcatatcctttcaccgaggagagnataaaaganatngagacagaacaagaagagactgcaaaggggtggncggagaagctgaagcat

SEQ ID NO: 280260 - DNA, 343 bp, Glycine max
  unsure (1)..(343): unsure at all n locations
ctacattgcaacaccgcgatatgaacgatgcaaaatagtttcagatacgtcgcgttgattgattgatatgaagtggttgactttctggaactgcatatctatcctcgtgttgtcttttgctttcttcttcttctattgtcacacatacacatctactccttccctcatggctgagcaatcttccaagtccatttacgatttcacagtcaaggacatcagtggaaatgatgtgagtctgaataattacagcgggaaggttctactgattgtgaatgtcgcctcacaatgtggttgacacagacnaattaccaagaattgaatgtattgtacgagaagtaccaga

SEQ ID NO: 280261 - DNA, 350 bp, Glycine max
  unsure (1)..(350): unsure at all n locations
ttccaatatattccattctntctgtgtatttccctacctctcccttcaagatgcagatcttcgtcaagaccctcaccgngcaagaccatcacccttgaggtggaaagctctgacaccatcgacaacgtcaaggccaagatccaggacaaggaaggaatccccccggaccagcaacgtctcatttcgccggaaagcaacttgaggacggccgtacccttgctgactacaacattcagaaggagngtactcttcacctcgtcctccgtctccgtggtggcatgcagatcttcgttaagacactcacggcaagacnataaccctagagttganantccgacacatcgatacgt

SEQ ID NO: 280262 - DNA, 350 bp, Glycine max
  unsure (1)..(350): unsure at all n locations
cccaactcaatttttctctcaaccggcccaatttagcataagcccagcatggccaccgcaacagcagcagccacctcgtccttcatggggacgcgcctcctggaggcccactccggggcggggcgggtgcaggcccggttcgggtttggcaagaagaaagccgccgccccgaagaaagttccagggggtcgggctctagctccgataggcccctgtggtatccgggcgccaaggcgcccgagtacctggatgggagccttgtcggagactacggattcgacccatttnggctagggaagcccgccgagtactgcagttcgagttggactcgtggaccagaacttgngaaa

SEQ ID NO: 280263 - DNA, 350 bp, Glycine max
  unsure (1)..(350): unsure at all n locations
ggtttgtggtggaacaccaccacttcctagatcatggcatagctcttgcacaattgaagggtccaaattggttgtctccggcgggtgcacagatccgcncggtacttcttagtgacacatatttactggacctcacaacagataatccaacatggagagaaattccaacttcatgggcctccttctcggttggggcactcactctcagtctatgggaggactaagattctaatgtttggaggacttgccaagagtggacacttgcggctacgatcaggcgaggcttatacaattgacttagaagatgaacaaccacaatggaggcaactagaatatagcgcattcacagg

SEQ ID NO: 280264 - DNA, 350 bp, Glycine max
  unsure (1)..(350): unsure at all n locations
caaaacactcataacacaaagcacaaagcaaagctcatccttgagttaaaaaatggcagcagcttcttccatggctctctcatccccatccttggctggcaaggccgtgaagctgggcccatcagccccagaagtgggaagggtgagcatgaggaagaccgtcaccaagcaggtctcccaggaagcccatggtacggcccagaccgagtcaagtacttgggcccattctctggcgagcccccgtcctacctaaacggtgagttcccaggcgactacggctnggacactgctgggctttccgcngacccagaaaccttcgccagaaccgtgaatcgaagtgatccactccc

SEQ ID NO: 280265 - DNA, 346 bp, Glycine max
  unsure (1)..(346): unsure at all n locations
agggaataaacgaaaactgtctgttgcnattgcaatgattggagatcctcctattgtcatncttgatgagccatccacaggtatggatcccattgccaaaaggttcatgtgggatgtaatatctaggatctcaacaaggcgaggaaagactgcagtaattcttactactcacagatgaatgaagctcaagccttatgtancagaatagggataatggttggtggacgattacgatgcattggaagtccacagcatctaaaaacaagatttgggaatcatctggaactagaggtcaaacctactgaagtgagttctgcagacttgcaaaacctctgccaagctattc

SEQ ID NO: 280266 - DNA, 340 bp, Glycine max
  unsure (1)..(340): unsure at all n locations
acggaacaaatcctgctagtgcagctatgtgtggaatgaaaattgtctctgttggaactgatgccaagggaaacattaatatagaagagctgaggaaggctgctgaaacacacaaggataacttatctgcacttatggtaacatatccttcaacccacggtgtttatgaggaagtattgacgaaatttgcannattattcatgataatggaggccaagtatatatggatggtgccaacatgaatgctcaggtgggactcacaagcccgggttggataggagcagatgtttgccatctcaatctccacaagacatttgcatcctcatggaggagtggcctg

SEQ ID NO: 280267 - DNA, 347 bp, Glycine max
  unsure (1)..(347): unsure at all n locations
tgagagagtgantgagatagagagagacgnttcgcaaatctcaatcgaatntcaganaaatgagannnatcatnagcattcanataggtcangccgggatccangtcggaaactcntgntgggaantctactgcntcgaacatggcatccagnccgacggcatgatgccttctgctccaccttcggtgtagcccacgangccttcaacaccttcttcagcgaaancggatctggnaagcangtncnccgtgctgtcttcgtnganctcgnacncagcgtcatngangangnccgctgnggaacctaccgtcaactcttccactncgancaactcatntcnggnnagg

SEQ ID NO: 280268 - DNA, 325 bp, Glycine max
  unsure (1)..(325): unsure at all n locations
caaaacactcataacacaaagcacaaagcaaagctcntccttgagttaaaaaatggcagcagcttcttccatggctctctcatccccatccttggctggcaaggccgtgaagctgggcccatcagccccagaagtgggaagggtgagcatgaggaagaccgtcaccaagcaggtctcctcagaagcccatggtacggcccagaccgagtcaagtacttgggcccattctctggcgagcccccgtcctacctaaccggtgagttcccaggcgactacggctgggacactgctgggtttccgcagacccagaaaccttcgccaagaa

SEQ ID NO: 280269 - DNA, 340 bp, Glycine max
  unsure (1)..(340): unsure at all n locations
ggaataccaagattaccaccacanaagcaangggcggtatacttncngcgcttcttagcggcgacgcagcggcggcnncacgntcgccggagagttctacttctagantctcctccttccactcgtngccgcgctggcagctctacttcaacgagatcaaagataccgataagtcgttgtgatagatttntcggcgtcgtggtgcggtccttgcaaattcatagagccagcgattcacgccatggccgacaagttcaacgacgttgacntcgtcaagatcgacgtcgacgaattacctgatgtngcgaggagtncaggtgcagggatgcgacttcgtgtt

SEQ ID NO: 280270 - DNA, 344 bp, Glycine max
  unsure (1)..(344): unsure at all n locations
gttatttctcagcgcgtaaagcatggctttgttggtggagaaaaccacgagtggtcgcgagtacaaggtcaaggacctttcccaggccgacttcggccgcctcgagatcgagctggccgaggttgagatgcccggcctcatggcctgtcgnaccgagttcggcccntcccagccttcaagggggcccgcatcaccggctccctccacatgaccatccagcggcgccgttctcattgagaccctcaccgcccttggcgccgaggtccgctggtgctcctgcaacatcttctccanccaggaccacgccgccgccgtanttcncgcgacagtgcngccgtcttcgc

SEQ ID NO: 280271 - DNA, 343 bp, Glycine max
  unsure (1)..(343): unsure at all n locations
cacagaganaatggctgcggaaaacgttgttgagttcacagacttacccgtcaagaggccaagagaagaagaagaaggaaccaatggcgtctccaacgacgccgtttcagcgctccccaatgaccctcaataccctggnatctctgcggttattcccggttggttctccgaatcagcccaatgtggcccggggaggcacattccttgaagatggaaaagattttgtttcaagggaagtctgactatcagaatgtcatggtcttccagtcatcaacatattggaaagttcttgttttggatggagtcattcagcttacagaagggatgagtgtgcctaccaaga

SEQ ID NO: 280272 - DNA, 341 bp, Glycine max
ctcaaactgcccagttactgttttgcaagattactcagaaatcttccgtggcacaccagtcaaattcagcatacctgggataagccctggaatcatctttacaggtactccacttgaaatcgagttcgcagagaaaccttattgtgctgaatcctccaaatgggtggcgttgtggacaatgaaatccaaaaggcatgtgtgggtattggtggtcctgaaggtcatcctggtcaacaaacatttagtggcacatttagcattcagaaatataaatttggatacaaacttgtgttctgtatcactggctcaggcacttgtttagatattggaaggtttgatgc

SEQ ID NO: 280273 - DNA, 343 bp, Glycine max
  unsure (1)..(343): unsure at all n locations
ttcatcgattctctcccttctctttctctcngcncacaccagatgatggagacgacggcgaangaaaacgctgtcgttgcgccantctcggcgtngttgttggtggtgctactcgcggcgngtgtggtggtggaggctcaggagaactcggacgtgaagacgctggtgaacacatgcacgggaagaagtactgcgacaaaggatgggaatgtaagggctggtcaatttactgttgtaacctcactattactgattatttccagacctaccagttctgaaaatctcttctccaagcggaactcgccggtggcgcacgccgtcggattttgggactaccactcgt

SEQ ID NO: 280274 - DNA, 338 bp, Glycine max
gcgcatcaaaatgcagggttttttgcaaagtgattacttgcacctatacccgcgctttttggaagatgtttcaagttactacaagcaaggaaagattgtgtatattgaagacatgaatgaaggcttggaaagtgctccagctgctttcgttggacttttccatggcaaaacgttggtaagcaagtcattcgtgttgcccatgaatgattttttcagtatttggttagctgaagcttgatatgttttaaacatattcaattgagaatttttggatgttcttgaactgtgtcagctggcaaggccttattctcaccttctgccttgagcagaaaatgtaa

SEQ ID NO: 280275 - DNA, 342 bp, Glycine max
  unsure (1)..(342): unsure at all n locations
gttcgtttgagagagaaaaaatggcagagggtctcgttctccgcggaaccatgcgcgcccacaccgacgtcgtgacggcgattgccactcccatcgacaactccgacatgatcgtgacggcgtcncgcgacaaatccatcattctctggcacctcaccaaggaggacaagcctacggtgtcccccgccgccgcctcaccggacattctcacttcgtccaggacgtcgtcctctcatccgacggtcagttcgccctctccggctcctgggacggcgagctccgcctctgggacctcgcggctggcacctctgcccgccgttcgttggcnnaccaaggacgtgt

SEQ ID NO: 280276 - DNA, 339 bp, Glycine max
  unsure (1)..(339): unsure at all n locations
gttgtganctataagctagtttatcgtgaggagaatatgaagttgtttgttttctntgttgctgcagtagttttggttncatggccatgccatggcgcnggctaccaaaggttcccnctccgaatgaaaactggctatggtgagcgttcttcggangtaaaatgcgcagttttaggcttgctgtggaagcacacaacatccgagcntttanaaccattcctgaagantgngttgaaccaacaaaggactacattaatggcgaacaatttagatcagactctaaaacagttaaccaacaagctttcttttatgctagtgaacgcgaagtccatcacaacg

SEQ ID NO: 280277 - DNA, 303 bp, Glycine max
  unsure (1)..(303): unsure at all n locations
aatatgagcagcagtgcagggaagttggtgtgtgtcaccggtgctgccggttatattgcttcatggattgtcaagttcctacttgaacgtggttacactgtcagggccactgttcgaaacccaaatgatcacacgaagtagaacatttgctaaaacttgaaggtgaaggagagactgcacctttttaaggcagatcttttgggtgaaatctttgactccattgttgaggtggatgcgtcttcatctctntctttatacacgtcaagaccacagtgactatgaccacatgaggacnctacgtct

SEQ ID NO: 280278 - DNA, 333 bp, Glycine max
  unsure (1)..(333): unsure at all n locations
agagcgaagagaatggctcccaagggtttaatctttttggctgtgttatgcttctcagcactgtcactgagtcgttgtcttgcggaggataatggacttgttatgaacttctacaaggaatcatgccctcaggctgaagacatcatcaaagaacaagtcaagcttcttacaagcgccacaagaacactgctttctcctggctcagaaacatcttccatgactgtgctgttcagagttgtgatgcttcactgttgctggactccacaagaaggagcttgtctgagaaggaaaccagatagaantttgggttgagaattcaggacattgagacca

SEQ ID NO: 280279 - DNA, 185 bp, Glycine max
gggattgactttcagaggaattcccaacagtatctctatctaaggaccctatggttgcttaagtactgttcctggttttaaataaatgtgaaattgaaggaaccagattccttaatcagttgtgtatgcttaagtcatgtatttggagtggctgaatgtatttgtattgtcattaataaagagag

SEQ ID NO: 280280 - DNA, 293 bp, Glycine max
  unsure (1)..(293): unsure at all n locations
cttctttccaaatcccaactactantcacantcactgcagatctcaatccatggctaccantgttagcatcaaggcccgccagatctttgacagtcgtggcaatccaaccgtcgaggtggatttgacatgctccgatggtacttttgctagagctgctgttccaagtgtgcatccactgggatttatgaggcccttgaattgagagatggaggatctgactaccttggaaagggtgtatcaaaggctgttgacaatgtgaacaccattattgccctgctttggttggcaanga

SEQ ID NO: 280281 - DNA, 361 bp, Glycine max
  unsure (1)..(361): unsure at all n locations
atcgcagagaagaacagagagagatccatccatcaattccaatggccgatcagctcaccgacgaacngatctccgagttcaaggangcttcagcctcttcgacaaggacggggatggttgtattaccaccaaggaacttgggaccgtgatgcggtcanttngccagaacccaactgncngngagctgcaggacatgataaatgaggttgatgctgatgggaatggtaccattgatttcccagaattcctgaatctcatggctcgcaagatgaaagacatgattcagaggaggagctgaaggaggctttccgcgtgttntcaaggatcagaatgcttccatctctgcanggantccgcatgt

SEQ ID NO: 280282 - DNA, 352 bp, Glycine max
  unsure (1)..(352): unsure at all n locations
gcagcaccttagtaccttgaatcattatcattcgggtaatggacacatcactagtgtttactgtgaggaggagtgaggcagagctgatatctccggcgaacccacccctcgtgaagtgaagctactctcagacatagatgaccaagatgggttacgtttccncattccggtgatacagttctatcgccacgacccatcaatggcagggaaagaccctgtcgatgtgataagaaaggctgtggccaaaacgcttgtgtttactatccttttgcaggtaggcttagggaagacttggtcggaantgtggtggatgtatggggaagtgtttgtncatgagctgatgcagtgcnct

SEQ ID NO: 280283 - DNA, 351 bp, Glycine max
  unsure (1)..(351): unsure at all n locations
acacatagtagctattatactctctagagtaattgcggaatctgctagaattttctaataatggcgaaagacgttgagcaggtcacagagcaaggtgaatactccgcgaaggactaccatgaccctcctccggcaccgttgatcgacccagatgagctcacaaagtggtccttgtacagagccgccatagctgagttcatagcaacactcctttttctttacatcaccgtgttgaccattattggctacaagagacagagtgacaccaaaatcccggtaacaccgaatgtgaggcgttggcatttgggctcgttggggctcggtgnatgnctcacctgttatnntgcggga

SEQ ID NO: 280284 - DNA, 357 bp, Glycine max
  unsure (1)..(357): unsure at all n locations
gagacttcagatacgggctgctgggagnntctatggaaatcactttcgtgtttcaacatatggncgaatcacatggaggaggtgttggttgtattattgatggatgtcctcctcaccttcctctctccgaagctgatatgcaattggatcttgacagaaggaggccaggtcagagccgaattacaactcctagaaaggagactgatacatgtaaaatattttcaggagtttctgaaggacttactactggaactccaattcatgtatttgtacccatactgatcaaagaggacatgactatactgagatggcagtagcttataggccttcccatgcagatntactatgacatgagta

SEQ ID NO: 280285 - DNA, 358 bp, Glycine max
  unsure (1)..(358): unsure at all n locations
gaggcactggcactgaagaagtgctcatcaggaagagaggtttctctgagactgaaactgaaactgaggaggatgagtctgctaccactgtggatttgatgcttaatctttcttctaaggaagctgctgctgctgcagatccaactgataagcacaagactttgcctaaggagaagactcttctgcctgcagatcctgctaagcctccagccaaggcacaggtggtaggttggccacctgtgcggtccttccggaagaacatgttagctgtacaaaagagcgtcggagaagagangagaagaacagcagcagcctaatgcaaactttgtcaagttanatggatggacacttactcgca

SEQ ID NO: 280286 - DNA, 358 bp, Glycine max
atcccaattgttctttgcggtaacaaggttgatgtcaagaataggcaagtgaaggcaaagcaggttactttccacaggaagaagaatttgcagtactatgagatatctgctaagagcaactacaattttgaaaagccatttttgtacttggccaggaaacttgcaggcgatgctaacttgcactttgtagaatctcctgcattggctccaccagaagttcaaattgatttagctgcacaacaacagcacgaggctgagcttcttgcagctgctagtcagccccttcctgacgacgatgatgatcatttgagtaggattgtgggctgtggaccatttactagttaatggtattgtgtag

SEQ ID NO: 280287 - DNA, 329 bp, Glycine max
gctcagcgataagcagaaagtggaaatcgcgaaatggttcctcctcaattctcctcccggagaaatccaatacgttgccaaagatgtgaaatccattctcaacaacgacgatttgtacaaggaagccgcttccgaggcttttctcttttacaacaaatcgcacttgatttcccttccaatgtccaaccgaagcggagacgtactggttacttcttttggtgagcttgagggtaatgcattcttgaacctaggactgcgcaagtagcaattgttgatcatgttaaacaagttgtacagagtgagactgccaccagagaggacttccatct

SEQ ID NO: 280288 - DNA, 349 bp, Glycine max
  unsure (1)..(349): unsure at all n locations
cttctntcntcgcttcggatcttcaatctcatctccgatctcaaaatgcccgctgtttatgganagcgctnngaccaccttcgaagactccncnaaggagnntgaatacggttacgttcgcaaggtttcaggacccgncgncgntgcggatggcatggctggtgctgctatgtatgaactcgtgcgtgttggtcatgataatctcattggtgaaatnntncgtctcgaaggggattctgctaccatccaacnctatgaggaaactgctggnttgatggttaatgatccggcttaggacgcacaagctttgtccgtggatngngnctggaaatggggatatntngaggaa

SEQ ID NO: 280289 - DNA, 356 bp, Glycine max
  unsure (1)..(356): unsure at all n locations
catggccatgccatggcgcaggctaccaaaggttccctctccgaatgaaaactggctatggtgagcgttcttcggaggtaaaatgcgcaagttttagggcttgctgtggaagcacacaacatccgagcntttaaaaccattcctgaagagtgcgttgaaccaacaaaggactacattaatggngaacaatttagatcagactctaaaacagttaaccaacaagctttcttttatgctagtgaacgcgaagtccatcacaacgacatatttatatttggcatagataacaccgtactctctaatatcccatactatgaaaaactggatatggggtggagganttatgaacttatatg

SEQ ID NO: 280290 - DNA, 354 bp, Glycine max
gctggagttttgggtatttatggccttattattgctgttattatcagtactggcattaatcccaaggccaaatcttattacctctttgatggttatgcacatctctcctctggtcttgcctgtgggctggctggtctctctgctggcatggctattggtattgttggtgatgctggtgttagagccaatgcacagcagccaaagctttttgttggaatgattctcattctcatctttgctgaggctcttgccctgtatggactcattgttggtatatcctgtcttctcgtgctggtcagtctagagctgataagaaagagtgctgcaaaatatctttgatctccaactgtttaa

SEQ ID NO: 280291 - DNA, 353 bp, Glycine max
  unsure (1)..(353): unsure at all n locations
aaaaaatggctctatcgcgcgtggctcaatcgtcgccatcacagtcgaatcttttgaaacccctctcgtcgtacttatccctacgacgccgttcggtgtcgacctcgtcggagcccctcaccgtggagacctcggtgcccttcacctcccacaactgcgatgccncctccacgcgccgtngagacgtntcggcggagtcttctcgttcttccgtaacatggcgctgatgcggcggatggagatcgcggcggactcgtctacaaggccaagctcatacgcggcttctgcaactctacgatggccaggagncgtcgccgtcggcatggaggcggcatacgcnaaggatgtancat

SEQ ID NO: 280292 - DNA, 355 bp, Glycine max
  unsure (1)..(355): unsure at all n locations
cgcagccatggggcgaagacccgcgaggtgttataggcaaattaagaacaaaccataccccaagtcacggttttgccgtggtgttcctgatcccaagatcaggatttacgatgttggtatgaagaagaagggtgttgatgagtttcctttctgtgtccatctggttagttgggagaaggaaaacgtttctagtgaggccctggaagctgctcgtattgcttgcaacaagtacatggccaaatttgctggaaaggatgctttccacttgagagtcagggtgcacccttccatgttcttaggatcaacaagatctttcgtgtctgggantgattagcnccaactggangagagtgnc

SEQ ID NO: 280293 - DNA, 353 bp, Glycine max
  unsure (1)..(353): unsure at all n locations
aaattcaataccttagaganaacaaaagcacagaatcgaaagaagagttcttttttgagagagattgggatggcttcgacgaagaagatcacactgaagagttcggacggcgaggccttcgaggtggaggaggcggtggcggtggagtcccagacgatcaagcacatgatcgaggacaactgcgccgacagcggaattcctctccccaatgttaccagcaagattctggccaaggttatcgagtattgcaagaagcacgttgaggccattggctgatgagaagcccatgaggatgantcaaggcttgggacctgattcgtcaagttgncagccacatcttgactcatctgntg

SEQ ID NO: 280294 - DNA, 349 bp, Glycine max
  unsure (1)..(349): unsure at all n locations
gtcgtctgnctcaacaagnaaganngttcgacgacgaagagcttctccaactagtcgaactcgaagttcgngaccttctnacntcctacgaattncccggtgacgatacccncatcgtctccggctccgcactcttagccctagnagcccttatgncgaaccctgccatcaaacgcggcgacaangagtgggtcgacaaaatctacaaactcatggacgantcgacgactacattcccatcccccagcgccagaccgactcccatcctcntcnacntcgaagagttttctccatcaccggccgtgggaccgtcgccaacggcgcgtagacgtggcacgtcaaagtaggg

SEQ ID NO: 280295 - DNA, 351 bp, Glycine max
  unsure (1)..(351): unsure at all n locations
gtcctttctgttctcttcactcttggtcttgngagagaaagccatgccagagacgaagatttttggcatgctgtttggccaaacactcccattccaagttcattgcgaganccttctaaagcctggccctgcaagtgttgaaatcgatgatncccctatgcaaattgaagaaacacagtacccgaaaaccttcttctataaagaagaccttcancccaggcaaaacaatgaaagtacaattcagcaagcctccctttcaacaaccatggggtgttggtacatggttaaaggaaattaaagacatactaaaagaggtatagtttgagagctatgcatcagaagagccatgag

SEQ ID NO: 280296 - DNA, 354 bp, Glycine max
  unsure (1)..(354): unsure at all n locations
gaataatttgaaatgaagattcagtgcaacgtgtgcgaggccgcggaggccaaggttctgtgctgcgcggncgaggcagcactgtgctgggaatgcgacgagaaggttcacgcagcaaacaagctcgccagcaagcaccagagggtccctctctctctctccgcctcncacatgcccaagtgtgacatatgccaggacatggttggttatttcttctgtttagaggatcgagctttgctatgtaggaattgtgatgtatctatacatacagcaaatgcctgtgtctctgatcatcaaaggtttttgcttactggtgtgagagtaggcttgaactatgagcgcggtgcttcctcg

SEQ ID NO: 280297 - DNA, 351 bp, Glycine max
  unsure (1)..(351): unsure at all n locations
ccggatcnccttcgaagtgaattatattgcagcgaatcacacacactctgaacaacgtncaccatgcaggccagtgataggtttaacatcaattcccagcttgagcatctccaagccaaatatgttggaactggccatgccgatttgaacagatttgagtgggcagtgaacattcaacgagatagctatgcatcatatattggacactaccctttactgggattctttgctattgctgaaaatgaatctattggaagagaacgctacagctttatgcagaaatgctcctgccttgtggtttgcctcccgaaagagagagataaggatacatctggatacaanggacacaca

SEQ ID NO: 280298 - DNA, 343 bp, Glycine max
  unsure (1)..(343): unsure at all n locations
cttatcagagtcaaccacggatgaagagttgatgataaattttggngaatatggtaccattactagtgctttaataatgagagatgctgatggtaaatcanggtgttttggctttgtcaattttgaaaacccagacgatgctgccaaagctgttgagggacttaatgggaagaaatttgatgataaggaatggtatgttggaaaagcccagaaaaatctgagcgtgaacaagaactgacaggacgatttgagcagagcataaaggaagctgctgacaaatatccagtttgncttgtatctcaaganttggatgatcaacngtgngaaacttaaggaatgttgc

SEQ ID NO: 280299 - DNA, 351 bp, Glycine max
  unsure (1)..(351): unsure at all n locations
attcttcatccatagacatggccaccgtcacttctgcagccgttgctattccctcattcactggcctcaaggcaagcgcaggcaaagtgagtgccgccgttaangtctcagctccccaagccacaaggttgggcatcaaggcttcgctgaaagacgttggagtcgctgttgtggccactgccgcgagtgcagtgctggctagcaacgccatggccattgaagtgttgctgggtggtgatgacgggtctctngctttcgttcccaacaatttctccgtggcctccnncgagaagatcgtgttcaagaacaagcagtttcccctncaagttgtgttcgagaggagagatncta

SEQ ID NO: 280300 - DNA, 355 bp, Glycine max
ggactggtgaagatgaagaggatcaggatacaaaagactgtaaaaagctctttaaaaatatgaaattcttcgtaagcagggaggtaccaagggaatcgatgctttttgttattcctgcttttggtggcatagtttcctgggagggagaaggggcaccttttggggaatctgaccagagcatttctcatcagattgttgacagggaagcacaaggacatcggttcctctcaagagaatacgttcaaccacagtgggtatatgactgtgtgaatgcacgaattattttgccactgacaattatttggtgggaagactcctccaccacatttgtcacttttattactacgcgaagaag

SEQ ID NO: 280301 - DNA, 354 bp, Glycine max
  unsure (1)..(354): unsure at all n locations
atgctgcagaatctcttatnnccacttttggaggaagtngaagctgctgttcctcaggagtttcaccccaggacgccagttaaacttggagcaactgcaggtttaaggcaattggaaggggatgcttctgataggatattgcaggcggtcagtgacatgctcaagaacagaagcacactgaacgttggggccgatgcagtttcagtgttgagtggaaaccaagaaggagcttatcaatgggtaacaattaactatctactgggaaacttgggaaagcatattcagaantgttgcagtagttgatcttggagtggatctgttcaaatggctatgcagtctcagagacagagctgc

SEQ ID NO: 280302 - DNA, 345 bp, Glycine max
  unsure (1)..(345): unsure at all n locations
acttggaatccaaaaatgagagaaatcatcagcattcacataggtcaggccgggatccaggttggcaactcctgctgggaactctactgcctggaacatggcatccagnccgatggcatgatgccaagtgactnctccttcggtgtagcccacgacgccttcaacaccttcttcagcgaaaccggatccggcaagcacgtccctcgcgccgtcttcgtcgatctcgagcccaccgtcatcgacgaagtccgttgtggcnttaccgtcaactcttccaccccgaacaatcctctccggcaggaagatgccgncannaatttgccagaggcatacacgttgcaagaa

SEQ ID NO: 280303 - DNA, 348 bp, Glycine max
  unsure (1)..(348): unsure at all n locations
cgcagcatggggcgaagacccgcgaggtgttataggcaaattaagaacaaaccataccccaantcacggttttgccgtggtgttcctgatcccaagatcaggatttacgatgttggtatgaagaagaagggtgttgatgagtttcctttctgtgtccatctggttagttgggagaaggaaaacgtttctagtgaggccctggaagctgctcgtattgcttgcaacaagtacatggccaaatttgctggaaaggatgctttccacttgagagtcagggtgcaccccatccatgttcttaggatcaacaagatgctttcgtgtgctggactgatagctccaactgganga

SEQ ID NO: 280304 - DNA, 348 bp, Glycine max
  unsure (1)..(348): unsure at all n locations
ctttgcgagtgaagccctagactacactacacactttgcaatggcggttgttgcgcaaacccctgacatcgccggcgagcgactngccggccaagacgttcgcacccaaaacgttgtggcatgccaagccgttgccaacatcgtcaaaagctctttaggccccgttggcctcgacaagatgctcgtcgacgacattggcgacgtcactatcaccaacgacggtgccacgattctcaagatgcttgacctntagcatcctgctgccaaggttttggtggantcgccgagcttcaggaccgagaatcggagaggcatattcggtcgtcatgtcgtgtganttctcaaaag

SEQ ID NO: 280305 - DNA, 329 bp, Glycine max
  unsure (1)..(329): unsure at all n locations
aggatcgtaagcgagcaaactgancttcttgaaccatttantgcgtcangttgccaagttctcttatattgtggaaggaagcaaatgctaaaggaagtctatttcaaagatttccttcagatttgttgacacagctgaagacagattgtctcgtcctgcacaatcatcgttatgccatatccccacgcaagcttcaatataataccaagttatctgacttttttgagattctggcaacatctgaggatagagatggaaagactttcgtttccacagcacgtggtaggaaatatcccgtgctgtcaactatggcaccagagaaaatnctt

SEQ ID NO: 280306 - DNA, 347 bp, Glycine max
tcaagcgcgcaggtttcagaagcgaaaacaacagcaccgttgctccttctccccataaccaaagcaatgcatttttgaacatatttactttgcacttcccaattcggttgtttttgggaggtctgtgtatgagtctcgtagacaatttggggagattttggctactgaaagtcctgtggagtgtgatgttgtgattgctgtgcctgactctggtgttgtggctgcgcttggttatgctgcgaaactggggttccgtttcagcaggtttgattaggtcgcactatgtggggaggatttcatgagccctctcagaagatagggactttggtgtgaagctgaagctatca

SEQ ID NO: 280307 - DNA, 347 bp, Glycine max
  unsure (1)..(347): unsure at all n locations
gtgtttgcggctgaggattccgnncgagcgaccttctncgtttctccgcaaagtttaagtcatcatgggtaaggaaaagactcacatcaacattgtcgtcattggacatgtcgactctgggnagtcatnaccactggtcatttgatctacaagcttggaggtattgacaagcgtgtgattgagannttcgagaaggaggctgctgagatgaacaagaggtcattcaagtatgcctgggtgcttgacaagctcaaggctgagcgcgaaagaggaattaccatgatattgctttgtggaagtttgaaacaccagtatatgcaccagtcatcgatgccccggacacgtga

SEQ ID NO: 280308 - DNA, 348 bp, Glycine max
  unsure (1)..(348): unsure at all n locations
gggttttgagtgcggtgcggcgatcctagcactctcttctgcagctttcgccgacagcttcattcaccatggctgagcaaaccgagaaggcttttttgaaacaaccaaaagtgtttctcagctcgaagaaaactgggaagggaaagagacccggaaagggtgggaaccgcttttggaaatccattgggcttggatttaagactcccagggaagccatcgaaggaacctacattgacaagaagtgccccttcactggcaatgtttccatccgtggccgtatcttggctggaacatgtcacatgctaagatgaacaggntatatgttaggaggattatctcntttattca

SEQ ID NO: 280309 - DNA, 352 bp, Glycine max
  unsure (1)..(352): unsure at all n locations
gagataactagaaacagtgtgatgaaaatgaaggtccttgttttcttcgttgctacaattttggtagcatggcaatgccatgcgtacgatatgttccctctccgaatgaacactggctatggtgcccgtactccggaggtgaaatgcgcaagttggaggcttgctgtggaagcacacaacatctttggctttgagaccattcctgaagagtgcgttgaagcaacaaaggaatacatccatggcgaacaatatagatcagactccaaaacagttaaccaacaagcttacttttatgccagagactcgagtccatcccaagacncnttgtgttcatattagatggccacgtant

SEQ ID NO: 280310 - DNA, 247 bp, Glycine max
  unsure (1)..(247): unsure at all n locations
gtgagaaacatggcttccttaagctccttagtgctgctccttgcagctctaattctatcccctcaagttcttgcaaactatgagantnccccagtgtacaagcctcccactgagaaaccaccagtntataagcccanagtngagaagccnccggtttncaagccnccagttgaaaancctccagtttanaagcnnccagtagngaagcnacnagtgtacaagcccccggtnggggaggntcggtntt

SEQ ID NO: 280311 - DNA, 369 bp, Glycine max
  unsure (1)..(369): unsure at all n locations
aagggtttaacctttctgggctgtgttaatatgcgtttcagcactgtcactgagtccttctgttgcgggggaagtcgcanaataatggccttgttatgaacttctacaaggaatcatgccctcaggctgaagacatcatcacagaacaagtcaagcttctctacaagcgccacaagaacactgctttctcctggctcaggaacatcttccatgactgtgctgttcagagttgtgatgcttcactgttgctggactccacaagaaggagcttgtctgagaaggaaacagatagaagctttgggttgaaatttcaggtacattgagaccatcaaagaagctttggaaagagaatgccctggagttgtttca

SEQ ID NO: 280312 - DNA, 366 bp, Glycine max
  unsure (1)..(366): unsure at all n locations
tccgaagcaggaactaaatatggctgacttgttggaatggtcaaagcaagataagaaacgaatgcttcatgtcgtctaccgtgttggtnacccttgatcgcaccatcaaattttacacagaatgtttaggaatgaagcttttgaggcaaagagatatcccagaggagaaatatgctaatgcttttcttggatttggccctgaagaatcccattttgttgttgaattaacatataattatggggttacctcgtatgacattggcgatggctttggacattttgcaattgcaactcaggacatttatattggttgagcacatcagggccaagggtggaaacatcacaagggaactggtccagttcaag

SEQ ID NO: 280313 - DNA, 359 bp, Glycine max
  unsure (1)..(359): unsure at all n locations
tccctcctcttcacacattttcttagcnctctccaacaatcccnctcgttcacactttcagattgtgtgaagatgggggctggtggccgaactgctgttcctcctgccaacaggaagtcagaggctganntttgaagcgggtaccatttgaaaaantcagtttagtctcagccagattaagaaggccattccacctcactgtttccancgctctgttctccgctcattctcctatgttgtttatgacctcaccatagccttctgcctctattatgttgccacccattacttccantcttcccggtcntctctctttcgtggcatggccaatctatgggctgtccagggttgcatcctta

SEQ ID NO: 280314 - DNA, 357 bp, Glycine max
  unsure (1)..(357): unsure at all n locations
atgcgtcaaactgttgctgtgggagtcatcaagaacgttgagaagaaggatcctaccggagccaaggtcaccaaggctgcccagaagaagaagtgaatcgtgcgggctggttcatcaggggatgttggttacaataaatgttggtttcttttctgtactcttgtgtcttcttttctaggtagcttgtttttcggacaaagtttgaagtctccaccatcatctcgcaactgttgttcccagaactgggttcttgatcgacggtggcaaaattgcttttatttactgtgtttaatgtgttgtttgtcggaaccctgatacattttgttaagcgcagaggtttcaggntttgctgcgttg

SEQ ID NO: 280315 - DNA, 365 bp, Glycine max
  unsure (1)..(365): unsure at all n locations
attaaccttcaagacaggccagcttggtataaggagaaagtctaccctgaaaataaggtgccatccttggagcacaatggcaaggtgttgggagaaagtcttgatttgatcaaatatgtagatgcaaactttgaagggacacctttgtttcccagtgatcctgccaagaaagagttcggtgagcaattgatatcccatgttgatacattcagcaaagacctgttcgtttcattgaaaggggatgctgtacagcaagccagtcccgcttttgaatacttggagaatgctcttggtaaatttgatgaggccattcttgcttngccaantcagttggtggatattgcttatatccattgttgaaagat

SEQ ID NO: 280316 - DNA, 365 bp, Glycine max
  unsure (1)..(365): unsure at all n locations
ggacgagttgttgccggaagggtttttggagaggaccaangagaagggaatggtggtgagggactgggccccacaggcggcgatactgagtcatgactcggtgggtgggttcgtgactcactgcgggtggaactcggtgttggaggcggtttgtgaagctgtgccaatggtggcgtggcctctctacgcggacagaagatgaataaggtgatcttggtggaggaaatgaaggtgggtttggcggtgaagcaaaacaaagacggcttagtgagttctaccgagttgagggaccgagtcatggaacatggactcggacagagggaaaganattagncagaggattttaaaatgaaaatcattccacc

SEQ ID NO: 280317 - DNA, 368 bp, Glycine max
  unsure (1)..(368): unsure at all n locations
atgggcacttcgttgcttggtgatgtccctttctgttctcttcactcttggtcttgcgagagaaagccatngccagagacgaagatttttggcatgctgtttggccaaacactcccattccaagttcattgcgagatcttctaaagcctggccctgcaagtgntgaaatcgatgatcaccctatgcaaattgaagaaacacagtacccgaaaacctncttctataaagaagaccttcatccaggcaaaacaatgaaagtacaattcagcaagcctccctttcaacaaccatggggtgttggtacatgttaaaggaaattaaagncactactaaagaaggatatagtttgaagagtatgcatcaagaag

SEQ ID NO: 280318 - DNA, 364 bp, Glycine max
  unsure (1)..(364): unsure at all n locations
atctttgcacaaagttgttgagcctgccgatatcatacagaagactggattagcttatccacacacatctcactgncttgcttctggtgacataatgatctcatgtcttggagataaagatggaaatgctgcaggaaatggatttcttcttcttgattcagagtttaatgtgaagggaaggtggtcgaaaccgggtcacagtccactatttggatatgacttttggtaccaaccacgtcacaataccatgattagcacatcatggggtgctcctagtgcttttacaaaaggttttaacttacacatctttctgatggatatacgggaggcatctccatgtatatagctggctgggggcgaactg

SEQ ID NO: 280319 - DNA, 365 bp, Glycine max
  unsure (1)..(365): unsure at all n locations
aaaaaaagacaacacagagagaagcgtcttaataaacgctcttctctgaaaaacctgatttcttctcttcttctcttctctttcgtnccgatcttcgatctctgaaaatgagagagtgcatttcaatccacatcggtcaggccggtattcaggtcggaaacgcctgctgggagctctactgcctcgaacacggcattcagcctgatgggcagatgccaagtgataagactgttggtggaggtgatgatgctttcaacaccttcttcagtgaaactggggctggaaagcacgtgcctcgtgcgatttgtagatctcgagcctactgtgattgatgaagttaggatgggacataccgccaactattt

SEQ ID NO: 280320 - DNA, 359 bp, Glycine max
  unsure (1)..(359): unsure at all n locations
gtcaggaagatatcttgacaaaatggccgtaacagaagcaaacctaaagaaggctggcntccacacatgggagcagttaattctcaaggatccacatcttatcactccaaatgcactttcatacaaatcagcaatgagagagaatctgttgaggcagggatacagaattgttggaatcattggagaccaatggagcgatctgcttggagaccacagaggcgaaagcaggacctttaagcttcctaatcccatgtactacattgagtagtaccttcacctctctcaacaatctagctagagttctcctatctatatgtaataaggtatgctgatatgcntattcaatagngcatactatg

SEQ ID NO: 280321 - DNA, 359 bp, Glycine max
  unsure (1)..(359): unsure at all n locations
acttcccttctccaacatgccaaacgacagcgttctgagtcttttcttcttcgttaccctcttcacatgccttcnctctgctaattcccacgatgaccatattttcctaccgagtcaactccatgacgatgactcagtgagttgcactgctaccganccaaaccttaactacaagccggtgatcggaatcctgacccaccccggcgacggtgcctctggccggctcagcaacgccaccggggtttcttacatcgccgcctcctacgttaaattcgtggagtccggtggtgctagagttatccccttatctacaatgagtcacctgagaacttaacaagaagtcgatttggtcaatggag

SEQ ID NO: 280322 - DNA, 337 bp, Glycine max
  unsure (1)..(337): unsure at all n locations
aaaaaagacaacacagagagaagcgtcttaataaacgctcttctctgaaaaacctgatttcttctcttcttctcttctctgncgttcgatcttcgatctctgaaaatgagagagtgcatttcaatccacatcggtcagnnnnnattcaggtcggaaacgcctgctgggagctctactgcctcgaacacggcattcagcctgatgggcagatgacaagtgataagactgttggtggaggtgatgatgctttcaacacttcttcatgaatggggtggaaacagtgctcgtggatttgtagactgagctatgtgatgtgagtaggntggnatacgcatat

SEQ ID NO: 280323 - DNA, 367 bp, Glycine max
  unsure (1)..(367): unsure at all n locations
gatgcttcaagcaccaggtgccacaagttacataggttgcataggaaaggacaaatttggagaggagatgaagaagaaatgtacacttgatggtgtaaaggttaactattatgaaatcgacaatacacctactggaacttgtgctgtttgtgtggttggcggtgaaaggtcccttgttgccaacttatcagctgcaaattgctataagtctgagcatttgacgagaccggaaaattgggcattagttgaaaaggccaagtatttctacatttctggcttttcctcactgtatctcctgattccacaattagttgctgaacatgcagctgcaaataacaagttcttccatgatgacctttctgcccna

SEQ ID NO: 280324 - DNA, 364 bp, Glycine max
  unsure (1)..(364): unsure at all n locations
gcgtcctcgatttgggcgtcgtaatgggcctcatggacaaatgggcctgcaagctccccacggtccangcccttctacgccgtcaagtgcaacccaaacctctccctcatcggcgcgctcgctgcactcggctccagcttcgactgcgccagcaaagccgagatcgaatctgtcttgtccctcggagtctcaccggacagaatcatctacgcaaacccatgcaaatccgagtcccacatcagatacgccgntccgtagtgtcaagtcacaacctacgactccctcgacgaggtcgagaaaatgcaattgccaccccangagcgagttgctcctccgcattaaaccccgcaagacagtggacgcg

SEQ ID NO: 280325 - DNA, 352 bp, Glycine max
  unsure (1)..(352): unsure at all n locations
aaatcgcgtcttctcctctgtattgagacatggccgaagaagaggaagaatcagagctcagcgataagcagaaagtggagaccgcgaaatggttcctcctcaactctcctcccggagaaatccaatacgttgccaaagatgtgaaatcgattctnnacaacgacgatttgtacaaggaagccgcttccgaggcttttccctattacaacaaatcgcacttgatttccattccaatgcccaaccgaagcggagacgtactggttacttcgttcggtgacttgagggtaatgcattcgaacctaggatgcgcaattgcaattgttgaccatgctaaacaagttgtacagagtga

SEQ ID NO: 280326 - DNA, 358 bp, Glycine max
  unsure (1)..(358): unsure at all n locations
gaaacattctaaaacaaaggacccagttttacatttttntttgttcctgagttccaatggctcttcaggctgcttccttggtttctgcttctttttctattgctaaagagggaaagtctggtgtatctctcagggacaccacaatgtttggtgtttcattgtcggatactctcaaatctgacttcagctctccctcatcgacttgcaaaagggaattccaacaaaaatttggccctttgagggttcagtcagtggcaacaacaactccaggagtcaccaaggttcaccagaaggcaagaactttgaggaaggcagtgntataccatggggcttcctctggattagcctggcactgcta

SEQ ID NO: 280327 - DNA, 355 bp, Glycine max
  unsure (1)..(355): unsure at all n locations
tcttctcttgcggctagggttttagcgcanttgcttctagatttaaggaagatgggtaaggaaaaggttcacatcngtattgtggtcattggccatgtcgactctgggaaatccactaccactggtcacctgatttacaagcttggaggcattgacaagcgtgttattgagaggtttgagaaggaagctgctgagatgaacaagaggtctttcaagtatgcctgggtgctggacaaacttaaggctgagcgtgaaagaggaatcaccattgatattgctttgtggaatttgaaaacaaagtattattgcacagttattgatgcgcctggacatagggattcattaagaatatgat

SEQ ID NO: 280328 - DNA, 353 bp, Glycine max
  unsure (1)..(353): unsure at all n locations
gtatttccctacctctcccttcaagatgcagatcttcgtcaagaccctcaccggcaagaccatcacccttgaggtggaaagctctgacaccatcgacaacgtcaaggcntagatccaggacaaggaaggaatccccccggaccagcaacgtctcattttcgccggaaagcaacttgaggacggccgnacccttgctgactacaacattcagaaggagtgtactcttcacctcgtcctccgtctccgtggtggcatgcagatcttcgttaagacactcaccggcaagacnataanctaggtgaangttccgacaccatcgatangtcaaggcaagatncaggcnaggatgggtt

SEQ ID NO: 280329 - DNA, 348 bp, Glycine max
  unsure (1)..(348): unsure at all n locations
ctcgagtcaaaggttaatgagaccaaggccatggtgaagttccagcttaagaaggtgctttgcatgggagtagccgtggggaatgttagcatggangnaaagcaaatcttccaaaatgtacaactgagtgttaacttccttgtctctttgttgaaaaagaattggcagaacgttcgctgcctgtatctgaagagtaccatggggaaatcgtaccgtgtcttttgaggagttgttcttaaattcagtgaatttctgatcgcacctaatatattgtctttcgataggtttgacagaattcatcgtctacagtttgttggatgagtattttgggnagtattgttgttattg

SEQ ID NO: 280330 - DNA, 361 bp, Glycine max
  unsure (1)..(361): unsure at all n locations
tcactagccgcagcagcctcaggaggagaataaggatgtctcacaggaagttcgagcacccaanggcacgggtcactgggatttctccccaggaagcgtgctgctcgtcacaggggaaaagtgaaggcattccccaaggatgacccatccaaggcacccaagctcactgcattcttgggttacaacgctggtatgactcacattgttagagaggtcgagaagccaggatcaaagttcacaagaaggaaacatgtgagcctgttacaattattgagacccctccaatggttattgttggtgtttgtgttatgtgaaaatcccgtggctccgacccatgaccatgtnnggctcacnttgatga

SEQ ID NO: 280331 - DNA, 357 bp, Glycine max
  unsure (1)..(357): unsure at all n locations
ggttttagngcagttcttctagatttaaggaagatgggtaaggaaaaggttcacatcagtattgtggttattggccatgtngactctgggaagtccactaccactggccacctgatctacaagcttggaggcattgacaagcgtgttattgagagatttgagaaggaagctgctgagatgaacaagaggtctttcaagtatgcctgggtgcttgataagcttaaggctgagcgtgaaagaggaatcacaattgatattgccttgtggaagtttgaaaccaccctgtactattgcagtcattgatgcccctggacacagggatttcatcaagaacatgatcactgggacatcccaagc

SEQ ID NO: 280332 - DNA, 346 bp, Glycine max
ggacgagttgttgccggaagggtttttggagaggaccaaggagaagggaatggtggtgagggactgggccccacaggcggcgatactgagtcatgactcggtgggtgggttcgtgactcactgcgggtggaactcggtgttggaggcggtttgtgaagctgtgccaatggtggcgtggcctctctacgcggacagaagatgaataaggtgatcttggtggaggaaatgaaggtgggtttggcggtgaagcaaaacaaagacggcttagtgattctaccgattgaaggacgatcatggaactcatggactcggacagagggaaagaattagacagaggattttaaat

SEQ ID NO: 280333 - DNA, 355 bp, Glycine max
  unsure (1)..(355): unsure at all n locations
ggtgaaggcgaaaaccaaatcaagatntctgagagtgggcgcaaagaggcttttgggaacgacgtcgttgggcgttagggttccggcgaggctgtaccacgaganggttgtggatcactacgacaacccccggnacgttggatcgttagacaagaacgacccgancgtggggacgggtttggtgggggcgccggcgtgcggcgacgtgatgaagctccagattaaggtcgacgacaaaaccggaanaatcgncgatgctcgattcaagactttcggttgtggctccgccattgctcntcctccgtcgctactgagtgggtgaagggaaagcaaatggaggnattctgactataaa

SEQ ID NO: 280334 - DNA, 354 bp, Glycine max
  unsure (1)..(354): unsure at all n locations
gagatattatggtttttccacaagggacagttgcattttcaggttaattctggaaacggaaaagccactgcttttctggcattcagtagtgcaaaccctggagcacaactacttgaccttctgttatttggcaacaccttgccttctgacttggttgcacagactaccttccttgatgttgcacaagtcaagaangttaaggctcgttttggtggcagaggctagggtttcttatgaatcaactcatacctagtgtttgttttagtgataatcgtcagcaattaataaacttgtgcatgggtgtgntttgctttcatttaagtttgatccaaacttatgattgagggttgaagt

SEQ ID NO: 280335 - DNA, 350 bp, Glycine max
  unsure (1)..(350): unsure at all n locations
ctccaaacttctgtcatgggggctaatttccatgaattcgtggagattgtnctccaaaattgggaggactctgtgcagtcatggcacatcgacggctattccttctttgttgtagggtttggtagcgggcagtggacagcagacagtagagtacactacaatctgagagacacagttgctagatgcaccactcaggtatatccaaggtcatggactgcaatctacatgtctcttgacaacgtgggaatgtggaatataaggtccgagaatggggaaggcatacttgggacaacaatnatctgagggtgtatacacttccaagtctggagggtgatatcggtccaagatcg

SEQ ID NO: 280336 - DNA, 355 bp, Glycine max
aaacaaataacggggaaaatagcagtcaatcaggctcatttgttcatcttaagaaagatgatggctctcaatcaggcgaagaaagtggtgctaagtctgtttctacttacaggtcttcttcacatcctataactgcaccgtcccccttgtgtggtctgcctgaattttctcaccttggctggggacactggtttacgttaagggacctagaacttgcaacaaacaggttttcaaaagacaatgttattggtgaaggtggatatggtgttgtttatcagggccattaatcatgggacctgtggctgttaagaagctactcaataatctaggacaactgaaaaggatttagatggaa

SEQ ID NO: 280337 - DNA, 357 bp, Glycine max
  unsure (1)..(357): unsure at all n locations
gtccaacctacccctttttcttctcccaccaacttcaccgtnntcttcctcgatcatgtctcactncaagggcaagtaccatgatgagcttattgccaatgctgcttacattggcactcctggaaagggtattcttgctgctgatgagtcaacagggacaattggcaagcgtttggccagcatcagtgtagagaatgttgaatccaacaggcgtgctcttagggagctgcttttcaccgctcccggtgctcttaaatatctcagtggtgtcatcctctttgaggaaatctctaccagcacagctgcaggcaagccctttgtggaatcttgaaggaggctggtgtgcttcctggcatc

SEQ ID NO: 280338 - DNA, 355 bp, Glycine max
gagaatggctcccaagggtttaacctttctggctgtgttaatatgcgtttcagcactgtcactgagtccttctgttgcgggggaagggcaaaataatggccttgttatgaacttctacaaggaatcatgccctcaggctgaagacatcatcacagaacaagtcaagcttctctacaagcgccacaagaacactgctttctcctggctcaggaacatcttccatgactgtgctgttcagagttgtgatgcttcactgttgctggactccacaagaaggagcttgtctgagaagaaacagatagaagctttgggttgagaaatttcaggtacattgagaccatcaaagaagctttgg

SEQ ID NO: 280339 - DNA, 359 bp, Glycine max
  unsure (1)..(359): unsure at all n locations
gtgagctataagctagtttatcgngaggagaatatgaagttgtttgtntnctttgttgtgcagtagttttggtagcatggccatgccatggcgcaggtaccaaaggttccctctccgaatgaaaactggctatggtgagcgttcttcggaggtaaaatgcgcaagttttaggcttgctgtggaagcacacaacatccgagccttaaaaccattcctgaagagtgcgttgaaccaacaaaggactacattaatggcgaacaatttagatcagactctaaaacagttaaccaacaagtttcttttatgctagtgaacgcgaagtccatcacaacgacatatttatattcggcatagataac

SEQ ID NO: 280340 - DNA, 337 bp, Glycine max
gagaattagggttcgattccggagagggagcctgagaaacggctaccacatccaaggtaggcagcaggcgcgcaaattacccaatcctgacacggggaggtagtgacaataaataacaataccgggctcattgagtctggtaattggaatgagtacaatctaaatcccttaacgaggatccattggagggcaagtctggtgccagcagccgcggtaattccagctccaatagcgtatatttaagttgttgcagttaaaaagctcgtagttggaccttgggttgggtcgatcggtccgcctccggtgtgcaccggtcggctcgtcccttctgccggcg

SEQ ID NO: 280341 - DNA, 333 bp, Glycine max
gctatcgttggtgggtcaaaggtgtcttccaagattggagttattgagtccttgttggagaaagttaacgttctcttgcttggtggaggaatgatctttaccttttacaaggctcagggttattcagttggttcatctcttgtggaggaagacaagcttagccttgcaactacacttctcgataaggccaaggctaaaggggtttctttgttgctccaactgatgtggtcatagcagacaagtttgctgctgatgctaacagcaagactgtgccagcatcaagcatcccagacgggtggatgggattagatattggtcccgattccatcaaga

SEQ ID NO: 280342 - DNA, 337 bp, Glycine max
  unsure (1)..(337): unsure at all n locations
ccatggcttccttaagctccttagtggctgctccttgcagctctaattctatcccctcaagttnctgcaaactatgagantnccccagtgtacaagcctcccactgagaaaccaccagtttanaagcccccagttgagaagcctcctgtttacaagccnccagttganaagccnccagtttataagcctccagtngagaagccaccagtgtacaagccaccagtngagnannctccagtntncnagccgccagttganannncaccagtntncaagccaccagttgagaagccaccagtgtacaagnnancagttggaagccacggttgctcaggcc

SEQ ID NO: 280343 - DNA, 334 bp, Glycine max
  unsure (1)..(334): unsure at all n locations
gttttccttgtttcccctattattatctcgctctcacaaaatcatggcattctctagtgctttgattctgtggtcgttgctagcaatcaacatggccctgccaaccctcgcaaccgtctacaccgtgggagatacttcaggttgggcaattggtactgattatngcacttggactggcgacaagatcttttcagtgggtgatagtctcgcgttcaactatggagctgggcacacagtggatgaagttaaagagagcgattacaagtcgtgcaccgcaggaattctattagcacagacagtagtggtgcgaccacaattgcccttaaaagtgcag

SEQ ID NO: 280344 - DNA, 188 bp, Glycine max
  unsure (1)..(188): unsure at all n locations
gctataagctagtttatcgtgaggagaatatgaagttgtttgttttctttgttgctgcagtantttttggtagcatggccatgccatggcgcaggctaccaaaaggttccctctcccgaatgaaaactggctatggtgagcgttcttcggaggtaaaatgcgcaagttttaggcttgctgtggaagca

SEQ ID NO: 280345 - DNA, 331 bp, Glycine max
  unsure (1)..(331): unsure at all n locations
ggtgaaggcgaaaaccaaatcaagatgctgagagtgggcgcaaagaggcttttgggaacgacgtcgttgggcgttagggttccggcgaggctgtaccacgagagggttgtggatcactacgacaacccccggaacgttggatcgttagacaagaacgacccgagcgtggggacgggtttggtgggggcgccggcgtgcggcgacgtgatgaagctccagattaaggtcgacgacaaaaccggaaaaatcgtcgatgctcgattcaagactttcggttgtggtccgccattgcttctttctccgtcgtaantgantgggtgaagggaaacca

SEQ ID NO: 280346 - DNA, 185 bp, Glycine max
  unsure (1)..(185): unsure at all n locations
gaacaagaaggatattagtggaaatgccagagctctgaggaggttgagaanngcatgtgagcgggcaaagaggactctctcttccactgctcanaccaccatagagattgattccttgtacgagggtattgacttctacacaaccantacnnngaanccgttttgaagagctaaacatggattna

SEQ ID NO: 280347 - DNA, 333 bp, Glycine max
gatatttgagcttaaaccctagccgctcttctcttcattcttcactttggaaacaatcataatggcgttctgtaataaggttggaaatgtcttgaggcagggtgctgctcgcagcacacatgcccctgttgcgtccatgcttaattacatccgctgcatgtcttcaagcaagcttttcattggaggcctttcatatggagttgatgaccagtctcttaaggatgcattttctggctttggagatgtggttgatgcaaaagttataactgatagagacagtggaagatcaaggggattggattgtcaacttctccaatgatgagtctgcaattc

SEQ ID NO: 280348 - DNA, 176 bp, Glycine max
  unsure (1)..(176): unsure at all n locations
cttggaatccaaaaatgagaganatcatcagcattcacataggtcaggccgggatccaggttggcaactcctgctgggaactctactgcctggaacatggcatccagcccgatggcatgatgccaagtgactcctccttcggtgtagcccacgacgccttcaacaccntcttcagc

SEQ ID NO: 280349 - DNA, 336 bp, Glycine max
acgatacgtaataagttctatcattgaggaagtttcctgtgcatcgtctccgaaaatgaacgacgcagatgtctcaaagcaaatccagcagatggtgcagttcatccgccaggaagctgaggaaaaggccaacgagatctctgtctccgccgaagaggaattcaatatcgagaagctgcagttggtcgaagccgacaagaagaagatcaggcaagaatacgaacgcaaagagcgccaagttgaaattcgcaagaagattgagtactcgatgcagctaaatgcttctcggattaaagttcttcaagctcaagatgacgtgatcagttccatgaaaga

SEQ ID NO: 280350 - DNA, 337 bp, Glycine max
  unsure (1)..(337): unsure at all n locations
cacctctcctcttccttcatccaccccaccacaatccnccacctcgccgctgcncaanaccaccacccgccgccgcnccttcaaccgtccgcgccgcccgcggcaagttcgagcgcaagaagccccacgtcaacatcggcancatcggccacgtcgaccacggtaagaccaccctcaccgccgccctcaccatggccctcgcctccctcggcaatagtgcccctaaaaaatacgacgagatcgacgccgcccccgaggagcgcgcccgcggcatcaccatcaacaccgccaccgtcgagtacgagaccgagaaccgccantacgcccacgtcgactg

SEQ ID NO: 280351 - DNA, 330 bp, Glycine max
  unsure (1)..(330): unsure at all n locations
tgggaacctttacgtagctgatgatgttcaagtgcaattttacatgatgagcccctatgtcttgaagactttatcaactgatggcaagggccgttatttcacatcatttaaggttccagatgtctatggggttttccaattcaaagttgngtacgaaaaacttggatatacaagcttatctttatcaaagcagattcctgttcgtccctttagacacaatgaatatgaaagatttataccagcagcctatccctattatggagcatcatttcaatgatggtgggtttcttcatcttcactgcagttcatctatacagcaagtagatgtaa

SEQ ID NO: 280352 - DNA, 328 bp, Glycine max
  unsure (1)..(328): unsure at all n locations
gaagtaattgaagcacattacttgtttggagctgactatgatcatattgagattgtcattcatccacaatcaatcatacantcaatgantgaaacacaggattcatctgttcttgcacagttggggtggcctgatntgcgtttgccaatcctctatacattatcatggcctgacaggatttattgttctgaaganccttggccctgccttgatctttgcaagattggttcacttacatttaaaactccagataatgtaaagtatccatccatgaatcttgcctatgctgctggccgtgctggaggcacaatgacaggagttcttagtg

SEQ ID NO: 280353 - DNA, 333 bp, Glycine max
  unsure (1)..(333): unsure at all n locations
gaatctgaaggttctataaaagcccacacccctgcttcgctgttctcacattttctacgtattgaatctcaagattctaagagagattttnnctgctctttgaagaagggtgtttgcttgattttggagatgtcgctgctctcagatctcatcaaccttaacctctcagacactactgagaaggtgatcgcagagtacatatggatcggtggatcaggaatggacctgaggagcaaagcaaggactctcccaggaccagttagcgacccttcaaagcttcccaagtggaactatgatggttccagcacaggccaagctcctggagaagacagt

SEQ ID NO: 280354 - DNA, 335 bp, Glycine max
attttgcaacaaaattcaattttgagcactaaccagcaccacttccaatggcttcaaatcatgaagaagtgatacttttggggcaagtgggccagcccatttagcaacagagtagaccttgctctcaagctcaagggagttccctacaaatactcggaggaagatcttgctaacaagagtgctgatcttctcaggtacaaccccgtgcacaagaaggttccggttttggtccacaatgggaacccattacccgagtcacttatcattgttgaatacatcgatgagacatggaaaaataatcccctcttgcctcgagacccttatgagagagccct

SEQ ID NO: 280355 - DNA, 327 bp, Glycine max
  unsure (1)..(327): unsure at all n locations
gaaatctgaagctaacttaagggaaatgagatggccaatggcaacactagtcatcgcttcaagctcttgcttttccttctaactctgcactcttcattcgctgagnncttcttcgaagagagattcgaagatgnctggaagagccgttgggtgctatccgatncgaaaaggagtgaaggaaaagcgggtaccttcaagcacacagcaggaaaatggtctggggatcctgatgacaaaggtcttcagacatataatgacgccaagcattttgccatatctgcaaagatacccgagctaagcaacaaggacagaaccctggtgctgcag

SEQ ID NO: 280356 - DNA, 331 bp, Glycine max
ctcgttgctatcaagttactgtggtgcacaaatatttgaagtctatggattagggaaggaagttgttgatcttgcattcagaggaagtgtgtcgaaaattggtggattaacttttgatgaggtggcaagagagactttgtctttctgggtgaaggcattctctgaagatacagctaaaaggttggaaaattttggatttatacagttcagaccaggaggggagtatcatgcaaataacccagaaatgtcaaagttgctccacaaagctgttcgtcagaaaagtcaaagtgccttttcagtttatcagcaatatttggctaatcgacctgtg

SEQ ID NO: 280357 - DNA, 329 bp, Glycine max
  unsure (1)..(329): unsure at all n locations
gccaaggtaggttaaacactcttcttcatcgtcgtcgcaatgggacgtgtgatccgtgcgcangtaanggagcaggctcggtcttcaagtcccacacgcaccaccgcancggccctgcccgcttccggagcctggatttcggagagcgcancggctacctgaagggtgtcgtcactgacgtcatccacgatcctggccgtggcgcgcctctcgctaaggtcgccttccgccacccgttccgctacaagaagcanncanagctcttcatcgccgccgagggtctctacaccggccagttcatctactgcggcaagaaggccaccctcgtt

SEQ ID NO: 280358 - DNA, 327 bp, Glycine max
  unsure (1)..(327): unsure at all n locations
tgccaataaggaggtacccgaggnatattatttccttgggactccacagtatagcatagtgatgagtcccaaggaaatacgtattcctagtggatgatgtgccaataaggaggtacccnaggaagagtggtgcaacatttcctctgaggccaatgtggctatatggttnaatatnggatgcatcatcatgggcaactgaggatggaaagtacaaagctgattacagataccaaccttttctggcaaagtataccaacttcaaagctggtggttgctcagcctatgcccctcgttggtgccatctagtttcagcctcaccatataggt

SEQ ID NO: 280359 - DNA, 325 bp, Glycine max
cacttgcaataggagataacttcaataaatacttaatgtatgcaatgaacacactacaacttgctgcagagatgtatgcccacacgtcaggttttgatgatgaaatgacagagtatatcaattctttgagaaatgggatattagaggcatattctgcgatttttcaagggtttaagaattcatcaaaaacccagctcttgattccttatgcacctcacatcctccagtttttggatagcatatacatggaaaaagacatggacgatgtagttatgaaaacagcaattggagtccttggagatctagctgatacacttggaagcaa

SEQ ID NO: 280360 - DNA, 330 bp, Glycine max
  unsure (1)..(330): unsure at all n locations
ggaagagagagggagattctttgtttgctaccttctctcggaaaaatgnttacgttcaggtttcaccagtaccncgtggttgggagggctcttcccacggaagcagatcagcaccccaagatctaccgaatgaagctctgggccaccaacgaggttcgcgccaagtccaagttctggtattttctgaggaaactgaaaaaggtgaagaagagcaatggccaagtgcttgccatcaacgagatttttgagaagaacccaaccaaaattaagaactatggtatatggttgcggtatcagagtaggactggttaccacaacatgtacaaggag

SEQ ID NO: 280361 - DNA, 168 bp, Glycine max
  unsure (1)..(168): unsure at all n locations
acagtacagtccattnttagtgatcnctntaatttatntgttcatagattaatatggtcgtgtatgattgcntctctatctattgtggcattttgtgttgtaccctgttgttgtgtttgcaataattattagtaataaagcagcaaattcaatttgtgttcatgcatc

SEQ ID NO: 280362 - DNA, 330 bp, Glycine max
  unsure (1)..(330): unsure at all n locations
ctttacccaatcctaacactttcttctctctgttttccttcttccncgcatcaatggagtncggacggcgttctcctcggcatgtgcaaccctctcctcgacatctctgccgtcgtcgacgacgctttcttgcaaaaatacggtatcaagttgaacgatgcgattctcgccgaggataaacacaaacctatgtatgaagaattggctaacaatcctaatgtggagtacattgctggaggtgctactcagaattcaatcagggttgctcagtggatgcttcaagcaccaggtgccacaagttatataggttgcataggaaaggacaaattt

SEQ ID NO: 280363 - DNA, 329 bp, Glycine max
  unsure (1)..(329): unsure at all n locations
ctttccaaatcccaactactantcacactcactgcngatctcaatccntggccnccattgttagcatcaaggcccgccagattctttgacagtcgtngcaatccaaccgtcgaggtggatttgacatgctccgatggtacttttgctagagctgctgttccaagtggtgcatccactgggatttatgaggcccttgaattgagagatggaggatctgactaccttggaaagggtgtatcaaaggctgttgacaatgtgaacaccattattgcccnctgctttggttggcaaggacccaactcagcagactgctattgacaacttaatgg

SEQ ID NO: 280364 - DNA, 349 bp, Glycine max
  unsure (1)..(349): unsure at all n locations
gagacagatgatgatggagatggcgaannaaaacgctgtcgttgcggcactcgcggcgttggtgcnactcgcggcgagtgtggcggtggatgctcaggagaactcggacgtgaagacgcncgtgaagtacaagcacgggaagaagtactgcgacaaaggatgggaatgtaagggntggtcaatttactgttgtaacctcaccattaccgattatttccagacctaccagttcgagaatctgttctccaagcggaactcgccggtgggcacgcggtcggattttgggatacactccttcatcgccgcngcgcgttttgagccgaagggtcggaccacggganaagacgat

SEQ ID NO: 280365 - DNA, 354 bp, Glycine max
ggcatagatgccatcgaagatgtgatctatcacattgagacatatgatgtgacaacaattagagcaagcattcccatgtttcttatgtctcgtaagatcaagtcattgggagtcaaaatggttatctctggagaaggatctgatgaaatctttggagggtatctatatttccacaaggcacccaacaaagaagagtttcaccaagaaacatgccgcaagattaaagcactccacaaatatgattgcttgcgagccaataaatcgacctttgcctggggtctagaagccagagtaccattttggacaaagagttatcagagtgcaatgaacattgatctgagtgtaaatgtaaaa

SEQ ID NO: 280366 - DNA, 361 bp, Glycine max
atgatgacgacttcatcaggattttggccacaaggagcagagcacagattaatgctactttgaatcactacaaagatgcatttggacaagatatcaacaaggacctgaaggctgatccaaaggacgagttcctgtctttactaagagcaactgtgaagtgcttgatccgtcccgagaagtacttcgagaaggttgttcgcttggcgatcaacaagcgaggaaccgatgaaggagcccttacaagagtggtggccacaagggctgaggttgatttgaaaaacatagcagatgagtatcaaaggaggagcagtgtccctcttgaacgtgctattgttaaggacaccaccggtgactatgagaa

SEQ ID NO: 280367 - DNA, 353 bp, Glycine max
  unsure (1)..(353): unsure at all n locations
agactgtgaaactgcgaatggctcattaaatcagttatagtttgtttgatggtatctactactcggataaccgtagtaattctagagctaatacgtgcaacaaaccccgacttctggaagggatgcatttattagataaaaggtcaacacaggctctgcctgttgctttgatgattcatgataactcgtcggatcgcacggcctttgtgccggcgacgcatcattcaaatttctgccctatcaactttcgatggtaggatagtggcctaccatggtggtgacgggtgacggagaattagggtcgattccggagaggganctgagaancgctacacatccaaggaagcagcagc

SEQ ID NO: 280368 - DNA, 358 bp, Glycine max
  unsure (1)..(358): unsure at all n locations
gagccataagctagtttatcgtgaggagaatatgaagttgtttgttttctttgttgctgcagtagttttggtagcatggccatgccatggcgcaggctaccaaaggttccctctccgaatgaaaactggctatggtgagcgttcttcggaggtaaaatgcgcaagttttaggcttgctgtggaagcacacaacatccgagcntttaaaaccattcctgaagagtgcgttgaaccaacaaaggactacattaatggcgaacaatttagatcagactctaaaacagttaaccaacaagctttcttttatgctagtgaacgcgaagtccatcacaacgacatatttatattcggcatagat

SEQ ID NO: 280369 - DNA, 356 bp, Glycine max
  unsure (1)..(356): unsure at all n locations
cttttgttctttttggtgctttaatttgcactagcaagggggttggttttatttctgtttgcttgcaacaatggctgtggctaataagttactttctgttttgatcattgccctcattgccatttccatgcttcaaacagtggttatggcatctcatggacatggaggccaccactacaatgacaagaaaaaatatngacctggcagtctcaaaagcttccaatgcccatcacaatgctcaaggaggtgtggcaagacccagtaccacaagccctgcatgtttttctgtcagaagtgttgtaggaagtgcctatgtgtgccacggggtattatgggaacaaagcagtgtgcccttg

SEQ ID NO: 280370 - DNA, 358 bp, Glycine max
  unsure (1)..(358): unsure at all n locations
acacctgtgattattcctcttttaacaatccacacccaaattctagggttccgaaatggacgctggcggaaagatcaagaagggcgccggaggtagaaagggcggcggcccaaagaagaagccggtttcaaggtccgtcaaagccggtctccaattccccgtcggaagaattggccgttatttgaagaaaggaaggtacgctcagcgtgtcggtaccggtgctcccgtatacttggctgcagttctcgaatacctagctgccgaggtgcttgagttggctgggaatgccgcacgtgacaacaagaagaacaggattattccaagacacgtgttttngcagtgangaacgatgaagatt

SEQ ID NO: 280371 - DNA, 355 bp, Glycine max
  unsure (1)..(355): unsure at all n locations
caaaaaacccttcttnnctttcaggttcattacttgatcagtgtcaaaagggtagttgcaaattgcaatggctaagcatgatgttgagggtggttccttctcagcaaaggactaccatgatcctcctccagcacctttgattgatgctgaggaactcacacagtggtccttctacagggctttgattgctgaattcattgccacattacttttcctttacatcacagtgctcactgtgattggttacaagagccagagtgatgtcaaggccgggggtgatgtgtgtggtggagttggcattcttgggcatgcttgggcctttggtggcatgatcttcatccttgtttatgcactg

SEQ ID NO: 280372 - DNA, 356 bp, Glycine max
  unsure (1)..(356): unsure at all n locations
caagtncaaagatgaagatgatccacgttctnccaanctttgctcttgtctcgttcacttcccatgcttctgtcaatgatntctgtgtagcagacctaaaaggtccagatagcccttcaggctatcagtgcaagccacctaacacagtcacantggatgactttgtgttctctggctttgtagcnggaaacaccacaaacactttcaatgctgcattaacctccgcatttgttactgattttccaggtgtgaatggnnntggtgtatctgtggcacggttagacatagccaaaggtggatcaatcccaatgcacacacaccctgctgccactggacttctaataatggtggaaggt

SEQ ID NO: 280373 - DNA, 349 bp, Glycine max
agggttctctttctctttctctgtctgcttcttcactttctctcgtttcaatcgaaaaaaatcatgggcagaaaattcttcgtcggtggcaactggaaatgcaatgggaccactgaggaggtgaagaagattgttactactttaaatgaagctaaagtccctggagaagatgttgtagaagttgttgtgagccctccttttgtgttccttccttttgtaaaaagtttgctgcgccctgatttccatgtctcggcccaaaattgttgggttcgcaaaggtggtgcttatactggagaggttagtgctgaaatgcttgttaatttgggaattccttgggttattatggcac

SEQ ID NO: 280374 - DNA, 343 bp, Glycine max
  unsure (1)..(343): unsure at all n locations
gtgatttcagtgagtgatcggtgttcacttgatctcatcataatcgtcagcgtcaattgaagaagatgnccgatcagaaacatcgccgtcggaaggcctgaagaggcgactcaccccgacacgttgaaggcggctttggctgagttcatctncaccttcatcttcgtgttcgccggctcaggctccggcatcgcctacaacaagctcaccgacaacggcgctgccacccctgccggctcatctccgctccatcgcccatgcattcgccctcttcgtcgccgtctccgtcggggcaaatttcggcgggcagtcaacccgccgtcacttcggcgcnatatcgggg

SEQ ID NO: 280375 - DNA, 346 bp, Glycine max
  unsure (1)..(346): unsure at all n locations
gttaacgcattggctaaggcattgtctggcaacaaggatgtggccttcttctctgctaatgctgcagctcaggcttcaagnaagtcctctccnagagtgaccaacgaggctgttcagaaggctgctgctgcattgaagggttcanatcatcgccgtgcaacaaatgtcagtgccagactggatgctcaacaaaagaagctcaaccttccaatccttccaaccaccactnttgnntccttccctcagactgtagaactgaggagggtacgcgtgagttcaaggtaacaagantccgaggaagagtatgttaagnccattaaggaganatntcaagtgtgaactnaag

SEQ ID NO: 280376 - DNA, 357 bp, Glycine max
  unsure (1)..(357): unsure at all n locations
agtttgttgtgagctataagctagtttatcgtgaggagaatatgaagttgtttgttttctttgttgctgcagtagttttggtagcatggccatgccatggcgcaggctaccaaaggttccctctccgaatgaaaactggctatggtgagcgttcttcggaggtaaaatgcgcaagttttaggcttgctgtggaagcacacaacatccgagcctttaaaaccattcctgaagagtgngttgaaccaacaaaggactacattaatggcgaacaatttagatcagactctaaaacagttaaccaacaagctttcttttatgctagtgaacgcgaagtccatcacaacgacatatttatat

SEQ ID NO: 280377 - DNA, 345 bp, Glycine max
  unsure (1)..(345): unsure at all n locations
cgagataactagaaacagtgtgatgaaaatgaaggtccttgttttcttcgttgctacaattttggtagcatggcaatgccatgcgtacgatatgttccctctccgaatgaacactggctatggtgcccgtactccggaggtgaaatgcgcaagttggaggcttgctgtggaancacacaacatctttggctttgagaccattcctgaagagtgcgttgaagcaacaaaggaatacatccatggcgaacaatatagatcagactccaaaacagttaaccaacaagcttactttatgccagagacctcgagtccatcccaagacacattgtgtcagtatagtgnacg

SEQ ID NO: 280378 - DNA, 352 bp, Glycine max
  unsure (1)..(352): unsure at all n locations
ctatttctcagtctctgtgtttgcggctgaggattccnaacgagtgaccttcntcgtnnctcgcaaagtttaagtncnncatgggtaagncaaaaggttcacatcaacattgtcgtcattggacatgtcgactctgggaagtcaactaccactggtcacttgatctacaagcttggaggtattgacaagcgtgtgattgagaggttcganaaggaggctgccgagatgaacaagaggtcattcaagtatgcntgggtgctcgacaagctcaaagctnngcgtgaaagaggaattaccattgatattgctttgtgggagtttgaaaccaccaagtactatgancgggtcattg

SEQ ID NO: 280379 - DNA, 352 bp, Glycine max
  unsure (1)..(352): unsure at all n locations
ggcaaagaagaagggccggcactctggttatggtaagagaaagggtacaagggaggcgaggcttcccaccaagatactttggatgagaaggatgcgtgtgctcaggcggttgcttcgtaagtacagggaatcaaagaaaattgacaagcacatgtaccatgatatgtacatgaaggtgaaaggtaatgttttcaagaacaagagagtcttgatggagagcattcacaagtccaaggctgagaaggcaagagagaagactttgtctgatcagtttgaggctaagcgtgcaaagaacaaggctagcagggaaaggaaacttgctcggagggangagcgcttagcccaaggtcct

SEQ ID NO: 280380 - DNA, 347 bp, Glycine max
ctttcttcaccgttcgctctttctttctcccctacacaaaacatggctttgcccaatcagcaaaccgtcgattaccccagcttcaagcttgtcatcgtcggcgacggtggcacaggaaagacaaccttcgtgaagaggcatctcactggtgaattcgagaagaaatatgaaccgaccattggtgtggaggttcatccgttggattttttcacgaactgtggaaagattcgcttctattgttgggatactgctgggcaagagaagtttggtggcctcagagatggatattatatccatgggcaatgtgcgattatcatgtttgatgttactgccgctaacatacaaaa

SEQ ID NO: 280381 - DNA, 312 bp, Glycine max
ggcaaagaagaagggccggcactctggttatggtaagagaaagggtacaagggaggcgaggcttcccaccaagatactttggatgagaaggatgcgtgtgctcaggcggttgcttcgtaagtacagggaatcaaagaaaattgacaagcacatgtaccatgatatgtacatgaaggtgaaaggtaatgttttcaagaacaagagagtcttgatggagagcattcacaagtccaaggctgagaaggcaagagagaagactttgtctgatcagtttgaggctaacgtgcaaagaacaaggctagcagggaagga

SEQ ID NO: 280382 - DNA, 284 bp, Glycine max
  unsure (1)..(284): unsure at all n locations
gtatttccctacctctcccttcaagatgcagatcntcgtcaagaccctcaccggcaagaccatcacccttgaggtggaaagtctgacaccatcgacaacgtcaaggcaagatccaggacaaggaaggaatcccccggaccagaacgtccattcgcggaanaacttgaggaggcgtaccttgtgatacanatcagaagagagacctcactgtctcgctcgtgtgnatganttcgtagaatacggaaacatactgagtgaagtcgaacangtagnaagcagtcagc

SEQ ID NO: 280383 - DNA, 332 bp, Glycine max
  unsure (1)..(332): unsure at all n locations
ctcgagcncttggaatccaaaaatgagagaaatcatncagcattcacataggtcaggccggnatccaggttggcaactcctgctgggaantctactgcctggaacatggcatccagcccgatggcatgatgccaagtgactcctccttcggtgtagcccacgacgccttcaacaccttcttcagcgnaaccggatccggcaagcacgtccctcgcgnngtcttcgtcgatctcgagccaccgtcatcgacgaagtccgttgtggcattaccgtaatcttccacccgacatcgattccggcaagaagtgcntcacaatttgcanagcataacg

SEQ ID NO: 280384 - DNA, 335 bp, Glycine max
  unsure (1)..(335): unsure at all n locations
cttctccaacatgccaaacgananngttctgagtcttttcttcntcgttaccntctaccacatgcctnctctctgctaattncacgatgaccatattttcctaccgagtcaactccatgacgatgactcagtgagttgcactgctaccgacccaaaccttaacganagccggtgatcggaatcctgacccaccccggcgacggtgctctggccggtcagcaacgccaccggggttcttacatcgccgcctcctacgttaaattcgtggagtcggtggtgtagagttattnccttattacaatgagcactgagaacttacagaggnnngattngna

SEQ ID NO: 280385 - DNA, 343 bp, Glycine max
  unsure (1)..(343): unsure at all n locations
caacgcttaacctctctcattccccatttcctcacctccttcaaccgctgctaaattctagggttccgaaatggacgctggcggaaagatcaagaagggcgccggaggtagaaanggcggcggnccaaagaagaagccggtttcaangtccgtcaaagccggtctccaattccccgtcggaagaattggccgttatttgaagaaaggaagtacgctcagcgtgtcggtaccggtgctcccgtatattggctgcagtttcgaatacctagctgccgaggtgttnagttggctggaatncgcacgtgacaacaagagacaggattattcccaagacagtgttttg

SEQ ID NO: 280386 - DNA, 274 bp, Glycine max
  unsure (1)..(274): unsure at all n locations
agcgccaganactcccacgtccccattttggcacncttgccaattgggttcgctgtgttcttggttcacttggcaaccatccccatcaccggaactggtatcaaccctgctcgtagtcttggtgctgctatcatcttcaacaaggaccttggttgggatgaacactggatcttctgggtgggaccattcatcggtgcagctcttgcagcatctaccaccaggtcgtaatcagggcattcccttcaagtccaagtgatcaatcaaacggtcatgc

SEQ ID NO: 280387 - DNA, 346 bp, Glycine max
gaatctcaagattctaagagagattttgctgctctttgaagaagggtgtttgcttgattttggagatgtcgctgctctcagatctcatcaaccttaacctctcagacactactgagaaggtgatcgcagagtacatatggatcggtggatcaggaatggacctgaggagcaaagcaaggactctcccaggaccagttagcgacccttcaaagcttcccaagtggaactatgatggttccagcacaggccaagctcctggagaagacagtgaagtgattatatacccacaagccattttcagggatccattcagaaggggcaacaatatcttggttatctgtgatac

SEQ ID NO: 280388 - DNA, 340 bp, Glycine max
  unsure (1)..(340): unsure at all n locations
aggaaaacacgggaattaacttcgatgcgtatgaggacattccggtggagacgagcggtgaaaacgtgcccccggctnctgaatacttttgcggagattgacttgggcgacgcgcttagtcagaacattagacgctgcaaatatgtgaagccaacgccggttcagcggcatgccataccgatatcccttgcgggacgggatttgatggcttgtgcgcagactggttccggaaagactgcagcattctgtttcccaatcatcaatgggattatgagaggccaagcccaacccctccagaggccccctcgcggcgtccgcatagtctaccattgccttgtnt

SEQ ID NO: 280389 - DNA, 341 bp, Glycine max
gagaattagggttcgattccggagagggagcctgagaaacggctaccacatccaaggtaggcagcaggcgcgcaaattacccaatcctgacacggggaggtagtgacaataaataacaataccgggctcattgagtctggtaattggaatgagtacaatctaaatcccttaacgaggatccattggagggcaagtctggtgccagcagccgcggtaattccagctccaatagcgtatatttaagttgttgcagttaaaaagctcgtagttggaccttgggttgggtcgatcggtccgcctccggtgtgcacggtcggctcgtccttctgccggcgatgcgt

SEQ ID NO: 280390 - DNA, 343 bp, Glycine max
attttgtggtttagtttttcaaccatgttctttgctcacagggaaaatacagtgagcactctcggtcgctttgtgctgcttatatggttatttgtagttctaataattaactcaagttacacagcaagtttgacatcaatcctcacagttaaacaactttcttcacctgtcaaaggcattgaaagtttaagaagtagcaaagagcctattggctacttgcagggttcatttactcgaaattatttaattgatgaaattggtattgatgaatccagactagttcctctgaaaacaccagaagaaactgcagaagcacttaagaaaggtccccagaagggtggtg

SEQ ID NO: 280391 - DNA, 336 bp, Glycine max
  unsure (1)..(336): unsure at all n locations
atttgtgaattctgatgagtgtttattgacaagaatgcaaganatgtccctggnttaccatttcacagtagagcaagaagttggatcagccactcacgctttcttcggtttcaacggaactgctggcatttggagaatagctgctatcaatgaagctggagggtggaaagacagaacaacagtggaagatatggaccttgctgttcgtgctagtcttaggggatggaaatttttgtaccttggagacctccaggccaaaagtgagcttcctagtactttgagagccttcagattccagcagcacagatggcttgtggtcctgctaattgttccgca

SEQ ID NO: 280392 - DNA, 339 bp, Glycine max
aagtaattgaagcacattacttgtttgggagctgactatgatcatattgagattgtcattcatccacaatcaatcatacattcaatgattgaaacacaggattcatctgttcttgcacagttggggtggcctgatatgcgtttgccaatcctctatacattatcatggcctgacaggatttattgttctgaagacacttggccctgccttgatctttgcaagattggttcacttacatttaaaactccagataatgtaaagtatccatccatgaatcttgcctatgctgctggccgtgctggaggcacaatgacaggagtcttagtgcagccaaatgag

SEQ ID NO: 280393 - DNA, 277 bp, Glycine max
gagatgctgaagaacatttttgtggaggtgaagaacaaatttgagaccgccataggaatattaaagaaggagaaaatcaccattgacccagaagatccagctgctgtttctcattatgcaaaggtcatgaaaacaattagagagaaggcaagcttattgtcggagtcccaagacatactatccaccattgaaattgagacacaggatattccagatgctcggacctatcttctgactttgaaggaaataagagtcaagagaggcttacagatgatct

SEQ ID NO: 280394 - DNA, 339 bp, Glycine max
  unsure (1)..(339): unsure at all n locations
acgatacgtaataagttctatcattgaggaagtttcctgtgcatcgtctccgaaaatgaacgacgcagatgtctcaaagcaaatccagcagatggtgcagttcatccgccaggaagctgaggaaaaggccaacgagatctctgtctccgccgaagaggaattcaatatcgagaagctgcagttggtcgaagccgacaagaagaagatcaggcaagaatacgaacgcaaagagcgccaagttgaaattcgcaagaagattgagtactcgatgcagnaaatgcttctcggattaaagttcttcaantaagatgngtgatcagttcatgaagaantnatcaa

SEQ ID NO: 280395 - DNA, 370 bp, Glycine max
  unsure (1)..(370): unsure at all n locations
ggccttatgaagctgctgccctagcttttgaagccataccacgaactttggctcaaaattgtggagtaaatgtcatccggactatgactgctctacaaggaaaacatgcaaatggagaaaatgcatggattggtatagatggaaatactggcagtatcactgacatgaaagagcgcaagatttgggatgcctacatgtgaaggcacaagcatttaagactgccattgaagccgcttgtatgcttctgaggattgatgatatagtgagtgggatcagaagaagcagcccctggagctgctccttcaaaacccangttgagaccgaggcagatgctgacagtgagcaatcctcctgctgagatctcgggtca

SEQ ID NO: 280396 - DNA, 377 bp, Glycine max
  unsure (1)..(377): unsure at all n locations
cttcaatcgcactaatgggctgtcaccttctcagatctacacaccgaagagggcatcaaatccctcgatcaattcctttctgggaaaacctatatttctggggatcagttgacaaaggatgatattaaagtgtatgcagctgttgttgaaaagccaggggacacttttcctaatgctgccaagtggtacgatgctgtctcttctcaacttgctccaagctttcctggccacgctcaaggggtaagattcagtggcgctgctgctccagctgaagctgcacctgccaaagcggctgccacnnnnnnnnnnnnnnnnnnnnnnnnnnnnctctttggtgatgagacagaggaagataagaaggcagcagaggaaagggt

SEQ ID NO: 280397 - DNA, 360 bp, Glycine max
  unsure (1)..(360): unsure at all n locations
gattttttgatggaaaaactgccagcttgtgtgtgcgtcgtgctgtttattatgatcctgagacaggaaaggaagatccttccaagaatggcatttgtagcaattttttgtgtaactcaaagccaggagacaaaattcagatcacaggcccgtcggggaagataatgcttttgcccgaggatgacccaaatgctacccatatatgattgccacaggcactggtgttgctccattcagaggctatctacgcggaatgttcatggatcagtcctgcataaagtttggtggattagnanggntttccttggagttgcaacatgacagctccctatgngatgattcagcaatactcaggnttnc

SEQ ID NO: 280398 - DNA, 372 bp, Glycine max
gtggacacctgctagcaggaaccagtacaatctccgagatgcagttgcacgttgcaccacacaggtataccccttttcatggactgctatttatattgcccttgacaatgtgggaatgtggaacttgaggtctgagttttgggcacgacaataccttgggcaacagttatatttacgcgtttatacagcatcaacctcaatcagagacgagttccctgttccaaagaatgcaattctttgtggtagggctagtgggagacacacgcgaccctttgagctagcaagagtttaaaggttccacgcttgaagaggcatctagctttagaatacgaaaagtagttaacttactacttctattttatagttgagtgc

SEQ ID NO: 280399 - DNA, 355 bp, Glycine max
  unsure (1)..(355): unsure at all n locations
agggtttagcgcanttcttctagatttaaggaagatgggtaaggaaaaggttcacatcagtattgtggtcattggccatgtcgactctgggaaatccactaccactggtcacctgatttacaagcttggaggcattgacaagcgtgttattgagaggttgagaaggaagngctgagatgaacaagaggtctttcaagtatgcctgggtgctggacaacttaaggctgagcgtgaaagaggatcaccattgatatgnctttgtggaagtttgaaccaacaagtattattgcacagttattgatgcgctggnatagggattccataagattatgttactgggcctcccagctgctgt

SEQ ID NO: 280400 - DNA, 365 bp, Glycine max
  unsure (1)..(365): unsure at all n locations
acttcctcctcgaagcccgccgtccctctcctgnaggacgagctggacatcgtgatcccgacgatccgcaacctcgacttcctcgagatgtggcggcccttcttcgagccctatcactcatcatcgtgcaggacggagaccccaacaggaccatcaaagttcccgatgggttcgattacgaactctacaaccgcaacgacatcaacaggatcttgggtcccaaggcctcctgcatctcgtttaaggattctgcttgtcgctgctttgggtacatggtgtctaagaagagtacatctacaccatcgacgacgactgcttcgttgctaaagaccttctggaaaggacncatgcattgancagcnatt

SEQ ID NO: 280401 - DNA, 188 bp, Glycine max
  unsure (1)..(188): unsure at all n locations
gctgttagggacatgcgtcaaactgttgctgtgggagtcatcaagaacgttgagaagaaggatcctaccggagccaaggtcaccaaggctgcccagaagaagaagtgaatcgtgcgggctggttcatcaggggatgttggttacaataaatgttggtttcttttctgtactcttgtgtcttctttncg

SEQ ID NO: 280402 - DNA, 349 bp, Glycine max
  unsure (1)..(349): unsure at all n locations
ctccataacacaaggcagaaagcaagctcatcctagagttttaaaaatggcagcagcctcctccatggctctctcttccccatccttggctggcaaggccgtgaagctgggcccatcagcccccgaagtcgggagggtcagcatgaggaagaccgtcaccaagcaggcttcctccggaagcccatggtacggccagacgcgtcaatacttgggcccattctctggcgagccccgtcctactcactggcgagttcccagtgatacggtgggacntgtgggttcggcgacccagaaacttcgccnaaaccgtgactcgaatgatcantcaagtgggcatgctcggggcttg

SEQ ID NO: 280403 - DNA, 354 bp, Glycine max
  unsure (1)..(354): unsure at all n locations
anagaaaatcctcacccattttcttcgtagccaaacactctgaaattctcagttatgtcgtggcaagcgtatgtggatgatcacctactgtgtgaaatcgaaggtaaccacctcactcacgccgctatcatcggccaagacggaagcgtttgggtcagagcaccaacttccctcagttcaaacctgaggaataactgccatcaatatgactttaatgagcctggatcacttgctccaactggattgtatatcggtggcaccaatacatggtcatccanggtgagcctggtgtgtcattcgagggaagaagggtctggtgtgttatgtgaagagaccggtgcggccttgacattg

SEQ ID NO: 280404 - DNA, 186 bp, Glycine max
atcaagcctttcgtcaatggtggagcctccggcatgctcgccacctgcgtcattcaacccatcgatatgatcaaggtgaggattcaacttgggcaaggatcagctgcgcaggtcacttccaccatgcttaagaatgagggtttgctgccttctataagggtctatctgctggattactcaggcagg

SEQ ID NO: 280405 - DNA, 349 bp, Glycine max
  unsure (1)..(349): unsure at all n locations
ctataagctagtttatcgtgaggagaatatgaagttgtttgttttctttgttgctgcagtagttttggtagcatggccatgccatggcgcaggctaccaaaggttccctctccgaatgaaaactggctatggtgagcgttcttcggaggtaaaatgcgcaagttttaggctgctgtggaagcacacaacatccgagcntttaaaaccatcctgaagagtgcgttgaaccacaaaggctacattatggcgacaattagatcagctctaaaacagttaaccacaagcttctttatgctatgacgcgagtccatcacacgactatttatattcggcatagttacacgtactc

SEQ ID NO: 280406 - DNA, 342 bp, Glycine max
  unsure (1)..(342): unsure at all n locations
cacaatttctctttctctctttttttgtgtgtccaanatggctcctagttctgctcacaacaatgggttctatgtgcttatgctagttgggatagtggttagcactatggttgctacctgtgctggtagcttctaccaagacttgatctaacatggggtggtgaccgtgctaagatatcaatggtggcagcttctatcactttccctagacaaagtctctggctctggttcaaatcaagaaaagatacctatttgggaggatgatatgcagctcagctcgttgccggcactctgctggcactgtcntgttactactgtcatccaaggccacacatgatgagt

SEQ ID NO: 280407 - DNA, 322 bp, Glycine max
  unsure (1)..(322): unsure at all n locations
caggaagagaaatgttgagtgagagcaagctgaaggacctcctgcacggttcggaatatgtactcacttatgaagataaagatggtgactggatgcttgttggagatgtaccatgggatatgttcatcgacacatgcaaacgactgaaaatcatgaagggtctgatgctattggcttantcccagggcccatggaaaatccagagcagtgtagttgtattgaactgtgactcgtttgttacaagtgagtgctgagtatatgaggtgtgaagagaatatgtataatgnngatctgggttgaggtactctatcagngtgcatga

SEQ ID NO: 280408 - DNA, 180 bp, Glycine max
ggtggactaacggttcgatccggaacgaggaagagtattctcacggagccaataatggcttgaagaaagctattgatttctgccaggaagtgaagggcaaaatatcctaaaattacatatgcagatctcttccagcttgcgggtgttgttgcagttgaggttactgggggtccaacaatt

SEQ ID NO: 280409 - DNA, 349 bp, Glycine max
caaatttctgccctatcaactttcgatggtaggatagtggcctaccatggtggtgacgggtgacggagaattagggttcgattccggagagggagcctgagaaacggtaccacatccaaggaaggcagcaggcgcgcaaattacccaatctgacacggggaggtagtgacaataaataacaataccgggctcattgagtctggtaattggatgagtacaatctaaatccttaacgaggatccattggagggcaagtctggtgccagcagccgcggtattccagctccaatagcgtatatttaagttgttgcagttaaaaagctcgtagttggacttgggttgggtcgat

SEQ ID NO: 280410 - DNA, 322 bp, Glycine max
  unsure (1)..(322): unsure at all n locations
catgagttgactgctatgttataccctctaatnatcagttctgtgggtatccttgtttgtttgctcacaactttatttgcaactgacttctttgagatcaaggctgtaaaggagatgagctgcattgaagaaacagctcatcattcccactggcttgatgactattggatgcaattgtagttggatgcactccaacttccttcacatcttcatttggagtncagaagagtcagaatggcactatctgtgtgtgcgtggcttgggcaggcttatattggattgtacgagtactatactagcatgcatatagccgtncagngtg

SEQ ID NO: 280411 - DNA, 365 bp, Glycine max
gtgcctctttctacttttccctcattgcttctaactcaacaattgagatctcacactgcaattccttcttctcccagaatcggtcactaaatccgcaatcatgaagctcgataccaccggtctcgaatcgtttcccacactgcttgcgcctcaaaacgacgtcgttggagaactctccgccgctccatccttcgaccttccgaattccaacgatttcgatgggtttgtgaaagaagctattcagatggtgaagcccgcgaaggtactacgactcttgcttttatatttaaggagggtgttatggtagctgctgattctcgagctagcatgggaggatatatatcatcgcagtctgtgaagaagat

SEQ ID NO: 280412 - DNA, 357 bp, Glycine max
caaatttctgccctatcaactttcgatggtaggatagtggcctaccatggtggtgacgggtgacggagaattagggttcgattccggagagggagcctgagaaacggctaccacatccaaggaaggcagcaggcgcgcaaattacccaatcctgacacggggaggtagtgacaataaataacaataccgggctcattgagtctggtaattggaatgagtacaatctaaatcccttaacgaggatccattggagggcaagtctggtgccagcagccgcggtattccagctccatagcgtatatttaagttgttgcagttaaaaactcgtattggacttgggttgggtcgatcggtccg

SEQ ID NO: 280413 - DNA, 362 bp, Glycine max
  unsure (1)..(362): unsure at all n locations
ctctgctcgtagggtttctccacctagaggganatgggctcccaaaccgcctagtacgggtctgtttgttggactgaacaagggtcacgtcgtcaccaagaaggaattgcctccacgcccctcagatcgtaaggggaaaacaagcaagagggtgcactttgtgaggaacctcataagagaggtagccggttttgcaccctatgaaaagcgtataactgagttgctgaaggttgggaaggataagagggcactgaaggttgcaaagagaaagctcggaacacacaaacgcgcaaagaagaagcgtgaggaaatgtccagtgttctcaggaagatgagggtggtggtgctggagacaagaagaa

SEQ ID NO: 280414 - DNA, 357 bp, Glycine max
caatggggctttgctactggtggaaaaacattctttctgtggggagggtgcatgatgatgcatgctgatgactttaggcaagatcgttatggtgtagtctccggacttaaagatggtggatattcggatgatatgactcttgcagccatatctggtgctcacaaaaggctcattacttctcctcctgttgctgtctttcctcacccccttgccagtgatcttaattttggaagatattggaattacttgaggaaacaaacatttgttttggagtcatatttaacaaatgttaactgggtgatgaaccgtgcatgtttactacccactgcttttgtcatggggattgtggcaccatat

SEQ ID NO: 280415 - DNA, 363 bp, Glycine max
ctttagcccgaggtcaggaggagcactagctaagttcacaatttcaaaatggctaggggactaaagaagcatttgaaaaggctcaatgctcctaagcattggatgcttgacaaactgggtggtgcatttgcgcctaaaccctcatctggaccacacaaatcgagggagtgcctccccctcattcttattctgcgaaaccggctgaagtatgctctgacataccgtgaagtcattgctattctgatgcagcgccatgttcttgttgatggcaaagtcaggactgacaagacttaccctgctggtttcatggatgttgtttcaatcccaaaaacaaatgagaacttccgcctgctctatgacact

SEQ ID NO: 280416 - DNA, 367 bp, Glycine max
  unsure (1)..(367): unsure at all n locations
aatgccatgggctgctctgcaatacttggaatcgctgcgcaacgcgcatccctgangctctccgattggtacaattcgctggcggatctataccagaacaagctctgggcaccagcttaccctcaagcttgagcagttcgtggctctcgccgtcttccaggccggtgatgcattaatacaattatatcacaatttcatcacagactttgagaccaaaatcaaccttctcaagcttgcgcatttcgctgttatagtttctcggcagtatgctgagaaagnngctgcggttggttatcttggaggggttattcagaaacttcnagatactagagagcagcgcatagaagaacctattctttacattang

SEQ ID NO: 280417 - DNA, 358 bp, Glycine max
agataagcaaagcgtgaaaaatcgcaaaataccaaatcaaaataacaagcacaattacagtgactccgcttggttcctcttcttcgatcttcggtttgattctgcgtttgttcacatcatggccaccgcttcagtggcatttaagtccagggaggaccaccgcaagcagattgagttggaggaggcgcgtaaagcggggcttgcgccagtgaactcgatgaagatggaaaggaaatcaatcctcacattccccagtatatgtcctctgctccttggtatcttaatgctgagagacctagtttgaaacatcaaaggaaatggaatctgaccccaattacaccaaatcatggtagatagg

SEQ ID NO: 280418 - DNA, 353 bp, Glycine max
aagagaatggctcccaagggtttaatctttttgggctgtgttatgcttctcagcactgtcactgagtcgttgtcttgcggaggataatggacttgttatgaacttctacaaggaatcatgccctcaggctgaagacatcatcaaagaacaagtcaagcttctctacaagcgccacaagaacactgctttctcctggctcagaaacatcttccatgactgtgctgttcagagttgtgatgcttcactgttgctggactccacaagaaggagcttgtctgagaaggaaacagatagaagcttgggttgagaattcagtaccatgagacatcaaagaagcttggaagggatgccag

SEQ ID NO: 280419 - DNA, 360 bp, Glycine max
  unsure (1)..(360): unsure at all n locations
ctcgagcgctnagttctgagtattctgatcgctccctgagagagctcgtcgcggcggttgcagaagaagattgcaagatgaagttcaacatcgcgaatcccaccactggatgccagaagaagctcgagatcgacgacgatctgaaactgcgagcattttgggacaagaggatctcacaggaggtcatcggagatgcactcggtgaggaatttaagggctatgtcttcaaaattaccggagttgtgacaaacaaggatttccaatgaagcagggagtgctgactcctggtcgtgttagacttttgcttcacaggggaatccttgcttccgtngatatggaaggcgtaatggagacgtagga

SEQ ID NO: 280420 - DNA, 343 bp, Glycine max
  unsure (1)..(343): unsure at all n locations
gagcaagcacacctatgtntctcatgtctcggaagattaaatcacttggtgtcaaatgggttatctcaggagaaggatctgatgagatcttggagggtatttgtacttccacaaggcacccaacaaggaggagttccacagagaaacatgccgcaagatcaaagcacttcaccaatatgattgcttgcgagccaataaatcaacatttgcttggggctagaagcccgtgtaaccattttggacaaggcgttatcatgtgcaatgagtattgacctgagtggaagatgtaaaagagtgaagacgaattgagaagtggatctgagagagcttgtgtgagacatct

SEQ ID NO: 280421 - DNA, 357 bp, Glycine max
  unsure (1)..(357): unsure at all n locations
tgtgaatcaagaaccgctctgctatggctgctctgcantacttggaatcgctgcgtaattcgcaccctgagctctccgattggtacaattcgctggcggatctgtaccagaagaagctctggcaccagctcactctcaagctcgagcagtttgtggctctcgccgtcttccaggctggtgatgcttaatacaattatatcacaatttcatcacagacgtngagacgnnaatcaaccttctcaagcttgcacattttgctgttatagttctcggcagtattctgaaaaagaagctgctgttggtnatcttggaggggtcattcaganacttcaagacactagggagcagcgcatagaa

SEQ ID NO: 280422 - DNA, 357 bp, Glycine max
  unsure (1)..(357): unsure at all n locations
tgttgatgttgagttcatgtacactgcaaaatggaaggaaacagatacatcttttgagaagagaatggataaatactctcagtcttcttctttgccacatcacttggagattcactggttctcaatcataaactcctgtgtaacagttcttcttttgactggttttctggcaaccattctcatgcgtgtattgaagaatgactttatgaagtatgctcaagatgaggaagctgctgatgatcaagaggagacaggatggaaatacattcatggtgatgttttccggtttccaaagcacaagtctttcttttcagcagccttggttctggtctcagttattcnacttaccaacttcat

SEQ ID NO: 280423 - DNA, 362 bp, Glycine max
gccagtaacacttaccagtatggctatccaacaatctctgttagacaggcctagaaaatctgtttccaaaactatctgcttaatcttttctatagctgctgtcatgatctcatcagcctttgttggttcttatctcatcaaatccacctccttcttcaaccaatcctctcctcaacatctctgtgatcatgcacttgatagggcaacatgtttaacccatgtctcagaagtggtacaaggtccgatcttgacccccacaaaagaccacaaattcaatttgttacagtcattcctaatgaaatacacctcacacattaagagagttatgaacacagccagttctatcaaacttaggatcaaca

SEQ ID NO: 280424 - DNA, 362 bp, Glycine max
  unsure (1)..(362): unsure at all n locations
aaaatatctctatatattccctccattnctgagaatgggcgaaggctgcggagaagaagccagcggtgagaagtctccggcggagaagaagcctaaggcagagaaaaagattccgaaggaaggcggtggcgnnnnnnnnnnnnnnnnnnnnnnnnnnagcgtggagacctacaagatctatatcttcaaggtgctgaagcaggtacaccctgacatcggtatttctagcaaggccatggggatcatgaacagcttcatcaacgacatcttcgagaagctcgcgcaggaagcggcgcgtctcgccaggtacaacaagaagcctactattacctccagggagattcagaccgcggtcaggttgg

SEQ ID NO: 280425 - DNA, 358 bp, Glycine max
caccgcacgaatatcttgttgtttggagcgatccgagaaaaactctgtaaacatgttggtttaccaggacctccttacaggtgatgagcttctctctgactccttccgttacaaggaaattgagaatggaatgctgtgggaagttgaggggaagtgggttgttaaaggagcagttgatgtagacattggtgcaaacccttctgctgagggtggaggagaagatgagggagttgatgatgcagctgttaaggttgttgacattgttgacacattcagacttcaggagcaacccgcattcgataagaagcagtttgttaccttcatgaagaggtttatcaagaattgactcccaagctcg

SEQ ID NO: 280426 - DNA, 363 bp, Glycine max
  unsure (1)..(363): unsure at all n locations
gcagaaggagcaaaagcaatgggcgccgnngaagccgagaaccacgacaaggaaccctgatttggttagggggattggcaagtattcgaggtcgcagatgtaccacaagangggcatctgggccatcaaggccaaaaacggtggcgttttgccccgccacgatcccaagcccaagcccgaggccccggcccagaagccgcccaagttctaccccgcggacgatgttaagaagcccntcgtcaacaagcacaagcccaaacccgcgaaactcagggctagcattactccagggactgtgttgatcctgcttgctgggaggttcaagggaaagagggttgttttcctgaagcagctcccatctgg

SEQ ID NO: 280427 - DNA, 361 bp, Glycine max
gtgagctataagctagtttatcgtgaggagaatatgaagttgtttgttttctttgttgctgcagtagttttggtagcatggccatgccatgggcgcaggctaccaaaggttccctctccgaatgaaaactggctatggtgagcgttcttcggaggtaaaatgcgcaagttttaggcttgctgtggaagcacacaacatccgagcctttaaaaccattcctgaagagtgcgttgaaccaacaaaggactacattaatggcgaacaatttagatcagactctaaaacagttaaccaacaagctttcttttatgctagtgaacgcgaagtccatcacaacgacatatttatattcggcatagat

SEQ ID NO: 280428 - DNA, 362 bp, Glycine max
gagaatgggctcccaagggtttaacctttctggctgtgttaatatgcgtttcagcactgtcactgagtccttctgttgcgggggaagggcaaaataatggccttgttatgaacttctacaaggaatcatgccctcaggctgaagacatcatcacagaacaagtcaagcttctctacaagcgccacaagaacactgctttctcctggctcaggaacatcttccatgactgtgctgttcagagttgtgatgcttcactgttgctggactccacaagaaggagcttgtctgagaaggaaacagatagaagctttgggttgagaaatttcaggtacattgagaccatcaaagaagctttggaaaga

SEQ ID NO: 280429 - DNA, 359 bp, Glycine max
cattttttctcttcaaacaaattttcaaaatgcgtgagatccttcacatccagggtggccaatgcggcaaccagatcggcgccaagttctgggaggtggtttgcgcggagaacgggatcgaccccactggaaggtacggtggggactcagagcttcagctcgagaggatcaatgtctactacaacgaagccagctgcggccggttcgtgccgcgcgcggttctcatggacctcgaaccgggcaccatggacagcgtccggtccgggccgtacgggcagatcttcaggcccgacaactttgtgttcgggcagtccggggcaggaaacaactgggccaaggggcactacactgagggtgtg

SEQ ID NO: 280430 - DNA, 356 bp, Glycine max
gtttgaccctcctctgcctagcggttactacggcaacgcttttgccttccccgttgctgtcaccactgcggggaagctgtgcgataaccctttgggatacgctctcgagttggtgaggaaagccaaagcggatgtgactgaggaatacatgcactcggtggctgatataatggtcaccaagggccggcctcacttcactgttgtgagatcgtatctcgtgtcggatgtgactcgtgctgggtttggaaacattgagtttgggtgggggaaggctgtttatggaggacccgccaagggaggggttggagccatacctggtgttgctacttttacataccctttaagaatgctaaagg

SEQ ID NO: 280431 - DNA, 356 bp, Glycine max
tctattcattcaagattcagcaagtgcgttttggaagcagagaccgaaatacttcgagatggcccgtacaaagcaaactgctcgtaagtcaactggaggaaaagctcccaggaagcagcttgcaaccaaggctgcacgtaagtctgcaccaacaactggtggtgtgaagaagcctcatcgttatcgccctggaactgttgctcttcgtgagattaggaaataccagaagagcactgagctcctaatcaggaaattcctttccagaggttggttcgtgaaattgcccaggattcaagactgatctgcgtttccagagccatgctgtgcttgcattgcaagaggctgctgaggcatac

SEQ ID NO: 280432 - DNA, 357 bp, Glycine max
  unsure (1)..(357): unsure at all n locations
gcagcacgagggagcagcctcaggaggagaaggatgtctcacaggaagttcgagcacccaaggcacggttcactgggatttcttcccaggaagcgtgctgctcgtcacaggggaaaagtgaangcattccccaaggatgacccatccaaggcacccaagctcactgcattcttgggttacaaggccggtatgactcacattgttagagaggtcgagaagccaggatcaaagcttcacaagaaggaaacttgtgagcctgttacaattattgagacccctccaatggttattgttggtgttgtgggtatgtgaaaactccacgtggtctccgaacattgaacatgtctgggtcagcat

SEQ ID NO: 280433 - DNA, 358 bp, Glycine max
caacaagttcacctacaactgtgacggccacaccttcaactacctcgtcgacaacggattcacttattgtgttgttgcggatgaatcgattgggagacaggtgcctgtggcttttctggagcgtgtgaaggatgactttgtggccaaatacggcggcggaaaggcagcaaccgtggctgcgaacagcctgaacaaggaattcgggtctaagttgaaggagcacatgcagtactgtgttgagcatcctgaagagataagcaagcttgctaaggtgaaagctcaggtttctgaagttaaagatgtcatgatggagaacattgaaaaggttctggaccggggggaaaagatagagcttctg

SEQ ID NO: 280434 - DNA, 356 bp, Glycine max
  unsure (1)..(356): unsure at all n locations
gtgattgattgtgacganatctgacaatgaagcgtggagcattgttgtcagtgcttgcctgcgccttcgcggcggtgatctgggcagcgaacggcgacgacaacctcgtcccgcctcgccgggaagtgtacggcaatgggcgaatattcgacatcagtcatcggtaccaacccgagatgccggaatgggaatcgaatgacggcatagggcagttcctgtggcttcccaagagcatgaagaacggttccctcgccaacaactccgaaatgaagtttcccacccacaccggcacgcacgtcgatgcccccggtcacgtgttcgaccactattccacgccggcttcgatgtcgangncc

SEQ ID NO: 280435 - DNA, 356 bp, Glycine max
  unsure (1)..(356): unsure at all n locations
gccagtaacacttaccagtatggctatccaacaatctctgttagacaggcctagaaaatctgtttccaaaactatctgcttaatcttttctatagctgctgtcatgatctcatcagcctttgttggttcttatctcatcaaatccacctccttcttcaaccaatcctctcctcaacatctctgtgatcatgcacttgatagggcaacatgtttaacccatgtctcagaagtggtacaaggtccgatcttgacccccacaaaagaccacaaattcaatttgttacagtcattcctaatganatacacctcacacattaagagagttatgaacacagccagttctatcaaacttagga

SEQ ID NO: 280436 - DNA, 356 bp, Glycine max
  unsure (1)..(356): unsure at all n locations
attaatcaaacatggctagggttagtgctttgtttcactctttgctcttgatttcttcccttgtattggcttctcaaatccatgtttcctctgggaaactagtccctggactatcatggaattactatttgttgacatgtcccaagcttgagaggattataaggaagcatcttgaggatgtcttcgagaaggacagtggagtagctcctggcatacttcgactcttcttccatgactgctttcctaatggatgcgatgcgtctatattgttgaatggagacggtgacgagaagcaacaccgtgctaactttggtttaaggcaagangccattgacgccattgaaaaccttcgggtt

SEQ ID NO: 280437 - DNA, 359 bp, Glycine max
cattaattgcaagaatggcacttcgttgcttggtgatgtccctttctgttctcttcactcttggtcttgcgagagaaagccatgccagagacgaagatttttgggcatgctgtttggccaaacactcccattccaagttcattgcgagatcttctaaagcctggccctgcaagtgttgaaatcgatgatcaccctatgcaaattgaagaaacacagtacccgaaaaccttcttctataaagaagaccttcatccaggcaaaacaatgaaagtacaattcagcaagcctccctttcaacaaccatggggtgttggtacatggttaaaggaaattaaagacactactaaagaaggatatag

SEQ ID NO: 280438 - DNA, 356 bp, Glycine max
ggatcctgtgaacttatggctgacggggtggttctgttggatacatgggccagcatgtttgggatgagggttaggattgcattagctgaaaagggtgttgagtatgaatacaaggaagaaaatctcaggaacaagagtcctttgcttttgcaaatgaacccaattcacaagaaaattccagttctgatccataatggcaaaccaatttgtgaatctgcaattatagtgcagtacattgatgaggtctggaatgataaagctccaatcttgccctctgacccttatgagagagctcaagccagattctgggtagattacattgacaaaaaggtgtatgaccttggaggaaaatgtgg

SEQ ID NO: 280439 - DNA, 351 bp, Glycine max
  unsure (1)..(351): unsure at all n locations
ctctttcttcctcttcctcagtagtgcgattttcgattctcttctctgcaactatgcctaaccctaaggtcttcttcgacatgaccatcggcggtcaacctgccggccgcatcgtgatggagctctacgccgacgtgactccgagcaccgccgagaacttccgcgcgctctgcaccggcgagaagggcgccgggcggagcggcaagcccctccactacaaaggctcgtccttccaccgcgtgatcccgaattcatgtgccagggcggcgacttcacgccggaaacggcaccggaggcgatcgatctacggcgccaattcgccgacgagaattcgtgaagaanacctggtcc

SEQ ID NO: 280440 - DNA, 324 bp, Glycine max
  unsure (1)..(324): unsure at all n locations
aaaaatganaacccaaagtgcttctctcctctgtctttttctctctcttgctatccttttggctagtnngcactgctgcaagtgcaatccaagaagcgcagtgccaagccaccatgtttcaacattcaacagaagcctttttccttccacttttctctttggaattggttcttctgcttaccaggcagaaggagcagcaagtgtagatgggagaggaccaagcatatgggacacctacactagacagcatactgaaaagatttgggatcatagcaccggtgacatgggagctgattttatcatcgatacaagggtgacataaaa

SEQ ID NO: 280441 - DNA, 355 bp, Glycine max
  unsure (1)..(355): unsure at all n locations
gaacaatttagatcagactctaaaacagttaaccaacaagctttcttttatgctagtgaacgcgaagtccatcacaacgacatatttatattcggcatagataacaccgtactctctaatatcccatactatgaaaaacatggatatggggtggaggaatttaatgaaaccttatatgatgaatgggttaacaagggcgacgcaccggcattgccagagactcttaaaaattacaacaagctgttgtctcttggcttcaagattgtattcttgtcaggaagatatcttgacaaaatggccgtaacagaagcaaacctaaagaagntggcttccacacatgggagcagnaattctc

SEQ ID NO: 280442 - DNA, 357 bp, Glycine max
gagtttgttgtgagctataagctagtttatcgtgaggagaatatgaagttgtttgttttctttgttgctgcagtagttttggtagcatggccatgccatgggcgcaggctaccaaaggttccctctccgaatgaaaactggctatggtgagcgttcttcggaggtaaaatgcgcaagttttaggcttgctgtggaagcacacaacatccgagcctttaaaaccattcctgaagagtgcgttgaaccaacaaaggactacattaatggcgaacaatttagatcagactctaaaacagttaaccaacaagctttcttttatgctagtgaacgcgaagtccatcacaacgacatatttat

SEQ ID NO: 280443 - DNA, 355 bp, Glycine max
gcgaagagaagagaaaaattaagatggaggggaaggagcaggatgtgtcgctgggagcgaacaagttcccggagagacagccgattgggacggcggcgcagagccaagacgacggcaaggactaccaggagccggcgccggcgccactggttgacccgacggagtttacgtcatggtccttttacagagcagggatagcagagtttgtggccacttttctgtttctatacatcactgtcttaaccgtcatgggagtcgccggggctaagtctaagtgcagtaccgttgggattcaaggaatcgcttgggccttcggtggcatgatcttcgccctcgtttactgcaccgctggcat

SEQ ID NO: 280444 - DNA, 353 bp, Glycine max
  unsure (1)..(353): unsure at all n locations
gggggttggtgctccgggaccgacaccgagaccggcaagccgcanggggtggcngtgaggaactccggcggcgaggaacctaacgccgcgaaactngccgccgctgcttcgtcatccaggaagaactctcagaactccgccagaacttccggcgactcttcgnnnnnnnnnnnnnnnnnnnnnnngattccgagaatttcggancatgtgatgggagcttgtcggcttttcaacagactttcgtggtttcggatgctaccaaagccgattacccgatcctgtatgcgagtgctgggttctttaaaatgacgggttataagtccaaggaagttattgggaganacncccgtttt

SEQ ID NO: 280445 - DNA, 352 bp, Glycine max
  unsure (1)..(352): unsure at all n locations
gggtaataccaaagtcattgctgctgtttatggccctagagaggtgcaaaataggaatcaacaaataagtngccatgctctggttcggtgtgagtacagcatggctaattttagcactggagatcgcatgaggaaacctaagggcgacaggagatcaactgaaatttctctggttattcgacaaactatggaagcttgtatactgacacatttattgcctcgtncccagatagatatttatgtccaagttctccaagcagatggaggaactagatctgcttgtataaatgctgcaactttggcccttgccgatgctgggattcctatgcgtgatcttgtaacttcctgtagt

SEQ ID NO: 280446 - DNA, 349 bp, Glycine max
gttctttttcttagaatggagttcttgtggaaaactctcatgaggatacacgtgattagaacattttttgctctccttttggttgcacttttaagttcagagggagtagagagcagaaaagccaaagttgtgaccacttccttagagtacaatgctataaactgcagagctcacagtgcttcattgacagattttggtggtgttggagatggaaaagcatccaacacaaaggcatttcagtctgcaataagtcaccttagtcagtatgcttctgaaggtggctctcagctctatgttcctgcaggaaaatggctcactggtagttcagcctcactagtcacttcacatt

SEQ ID NO: 280447 - DNA, 352 bp, Glycine max
gaagagcatcactgaactaacaaagcaaccctatgtcgaaggtggtttgtgtcaccggagccagcggcgccatcggatcatgggtggtcctactcctcctccagcgtggttacaccgtccatgccaccgtccaagatatcaaggatgaaaatgagacgaaacatttggaggaaatggaaggagcaaagagtcatctccatttttttgaaatggatcttcttgacatcgactccattgccgctgccataaagggttgttccggcgtaatccaccttgcatgtcctaacatcattggtcaagtcgaagatcccgagaaacagatattggaaccggcgataaaaggaacggttaa

SEQ ID NO: 280448 - DNA, 349 bp, Glycine max
ctcgagcggtgagatagagagagacgcttcgcaaatctcaatcgaatctcagaaaaatgagagaaatcatcagcattcacataggtcaggccgggatccaggtcggaaactcctgctgggaactctactgcctcgaacatggcatccagcccgacggcatgatgccttctgactccaccttcggtgtagcccacgacgccttcaacaccttcttcagcgaaaccggatctggcaagcacgtcccccgtgctgtcttcgtcgacctcgaacccaccgtcatcgacgaggtccgctgcggcactaccgtcaactcttccacccgaacaactcatctcggcaaggaagacgc

SEQ ID NO: 280449 - DNA, 351 bp, Glycine max
tggtgatgatgctcccagggctgtctttcccagtattgttggccgacctcgacacactggtgttatggttgggatgggtcaaaaggatgcctatgttggtgatgaagcccaatcaaaaagaggtattcttactctcaagtatcccattgagcatggtatagtcagcaactgggatgacatggaaaagatctggcatcacacattttataatgaacttcgtgttgctcctgaggagcacccagtgcttctcactgaggctcctctcaacccaaaggccaacagagaaaagatgacccaaatcatgtttgagaccttcaatgtgcctgccatgtatgtggccatccaggctgt

SEQ ID NO: 280450 - DNA, 321 bp, Glycine max
  unsure (1)..(321): unsure at all n locations
caagcttctccttcttttgggacaagattancantaaaagtgtggagtactncttgatagcaaagatgtttgggatcttcgacaaggggcanaagataaangggacagtggttctgatgccnaagaatgtgntggacttcaacgccataacctccatcggtaaaggtggtgttattgacacagccaccggcatcttangccaaggcgtcagcttagttcgtggagtaattgatactgccacttccttcttaggccgtaatatctncatgcaantnatcagtgcnactcagactganggcagtgntnattggnaantttgaa

SEQ ID NO: 280451 - DNA, 348 bp, Glycine max
  unsure (1)..(348): unsure at all n locations
attttgtttggaaataattgaggactacgttgttacggtcccaaagaacaacccttctagcaagtaaacccgagttcccttctctctctttacgattacattgctctctctctctctgttcgcattcaatctttcgcttctgaatctccaacaatggtgctcgaggcgactatgatctgtatagacaattcggaatggatgcgtaacggggattactctccttctcgatttcaagcccaagcagacgccgccaatctcattgcggtgtaaaacccagtctaatccagaaaatacggtgggagntctcacgatggcggggaagggcgttcgtgtttngtganccnacca

SEQ ID NO: 280452 - DNA, 349 bp, Glycine max
caagattggaggtattggaactgtgccagtgggacgtgttgagaccggtgtcttgaagcctggaatggtggtgacttttgcaccaactggactgacaactgaagtcaagtctgtggagatgcaccatgaatctcttacagaggcacatcctggtgacaatgtgggattcaatgttaagaatgttgctgttaaggatttgaagcgtggttatgttgcctcaaactcaaaggatgaccctgcaaaggaggctgctaacttcacagcccaagtcatcatcatgaaccaccctggtcagattggaaatggctatgcccctgtcctcgactgccacacttctcacattgctgtc

SEQ ID NO: 280453 - DNA, 344 bp, Glycine max
  unsure (1)..(344): unsure at all n locations
gcgtcttcgagtttcacagcgaagtcgtaggagggtttcaaaagatggagaacatgcagcttctggcaattgggcgatgaactccgtggacactcaaaagcatcggaggatcacaaatggttaatggttgcttcgaaattggcggaacagacaagattgaagggggagcgtgtgaacaaccttgatctttcaaagggccccattgaaacaaggtcaagggataaatttgggttccaggaagagaacaaatttgattccttaacttaagcatgttgaacctggactctaaatttactgagaatgtgagcaaaactcgcttcgaatggngttatggatgaatgcag

SEQ ID NO: 280454 - DNA, 346 bp, Glycine max
  unsure (1)..(346): unsure at all n locations
gagagaataagaacataagggaacnacagcggcggtaacagaagaacaagcagagatgggtcgagtnttggncganganggtgaagaaatcctctcggcaggtgancgagcgtcactactcgcgcatgaccctggacttccacacgaacaagaagcntctggaggaagtggcgataatcccgtcgaagaggctaaggaacaagatcgcggggtctcgacgcacctgatgaagcgcatccagaaggccctgtgcgcggcatnnccctcaagctccangagnaggancgcgacnccgcatggantcgtcccgacgtctccgccatcaacaccgacaatcgaggcgnaa

SEQ ID NO: 280455 - DNA, 352 bp, Glycine max
gaatggagtgacgctcccgagttacaggggtgataatgtgaatggcgatgcatttgacgcggcatctagaatccccgatccacagaggatgataagagcctactgccaatctgtgtctactctgaaccttttgcgggcatttgccacgggaggttatgctgccatgcaaagggttaatcaatggaatcttgatttcatggagcatagtgaacagggagacaggtaccgtgaattagcccatagagtggatgaggctcttggcttcatgaatgttgctgggctcacagccgaccatcccatcatgagtacaacagacttttggacctcccatgagtgtttgcttctcccttat

SEQ ID NO: 280456 - DNA, 348 bp, Glycine max
  unsure (1)..(348): unsure at all n locations
gctggtgaagtacaagcacgggaagaagtactgcgacaaaggatgggaatgtaagggctggtcnatttactgttgtaacctcaccattaccgattatttccagacctaccagttcgagaatctgttctccaagcggaactcgccggtggcgcacgcggtcggattttgggactaccactccttcatcgccgccgccgcgctttttgagccggaagggttcggcaccaccgggaacaagacgatgcagatgatggagatcgccgccttcttcggacacgtcggcagcaagacctcttgtggntatggatggccatggaggacctttggcctggggtctttgttacaatc

SEQ ID NO: 280457 - DNA, 349 bp, Glycine max
ggaagatcaacttgagtatcttgaggaacgccgtctgaaggatttgataaagaagcattctgaattcattagctatccaatttctctttggattgagaagaccactgaaaaggagatttctgatgatgaggacgaggaagagaagaaggatgaggagggtaaagttgaagatgtggatgaagataaggagaaggaggagaagaaaaagaagaccattaaggaggtatctcatgagtggtcattggtgaacaagcagaagcctatttggatgaggaaacctgaagagatcacaaaagaagaatatgctgcttctacaagagtcttaccatgttgggaagacaattcgctg

SEQ ID NO: 280458 - DNA, 353 bp, Glycine max
cttttccatctttctagatatcagagaactttggagctcgcttaggtttaaaaaaacaccacgcaaacggcaagatggccacttccgacagaaacatgttactaaattatgttccagtttatgtgatgctcccactcggagttgtcactgttgacaatgtttttgaagacccagatggccttaaagaacagctcttgcagcttcgagccgcaggtgttgatggggttatggttgatgtgtggtgggggatcatagaactgaaggggcctaagcagtatgattggagtgcctacaggagtttgtttcagttggttcaggaatgtggcttgacactccaagctattatgtcatcc

SEQ ID NO: 280459 - DNA, 351 bp, Glycine max
  unsure (1)..(351): unsure at all n locations
ttcgtggaggccgtggaggtggacgaggtgggggacgtggatttggacgtggatttggaccacgagttccttaccgtggtggtcgtcgtggaggtttcagcaatggtgaaactggtgaaggtgaagacggacgacctcgaagagcatttgatcgtcgcagtgggactggacgaggaaatgaattcaaacgngaaggttcaggacgaggtaactggggaacccaaactgatgaacttgctcaggtaactgatgaggttgtgaatgaaacggaaaagaatttgggtgatgagaagcctgcagttgaagaagatgtagctgatggaaacaaggacagccctactaatgnaaccg

SEQ ID NO: 280460 - DNA, 350 bp, Glycine max
aagaggagcaagtgggcgatctcgaagccggccccactcagcatcaagatgatggagaaatctggaccgttcgcgttcgagaccgagtcagggacatcatgggtcgctgacctcaaagaaccatcttccgcacccgtggtcgtgttcgagaagccactcatgaacctcaccttcgtcgaccttctcgctggcacgtcacacttcggcaaagactcccttctcgctgagggcaggtgtgggcccgtttatcgcgctgtcttacccggagacatccacgtggcaatcaaagtcctcgaaaacgccagagacgtccatgatgatgacgctgtcgctctcttcgttgacctctc

SEQ ID NO: 280461 - DNA, 345 bp, Glycine max
cttttttcactttctcgggaaaatcacagcgacgctcaggaaaaactctaaactgtgaaaaaaccactgcgatcaatggcaacgatcaaggccgtgaaagctcgccagatcttcgacagccgtggaaatccaaccgtcgaagttgacgttattctcagcgatggaagcttccacagagccgccgtgcctagcggtgcttcaacaggtgtttatgaggctttggaattaagggatggaggctcagactacctcgggaaaggtgttctcaaggctgtggagatgttaattcaattatagcacctgctctgcttggcaaggaccaacgaagcagatgaattgacaatt

SEQ ID NO: 280462 - DNA, 348 bp, Glycine max
  unsure (1)..(348): unsure at all n locations
ggaggttttaagaggagatggaacagggaagagaaaggactttgacagaatctatgnctnatgatgtctataatgatttgggcaatccagatggtggtgatcctcgcccaatccttggtgggtctagcatctatccctaccctcgcagggttagaacaggaagagaaaggaccaggacagatcccaacagtgagaaaccgggcgaggtttatgttccaagagatgaaaattttggtcacttgaagtcatcggatttccttacatacggaatcaaatccttatctcacgatgtgatacctttgttcaaatctgcaattttcaattaagggtcacatcgagtgagtttga

SEQ ID NO: 280463 - DNA, 348 bp, Glycine max
  unsure (1)..(348): unsure at all n locations
aaactgaggtggcaatgcctggcttatcaggcattggtctactatacaagattatgggccacaaaacccggaaaaatattccagtagttatgatgtcatctcatgattctatgggtttagtctttaagtgtttgtcaaagggtgctgttgactttctagttaaacccatacggaagaatgagcttaaaaacctgtggcagcatgtttggagaagatgtcacagttctagtgggagtggcagtgaaagtggcacacaaacccagaagtctgtaaaatcaaagagtcttgagaagtttgataataattctggaagcaatggcgaagatgataatggaagtataggctnaa

SEQ ID NO: 280464 - DNA, 352 bp, Glycine max
ctgctacttcctactccaaccgcacttctgctccgcaattatcatgggcaaggtcaagatcggaatcaacggatttggaagaattggccgtttggtagccagagtggctctgcagagagacgatgttgaactcgttgccgttaacgaccctttcatcaccaccgattacatgacatacatgtttaaatacgacagtgttcatggacactggaagcatcacgatgtcaccgttaaggacgagaagacccttctcttcggtgacaagccagtcactattttggacacagaaaccctgaagagatcccatgggggtcaactggagctgacatcatgttgagtccaccggagtttt

SEQ ID NO: 280465 - DNA, 355 bp, Glycine max
  unsure (1)..(355): unsure at all n locations
gcagcttttgctgtgtctagctatgcgtcaactgaangtcgacaatgtaaaccttttaatcctttactcggggagacctacgaagctgactatccagataaaggacttaagtttttttctgaaaaggttagtcatcatccaatgattgttgcttgtcactgtgagggaaggggatggaagttttgggcagattctaatttgaaaggaaaattctgggggcgttctatccagttagatcctgtgggtgtcctcactctacagtttgaggatggtgaaacatttcagtggagcaaggtcaccacttcgatttacaatatcatactangtaaaatttattgtgaccactacggtacca

SEQ ID NO: 280466 - DNA, 345 bp, Glycine max
aagacacccttttccttttcattccatcatctctttagctttgtccaaagaccatgtctgtggtggctgataattctgcaaacaatggaagccaccaagtggttttaaatgtaaacggtgatgcccccaagaagtgtgatgactcagcgaaccaagactgtgtacctcttctgcagaagttggtagcagaggtggtggggacgtacttcttgatatttgcagggtgtgcttcggtggtggtgaaccttgacaaggacaaagtggtaacacaacctgggattcaattgtttggggtctcatgttatggtttggttactcagtggtcaatctctggtgtcattcaac

SEQ ID NO: 280467 - DNA, 349 bp, Glycine max
gaaaccctaaaccccgttttcggtgagatcgagatcgatcgaacatggatgaggagtacgatgtgatcgtgttgggcacgggtctcaaggagtgcattctcagcggtcttctctccgtcgatggcctcaaggttctgcatatggataggaacgactattacggaggagaatccacttcgctcaatcttattcagctttggaagagattcaggggagatgacaagcctcctccacatttgggcgctagcagggactacaacatcgatatgaaccccaagtttattatggctaatggcaatttggtgcgggttctcatacataccgatgttacaaagtatctctattcaaa

SEQ ID NO: 280468 - DNA, 349 bp, Glycine max
attaattgcaagaatggcacttcgttgcttggtgatgtccctttctgttctcttcactcttggtcttgcgagagaaagccatgccagagacgaagatttttggcatgctgtttggccaaacactcccattccaagttcattgcgagatcttctacggcctggccctgcaagtgttgaaatcgatgatcaccctatgcaaattgaagaaacacagtacccgaaaaccttcttctataaagaagaccttcatccaggcaaaacaatgaaagtacaattcagcaagcctccctttcaacaaccatggggtgttggtacatggttaaaggaaattaaagacactactaaagag

SEQ ID NO: 280469 - DNA, 346 bp, Glycine max
attgacatggctgagaccttgtgtcagaagcgtgcacttgaagcttttcagctggatccagcaaaatggggagtcaatgtgcaatcattatctggatccccttctaacttccaagtttacactgctttattgaaacctcatgagagaattatggcacttgatcttccccatggtgggcatctatcgcatggttatcagactgacaccaagaagatatcggctgtatctatattctttgaaacaatgccatacagattgaatgagagcactggttatatcgattatgaccagttggagaaaagtgcagcactttttaggccaaaattaatagttgctggtgctagtg

SEQ ID NO: 280470 - DNA, 332 bp, Glycine max
  unsure (1)..(332): unsure at all n locations
cggatctagagtcttcagtttctcctcgttgttcttcgctttcctgttttcaatttcgancctttcgttaatttaataagatgtttgggagggcaccgaagaagagcgataatacgaggtactacgaaatcctcggcgtctccaagaacgcttcgcaggatgatctgaagaaggcttacaagaaagccgccattaagaatcaccccgacaagggcggtgatcccgagaagtttaaagagctggcgcaagttatgaggttctgagtgaccctgagaagcgtgagatatatgatcagtatggtgaagatgcgcttaaggaaggaatgggtggtg

SEQ ID NO: 280471 - DNA, 346 bp, Glycine max
ctttcctcttatcttggaatggagttctgcagaggagaaactcatggcaggatggagtgtatggtaccaattgtccaattctaccagggcataacttcacttatgttcttcaagtgaaggatcagataggtagctacttctactacccttcccttgcattccacaaggcagcaggaggttatggtggattcaaaattgagagccgccccgggattccggtgccttttcctcctccagcaggagatttcacgatattggcaggagactggtacaagagaaatcacacagatttgagggctattttggatggtggaagtgaccttcccttcccagatgggattatcat

SEQ ID NO: 280472 - DNA, 349 bp, Glycine max
cattctcccatttcctctcagaaccctcgatcactcccacgcgctcctatatcctctccttcaccgtcgctctctccaacgatcacaacaacatcgtcatcccatggcaaacgccgcatctggtatggcagtccatgatgactgcaagttaaggtttttggagctgaagacaaagaggacacaccgtttcatagtttttaagattgaggagcagcagaagcaggtcattgtggagaagcttggtgagccagcccaaggctatgaagatttcactgccagccttcctgctgatgagtgccgttatgctgtttatgattttgagtatctgactgaagggaatgtccctaaa

SEQ ID NO: 280473 - DNA, 356 bp, Glycine max
ccgattgctagaatggaatttcgatgctcagtcatctcttttaccattctcttctctcttgctcttgcaggagagagccatgtccatgcatcgctacctgaggaagattattgggaagctgtttggccaaacactcccattcccactgcactgcgagagcttctaaagcctctccctgcaggagttgaaatcgatgaactccctaagcaaattgatgatacacagtacccaaaaacattcttctataaagaagaccttcatccaggcaaaacaatgaaagtacaattcaccaagcgtccctatgcacaaccttatggtgtatatacatggttaacgggatattaaagacacctcta

SEQ ID NO: 280474 - DNA, 351 bp, Glycine max
  unsure (1)..(351): unsure at all n locations
ttgatttctccctcttcgctctctctcagtgaccagagacagatgatgatggagatggcgaangaaaacgctgtcgttgcggcactcgcggcgttggtgctactcgcggcgagtgtggcggtggatgctcaggagaactcggacgtgaagacgctggtgaagtacaagcacgggaagaagtactgcgacaaaggatgggaatgtaagggctggtcaatttactgttgtaacctcaccattaccgattatttccagacctaccagttcgagaatctgttctccaagcggaactcgccggtggcgcacgcggtcggattttgggactaccactccttcatcgccgccgccgcg

SEQ ID NO: 280475 - DNA, 349 bp, Glycine max
  unsure (1)..(349): unsure at all n locations
agtgagtttgaaagcttcgaagatgtgcgtagtcncctatgagggtggaattaaattgccaacagatatactgagccanattagccccttaccagccctcaaggaaatcttccgcactgatggtgaaaatgttcttcaatttccaccacctcatgtagccaaagttagtaagtctgggtggatgactgatgaggaatttgctagagaggtgattgccggtgtaaacccaaatgtgatccgtcgtcttcaagaattcccaccaaagagcacacttgatcccacactctatggtgatcaaaccagtaccataacanaagaacaattggagattaacatgggaggggtcaca

SEQ ID NO: 280476 - DNA, 349 bp, Glycine max
  unsure (1)..(349): unsure at all n locations
gcattttcagaggaacaatgggcgggtagggtttcgacgtgcttcttcttcgtgtttgctctttctctccttcttccttttcagatctccgctgaggaatcatcggagaaagagttcgtactcacattggatcactctaactttcacgacactgtcagcaagcacgatttcatcgtcgtcgagttctacgctccatggtgtggccactgtaagaagcttgctcccgagtatgaganagctgcttctatcttgagtagtcatgatcctccggttgttttggctaaaattgatgccaatgaggagaagaacaaagaccttgcatctcaatatgatgttaggggatacccaa

SEQ ID NO: 280477 - DNA, 332 bp, Glycine max
ggaagatcaacttgagtatcttgaggaacgccgtctgaaggatttgataaagaagcattctgaattcattagctatccaatttctctttggattgagaagaccactgaaaaggagatttctgatgatgaggacgaggaagagaagaaggatgaggagggtaaagttgaagatgtggatgaagataaggagaaggaggagaagaaaaagaagaccattaaggaggtatctcatgagtggtcattggtgaacaagcagaagcctatttggatgaggaaacctgaagagatcacaaaagaagaatatgctgctttctacaagagtcttaccaatg

SEQ ID NO: 280478 - DNA, 345 bp, Glycine max
gtgatttcagtgagtgatcggtgttcacttgatctcatcataatcgtcagcgtcaattgaagaagatgccgatcagaaacatcgccgtcggaaggcctgaagaggcgactcaccccgacacgttgaaggcggctttggctgagttcatctcaaccttcatcttcgtgttcgccggctcaggctccggcatcgcctacaacaagctcaccgacaacggcgctgccacccctgccggcctcatctccgcctccatcgcccatgcattcgccctcttcgtcgccgtctccgtcggcgccaacatctccggcggccacgtcaaccccgccgtcaccttcggcggcttcg

SEQ ID NO: 280479 - DNA, 347 bp, Glycine max
atgagatggtgaagaatcctcaaaaggcttatctgagaacaatcacacccaagtttgagacccttattgatctttcagtgatagagatattgtcaaggcatgcttctgatgagatataccttggagagagggagactccaaattggactactgataagaaggcattagaagctttcaaaaggtttggaagcaaactgactggaattgaaggaaaaatcaatgcaaggaacagtgatccaagtctgagaaaccggactgggccagttcagctgccatacactttgctccatcgttcaagtgaggaaggttgactttcaaaggaattcccaacagtatctctatctatt

SEQ ID NO: 280480 - DNA, 344 bp, Glycine max
taacatttctaatctcattctccttctgttcaaacactctctctcatggcatcagataagaagattaggatcggcatcaacgggtttggaaggattggccgtttggtggccagggttgcccttcaaaggaatgatgttgaacttgttgctgtcaacgatcctttcatcaccactgattacatgacatacatgttcaagtacgacaccgttcatggccagtggaagcattttgatgtgaaggtgaaggactctaagacccttctctttggtgagaagcccgtcaccgtttttggaatcaggaaccctgaggaaattccatggggtgaggttggtgctgattatgt

SEQ ID NO: 280481 - DNA, 343 bp, Glycine max
cagaaatagcttttgcaatcttcattgccatctttggattggtcttattctcattacttattggaaacatgcagaaatatctgcaatctacaactgtaagagtggaggagatgagagtgaagagacaggacgcagaacagtggatgtcccaccgtatgctacctgagaacttgagggaaagaattagaaagtacgaacagtaccaatggcaagaaaataggggtgttgaggaggaggcattaattcgtaaccttccctaagatctcagaagggacattaagcgtcacctttgcttaactttagttaaaaaagtgccaatgtttgagaaaatggatgagcagtt

SEQ ID NO: 280482 - DNA, 348 bp, Glycine max
tctttctctgttctattcctacgatggagttttggggtgccgaggttaaggttggtgagtctgttaaggtagatccagccgaattcgaggcatgcatacacctttctcaggctgctcttggtgaggcaaagaaagacaaatcaaatgaaccagttgttctctacttgaaagttggtcaacagaaatttgtcttgggaaccctttccagggagaaaattcctcaaatacctctggaattggttttggaaaaggagtttgagctttcccacaactcaaagaatgccagtgttcatttctgtggatacaaggcatttatgatgctggcgatgatagcgaggaggatgaatt

SEQ ID NO: 280483 - DNA, 341 bp, Glycine max
ctctcactttcatttctacatccctggctctgttccgtcgatgacgatggcgtttagggtgcgaaaccctgacctccgctttctcattcttctctctctcttgtccatcacttccgccaaggtcttcttcgaggagcgtttcgatgacggatggggaaatcgttgggttaaatcagattggaaaaaagatgagaacctggctggggagtggaaccacacctctggccaatggaatggagacgctaacgacaaaggtattcaaaccagtgaggattacagattctacgctatttcagctcagtaccctgaattcagcaacaaggataagacactagtcttcc

SEQ ID NO: 280484 - DNA, 326 bp, Glycine max
  unsure (1)..(326): unsure at all n locations
gctagtttatcgtgaggagaatatgaagttgtttgttttctttgttgctncagtagttttggtagcatggccatgccatgggcgcaggctaccaaaggttccctctccgaatgaaaactggctatggtgagcgttcttcggaggtaaaatgcgcaagttttaggcttgctgtggaagcacacaacatccgagcctttaaaaccattcctgaagagtgcgttgaaccaacaaaggactacattaatggcgaacaatttagatcagactctaaaacagttaaccaacaagctttcttttatgctagtgaacgcgaatccatcacaacg

SEQ ID NO: 280485 - DNA, 343 bp, Glycine max
  unsure (1)..(343): unsure at all n locations
ggagaacgcaatcgttctccagctacagcgaagacggcaacgccggcggccagaccttccaatcctacggaaagaactccgccggcgcggcgaacgacttcgccgcctacggcacagactccaacgtcgcctcttcagatttcacgaactacggaaagggaggtgcgggccccaacgacacgttcacanattacggngttaacatgaacaaccctacgggcaacgtttcagagctacgcagacggaaccgttggtggaacgcagagtttttccaactacagagaccaagctaacgtaggtgctgactcgttccaatcctacgctaagaacacgttaggtccga

SEQ ID NO: 280486 - DNA, 346 bp, Glycine max
caaaaccgaactatgccgattcagcggtgccaagatctacccagggaaaggcatcagatttgttcgtggtgattctcaggttttcctgtttgctaactcgaaatgtaagaggtatttccacaacaggttgaagccatcaaagctcacctggactgcaatgtacagaaagcaacacaagaaggacattgctcaagaagctgtgaagaaaagaagacgtgctgccaaaaagccttactccaggtccattgtcggtgccactttggaagttatccagaaaaagagagctgagaagccagaagttcgagatgcaaatagggaagctgcccttcgtgaaattaaggagagg

SEQ ID NO: 280487 - DNA, 346 bp, Glycine max
aaacaaaggacccagttttacatttttttttgttcctgagttccaatggctcttcaggctgcttccttggtttctgcttctttttctattgctaaagagggaaagtctggtgtatctctcagggacaccacaatgtttggtgtttcattgtcggatactctcaaatctgacttcagctctccctcatcgacttgcaaaagggaattccaacaaaaatttggccctttgagggttcagtcagtggcaacaacaactccaggagtcaccaaggcttcaccagaaggcaagaaaactttgaggaaaggcagtgttattatcactggggcttcctctggattaggctggc

SEQ ID NO: 280488 - DNA, 342 bp, Glycine max
  unsure (1)..(342): unsure at all n locations
aatcttctgagagtgtttggttgaaagtagcaaagatntttcctttcgggcaaaagggtcaaaagataaaggggactatggtggttatgcagaagaatgtgttggatatcaacagcatcaccagtgttggagggatcgttgaccaaggcttaggcttcataggcagtgcagtcgatgcacttacttttgcagccaccaaaatctccatccagttgattagtgctaccaaggctgatggtgggaaaggaaaaattggaaagagtacaaatttaagaggaaagataacattaccaaccttgggagctggcgaacaagcatacgatgttaattttgatgggacca

SEQ ID NO: 280489 - DNA, 343 bp, Glycine max
  unsure (1)..(343): unsure at all n locations
gntcgaggaaagtacacgctattcttacctantnggacacnaaaccacttgntaaagaaggatgttncttgtnagactgaaccanctnnctcatgttnacacatttatcctccgtccggatgcaacctacagcatcctgattgataatgtggagaagcaaactggtagtctctactctgattgggatnctctccctccaaagacaatcaaagatcccgangctanaaaaccagaagattgggatgacaaaganttnattnctgatccncaggataagaaaccagangggtatgatgacatcccaaaagagctcccagatcctgaagccaagaagctgcagatt

SEQ ID NO: 280490 - DNA, 311 bp, Glycine max
aaaaaaaaaaaagttgttcgagatggcacgtacgaagcaaactgctcgtaagtccacaggaggaaaggcacctaggaagcagctcgcaaccaaggctgcacgtaagtctgcaccaactactggtggtgtgaagaagccacatcgttatcgtcctggtaccgttgctcttcgtgagattaggaaataccagaagagtaccgagcttttgatcaggaagctccccttccagaggctggttcgtgaaattgctcaggacttcaagactgatctgcgtttccagagccatgctgtgcttgcattgcaagaagctg

SEQ ID NO: 280491 - DNA, 339 bp, Glycine max
gtcccatagcagcgatgggaatcgatcttaaggctgggggtaagagcaaaaagaccaaaagaacagcaccaaaatccaatgacatctacctcaaattacttgtcaagctttatcggttccttgttcgaaggactggcagcaatttcaatgctgttatactcaagcgcttgttcatgagcaaggttaacaagcctccaatttctttgtcaaggttaattaagtatacaaaggggaaggaggataaaattgctgtaatagtggggactgtaactgatgatatcagagtatatgaagttccagcattgaaaattacagcactcaagtttactgagagagcac

SEQ ID NO: 280492 - DNA, 309 bp, Glycine max
  unsure (1)..(309): unsure at all n locations
tgcaagaatgggcacttcgttgcttggtgatgtccctttctgttctcttcactcttggtcttgcgagagaaagccatgccagagacgaagatttttggcatgctgtttggccaaacactcccattccaagttcattgcgagatcttctaaagcctggccctgcaagtgttgaaatcgangatcaccctatgcaaattgaagaaacacagtacccgaaaaccttcttctataaagaagaccttcatccaggcaaaacaatgaaagtacaattcagcaagcctccctttcaacaaccatggggtgttggta

SEQ ID NO: 280493 - DNA, 338 bp, Glycine max
  unsure (1)..(338): unsure at all n locations
cccccagccatgatgcctccacaagctggatttggttaccagcagcaactagttccgggaatgagacctggtggtggtcccatgccaagcttctttgttcccatggttcagcagggccaacaagggcagcgcccagtgggccgccgaggaacaggtcctgtgcaacaaccccagcagccaatgccaatgatgcagcagcagatgcttccaaggggacgtgtctatcgttaccctcctggccgcaacatgcaagatgtcccacttcaagttgcagctggtggaatgctgtcggtcccttatgacatgggaggtctgccaatgcgcgatgctgtgggana

SEQ ID NO: 280494 - DNA, 308 bp, Glycine max
ctaaggtcgatttctcgttgtgctaacattgcattggatagaaactaaagtcttaaaacattcataatcatatctctttttattagttgttattgtgtgtctcagtattcaattggttgaattgaagctacttgttataatggatcacgctattgatggttactgtgttggggattgcagccaaagagtggtcgatttggcacatctagtagcaagcaagtggccaggggcacctaaagcggggagtggagacccattggaggatttctgcgagacaaaccctgctgatgaggaatgcaaagtttatg

SEQ ID NO: 280495 - DNA, 314 bp, Glycine max
aggagaatggcctggttcccattgttgagcctgagatccttgttgatggacctcatgacattcacaagtgtgccgccgtcaccgagcgtgtccttgcagcatgctacaaggctttgaatgatcaccatgtccttcttgagggtaccctattgaagccaaacatggtcacccctggatcccaatctgctaaggtttcccctcaggtggttgccgagcacactgtcagagcccttcagagaaccgtgcctgctgcagttcctgctgtcgttttcttgtctggtggccagagtgaggaggaggcatccgtcaacctc

SEQ ID NO: 280496 - DNA, 147 bp, Glycine max
  unsure (1)..(147): unsure at all n locations
tctaaaagagatctttttctgctcnttgaagaaagaagggtctttgcttgattntngagatgtctctgcnctcagatctcatcaaccttaacctctccgataccaccgagaaggtgatcgcagagtacatatggatcggtggatcag

SEQ ID NO: 280497 - DNA, 338 bp, Glycine max
aaagaggattagagggtcgccacgtttagcaataaccaaaccctctctactcttttttcttctccttctcttcgctagggttttagcttcttcctcttcacttcgttctttttcgcctctacaatgagcaacgacaaggacacattcaacgtcgccgatctcacttctgctctcaacgaggacaatagagcagaccttgtcaatgctcttaagagcaagatacagagtttggctggacaacactcggatattctagagtctctgtcgcccaatgtccgaaagcgtgttgaggttcttagagagatccagggccaacatgatgaattagaggtaaattt

SEQ ID NO: 280498 - DNA, 335 bp, Glycine max
  unsure (1)..(335): unsure at all n locations
ttctctctgtactcaaactcacttccccacttatttatacaatgtcggcttacaaagaccaggatacccgtcttcatggcatcaaaactaagattcgtgtcgtccccaatttccccaaatccggtattatgttccaagacattactactctattgcttgatcccaaagcatttaaggacacaatagatttgttcgttgagcggtacaagggcaaaaacatttctgttgttgcaggnattgaagctcgaggttttatttttggtcctcccattgcgctggctataggagcaaagtttgtaccatgagganaccaaagaagttgctggaaagttatt

SEQ ID NO: 280499 - DNA, 330 bp, Glycine max
  unsure (1)..(330): unsure at all n locations
gatgcctcggttttggttgcatccacaaaaaacaacaaagcagagaaggatcacccagataatgtttcactagctggagatggatttgacacagtgattaaagcaaaagaagcagttgatgcagttccattgtgcaggaacaaagtttcatgtgctgatattttagccttggcaacccgtgatgttattgaactggccggtgggcctttctacncggttgaattgggaagatttgatgggctaagatctaaagattcagatgtaaacgggaggctgcctcatccagagttcanttgaaccactcatcactgttcggccacggctcaccaa

SEQ ID NO: 280500 - DNA, 335 bp, Glycine max
  unsure (1)..(335): unsure at all n locations
ttttcaatttggtgtaggatcctgcatactacgtacttaaggaggatgagtctccttgtatttttggttcaattgaaaagcagagatggtcctatgcctgtgctaagcagttgattgagaggcttgtttatgctgagggtgctgaaantggcttggaattcacaattgtgaggccttttaattggattggaccacgaatggatttcattcccggcattgatggcccaagtgagggtgttcctcgggttctggcatgctttagcaataatctcctccgtggagagccctcaanttgtggatggtggcaatccagagactttgtgatattaagatgc

SEQ ID NO: 280501 - DNA, 348 bp, Glycine max
  unsure (1)..(348): unsure at all n locations
aaatctttttgctcttagtgccttagtacacaatccatgtaaccaccactagtgctaaaatcatcaaccaaaaaggtaaacttctgcaacaaccatggttgcaatggcagcagcaacagcatcctcccagttgattttctcaaagcctcgttcaccctcgcgtctctgcnccttccaactatgtgtctttgacaccaaacaagtgctgtcaagttcaagtggcaggagaaggcatgtggggggttctggagttaggtgcatggcggtgggagaagctgcaaccactgagactaagaagagaagtggatatgagcttcaaacactcactaactggttctgaagcaggac

SEQ ID NO: 280502 - DNA, 349 bp, Glycine max
gttctttctgcctggagtggcattcgcccattagcgatggacccaacagctaaaaataccgagagtatctccagggatcatgttgtctttgaggatcaccctggtttggtcaccattactggtggcaagtggactacctatcgaagcatggcagaagatgctgtcaattcagctataaagtctgggaagttgacccccgccaatggatgtatcaccaacaatatcaggattgttggtggtgaagggtgggatcctgtttcctttaccattctttctcaacagtatatgcgcatgaaagtcacatataggggtaaagttgttcctggtgtgatggacactgcttcagcaa

SEQ ID NO: 280503 - DNA, 172 bp, Glycine max
caaagatctctttaacccagaccgtgttcttattgggaggcaggggaaaccccagagggccaaaaagctattcaaacattggaaggatgtttatggctcaatgggtccccgaagaaagaatactgaccacaaatctttggtcggcagaactgtctaagcttgctgctaatgc

SEQ ID NO: 280504 - DNA, 302 bp, Glycine max
  unsure (1)..(302): unsure at all n locations
gaagacattcgccagggaaagatggtagtggttgtggacgatgaagatcgagaaaatgaaggagacttgataatggcagcacagttggcaacacccgacgcaatggcttttattgtaaagcatggaactggtatagtttgtgtaagcatgaaagaggaagatctggatagattggaacttcctttgatggtgacagtaagacatgatgagaaactctgtacggcatcactgtgacatgatctaacaggtcacantgggtgcactccgtagcacacatctgcctgcgctaantctntcagcgt

SEQ ID NO: 280505 - DNA, 332 bp, Glycine max
  unsure (1)..(332): unsure at all n locations
caaaaatggttctcacatccactgccacacacccagatgannaagaccagagcctaaactatacttttgcttccagatatgtgcgtgaacctattccaaagttcaagatgccggagaaatccataccaaaagatgctgcttatcagataataaacgatgagttgatgttggatggtgcaccaaggctcaacttggcctcgtttgtgaccacttggatggagcctgagtgtgacaagctcataatggcttcacttaacaagactacgttgacatggatgagtatcctgtcaccatgagctccagaacggtgtgttaatacatagcaaantatt

SEQ ID NO: 280506 - DNA, 332 bp, Glycine max
  unsure (1)..(332): unsure at all n locations
taattctctctactactgctagctgtgacttgttttgagttcaatcnaatcgcattggtatctgaaatcaggaaagatggttagcgtantgatgatcaggcaggcacaaagggcagaaggcccagcaaccatccttgccattggaactgcaaacccaccaaaccgtgttgatcagagcacctanctgattactacttcagaatcaccaacagtgaccacatgancgagctcanagaganatttcagcgcatgtgtgacnagtctatgatcaagacgagatatatgtacctaaacgaagagatcttganagagatcaacatgtgtgctaattg

SEQ ID NO: 280507 - DNA, 305 bp, Glycine max
  unsure (1)..(305): unsure at all n locations
gcatccttgcaatgagtgtaagggtactggagagacaatcaatgacagagacaggtgccaacagtgcaaaggagagaaagttgttcaggagaagaaagtacttgaagttgttgtggagaagggaatgcagaatggacagaagattacattccctggtgaagctgatgaagcacctgatacagtcactggggatattgtctttgtcctacagcagaaggacaccaagttcaacgaagccgtgactttgtgacaccatgccttctgagcntggtgctcatttctgccncttgtggcggactctanaa

SEQ ID NO: 280508 - DNA, 347 bp, Glycine max
tgaaaactccccgtggtctccgaacattgaacactgtatggggctcagcacttgagtgaggaactgaaacgtaggttttataagaactggtgcaagtccaagaagaaggccttcaccaagtactcaaagcagtatgaaactgaggagggaaagaaaaacattgaggcacagctggagaaactgaagaagtatgctactgtggttcgtgttttggctcacacccagatcaggaaaatgaaagggttgaagcagaagaaagcccatatcatggaaattcaggttaatggtggtactattgcacagaaggtggactttgcatacagtttctttgagaaacaggttctatt

SEQ ID NO: 280509 - DNA, 331 bp, Glycine max
  unsure (1)..(331): unsure at all n locations
caattttgattggagggtctcgcccagagcatttgaaaaaggggtactttgttgaaccaaccatcataactgatgtgactacctcgatgcaaatttggagagaagaagtttttggacctgtgctatgtgtgaaaacattcagtaccgaagaagaagctattgaactagcaaatgacacacactacggcttagggtctgctgtaatgtcaaaagatctagaaagatgcgagcgcatatcaaaggctattcaggctggaattgtatggataaattgtgctcaaccaagcttcattcaagcncatggggagcgttaacgtatggttttgtcgtg

SEQ ID NO: 280510 - DNA, 342 bp, Glycine max
ggagtgagtcactcttcttgcataacccagatctgacaatatgcgaagaactggcttgttacatttgttatgccttgtcattgctttagtaagtgtgcaagcagaagatgcgtataagtattacacatggacggtgacttatggaactatttctccattgggtagtccccagcaggttattcttatcaatggtcagtttcctgggcctagacttgacttggtgactaatgagaatgtaattctcaaccttatcaacaagctggacgagccatttttactcacttggaacggtattaaacaaaggaagaattcatggcaagatggagtttgggaaccaactgt

SEQ ID NO: 280511 - DNA, 333 bp, Glycine max
agaaagaaggttttttagtatagttaacagcatggagagggaggaagatgttaaggttggagcacagaaattctcggagaggcaagcactgggtacaggagctaagagtgacaaggactacaaggaggcaccaccagcacccttgtttgagccaggggagttaaagtcatggtctttttacagagctgggatcgcagagtttgtggccacattcttgttcctctacatcactgtcttgactgtcatgggtgtcaacagggcacccaacaagtgctcttctgttggcattcaaggattgcatggctttggtggcatgactttgccctgctatgc

SEQ ID NO: 280512 - DNA, 337 bp, Glycine max
  unsure (1)..(337): unsure at all n locations
ttcatgaacgagggcaaattgattgatcttctcaacggctctgattacgtaccaacctgtgaagacaaagatggtgattggatgctcgtgggtgacgtaccttgggaaatactcgtggaatcatgcaagcgcctgcgtataatgaaaggatctgcggcaatcgggctagcaccaagagcagtgcaaaagtgcaagaacagaagctagaggcaaatttgtaagttccagtttcgaccacaatctcctcgatctgttgctcttgggcgtccatgggaagcattaatgctaatatangagccaagttatataatatgtcggtaccatttnttngaaataa

SEQ ID NO: 280513 - DNA, 270 bp, Glycine max
tagtgcctccttgccagaagttaaaatggcccaagaaactttcctattcacatctgaatcagtgaacgaggggcaccctgacaagctctgtgaccagatctccgatgctgtgctcgatgcatgcttggagcaggaccctgacagcaaggttgcctgtgaaacctgcaccaagaccaacatggtgatggttttcggagagatcacaaccaaggccaacgtggactatgagaagattgtgcgtgacacatgcaggaacattggttttgtctc

SEQ ID NO: 280514 - DNA, 337 bp, Glycine max
gtttgttgtgagctataagctagtttatcgtgaggagaatatgaagttgtttgttttctttgttgctgcagtagttttggtagcatgggccatgccatgggcgcaggctaccaaaggttccctctccgaatgaaaactggctatggtgagcgttcttcggaggtaaaatgcgcaagttttaggcttgctgtggaagcacacaacatccgagcctttaaaaccattcctgaagagtgcgttgaaccaacaaaggactacattaatggcgaacatttagatcagactctaaaacagttaaccaacaagctttcttttatgctagtgaacgcgaatccat

SEQ ID NO: 280515 - DNA, 339 bp, Glycine max
  unsure (1)..(339): unsure at all n locations
ctttctctagtcctgttatttctcagcgcgtaaagcatggctttgttggtggagaaaaccacgagtggtcgcgantacaaggtcaaggactttcccaggccgacttcggccgcctcgagatcgagctggccgaggttganatgcccggcctcatggcctgtcggaccgagttcggcccctcccagcccttcaagggggcncgcatcaccggntccctccacatnaccatccagaccgccgttctcattgagaccctcaccgcccttggcgccgaggtncgctggtgctcctgcaacatcttctccacccaggaccacgccgngccgctattgtcgcgaa

SEQ ID NO: 280516 - DNA, 342 bp, Glycine max
  unsure (1)..(342): unsure at all n locations
ttcatagcattttcagaggaaaatggcgggtacggtttcgacttgtttcttcttcgtgtttcttctttctctccttcttccttttcagatctccgntgaggaatcctcggagaaggagttcgtactcacattggatcactctaactttcacgacactgtcagcaagcacgatttcatcgtcgtcgagttctacgccccatggtntggtcactgtaagaagcttgctccggagtatgagaaagctgcttctatcttgagtagtcatgatcctcctattgttttggctaaagtagatgccaatgaggagaagaacaaagancttgcatcacaatatgatgttaa

SEQ ID NO: 280517 - DNA, 342 bp, Glycine max
  unsure (1)..(342): unsure at all n locations
ctctctagctccgtccacgtgccgtcgtacgctctgaaatcttccgtcgtctctggcatctccgctgccagccttctgatctgtcataccaaatngccaacagggttcaaattcctaccaacaattcagcnctcattgctatgattgcagatgaggatactgtagttggatttttgttggctggagtgggaaatgttgacatacgtaggaagacaaattacctcattgtggattcaaaaacaaccgtcaaacaaattgaggatgcattcaaagaatttacaacaagggaggatgttgcaattgtgctgattagccaatatgttgcaaatatgataagnttnt

SEQ ID NO: 280518 - DNA, 333 bp, Glycine max
  unsure (1)..(333): unsure at all n locations
agggagacaacatgattgagaggtccacaaaccttgactggtacaagggtccaactctgcttgatgcacttgaccagattagtgagcccaagaggccctctgacaagcccctcaggcttccccttcaggatgtgtacaagattggaggtattggaactgtgccagtgggacgtgttgagaccggtgtcttgaagcctggaatggtggtgacttttgcaccaactggactgacaactgaagtcaagtctgtggagatgcaccatgaatctcttacagaggcacatcctggtgacaatgtgggattcaatgttaagaatgntctgttaaggattg

SEQ ID NO: 280519 - DNA, 333 bp, Glycine max
aaacatcttaagggaaaatggatgccaaactcatgccgtaggtggtggagctggtactggagtgtttctgttgattaggagaacaacaatcctactactgagatctgcacgtcaggccccctggccctctccttacttagatgattttggcgaggaggattttgaaatgaatcgaggcaagccactttacctgaatgaggaacgctatgctgctttgacttatatggtcgcttctcatggtctggaccgtagttccagggttcttggtcggaccactattggttccttcttcctggttagttcaaattctacatgtttacttagtgtgaagaa

SEQ ID NO: 280520 - DNA, 335 bp, Glycine max
  unsure (1)..(335): unsure at all n locations
gccgaagaagaggaagaatcagagctcagcgataagcagaaagtggagatcgcgaaatggttcctcctcaantctcctcccggagaaatccaatacgttgccaaagatgtgaaatcgattctcaacaacgacgatttgtacaaggaagccgcttccgaggcttttccctattacaacaaatcgcacttgatttccattccaatgcccaaccgaagcggagacgtactggttacttcgttcggtgagcttgagggtaatgcatttcttgaacctaggactgcgcaagttgcaattgttgaccatgctaaacaagtttgtacagaggtgagactgcc

SEQ ID NO: 280521 - DNA, 339 bp, Glycine max
agacgctcaagttgtggaacaggctgctgaagctaagaagccggagaggaagaagcccaaatctaaagagcctatggcaaaaaaagctaaagttgggaaggggaagaaagtcaaggatcctaacatgcctaagcgtcctcccacagctttctttgtcttcttggatgattttagaaaatctttcaaagaagctaatcctgattctaaggatgttaaaagggttggtaaagaggctggtgaaaagtggaggtctatgactgatgaagagaagaagccatatcttgacaaagttgctgagcttaaggaagagtacgagaaggctatggaagctatgaactg

SEQ ID NO: 280522 - DNA, 340 bp, Glycine max
  unsure (1)..(340): unsure at all n locations
tttcactagccgcagcagcctcaggaggagaataaggatgtctcacaggaagttcgagcacccaaggcacgggtcactgggatttctccccaggaagcgtgctgctcgtcacaggggaaaagtgaaggcattccccaaggatgacccatccaaggcacccaagctcactgcattcttgggttacaaggctggtatgactcacattgttagagaggtcgagaagccaggatcaaagcttcacaagaaggaaacatgtgagcctgttacaattattgagaccctccaatggttattgttggtgtgtgggtatgtgnaaactccccgtgggctccgaacattg

SEQ ID NO: 280523 - DNA, 346 bp, Glycine max
gcagtattgcatgaaccatccagaagaaatgagtaaactatcaaaattgaaggctcaaataactgaggtcaaggggataatgatggacaatattgagaaggttttggatcgtggagagaagattgaactgctggtggacaaaacagaaaacttacagttccaggctgacagcttccagaggcagggcaggcagctgagaaggaagatgtggctgcagaatctccaaatgaagctgatggtgggaggaggaatccttatcttaattataattctgtgggttattgcttgtgggggtttcaaatgttgatggagacactggaatttaagtctgtataaggcaagagat

SEQ ID NO: 280524 - DNA, 335 bp, Glycine max
  unsure (1)..(335): unsure at all n locations
aganaatccgangcgaanagaagagaananttaagatggagncggnangagcaggatgtgtcgctnggngcgnacaagttcccgganagacagccgcttgggacggcnncgcaganccaagacgacggcnangactaccaggagccggcgccgncgccactggtgacccgacggatttacgtcatggtccttttacagagcanggtagcagagtttgtggcacttttcttgtttctatacatcactgtctaaccgtcatgnagtcgccggggctaagctaagtgcagtaccgttggatcaaggaatcgttggncctcggtgcatgnctttcnccc

SEQ ID NO: 280525 - DNA, 169 bp, Glycine max
agctgctcttgctcgtttgaaggtttatgaaggaatccctcctccatatgacaagaccaagagaatggttgttcctgatgcactcaaggtgttgaggcttcagaagggacacaagtattgtgtgctgggcaggttgtcatctgaagttggatgggctactatgatacca

SEQ ID NO: 280526 - DNA, 181 bp, Glycine max
  unsure (1)..(181): unsure at all n locations
agagacttcagatacgggctgctgggagtatctatggaaatcactttcgtgtttcaacatatggagaatcacatggaggaggtgttggttgtattattgatgnatgtcctcctcaccttcctctctccgaagctgatatgcaattggatcttgacagaaggaggccaggtcaganccgaat

SEQ ID NO: 280527 - DNA, 321 bp, Glycine max
  unsure (1)..(321): unsure at all n locations
tgggagttaggttctgcacgctctgcttccagcgagtgttctttcttcgtttcaacaccttaatttgcacacgctgcttcttcagcttgagaaatggcacaagaaacctttctattcacatctgaatctgtaaacgagggtcaccccgacaagcgtgcgaccagatctctgatgcagtgctcgatgcgtgccttgaacaggaccctgacagcaaggttgcctgtgagacatgcaccaagaccaacatggtcatggtctttggagagatcacaaccaaggcaacgtagatatgagaagatgtcgtgnacatgcgcgaattgg

SEQ ID NO: 280528 - DNA, 315 bp, Glycine max
  unsure (1)..(315): unsure at all n locations
gttgtgagctataagctagtttatcgtgaggagaatatgaagttgtttgttntctttgttgctgcagtagttttggtagcatggccatgccatggcgcaggctaccaaaggttccctctccgaatgaaaactggctatggtgagcgttctnggnggtaaaatgcgcaagttttaggcttgctgtngaagcacacaacatccgagcctttaaaaccattcctgaagagtggttganccnacaaaggactacattaatggcgaacatttagatcagctctaaanagttaacaacaactttttntnngggggnngggg

SEQ ID NO: 280529 - DNA, 205 bp, Glycine max
  unsure (1)..(205): unsure at all n locations
gttttccttgtttcccctattattatctcgctctcacaaaatcatggcattctctagtgctttgattctgtggtcgttgctagcaatcaacatggccctgccaaccctcgcaaccgtctacaccgtgggagatacttcaggttgggcaatggtactgattatagcacttggactggcgacaagatcttttcagngggtgatantc

SEQ ID NO: 280530 - DNA, 333 bp, Glycine max
  unsure (1)..(333): unsure at all n locations
ctcctcgttgttcttcgctttcctgttttcaatttcgattctttcgttaatttaataagatgtttgggagggcaccgaagaagagcgataatacgaggtactacgaaatcctcggcgtctccaagaacgcttcgcaggatgatctgaagaaggcttacagaaagccgccattaagaatcaccccgacaagggcggtgatccgagaagtttaaagagctggcgcaacttatgaggttctgagtgaccctgagaangtgagatatatgatcagtatggtgaagatgcgcttaaggaaggatgggtggtggcggtgccatgatccnttgaatcttt

SEQ ID NO: 280531 - DNA, 315 bp, Glycine max
  unsure (1)..(315): unsure at all n locations
gggcaagctgagaagtgtgccaagaganagaggaagaaccagtatcgcggaatccgccagcgtccatggggaaagtgggctgctgagattcgcgacccaagaaagggggttcgtgtttggcttggaactttcagcactgctgaagaagctgcagagttacgatgtgaagcaaggaggatccgtggcaagaaagccaaggtgatttccctgatgagccttcaggcgctgttctcaaaacgtctcaagggaatccagaggcnanccaatgaagaaaatctgaactctgtnaanccgaaataacccagtgtcatttgg

SEQ ID NO: 280532 - DNA, 316 bp, Glycine max
gctctttgatcaattatctccggaaacttctggaacctccttatgttgatacccttgaatggtccaaatggcacgtgttttgggtggatgagagagtcgtgcctaagactcacgaagatagcaactacaagcttgctttagatggactttctccaaggtgccaattcccccgggcaatgtttatgcaatcaatgatgcgctttcagccgagggagcggcagatgattatgagacgtgtctcagacattggtcaagaacaatgtgatagttcatcaccagccaatgaatttcaaatttgatctcatgtgtgggcatg

SEQ ID NO: 280533 - DNA, 316 bp, Glycine max
  unsure (1)..(316): unsure at all n locations
agagtttgttgtgagctataagctagtttatcgtgaggagaatatgaagttgtttgttttctttgttgctgcagtagttttggtagcatggccatgccatggcgcaggctaccaaaggttccctctccgaatgaaaactggctatggtagcgttcttcggaggtaaaatgcgcaagttttaggcttgctgtggaagcacacaacatccgagcctttaaaaccattcctgaagagtgcgttgaaccaacaaaggctacattantggcgaacatttagatcagactctaaacagttaaccaacagnttntttnnggca

SEQ ID NO: 280534 - DNA, 317 bp, Glycine max
  unsure (1)..(317): unsure at all n locations
anganaaaganaaataaaatgggttccgataataccaacttggagttcttgaaggagatcggtttgggctcctccaacattggttcttacattaatggccaatggaaagccactggttcttctgtcacttctgttaatccttctaacaanagagcatagctcaagtgactgaagcgacnttgcaagattatgaggngggttgcaagcttgcagtgaagcaccaagacatggntgactatncgggcaccgaagagaggtgagttgtnagacagattggtnaagcattgngggccagttggntcctttgggtagatggt

SEQ ID NO: 280535 - DNA, 310 bp, Glycine max
  unsure (1)..(310): unsure at all n locations
acttctttcatcgcttcggatcttcaatctcatctccgatctcaaaatgcncgctgtttatggagctcgcttgangaccttcgaagactccgaganggngagtnaanacggttacgntcgcnaggnttcangacccgtcgtcgtttggatggcatggctggngctnctatgtangaactcgtgcgtgttggtcatgataatctcantggtgaaattactcgtctcgaaggggattctgctaccatccaagtttatganganactgctggttnatggnnatgatcggtntacggnnnacaagccttgtccg

SEQ ID NO: 280536 - DNA, 321 bp, Glycine max
  unsure (1)..(321): unsure at all n locations
ccatggnattttattcatgaaatgggttggcttcttcacagaagccagttgaaattaaggatggttcaattgaactctagtgaggatctctttccattgaaacggttcaagtggcttattgagttttccatngatcatgattggtgtgagcagtgagaaaactgttgaacctactgcttgatggaactgtaaatacaggagatcatccttccttgtatctcgcgctttcagagatgggtctccttcacaaagctgtaaggagaaacagcaagcagttagtggagtgtcttttgagatatgntcctgagaatatttctgata

SEQ ID NO: 280537 - DNA, 171 bp, Glycine max
attactggggacatcccaagctgactgtgctgttcttatcattgattcgaccactggtggttttgaagctggtatttccaaggatggacagactcgtgaacatgctctgctttcattcacccttggtgtgaaacagatgatttgctgctgtaacaaatggatgctactaca

SEQ ID NO: 280538 - DNA, 335 bp, Glycine max
  unsure (1)..(335): unsure at all n locations
gtanaacttactggtgggttgggaatgattatggnccaaccactgaagccaacggtgaagagcttcttgcagatgcgcatcttttagcagctactatggtgggtcaaaccgcaggagataagattaaggagtatataaagctgagtcagtacccaacagaacgattgagtttagaggaactgtgattggtggttctccttctgctcctcaagttgcttccttttctagccgtggaccgaaccatcttacgtcgcagattctgaaacctgatgtattgctcctggtgttaacatttagcagggtggactgggcgtgtnggtccacggattgacatt

SEQ ID NO: 280539 - DNA, 313 bp, Glycine max
  unsure (1)..(313): unsure at all n locations
tctctctccatccaacatcgaaacgaggtcgttttgtgttccgccgaaggacccggangttgtagcaggctagcagctatggatttggcatccaatctcggtggcaagattgacaaagccgnagttctctctgccgttcagaagtatgagagtatcatgtttgctatggaggtcaagaggaagagaggaaactaattataccgatatggttaataaatactacgatcttgttacaacttnatgagtntggctgnggggaatcttccntttgcaccagtggaaaagggatctctngaaganacaacgcatgaac

SEQ ID NO: 280540 - DNA, 321 bp, Glycine max
aacactttgagttgcattacatcacaacaacaacatggctgccactgctgctgcaggcatagcttccttgttttcttcttctattaacagtgtcaaatgtcttcgttcctccaagaactgctccataatagaccctctcataacaacagtccctcaaaccgtggcatgtttgggtcacacttggtggaactttgtccattattcgcacaagttgtggggacctagaatttctgctgctgttgcacaagaagaggctgttgttgttgtggatgatgatggtgctggttagttgaagaagagaaagtggaggagaatgaagag

SEQ ID NO: 280541 - DNA, 309 bp, Glycine max
  unsure (1)..(309): unsure at all n locations
gcaggagcagaggggctaaacagagaacagtacgtgtaccttgcganntgtcggagcaggcgganggtacgaagagatggtggagttcatgcagaaggtggtggtggggtggacgccggcgtcggagctcacggtggaggagcgcacctcctctcggtggcctacaagaacgtgatcgggtctctgcgtnccgcgtggcgcatcgtgtctccatcgaacagaaggaggaaggcgcaanaacgagaccagtgtcctcgtgaacactanagatccaagtcgagangagctcagcaagttgcgccanatcct

SEQ ID NO: 280542 - DNA, 316 bp, Glycine max
  unsure (1)..(316): unsure at all n locations
ggagagagagagagagtcgaatntgaattgagctgagcagntatggtgagaaaacatggctggcaattacctgctcacanttttcaggttgttgcgatcactgtattctgcttattggtgattgctttctatgctttccttgctccctcatcggaggaggtcatatatgggaatacaccttcattgctgtttactctcctgtggctctcattgtgttcattctttacgtcagatgcactgcaattaaccctgcagatcgggnntatgtctaatntgacctagnttgggaataagttcaattctgctcacnattanc

SEQ ID NO: 280543 - DNA, 316 bp, Glycine max
  unsure (1)..(316): unsure at all n locations
atctagactcttccttttctcttctctgtctaaggggtgccctgagatcacattgaacaatggtgaaggctgtggccgttcttggcagcagtgagggtgtcactggaactattcacttcgttcaggagggaagtggtccaaccaccgtaatggatctcttgctggtcttaagcctggnctcnatggttnccatgtccatgccttgggggacataccaatggttgcctctcaactggancanttnnatcctaataacaaggagcatggnnccctgaggatgagaatcgncatctggtgtctggggatgttatgnggg

SEQ ID NO: 280544 - DNA, 307 bp, Glycine max
  unsure (1)..(307): unsure at all n locations
gtttgttgtgagctataagctagtttatcgtgaggagaatatgaagttgtttgttttctttgttgctgcagtagttttggtagcatggccatgccatggcgcaggctaccaaaggttccctctccgaatgaaaactggctatggtagcgttcttcggaggtaaaatgcgcaagttttaggttgctgtggaagcacacaacatccgagcctttaaaaccattctgaagagtgcgttgaacnaacaanggctacttatggcgaanatttagatcagctctaaannngtnacccaanangcttttttttg

SEQ ID NO: 280545 - DNA, 318 bp, Glycine max
  unsure (1)..(318): unsure at all n locations
cactctctttctctagtcctgttatttctcagcgcgtaaagcatggctttgttggtggagaaaaccacgagtggtcgcgagtacaaggtcaaggacctttcccaggccgacttcggccgcctcgagatcgagctggccgaggttgagatcccggcctcatggcctgtnggaccgagttcggccctcccagccctcaagggggcccgcatcaccggctccctccacatgaccatccagaccgccgttctcattgagacctcacngccttgggccgagtccgttggtgctctgaaanatttctcaaccaaggacaagcng

SEQ ID NO: 280546 - DNA, 125 bp, Glycine max
ggagcattagctatgtttgttaatgtcactttatgttatgtgggtaagtcacctaagacactccacgtacctacttgttgtctcttacgcggctttaataaatcttctgcccttgttccatattt

SEQ ID NO: 280547 - DNA, 315 bp, Glycine max
tccgaagcaggaactaaatatggctgacttgttggaatggtcaaagcaagataagaaacgaatgcttcatgtcgtctaccgtgttggtgacttgatcgcaccatcaaattttacacagaatgtttaggaatgaagcttttgaggcaaagagatatcccagaggagaaatatgctaatgcttttcttggatttggccctgaagaatcccattttgttgttgaattaacatataattatggggttacctcgtatgacattggcgatggctttggacattttgcaattgcaactcaggacatttataaattggttgag

SEQ ID NO: 280548 - DNA, 316 bp, Glycine max
caaacctcttcgttccttcgattcattccatttcttccaaaatggccaaagacccagttcgcgttctcgtcactggagccgcaggcaaattggatatgctcttgtccctatgattgctaggggagtgatgctgggtcctgaccagcccgtgatcctccacatgcttgacattcctccagcagcagagtcgttgaatggggttaaaatggaattggtggatgctgcattccctcttcttaaaggtgttgttgctacaaccgatgtggttgaggcatgcactggggtcaatattgcagtgatggttggtggattccct

SEQ ID NO: 280549 - DNA, 315 bp, Glycine max
attatctttggcaattgcatggaagaagatagtttggagtctcggcatgtgggattctgtccgtgagtttgctagaatgtatgacgctggaatgggtatgatcatttttgcaccaatagcatttttatcgtggtttccattcatttcaactttccaatctcgccttctcttcaatcaagccttcagccgtggtcttgaaatttctatcatccttgctggaaacaaagctaacgttgagacttagcgcctttcatcttactctgtatccctgtggggcttgtatatttagatgtatattatttttgtagttcattg

SEQ ID NO: 280550 - DNA, 315 bp, Glycine max
gaagagcgaagagaatgggctcccaagggtttaatctttttggctgtgttatgcttctcagcactgtcactgagtcgttgtcttgcggaggataatggacttgttatgaacttctacaaggaatcatgccctcaggctgaagacatcatcaaagaacaagtcaagcttctctacaagcgccacaagaacactgctttctcctggctcagaaacatcttccatgactgtgctgttcagagttgtgatgcttcactgttgctggactccacaagaaggagcttgtctgagaaggaaacagatagaagctttgggttg

SEQ ID NO: 280551 - DNA, 149 bp, Glycine max
atcacaatgtgtggtattcttgctgttcttggttgttctgatgactctcgagccaaaagggtccgcgtgcttgagctctctcgcagattgaagcaccgtggccctgactggagtgggctccatcaacatggtgactgctttttagcaca

SEQ ID NO: 280552 - DNA, 314 bp, Glycine max
  unsure (1)..(314): unsure at all n locations
cagaaaatggangtncgccggcgagtcctccgtnccgctcccgccggcgaacccttgaagcccaaacaggacccacacccacactcccagcagcaatcgtacctcaccaacgccgtgttcttagggctgttcttctcgctggcgtacttcctcctccaccgatggcgcgagaagatccgcacctccactcccctccacgtcgtcacgctctccgagatggctgccatcgtctccctcatcgcctccttcttctacctcatggccttcttcggcattaccttcatcctccacccattccttaattaccgctcttc

SEQ ID NO: 280553 - DNA, 285 bp, Glycine max
  unsure (1)..(285): unsure at all n locations
tttccaaatcccaactactactcacactcactgcagatctcaatccatggctaccatncgttagcatcaaggcccgccagatctttgacagtcgtggcaatccaaccgtcgaggtggatttgacatgctccnatggtacttttgctagagctgctgttccaagtggtgcatccactgggatttatgaggcccttgaattgagagatggaggatctgactaccttggaaagggtgtatcaaaggctgttgacaatgtgaacaccattattgcccctgctttggttg

SEQ ID NO: 280554 - DNA, 240 bp, Glycine max
acttttgttgaaaatgcagtggcaaaaggggctgtttgtttggatgggagtcctccagcttaccacttccacaagggatctggagcagggattaacaactggatagttcactttgagggaggaggatggtgcaacaacgttactacttgcctttcccgtaggacactcgattaggttcatctaagaaaatggatacatcactttccttttctgggtttttcagtaacagtaaaaagttca

SEQ ID NO: 280555 - DNA, 311 bp, Glycine max
  unsure (1)..(311): unsure at all n locations
ataccctgtgtgatctttatgataccctcactatcactcaagctgttatattctgtaatactaagcgaaaggtggactggttaactgaaaaaatgcgtaacaacaatttcactgtctcatcaatgcacggtgacatgcctcagaaagaaagagatgctattatggganaatttcgtgctggaacaacccgtgtgctaataacaactgacgtttgggcccgtggtcttgatgtacagcaggtttctctagttatcaattatgaccttcccaataatcgtgagctttacattcatcgaattggtcgctctgga

SEQ ID NO: 280556 - DNA, 314 bp, Glycine max
gttgtgagctataagctagtttatcgtgaggagaatatgaagttgtttgttttctttgttgctgcagtagttttggtagcatgggccatgccatgggcgcaggctaccaaaggttccctctccgaatgaaaactggctatggtgagcgttcttcggaggtaaaatgcgcaagttttaggcttgctgtggaagcacacaacatccgagcctttaaaaccattcctgaagagtgcgttgaaccaacaaaggactacattaatggcgaacaatttagatcagactctaaaacagttaaccaacaagctttcttttat

SEQ ID NO: 280557 - DNA, 307 bp, Glycine max
  unsure (1)..(307): unsure at all n locations
cgcaataactcagccacagccacaacacacaaacacaaacccttcgttcctctctcgttcccttcttcaattcgatcaaacacagaatagtacttttttattatgatggccgtggcccgaaaggaaatggaccggatcaagggcccgtggagcccggaggaggacgaggctcttcagaagctcgtggagcggcatgggcccagaaactggtccctcatcagcaggtccattccgggccggtctgggaaatcgtgcaggctccgatggtgcaacagctgtcgccacngtcgagcaccgggcttcngcc

SEQ ID NO: 280558 - DNA, 310 bp, Glycine max
  unsure (1)..(310): unsure at all n locations
ttctttccaaatcccaactactactcacactcactgcagatctcaatccatggctaccattgttagcatcaaggcccgccagatctttgacagtcgtggcaatccaaccgtcgaggtggatttgacatgctccgatggtacttttgctagagctgctgttccaagtggtgcatccactgggatttatgaggcccttgaattgagagatggaggatctgactaccttggaaagggtgtatcaaaggctgttgacaatgtgaacaccattattgcncctgctttggttggcaaggacccaactcagcagact

SEQ ID NO: 280559 - DNA, 309 bp, Glycine max
cacaacaacactctctcttctcgctcttggcttttcgctcttcactcactctcattcattcatttccaccgttcatggatccagtaagcgtgtggggtaacacgcccttggcgacggtggatcccgagatccatgacctcatcgagaaggagaagcgccgtcaatgccgcggaatcgagctcatcgcctccgagaacttcacctccttcgccgtcatcgaggccctcggcagcgctctcacgaacaaatactccgagggcatgccgggcaaccgctactacggcggcaatgaatacatcgaccagatcg

SEQ ID NO: 280560 - DNA, 308 bp, Glycine max
ccaaacaaccttctttctttttctgtgagcctttctttcaggttcttaacttgatcagtgtgcagtgtccaaatcataagggtagttgcaaattgcaatgggctaagcatgatgttgagggtggttccttctctgcaaaggactaccatgatcctcctccagcaccgttgattgatgctgaggaactcacacagtggtccttctacagggctttgattgctgagttcattgccacaatgctcttcctttacatcacagtgctcactgtgattggttacaagagccagagtgatgtaaaggctgggggt

SEQ ID NO: 280561 - DNA, 308 bp, Glycine max
tcaagcttctaggatttctgcctgctgcatcaaaatgggaagcaacttgaggtttttgagtctttgcctcttggcattgattgcatcaactcatgctcaacttcagcttggtttttatgctaacagttgcccaaaagcagagcaaattgttttgaaatttgttcatgaccatatccacaatgctccatcactagcagctgcattaataagaatgcactttcatgactgttttgtaaggggatgtgatgcatcagtccttctgaactcaacaaccaatcaggctgagaagaatgctcctccaaatctca

SEQ ID NO: 280562 - DNA, 279 bp, Glycine max
aaaaaacacacacgacacactcccatacacacacgttgtctcgcacacattccttcattccgcagcagcaaacatctttaccttaaacgacaacaatggccgatgccgaggatattcaacccctcgtttgcgataatggaaccggaatggtcaaggctggttttgccggagatgatgcgccgagggcggtgttccccagcattgtggggcgtccacgtcacacgggagtgatggttgggatggggcagaaggatgcgtatgttggggacgaggctcaat

SEQ ID NO: 280563 - DNA, 307 bp, Glycine max
  unsure (1)..(307): unsure at all n locations
atgcanataagctcaatcgcattcttcagctcactggattcagtgatcctgtttatgctgaagcatatgtcacagtgcatcactatgacattgtccttgatgttactgtcatcaaccgaaccaaggaaactcttcagaatttatgtttggagttagcaaccatgggtgatctcaaacttgttgagcgtccacaaaactatacgcttgctccagaatcaagcaaacaaattaaagccaacattaaggtttcatcaactgaaacaggagttatatttggtaacatagtctatgagacatcttctaatgt

SEQ ID NO: 280564 - DNA, 307 bp, Glycine max
gagcgcggcataacctaaacctatctttcttctctctctgtgtgtgcgcttcaacggcaaccagaagcagccatggccactgcaaggactgtgaaggatgtttcacctcatgagttcgttaaggcgtactcctctcacctcaagcgatccggcaagatggagctgccagagtggactgatattgtgaaaactgcaagatttaaggagttggctccttatgatcctgactggtactatgtcagagctgcttccatggcaagaaagatctacttgagaggaggacttggtgttggtgcctttcagagga

SEQ ID NO: 280565 - DNA, 305 bp, Glycine max
gctaacagcaagactgtgccggcatcaagcatcccagatgggtggatggggttggatattggtcctgattccatcaagacatttggtgaagcattggatacgactcagaccattatttggaatggaccaatgggtgtttttgagtttgataagtttgccacaggaacagaggctatagccaagaaactggcagagctgagtgggaagggagtgacaaccatcattggaggaggtgactccgttgccgctgtggagaaggttggacttgcagacaagatgagccacatctccactggtggtggtgc

SEQ ID NO: 280566 - DNA, 304 bp, Glycine max
gctaacagcaagactgtgccggcatcaagcatcccagatgggtggatggggttggatattggtcctgattccatcaagacatttggtgaagcattggatacgactcagaccattatttggaatggaccaatgggtgtttttgagtttgataagtttgccacaggaacagaggctatagccaagaaactggcagagctgagtgggaagggagtgacaaccatcattggaggaggtgactccgttgccgctgtggagaaggttggacttgcagacaagatgagccacatctccactggtggtggtg

SEQ ID NO: 280567 - DNA, 305 bp, Glycine max
gggagcataccatgttgcctcctattgctttcgatatcaacggtataaaagataagctctccaatcagttccgcccttggcaacgctccttccaattctgggttcgagccattgacatttacaccggatacaaggtgtttcaagtgagagtgaatttcgtcaaagatgcgcagaagcaggaagcaatgtgggagaggcagcacgagcttgccgccgataagattttctccatgtgctatgaccttggaggtttcttcctcaagattgctcagattattgggaagcccgatttggccccggctgcg

SEQ ID NO: 280568 - DNA, 305 bp, Glycine max
  unsure (1)..(305): unsure at all n locations
gtgaaacgacatggcgatggtggaccagcctctgtatccgattgccgttttgatcgacgagttgaagaatgaggacattcagctgcgcctcaactcgatccgaaggctctccacgatcgcgcgcgcgctcggcgaggaccgcacgcggaaggagctgattccgttcctcagcgagaacaacgacgatgacgacgaagtnctcctcgcaatggccgangaattaggtgtcttcattccctacgtcggaggcgttgagcacgccaacgtgcttcttcctcccttggagacgctctgcaccgttgagg

SEQ ID NO: 280569 - DNA, 304 bp, Glycine max
  unsure (1)..(304): unsure at all n locations
catgaaaaggtgttacaaacttctcagacacatctgaaagatattcaagcaaaatctcatagtggttctgctagaagttgcactaaagttcacaagaaggggattgcgctcggtaggtcagtggacctcacaaaattcagtgattatggggaattaattgctgaattagatcaactattcgaatttggaggtttattaacttctccacaaaaggattgncttattgtctacactgataatgagggagatatgatgcttgttggtgatgatccgtggcaggaatttgttgcaatggttcgcaaaa

SEQ ID NO: 280570 - DNA, 302 bp, Glycine max
  unsure (1)..(302): unsure at all n locations
aacttcacccattcatacgtggtgttgttactgctgctcttttctcttttcttttctctttagttctctcttcccctnnnnnnnnnnnnnnnnnnnnnnnnngagcttgtttaagcttttcttccattaacatattatcacaatgtgtggtattcttgctgttcttggttgttctgatgactctcgagccaaaagggtccgcgtgcttgagctctctcgcagattgaagcaccgtggccctgactggagtgggctccatcaacatggtgactgctttttggcacatcaacggttagccatag

SEQ ID NO: 280571 - DNA, 302 bp, Glycine max
ggcaaatgatcctacgattgagcgtatcatcactcctcgtattgctcttactactgctgaatatttggcatatgaatgtggcaagcatgttcttgtgatactaactgatatgagttcttatgctgatgctcttcgtgaggtatctgctgcccgagaagaagtacctggtagacgtgggtatcccggctacatgtatacagatcttgcaacaatatacgaacgtgctggaagaattgaggggcgaaaaggctctattacacaaattccaattctaaccatgcctaatgatgatattacgcatc

SEQ ID NO: 280572 - DNA, 303 bp, Glycine max
  unsure (1)..(303): unsure at all n locations
cacagggaaaacaaaacaaaaatactggaatttctacgtaaatcctggggagattgatannagaactgaatggtcaatatggatggtgtactcaaaggttgcaatgcctcgtcaaaatatgagcaatggagttgaggggacatcattgtcccatggcatgcatagaagttcaataattacaaggaggtttactgatgatcctattcaaactgcagcaatgcgtgcagaacttcacaggcgaggaatagctcaaatgaggatcaacaatcggtcacttcaagatatgtatatatttggagatcc

SEQ ID NO: 280573 - DNA, 302 bp, Glycine max
gatggatcattctggtcaccggcgtgcacgaggaagcgcaagaagacgatttgcaaaacacctttggtgaatatggagagattaagaacctgcatttgaatcttgatcgccgcactggttttgtcaaaggttatgcgttgattgaatatgagcgtgctgaggaagctcgaaatgcaatagagaatttgaatggatctgagcttcttacccaaaccatttatgttgactgggccttcagcagtggacctattaacgagccagtcagaagaaagaatgctagaccacctcgtgaacggcgttcc

SEQ ID NO: 280574 - DNA, 136 bp, Glycine max
tgattgaagaagatgccgatcagaaacatcgccatcggaagggctgaagaggctactcaccccgacacgttgaaggcggggttggctgagttcatctccaccttgatcttcgtgttcgccggttcaggttccggca

SEQ ID NO: 280575 - DNA, 303 bp, Glycine max
aggagggagagtgttgacgctccatcaagatgggtatttctagggattccatgcacaagaggcgtgccactggtggcaagaagaaggcatggagaaagaagagaaagtatgagcttgggcgtcaggccgcaaacaccaagttatcaagcaacaaaactatccggaggattcgtgttcgaggtggcaatgttaaatggagggcattgaggttggataccggcaattactcatggggtagtgaagcagttactcgcaagactcgtattctagatgttgtttacaatgcctcaaacaatgagcttg

SEQ ID NO: 280576 - DNA, 302 bp, Glycine max
  unsure (1)..(302): unsure at all n locations
cctcaaagcaacacaagaacactctcttgaacattcatggatccagtgagcgtgtggggtaacacgcccttggcgacggtggatcccgagatccatgacctcatcgagaaggagaagcaccgccaatgccgcggcatcgagctcatcgcctccgagaacttcacctccttcgcagtcatcgaggccctcggcagcgccctcaccaacaaatactccgagggcatgcncggnaaccgctactacggcggcaagaattcatcgaccagatcgaaaacctctgcngctcacgcgccctccaggcc

SEQ ID NO: 280577 - DNA, 298 bp, Glycine max
gcaaaaatggcacctgcaacactgtctctgtctctcctcctcctgttctcactcagcatcgccgtaaccgttagatcgagcgactacgactacgattgtgtgtacactgcatacgttagaaccggttcggtgttgaagggcggaacggactctaagatcgggctgaagctgtacgacaagtacggctactacatctacattaaaaacctcgaagcatggggcggcttgatgggcaagggctacgactacttcgagcgcggcaacctcgacatcttcagcggaaggggacctgtcttga

SEQ ID NO: 280578 - DNA, 307 bp, Glycine max
gtttgtaccattgaggagtctggtgaacacattgttgctggtgcaggagagcttcatcttgagatctgtttgaaggacttgcaggatgatttcatgggtggagctgagattatcaaatctgaccctgttgtgtcattcagggagactgttttggagagatcatgccgcaccgtgatgagcaaatcacccaacaagcacaaccgtctgtacatggaagcaagaccattggaggaaggtcttgctgaggccattgatgatggcaagattggaccaagggatgaccccaaggttcgttccaatatcttgt

SEQ ID NO: 280579 - DNA, 360 bp, Glycine max
gaatcagaccatccaaacgaagcagaaagagctcatagaagttctcgtcctcttctctctatcttgaatcttcttctcttatcagaaacgcgcgttgctcggataaggttgtgctgcgccgactcactggtactttgcttaatatggcggctgagaagtcaaacattgcaaaagatgtgactgaattaattggcaaaactccattggtatatctcaaccacatcgtggatggttgtgttgccaaagttgctgccaagcttgaaatgatggaaccttgctccagtgtcaaagacaggataggatatagcatgattgtagacgctgaggagaaaggactcatcacaccgggtgaaagtgtcc

SEQ ID NO: 280580 - DNA, 359 bp, Glycine max
ctttccgttcatttcctctgttttttcttcaaatccattgtttcgtggaaatcccgaaatttaaccatgcttctccgaaccgccgcctccgccgcttctgcttcgtccctctccctcttcagccctacctccgaacctctccgttcggttcccgctcgtggattggtggttcgcgccgcgaaaggatccacgaaccaccgcgccctaaccggcgtgatctttgaaccgttcgaagaggtgaagaaggagctcgatctcgttcccaccgttccacaagcttctctcgcccgccaaaaatacgttgacgaatccgaagccgccgttaacgaacaaatcaatgtggagtataagtttcctac

SEQ ID NO: 280581 - DNA, 260 bp, Glycine max
gatcgagataactagaaacagtgtgatgaaaatgaaggtccttgttttcttcgttgctacaattttggtagcatggcaatgccatgcgtacgatatgttccctctccgaatgaacactggctatggtgcccgtactccggaggtgaaatgcgcaagttggaggcttgctgtggaagcacacaacatctttggctttgagaccattcctgaagagtgcgttgaagcaacaaaggaatacatccatggcgaacaatatagat

SEQ ID NO: 280582 - DNA, 319 bp, Glycine max
  unsure (1)..(319): unsure at all n locations
cgaganatggcgatggcaatggcgcttcgcaggctttcatcttcaattgacaagcctctgcgccctctcttcaatgccggttccctctactacaagtcgtctttgcctgatgaagctgtttacgacaaggagcgacccggagttacatggccgaagcagttgaatgctccacttgaggtcgtggatcctgagattgctgatattattgagcttgagaaagctaggcaatggaaggggctaganttgataccgtcagagaatttcacctctgtgtctgtgatgcaagcggttggatcggttatgancaacaaatacagtg

SEQ ID NO: 280583 - DNA, 360 bp, Glycine max
  unsure (1)..(360): unsure at all n locations
cgctctctcactcacaaacgcacactgaattcaaaaacatcgaaagagagaggcatggccgagcaaaccttcatcatgatcaagccagatggcgttcaaagaggccttattggcgagattattagcagatttgagaggaagggtttttacttgaaagggttgaaactcgttactgtggaccgtccttttgctgagaagcactatgctgatttgtctgcaaagcctttctttagtggtttggtggattacattgtctctggccctgttgttgccatgatctgggagggtaagaatgttgttacaactggccgaaagatatcggagccacaaacccagctcaatctgagctggantattcgt

SEQ ID NO: 280584 - DNA, 360 bp, Glycine max
  unsure (1)..(360): unsure at all n locations
cgacaggtntctgagtcttttcttcttcgttaccctcttcacatgccttctctctgctaattcccacgatgaccatattttcctaccgagtcaactccatgacgatgactcagtgagttgcactgctaccgacccaaaccttaactacaagccggtgatcggaatcctgacccaccccggcgacggtgcctctggccggctcagcaacgccaccggggtttcttacatcgccgcctcctacgttaaattcgtggagtccggtggtgctagagttattccccttatctacaatgagtcacctgagaaccttaacaagaagctcgatttggtcaatggagtgctcttcactggtgggtgggc

SEQ ID NO: 280585 - DNA, 362 bp, Glycine max
  unsure (1)..(362): unsure at all n locations
agactcctgaacaatgtgggaagggctcacatttcctatttcgttgaagcagcctggtcctcgtgattctccaatacagtgctttatcaggaggaacagagaaacttcaacatatctattgtacattggcctggtaccatcggagaatgagactgataagttgttattagctgccaaaaaggtaagaagggcaacaggcacagacttcgtcatatctttggttgcagatgatttttttcgctccagcaacacatatgttggaaaactcaggtctaattttttgggtaccaagttcactatttatgacagccaacccccacnaggagctgcaattcaaccagataatagatctagtaggagat

SEQ ID NO: 280586 - DNA, 359 bp, Glycine max
  unsure (1)..(359): unsure at all n locations
cgggaatatccgctattctagttgctgcttctgtctgtaacacaatacaatcatcattcatcaaatcactgaaaccaaagccacaagctgcgacatcagaagaatggaagacggtgttgaccacttggctttcgagaggaacaaggcgcagttcgatgttgaggacatgaaaatcatttgggccggttctcgtcaagactttgagctttcggatcgaatttctcgccttgttgccagcgatccggcgttcagaaaggatgatagaaccacgcttgataggaaggagttgtttaaaaacaccttgagaaaagcagcttatgcatggaaaaggatcaacgagctccgtcttaatgaacang

SEQ ID NO: 280587 - DNA, 333 bp, Glycine max
  unsure (1)..(333): unsure at all n locations
gaaaagantaacaatanaagtgtggagtactgttgatagcaaagatgtttgggatcttcgacaaggggcaanagatanagnggacantggtgtnnatgccaaagaatgtgtnggacttcaacgccataacctccatcggtaaaggtggtgttattgacacagccaccggcatcttaggccaaggcgncacttagttggtggagtaattgatactgccacttccttcttaggccgtaatatctccatgcaattgatcagtgctactcagactgatggcagtggaaatgggaaagttggaaaagaagtctattggacaaacatcttccgaccttg

SEQ ID NO: 280588 - DNA, 358 bp, Glycine max
  unsure (1)..(358): unsure at all n locations
cgagataactagaaacagtgtgatgaaaatgaaggtccttgttttcttcgttgctacaattttggtagcatggcaatgccatgcgtacgatatgttccctctccgaatgaacactggctatggtgcccgtactccggaggtgaaatgcgcaagttggaggcttgctgtggaagcacacaacatctttggctttgagaccattcctgaagagtgcgttgaagcaacaaaggaatacatccatggcgaacaatatagatcagactccaaaacagttaaccaacaagcttacttttatgccagagacctcgaagtccatcccaaggacacatttgtgntcagtatagatggcaccgtactc

SEQ ID NO: 280589 - DNA, 258 bp, Glycine max
  unsure (1)..(258): unsure at all n locations
tcgagataactagaaacagtgtgatgaaaatgaaggtccttgttttcttcgttgctacaattttgttagcatggcaatgccatgcgtacgatatgttccctctccgaatgaacactggctatggtgcccgtactccggaggtgaaatgcgcaagttggaggcttgctgtggaagcacacaacatctttggctttgagaccattcctgaagagtgcgttgaagcaacaaaggaatacatccatggngaacaatatagat

SEQ ID NO: 280590 - DNA, 357 bp, Glycine max
  unsure (1)..(357): unsure at all n locations
aatcttctgagagtgtntggttganagtagcaaagatgtttcctttcgggcaaaagggtctnaagatagaggggactatggtggttatgcagaagnangtgttggatatcaacagcatcaccagtgttggagggatcgttgaccaaggcttaggcttcataggcagtgcagtcgatgcacttacttttgcagccaccaaaatctccatccagttgattagtgctaccaaggctgatggtgggaaaggnnaaattggacagagtacaaatttaagaggaaagataacattaccaaccttgggagctggcgaacaagcatacgatgttaattttgaatgggacagtgacttcggaattc

SEQ ID NO: 280591 - DNA, 355 bp, Glycine max
tgcactctttgttgcagtttctgttggtgccaacatctctggtggccatgtcaaccctgctgtgacttttggattggctcttggtgggccacatcaccatcctcactggcttcttctactggattgcacagcttcttggctccatcgtggcatgttttcttctcaactatgtcacaggaggcttgccaactccaatccacagtgtggcttctggggttggagctgttgaaggagttgtgaccgagatcatcatcacatttggtttggtgtacacagtgtatgccacagcagcagaccctaagaagggatcattgggaaccattgcaccaattgccattggtttcattgttggtgc

SEQ ID NO: 280592 - DNA, 351 bp, Glycine max
gtttctcaacatactctgacaaccagcctggtgtgcttatccaggtctttgagggtgaaagagcaaggaccagagataacaatttgttgggcaaatttgagctatctggcattcctcctgcacccaggggtgttcctcagattacagtgtgctttgacattgatgccaatggtatcttgaatgtctctgccgaagataaaaccactggccagaaaaataagatcactatcaccaatgacaagggtagattgtcaaaggaagatattgagaagatggttcaagaggctgagaagtacaagtctgaggatgaagagcacaagaagaagttgaggccaaaaacgctttggtttc

SEQ ID NO: 280593 - DNA, 354 bp, Glycine max
ggggcaaggccaaacttggtcacagatccaactcctcaatatccaggtggatgtactgctgctgatcttgcttatgtgaagggatgtgatggcttagctgcttacctttctgagaagtctctggttgagcagttcaatgacatgagcttggctggaaatatcagtggctcactggaaactagctcaactgatccagtaaatgctgcgaaccttaccgaggaccaactttacctaaaggagactttggaagcttaccgtacagctgccgaggcagcagcacgtattcaagctgcatttagggagcattcatttaaattacgatatcaagcagttgaaattatgagcccagaggaa

SEQ ID NO: 280594 - DNA, 300 bp, Glycine max
agggcaattgaccacaaggcattgcatgataccttttctacatttggaaatatcctttcgtgcaaggtagctacggattcatctgggcaaatcaaaaggctatggctttgttcaatttgataatgaggaatctgcccaaaaagctatagagaagctgaatggtatgctgttgaatgataaacaagtgtacgtgggacccttccttcgcaagcaagagagagaaagtgctgctgacaaggcaaaattcaacaatgtttttgtgaagaatctatcagaatcaaccaccgatgatgagttgaa

SEQ ID NO: 280595 - DNA, 351 bp, Glycine max
gattcgtttctcaaccacctcaattgagagagagatcaactctgtgaatgacaaccctttgattgatgtttcaaggaacaagggcattgcatggtggcaatttccaaggaacccctattggagtctctatggacaacacacgtttggcacttgcatctattggcaaactcatgtttgctcaattctctgagcttgtcaatgacttttacaacaatggattgccttcaaatctcactgctagcagaaatccaagcttggactatggtttcaagggagctgaaattgccatggcttcttactgctctgaactccaatatcttgcaaatccagtaatacccatgtccaaagtgc

SEQ ID NO: 280596 - DNA, 312 bp, Glycine max
  unsure (1)..(312): unsure at all n locations
aaaggtggcgagaagaacattctagtctttgatcttggtggtgggacctttgatgtcagtatcttgacaattgataacggtgtttttgaagttcttgctacaaatggagatactcatcttggaggtgaggattttgatcaaagaataatggagtacttcattaaattgatcaagaaaaagcatggaaaggatattagcaaggacaacagagcacttggaaagctgaggagagangctgagcgtgcaaagagggctctcagcagccagcaccaggtccgcgtggaattgaatcactttttgatggtgttgatt

SEQ ID NO: 280597 - DNA, 299 bp, Glycine max
agagcacacacaaacccgtccctcacactctccaaaccctagcggcactacacactagttctatcgctatctccccaagatgtcgagcgccgatcccgagcacagagaagaggaggaggcacccgccgttggcgacgacgaggacaccggagctcacgtcgctccaatcgtcaagctcgaggaggttgctgtcaccaccggcgaggaggacgaagatgcaatcctggatctcaaatcgaagctttaccggttcgacaaggacgggaaccagtggaaggagcgtggcgccggcactgtga

SEQ ID NO: 280598 - DNA, 299 bp, Glycine max
ttatcgatccctttggggagataagaaaatgtggcttgtgcagctctcaaccccatttctgaacggccatggccatggctccagccttctctggaaacccagttcggcggtgactcagacccactgggccccgccgagtttgctgcctcaaatcaatgcgatgaagacgatgcagggaaaagtggtgtgctccacgaacgacaagacggtggcagtggaggtggtgcggctggcccctcacccaaagtacaagaggcgcgtgaggaagaagaagaagtaccaggcccacgatcccgata

SEQ ID NO: 280599 - DNA, 351 bp, Glycine max
  unsure (1)..(351): unsure at all n locations
gtgtttgcggctgagggattccgaacgagcgaccttcttcgtttctcgcaaagtttaagtcatcatgggtaagganaagactcacatcaacattgtcgtcattggacatgtcgactctgggaagtcaactaccactggtcatttgatctacaagcttggaggtattgacaagcgtgtgattgagaggttcgagaaggaggctgctgagatgaacaagaggtcattcaagtatgcctgggtgcttgacaagctcaaggctgagcgcgaaagaggattaccatgatattgctttgtggaagtttgaaaccaccaagtactactgcacagtcatcgatgcccccggacatcgtg

SEQ ID NO: 280600 - DNA, 352 bp, Glycine max
  unsure (1)..(352): unsure at all n locations
cttctcttacccttctctcaagtttcaagagatttcatcatgggctccaaagaaggacaagggctccaccaccttcctccaagcccgccaaatctgggcggtggcnnnnnnnnnnnnnnnnnnnnnnnnnnnggaaagcaaaaggagaaggtgaacaatatggtgctgtttgatcagggcacctatgacaagctcctttctgaagctcccaaatacaagctcatcactccttccattctctctgatcgtttgaggattaatggatcacttgcaaggaaggctataagagattgatggcaagaggttctatcaggatggtgtctgcccatgcaagtcagcaaatttataccag

SEQ ID NO: 280601 - DNA, 348 bp, Glycine max
ggaaatcgttcctatcatcacttctcaaatctcgaaccctctcgttcgtgccgatcactaggtcacacttcatcaatggcgggtagaggcaaaaccctaggatccagcgccgctaagaaggccacctcaaggagcagcaaagccggcctccaattccccgtcggtcgtatcgccaggttcctcaaggccggaaagtacgccgagcgcgtcggcgccggagcccccgtctacctcgccgccgttctcgaatatctcgctgctgaggttttggaattggctggaaacgctgcgagagataacaagaagactcgaattgttccacgccacatccaattggcggtgaggaac

SEQ ID NO: 280602 - DNA, 249 bp, Glycine max
gcgacacgtatcttcatcaataatcgcagaagcagtttccggtgcatctcatcgtcttccaaaatgaacgacgcagatgtctcgaagcaaatccagcagatggtgcgtttcatccgccaggaagctgaggagaaagccaacgagatctctgtatctgccgaagaggaattcaatatcgagaagctgcagttggttgaagccgaaaagaagaagatcaggcaagaatacgaacgcaaagagcgccaagtc

SEQ ID NO: 280603 - DNA, 217 bp, Glycine max
  unsure (1)..(217): unsure at all n locations
aggtggaaactccaagggccactgggaagagagggttctctganactgttgatctgaaacttaatcttcattccaaggaagatctgaatgagaatctgaagaatgtctcaaaggagaagaccctccttaaggatcctgccaagccaccggctaaggctcaagtggttggttggccaccagtgaggtcatacaggaagaacatgatggcagtacaaaa

SEQ ID NO: 280604 - DNA, 251 bp, Glycine max
  unsure (1)..(251): unsure at all n locations
anacctcttcgttccttcgattcattccatttcttccaaaatggccaaagacccagttcgcgttctcgtcactggagccgcagggcaaattggatatgctcttgtccctatgattgctaggggagtgatgctgggtcctgaccagcccgtgatcctccacatgcttgacattcctccagcagcagagtcgttgaatggggttaaaatggaattggtggatgctgcattccctcttcttaaaggtgttgttg

SEQ ID NO: 280605 - DNA, 249 bp, Glycine max
  unsure (1)..(249): unsure at all n locations
gctgttcttgcgcgtgaacaagcctcaggtnagccaaaaccatggttaagcataacaatgttatcccaaacggacacttccgtaagcactgggcagaactatgtgaagacttggttcaatcagccagcacggaagacaaggagacgattggctcgtcagaagaaagctgtgaagatattccccagacctacggctggacctctcaggcccattgtacatggtcaactttgaattacacatgaaagtgag

SEQ ID NO: 280606 - DNA, 344 bp, Glycine max
ggccaccttaccaaaaaacctgaagaaattggtgctggtgaccagggtcacatgtttggctatgccactgatgaaacccctgaattgatgccattgagccatgttcttgcaacaaaactcggtgctcgtctcaccgaggttcgcaagaacggtacctgcccttggctgaggcctgatgggaagacccaagtgaccgttgagtattacaatgacaatggtgccagggttcctattcgtgtacacaccgtgctaatctccacccaacacgacgagactgtcaccaatgacgaaattgctgctgacctcaaagagcatgtgatcaagcctgtgatcccagagaagta

SEQ ID NO: 280607 - DNA, 344 bp, Glycine max
ccgagattcattcttcaccaaaacttcgcaaagaaacactacacatccatggcaactgctggcgtgcaagaagttcgtgttccccctctaacttccacctctgagccaccttctctctttgacggaaccaccaggttgtacatcagttatatttgtccctatgcgcaggtgtttggatcactcggaactataagggactacaagacaagatcaaactggttcctattgacctacaaaacaggcctgcttggtataaggagaaagtctaccctgaaaacaaggtgccatcattggagcacaatggaaaggtcttgggtgaaagtctcgatttggtcaaatacata

SEQ ID NO: 280608 - DNA, 343 bp, Glycine max
  unsure (1)..(343): unsure at all n locations
aaanaagacaacacagagagaagcgtcttaataaacgctcttctctgaaaaacctgatttcttctcttcttctcttctctttcgtttcgatcttcgatctctgaaaatgagagagtgcatttcaatccacatcggtcaggccggtattcaggtcggaaacgcctgctgggagctctactgcctcgaacacggcattcagcctgatgggcagatgccaagtgataagactgttggtggaggtgatgatgctttcaacaccttcttcagtgaaactggggctggaaagcacgtgcctcgtgcgatttttgtagatctcgagcctactgtgattgatgaagttagg

SEQ ID NO: 280609 - DNA, 318 bp, Glycine max
aaacctcttcgttccttcgattcattccatttcttccaaaatggccaaagacccagttcgcgttctcgtcactggagccgcagggcaaattggatatgctcttgtccctatgattgctaggggagtgatgctgggtcctgaccagcccgtgatcctccacatgcttgacattcctccagcagcagagtcgttgaatggggttaaaatggaattggtggatgctgcattccctcttcttaaaggtgttgttgctacaaccgatgtggttgaggcatgcactggggtcaatattgcagtgatggttggtggattccctag

SEQ ID NO: 280610 - DNA, 278 bp, Glycine max
ctgccccagatagaattgtcttcaagaaggtttcgttgcaatacagagatgtttcaaccagtggaagggtagtttcaatcagagcacaagttgaccacagaggcacctgctaaggttgaaaaggaatcaaagaaacaggaggaaggtgtgatcgtgaacaagttcaaacccaagaacccatatattggtaggtgtcttctcaacacaaagatcactggggatgatgcacctggagaaacttggcacatggtcttcagcactgagggagaagttcctta

SEQ ID NO: 280611 - DNA, 343 bp, Glycine max
  unsure (1)..(343): unsure at all n locations
gggcttcttcctctgcgcaggaattaggaatattcgacaggtagagtttcttcaatggctcctaaagttgataagaagaatgatncaaaggcccaggccttgaagactgctaaggcagttaagtcaggtgctacctttaagaagaaggtaaagaagatccgaacttctgtcactttccacaggccgaagaccttgaagaaggacaggaaccccaagtaccctcgcattagcgccccgccgaggaacaagcttgatcattatcagatcctgaaataccccctcaccactgagtctgccatgaagaagattgaggacaacaacatttggttttcattgtcgacct

SEQ ID NO: 280612 - DNA, 340 bp, Glycine max
ggaaatcgttcctatcatcacttctcaaatctcgaaccctctcgttcgtgccgatcactaggtcacacttcatcaatggcgggtagaggcaaaaccctaggatccagcgccgctaagaaggccacctcaaggagcagcaaagccggcctccaattccccgtcggtcgtatcgccaggttcctcaaggccggaaagtacgccgagcgcgtcggcgccggagcccccgtctacctcgccgccgttctcgaatatctcgctgctgaggttttggaattggctggaaacgctgcgagagataacaagaagactcgaattgttccacgccacatccaattggcgg

SEQ ID NO: 280613 - DNA, 344 bp, Glycine max
  unsure (1)..(344): unsure at all n locations
ctcctccacgctacgacgtcgtttgcccctcgtcggcgcgttntgcatgctcagtttgggactctccaatctctgcacgcccttccattcctctgccctcaaaacgggatccaagttcggtattcgaagccactccagcaccagaatggaagggagtaactccactgtgccgagtattgttgtctatgtcactgttcccaacaaagaagcaggtaagaagttggctgaaagcatcgtcaaagagaagcttgctgcttgtgtcaacagggtaccgggtattgaatcggtgtaccagtgggagggaaagatccaaactgattctgaggaattcttattatcaagac

SEQ ID NO: 280614 - DNA, 233 bp, Glycine max
  unsure (1)..(233): unsure at all n locations
cgacaggttctgagtcttttcttcttcgttaccctcttcacatgccttctctctgctaattcccacgatgaccatattttncctaacggagtcaactccatgacgatgactcagtgagttgcactgctaccganccaaaccttaactacaagccggtgatcggaatcctgacccancccggcgacggtgcctctggccggctcagcaacgccancggggtntcttacatcgcg

SEQ ID NO: 280615 - DNA, 339 bp, Glycine max
agaagtgtaagttttcattcaatggccagcgctcagctctcagcaatatcttcgtcgatctctacggcgtcgtttgaagggcttcgaccttcggctgttcagtttgcttccgcgggcagaattagaattggcaatctctcccaaaggtctttccggggcttggttgtcaaagccgccaccgttgttgcccccaaatacaccgcgattaagcctctgggagacagagtgctgataaaaattaaggaagcagaggagaaaactgagggtgggattttgcttccatcaactgctcaaacgaagcctcaagggggtgaggtgttgctgttggagaaggaaaga

SEQ ID NO: 280616 - DNA, 343 bp, Glycine max
ggaattaccatctttgttcctaaggacagtgccttcaatgctataaagaaaactaccctatccaacctcacctctaaccagctaaagcaagtgatcctcttccatgccttgccacatttctattctctggctgagttcacaagccttagccaaaccagctctactcccacattcgccggaggagattacactttgaatttcactgatgattctgggacagtgcacattaattcaggatggtccaagaccagggtgagcagtgctgttcattccacagatcctgttgcaatatatcaagttgacaaggtgctactccctgaggccattttggcactgatatacc

SEQ ID NO: 280617 - DNA, 336 bp, Glycine max
cgtaaacgtctcgctgttccaagatgggtgtggctgagaacattcccgatatggaggagggtaccttggagattggaatggaatacagaactgtatctggagttgctggaccattggtcattcttgacaaagttaagggacccaaatttcaagagattgttaatattcgtttaggagatggaactactcggcgtggacaagttctagaggttgatggcgaaaaggctgttgttcaggtatttgaaggcacatctgggatcgacaataagtttacaactgtgcaatttactggagaggtgttaaaaactcctgtctcactggacatgcttggacgca

SEQ ID NO: 280618 - DNA, 338 bp, Glycine max
  unsure (1)..(338): unsure at all n locations
tgaaaacccaaagtgcttctctcctctgtctttttctctctcttgctatccttttggctagtncgcactgctgcaagtgcaactccaagaagcgcagtgccaagccaccatgtttcaacattcaacagaagcctttttccttccacttttctctttggaattggttcttctgcttaccaggcagaaggagcagcaagtgtagatgggagaggaccaagcatatgggacacctacactagacagcatactgaaaagatttgggatcatagcaccggtgacatgggagctgatttttatcatcgatacaagggtgacataaaaatagcgaaagaaattgg

SEQ ID NO: 280619 - DNA, 336 bp, Glycine max
caatcttctgagagtgtttggttgaaagtagcaaagatgtttcctttcgggcaaaagggtcaaaagataaaggggactatggtggttatgcagaagaatgtgttggatatcaacagcatcaccagtgttggagggatcgttgaccaaggcttaggcttcataggcagtgcagtcgatgcacttacttttgcagccaccaaaatctccatccagttgattagtgctaccaaggctgatggtgggaaaggaaaaattggaaagagtacaaatttaagaggaaagataacattaccaaccttgggagctggcgaacaagcatacgatgttaattttgaa

SEQ ID NO: 280620 - DNA, 229 bp, Glycine max
  unsure (1)..(229): unsure at all n locations
ctgggacgggaatccgaggctgaacctggcgtcgtatgtgacgaacgtggatggaacctgagtgtgacaaactcatcatggctgcnattaacaaaaattacgtcgacatggatgagtacctgtcancactgagctccagaaccggtgtgttaacatgatagctcaccttttcaatgcaccactagaagagtcagaaactgcagttggtgtnggcacggttggctcatca

SEQ ID NO: 280621 - DNA, 329 bp, Glycine max
ggttgaccttgaactcatgaagatcgttcagtatcacgacggtggcattataccagtaccaactgccgacaacactgaataccgcttttcacatcagaacccaccattcggtccaagacaacatagtctagcaacccatcaaccacagggtccaggcttccaaatcaacggacacagtattagttgggccaactggaagttccatattggatttgatccacgtgccggaattgtaatatcactggcatccatttatgatttggagaagcacaaatctcgtagagtgttatacaaaggtacattctgagctgttgtgcatacagaccaca

SEQ ID NO: 280622 - DNA, 225 bp, Glycine max
  unsure (1)..(225): unsure at all n locations
ttctncgtgtnctccatnccctctctcactccttcatctacttcacatatnatatcatcacatntcatagtgatatcatatcacaatgtgtggcatacttgctgngcttggntgctctgattcatctcaagncataagggtccgcgtccntgagctnnctcgcagattgaagcaccgtggtcctgactggngtgggctccaccaatatggtgataactatntggc

SEQ ID NO: 280623 - DNA, 267 bp, Glycine max
atttccgttgagtacagtctcgaggattatgcagtcgcggttgttcacgcggttcagtgtgtgtgcgaccgaagtccgtgaaacacccagttatctgcagcgagagtgggagagccatcgtgtctcatcattcgctcttgattttcgaggcggttggcaccagcagcaccaccgggggaggagcttcccctgcattgtccgctcaatatctggcggaggagctgtcggaggattaccgcaatctgtcggagctggcttttagagggg

SEQ ID NO: 280624 - DNA, 266 bp, Glycine max
  unsure (1)..(266): unsure at all n locations
aattaataacaagctagctattagttcgnttttgtagtaagtgaggtgccaatatggtgaagatagctcttggtactttggatgactcttttagcgctgcctctcttaaggcttatttcgcagagttccacgcaactctgattttcgtgttcgctggtgttggatcagccatcgcttacaacgagcttacaaaagatgcagccttggatccaacggggctggtggcagtagctgtggcacatgcatttgcactgtttgtaggtgtc

SEQ ID NO: 280625 - DNA, 336 bp, Glycine max
  unsure (1)..(336): unsure at all n locations
gaagtttgctgctggtgtctcaatggttacttcactttcattggctatttcatatccaacacttgctgcagcaccacacatgtntgtcaatgcctacaagaatgttcttgctgttgcggttgagacagattattctttcccggaggcagacaaggtcaaggagtatctgaaggacccaagtaaatttgccgttgccgccgttgctgctcctgctgctgcatctggtgctccagcggctgcagccaaggaggaggaaaagaaggaagaaccagctgaagagtctgacgatgacatgggtttcagtctgtttgactaaattaagtaatacttttgttg

SEQ ID NO: 280626 - DNA, 330 bp, Glycine max
agggcaattgaccacaaggcattgcatgataccttttctacatttggaaatatcctttcgtgcaaggtagctacggattcatctgggcaatcaaaaggctatggctttgttcaatttgataatgaggaatctgcccaaaaagctatagagaagctgaatggtatgctgttgaatgataaacaagtgtacgtgggacccttccttcgcaagcaagagagagaaagtgctgctgacaaggcaaaattcaacaatgtttttgtgaagaatctatcagaatcaaccaccgatgatgagttgaagaacacttttggtgaattggaactattacta

SEQ ID NO: 280627 - DNA, 330 bp, Glycine max
ggggaagattcttgaagtattgaaaaactggcctgagaaaagtattcaagttattgttgtaacagatggtgaacgaattttgggacttggggatcttggatgtcaggggatgggaattcctgttggtaaattggccttgtacacagcactaggaggagttagaccatcagcatgtttgcctattacgattgatgtggggacaaacaatgagaaattactaaatgatgagttttacattgggcttagacaaaagagggcaactgggcaggaatattctgaacttttgcacgagttcatgactgctgtcaagcaaaactacggagaaaaagt

SEQ ID NO: 280628 - DNA, 330 bp, Glycine max
  unsure (1)..(330): unsure at all n locations
ggagatggctctgggaagaggcagtgcagtggttctactactttgcttcttgctgcttcactctcagatggctcgtgctgccacctacacagttggagattctgggggttggacctttaacactgttgcctggcccaaaggaaagctctttcgggctggtgacacacttgctttcaattatagcccngggactcacaatgtggtggccgtgaacaaggctggatatgatagctgcaagactccaagaggagccaaagtgtataagtcagggacggatcagatcagacttgccaagggacagaactacttcatctgcaattatgttggtca

SEQ ID NO: 280629 - DNA, 177 bp, Glycine max
  unsure (1)..(177): unsure at all n locations
caagtccaacctacccctttttcttctcccaccaacttcaccgtcttcttcctcgatcatgtctcacttcaagggcaagtaccatgatgagcttattgccaatgctgcttacattggcactcctgncaagggtattcttgctgctgatgagtcaacagggacaattggcaagcggtt

SEQ ID NO: 280630 - DNA, 331 bp, Glycine max
  unsure (1)..(331): unsure at all n locations
atgttggaaaagctcaaaagaaatctgaaagggagaatgaattgaaacaacgatttgagcagagcatgaaagaagctgctgataaatatcaaggggcaaacttgtatgtcaaaaatttagatgatagcctcggtgatgataaacttaaggagctgttctccccttttggtaccataacttcttgcaaggttatgagagacccaaatggcataagtcgtggatcaggatttgttgcattctcaactcctgatgaggcatctagagcactcttggagatgaatggcaaaatggtggtaagcaaacctctgtatgtgactctagcccaacggna

SEQ ID NO: 280631 - DNA, 320 bp, Glycine max
  unsure (1)..(320): unsure at all n locations
cgatactgctcgctatgttgatcaagggggaggcaagaggaaaggtgcatttgctgtgtacntggagccatggcatgctgatatatttgaattcttggatttaaggaaaaaccatggaaaggaagagcatcgagctcgagatttgttttatgctctttgggtgtctgatctctttatggaaagagttcagagcaatgggcaatggtctttgttttgccccaatgaagcgccaggtttggctgattgctggggtgaagaatttgagaaattgtacactcaatatgaaagagaaggaaaagcaaagaaggttgttcaggcac

SEQ ID NO: 280632 - DNA, 328 bp, Glycine max
gctcaaccgcatcaagaaacaaggccttgatatcacccctcgtattctcattattactcgtcttctccctgatgcagtaggaactacctgtggccaacgtctagagagggtatatgatactgaatattgtgacattctccgagttcctttcagaaccgaaaagggaattgttcgcaaatggatctcaagattcgaagtctggccatacctagagacttacactgaggatgttgcccttgaacttgccaaggagttgcaagccaagccagatctgatcgttggaaactacagtgatggaaacattgttgcctctttgttagcacataaa

SEQ ID NO: 280633 - DNA, 327 bp, Glycine max
ttgtcaagtccgaagaaaaagaacagcctttgttggtaacggagcctaaagaagaaaagaaggatgaccccaacgcgatttccaacttcaggatttcggaaccattgagggagaaattgaaggagaagggtatcgaatcgctgtttcccattcaggccatgaccttcgacaccgttctcgatggttctgatttggttggccgtgctcgcactggtcagggtaaaactctggcatttgtgttgcccatattagagtctttaataaatggtccagcaaaatctgcgagaaagactggctacgggaggactccgagtgttctcgtgcttc

SEQ ID NO: 280634 - DNA, 326 bp, Glycine max
tggtaacacccccatattggttgccaccgatgttgctgcacgtggtcttgatattccccatgttgctcatgtggtcaactttgacctgccaaatgacattgatgattatgtacaccgaattggaagaacagggcgagctggaaagaaaggtctgcaactgcattctttaatgacaacaattcatcactagctagagctttatcagaactgatgcaagaagcaaatcaagaagtacctgcttggctctcacggtttgctgctcgatcttcttttggtggaggcaggaaccgccgatcaggggtcgatttggtggtcgtgacttccga

SEQ ID NO: 280635 - DNA, 233 bp, Glycine max
  unsure (1)..(233): unsure at all n locations
attacaacaacgtcgtccaagaccatgaccatggccatggccacgatcctgctcctgttcacggtcttcgcggtttcatcgggcctagacatgtcgataatctcgtacgacaacgcccacgccgccacgtcgcgcanacaagggagctgatgtccatgtacgagcagtggctagtaaagcacggcaaggtgtacaacgcgctcggagagaaggagaagaggttccagatcttc

SEQ ID NO: 280636 - DNA, 330 bp, Glycine max
ggctaggcacactcaagggttcagtggtgctgatattacagaaatatgccagcgagcatgcaaatatgccataagagaaaacatagagaaggacattgagcgagagaggaagagtagggaaaaccctgaggccatggatgaagataccgtcgacgacgaagttgcggagatcaaggctgctcattttgaggagtcaatgaagtttgcacggaggagtgttagtgatgctgatattcgcaagtatcaggcatttgctcagaccttacagcaatcaagagggtttggaagtgaatttaggtttccagagtctggagataggactactactgg

SEQ ID NO: 280637 - DNA, 327 bp, Glycine max
ctgctcgtgcctctagggttatcatatctccatttccatttcctctctctcagtttccaagaatcttaagctatgggaaagtcttacccaaccgtgagcgctgattaccagaaggccgttgagaaggcgaagaagaagctcagaggcttcatcgctgagaagagatgcgctcctctaatgctccgtttggcatggcactctgctggaacttacgacgtgagctcgaagaccggtggtcccttcggaaccataaagcacccctccgaactcgctcacggcgctaacaacggtcttgacatcgctgttaggcttttggagccactcaaa

SEQ ID NO: 280638 - DNA, 278 bp, Glycine max
  unsure (1)..(278): unsure at all n locations
gcggaaaccggaatatctcagttctctgatcagatccatccgacgtcgtttcagtgataatggctccgttcagcggcgatgagacggcaccgtttttcggcttccttggagccgcagctgccctcgtcttctcctgtatgggagctgcctatggcacagcgaagagtggcgttggcgtggcttcgatgggtgtgatgagaccagagctggtgatgaagtctattgtccctgttgttatggctggagttttgggtattatngcttatattgctgntata

SEQ ID NO: 280639 - DNA, 316 bp, Glycine max
ctctgcataggcgagttcaactggtcccagttcctccagtcgattctggtctccctcgcatggatattcgacgcccagcagaccttcatctccgtcttcaccgacgccctgcccgagtggcactgcaccgagcggggcgccaatgcatgcaagactgccaccacagtctgcagcctcccaaagggctcgtgggcctgggacgtgcccacgcaggcctccatcgtgtcggagtggggctggaatgcgccaactccgcgatcacgggctcccgttcgatgttcttcttggggtgttgattggcgggtcgtactgcctc

SEQ ID NO: 280640 - DNA, 323 bp, Glycine max
  unsure (1)..(323): unsure at all n locations
cgagattcattcttcaccaaaacttcgcaaagaaacactacacatccatggcaactgctggcgtgcaagaagttcgtgttccccctctaacttccacctctgagccaccttctctctttgacggaaccaccaggttgtacatcagttatatttgtccctatgcgcangtgtttggatcactcggaactataagggactacaagacaagatcaaactggttcctattgacctacaaaacaggcctgcttggtataaggagaaagtctaccctgaaaacaaggtgccatcattggagcacaatggaaaggcttgggtgaaagtct

SEQ ID NO: 280641 - DNA, 333 bp, Glycine max
  unsure (1)..(333): unsure at all n locations
gcacaaggtgccatgggaagctgttgaagagggaaactacagcggtggtgaagaagcgagtgtttgtatgcccggagcctagttgtttgcaccatgacccatgccatgctctgggtgatcttgtcggcataaagaagcatttcagaaggaaacacaacaatcacaagcaatgggtctgcgagngatgctccaaaggcttgcggtgcagtctgattacaaagcacatctcaaaacttgtggcacccgaggacactcttgcgattgtggccgcgttttctcaagggtggagagctttattgagcaccaagacgcgtgcaagtagggagctggggc

SEQ ID NO: 280642 - DNA, 360 bp, Glycine max
  unsure (1)..(360): unsure at all n locations
atgttgtgctgtcaatttgcaggtttaagccaaganagctgttcctagggatgatcagcanactataaacagacagactggtagcatccatggatctcctagtcctggacgcaccaaaaagatttttgttggaggtttaccatcaacaatcacagagagtgattttaagaagtactttgatcagtttggtacaatactgatgttgttgtaatgtatgaccacaatacccagaggccaagaggttttggcttcatcacttatnnttcagaagaagctgtggacagagttctttataagacatttcatgaactcaatgggaagatggttgaggtccagagggcagttnctaaagagtttncc

SEQ ID NO: 280643 - DNA, 327 bp, Glycine max
  unsure (1)..(327): unsure at all n locations
gaaganttgaagantgtaagangggatggaactggagagcgcaaggnatgggataggatctatgattatgatgtctacaatnacttgggcaacccggatagcggtgataaatatgcacgccccgttcttggtggttcanccttancttaccctcgcagaggaagaaccggaagaggaaaaactaganaagatccaacagtnagaagccgagcgattttgttnaccttccaagagatgaagcatttggtcattgaagtcatnagattnntctcgcttttagaatcaaatntgtatcccaagatgtctngcctgtntngactgangcat

SEQ ID NO: 280644 - DNA, 354 bp, Glycine max
  unsure (1)..(354): unsure at all n locations
cagtaattgcatcatattctttcctttagacaagtgcaacataggaagagataacaaacatgggttcttcggaaactatcaatatggcnccatgccgtgtgcataccgtacccagcacaaggccacataaacccaatgctaaaactagcaaaactccttcacttcaaaggctttcacatcacttttgttaacctgagtataaccacaaacggattctcaaagctagaggtccttattcccttaatggtctcccttcatttcgctttganaccattcccgatggtctacacgagcctgttgtggaggcnacacaggacataccttcnctatgtgactccactagnagaattgttg

SEQ ID NO: 280645 - DNA, 321 bp, Glycine max
  unsure (1)..(321): unsure at all n locations
cttgcagtcgcagaggaaaaccctagctagtagtntcagttcgtttgagagagannaaatggcagagggtctcgttctncgcggaaccatgcgcgcccacaccgacgtcgtgacggcgattgccactcccatcgacaactccgacatgatcgtgacggcgtcgcgcgacaaatccatcattctctggcactcaccaaggaggacaagacctacggtgtnncccgccgcngctcaccggacattctcacttcgtcgaggacgtcgtctctcatccgagggtcagttcgcnctctccggctctgggacngcgagtncggctct

SEQ ID NO: 280646 - DNA, 328 bp, Glycine max
  unsure (1)..(328): unsure at all n locations
ttgctccctcagaagcgacacngaagccacagagcactagtctcctactctcacccancaaganaaaaatggcatctcacatcgttggatacccccgtatgggtcccaagagagagctcaagttcgctctcgagtctttctgggatggcaagagcagcgccgaggatttcagaaggtgtcttctgatctcagggcatccatctggaagcagatggctgatgctgggatcaagtacatccccagcaacactttctctcactatgacanggttctcgacgccaccggcaccctcggtgccgttncaccaagtaggtggancggcggcgag

SEQ ID NO: 280647 - DNA, 320 bp, Glycine max
  unsure (1)..(320): unsure at all n locations
gtcgttgcagagctgcgcgttgatctagaaaaatggcgaggataaaggtgtacgagttgaggaataagacgaangcggagtactgaaccagctcaaggatctcaaggcggactagccctgctccgcgtcgccaaggttaccggcggcgccccaaacaagctctccaaaattaaggtggtgaggctatgatagcgcaggttttgacggttatttcccagaagcagaaagcggcgtgagagaggcttacaagaagaagaagtatttgcnccttgacctccgtcccaagaagacccgcgccattcgcagacgccttaccaaac

SEQ ID NO: 280648 - DNA, 356 bp, Glycine max
  unsure (1)..(356): unsure at all n locations
cgatcaattaatttccaatggccgatcagctcaccgacgaacagatctctgagttcaaggaagcctttagcctcttcgacaaggacggcgatggttgtattaccaccaaggaacttgggactgtgatgcggtcgcttgggcagaacccaactgaggctgagctgcaggacatgataaatgaggttgatgctgtgggaatggtaccattgatttcccagaattcctcaatctcatggcgcgcaagatgaaagacactgattcagaggaagagctgaaggangctttccgtgtgtttgacaangatcagaatggtttcatctctgccgcagantccgccacgtaatgaccaatctcgg

SEQ ID NO: 280649 - DNA, 324 bp, Glycine max
ctttcttcaccgttcgctctttctttctcccctacacaaaacatggctttgcccaatcagcaaaccgtcgattaccccagcttcaagcttgtcatcgtcggcgacggtggcacaggaaagacaaccttcgtgaagaggcatctcactggtgaattcgagaagaaatatgaaccgaccattggtgtggaggtcatccgttggattttttcacgaactgtggaaagattcgcttctattgttgggatactgctgggcaagagaagtttggtggctccagagatggatattatatccatgggcaatgtgcgattatcatgttgatgt

SEQ ID NO: 280650 - DNA, 321 bp, Glycine max
  unsure (1)..(321): unsure at all n locations
gagaatggctcccaagggtttaatctttttggctgtgttatgcttctcagcactgtcactgagtcgttgtcttgcggaggataatggacttgttatgaacttctacaaggaatcatgccctcaggctgaagacatcatcaaagaacaagtcaagcttctctacaagcgccacaagaacactgctttctctggctcagaaacatcttccatgactgtgctgttcagagttgtgatgcttcactgttgctggactccacaagaaggagcttgtctgagaaggnaacagatagaagcttgggttgagaaatttcaggtacattt

SEQ ID NO: 280651 - DNA, 323 bp, Glycine max
  unsure (1)..(323): unsure at all n locations
gctcagcgataagcagaaagtggaaatcgcgaaatggttcctcctcaattctnctcccggaganatccaatacgttgccaaagatgtgaaatccattctcaacaacgacgatttgtacaaggaagccgcttccgaggcttttctcttttacaacaaatcgccttgatttcccttccaatgtccaaccgaagcggagacgtactggttacttcttttggtgagcttgagggtaatgcatttcttgaacctaggactgcgcaagtagcaatgttgatcatgttaaacaagtttgtacagaggtgagacctgcaacagacgaagaa

SEQ ID NO: 280652 - DNA, 353 bp, Glycine max
  unsure (1)..(353): unsure at all n locations
acttaacaacagcacaaagcgggttactgtctgttcaagctaccatctctgctctctctntcttagtgcctcnttnccagaagttaaaaatggcccaagaaactttcctattcacancctgaatcagtgaacgaggggcaccctgacaagctctgtgaccagatctccgatgctgtgctcgatgcatgcttgagcaggaccctgacagcaaggttgcctgtgaaacctgcaccaagacnaacatggtgatggttttcggagagatcacaaccaangccaacgtggactatgaggagattgtgngtgacacatgcaagaacattggtttgtctccgatgatgtnngtcttnntg

SEQ ID NO: 280653 - DNA, 345 bp, Glycine max
  unsure (1)..(345): unsure at all n locations
gagtgatttcagtgagtgatcggtgttcacttgatctcatcataatcgtcagcgtcaattgaagaagatgccgatcagaaacatcgccgtcggaaggcctgaagaggcgactcaccccgacacgttgaaggcggctttggctgagttcatctcaaccttcatcttcgtgttcgccggctcaggcncggcatcgcctacaacaagctcaccgacaacggcgctgccacccctgccggcctcatctccgcctccatcgcccatgcattcgccctcttcgtcgccgtctccgtcggngccaacatctccggcggccacgtcaaccccgccgtcaacttcggcgcttcg

SEQ ID NO: 280654 - DNA, 344 bp, Glycine max
cttctctctctctttttcgcctcattccattttcatctatcaatggctccagtagcagcagcatcttcagattcaatcaagccaagagatgtttgcatcgttggtgttgcacgtacaccaatgggtggatttcttggtactctgtcatctctatctgccaccaagctaggctctatagctattaagctgctcttaaaagggccaatgttgatccatcccttgtggaagaagtattttttgggaatgttcttagtgctaatttggggcaagctcctgcaagacaagctgctcttggagcaggaatatccaattcagttatctgcactaccgttaacaaagtttgt

SEQ ID NO: 280655 - DNA, 343 bp, Glycine max
  unsure (1)..(343): unsure at all n locations
aaaaaaagacaacccagagagcgcgtcttaataaacgctcttctctgaaaacccccatttcttttcttctttcttcttctntttcgcttcttcgatcttcgatcttcgtcgctgaaaatgagagagtgcatttcaatccacatcggccaggccgggattcaggttggaaacgcctgctgggagcttactgcctcgaacacggcattcagcctgatgggcagatgccaagtgacaagaccgttggtggaggtgatgatgctttcaacaccttcttcagtgaaatggggcaggaaagcacgtgccccgtgcgatttttgtagatcttgagcccatgtgattgatg

SEQ ID NO: 280656 - DNA, 350 bp, Glycine max
  unsure (1)..(350): unsure at all n locations
gcaagcagttgtgtctgtaacaccactgcattttcaacatccactagaccctttaaccaaacaagagnncagtccncnccannaccatagtccaaaacaagtacccaagctcaagtaacaggttgagcttccactacattggactcgacgaacctgaaaaggatgccatcctcaaatgggaatccatcaaccaactgttataactgtccctcgcaaagccttggccattgttataatcaacagccaaacccacgagatcttaattgatctaaaggcaaggcgcattgtctccgacaatattcatccgggaatggcttccctacctttccgttgatgaacaagtcgttgcc

SEQ ID NO: 280657 - DNA, 343 bp, Glycine max
  unsure (1)..(343): unsure at all n locations
ggaagccaaagcgaaaccctaaccctaacggagagatggcggagacttgggcatcgatattcgggacggagaaggacagggtgnactgtccgttctacttcaagatcggcgcgtgcaggcacggcgaccggtgctcccggcttcacacnaagcccacaattagcccaacgttggttctgtcaaatgtaccagaggcccgacatgaacatgaacatcatcaccaaccccgatcagccccagccccaatctctcgaccccgataaggtccaggatcacttcgacgacttctacgaagatctctttgaggagcttagcaagtaggcccattcagagttgaatattg

SEQ ID NO: 280658 - DNA, 332 bp, Glycine max
  unsure (1)..(332): unsure at all n locations
cacgctcgtatataattgaaaacatcataaagaaaaananatgaattcccttcgtctcagttttttctgtgtggtggtagttcttggagcattaccctacttctcatatgcacaactagatccctcgttttacgctagcacatgttcaaatttgagttcaatcgtacgtgaggtgctcacanatgttccctgtctgatccccgcatgcctgccagtctcatcaggctccactttcacgactgttttgttcanggttgtgatgnatcaattctgttgaaccaaacggatgagntcgatagtgagcnaatgttntccaaatgacactccnataa

SEQ ID NO: 280659 - DNA, 340 bp, Glycine max
  unsure (1)..(340): unsure at all n locations
aaccatggctatgtctactattttgcttttgactttcttttctttcatttatggcagtgcagctactcatcacgtttatagaaatcttcagagtttatcttctgattcctccaaccaacctnacagaactgcttatcacttccaacctcccaagaattggataaatgatcccaatggaccatgagatatgcaggactttaccacctattctatcaatacaatcctaaaggtgcagtttggggaaatattgtgtgggcacattcagtgtcaaaggatctngtgaattggactccactagatcctgccatttttncatctcaaccgtccgatataatggctg

SEQ ID NO: 280660 - DNA, 348 bp, Glycine max
  unsure (1)..(348): unsure at all n locations
annnaaggctaaggctcaattgtngcntgactcanagnaacaaattgcgctcagccttactgaattgcnganaaatcccctgaactacactcaggtgtctgtcttggcagatgacattctaaagaatgtngagtatgacgcattaaggattgttttcaacaaatttcattctgttgtacaattttgccaacagttgcaactgtactgtctcctgaggntattganagngangctgnatcaggagnaaagcttggggaattggattcatatggagattgaaggtggcgagacaaaagctgaaattcttcagaatctggctnagttccagtttncttgtgtcatgtacaa

SEQ ID NO: 280661 - DNA, 357 bp, Glycine max
  unsure (1)..(357): unsure at all n locations
aaagaagttggtggcatcgatataagaaaggcaagtttggtcggaataagattcaaaacgctgtttttttgcagtttcttcgattnctntctttctctttnttcagaaaaattaaacccattcaaagaaaganagaaagagcgatcatttccaatcacaatggcagatcaactcaccgatgaacagatcnggagttcaaggaagccttcagtttgttcgataaggatggcgatggttgcatcacaacaaaggagcttgggactgttatgcgttcgttgggtcagaatccaacagaggctgagctccaagacatgatcaatgnagtagatgctgatggggaatggcaccattgacttc

SEQ ID NO: 280662 - DNA, 315 bp, Glycine max
  unsure (1)..(315): unsure at all n locations
acaaaacactagtccctcccttcttccttgtctctttctcttctcaacaacatgcagatcntcgtcaagactttgactggcaanangatcancctcgnggtcgagagtagcgacaccatngnnaacgtcnaggccaagatccaggacaaggnangtatncntnctnaccagcagaggntgattctgnnggtaagcagctggaanatngtngnactcttnntgatnanaanatacacnaggntcnacactncacttngtcttgaggncaggggaggacacatngatnatngtgaagactctaactgnagtagattt

SEQ ID NO: 280663 - DNA, 347 bp, Glycine max
  unsure (1)..(347): unsure at all n locations
agcaaccacatcactctttctttcaaatctagggtttcctccttctgcaaccatcaatgtcggcaatcgcggctccccaacacagatcntcgaagacagagtcctacgtggacaataagcgcaaggaggatatccgccatgccaacatcgtggccgcacgctcagtcgccaacgcggttcgcacagtctgggccctaagggcatggacaagatgatctccacctcctccgacgangtcatcatcaccaacgacggcgccaccatcctcaacaagatgcaggtcctccagccgccgccaagatgctcgtcgagctctccaagtcccaggactccgcngccggggacgg

SEQ ID NO: 280664 - DNA, 342 bp, Glycine max
  unsure (1)..(342): unsure at all n locations
tttctcttcctcccttgggagaaaaagaagagccaccgctgcgacgccgttcgtgcatttttgaggtgccgctgtcatgtttgggcgtggtggaccaaggaggagtgataactccaaatattatgatattctcgggatttccaaaaatgccagtgaagatgaaatcaagaaggcctatagaaggcggctatgaagaaccatccagataagggaggagatcctgaaaagtttaaggagttaggtcaagcatatgaagttttaagtgatcctgagaagaaagaactgtatgaccagtatggtgaagatgcccttaaagaagggatggggggaggangctctttc

SEQ ID NO: 280665 - DNA, 342 bp, Glycine max
  unsure (1)..(342): unsure at all n locations
anacactgntaaagtgaaganggtgaatggagatgtgtctgagaacaacaaaggaggnagcaaaccttcagcagaaatagatcttccagatgctgaagttggaaaagttcgcttgcgatttgcacctgaaccaagtggttatcttcatattggacactcaaaagcagctttgttgaacaatattttgctgagcgataccagggtcaggttattgtncgntctgatgatancaatcctgctaaagagagcaatgaatttgtggacaacctgattaaagatattgatacattgggcatcanatatgaacaaattacatatacatcagattacttccctgagttg

SEQ ID NO: 280666 - DNA, 316 bp, Glycine max
  unsure (1)..(316): unsure at all n locations
tgaaggcacaatctntgggtgatgcatccantttggaattcatgaggagcagaagggtgtttgagatcaaccctgaccattctattatcaggaacttggatgatgcatttaaaacaaatcccgatgatgaagatgccctaagagctattgatcttttgtatgatgctgctttggtttccagtgttttacgcctgataatccagcacaacttggagggaagatatatgagatgatgggtatggctctcactnntaaatggtccacacctggtcagttccagtccacagtaacccagcncnataccccaganactttt

SEQ ID NO: 280667 - DNA, 314 bp, Glycine max
  unsure (1)..(314): unsure at all n locations
tggaaaacaaagtatagagtgaaagaatgggtgaganaagcaagattttgatcataggaggcaccggctacatcggcaaacatntagtggaagcnagcgcaaaggctggaaatcccacttttgctttggtgagggaatccacactctctgacccctccaaggcacaactcatccacaattttaggctttgggcgttaatttggtccgcggggatctgtacgatcatgagaagttggtgaaagctatcaagcaagtagatgtcgtcatatccacgctgggtcacctgcagcttgccgatcagctcaagatcatcg

SEQ ID NO: 280668 - DNA, 310 bp, Glycine max
  unsure (1)..(310): unsure at all n locations
attgtctcacgatctcaacggagcacctctcttcaggtcgccatatagactgcaatcatggctgatggaccacagcatccatnagttgttcagaagctagctggacagtcttacctggtgtccaggctaagccccaactttaactctgggaattattcctcgactggttcttacttcaatgaggactgcactcttctnngttggctgttgtgtcgcctggatctccagttactgtgcatgctccagcagagaaaagagngagtggattctagtggatttctgatnggtggagtgtctgctgctgtgtcaa

SEQ ID NO: 280669 - DNA, 284 bp, Glycine max
  unsure (1)..(284): unsure at all n locations
ttcttctcttgcggctanggttttagcgcanttcttctagatntaaggnagatgggtanggaaanngttcacatcagtattgtggtcattggccatgtcgactctgggaaatcnactaccactggtcacctgatttacaagcttggangcatngacnagcgtgttattnagaggtcgagancgnatcngctgagatnaacgagaggncttnnagnatgcctnggtgctggnctaacttaggcgaacntgananagggtcnncnntgnanatgcttgtngaantt

SEQ ID NO: 280670 - DNA, 300 bp, Glycine max
  unsure (1)..(300): unsure at all n locations
tttaaacctcttgcttttgttttgcttcaaggtgtggtgtgtttcacatttgaagtaacactgaaaagaaaggnnagtgaagttgagagtttaagangnacaaganatgggggttggttcccaggatgccatcaagcagttccaggcattcattgancaagttgaggagccttgcnacaacgtttcagaatgntcatcaaggatttgtcactgcaanttnaatgcggttctanaantanggactgggatcttannangcncagagaatgttggctgatnttnaatngganggnncanatg

SEQ ID NO: 280671 - DNA, 191 bp, Glycine max
  unsure (1)..(191): unsure at all n locations
ttcaacttcacccattcatacgtggtgttgttactgctgctctnttctcttttctncttctctttagttctctcttgccctttcgttctctngttcttcgtctnncgagctgttaagcatttctnccatnaacanantaccacaatgtgtggtatcttgntgttcttggntgtctgatgactctcgancna

SEQ ID NO: 280672 - DNA, 338 bp, Glycine max
  unsure (1)..(338): unsure at all n locations
gaaaaaatgggttcttcttcttctatgnggacggnntgtgtgattttggcatcactggcctctgcagcactctgtgccaacccacgnangccagtggatgtacaatttggccgaaactacgtgcccacatgggcctttgatcacatcaaatatttcaatggtggttctgacattcacttcatcttgacaagtacactggtactggcttccagtccaaagggtcttacttgtntggtcacttcagcatgtacataaagatggttcctggngattctgctggcacagtcaatgcttncctaagtatcctccnaaaacgcggagaatgatgagatagattt

SEQ ID NO: 280673 - DNA, 316 bp, Glycine max
  unsure (1)..(316): unsure at all n locations
tcagggaggagaaggatgtctcacaggaagttcgagcacccaaggcacggttcactgggatttcttcccaggaagcgtgctgctcgtcacaggggaaaagtgaaggcattccccaaggatgacccatccaaggcacccaagctcactgcattcttgggttacaaggccggtatgactcacattttagagaggtcgagaagccangatcaangcttcacaagaaggaaattgtgagcctgttacaattattgagacccctncaatggttattgttggngttgtnggctatgnganaatcgacgnggtctccgaacat

SEQ ID NO: 280674 - DNA, 341 bp, Glycine max
aagtatatgggacacctatactaaacagcaaccagggaagatttgggatcatagtgatggaagtctagcaattgatttttatcaccggtacaagagcgacataaagatggtgaaagaagttgggttggattcatacagattttccatctcatggtccagaatattccccaagggcaaggagcagttaacaccttgggggtcaagttctacaacgatctcattaatgagattatagcaaatggcttaaagccatttgtcacgctgtttcattgggacctcccacaagctcttgaagatgaatatgggggatttctcaaacctgaaatagtggaggacttccg

SEQ ID NO: 280675 - DNA, 330 bp, Glycine max
  unsure (1)..(330): unsure at all n locations
agagtttgttgtgagctataagctagtttatcgtgaggagaatatgaagttgtttgttttctttgttgctgcagtagttttggtagcatggccatgccatggcgcaggctaccaaaggttccctctccgaatgaaaactggctatggtgagcgttcttcggaggtaaaatgcgcaagtttaggcttgctgtggaagcacacaacatccgagccttaaaaccattctgaagagtgcgttgaaccaacanaggactacatnaatggcggacatttagatcagatctaaaaccagtttaccacnagtttctttatgctatgacgcgangccnt

SEQ ID NO: 280676 - DNA, 301 bp, Glycine max
  unsure (1)..(301): unsure at all n locations
tttgtaccattgaggagtctggtgaacacattgttgctggtgcaggagagcttcatcttgagatctgtttgaaggacttgcaggatgatttcatgggtggagctgagattatcaaatctgaccctgctgtgtcattcagggngactgttttggagagatcatgccgcaccgtgagancaaatcacccaacaagnacaaccgtctgtacatggnngctagaccattggangnaggtcttgctgangcnantgatgatggcnagattngaccaaggatgacccnaggtcgttccaagatcttg

SEQ ID NO: 280677 - DNA, 233 bp, Glycine max
  unsure (1)..(233): unsure at all n locations
caagtggtgaacccatgggaagtttccgccagaggcaaatcgattacgacaaactcattgaccgtttcggttgccagaagctcgacgaagccctaatttcgcgtctcgagcgcatcacctctcgcactccccacgtctttctacgacgcggcgttttcttcgcccaccgcgatttcgcggagattctggacgcgtatgagagggganataagttctacttgtacaccggacgc

SEQ ID NO: 280678 - DNA, 338 bp, Glycine max
  unsure (1)..(338): unsure at all n locations
gccgcagcagcctcaggaggagaataaggatgtctcacaggaagttcgagcacccaaggcacgggtcactgggatttctccccaggaagcgtgctgctcgtcacaggggaaaagtgaaggcattccccaaggatgacccatccaggcacccaagctcactgcattcttgggttacaaggctggtatgactcacattgttagagaggtcgagaagccaggatcanagcttcacaagaagganacatgtgagcctgttacaattattgagacccctccaatggttattgttggtgttgtnggttatgtganaatccccgtggtctccgaacattgaacac

SEQ ID NO: 280679 - DNA, 340 bp, Glycine max
cactttaccaactcctaacaatttctctctgtttccttcttcaccgcatcaatggagttggacggcgttctcctcggcatgtgcaaccctctcctcgacatctctgccgtcgtcgacgacgctttcttgcaaaaatacggtataagttgaacgatgcgattctcgctgaggataagcacaaacctatgtatgaagaattggctaacaatcctaatgtggagtacattgctggaggtgctactcagaattcaatcagggttgctcagtggatgcttcaagcaccaggtgccacaagttacataggttgcataggaaaggacaaatttggagaggagatgaa

SEQ ID NO: 280680 - DNA, 276 bp, Glycine max
tagtgcctccttgccagaagttaaaatggcccaagaaactttcctattcacatctgaatcagtgaacgaggggcaccctgacaagctctgtgaccagatctccgatgctgtgctcgatgcatgcttggagcaggaccctgacagcaaggttgcctgtgaaacctgcaccaagaccaacatggtgatggttttcggagagatcacaaccaaggccaacgtggactatgagaagattgtgcgtgacacatgcaggaacattggttttgtctctgatga

SEQ ID NO: 280681 - DNA, 334 bp, Glycine max
atgtttaaatacgacagtgttcacggacactggaagcatcacgatgtcaccgttaaggacgagaagacccttctcttcggtgacaaggcagtcactgtttttggacacagaaaccctgaagagatcccatgggggtcaacggagctgacatcattgttgagtccaccggagttttcaccgataaggacaaggctgccgcacatttgaagggtggtgccaagaaggttattatttctgcccccagtaaggatgcccccatgtttgttgttggtgttaatgagcacgagtacaagccagagcttgatattatttccaacgctagctgcacaaccaa

SEQ ID NO: 280682 - DNA, 334 bp, Glycine max
  unsure (1)..(334): unsure at all n locations
cctagttcgcttgcagtcacacaagaggccaatcctattcatagctcgagatgggtgaagaagtgaaggtagttgttccagaatcagtgttgaagaagcgcaagagggaggaggaatgggcgttggccaagaagcaagactcgatgctgccaagaagaagagagccgagagccgcaaactcatctacaacagagctaagcagtacgctaaggagtacgatcaccaggagaaggaattgattcggttgaaacgcgaggccaagctgaaaggtggtttctatgtggatccagaggctaagctgttgtttattattcgcntcgtggtattaatgcca

SEQ ID NO: 280683 - DNA, 336 bp, Glycine max
  unsure (1)..(336): unsure at all n locations
atgtttaaatacgacagtgttcacggacactggaagcatcacgatgtcaccgttaaggacgagaagacccttctcttcggtgacaaggcagtcactgtttttggacacagaaaccctgaagagatcccatgggggtcaactgagctgacatcattgttgagtccaccggagttttcaccgataaggacaaggctgccgcacatttgaagggtggtgccaagaaggttattatttctgcccccagtaaggatgcccccatgtttgttgttggtgttaatgagcacgagtacaagccagagcttgatatnatttccnacgctagtgcacnacnaactg

SEQ ID NO: 280684 - DNA, 341 bp, Glycine max
  unsure (1)..(341): unsure at all n locations
cttcccttctccaacatgccaaacgacagcgttctgagtctttntcttcttcgttaccctcttcacatgccttctctctgctaattcccacgatgaccatattttcctaccgagtcaactccatgacgatgactcagtgagttnactgctaccgacccaaaccttaactacaagccggtgatcggaatcctgacccaccccggcgacggtgcctctggccggctcagcaacgccaccggggtttcttacatcgccgcctcctacgttaaattcgtggagtccggtggtgctagagttattccccttatctacaatgagtcactgagaacttaacaagaagc

SEQ ID NO: 280685 - DNA, 333 bp, Glycine max
caggcgttggaacggtcggacaaagtcacatgttgctcctgatgtcattctaacttcacttgaacctattcagcaagggcagtgggcaaatttaccgcctgaattgcttctggacataataaggagggtggaagataggagactacttggcctgcacgtgctgttgttgtttactgtggttcggtttgtaaatcatggagggctgttacgaaagagattgttaagactcctgaacaatgtggaaggctcacatttcctatttcgttgaagcagcctggtcctcgtgattctccaatacagtgctttatcaggaggaacagagaaacttcaact

SEQ ID NO: 280686 - DNA, 334 bp, Glycine max
ggttgcccatgtagacatacatgtttaaatacgacagtgttcacggggcactggaagcatcacgatgtcaccgttaaggatgagaagacccttctcttcggtgacaagccagtcactgttttggacacaggaaccctgagagatcccatggaagtcgactggagctgacatcattgttgagtccaccggagttttcaccgataaggataaggctgccgcacatttgaagggtggtgcaaagaaggttattatttctgcccccagtaaggatgcccccatgtttgttgttggtgttaacgagcacgagtacaagccagagcttgacattattcca

SEQ ID NO: 280687 - DNA, 335 bp, Glycine max
  unsure (1)..(335): unsure at all n locations
atatgctnnccagctgttgcccaaggtgcnattggaatagcctgtagaagtaacgatgataaaatgnncagaatacctcnncttcattgaatcatgaagaaacaagactagcagtttgctgtgaaagagccttccttganaagtagaaggatntgccgnannctattgcaggctatgctagcagaaacgaggatggcaattgcttgtttagaggatagttgcttcccctgatggaacccgcgtgctcgaaactccagaatggttcanatgctttcgaagatatgataaagatgggtaagatgctggagaggagctctttctcgagctgacntgct

SEQ ID NO: 280688 - DNA, 322 bp, Glycine max
  unsure (1)..(322): unsure at all n locations
tcttggttggcagtacatatctggcactctccctgatggtcgcgaatttgaccgaatagataatccacagtttgtgggctacaaatgtgacccaaatggagaatatgtgcgacgctggcttcctgaattgctagattaccaactgaatggatacaccatccatggaatgcaccagagtctgtactccaagctgctggaattgaacttggttcaaattatcctcttcccattgtgggaatagatgcagcagaagtaagactgcnagaagcacttattcanatgtggcgacaagaagcagttcaagagctgcaatggaaaatgg

SEQ ID NO: 280689 - DNA, 333 bp, Glycine max
aagggtttaacctttctggctgtgttaatatgcgtttcagcactgtcactgagtccttctgttgcgggggaagggcaaaataatggccttgttatgaacttctacaaggaatcatgccctcaggctgaagacatcacacagaacaagtcaagcttctctacaagcgccacaagaacactgctttctcctggctcaggaacatcttccatgactgtgctgttcagagttgtgatgcttcactgttgctggactccacaagaaggagcttgtctgagaaggaaacagatagaagctttgggttgagaaatttcaggtacattgagaccatcaaag

SEQ ID NO: 280690 - DNA, 335 bp, Glycine max
  unsure (1)..(335): unsure at all n locations
ctattactgaccaagagattgtggagatgatactattcccagtagntaatgaggcatgccgtgttctagaagatggagttgttatacgagcatcagaccttgacattgcatctgttcttggaatgagcttcccaaataccggggtggcattgttttctgggcagatttggttggggctaatcatatatttaccagcctaaaaaaatgggcacaattatatggtaacttctataaaccctcaaggtatttggaagaaagagcactcaaaggaattcctctgagtgcacctgntcnatctactccaaagtcaatggcgcgtctatgagaaagccatt

SEQ ID NO: 280691 - DNA, 336 bp, Glycine max
  unsure (1)..(336): unsure at all n locations
atgatgacgacttcatcaggattttggccacaaggagcagagcacagattaatgctactttgaatcactacaaagatgcatttgnacaagatatcaacaaggacctgaaggctgatccaaaggacgagttcctgtcttactaagagcaactgtgaagtgcttgatccgtcccgagaagtacttcgagaaggttgttcgcttggcgatcaacaagcgaggaaccgatgaaggagcccttacaagagtggtggccacaagggctgaggttgatttgaaaaacatagcagatgagtatcaaaggaggagcagtgtccctcttgaacgtgctattgttaa

SEQ ID NO: 280692 - DNA, 329 bp, Glycine max
  unsure (1)..(329): unsure at all n locations
agcaatgaaagcaataagtccctccttcctctgccttataattcttgtgacccttttngctggtagcattgaaagtgcaccagcaaacgtgaagccaagccattatgctgcacccttcaataggagtgtttttcttctggttttctatttggaataggctctgcagcttaccagatagaaggagcagcagctatagatggcagaggaccaagtatatgggacacctatactaaacagcaaccagggaagatttgggatcatagtgatggaagtctagcaattgatttttatcaccggtacaagagcgacataaagatggtgaaagaagt

SEQ ID NO: 280693 - DNA, 330 bp, Glycine max
  unsure (1)..(330): unsure at all n locations
cgcatgtnctcctcgctctccgctcaggagaaagacaaatctcgcgccgattggataaagcagctcaacgatcctctcgagaccatcgatcccgagatcgctgacataatcgaactcgaaaaagcgcgtcaatggaggggttcgaacttataccttcggagaatttcacgtcgctgtcggtgatgcaagccgttggatcggtgatgacgaataaatacagcgaaggntatcccggtgctagatactatggaggaaatgagtatattgacatggctgagaccttgtgtcagaagcgtgcacttgaagcttntcggctggatccagcaaaat

SEQ ID NO: 280694 - DNA, 328 bp, Glycine max
ccctgatgaagcagttgcctatggtgctgcagtgcaaggaagcattttgagtggagagggtggtgaagaaaccaaagatatccttctcttggatgtggctcccctcacccttggaattgaaactgttggtggggtatgacgaagttgattcccagaaacactgttatccctaccaagaaatctcaggtgttcaccacctaccaggatcagcagactaccgtctccattcaggtttttgaaggtgagaggagtctcacaaaggatgccgtctgcttgggaatttgaactgtctggaattcctccagtccaaggggtaccctcaaattga

SEQ ID NO: 280695 - DNA, 331 bp, Glycine max
  unsure (1)..(331): unsure at all n locations
tttctctcttctttctctgttgcgttttgtgaaatctaattcgacatgtngtcacgggacaacaagaaggcgtccagcagccgagccggccgaattcgcaccctctccgatctgaaccgtccctccgccgattcgacagcgactccgatggccctcaggagtattacaccggcggcgaaaagagtggaatgcttgtccaggatccttcaaagggaaatgatgtggatgaaattttcaatcaagctangcaacttggggctgttgaaaggcctcttgatcagttcaggagctccaaggtcaactagctttactggaactggcaggttactct

SEQ ID NO: 280696 - DNA, 329 bp, Glycine max
caagtcctcaagtttccaccacctcatgtcatcaaagttagtaagtctgcatggatgatgatgaagaatttggaagagagatgcttgctggtgttaatccatgcctaattgagtgccttcaagtgttccctccaagagcaagctagatcccacagtgtatggtgatccaaactagtacaataaccaaagaacacttagagatcaacctggtggactctctgtggaacaggcatgagtggtaacagatgttcatattagatcaccatgatgcattcatcgcatatctgaggaagatcaatgacttccactgcaaagtttatgccacaagg

SEQ ID NO: 280697 - DNA, 317 bp, Glycine max
cttgttgtttggagcgatccgagaaaaactctgtaaacatgttggtttaccaggacctccttacaggtgatgagcttctctctgactccttccgttacaaggaaattgagaatggaatgctgtgggaagttgagggaagtgggttgttaaaggagcagttgatgtagacattggtgcaaacccttctgctgagggtggaggagaagatgagggagttgatgatgcactgttaaggtgttgacattgttgacacatcagcttcaggagcaaccgcatcgataagagcagttgttacctccagagagttacaagattgc

SEQ ID NO: 280698 - DNA, 283 bp, Glycine max
gatggcaaatgaactacccgtcaaagcttttggttgggctgcttcagacacttctggcacccttgccccttttcatttctccagaaggaaaatggcgtcgatgacgtcactctcaagattctcttctgcggggtttgccactctgatctccacactctcaaaaacgactggggtttcaccacctaccctgtcgttcctgggcatgaaattgttggtgttgtgacagaagttggaaacaatgtgaaaaacttcaaagtgggtgataaagttggattggtgtgat

SEQ ID NO: 280699 - DNA, 326 bp, Glycine max
cagctgtctgctgttagatctgtacccgcctagccattgatttggaaaagtccaacttcaaggatgagtaagcttcagagtgatgctctaagagaagctatctcaggaatcatggctgattccaaggaaaagacaggaaatttgtggagaccattgaactccaaattgggttgaaaaattatgatccccagaaggacaagcgtttcagtggctctgttaagttgcctcatattcctcgccccaagatgaagatttgtatgcttggagatgcccagcacgttgaggaggctgagaagataggattggactacatggatgttgaggct

SEQ ID NO: 280700 - DNA, 328 bp, Glycine max
  unsure (1)..(328): unsure at all n locations
gcacaccacacaaaaaagcaaaacagagagaacaactgttactcacacacgccatgggtaaatgaatggtttttgagcaacagcagttaaaagagaaaagggattcagcgaagatgacatcngttggtgtggcccaacttcgggtttgagagaagccagtgggcatggagcagcagctgcggatagattgccagaggagatgaacgatatgaaaattagggatgatagagaaatggaagccacagttgttgatggcaacggaacggagacaggacatatcattgtgactaccattgggggtagaatggtcagcccaagcagactataa

SEQ ID NO: 280701 - DNA, 289 bp, Glycine max
  unsure (1)..(289): unsure at all n locations
tgaatctctcgtcgttctttttatttgcggtttcttctncttctcacgttctacctaacattttctaaaacatgtctggggaagaggaagaaacgccgcagagctcaaaattggagacgagtttttgaaggcaaagtgcttaatgaactgtgaagtttcattgattcttgagcacaagtatgagcagcttcaacagacatccgatgatcccatgaatcaagtttctnaggtatntgaaaagtcactgcagtatgtgaagcgtttcagccgtataaaaatcctgatgctg

SEQ ID NO: 280702 - DNA, 319 bp, Glycine max
  unsure (1)..(319): unsure at all n locations
gcaaaacttagggttgggcctttttttgaggttttcagcgcttctttctcacaatggttcttcagaatgatattgatttgctgaatcctccagctgagttggagaagagaaagcacaaactcaagcgtcttgtnagtcaccaaactctttcttcatggatgttaagtgccagggatgcttcaacataacaactgtgttagccactctcaaactgttgtggtgtgcggaaactgccagactgtttgtgccaccaacagggggacgggcgaggtaaccgaagttgctcattaggagaaggagatgatggttgttaccagct

SEQ ID NO: 280703 - DNA, 320 bp, Glycine max
  unsure (1)..(320): unsure at all n locations
angatgtgacactcccacatgagggtgaggagatccctcttnaagagcgngaccttgtggttggaaaggtgtattccaagatcatggagattgagtctcgtctgttaccttgtnggctncatgtcattngtgagctncctcagcctnggaagctggtgctacactggtcaacattgtgctctgatcgtctgaagatggtatatcttctcttccatcatattagctgacactgnaggaagagatatagagatgtgtanagaggaantaacaaacgatatcanagatgtggacntcttaggcaaatnacgagcatagtggag

SEQ ID NO: 280704 - DNA, 325 bp, Glycine max
  unsure (1)..(325): unsure at all n locations
gtttggagcgatccgagaaaaactctgtaaacatgttggtttaccaggacctccttacaggtgatgagcttctctctgactccttccgttacaaggaaattgagaatggaatgctgtgggaagttgaggggaaggggttgttaaaggagcagttgatgtagacattggtgcaaacccttctgctgagggtggaggagaagatgagggagttgatgatgcactgttaaggttgttgacattgttgacacattcagacttcaggagcaacccgcattcgataagaancagttgttacttcatgaagaggttaccagattgctcccaa

SEQ ID NO: 280705 - DNA, 360 bp, Glycine max
ggctctttgatcaattatctccggaaacttctggaacctccttatgttgatacccttgaatggtccaaatggcacgtgttttgggtggatgagagagtcgtgcctaagactcacgaagatagcaactacaagcttgctttagatggacttctctccaaggtgccaattcccccgggcaatgtttatgcaatcaatgatgcgctttcagccgagggagcggcagatgattatgagacgtgtctcagacacttggtcaagaacaatgtgatagcttcatcaccagccatgaattccaaaatttgatctcatgtgctgggcatgggcctgatggccacatacttctctgttccaggcatcctc

SEQ ID NO: 280706 - DNA, 351 bp, Glycine max
  unsure (1)..(351): unsure at all n locations
aganaaggctaagggctcaattgttgcgtgactcaaagaaacaaattgcgctcagccttactgaattgcagaaaaatcccctgaactacactcaggtgtctgtcttggcagatgacattctaaagaatgtggagtatgacgcattaaggattgttttcaacaaatttcattctgttgtacaatttttgccaacagttgcaactgtactgtctcctgaggttattgagagagaggctgaatcaggaggaaagcttggggaattggattcatatgagattgaaggtggcgagacaaactgaaattcttcagaatctggctgagttccagtttcttgtgtcatgtnaatctgtg

SEQ ID NO: 280707 - DNA, 349 bp, Glycine max
ggcgttgagcacgccaacgtgcttcttcctcccttggagacgctctgcaccgttgaggaaaccagcgtcagagacaagtcggtggagtcgctgtgcagaattggagctcagatgagagagcaagacttggttgaatacttgattcctttagttaagaggctggctgctggtgagtggttcacggcacgggtttcatcgtgtggtttgttccatattgcttaccctagtgcacccgaggcggtgaagactgaactgagagccatatatgggcagctgtgtcaggatgatatgcccatggttaggagatctgcggccacaaacttgggaaagttgccgctactgtgaactc

SEQ ID NO: 280708 - DNA, 349 bp, Glycine max
  unsure (1)..(349): unsure at all n locations
gaagagcatcactgaactaacaaagcaaccctatgtcgaaggtggtttgtgtcaccggagccagcggcgccntctngtcatgggtggtcctactcctcntccagcgtggttacaccgtccatgccaccgtccaagatatcaaggatgaaaatgagacgaaacatttggaggaaatggaaggagcaaagagtcatctccatttttttgaaatggatcttcttgacatcgactccattgccgctgccataaagggttgttccggcgtaatccaccttgcatgtcctaacatcattggtcaagtcgaagatcccgagaaacagatattggaaccggcgataaaggaanggta

SEQ ID NO: 280709 - DNA, 346 bp, Glycine max
  unsure (1)..(346): unsure at all n locations
cttttaccctgactaactttgccaagatgtatgcatccaagttangagttgatgaaggaaagatgatggaaaggctctggggtgaaaacttttttgatccagccacaaagaaatggaccagcaagaatagtggttctgctacctgcaagcgtgggtttgttcagttctgttatgagcccatcaagcagattattaacacttgtatgaatgatcagaaggataagctgtggcctatgctgcaaaagcttggggtcaccatgaaatctgaggagaaggacctcatgggtanacattgatgaagcgtgtcatgcanactggcttccacagtagtgcctantggaatgat

SEQ ID NO: 280710 - DNA, 350 bp, Glycine max
cgcaactgaaaaggaaaaccctaagagatgaagagaactcctatcttgttccctctcttctttcttctttgtgccttcacctcatatctaccttcagccaccgctgatgatgatcatgtgtacgacactgacggcgataagcttcaatacggtgtcaattatttcgtgttgccagtgataagaggaaatggcggtggaatacaagtagcaaaagcaggaaacgaaacttgccctctgactgtggtgcaatctggcaacgagctctctgaggggttaccgataaagattgcatctcgatcagcaggagtcgctttcatcaccaaggccactttcaagagcattcagttcgg

SEQ ID NO: 280711 - DNA, 345 bp, Glycine max
  unsure (1)..(345): unsure at all n locations
cggagagagagagagaggttttgacgcaacacactttcactgagaaaggatctctatctaccaaggagcagaataaaacccttctctctggtaagtgaataagagaatggcttcagatcggaaacttcacactttcgaggaggtggcaaagcacgaccagaccaaggattgctggctcatcatttctggcaaggtgtatgatgtcacccctttcatggaggatcatcccggagtgatgaggtttgttatctgcaacagggaaagatgcaaccaatgattttgaagatgtggacacagtgattctgctagagtatgnggaaaatntacttggtgagatgatcatca

SEQ ID NO: 280712 - DNA, 343 bp, Glycine max
  unsure (1)..(343): unsure at all n locations
ggtttgaggaaactgagttaaggcttggactgcctggaaacggaggcactgaagaagtgctcatcaggaagaggggtttctctgagactgaaactggtcatgaagatgagtctgccaccactgtggatttgatgcttaatctttcttctaaggaggccgcaaccannnnnnnnnnnnnnnnnnnnnnaactgataagcacaagactttgcctaaggagaagacccttctgccagcagatcctgctaagcctccagccaagacgcaggtggtgggttggccactgtgcggtccttccggaagaacatgttgctgtncaaagaacgttggagagagacgagagaa

SEQ ID NO: 280713 - DNA, 315 bp, Glycine max
  unsure (1)..(315): unsure at all n locations
agacttagattttgtgaatggctgangtggaagagggacaggtcatcngcgtccacancgttgatgagtggaagctgcaactccagaatgcaaaagactccaaaaaactgattgtggtggattttactgcttcctggtgtggtccatgccgttttatggccccagttcttgcagagattgcaaagaaaactccngnattgatcttcctcaaagtggatgtggatgaagtgaggcctgttgctgaggaatattccattgaggccatgcnaaccttcctcttcttgaaagatggcganangtggacaagtggttgtg

SEQ ID NO: 280714 - DNA, 342 bp, Glycine max
cgctctctaataacatttctaatctcattctccttctgttcaaacactctctctcatggcatcagataagaagattaggatcggcatcaacgggtttggaaggattggccgtttggtggccagggttgcccttcaaaggaatgatgttgaacttgttgctgtcaacgatcctttcatcaccactgattacatgacatacatgttcaagtacgacaccgttcatggccagtggaagcattttgatgtgaaggtgaaggactctaagacccttctctttggtgagaagccgtcaccgtttttggaatcaggaacctgaggaattcatgggtgaggttgtctgat

SEQ ID NO: 280715 - DNA, 338 bp, Glycine max
  unsure (1)..(338): unsure at all n locations
ggcaggagcagaggggctaaacagagaacagtacgtgtaccttgcgaantgtcggagcaggcgganggtacgaagagatggtggagttcatgcagaaggtggtggtggggtggacgccggcgtcggagctcacggtggaggagcgcaacctcctctcggtggcctacaagaacgtgatcgggtctctgcgtgccgcgtggcgcatcgtgtcctccatcgaacagaaggaggaaggcgcaagaacgacgacaacgtgtcctcgtgaanccatacagatcaaggtcgagacganctcagcagtctncgcaanatctcaactctcgatcaactcgacctcg

SEQ ID NO: 280716 - DNA, 355 bp, Glycine max
  unsure (1)..(355): unsure at all n locations
caaaacacttgctnccattattatnttctcattcattcgttcatcatggttcggttcagcaacaatgtgatcggactcctgaacttcctgacnttcctcctctccatcccgatcctggtggccggagtgtggctgagcaagcagggcgccaccgagtgcgagcggtggctggagaagccggtgatcgcactcggcgtcttcctcatgctcgtctcactcgccggcctcgtcggcgcgtgctgtcgcgtgtcgtggctcctctggctctactcctcgtcatgttcgtcctcatcgtcttctcttcgcttcaccancttcgcttcgttgnaacanaaggcntgcgangtgtgttaat

SEQ ID NO: 280717 - DNA, 344 bp, Glycine max
  unsure (1)..(344): unsure at all n locations
gaagtgaccccaatatacttagccatatctttacttcccaaaacttgctctacaatgagtttccttcgttcttttgcaagaaacaaggatatatcaaaagtaggacgcagaggtatccattgcatgcagaaactatgtgcagaaaaaatatctcctgattcactagagaaggcccaaaatcgtgtgatagatgctgcactcacacttgttcgaganaatacaaggcntaaganaganctcgngcatagtttgggaggtgngtggcacttcaactctcttggagtcctnngggcataattcacgttcctgaaggctgcattgcaccctcttcataggagnantng

SEQ ID NO: 280718 - DNA, 343 bp, Glycine max
  unsure (1)..(343): unsure at all n locations
tgatgaggtgatggcaaggggaacttttgccaacattcgccttgttaacaagctcttgaaaggggaagttggtccaaagacagttcacattccaacaggggacaagctttacgtgtttgatgcagcaacgagatacatggcttctgggcaagacaccattgtgctggctggagctgaatatggcagtggaagctctagagattgggctgccaagggtccaatgctactgggagtcaaagctgtgatagccaagagtttcgagagaattcatcgtagtanttggtaggaatgggtatcatcctctttcttcaanccggtgaggatgcggacnattgggatantg

SEQ ID NO: 280719 - DNA, 348 bp, Glycine max
caacatctctatcgagtaaattaactatgaagcctaccctactattatccctttccttcctgcctctctttgctttcctggctctttcagaagatgttgaacaagttgtggacataagtggcaaccccattttcccaggtggcacatattacattatgccatcaacttggggcgctgccggtggtggattgaaactaggccggacaggaaactcaaactgcccagttactgttttgcaagattactcagaaatcttccgtggcacaccagtcaaattcagcatacctgggataagccctggaatcatctttacagtactccacttgaaatcgagttcgcagagaaact

SEQ ID NO: 280720 - DNA, 340 bp, Glycine max
  unsure (1)..(340): unsure at all n locations
gaagagcatcactgaactaacaaagcaaccctatgtcgaaggtggtttgtgtcaccggagccagcggcgccatcggatcatgggtggtcctactcctcctccagcgtggttacaccgtccatgccaccgtccaagatatcaaggatgaaaatgagacgaaacatttggaggaaatggaaggagcaaagagtcatctccatttttttgaaatggatcttcttgacatcgactccattgccgctgccataaagggttgttccggcgtaatccacttgcatgtcctaacatcatggtcaagtcgagatcccgagaacagtattggaacggcgataaaggangg

SEQ ID NO: 280721 - DNA, 344 bp, Glycine max
tcgctccgcaccagtttcaccgcacgaatatcttgttgtttggagcgatccgagaaaaactctgtaaacatgttggtttaccaggacctccttacaggtgatgagcttctctctgactccttccgttacaaggaaattgagaatggaatgctgtgggaagttgaggggaagtgggttgttaaaggagcagttgatgtagacattggtgcaaacccttctgctgagggtggaggagaagatgagggagttgatgatgcagctgttaaggttgttgacattgttgacacattcagacttcaggagcaaccgcattcgataagaaccagtttgttactccatgaaga

SEQ ID NO: 280722 - DNA, 344 bp, Glycine max
  unsure (1)..(344): unsure at all n locations
acatgccatacaacaagattgctgacaggaaaggtcaccagggatggatgaaactagaaggtcaacactttatattccctggtggtggtacgatgtttccagatggagcagagcaatatattgaaaaacttggtcaatacattcctataagtgaaggtgttctgaggactgcgcttgacatggggtgtggggttgctagttttggaggatatatgctatctaaaaatattttaaccatgtctttgctccaagagattcacataaagctcaaatacaatttgccttggaaagaggataccacttttgttgnatcttggcactcgcagactcccattcctgggttg

SEQ ID NO: 280723 - DNA, 348 bp, Glycine max
ctcgattcttctctcttcctctctgctccttcaatttttgtttcaggttcgagatccatggtgagttttgaagcagaaggagggaaggggtgtaacggctccttcttccgcgcgtttgacatggacgacaatggggacgagtgcatggatgagtactttcataaacccgagaagaagcgtcgtctctccatgaaccaggttcagtttctggagaagagtttcgaggaggagaacaagcttgaaccggagagaaagaccaagcttgccaaagaccttggtttgcggccacggcaagttgctatttggttccagaacgtcgactcgctggaagaccaagacctggagaag

SEQ ID NO: 280724 - DNA, 348 bp, Glycine max
  unsure (1)..(348): unsure at all n locations
gttgggtagggtgaattgcaatttcaattaatnagaattcaacgtttgcaaattgcatattgttcttctcttcctctcttcctctgactccatgtcgtcgataacgggcatccaggggcaacctcttgaggttacggtggtttcgtgctccaagttgaggacacagaatggatttcaagacaagatccgtacgtttgtgttgagtatggcagcacaaagttccgaaccagaacctgcacagacggcggaaaaaacccggtattccaagagaagttcatctttcccctcattgaaggcttcgggagctcatgccttgtttggannnannnctcacttccgacgattata

SEQ ID NO: 280725 - DNA, 312 bp, Glycine max
  unsure (1)..(312): unsure at all n locations
cggcggcggcgactatacacccgtcgcaaccgccgcagtgtcagccgcaacccgaagttcctcgccggagctccgatatggagaccgataaggatatgtcagctactgtcattgaggggaatgatgccgttactggccacataatctccaccacaattggaggcaaaaatggggaacctaaacagaccatcagttacatggcagaacgtgttgttggcactggatcatttggagttgtttccaggcaaagtgcttggagatggagaggcatgntattaaaaggcttgcaagacaggcggtacaaaangtgat

SEQ ID NO: 280726 - DNA, 150 bp, Glycine max
catcgatatgaaccctaagtttattatggctaatggcaatttggtgcgggttctcatacatactgatgttactaagtatctctctttcaaagctgtggatgggagctttgtgtttaataaaggaaaggttcataaggtgcccgcaaatgt

SEQ ID NO: 280727 - DNA, 334 bp, Glycine max
  unsure (1)..(334): unsure at all n locations
gttggttctttctttccccaatttgtgagtgttactattgaatcgattggattgacatggcgagcgcgatggttgaggacgccaacttcgaagatgaccagctcgccaatatgaccaccgacgacgtcgtcagagcttctcgtcttctcgacaacgagattcgcatcctcaaagaagagttgcagaggaccaatttggagttggaatcgtacaaggacaagatcaangagaatcaggagaagataagctcataagcagttgncctactcgttgggaacatcgttgagatattggnatgaaccagaagcganctgagaagnngtgccatatgnct

SEQ ID NO: 280728 - DNA, 126 bp, Glycine max
gggagcattagctatgtttgttaatgtcactttatgttatgtgggtaagtcacctaagacactccacgtacctacttgttgtctcttacgcggctttaataaatcttctgcccttgttccatattt

SEQ ID NO: 280729 - DNA, 335 bp, Glycine max
  unsure (1)..(335): unsure at all n locations
ctagaccccacaaagggtgttggtcgattaagacagcaggacggtggtcatggaagtcgaaatcnnctaaggagtgtgtaacaactcacntgccgaatcaactagccccgaaaatggatggcgctaaagcgcgcgacctatacccggccgtcggggcaaggaccaagccccgatgagtaggagggcgcggcggtcgctgcaaaacccagggcgcgagccgggcggacggtcgtcggtgcagatcttggtggtagtagcaatattcaaatgagaatttgaaggccgaagaagggaaagttccatgtgaacggcattgcacatgggttatcgatcta

SEQ ID NO: 280730 - DNA, 336 bp, Glycine max
  unsure (1)..(336): unsure at all n locations
cataaacgccgcccaaaaccatttatagggttttcttttctttgccaagaaaatgagagagtgnatttcaatccacattggtcaggccggtatccaggtcggaaacgcctgctgggaactctattgccttgaacacggcattcagcccgatgggcagatgccgagtgacaagaccgttggaggaggagacgacgccttcaacacattcttcagcgagaccggcgccggaaagcacgtgcctcgcgccgtcttcgtggatcttgagcccaccgtgatcgacgaatccgaaccggcgcgtaccggcagtcttccacccggagcactgatcacggcaag

SEQ ID NO: 280731 - DNA, 336 bp, Glycine max
  unsure (1)..(336): unsure at all n locations
agagtttgttgtgagctataagctagtttatcgtgatgagaatatgaagttgtttgttttctttgttgctgcagtagttttggtagcatggccatgccatggcgcaggctaccaaaggttccctctccgaatgaaaactggctatggtgagcgttcttcggaggtaaaatgcgcaagttttaggcttgctgtggaagcacacaacatccgagcctttaaaaccattcctgaagagtgcgttgaaccaacaaaggactacattaatggcgaacaatttagatcagactctaaaacagttaaccaacaagctttctttatgctatgaacgcgantcca

SEQ ID NO: 280732 - DNA, 338 bp, Glycine max
  unsure (1)..(338): unsure at all n locations
aaccgatcttttcctctgagaagacgtgtcggtagctgaagcattttataagcctccactttcctgaactagttttaacatacaatctttcaagtacacctccccagcttccatttaagaatggagatcactagaataggccaatggttaagtcttctgatatgtgtactactattactgcagacagaaggggttcctgtgggaatcacttttgttgaaaatgcagtggcaaaaggggctgtttgtttggatgggagtcctccagcttaccacttccacaagggatctggagcagggattaacaactggatagttcntttgagggaggaggnggtgca

SEQ ID NO: 280733 - DNA, 337 bp, Glycine max
  unsure (1)..(337): unsure at all n locations
aaaataaccacaagaatgagggagatattgcacgtgcaaggtgggcaatgcgggaaccaaatcggttccaagttctgggaagtgatatgcgacgaacacggcatcgaccccaccggaaagtacaccggcgacgaggcctccgatctccaactggagaggatcaacgtctactacaatgangcctccggcggaaggtacgttccccgggccgtcctcatggatctggagcccggcaccatggacagcatcagatccggcccatacggcaagatcttcaggcccgacaattcgtctttggcagtcccggcgccggcaacaattgggcaagggcactaac

SEQ ID NO: 280734 - DNA, 342 bp, Glycine max
  unsure (1)..(342): unsure at all n locations
aaccgatcttttcctctgagaagacgtgtcggtagctgaagcattttataagcctccactttcctgaactagttttaacatacaatctttcaagtacacctccccagcttccatttaagaatggagatcactagaataggccatggtaagtctctgatatgtgtactactattactgcagacagaaggggttcctgtgggaatcacttttgttgaaaatgcagtggcaaaaggggctgtttgtttggatgggagtcctccagcttaccacttccacaagggatctggagcagggataacantggatagttcntttgaggaggagatggtgcacangtttata

SEQ ID NO: 280735 - DNA, 343 bp, Glycine max
tggtgctagccatcaactaccaaccagaggttatgttgaatttcttgaaggattttgaaacaaagctcggcatcaagatcacatgttctcaggaaactgaaccattgggaacagcaggtcctctggctcttgccagggataagctgatagatgactctggagaaccctttttttgttctcaacagtgatgttatcagtgagtatccactcaaagaaatgattgaattccataaaaaccatggaggagaggcttccataatggtaaccaaggttgacgagccatcaaagtacggcgtggttgtgatggaagagagcacagggcagttgataaatttgttgaaaa

SEQ ID NO: 280736 - DNA, 344 bp, Glycine max
ggcgttgagcacgccaacgtgcttcttcctcccttggagacgctctgcaccgttgaggaaaccagcgtcagagacaagtcggtggagtcgctgtgcagaattggagctcagatgagagagcaagacttggttgaatacttgattcctttagttaagaggctggctgctggtgagtggttcacggcacgggtttcatcgtgtggtttgttccatattgcttaccctagtgcacccgaggcggtgaagactgaactgagagccatatatgggcagctgtgtcaggatgatatgcccatggttaggagatctgcggccacaaacttgggaaagttgccgctactgtt

SEQ ID NO: 280737 - DNA, 207 bp, Glycine max
  unsure (1)..(207): unsure at all n locations
gtgagaaacatggcttccttaagctccttagtgctgctccttgcagctctaattctatcccctcaagttcttgcaaactatgagaatcccccagtgtacaagcctcccactgagaaaccnccagtttataagcccccanttgagaagcctcctgtttacaagccnccagttgaaaagcctccagtgtataagcctccagtagagaag

SEQ ID NO: 280738 - DNA, 345 bp, Glycine max
gctaacagcaagactgtgccggcatcaagcatcccagatgggtggatggggttggatattggtcctgattccatcaagacatttggtgaagcattggatacgactcagaccattatttggaatggaccaatgggtgtttttgagtttgataagtttgccacaggaacagaggctatagccaagaaactggcagagctgagtgggaagggagtgacaaccatcattggaggaggtgactccgttgccgctgtggagaaggttggacttgcagacaagatgagccacatctccactggtggtggtgccacttagacttcttgagggaaagcaactcctggtgtcttg

SEQ ID NO: 280739 - DNA, 336 bp, Glycine max
  unsure (1)..(336): unsure at all n locations
gcttatcaatgggtaacaattaactatctactgggaaacttgggaaagcattattcagaaactgttgcagtagttgatcttggaggtggatctgttcaaatggcttatgcagtctcagagacagatgctgcgaaggctccacgagcaccggacggagtggaatcatacataacggagatgttccttaggggaaagaaatattacctctatgtacacagttacttgcgatacggtatgctagcagctcgtgcagaggcttaaaggttcgtgattctgaaatcctggnatttggctggctttgatggtatacgtatatgaggantcatnaggccaacc

SEQ ID NO: 280740 - DNA, 342 bp, Glycine max
gagtttgttgatcgagataactagaaacagtgtgatgaaaatgaaggtccttgttttcttcgttgctacaattttggtagcatggcaatgccatgcgtacgatatgttccctctccgaatgaacactggctatggtgcccgtactccggaggtgaaatgcgcaagttggaggcttgctgtggaagcacacaacatctttggctttgagaccattcctgaagagtgcgttgaagcaacaaaggatacatccatggcgaacatatagatcagactccaaaacagttaaccaacaagcttactttatgccagagacctcgaagtccatcccaaggacacattgtg

SEQ ID NO: 280741 - DNA, 344 bp, Glycine max
cttctttccaaatcccaactactactcacactcactgcagatctcaatccatggctaccattgttagcatcaaggcccgccagatctttgacagtcgtggcaatccaaccgtcgaggtggatttgacatgctccgatggtacttttgctagagctgctgttccaagtggtgcatccactgggatttatgaggcccttgaattgagagatggaggatctgactaccttggaaagggtgtatcaaaggctgttgacaatgtgaacaccattattgcccctgctttggttggcaaggacccaactcagcagactgctattgacaacttaatggttcaacaacttgat

SEQ ID NO: 280742 - DNA, 340 bp, Glycine max
  unsure (1)..(340): unsure at all n locations
gctaacagcaagactgtgccggcatcaagcatcccagatgggtggatggggttggatattggtcctgattccatcaagacatttggtgaagcattggatacgactcagaccattatttggaatggaccaatgggtgtttttgagtttgataagtttgccacaggaacagaggctatagccaagaaactngcaaagctgantgggaagggagtgacaaccatcattggaggaggtgactccgttgccgctgtggagaaggttggacttgcagacaagatgagccacatctccactggtggtggtgccagcttagacttcttgagggaaagcaactcctggt

SEQ ID NO: 280743 - DNA, 336 bp, Glycine max
  unsure (1)..(336): unsure at all n locations
cttcctcagtagtgcgattttcgattctcttctctgcaactatgcctaaccctaaggtcttcttcgacatgaccatcggcggtcaacctgccggccgcatcgtgatggagctctacgccgacgtgactccgagcaccgccgagaacttccgcgcgctctgcaccggcgagaagggcgccgggcgganggcaagcccctccactacaaaggctcgtccttccaccgcgtgatcccgaacttcatgtgccagggcggcgacttaccgccggaaacggcaccggagggagtcgattaggcgccaagttcgccgacgagaattcgtgaagaacacntggt

SEQ ID NO: 280744 - DNA, 344 bp, Glycine max
  unsure (1)..(344): unsure at all n locations
caccgcacactctctgctcctagggtttctccttcgagtgagggaaatggctcccaaaccgcctagtacgggtctgtttgttggactgaacaagggtcacgtcgtcaccaagaaggaattgcccccacgcccctcagatcgtaaggggaaaacaagcaagagggtgcactttgtgaggaacctcataagagaggttgctggttttgcaccctatgaaaagcgtataactgagttgctgaaggttgggaaggataagagggcactgaagttgcaaagagaaagcttngaacccacaaacgtgcaaagaagaagcgtgangaaatgtccatgntctcaggaagatg

SEQ ID NO: 280745 - DNA, 338 bp, Glycine max
  unsure (1)..(338): unsure at all n locations
tataagctagtttatcgtgaggagaatatgaagttgtttgttttctttgttgctgcagtagttttggtagcatggccatgccatggcgcaggctaccaaaggttccctctccgaatgaaaactggctatggtgagcgttcttcggaggtaaaatgcgcaagttttaggcttgctgtggaagcacacaacatccgagcctttaaaaccatncctgaanagtgcgttgaaccaacaaaggactacattaatggcgaacaatttagatcagactctaaaacagttaccaacaagctttctttatgctangacgcgaagtcatcacaacgacntttatatcg

SEQ ID NO: 280746 - DNA, 342 bp, Glycine max
  unsure (1)..(342): unsure at all n locations
gaaacaccctgtcatctgcagcgagagtgggagagccatcgtgtctcatcattcggtcttgattttcgaggcggttggcaccagcagcacaaacggcggaggagctcccccggcattgtcagcgcattacctggcggaggagctgtcggaggactacggatatctctcggagctggcgttccgaggggactatgaaacgtgcctggtgtacacggaggagatgaaagagcggtgcgtggagcagttcaagcaggggacggtgtgtatggaacagctggcagcggtggaagggttgtgtgaattggtgangaagcgttggggcgcggaatcggttcggagata

SEQ ID NO: 280747 - DNA, 344 bp, Glycine max
attaggtcttcctacccaaaacaaaacttcaatttctgtttcagttcgcggagatcaatattttatctaggtccatcgtcgatagaagatacgagaaaccaaaggcaatgtttttgtgggattggttttatgggattctagcgtcgctcgggctgtggcagaaggaggccaagatcttattcttgggcctcgataacgctggcaaaactaccttgcttcacatgctcaaagatgagagattagtccagcatcagcctacccagtatcctacatcggaggagttgagtattgggaagatcaagtttaaagcttttgatctagggggtcatcagattgctcgaaga

SEQ ID NO: 280748 - DNA, 347 bp, Glycine max
  unsure (1)..(347): unsure at all n locations
ccggctcccttcacatgaccatccagaccgctgtcctcatcgagaccctncaccgctctcggcgccgaggttcgctggtgctcctgcaacatcttctccactcaggaccannnnnnnnnnnnnnnnnnncgtgacagcgccgccgtcttcgcctggaagggtgagaccctccaggagtactggtggtgcaccgagcgcgccctcgactggggccccggcggcggccccgacctncatcgtcgacgacggaggcgacgccaccctcctcatccacganggcgtcaaggccgaggagctctatgagaagaccggggaattccccgaccctaattccantgacaacgcgg

SEQ ID NO: 280749 - DNA, 342 bp, Glycine max
  unsure (1)..(342): unsure at all n locations
caaaacactcataacacaaagcacaaagcaaagctcatccttgagttaaaaaatggcagcagcttcttccatggctctctcatccccatccttggctggcaaggccgtgaagctgggcccatcagccccagaagtgggaagggtgagcatgaggaagaccgtcaccaagcaggtctcctcaggaagcccatggtacggcccagaccgagtcaagtacttgggcccattctctggcgagcccccgtcctacctaaccggtgagttcccaggcgactacggctgggacattgctgggtttccgcagacccagaaaccttcgccaagaaccgtgaatncgaatga

SEQ ID NO: 280750 - DNA, 343 bp, Glycine max
  unsure (1)..(343): unsure at all n locations
gcaacctcacctcttcctccttcaatctctttcggaatttcccaaaatccttagtgggaggaagagatggttctgactcagaagcttcacgaagccttcaaaggcaccgtcgagaggattactggcccccgaaccgtttccgncttcaaagaaaaaggagttctcagtgtctctgagttcgtcaccgctggcgataatctcgttgccaaatgccccacctggtcctgggaatcgggtgatccaggcaagaggaagccatacttgccacctgagaaacagttcttgattactagaaatgtgccttgtcttcggagagctgcatctgttgaagaggaatatgaag

SEQ ID NO: 280751 - DNA, 333 bp, Glycine max
  unsure (1)..(333): unsure at all n locations
ccctttgagtntcagttttcaattttgaacccccttttttgtaatccataaccatagctggtagcatccttggttgagtcgagggatttgattatggataagtatgaggctgtcaaggatttgggagctgggaattttggggtggctaggctcatgaggaacaaggagaccaaggagcttgttgccatgaaatacatcgagcgtggccaaaagattgatgagatgtggcaaagnggnttttaacccaangntccttgggnacccaatatattcgcttcaaggaggtggtttgacccccacccatttagccatatgatggatatgcggctggag

SEQ ID NO: 280752 - DNA, 199 bp, Glycine max
  unsure (1)..(199): unsure at all n locations
gttaaaagttttgggaaaaaagaataaaagatgatgcaaccagcaaaacacaatctgttttgtacatcataaagagaacggagctagaaattaattgcatccaatgtaactctaatttgttcccacgtttcttattaactgcttcttgtaacgtacgttgtagatatgtattaatcttcttcccanaaaanaagtngnc

SEQ ID NO: 280753 - DNA, 335 bp, Glycine max
gaagcagccatggggatcgatctcaaggccggaggtaagagcaaaaagaccaaaagaacagcacccaagtccaatgatatctatctcaagctcttggtcaagctttatcgcttccttgttcggagaactggcagcaacttcaatgctgttatacttaagagattgttcatgagcaaggttaacaaacccccattgtctttgtcaaggttgattaagtatacgaaggggaaggaagataagattgcagtggtggtggggtctataaccgatgatattcgtgtttatgaagttccaccattgaaagttacagcactcaggttacagagactgcccgt

SEQ ID NO: 280754 - DNA, 342 bp, Glycine max
ctcttgcagtcgcagaggaaaaccctagctagtagtctcagttcgtttgagagagaaaaaatggcagagggtctcgttctccgcggaaccatgcgcgcccacaccgacgtcgtgacggcgattgccactcccatcgacaactccgacatgatcgtgacggcgtcgcgcgacaaatccatcattctctggcacctcaccaaggaggacaagacctacggtgtcccccgccgccgcctcaccggacattctcacttcgtccaggagtcgtcctctcatccgacggtcagttcgccctctcgggctcctgggacggcgactccgcctctgggacctcgcggctgg

SEQ ID NO: 280755 - DNA, 157 bp, Glycine max
  unsure (1)..(157): unsure at all n locations
cgaagagaatggctcccacnggtttaatctttttggctgtgttatgcttctcagcactgtcactgagtcgttgtcttgcggaggataatggacttgttatgaacttctacaaggaatcatgccctcaggctgaagacatcatcaangaacagtctgt

SEQ ID NO: 280756 - DNA, 343 bp, Glycine max
  unsure (1)..(343): unsure at all n locations
gatttggaatggggcaaatggatcactatgagaatgatnctgaagccgccatgctcaaagacacttctgcttattattctcgaaaggcttcgaattggattctagaagattcttgtcctgattatatgctcaaggctgaggagtgcttaaaacgggagaaagatagggttgctcattacttgcactctagtagcgagctcnaagttattagaagaaagttcaacatgagttgttatctgtgtatgcaaaccaactccttgagaaagagcactctggatgtcatgcttgacttagagatgacaaggttgaagacttgtcagaatgttcaggctattctctaaaa

SEQ ID NO: 280757 - DNA, 338 bp, Glycine max
  unsure (1)..(338): unsure at all n locations
ctccaaggtcagaacctgaaggccttccatgagagcctgatatctttgtcaccaccaccggtaacaaggacatcatcatggttgaccacatgaggaaaatgaagaacaatgccattgtttgcaacattggtcactttgacaatgagatcgacatgcttgggctggagaactaccccggcgtgaagcgcatcaccatcaagccccaaactgacagatgggtctnccctgagaccaacaccggtatcattgtcttggctgagggtcgattgatgacttgggatgcgccatggacaccccagttttgtgatgtcctgctccttcaccaacangtcattgtc

SEQ ID NO: 280758 - DNA, 340 bp, Glycine max
caacattttacactcttttcttcttctcgttgttgcttcgctgttgaatcatggatcagaaggtcgatttcagcgctccccattccatgggaaccactatcatcggcgttacttacaacggcggtgtcgttctcggagccgactctcgaaccagcaccggagtgtatgttgccaaccgagcatcggacaaaatcactcagctcactgataatgtatacgtgtgtcgctctggatcggctgctgattctcagattgtctctgattatgtgcgttacttcctccatcaacacacaatacaacttggacaacctgcaacagttaaagttgctgcaaaccttgt

SEQ ID NO: 280759 - DNA, 123 bp, Glycine max
  unsure (1)..(123): unsure at all n locations
tgattgnagaagatgccgatcagatacatcgccatcggaangcctgaagaggctactcacnccgacacgttgaaggcggggntggctgagttcatnnnnaccttgatcttcgtgtcgccggtc

SEQ ID NO: 280760 - DNA, 341 bp, Glycine max
taacaacaaggacattgtgctgtggcacgttgtgggaattcatcatgttccagcacaggaagacttccccataatgccattattgagcactgcattcgagctcaggccaaccaatttcttcgagaggaatccggttcttaaaacactttctcccccggatgtccaatggcctggttgccccaagtaaaactagctagccagccatttccattatattagtgtgcttcgagtgctacaactagatgtgttccttggataatgtgaaatgcgatctgcttattgcatgtgcaagaataatgatttgatatgtattgctattattatatcaatgagaagtttac

SEQ ID NO: 280761 - DNA, 336 bp, Glycine max
  unsure (1)..(336): unsure at all n locations
aggatgtgacactcccaaatgagggtgaggagatccctcttaangggcgtgaccttgtggttggaaaggtgtattccaagatcatggagantgagtctcgtctgttaccttgtgggcttcatgtcattggtgagcctccctcagccttggaagctgttgctacactggtcaacattgctgctcttgatcgtcctgaagatggtattcttctcttccatcaatatagctgacactgtaggaagagatatagaagatgtgtatagaggaagtaacaaaggaatattgaaggatgtggagctcttaggcaaataaccgaggcatcacgtggagcatcac

SEQ ID NO: 280762 - DNA, 338 bp, Glycine max
gtgaagcactgggtaaccctaaatgaaccatatggctacagcgtgaatggctacagtggtggaaattttgcaccaggtagatgttctaactacgttggaaaatgccctgctggtgattcttccaccgagccctacattgttaaccaccacttaatacttgctcatggagcagcagtcaattgctacaagaacaaataccaggctcatcagaaaggacaaattggagtcaccatagtgacttcttctttgaaccaaaatctaatagtgatgctgatcgcaaggcagcaaggcgagctctggactttatgtttggctggtttgctaatcccattacattt

SEQ ID NO: 280763 - DNA, 200 bp, Glycine max
  unsure (1)..(200): unsure at all n locations
gatggcnagcgtncnagggcagctcgtgtgggagatcgncaagnaaaacaattccttcttggncaagcagtttggaaggggcacccagagcgtcgaattcagcagagagagcaacaatctctacaacctcaattcgttcaagtactctggtttggcaaagaaganaactgttactgttcagcctgagggcaaagatcagg

SEQ ID NO: 280764 - DNA, 336 bp, Glycine max
atcttatccctctaatcactctagctgttgcaaatttctactatttttcaatggcttctgcagatgttgagttccgttgctttgttggtgggcttgcttgggtcaccggcaacgatgccctcgagaaagccttttcaatctacggcgacatcgttgaatcgaaggttatcaacgaccgtgagactggaaggtccagaggattcggatttgtgaccttcgcctcagagcagtcaatgaaagatgcgatcgcaggaatgaacggccaggaccttgacggtcgtaacatcactgtcaacgaagctcagacccgcgccaccgtggtggtggtggaggcgt

SEQ ID NO: 280765 - DNA, 315 bp, Glycine max
  unsure (1)..(315): unsure at all n locations
tgttgatcttggaggtggatctgttcaaatggcttatgccatctcagagacagangctgccatgggctccaaaagtagtagatggtggggatccatatctcaaggagatgttcctgaggggaaggaaatactatctctatgttcacagttacttgcactatggtttactagctgctcgtgcagagattttaaagattctgatgatgctgaaaacccttgtgtcatatctggctatgatggatcctacaactatggaggaaagtcgttaaggctcatccggctcttctggtgcagcttaaatgatgcnaaagtgtt

SEQ ID NO: 280766 - DNA, 336 bp, Glycine max
gctttcctcctatgcaccagttatctctgctgagaaggcctaccatgaacagctctcagtggcagaaattaccaacagtgcttttgagccatcgtccatgatggccaagtgtgatcctcgtcacggaaagtacatggcgtgttgcctgatgtaccgtggtgatgttgtgcccaaagatgtaaacgctgctgttgccaccatcaagaccaagaggaccattcagtttgtggattggtgccctactggtttcagtgtggtattaactaccagccacctaccgttgttctggaggcgaccttgccaaggtgcagagggcagtttgcatgatttcaactc

SEQ ID NO: 280767 - DNA, 337 bp, Glycine max
  unsure (1)..(337): unsure at all n locations
ggcgcagagtagagcagcagagaagagagaaaacggcactgcagccgtagaaggaaaaccgaccatggtgcacgtctccttttacaggaactatggtaagacgtttaagaagccccgccgtccgtacgagaaggagcgtctagacgcggantgaagctggtgggggagtacgggctgcggtgcaagagggagctgtggagggtgcagtacgcgctcagccgcatccgcaacaacgcgcggaatctccttaccctcgacgagaagaacccgcgccggatcttcgaaggcgangctcttctccgcagattttcngctacggactcctcgacgagactca

SEQ ID NO: 280768 - DNA, 334 bp, Glycine max
  unsure (1)..(334): unsure at all n locations
gcacatttgcttgatggccgggctagtgctggtgcaagtgttgattcagctagacagaaccttgctgcaacttttgttaatgcatttgtaaatgctggctttggtcaggataaattaatgactgttccatcagattcttcaagcagtgcttcttctggaaattggcttttcanaaataaggaacatgggnagactantgctgcagctagtctgggtatgatnntactctggggatgttgactcgggacttgctcaaattgacaagtacttccatagtaatgtaancatgncattgcngngcatantgggnnntggnattgnnaatntagtaacc

SEQ ID NO: 280769 - DNA, 268 bp, Glycine max
ctcagtacctgcatacttcgaatacacaacttgtgcaccagtcttcacactaatctctacattgttggtatccttgaaactgatgacatcaaggatcttaaacccttgaatgatagagtcctcataaaggttgctgaagctgaggaaaaaacctctggcggtttgttgcttacagaggcaaccaaggacaaaccttcgattggaacagtgatagcggttgggccggggcatctggacgaggaaggcaacagaaaacctttgtccgtga

SEQ ID NO: 280770 - DNA, 222 bp, Glycine max
aagaatctgtcatgaagcgtacaacactagtggctaacacttcaaacatgccagtggctgctcgtgaagcttcaatttatacaggaatcacattagctgagtatttcagagatatgggttataatgtcagtatgatggcagattctacatctagatgggcagaagcattgcgtgaaatctctggacgactggcagaaatgcctgcagatagtggatatcctg

SEQ ID NO: 280771 - DNA, 117 bp, Glycine max
  unsure (1)..(117): unsure at all n locations
caatatattccattctctctgtgtatttccctacctctcccttcaagatgcagatcttcgtcaagaccctcancggcaagaccatcacccttgaggtggaaagctctgacaccatcg

SEQ ID NO: 280772 - DNA, 269 bp, Glycine max
  unsure (1)..(269): unsure at all n locations
caaaaatgtctcacttcggacgttcgggtcccccagacatttccgacacttactctcttctcgttctgaacatcaccttccgtaccaccgccgacgacctattccctctcttcgacaagtatgggaaggtcgtcgacatcttcatccccaaggatcgaaggactggtgaatcgaggggttttgcgttcgtgcgttacaagtatgctgatgaggctcagaaggccgttgagaggctcgacgggagaatggttgatggcanttntcaaagg

SEQ ID NO: 280773 - DNA, 138 bp, Glycine max
  unsure (1)..(138): unsure at all n locations
ctatnttcctgtccaagttctttgaataaaagnctgaatgtgnnctctctgcactacaatatntgtgattctgaccaagtnggttctatttgtttgatggccatcttgcacgncctgatcttatngtgttcaagtgac

SEQ ID NO: 280774 - DNA, 212 bp, Glycine max
  unsure (1)..(212): unsure at all n locations
aaaaatggggtgtttccatctcnnagtgactagtctgtgctttgtagtggttgtggttggagtgcttccactctccttagatgcacaactagatccctcgttttacagagacacgtgtcccaaggttcactccattgttcgcgaagtggtgaggaacgtttccaagaaagatccccgcatgcttgcnagtctcattagacttcactttcatg

SEQ ID NO: 280775 - DNA, 275 bp, Glycine max
gcagcaaaaggaccgggttggtaggctcccaggtcaaggcttcaacatcagcttcgcacactatgctgggtacatcaccgtcaatgagaaagctgggagaacactcttctactggttcattgaggcacttgaagatcctcattctaagccccttgttttgtggctcaatggagggcctggatgttcgtccattgctttcggacagtcagaagaagttgggccttttcatataaattcagatagcaagaccctccatttcaatccctattcttgga

SEQ ID NO: 280776 - DNA, 261 bp, Glycine max
  unsure (1)..(261): unsure at all n locations
ctagctaggttgaaaatagtttggttttgtagtaagtgaggtgaggtgccaaaatggngaagataactcttggtactttcgatgactcttttggtgttgcctctcttaaggcttatttggcagagttccatgcaactctgattttcgtgttcgctggtgttggttcagccatcgcttacaacgagcttacaaaagatgcagccttggatccaacggggctggtggcagtagctgtggcccatgcatttgcactgtttgtag

SEQ ID NO: 280777 - DNA, 125 bp, Glycine max
  unsure (1)..(125): unsure at all n locations
gagctataagctagtttatcgtgaggngaatatgaagttgtttgttttctttgttgctgcagtagttttggtagcatggccatgccatggcgcaggctaccaaaggttccctctccgaatgaaaa

SEQ ID NO: 280778 - DNA, 134 bp, Glycine max
  unsure (1)..(134): unsure at all n locations
aacagtgtgatgaaaatgaaggtccttgttttcttcgttgctacaattttngtagcatggcaatgccatgcgtacgatatgttccctctccgaatgaacactggctatggtgcccgtactccggaggtgaaatg

SEQ ID NO: 280779 - DNA, 249 bp, Glycine max
gtgaatcaagaaccgctctgctatggctgctctgcaatacttggaatcgctgcgtaattcgcaccctgagctctccgattggtacaattcgctggcggatctgtaccagaagaagctctggcaccagctcactctcaagctcgagcagtttgtggctctcgccgtcttccaggctggtgatgctttaatacaattatatcacaatttcatcacagactttgagacgaaaatcaaccttctcaagcttgc

SEQ ID NO: 280780 - DNA, 208 bp, Glycine max
tgacagatggaagttcgaagaggaaaagctattggacaactgaggttgaaactgccaagactgaaaatgatgcaaagataatacttgggttgagccctggtgagctttcagtggtgaatcctaacaagaaaacctctgttggaaatgatgtgggataccgtttgattccagcaatcccagctcatcctcttctcacagatgacgatta

SEQ ID NO: 280781 - DNA, 269 bp, Glycine max
tgacatggtgctggttgtgcctcatggtacctatgctgttaggcttggcaacgaagcttccattaagcagaagatccaagttgtgaagggcatgttctactcattaacattcagtgcctcacgcacttgtgctcaagaggagaagctcaacgtgtcagtggtgccatccaatgagaagagtgattggggagtgtttcccattcaaactatgtatggaagcaatggttgtgactcttatgcatgtgggttccgagcagattaccctcgag

SEQ ID NO: 280782 - DNA, 192 bp, Glycine max
gctgttagggacatgcgtcaaactgttgctgtgggagtcatcaagaacgttgagaagaaggatcctaccggagccaaggtcaccaaggctgcccagaagaagaagtgaatcgtgcgggctggttcatcaggggatgttggttacaataaatgttggtttcttttctgtactcttgtgtcttcttttctaggg

SEQ ID NO: 280783 - DNA, 174 bp, Glycine max
gaaagctgcttctatcttgagtagcaatgattctccggttattttggctaaagttgatgccaatgaggaaaagaatagagaacttgcaagacaatttcaggttcagggatttccaacgattaagattctaagaaacgggggcaaggttgttcaagattacaaaggtccccgtga

SEQ ID NO: 280784 - DNA, 183 bp, Glycine max
aagagaatggctcccaagggtttaatctttttggctgtgttatgcttctcagcactgtcactgagtcgttgtcttgcggaggataatggacttgttatgaacttctacaaggaatcatgccctcaggctgaagacatcatcaaagaacaagtcaagcttctctacaagcgccacaagaacact

SEQ ID NO: 280785 - DNA, 170 bp, Glycine max
gagagagagagatccatcgatcaattaatttccaatggccgatcagctcaccgacgaacagatctctgagttcaaggaagcctttagcctcttcgacaaggacggcgatggttgtattaccaccaaggaacttgggactgtgatgcggtcgcttgggcagaacccaactg

SEQ ID NO: 280786 - DNA, 204 bp, Glycine max
gggaagaagacgtggaggaagaggaggacgaagaagacgagtatgacaagagggtcaaagaggttcatgcaagtggagaatttcaaatcagttaagcactataataattcttgtgtacttggttaaagtattttttttaatgctagaagtcatctatttatgtgtactataatttataataactactactataaaccatcgagg

SEQ ID NO: 280787 - DNA, 258 bp, Glycine max
atacgtttgagtctggaaggccatttcgccctgttatgtttgaaggtgtcctaaaaaattttactccggatgtgccaaatagcatttcaggaagaccaagacaggaagatgctcaggaatttctgagctttgtaatggatcaaatgcatgatgaattactgaagcttgaaggacagtcttcaagtcttaatggtagcaaatcttctctggtttcttcggtggaagatgatgaatgggaaacagtggggccgaaaataa

SEQ ID NO: 280788 - DNA, 201 bp, Glycine max
  unsure (1)..(201): unsure at all n locations
ttagccatatctttacttcccaaaacttgctctacaatgagtntccttcgttcttttgcaagaaacaaggatatatcaaaagtaggacgcagaggtatccattgcatgcagaaactatgtgcagaaaaaatatctcctgattcactagagaaggcccaaaatcgtgtgatagatgctgcactcacacttgttcnagaaaat

SEQ ID NO: 280789 - DNA, 264 bp, Glycine max
  unsure (1)..(264): unsure at all n locations
tatagaaaaaacgacattcattcatctatggctacccttattgctcccagcaaccactctccccaagaagacgctgaggctctcagaaaggcttttgaaggatgggggactgatgagaaaactgtcatagtaatattgggtcatagaactgtttatcagaggcagcaaatcagaagagtctatgaggaaattttccaggaggatcttgtgaaacgcctagagtctgagatcaaaggagactttgagaaagccgtgtancgatgg

SEQ ID NO: 280790 - DNA, 198 bp, Glycine max
  unsure (1)..(198): unsure at all n locations
gaacagaagaagaaggtaaatttcttatctgctgatgattttgaaccccctcttatccctcccaagacaatcccagatcctgatgataaaaaacctgaggactgggatgagagagaganaattccagactcaagtgcagtaaagccagatgactgggatgagaatgcacccttggaaattgttgatgaagaagctgag

SEQ ID NO: 280791 - DNA, 219 bp, Glycine max
  unsure (1)..(219): unsure at all n locations
atcaacttgggaggttaaagagacggcaacgttgtgctgtccgccttgaccgagccagagcttcgtcttggccctggattttgccctgnaaaactaatcccagtcacaacagaaataatcaatggcaccgaaacagaccaaggctgagaagaagatcgcttacgatgcgaantgtgcgacctaatggaggagtacggccaaatcctcgttgtaaactcc

SEQ ID NO: 280792 - DNA, 233 bp, Glycine max
gcaagtgttgaaatcgatgatcaccctatgcaaattgaagaaacacagtacccgaaaaccttcttctataaagaagaccttcatccaggcaaaacaatgaaagtacaattcagcaagcctccctttcaacaaccatggggtgttggtacatggttaaaggagttaaagacactactaaagaaggatatagttttgaagagctatgcatcaagaaagaagccattgagggagaa

SEQ ID NO: 280793 - DNA, 254 bp, Glycine max
  unsure (1)..(254): unsure at all n locations
gtcagagaaaccctaggtaagaagaaaagatgccggctggtcatggtttgagatcccgcaccagagattccttctctcgtcctttcaggaagaagggaaccatcgccctcaccacatacctgagaacctaccacgtcggcgactatgttgacgtcaaggttaacggtgccgttcacaagggaatgccccacaaattctaccatggccgcaccggacgcgtctggaatgtcaccaaacgtgctgntggcgtcgaa

SEQ ID NO: 280794 - DNA, 260 bp, Glycine max
gttgaaattcaactctctgaatcatttgaagagcttctgtggcctcaaggccatgtcatccgtgagatgtgagtcggaatcctccttcttcggtaacaaaaccggtgctgctctacgggcgtcttttgcatccaaagctcaaaaggaaaacaaccacaactcgcagcctcaggcttcgtacaaagttgcggttcttggtgctgctggagggataggtcagccgctctcgcttctcatcaagatgtcgcctttagtttcca

SEQ ID NO: 280795 - DNA, 277 bp, Glycine max
attccccttatctttctctcttctctctccccgcccaaaccctaactccctaccctattccgctttctctcatccatcatgaaaggaggaaagtccaagaccgaatctaagagagccgatgccaaacttgctgtgaataagaagggcgccgccaccaagactaggaaacccgccggaaaggggaaggcagcgaaagatcctaacaagccaaagaggcctccaagtgctttcttcgttttcatggaggaattcaggaaggtgttcaacaaggaacatc

SEQ ID NO: 280796 - DNA, 279 bp, Glycine max
  unsure (1)..(279): unsure at all n locations
gtgagctataagctagtttatcgtgaggngaatatgaagttgtttgttttctttgttgctgcagtagttttggtagcatggccatgccatggcgcaggctaccaaaggttccctctccgaatgaaaactggctatggtgagcgttcttcggaggtaaaatgcgcaagttttaggcttgctgtggaagcacacaacatccgagcctttaaaaccattcctgaagagtgcgntgaaccaacaaaggactacattaatggcgaacaatttagatcagactct

SEQ ID NO: 280797 - DNA, 190 bp, Glycine max
  unsure (1)..(190): unsure at all n locations
tcgtgaatcgtgatttagcatttaccacaccaaaatcaatcngcggagtcagaaagccatggatccctacaagantcggccatcaagcgccttcaattctcccttctggactanaaattccggtgctcccatctggaacaataactcatcgctgactgttggatctagaggtccaattctgctggaggat

SEQ ID NO: 280798 - DNA, 203 bp, Glycine max
  unsure (1)..(203): unsure at all n locations
agaatggctcccaagggtttaacctttctggctgtgttaatatgcgtttcagcactgtcactgagtccttctgttgcgggggaagggcaaaataantcgccttgttatgaacttctacaaggaatcatgccctcaggctgaagacatcatcacagaacaagtcaagcttctctacaagcgccacaagaacactgctttctctg

SEQ ID NO: 280799 - DNA, 273 bp, Glycine max
gatttcagtgagtgatcggtgttcacttgatctcatcataatcgtcagcgtcaattgaagaagatgccgatcagaaacatcgccgtcggaaggcctgaagaggcgactcaccccgacacgttgaaggcggctttggctgagttcatctcaaccttcatcttcgtgttcgccggctcaggctccgggatcgcctacaacaagctcaccgacaacggcgctgccacccctgccggcctcatctccgcctccatcggccatgcattcgccctcttc

SEQ ID NO: 280800 - DNA, 198 bp, Glycine max
  unsure (1)..(198): unsure at all n locations
cttgtnngactagattggatcacaacagggcattgggccaaatcnctgaaagactgaccgttcaggnttctgatgtaaagaatgtcattatctggggcaatcactcatcaacccagtatcctgatgttaatcatgcaactgttgcaacctcagctggggagaanccggtccgtgagcttatangcggtgatgcctggt

SEQ ID NO: 280801 - DNA, 234 bp, Glycine max
  unsure (1)..(234): unsure at all n locations
gagtttgttgtgagctataagctagtttatcgtgaggagaatatgaagttgtttgttttctttgttgctgcagtagttttggtagcatggccatgccatggcgcaggctaccaaaggttccctctccgaatgaaaactggctatggtgagcgttcttcggaggtaaaatgcgcaagttttaggcttgctgtggaagcacacaacatccgagcctttaaaaccattccnganggg

SEQ ID NO: 280802 - DNA, 176 bp, Glycine max
  unsure (1)..(176): unsure at all n locations
ccactcaggcttccattgngangatgtctacaaaattggtggtattggtaccgtgccagtgggacgtgttgagactggtgtcgtgaagcccggtatggtggtgacttttggtcccactgggctgacaactgaggttaagtctgttgagatgcaccatgaggctctcacagaggctc

SEQ ID NO: 280803 - DNA, 216 bp, Glycine max
  unsure (1)..(216): unsure at all n locations
ctacgacatttgcaggagatctcttgacatcgaacgcnctacctacaccaacctgaaccgtctcgtttcccaggtgatatcatccctcactgcntccttgaggtttgatggancactgaatgttgatgtgactgagtttcaaaccnnnttggttccttacncaagganccatttcatgctttcctcgtatgccccngttatctctgccganaaaga

SEQ ID NO: 280804 - DNA, 270 bp, Glycine max
  unsure (1)..(270): unsure at all n locations
aacgaagcaaacggcccgcaagtccaccggcggcaaggcgccgcggaagcagctggcgactaaggcggctcgcaagtcggctccggcgaccggcggcgtgaagaagccgcacagattcaggccgggaaccgtggcgctgcgcgagatccggaagtatcagaagagcacggagctactcatncggaagcttccgttccagcgcttggtccgcgagatcgcgcaggacttcaagaccgacctccggttccagagtccgccgtctccgcgctc

SEQ ID NO: 280805 - DNA, 278 bp, Glycine max
caagtagttgagaactaagaaggagaagcaaatggcttcctcaatgatctcttccccagctgttaccactgtcaaccgtgccggtgccggcatggttgctccattcactggcctcaagtccatggctggcttccccaccaggagaccaacaatgacattacctccattgctagcaacggtggaagagtgcaatgcatgcaggtgtggccaccagttggcaagaagaagtttgagactctttcctacctgccagaccttgatgatgcacaattggcaaa

SEQ ID NO: 280806 - DNA, 272 bp, Glycine max
gaagctgttgatccgaaaaccaatttgcacttcagaggagcaagggtttttgctgtggtcgttgaggatttattagcaaaaggaatgaaaaatgctcaaaatgcaattatctccggatgttcagctggaggattggctttattctaaattgcgatcgattcaaatcactactacctgcaacaactaaagtgaaatgccttgcagatgctggtttttttatcaatgtaaaggatgtctctggagcacagcgcattgaagagttctacagtcaa

SEQ ID NO: 280807 - DNA, 273 bp, Glycine max
agggttttagcgcacttcttctagatttaaggaagatgggtaaggaaaaggttcacatcagtattgtggtcattggccatgtcgactctgggaaatccactaccactggtcacctgatttacaagcttggaggcattgacagcgtgttattgagaggtttgagaaggaagctgctgagatgaacaagaggtctttcaagtatgcctgggtgctggacaaacttaaggctgagcgtgaaagaggaatcaccattgatattgctttgtggaagtt

SEQ ID NO: 280808 - DNA, 252 bp, Glycine max
  unsure (1)..(252): unsure at all n locations
gttctattcttcttccacaatgggtatctctcgtgattccatgcacaagaggcgcgccaccggcggcaagaagaaggcttggaggaagaagagaaagtatgagcttgggaggcagccgcaaacacaaagctatcaagcaacaagacggtgaggaggaanagggttcgcggtggaaacgtgaagtggcgtgctttgaggcttgataccgggaatactcttgggggagtgaggctgtgacccgcaagacaagga

SEQ ID NO: 280809 - DNA, 270 bp, Glycine max
gtgaccccaatatacttagccatatctttacttcccaaaacttgctctacaatgagtttccttcgttcttttgcaagaaacaaggatatatcaaaagtaggacgcagaggtatccattgcatgcagaaactatgtgcagaaaaatatctcctgattcactagagaaggcccaaaatcgtgtgatagatgctgcactcacacttgttcgagaaaatacaaggcttaagaaagaactcgtgcatagtttgggaggtgctgtggcaacttcaa

SEQ ID NO: 280810 - DNA, 253 bp, Glycine max
atggcagcacttggtggcaatcgtgatgtggcaggaagccagaacagccttgagatcgatggtttagctcgctttgctgttgaagaacacaacaaaaaacagaatgcccttttggagtttaaaaggtagtaagtgcaaaacagcaagtggtttctggtaccttgtacaccatcactttggaggcaaaagatggtgggcaaaagaaggtttatgaagccaaagtttgggagaaggcatggttgaacttcaagga

SEQ ID NO: 280811 - DNA, 270 bp, Glycine max
ggaagatccagaggttattattgggagcttgaatccaaatgataccaggggaaagaccgttacttgcaaagctgccgtggcatatggtcctggagagccctttgtggtggaacgtgttcttgttcatcctcctcagaaatggaggttcgaatcaagatcctcttcacttcaatctgccacaccgatctcagtgcttggcaaggcgagaatgaggctcaacgtgcatatcctcggattttcggccatgaagcttccgggattgtggagagt

SEQ ID NO: 280812 - DNA, 259 bp, Glycine max
cagaaaaaatgggttcttcttcttctatgtggacggtgtgtgtgattttggcatcactggcctctgcagcactctgtgccaacccacgcaggccagtggatgtacaatttggccgaaactacgtgccacatgggcctttgatcacatcaaatatttcaatggtggttctgacattcagcttcatcttgacaagtacactggtactggcttccagtccaaagggtcttacttgtttggtcacttcagcatgtacataaag

SEQ ID NO: 280813 - DNA, 269 bp, Glycine max
actctttgcaacacaacaaaaaaagacaacacagagagaagcgtcttaataaacgctcttctctgaaaaacctgatttcttctcttcttctcttctctttcgtttcgatcttcgatctctgaaaatgagagagtgcattcaatccacatcggtcaggccggtattcaggtcggaaacgcctgctgggagctctactgcctcgaacacggcattcagcctgatgggcagatgccaagtgataagactgttggtggaggtgatgatgcttt

SEQ ID NO: 280814 - DNA, 271 bp, Glycine max
  unsure (1)..(271): unsure at all n locations
cttgcgtttccctttcattttccctcactttctcgctcgccaaanncccctctctctcctccaatggccgaccagctcaccgacgaccagatcgccgagttcaaggaggccttcagcctcttcgacaaggacggcgatgttgtattactactaaggaacttgggactgtgatgcggtcactagggcaaaacccaactgaggcagaactgcaggatatgattaatgaggttgatgctgatggcaatggaaccatcgacttcccagagttcct

SEQ ID NO: 280815 - DNA, 270 bp, Glycine max
agccaccaccagagggtcgcttgcccgatgccactaagggttctgaccatttgagagatgtgtttggcaaagctatggggcttactgaccaagatatcgttgctctatctgggggtcacactattggagctgcacacaggagcgttctggatttgagggtccctggacctctaatcctcttattttcgacaactcatacttcacggagttgttgagtggtgagaaggaaggtctccttcagctaccttctgacaaggctcttttgtctga

SEQ ID NO: 280816 - DNA, 273 bp, Glycine max
gctagaagcaataagatgaaaatgaaagtgcttgttttgtttgttgctacagttttggtagcatatgaatgccatggctcagactaccagaagttccctctccaaatgaaaactgggtttggtgggcaatacagcaatgggtggcatgtgccagttggaggcttggcgtggaagcaaacaacgtagtcaagtggcaaactgttcctgcagcttgcggagagtacatagctgactacgttctaggagaccaatatagatcagattccaaaacag

SEQ ID NO: 280817 - DNA, 265 bp, Glycine max
ggggttgtcgttcacgaagctgttcagcaggttgtttgcgaagaaggaaatgaggattctgatggtaggtctcgatgctgctggtaagacaaccatcttgtacaagctcaagcttggagaaatcgtcaccactaccccaccatcggatttaatgttgagactgtggagtacaagaacatcagcttcactgtgtgggatgttggtggtcaggacaagatccgtccactgtggaggcattatttccagaacactcaggtctcatttt

SEQ ID NO: 280818 - DNA, 266 bp, Glycine max
tttaatgttgacccagaagcagtcataagtcaagccttgcagacaggagggggacccaatgtttcagatgcatacaccatcaatggacttcccgggcctttgtataattgttcttctaaagatacatacacattaaggtgaagccaggcaagacatatctgctaagactaatcaatgctgcactcaacgaagagcttttcttcagcatagccaaccacaccctaactgtggttgaagcagatgccagatacaccaaaccatttgac

SEQ ID NO: 280819 - DNA, 271 bp, Glycine max
  unsure (1)..(271): unsure at all n locations
aaatgtctaggcaatctagcagctgtcaaaacattgggtctttcttgnntgacataaactatcagtttgacagaggccagtatttggctttggatgagggagatgcccaagttanncttgagtattttaagcatgtaaaaaggagagtcccaacttcttctattctatagatttaaatgaagagcagcgcttaagaaatctattttggattgatgcaaaaagtatcaatgattatctcagctttaacgatgtagtttcatttgataccact

SEQ ID NO: 280820 - DNA, 273 bp, Glycine max
  unsure (1)..(273): unsure at all n locations
agagtgtttggntgaaagtagcanagangnttcctttcgggcnaaagggncaaaagatnaaggggactatggtgnttatgcagaagaatgtgtnggatatcaacagcatcaccantgntggagggatcgttgaccaaggcttaggcttcataggcagtgcagtcgatgcacttactnttgcagccaccaanatctccatccnnttgantagtggtaccaaggctgatggtgnganaggnaaaattgganagagtacaanttnangacgaaaga

SEQ ID NO: 280821 - DNA, 274 bp, Glycine max
  unsure (1)..(274): unsure at all n locations
taattgcaagaatggcacttcgttgcttggtgatgtccctttctgttctcttcactcttggtcttgcgagagaaagccatgccagagacgaagagtatnggcacgctgnntggccaaacactcccattccaagttcattgngagancttctaaagcctggccctgcaagtgttgaaatcgatgatcaccctatgcaaattgaagaaacacagtacccgaaaaccttcttctataaagaagaccttcatccaggcaaaacaatgaaagtacaatt

SEQ ID NO: 280822 - DNA, 265 bp, Glycine max
gctgaaaacatacaaggccaaattggttgtgttcccaagacgggcacagaaggttaaggctggtgattctactcccgaggagcttgcaaatgcaacgcaagtccagggttctttcttgcctattgtgagggagaaccaactgttgaacttgtaaaggttacagatgacatgaaggctttaaagcttattacaagcttcgacttgaacgcacaaacaaacgccattatggtgccagactgaagaagctgccgaagctgagaagaag

SEQ ID NO: 280823 - DNA, 262 bp, Glycine max
  unsure (1)..(262): unsure at all n locations
tcagttccgttgttgtgttgtgtgctgcaacacaatcggtggtctgagaaatcttgtttgtgttgggtttgttatggctcggagagcagaggaagagtacgattacangttcaaggttgtactgatcggtgatccggtgttggaaaatccaatcttctgtcccgattcactcgcaacgagttttgcctcgaatccaagtccaccattggagtcgaattcgccactcgcatcttcaggtggagggaagaatgtgaaagctcaa

SEQ ID NO: 280824 - DNA, 264 bp, Glycine max
ggcaggtactcggtgaagcggttcaggaaggcgcaatgccccattgttgagaggctgaccaactctctcatgatgcacggtagaaacaatggcaagaaactcttggctgttaggatcatcaaacatgctatgggattattcatttgttgactgaccagaaccccattcaggttattgttgaagctgttgtcaacagtggtccacgtgaagatgcaacaagaattggttcagctggagttgttaggagacaggctgtggatatct

SEQ ID NO: 280825 - DNA, 264 bp, Glycine max
  unsure (1)..(264): unsure at all n locations
aagcttgctactgagtttccacactgcataccttatngtcttccgaattcgaagttaatttgcaagatggctaaggaaaaggctcanatcaacattgtggtggttggtcatgtggaccctgaggaggcaaccacattaacgagctgaagaagcctgttgtggagaaagaagctccagggcatgccatatgagggcatgcacgtacggcctcggaggggaaccagaaaattatgttaacaaaataatctggaaccctaatgtatc

SEQ ID NO: 280826 - DNA, 265 bp, Glycine max
aaagtttcttcctttctctgctctttgccttctctgacacatttggtgccttgtagagcgtgttttggcaggaaggtggtatggcgaaggacgttgaggttgctgagcgtggctccttctctgggaaggactaccaggaccctccaccagcaccactcattgatgctgaggagctcacaaagtggtccttttacagggctctcattgctgaattcattgccatttgctcttcctctacattactgtgctcacagtcatagggtac

SEQ ID NO: 280827 - DNA, 269 bp, Glycine max
  unsure (1)..(269): unsure at all n locations
tgcagcatcgtanagcaataagggaannatggtgtcgctganactgcagangcgcctctccgcaagcgtgctcaagtgcggcanaannaaangttnggcttgaccccaatgaagtcaacgaaatctccatggccaatctcggcaaaacatcaggaagttggttaaggatgggtttatcatcaggaagccaaccaagattcactcccgctcacgtgctcgtaggatgaaggaggcaaagaggaagggccgccactccggttatggtaaac

SEQ ID NO: 280828 - DNA, 272 bp, Glycine max
  unsure (1)..(272): unsure at all n locations
ctcaaacctgaaatagtgnnagacttccgtaactatgctgacttttgcttcnagacatttggtgatcgggtgaagcactgggtaaccctaaatgaaccatatggctacagcgtgaatggctacagtggtggaaatttgcaccaggtagatgttctaactacgttggaaaatgccctgctggtgattcttccaccgagccctacattgttaaccaccacttaatacttgctcatggagcagcagtcaattgctacaagaacaaataccaggct

SEQ ID NO: 280829 - DNA, 271 bp, Glycine max
  unsure (1)..(271): unsure at all n locations
aaaccctactcattctccatacctcaacgaagaggttaaagagacggcaacactttgctgtccgccttgaccgagcagagcttcgtcttggccctcgattttgccctaaagtactctcantcacaacagacaccgtcgtgtcgtcgtcgtcatcaatggcaccgaagcagaccaaggctgagaagaagatcgcttacgatgcgaantgtgcgacctaatggaggagtacggccagatcctcgttgtgaatccgataagtgggatcgaacca

SEQ ID NO: 280830 - DNA, 264 bp, Glycine max
attgcaagaatggcacttcgttgcttggtgatgtccctttctgttctcttcactcttggtcttgcgagagaaagccatgccagagacgaagatttttggcatgctgtttggccaaacactcccattccaagtcattgcgagatcttctaaagcctggccctgcaagtgttgaaatcgatgatcaccctatgcaaattgaagaaacacagtacccgaaaaccttcttctataaagaagaccttcatccaggcaaaacaatgaaag

SEQ ID NO: 280831 - DNA, 223 bp, Glycine max
agataactaagctaaaggtgaatgaaaaatttgcctgcagtgtaatttcatctgggcaaagcttttatagtttatagttataaggctttctaaaaagtgttgcgtattgtattatcttgaatgctgtgattgaagtcttaataaaagtgtttcctttatcagttcataatgaatgcaaagtccattattttaggctgtattttatttcacttttaattagctg

SEQ ID NO: 280832 - DNA, 263 bp, Glycine max
  unsure (1)..(263): unsure at all n locations
gaacgtgaaaatgtcgatgaaccccttctgcgagatcgctctcgaagaagcccttcgcatcagagagtctggcttggcctccgaggttgtcgccgtcaccatgggaccctctcaatctctcgacacgcctccgaccggccttgccatgggagcngacagaggcatccacgtcgactcctctgcttccctctaccctctctctgttgccaaaattttgagaaaatcgtcgagattgagaaaccgctcttctcatccttggcaaa

SEQ ID NO: 280833 - DNA, 262 bp, Glycine max
attaaggaaaagggcaatgcattagaagttgttttcatctcaagtgacagagatcaaacctcctttgatgaattctttgcgggaatgccatggttggcacttccctttggggactcgaggaagaaattccgagtcgcaaattcagggtatctggcatccccatgcttgtggccattgcatcaagtggtcagacattgacaacaaaagctcgagatctggtttcactctatggagcagatgcatatcctttcaccgaggagag

SEQ ID NO: 280834 - DNA, 266 bp, Glycine max
ggccctcgcattacggcccggcgggcccccgactttccgtttaaccggaatcgggcccccacagcccgacaacaccgacgcgctgcagcaggtgggcttgaaattagcccaattggcccaaatcatcggcgtcagttcgaattccgcggcttcgtttgcaacagcctcgcggatctcgacccgaatatgctcgagatccgacccggggaagccgtggcggtgaattccgtcttcgaactccaccgcatgctcgcccggtccggatc

SEQ ID NO: 280835 - DNA, 268 bp, Glycine max
cgagataactagaaacagtgtgatgaaaatgaaggtccttgttttcttcgttgctacaattttggtagcatggcaatgccatgcgtacgatatgttccctctccgaatgaacactggctatggtgcccgtactcggaggtgaaatgcgcaagttggaggcttgctgtggaagcacacaacatctttggctttgagaccattcctgaagagtgcgttgaagcaacaaaggaatacatccatggcgaacaatatagatcagactccaaaa

SEQ ID NO: 280836 - DNA, 269 bp, Glycine max
  unsure (1)..(269): unsure at all n locations
gctccgcaattatcatgggcaaggtcnagatcggaatcaacggatttggaagaattggccgtttggtagccagagtggctctgcagagagacgatgttgaactcgttgccgttaacgaccctttcatcaccaccgttacatgaagnacatgtttaaatacgacagtgttcatggacactggaagcatcacgatgtcaccgttaaggacgagaagacccttctcttcggtgacaagccagtcactatttttggacacagaaaccctgaag

SEQ ID NO: 280837 - DNA, 268 bp, Glycine max
  unsure (1)..(268): unsure at all n locations
gatcagctggctttaagcctgaaaatcttgtgcaaccaaacatacctaacacctggaaggcgatggaagcactctatgactctggcaaggcncggaccatcggtgtaagcaatttttccaccaagaagctctcggattgctgctaattgctcgtgttcctcccgctgtcaaccaggtggagtgtcatccttcctggcagcaggacaagctgcaggctttctgcaattccaaaggtgtccactctctggatattcactttgggttccct

SEQ ID NO: 280838 - DNA, 274 bp, Glycine max
aaaagatgtggtggatgagagtgtttggagtgatgtggatatgcttaggagtgtaaagccttttggttggtcctatgcagtttcaaaggtgttgactgagaaggctgtgcttgaatttggagaacataatgggttggaagttgcaactgttattgctccttttattgttggtccttttgtttgtcccaagcttcctgactctattgaaaaagctctgcttatggtgttgggtatgaaggctgcaccttactctactatgtttcttcttccagtt

SEQ ID NO: 280839 - DNA, 272 bp, Glycine max
ttgacatggctgagaccttgtgtcagaagcgtgcacttgaagcttttcagctggatccagcaaaatggggagtcaatgtgcaatcattatctggatccccttctaacttccaagtttacactgctttattgaaacctcatgagagaattatggcacttgatcttccccatggtgggcatctatcgcatggttatcagactgacaccaagaagatatcggctgtatctatattctttgaaacaatgccatacagattgaatgagagcactggt

SEQ ID NO: 280840 - DNA, 265 bp, Glycine max
caacaacaggtgctgatccattctattggatgcgtgttattctcgcttcaaaccgtggaactgtcatggaacttggaatcactccgattgtgacttctgggctagtaatgcaacttctggctgggtcaaagatcattgaagtggacaacaatgtacgagaggatcgagccctgttaaacggagcacagaagctacttggtattttgatagctgttggtgaggcagttgcctatgttctttcggggatgtatggtagtgtggggca

SEQ ID NO: 280841 - DNA, 271 bp, Glycine max
  unsure (1)..(271): unsure at all n locations
gtcagagaaaccctaggtaagaagaaaagatgccggctggtcatggtttgagatcccgcaccagagattccttctctcgtcctttcaggaagaagggaaccatcgccctcaccacatacctgagaacctaccacgtcggcgactatgttgacgtcaaggttaacggtgccgttcacaagggantgccccacaaattctaccatggccgcaccggacgcgtctggaatgtcaccaaacgtgctgttggcgtcgaantcaacaagcaggttgg

SEQ ID NO: 280842 - DNA, 270 bp, Glycine max
  unsure (1)..(270): unsure at all n locations
ttgttagttggtggagatagtatggagagtcagtttgangaattagctcagagtcctgacatcataattgccactcctggtaggctcatgcaccatttgtctgaggttgatgacatgtcattgcgcacgtcgagtatgttgttttcgacgaggctgattgtttatttggcatgggtttcgccgagcagttgcatcagattcttgctcagctcggggagaaccgtcagaccttgcttttcagtgccacactgcccagtgctcttgctgaat

SEQ ID NO: 280843 - DNA, 271 bp, Glycine max
caccttttccttttcccttccgttggtgccattcgtgcagcaccggatcctctcatttctccggcgataactctcccttttccggcgaattcaccgcttcctcgatatgaatcccgagtatgactatctgttcaagctccttctgattggagactctggtgttggtaaatcatgccttcttctaagatttgctgatgattcatacattgagagctacataagcaccatcggagttgattttaaaattcgcatgttgagcaggatgggaaga

SEQ ID NO: 280844 - DNA, 272 bp, Glycine max
aacaggagatcctttaggagatggcactggtgggcagtctatttgggggagagaatttgaggatgaatttcataaaagtttgaggcatgataggcctttcacggtatcaatggcaaatgcgggcccaaatacaaatggttctcagttctttatcaccacagttgctactccatggttggacaacaagcacactgtatttggtagagttgcgaagggaatggatgttgtacaggctatagaaaaagtgaagacagacaagacagataagccat

SEQ ID NO: 280845 - DNA, 270 bp, Glycine max
gctccacaggcagcacaaccagcatctgttccttctagtggacctaatgccaatcctttagatctctttccccagggccttccaaatgttgggtctggtgctgctggtgctggctctttagactttcttcgcaacagtcaacagttccaagccttacgcgctatggtacaggctaatccacaaatattgcagcctatgctacaagagcttggcaaacaaaatcctcatcttatgcgattgattcaagagcatcaagttgacttccttcgc

SEQ ID NO: 280846 - DNA, 265 bp, Glycine max
  unsure (1)..(265): unsure at all n locations
ctctttcttcctcttcctcagtagtgcgattttcgattctcttctctgcaactatgcctaaccctaaggtcttcttcgacatgaccatcggcggtcaacctgccggccgcatcgtgatggagctctacgccgacgtgactccgagcaccgccgagaacttccgcgcgctctgcaccggcgagaagggcgccgggcggagcggcaagcccctccactacnaaggctcgtccttccaccgcgtgatcccgaattcatgtgccagggc

SEQ ID NO: 280847 - DNA, 263 bp, Glycine max
  unsure (1)..(263): unsure at all n locations
caaggaatggctgttgggagggctgtggntttaacacgatttgatggatatgaggatcttctcaggaaattggaagatatgtttaacatcaagactgagntctgtgggtccctaaaaaaatggcaagttgtctacactgataatgaagatgatatgatgatggttggagacgatccgtgggatganttctgtagtgttgtgaggaaaattttcatctacacagcagaggaggtgaagaagctttcaccgaaaataagcttcca

SEQ ID NO: 280848 - DNA, 264 bp, Glycine max
  unsure (1)..(264): unsure at all n locations
gcaccggcattgccagagactcttaaaaattacaacaagctgttgtctcttggcttcaagattgtattcttgtcaggnagatatcttgacaaaatggccgtaacagaagcaaacctaaagaaggctggcttccacacatgggagcagttaattctcaaggatccacatcttatcactccaaatgcactttcatacaaatcagcaatgagaganaatctgttgaggcagggatacagaattgttggaatcattggagaccaatgg

SEQ ID NO: 280849 - DNA, 218 bp, Glycine max
  unsure (1)..(218): unsure at all n locations
tantgcctccttgtcagaagttaaaatggcccaagaaactttcctattcacatctgaatcagtgaacgaggggcaccatcgacaagctctgtgaccagatctccgatgctgtgctcgatgcatgcttggagcaggaccctgacagcaaggttgcctgtgaaacctgcaccaagnaccaacatggtgatggttttcggagagatcacaaccaaggccaa

SEQ ID NO: 280850 - DNA, 274 bp, Glycine max
  unsure (1)..(274): unsure at all n locations
cctttaccaccattctagatatcagagaactttggcagctctcttangtttttaaaaaacaccacgcaaacagcaagatggccacttccgacagtaacatgctactaaattatgttccntttatgtgatgctcccactcggagttntcaatgttgacaatgtttttgaagacccaganggccttaaagaacagctcttgcagcttcgagctgcgggtgttgacggggttatggttgatgtgtggtgggggatcatagaactgaaggggcctaac

SEQ ID NO: 280851 - DNA, 271 bp, Glycine max
tttatcttagaggttgacaaacaagagtttgggttgaaaccaatgaattgcccagggcactgcctgatgtttaaacacagggttcgatcatatagagaacttcctcttcgctttgctgattttggggttttgcatcggaatgaggctagtggtgccctgagtggattaacacgtgttaggagatttcagcaggatgatgcacatattttctgcagggagtcccagataaaggatgaagtgaggaatggcttgaatttcatcaattatgtct

SEQ ID NO: 280852 - DNA, 269 bp, Glycine max
cacacgtgataacacacgttttgtgaatggaactgttgttggagacagaaatatgttccaggtagaccaaggccttggcattggcagccagttccccttctttaaccgtcaccaactaactctgacacgatttatccagttgatggcagtggaggaaggggctggtaaaccacctccaccagtgcttgtcctccatggccactatggtggttgtgtaggtgatctccccagctatgatgcttttactcttggggggcctattctgtaag

SEQ ID NO: 280853 - DNA, 270 bp, Glycine max
  unsure (1)..(270): unsure at all n locations
gcagcggcaacagaggagagaagatgaagttcaatccacgagtntcgagcagccgccgcaagagccgaaaggctcacttcacggcgccgtcgagcgtgcggagggtgctgatgagcgcccctctgtcggcggagtccggtcgaagtacaacgtgcggtcgatcccagtccgcaaggaggacgaggtgcaggtggtgcgcggaacatacaagggtcgcgaggggaaggtgacgcaggtgtaccgtcgcaagtnggtcatccacatcgagcg

SEQ ID NO: 280854 - DNA, 265 bp, Glycine max
  unsure (1)..(265): unsure at all n locations
aacagtgcattcgagccatcatctatgatggccaagtgtgntccccgccatggcaaatacatggcgtgcagtctcatgtacagaggtgacgtagtgcctaaagangttaatgcagctgttggaattatcaagaccaagcgcactattcaatttgttgactggtgcaccaccgggttcaagtgtggaatcaattaccagcctccgactgttgttccaggtggtgatcttgccaaggttcagagggccgtgtgcatgatctccaatt

SEQ ID NO: 280855 - DNA, 255 bp, Glycine max
  unsure (1)..(255): unsure at all n locations
cttatctttctctcttctctctccccgcccaaaccctaactcccnaccctattacgctttctctcatccatcatgaaaggaggaaagtccaagaccgaatctaagagagccgatgccaaacttgctgtgaataagaagggcgccgccaccaagactaggaaacccgccggaaaggggaaggcagcgaaagatcctaacaagccaaagaggcctccaagtgctttcttcgttttcatggaggaattcaggaaggtg

SEQ ID NO: 280856 - DNA, 264 bp, Glycine max
  unsure (1)..(264): unsure at all n locations
gaaagctgnttctatcttgagtagcaatgattctccggttattttggctaaagttgatgccaatgaggaaaagaatagagaacttgcaagacaatttcaggttcagggatttcnaacgattaagattctaagaaacgggggcaaggttgttcaagattacaaaggtccccgtgaagcagatgatattgtngactatttgaagaagcaaagtggtcccgcaacagctgaaattaaatctgcagatgatgctagtgctttgattgg

SEQ ID NO: 280857 - DNA, 227 bp, Glycine max
gacattgcttctggggatcttccccctactcaccccatcagattgggtctcgctctcaacttctccgtcttctactatgaaatcctcaaccagtctgacaaagcgtgtgccatggctaaacaggtcaacttcatttcgacgtttttgactttcttgtttcggcaatcaattatcctttccccttttattttactcggagattccacttccgtttaacatttttggaa

SEQ ID NO: 280858 - DNA, 262 bp, Glycine max
aaatgaagttcaacattgcaaatcccaccactgggtgccagaagaagctggaaatcgatgacgacctgaagcttcgggcattttgggacaagaggatctcccaggaggtccttggtgacgccctgggtgaggagtttaaaggatatgttttcaaaatcactggtgggtgtgacaaacaaggattcccaatgaagcagggagtgttgacccctggtcgtgttcgactcttgctccatagaggaactccttgtttccgtggata

SEQ ID NO: 280859 - DNA, 262 bp, Glycine max
acgaaaccctaggttttagtgagtggcgaaaatggcggtgattttttcaagtgcaataccaggaggggcagcaccagcagcaatcgagcaagtgcagtgcttcgggcggaagaagacggcggtggcagtgacctactgcaagcgcggccgaggcctcattaagatcaacggctgcccgatcgagctggtggagccggagatcctccgcttcaaggccttcgagccaatcctcctcctcggtcgccaccgcttcgccggcgtg

SEQ ID NO: 280860 - DNA, 267 bp, Glycine max
  unsure (1)..(267): unsure at all n locations
gantcctcnnanatctanngttacctcttcctctgcatgatctttctcncttccgnnactcncattctcggttntggctactgtggcaaaccccccaaaaagcacaagcctggtaaaacaccaaagacacccaaaacacccgttgttaagccaccagtcaccatcnctcccattaatgttcctcccgtngttcttncaccaatagtgaagcccccaggtattctccctccaattccaattattaacccacnaaccacaccagggnag

SEQ ID NO: 280861 - DNA, 260 bp, Glycine max
  unsure (1)..(260): unsure at all n locations
tagaaacagtgtgatgaaaatgaaggtccttgttttcttcgttnctacaattttggtagcatggcaatgccatgcgtacgatatgttccctctccgaatgaacactggctatggtgcccgtactccggaggtgaaatgcgcaagttggaggcttgctgtngaagcacacaacatctttggctttganaccattcctgaagagtgcgttgaagcaacaaaggaatacatccatggcgaacaatatagatcagactccaaaa

SEQ ID NO: 280862 - DNA, 261 bp, Glycine max
taaacttacccttcttctctctgtgtgtgtgcgcatcaaacgacaccagaagcagccatggccactgcaagaactgtgaaggacgtttctcctcatgagttcgtcaaagcttactcttctcacctcaagcgatctggcaagatggagctgccagagtggactgatattgtgaaaactgcaagatttaaggagttggctccttatgatcctgactggtactatgtcagagctgcttccatggcaagaaagatctacttgaga

SEQ ID NO: 280863 - DNA, 262 bp, Glycine max
  unsure (1)..(262): unsure at all n locations
acaactcaagggaaagccatccctgatgcctccgactacaagggccgccccgccgagcgntctaaaaccggtggttggaccgcttccgccatgatattaggaggagaagtgatggagaggttgacaacactaggcatcgcggtgaatttggtaacatatttgactgggaccatgcatttgggtaatgctgcctctgccaacgttgtaaccaacttcttgggaacctccttcatgctctgtctgctcggtggcttcctcgccg

SEQ ID NO: 280864 - DNA, 265 bp, Glycine max
tttcattcaccgactccttttggttgctacagagacagggagacaagacagagtagtacagattactaccaatggctaccaaggtttacattgtttattattctacgtatggacatgttgagaagctagctagagagatagaaaaaggggctgcttctgtggagggagtagaagcaaaactgtggcaggtacctgaaacattgcctgaagaagtccttgctaagttgggagcacctccaaagagtgatgttccaattattactcc

SEQ ID NO: 280865 - DNA, 263 bp, Glycine max
  unsure (1)..(263): unsure at all n locations
gctggtgaagtacaagcacgggaagaagtactgcgacaaaggatgggaatgtaagggctggtcaatttactgttgtaacctcaccattaccgattatttccagacctaccagttcgagaatctgttctccaagcggaactcgccggtngcgcacgcggtcggattttgggactaccactccttcatcgccgccgccgcgctttttgagccggaagggttcggcaccaccgggaacaagacgatgcagatgatggagatcgccg

SEQ ID NO: 280866 - DNA, 261 bp, Glycine max
  unsure (1)..(261): unsure at all n locations
cgaaaacaaatatctttcacttcttctgcatccgacgctagaagaggtgtcggaacaaacaagcttcgtttcgccggaacgatgaccggcggcggatcgacggggaggttgccaacatggaaggagagagaaaacaacaagaggagagagaggagacgaagagcgatcgccgctaagatctacaccggtcttcgagctcaggggaactacaagcntccgaagcactgtgacaacaacgaggtcctgaaagctctatnngcc

SEQ ID NO: 280867 - DNA, 263 bp, Glycine max
ctcaaccaacgctctctcttcagcctccattctacgctctcccaaccgccagtcctctgacccgaagagcgaaccataatggaagagtaaattaccggaaaccgaataaccgtttctccgtgaaagcctccgccaaagagattgcctttgaccagcattcccgctctgctatgcaggccggcattgacaagctcgccgacgctgttgggctcactcttgggcccagagggaggaatgttgtgttggatgagtttggaagtcct

SEQ ID NO: 280868 - DNA, 271 bp, Glycine max
  unsure (1)..(271): unsure at all n locations
tcatgaagcgtacaacactagtggctaacacttcaaacatgccagtggctgctcgtgaagcttcaatttatacaggaatcacattagctgagtatttcagagatatgggttataatgtcagtatgagggcagattctacatctagatgggcagaagcattgcgtgaaatctcnggacgactggcagaaatgcctgcagatagtggatatcctgcataccttgctgcacgtttagcctcgttctatgaacgtgctgggaaggtaaaatgtct

SEQ ID NO: 280869 - DNA, 269 bp, Glycine max
  unsure (1)..(269): unsure at all n locations
ccgcggagtacctgcagttcgagctggactcgctggaccagaaccttgcgaagaacgtggctggggacatcattggaaccaggaccgagctcgcggacgtnaagtccacgccgtttcagccctacagcgaggtgtttgggctccagaggttccgtgagtgcgaactcatccatggaaggtgggccatgctcgccactctcggagctctcactgttgagtggctcactggtgttacatggcaagacgccggaaaggtggagctagtagaa

SEQ ID NO: 280870 - DNA, 275 bp, Glycine max
  unsure (1)..(275): unsure at all n locations
cgnnnntagncnanngtgnttaccggcngcaagatcantatcgatacttatnggaggatgnngtgctcatggtngtggtgctttctccggcaaggaccctaccaaggttgataggagtggtgcttacattgtgagacaggctgctaagancattgtggcaagtggactngccagaaggtgcattgtgcaagtgtcttatgccattggtgtgcctgagcctttgtctgtgtttgttgacacctatggcactgganagatccctgacaaggagatct

SEQ ID NO: 280871 - DNA, 271 bp, Glycine max
  unsure (1)..(271): unsure at all n locations
ctctntctggacncaaganttaagttntnagatngagagaagtagngaanatgagatgtnaataanganaggtccatggacagagcnagaggattctcttctcttcaattacatcnnnntccacggcgaaggncactggaactctgtcgctcgctacacaggtctaaaacgaacgggcaaaagctgcagattaagatggttgaactacttgcgtccanatgttcgangtgggaacataaccctccaagaacngctcttgattctttncctc

SEQ ID NO: 280872 - DNA, 268 bp, Glycine max
  unsure (1)..(268): unsure at all n locations
gagagaagtantggcgaacatagacatcgaagggatcttgaagcagcagcagccttatgatgggcgcgttccgaatacgnaganagtgtgtactttgggccctgcttctcgatccgtagaaatgaccgagaagcttctganggcagggatgaacgttgctcgtttcaatttctntcatggcacccacgactatcaccaggaaaccctcaacaatctcaagantgccatgcacaacactggcatactctgtgccgtcatgctngacact

SEQ ID NO: 280873 - DNA, 267 bp, Glycine max
  unsure (1)..(267): unsure at all n locations
cttttgattngtgaaagganagcnaacatggttgatcaggtccaacaccctncantcatggacnnggttnctggtcagctccatctccgttctggtcttnnatctggtattagaagttatgatggagcctaccgccacccagntatgtaccanagaccctcttttgggaattactcgaatgctgcattgcagtttcctgtgatgcnnacatgcaaagctaccatggatntgtctgctactgcaacanctgcctcacccgtctttgtt

SEQ ID NO: 280874 - DNA, 267 bp, Glycine max
  unsure (1)..(267): unsure at all n locations
ggcctctaaggtggtcgcccgcatcgctcaccgcaccggcaaganagcagagctctgggccctacgtcccctacgacgtcgttgctcacccctacgcacccggagtctacgacaagaaagccccctccggttatgtccgcaacaccgatgatcctcactattcccatctcgcacgtgcnagctccaccgaggtccgctacaccactgctttcagcgacgaaaacccctccgcctgtgtcgttatgtgaaactattctctttatttgt

SEQ ID NO: 280875 - DNA, 263 bp, Glycine max
  unsure (1)..(263): unsure at all n locations
tggnatgcaaatntttgtgaagacccttantgggaagaccattactttggaggtagagagctctgncacaattgncaatgtgaaggcaaagatccaagacaaggagggnattcctccagtncagcaaaggttgantnttgcgggaaagcagcttgaagatggacgtacgctggcagactacaacattcanaaggagtctacccttcaccttgtccttngnctgaggggaggtatgcagatctttgtgaagnctttgacaggng

SEQ ID NO: 280876 - DNA, 266 bp, Glycine max
  unsure (1)..(266): unsure at all n locations
agnatcancanncccancgcgtgcagancanaggganacgcagccataggncgaagacccncgaggtgttanaggcgaattaagancnnaccataccccangtcacggttttnccgtggtgttcctgatnccaagatcaggattcacgatgtttgtatgaagaagaagggtnttgatgagtttcctgtctgtgtccatctggttacttgngngaangaaaacgtttctaggtgaggccctggaagctgntcgtattgtcttgcaac

SEQ ID NO: 280877 - DNA, 262 bp, Glycine max
  unsure (1)..(262): unsure at all n locations
ccaacttcatgtgccagggcggtgacttcaccgccgganacggcaccggtggcgagtccatctacggatcgaagttcgcggacgagaacttcataaagaagcacacgggacccggcattctatcgatggcgaacgcgggacctggcacgaacgggtctcagttcttcatctgcaccgttaagacggagtggctcgacggaaagcacgtggttttcgggcaggtngtggagggccttgacgtcgtgaaggacatcgagaaggt

SEQ ID NO: 280878 - DNA, 259 bp, Glycine max
  unsure (1)..(259): unsure at all n locations
ctgcttcttccgccactcancacttcgctccctctgtgcttcaccaaccatggccgaaatcgaagctaccgttccagatccctctcaaatcgacgtcaaacttttcaaccgctggagcntcgacgacgttgaggttactgatatgtctctggctgattacattggagtgtccccgtcaaagcatgctacatatgttcctcacactgctggtaggtactcagtgaagaggttcaggaaggcgcagtgccccattgttgag

SEQ ID NO: 280879 - DNA, 260 bp, Glycine max
  unsure (1)..(260): unsure at all n locations
ctctaaaagagatctttttctgctctttgaagaaagaanggtctttgcttgattttggagatgtctctgctctcagatctcatcaaccttaacctntccgatacnaccgagaaggtgatcgcagagtacatatggatcggtggancaggaatggacctgaggagcaaagcaaggactctcccaggaccagttagcgacccttcagagcttcccaagtggaactatgatggttccagcacaggtcaagctcctggtgaagt

SEQ ID NO: 280880 - DNA, 256 bp, Glycine max
  unsure (1)..(256): unsure at all n locations
ttatgatgaacttcgtctggcaactgaggagttcagccaggaaaacctattaggagttggaagctttggctcagtttataaaggccatctaagtcatggagctactgttgcagtgaaagttcttgacaccctaagaactggctctttgaagagtttctttgcagaatgtgaggctatgaagaactcaaggcatcgaaatttggttaagctgatcacatcatgctctagtgttgacttcaaaaacaatgattttntg

SEQ ID NO: 280881 - DNA, 258 bp, Glycine max
  unsure (1)..(258): unsure at all n locations
ctggggancttgatcatgtgaaggagattatcaagtggggtactgattattttctcaagagttttaatagcactgctgataccatcaccacccttgctgctcaggttgggcttggagatactnctggtggtgacagtccgaatgatcactattgctggatgcgtccggaggacatggactatgaccgccctgtgactgaatgccacagttgttcccgatctcgcggctgagatggctgctgccttggcttctgcttct

SEQ ID NO: 280882 - DNA, 263 bp, Glycine max
  unsure (1)..(263): unsure at all n locations
cggtggcatgatcttcgncctcgtttactgcaccgctggcatctgcagngggacacataaacccggcggtgacatntgggctgttnttggctaggaagttgtcgttgcccagggcgattttctacatcgtgatgnaatgcttgggtgctatttgtngcgctggcgtgntgaaggggtttcgaggggaaaacaaaatacngtggcgttgaatggtggtgccaactttgttgccnctggttacaccaagggtgatggtcttggtg

SEQ ID NO: 280883 - DNA, 267 bp, Glycine max
  unsure (1)..(267): unsure at all n locations
gggtttatcatctgcttcaatggggaagggaacagggagcttcggtaagaggaggaacaagacccacactctctgtgtgaggtgtggccgccgcagcttccacctccagaagagtcgctgcgccgcttgtgctttccccgctgcacgcacgcggaaatataactggagcgtcaaggcaattcgcagaangaccaccggaactggcaggatgagatacttgccgtaacgtgcctcgccgtttcaagagtggncttcagagaaggtacc

SEQ ID NO: 280884 - DNA, 262 bp, Glycine max
  unsure (1)..(262): unsure at all n locations
ccgtttctttcacttcacaaaaatganaaacatganattgtgttcggtgatgctatgcttatcactagcgttccntcttggggccacagcagaacaatgtggcacacaagctggtggagcgttatgcccaaatagattatgttgcagcaaatttgggtggtgtggtgacacagattcctactgtggagaaggttgccaganccaatgcaaatctgcaacaccctcaacaccanctccaacaacacctagtagtggtggagat

SEQ ID NO: 280885 - DNA, 261 bp, Glycine max
  unsure (1)..(261): unsure at all n locations
aagaacttcaacagcaccgccgacaccatcacccagctgggcatgcaggttggatcaggggacacctcccaaggtagcaccactcccaacgancactactgctggatgcgtcccgaggacatcgactacgaccgccccacccagacctgcaccacatgctccgatctggccgccgagatggccgcggcgttggcggcggcatcgattgtgttcaaggacaacagggcctattcgcagaagtggttcacggggcgaccacgt

SEQ ID NO: 280886 - DNA, 264 bp, Glycine max
  unsure (1)..(264): unsure at all n locations
gcaaagcaccccaggntcntggttntctccgatgaaatttatgaacacataatttatgcaccagcaactgcacacaagttttgcatctttaccaggantgtgggacagaactcttactgtgaatggattttccaaggcctttgcaatgantggttggcggcttggatatattgctggtccaaaacactttgttgcagcatgtggaaagatccaaagtcagttcacttcaggggccagtagtatagctcagaaagctgcagttgc

SEQ ID NO: 280887 - DNA, 266 bp, Glycine max
  unsure (1)..(266): unsure at all n locations
cgagcagccacacctcccgcagcagccatggttctcaaaactgaactatgccgattcagtggtgccaagatctacccaggaaaggncatcaaatttgtncgtggtgattctcaggttttcctgtttgcaaactcaaaatgtaagaggtatttccacaatcgcctgaagccttcaaagctcacctggactgcaatgtacagaaagcaacacaaaaaggacattgctcaagaagctgtgaggaagaggagacgtgctgccaaaaagcc

SEQ ID NO: 280888 - DNA, 262 bp, Glycine max
  unsure (1)..(262): unsure at all n locations
ctctcaccaacttccgctacttcctactccnaccactttctnntnncccgcanccnngggcaangtcaagatcggaatacaacggatttggaagaattggccgtttggtggccagggtggctctgcagagagacgatgttgaactcnttgccgtnaacgatcctttcattaccnccgnttacatgacatacatgtttaaatacgacagtgtncacgggcactggaagcatcacgatgtcaccgttaaggatgagaagaccct

SEQ ID NO: 280889 - DNA, 262 bp, Glycine max
gcccgagatacaagcaactctagcaccccctgccactgggaagatggtaaaaggcctttttatgtgctattccgttatttttgtaacattttactctgctgcagtttctgggtattgggtatttggaaacaaatccaactcaaacattttgaagagtctgctgccagatagtggacctcctttggctccaacttgggttcttggacttgcaatcatctttgttcttcttcaactctttgccattggtctggtttattctcaa

SEQ ID NO: 280890 - DNA, 263 bp, Glycine max
  unsure (1)..(263): unsure at all n locations
cttntcttgcggctagggttttagcgcanttnttctagatttaaggaagatgggtancgaaaaggttcacatcagtattgtggtcattggccatgtcgactctgggaaatccactaccactggtcacctgatttacaagcttggaggcnttgacaagcgtgttnttgagaggtttganaaggaagctgctgagntgaacaagaggtctttcaagtatgcctgggtgctggacaaacttnaggctgagcgtgaaagaggaatca

SEQ ID NO: 280891 - DNA, 265 bp, Glycine max
ggaagaggctgttcgcagtgttgagatgcctggtctattgtggggagcatccaaactggttcctgttggttatgggatcaagaagttgcagatcatgttaactattgtcgatgaccttgtatctgtggacacccttgttgaggagactctcacagttgagcccatcaatgagtatgtccaaagctgtgacattgttgcattcaacaaaatctaagttttcatgttgaatttcagtcattttgaagcagccaattagtttgttttt

SEQ ID NO: 280892 - DNA, 263 bp, Glycine max
  unsure (1)..(263): unsure at all n locations
tgtggatgtgtcaatgtttggngttatctatgcngnggcccagaancatgtgnggccctctggtgtgcaccattgtgntcatcagaaaggacctcattgggaatgcacagggtgtcacacctgtgatgtntgattacaagntccatgatgagaacgattgcactctacaacacccctccttggctatgggattnacatgtgtgggttggtgtttgaggacttggttggagcaaggtcgggttggnggaggttganaggaggaa

SEQ ID NO: 280893 - DNA, 260 bp, Glycine max
  unsure (1)..(260): unsure at all n locations
agaggttgggctttcttggctggtctactttgtggctttgggaatggcctccaatttatgggaggtcaagctgcaggatatgcagcagcagatgctgttcaagcacttccactagtgagtaccttttggggcattgttttgtttggagagtaccgcaaatcatcaagaagaacatatgtgctacttgggagcatgttgcttatgtttgttgcggctgttgctgtattaatggcatcatcagggcatcganaatgatcata

SEQ ID NO: 280894 - DNA, 259 bp, Glycine max
  unsure (1)..(259): unsure at all n locations
caaaccccagctgcagagcccgggaaagctgattgggaattggcattggtaganactgctagcaatttgtcaaagcagaaggcaactttaggtggtgggtttgatcctctattgntgactggcatgtatgatcaaggaatggtgaggcagcatgtcagcactacccaactgagtggagggagtgcaagcagtgtggcattgccaggacctgggaagactacaaccccatgttggctctccccgccccggatggatccgt

SEQ ID NO: 280895 - DNA, 264 bp, Glycine max
  unsure (1)..(264): unsure at all n locations
ggtttctctttctctttctcngtctgcttcntcactttctctcgtntcaatcgaaaaaaatcatgggcagaaaattcttcgtcggtggcaactggaaatgcaatgggaccactgaggaggtgaagaagattgttactactttaaatgaagctaaagtccctggagaagatgttgtagaagttgttgtgagccctccttttgtgttccttcctttgtanaaagtttgctgcgccctgatttnccatgtctcggcccaaaattgtt

SEQ ID NO: 280896 - DNA, 256 bp, Glycine max
  unsure (1)..(256): unsure at all n locations
ttcttctcactcttcagatctcnctcccttccttccatcccaaccacaaggntgctgagaagacataaaaaatggtgaagatttgctgcattggagctggctatgttggtggcccaaccatggctgtaattgccttgaagtgtcctgagatcgaggtggtcgtggtggacattgctgcaccgcgaatcaacgcgtggaacagcgaccacctcccgatatatgagcctggccttgatgatgtggtgaagcagtgcag

SEQ ID NO: 280897 - DNA, 258 bp, Glycine max
  unsure (1)..(258): unsure at all n locations
atagtatccgatcctctgtcctctcgaagctttcatcgttcaacanattctcaccatctcagtcatgggcctgctatcttgttttaggtctaccgtcctgagaaaatgttccaaaggaagctctggcatgtcaagattcctgtatacgaacaattttcaacgaaacttgatttcgtctggtggcaatgaatcgtattatgggtattttaacaggagatcatacacttcactttatatgggaactggaactgtgggtgg

SEQ ID NO: 280898 - DNA, 273 bp, Glycine max
  unsure (1)..(273): unsure at all n locations
gcattcaaggggaaccagaggatggtggttgaagcacttgaggcaatggctgagaaagaagctttggatatgaaggctgctctggagtcanaaggggaggtgaagtttcaantgtgtacacttgggaanaatgtgactattaagaagagtatgctgaccattcaaaaggagataaagaaagagcaccagcgagtttttacaccatctgtgattagaccatcatttggaattggacgtataatctattgcctctttgagcncacttctacacga

SEQ ID NO: 280899 - DNA, 272 bp, Glycine max
  unsure (1)..(272): unsure at all n locations
caagtngttgagaactaagangaaggaaatggcttcctcaatgatctcctccgcagctgtnaccaccgtncaaccgtgccggtgccggcatggttgctccattcaccggcctcaaatccatggctggcttccccacgaggaagaccaacaatgacattacctccattgctagcaacggtggaagagtacaatgcatgcnnntgtggccaccaattggcaagaagaagttcgagactctttcctacttgccagacctcgatgatgcccattgg

SEQ ID NO: 280900 - DNA, 274 bp, Glycine max
  unsure (1)..(274): unsure at all n locations
caagaacttgtttctgagagcgtgcagtcaatgagcaaacaggatnncttctggaaataagctttttcaagatgttggcctatggatatcccaaaagattagggatcattttgctgcacagaagaccctgcccataactctcaaatacatagatccaacttatatgattcgagctattccaagcaatgcttctgacaacgtgtactgcacacttcttgctcaaagtgcagttcatggagcaatggcaggttacactggctatacaagtggactt

SEQ ID NO: 280901 - DNA, 271 bp, Glycine max
  unsure (1)..(271): unsure at all n locations
tcagatcatcgccgtgcaacaaatgtcagtgccagactggattctcaacaaaagaagctcaaccttccaatcctgccaaccaccactattggatccttccctcagactgtagaactgaggagggtacgccgtgaattcaaggctaacaagatctccgaggaagagtatgtaaagtcaattaangaggaanttcgcaaagttgttgagcttcaagaagagcttgatatngatgttcttgttcatggagaaccagagagaaatgatatggttg

SEQ ID NO: 280902 - DNA, 266 bp, Glycine max
  unsure (1)..(266): unsure at all n locations
cgaangnnnagagagtaatcngcagagaaattnatcgtcgtagttatgggtnangttcacggatgacttgcacgtggccggtaaggtnagaggccaaacnccaaaagtggccaagcaggataagacgaagaagccacgtggccgcgctcacaagaggatgcagtataatcgccgattcgtcaccgccgtggtgggattcggcaagnagaggggacctaacttcgtctgagnatgaggctnaggctaaagaatatgtcactactctg

SEQ ID NO: 280903 - DNA, 268 bp, Glycine max
aaaaaacacacacgacacactcccatacacacacgttgtctcgcacacattccttcattccgcagcagcaaacatctttaccttaaacgacaacaatggccgatgccgaggatattcaacccctcgtttgcgataatggaaccggaatggtcaaggctggttttgccggagatgatgcgccgagggcggtgttccccagcattgtggggcgtccacgtcacacgggagtgatggttgggatggggcagaaggatgcgtatgttgggga

SEQ ID NO: 280904 - DNA, 268 bp, Glycine max
  unsure (1)..(268): unsure at all n locations
gaatggctcccaagggtttnacctttctggctgtgtnaatatgcgttncagcactgncactgagtccttctgttgcgggggangggcaaaataatggccttgttatgaacttctacaaggaatcatgccctcaggctgnaganatcatcacagaacaagtcaagcttctctacaagcgccacaagaacactgcttnctcctggctcaggaacatcttccatgactgtgctgttcagagttgtgatgcttcactgttgctggactccac

SEQ ID NO: 280905 - DNA, 266 bp, Glycine max
  unsure (1)..(266): unsure at all n locations
aaatttctcattctccctttcctctccgaaccctcgatcactctcacgcgctcctatattcgctcctccaccgtcgctctctcgaacaaccacaacaccatcttcatcacatggcaaacgcagcatctggtatggcagtccatgatgactgcaagttgaggtttttggagctgaaggcaaaanggacacaccgtttcatagtttttaagattgaggagcagcagaagcaggtcattgtggagaagcttggtgagcctgcccagggt

SEQ ID NO: 280906 - DNA, 266 bp, Glycine max
  unsure (1)..(266): unsure at all n locations
gaccaagccccactcaaccaccacaccactctntctggctcttcttctacctttcaagttnttaaagtattaagatggcngagacagccctatttaccncagagtcagtgaacganggacaccctgacaagctctgcgaccaaatctccgatgctgtcctcgacgcttgccttgaacaggacccagacagcaaggttgcctgcgaaacatgcaccaagaccaacttggtcatggtctncggagagatcaccaccaaggccaacgtt

SEQ ID NO: 280907 - DNA, 266 bp, Glycine max
caacaatgtcgaagcgaggtcgcggaggatcggcagggaacaagttccgcatgtcactgggtctgccggtggcggcgacggtgaactgcgccgacaacaccggcgcgaagaatctctacatcatatcagtgaaggggatcaagggaaggctgaaccggttgccgtcagcttgcgtgggtgacatggttatggccaccgtcaagaagggaaagcctgatctccgtaaaaaggtgctccccgccgtcatcgtccgtcagcgcaaccgt

SEQ ID NO: 280908 - DNA, 264 bp, Glycine max
gccttcagcggctccgtcgtcgtcggtttcggagtacacacagaagaagatctacgtgagcaacgtcggtgcggacctggatccgcagaagcttctcgcgtttttttcacggttcggggagattgaggaagggccgttggggcttgacaaggccaccggaaaacctaaggggttctgtttgtttgtttacaggaatccggagagtgcgaggagagcgttggaagagcctcataaggatttcgaagggcacattttgcatgccag

SEQ ID NO: 280909 - DNA, 264 bp, Glycine max
  unsure (1)..(264): unsure at all n locations
cttcatctgactcactcatcaatggctctgagactgaaccctatccccacccaaaccttctccctcccccaaatncccagcctcagatctccccgcttccgcatggcttccaccctccgcnccggtnccngagaggttgagaatattannannccattcnttcctnccatatangtgcatgttcaagtnacccactctatnttccccanaagattganttntcanatctttggaggattgggctgaccagaacatcttgactca

SEQ ID NO: 280910 - DNA, 264 bp, Glycine max; identical to SEQ ID NO: 171599

SEQ ID NO: 280911 - DNA, 264 bp, Glycine max
  unsure (1)..(264): unsure at all n locations
ccttccgccatcaagccctacaggaacttccagaaggangaagaagctcgaggacaacgactcaccggcgcngttttcgaaggcangttttacggccccgntgaggttaanaacctcgaatccttgnccacgcgngctgagatttacgccacccttttgggggctttgaagagccctgcttccgctcttgttggcatactncagtntcctgctagggaattgttacggttctcaagcgcatattaagaaccttgaagaacaaca

SEQ ID NO: 280912 - DNA, 265 bp, Glycine max
  unsure (1)..(265): unsure at all n locations
gaaatggcaacaagcgaagaagtggttgcngcggcgccagaggagcngggccggaggannggttgaagcacaanctggagagaaaatggacgttttggtgcgacaaccaatccaaacccaagcaaggcgctgcttngggaacctctcttcgcaaggtctacaccttcgacaccgttgaagagttctggtgtttgtatgatcaggtattcaagcccagcaagttgcaaatcaatgccgattttcacttgttcaagactgggattga

SEQ ID NO: 280913 - DNA, 199 bp, Glycine max
  unsure (1)..(199): unsure at all n locations
gcttaccaaaaaaatggctttggaaactctcaactcaccaacaacaancgccccatctttccccttcgacgacccanctattccatgggccaaaagaaaacgttcaaagcgttgttcacgcgaccacccttcggaggaagagtacctcgctctctgcctcatcatgctcnctcgcggcggcaccacccgccgcgtcaga

SEQ ID NO: 280914 - DNA, 262 bp, Glycine max
  unsure (1)..(262): unsure at all n locations
acttggcctccantagctccagncccctcnggtatgcagntaggcgtgcgtctgctcatataattgtgctatccagctattcaccnnttgtganntacactcctcaatacatgtggcttaaagaatagctgaagcgagttgagagggagaagactccttggctcattgtgctcatgcacgtgccgctctacaatagtaatggagctcactatatggagggtgaaagcatgcgatctgtttttgagagctngttcatcgagta

SEQ ID NO: 280915 - DNA, 262 bp, Glycine max
ggacaactgtgaggagctcattcccgagtacctcggatttgtgaagggtgttgtcgactccgatgacttgcccctcaacatttctcgtgagctgctgcagcagaacaagatcctgaaggtgatcaggaagaatcttgtgaagaagtgcattgagatgttcaatgaaattgcggagaacaaggaagactacaacaagttctatgatgctttttcgaagaatttgaagttgggtatccacgaggatagccagaacaggtccaag

SEQ ID NO: 280916 - DNA, 262 bp, Glycine max
ggaagtttgaaaccaccaagtactactgcacggtcattgatgctcctggacatcgtgactttatcaagaacatgattactggtacctcccaggccgactgtgctgtccttattattgactccaccactggtggttttgaagctggtatttctaaggatggacagacccgtgagcatgctcttcttgctttcaccctaggtgtgaagcagatgatctgttgctgtaacaagatggatgccactacccccaagtactctaaggc

SEQ ID NO: 280917 - DNA, 258 bp, Glycine max
ccttctcatcattctcatattattgtcgccacttcgacctcaatcaccctcgcgccctcgctcttcccttcctggtggcgacaatgtcgactcctgctaggaagaggctgatgagagacttcaagaggctgcaacaagacccgcctgcagggatcagcggtgccccccaggataacaacataatgctgtggaatgctgtcatatttggtcctgatgatactccatgggatggaggcacgttcaagttgactctccagt

SEQ ID NO: 280918 - DNA, 260 bp, Glycine max
  unsure (1)..(260): unsure at all n locations
gagggagggtcctaaccttctcaagttggnccaggaaggagcagtgcttggcncttgggacnaggctcatgtccaagtacaagatcaagtaccagttctacagggtcttccctaatggggaggttcagtatttgcaccctaaggatggtgtttaccctgagaaggtcaacgccggacgccaaggggtgggtcaaancttcaggtctattggtaagaatgttagtcctattgaggtcaagttcactggcaaccanccctat

SEQ ID NO: 280919 - DNA, 260 bp, Glycine max
  unsure (1)..(260): unsure at all n locations
gcggnagangaagacgccgcngccatggtgaagtactccagagaacccgncaatcccacaaagtcctgcaaggccagnggcgctgancntagagtgcatttcaagaacactagggagantgcctttgccatcaggaagttgcccctggttaaagctaaaagatacctggaggatgttttggcccacaaacaggccatccctttccgacgcttctgtggtggtgntgggaggacagcccaggctaacncgacactccaatg

SEQ ID NO: 280920 - DNA, 259 bp, Glycine max
  unsure (1)..(259): unsure at all n locations
ggcatctcactggtgaattcgagaagaaatatganccgancattggtgtggaggttcatccgttggatnntttcactaactgcgganagattcgattctattgttgggatactgctgggcaagagaagtttggcggcctcagagatggatattatatccatgggcaatgtgcgattatcatgtttgatgttactgcccgtctaacatacaagantgtccctacctggcaccgtgatctttgcagggtctgtgaaaacat

SEQ ID NO: 280921 - DNA, 258 bp, Glycine max
  unsure (1)..(258): unsure at all n locations
aaaaaatccgcgattcgctcttctcttggaaaagtgaaaaccagaagtacgaacganagagaagagcgatttagaagtgagagaagatggggttgtcgttcacgaagctgttcagcaggttgtttgcgaagaaggaaatgaggattctnatggtaggtctcgatgctgctggtaagacaaccatcttgtacaagctcaagcttggagaaatcgtcaccactatccccaccatcggatttaatgttgagactgtggagt

SEQ ID NO: 280922 - DNA, 256 bp, Glycine max
  unsure (1)..(256): unsure at all n locations
acagggggacccttagcctggggcttatgctacagcaaggaattgagtcctgataaattctactgcgatgactactataaattaacctacccttgcactcctggcgcagatactatggccgtggtgccatcccactttactggaactacaactatggaaaagccggggaagccttgaaggtggatctgttgaaccatccagaatacatagaacaaaacgccactctagccttccangctgcactctggcagtggat

SEQ ID NO: 280923 - DNA, 257 bp, Glycine max
  unsure (1)..(257): unsure at all n locations
ggggatagaaataggcatggcgangtggtntgctctgtttgccgctacccaattattggttctcggtttaaggagataaaatctcattntagtttgtgtaaccaatgctacagtgagggaaaagtgccttcttcatttaagcaggaagagtacagatttaaagagtatggaagtgagggtgaagccatgaaagataagtgtatgtgcttcaacttgcaatcccgtaatganaagtagatagcggcattcaatttttt

SEQ ID NO: 280924 - DNA, 257 bp, Glycine max
  unsure (1)..(257): unsure at all n locations
cagttgntggcatctgggaaaccagacagcttcagtggggagtncctagtgccgtcttancgtggttcntctttcttnggancccaagggaangggngcctcaactggntatgncaatgctgttgctttgcctgctggtggaagaggagatgaagaggaacttgccaaggagaacaataaaagtgcttcancttccaaagggaaaatcaccttgagtgtcaccaagtccaagcctgngactggtgaggttattgggg

SEQ ID NO: 280925 - DNA, 257 bp, Glycine max
  unsure (1)..(257): unsure at all n locations
caaggttgctttgcaggtggcacggttcttcgtttggccaaggatttggctgagnncaacaagggtgcacgtgtgcttgttgtctgctctgagatcactgcagtcanattccgtgggccaagtganactcaccttgatagtcttgtgggccaagcattgtttggagatggagctgctgcagtcattgttggttctgacccaattccacaagttgagaagcctttgtatgagcttgtttggactgcanaaacaattgc

SEQ ID NO: 280926 - DNA, 256 bp, Glycine max
  unsure (1)..(256): unsure at all n locations
cgncgtcgtggtcgtgtcgcagcaaaaccaagcnacccantaactggnntggtccaaganatggctctgatcntgcangctaccaaaacaaacaagaatgccttcaagactctgattgcggcagagtatggtngcgtccaagtggaantggcccctaatttcgagatgggtgtctctaacaaaactcctgantntctcaagatgaatcctattggaaaggttcctgttttggaaacgcccgatggtccagtctttg

SEQ ID NO: 280927 - DNA, 259 bp, Glycine max
  unsure (1)..(259): unsure at all n locations
gaacttcgaagacaaacntcatccaggtggtccatttgncccatngggggnttgnaaatgatccagnncaagctgtnactgctaaaggtgaaggaaatnaagaatggcagacttgctatgtttgccangcttggtttcnactnccaagcatatgtcaccggaganggtcctgttgagnacctagcaaaanatctcagngacccttttggcaacaacttgctcactgtcattgccgggtctgctgagagactccaactct

SEQ ID NO: 280928 - DNA, 256 bp, Glycine max
  unsure (1)..(256): unsure at all n locations
gctgganctggttctgcaacactatcaatggcatatgctgctgttaaatttgcagatgcatgccttcatgccctganaggagatgctggcatcattgaatgtgcatatgttgcttcacaggtgactgaactcccattctttgcatcaaaagtacgacttggccgagttggggtggaggaaattcttcctcttggtcccctgaatgattatgagagggagagtttggaaaaggccaagaaagagttagcagcaagca

SEQ ID NO: 280929 - DNA, 255 bp, Glycine max
  unsure (1)..(255): unsure at all n locations
cttcataaacgccgcccaaaaccatttatagggttttnttttctttgccaagaanatgagagagtgcatttcaatccacattggtcaggccggtatccaggtcggaaacgcctnctgggaactctattgccttgaacacggcattcagcccgatgggcagatgccgagtgacaagaccgttggaggaggagacgacgccttcaacacattcttcagcgagaccggcgccgganagcacgtgcctcgcgccgtctt

SEQ ID NO: 280930 - DNA, 257 bp, Glycine max
  unsure (1)..(257): unsure at all n locations
ggaagaggctgttcgcagtgttgagatgcctggtctattgtggggagcntccaaactggttcctgttggttatgggatcaagaagttgcagatcatgtnnactattgncgatgaccttgtatctgtgganacccttgttgaggagactctcacagttgagcccatcaatgagtatgtccaaagcngtgacattgttgcattcaanaaaatctaagtntnnatgttgaatttnagtcattttgaagcagccaatnagt

SEQ ID NO: 280931 - DNA, 253 bp, Glycine max
  unsure (1)..(253): unsure at all n locations
cgcaggaagggagacacccaaactgctcaaatgtacacagatgttggagtttattatgcaccaggtcctgttcttaggggtgaggtatttgatggggcagaagcagtgcgtaaaatggagaactggttgattganaatcatggttttcagccacagtatgctgtgtcagagctgtccgagaaaaacttctggaggatgtttgatgctggtttatatgagcatactaggaggaagtatggagctgttgggacct

SEQ ID NO: 280932 - DNA, 259 bp, Glycine max
  unsure (1)..(259): unsure at all n locations
tagcagatcttcgttaagaccctcaccggcaagactataaccctagaagtcgagagctccgagancatcgacaacgtcaaggctaagatccaggacaaggagggtatccccccagaccagcagaggctgatcttcgccggcaagcagctcgaggacggacgtacccttgctgactacaacatccagaaggagtcaactctccacttggtgttgcgtcttcgtggtggtatgcagatcttcgtcaagacccttacgggta

SEQ ID NO: 280933 - DNA, 254 bp, Glycine max
  unsure (1)..(254): unsure at all n locations
ctcaatcatgaccctggttgnnggncacaatcataaagaactgtggagatatngttcacatgcatgttgcagaaagngatgtgcttcatgagatggtgancatagtaaagaaaaagcctgattttcatgtcaaagaaaagatactggtncttgtagatacttggcaagnagcttttggaggcccaagggcaagatatccacaatattatgctgcataccangaactgtngcgtgctggggcagtattccctcag

SEQ ID NO: 280934 - DNA, 253 bp, Glycine max
  unsure (1)..(253): unsure at all n locations
ccaacttcatgtgccagggcggtgacttcaccgccgganacggcaccggtggcgagtccatctacggatcgaagttcgcggacgagaacttcataaagaagcacacgggtcccggcattctatcgatggcgaacgcgggacctggcacgaacgggtctcagttcttcatctgcaccgttaagacggagtggctcgacggaaagcacgtggttttcgggcaggtggtggagggccttgacgtcgtgaaggacat

SEQ ID NO: 280935 - DNA, 255 bp, Glycine max
  unsure (1)..(255): unsure at all n locations
gcaaaancgcattgtgtntctctctttccgcggcgtagatctgagcagtttggganaccctaactgctctcaccactctctttgctnttnttcctctccgatcaacgacctctttcgtcgccctaagtcatggcaggacttgcacccgagggatcacagtttgatgctcgtcaatatgataccaagatgaatgagttgcttacatctgatggacaggattttttcacatcttatgatgaggtttatgacagtttt

SEQ ID NO: 280936 - DNA, 253 bp, Glycine max
ccctcttcaccaccagtgcctgctacaagttatacagggccagtgagagtagacagcaaaaaagaggagaaaggagacgctcagagaaagcaacgcaggtgctggtcacaagaattgcacaagagattcttgcatgcacttcaacaacttgggggtgcagattctgccacgcccaaacaaatcagggaattaatgaaggttgatggcctcaccaatgatgaagtcaaaagtcatttacagaaatttcgcttca

SEQ ID NO: 280937 - DNA, 254 bp, Glycine max
  unsure (1)..(254): unsure at all n locations
atcgttttctacataatacaaacctntctaatttttgaagcttattatacccaatctcgatatgcagatcttcgtgaaaaccctaactggcaagacgatcaccttggaggtggagtcctctgacaccatcgacaacgtgaaggccaaaatccaagacaaggagggcattcctccggatcaacagcgtttaatnttcgccggaaaacagctcgaagacggcagaaccctcgccgactacaacatccaaaaggagt

SEQ ID NO: 280938 - DNA, 253 bp, Glycine max
  unsure (1)..(253): unsure at all n locations
agcgaaaganattaggagagagaaaaaaaaatcatnaagctgaagacatatgcgggtcttagtatcattgcaactctggctattatatatcatgcgtttaacagtaggggccagttttatccggcaatggtgtatctgtcaacttccaagatcagtttggtgcttcttctcaacatgggtttggtctttatgtgtattctatggcaattaaccaagaaggtgttcctgggttccctccgagaggcagaggttg

SEQ ID NO: 280939 - DNA, 256 bp, Glycine max
gagacacaatacagagtgagttgttgctccttcgccacaactctctgccaacatgggtatctccagagattctatgcacaagaggcgtgccactggtggcaagaagaaggcctggaggaaaaagagaaagtatgagcttggtcgccagcctgctaacactaagctgtcaagcaacaagacagtcaggaggatccgtgttagaggtggaaatgtgaaatggagggcattgagattggatactggaaattactcctgg

SEQ ID NO: 280940 - DNA, 258 bp, Glycine max
agttgctgccctaacgactatcccatctgcaacacttatgctggaacttgtctcaagagcaagaacaacccattcggagtgaaggcattgaggcgtactccggctaaaccccattggacctttgggcgtaagaacaaggtcagcagtgcttaagcagataaaggaaatgtgaacgtgcaggaaggagccaatgatgaagtaaatgaaagacgaagaattaaaacaccagctgatacacttcccctttaccttcacata

SEQ ID NO: 280941 - DNA, 252 bp, Glycine max
  unsure (1)..(252): unsure at all n locations
cacagtcttgaaagcatcaaggctagcattgnngcaaggnagcctgatnttgaagcntatattgatccacaanagcaatacgcagatgcagtgatagaagtgttgccaacgcaactcattccagatgaccaacgagggtaagattttgagagtgagattgatacagaaagagggggttaagtactttagcccggtttacttgtntgatgatggcnctacnattcatggtaccatgtggnagaagttacatgc

SEQ ID NO: 280942 - DNA, 252 bp, Glycine max
cggtgagaagctgaccgatgaggaagtcgatgagatgattcgtgaggctgacgttgatggtgatgggcagatcaactacgaggagtttgtcaaagtcatgatggccaagtgaggaccaatcaaccataacaaaaacatttgaaagcacatgaacagaaaagggacagggcagataagttttgatgaaaattctattttcattaggacaatcttcattggggtcatagtttttgttggtcggatttgtgtttg

SEQ ID NO: 280943 - DNA, 253 bp, Glycine max
  unsure (1)..(253): unsure at all n locations
ggcacacacagacacacacatttcgtcggaatgggaagggtgattcgcgcacagcgtaaggntgcggngtcggtnttcaagtcccacacccaccaccgcaagggtccggcgaggttccgcagccnnagccttcggcgagcgcaacggctacctcaaaggggtcgtcaccgatatcatccacgaccctggtcgcggtgctcctctagccaaggtggcgtccgccaccccttccgctacaagaagcagatggagc

SEQ ID NO: 280944 - DNA, 252 bp, Glycine max
gcatataaagcttctctggcgcttgggcttagcataacccttacctttggtatagagaagaagaatagagagtgatggagtgcgtattcggattggtgggtaatggattcgcgatcgtggtggctgattcatcggcggtgcacagcatcctcgtccacaagtccaacgaggacaagatcatgcttctcgattcccacaaactcatcgccgctagcggcgagcccggagacagggttcaattcactgagtaca

SEQ ID NO: 280945 - DNA, 253 bp, Glycine max
  unsure (1)..(253): unsure at all n locations
atccctctaatcactctagctgttgcaaatttctactatttttcaatggcttctgcagatgttgagttccgttgctttgttggtgggcttgcttgggtcaccggcaacgatgccctcgagnaagccttttcaatctacggcgacatcgttgaatcgaangtnatcaacgaccgtgagactggaaggtccagangattcggatttgtgaccttcgcctcanagcagtcaatgaaagatgcgatcgcaggnntga

SEQ ID NO: 280946 - DNA, 253 bp, Glycine max
  unsure (1)..(253): unsure at all n locations
cgaaagcaagcattatcagaagcagaaagaaagaataagaggttgcagcaacaatggcagccatggctgcgcttcagagctcaatggtcggtctctcctncntcctccaactctttcttaggccaacgcctttctcccatcaccctcccctctcttcttccgggtaagtcaacagagaagcaatgtcctattgtaatgaggcttaaacgatgggaacggaaggagtgtaaaccaaacagccttcctatcttgc

SEQ ID NO: 280947 - DNA, 254 bp, Glycine max
caggcagaggcacatcagggttgggagacaggtggtgaacatcccatcgttcatggttagggttgattcgcagaagcacattgacttctcactgaccagtcctcttggtggtggtcgtccaggacgcgtgaagcgaaagaaccaaagggctgctgctaagaaggctgctggtggagacggagatgaggaggatgaagattaaattattaatggcttctgatatttatagacctgtgctcgtttttttatctgtg

SEQ ID NO: 280948 - DNA, 251 bp, Glycine max
  unsure (1)..(251): unsure at all n locations
cttggcttcaagattgtattcttgtcaggaagatatcttgacaaaatggccgtaacagaagcaaacctaaagaaggctggcttccacacatgggagcagtnaattctcaaggatccacatcttatcactccaaatgcactttcatacaaatcagcaatgagagagaatctgttgaggcaggtctacagaattgttggaatcattggagaccaatggagcgatctgcttggagaccacagaggcgaaagcag

SEQ ID NO: 280949 - DNA, 248 bp, Glycine max
atgacaaggaaattgttgcgttatctggtgcacacacattggggcggtctagaccagatcgcagtggttggggaaagcctgaaactaaatatacgaaagatggaccaggagcacccggaggacaatcctggacagtgcaatggttgaaatttgacaactctacttcaaggacatcaaagaaaaaaaggatgaagatctattggtattgccaactgatgctgctctttttgaagacccatccttcaagg

SEQ ID NO: 280950 - DNA, 246 bp, Glycine max
ctcgtgcgcggcttcggagttcgtggagcttttcgtgggggttggtgcttcgagggtgagggatttgtttgagaaggcgaaggggaaggcgccgtgcattgttttcattgatgagattgacgccgttgggaggcagagaggggcggggctaggaggtggaaatgatgagagggaacaaactattaatcagcttcttactgagatggatgggtttctggtaattctggtgttatgttttggctgcca

SEQ ID NO: 280951 - DNA, 251 bp, Glycine max
  unsure (1)..(251): unsure at all n locations
attaaaactaagcatgtgctctgccatatcccaagtggaacnagaagagttgctcgaaaaattagaggtgttcaagatcaaaggcagggacaagcatggccgcaagatccttcgcattatcgccaaactcttcccagcgcggttggtgagtgttgatgttctgaagaagtacctggaggataaggttttcccgaagctggggaagaggaaattcgtggtgctgtacgtgcacaccggcgtccagaggagcg

SEQ ID NO: 280952 - DNA, 254 bp, Glycine max
tccgaatcgaaaggtgaggttagtaagtaacaatggtggagaaggccaagggtaggaaggaggaggttgtcactcgagagtacaccatcaacctccacaaacgcttgcatggctgcacatttaagaagaaggctcctaaagcaattaaggagataaggaagtttgctcagaaagcgatggggacgaatgatgtaagagtggatgtgaagctcaacaaggctgtgtggagccaggggatccggagcgtcccaagg

SEQ ID NO: 280953 - DNA, 247 bp, Glycine max
  unsure (1)..(247): unsure at all n locations
acataacatagctttcacttgcaaagcttgggggattcgagcaactgatctgaaccaaggagttgtatatggggtcagaacagatgagactgcaatgcatgaagagctgtataacaggtttgattacgatggaatatttggaactgcattgaatcggttctgtgttcaggctgctgttggtcatccacttacngtatatggtaaaggaggccagactaggggcttcctgacataagagatacagttc

SEQ ID NO: 280954 - DNA, 250 bp, Glycine max
gtggagcgttttgttgggcatggtgtgggaacagtgtttcattctgaaccaattattatacacaatcgcaatgagaaggcaggccgcatggttgaaggtcaaacatttacaattgagccgattctttcaatgggaagcattgattccattacatggccagacaactggacaacactaacagctgatggtagtccggctgcacagtttgagcataccattttgataactaagactggagccgaaattttga

SEQ ID NO: 280955 - DNA, 255 bp, Glycine max
  unsure (1)..(255): unsure at all n locations
actagaaacagtgtgatgaaaatgaaggtccttgttttcttcgttgctacaattttggtagcatggcaatgccatgcgtacnatatgttccctctccgaatgaacactggctatggtgcccgtactccggaggtgaaatgcgcaagttggaggcttgctgtggaagcacacaacatctttggcttngagaccattcctgaagagtgcgttgaagcaacaaaggaatacatccatggcgaacaatatagatcagac

SEQ ID NO: 280956 - DNA, 247 bp, Glycine max
  unsure (1)..(247): unsure at all n locations
cctagttagcctcttcttgtttctcctgcaatcaacgacacccccccaaaaatgacaggagagacagtgaacccaaaagcttaccctttggccgatgcgcaactcgcaataacaatactggatcttgtgcaacaagctgccaactacaagcaactcaaaaagggtgctaatgaagcgaccangacactgaacagaggcatctctgagttcgttgtgatggccgcggacactgagcctcttgngattc

SEQ ID NO: 280957 - DNA, 249 bp, Glycine max
  unsure (1)..(249): unsure at all n locations
cgcaataccagcaccgttctattcttcttccaaaatgggtatctctacgtgattccatgcacaagaggcgcncccaccggngcaagaagaaagcttggaggaagaagagaaagtatgagcttgggaggcagccagcaaacacaaagctatcaagcaacaagaccggttaggaggattagggttcggggtgggaacgtgaagtggcgcgctttgaggcttgatactgggaactactcttgggggagtgag

SEQ ID NO: 280958 - DNA, 244 bp, Glycine max
  unsure (1)..(244): unsure at all n locations
gcgatttcgatctcgcatagcattctacaatggccactattccagttaaccccaagcctttcttgaacaatttgactgggaagcccgtaattgtgaaacncaagtggggaatggagtacaagggctatctcgtttccgttgattcctacatgaacttgcagctggccaacactgaagagtacattgagggacagtttactggaaatttgggagagattttaatcagatgtaacaatgttctcta

SEQ ID NO: 280959 - DNA, 244 bp, Glycine max
  unsure (1)..(244): unsure at all n locations
cgccgttgtcgctgtcgtctcgcttcgttccccatgtctctgtgttngagcaggaggaggacaccttcggcgacggagacggccccagcttctcccgcgaccttaagctctttgtcgggaatctccccttcagtgtcgacagtgcgcggctcgcggagtncttcgagagtncggggaatgtggangtggtnnaggttatttatgataagactactgggaggagcagggggtttgggtttgtgac

SEQ ID NO: 280960 - DNA, 246 bp, Glycine max
gaaaatggcggtgcctctgctctcaaagaagatcgtgaagaagagggtaaagaagttcaagaggcctcagagtgacaggaaaatttccgtcaagactaactggcgcagaccaaagggtatcgattctcgtgttaggagaaagttcaagggatgcactttgatgccaaacattggttatggttcagacaagaagacccgccactatctccctaatggtttcaagaaatttgttgttcacaatgtgaa

SEQ ID NO: 280961 - DNA, 247 bp, Glycine max
  unsure (1)..(247): unsure at all n locations
atcttgacaaaatggccgtaacagaagcaaacctaaagaaggctggcttccacacatgggagcagtnaattctcaaggatccacatcttatcactccaaatgcactttcatacaaatcagcaatgagagagaatctgttgaggcagggatacagaattgttggaatcattggagaccaatggagcgatctgcttggagaccacagaggcgaaagcaggacctttaagcttcctaatcccatgtacta

SEQ ID NO: 280962 - DNA, 266 bp, Glycine max
  unsure (1)..(266): unsure at all n locations
cctagctagccacaatgcagatattcgtgaaanccctaacggggaagacgataaccctagaggtagagtcttcggacacgatcgacaatgtgaaggcgaagatccaggacaaggagggcatcccgccggatcagcagcgctgatcttcgccggaaagcagctggaggacgggcgcacccttgccgactacaacatccagaaggagtccaccctccacctcgtcctccgcctccgcggcggcgccaagangcgcaagnagaagacta

SEQ ID NO: 280963 - DNA, 262 bp, Glycine max
  unsure (1)..(262): unsure at all n locations
aaaggctgcagatttgacttactgncacgagtgcagcacgcatgattgctgatgtctccaagagtgacaagattgtggtggagaaatccactgtccctgtgaaaactgctgaggccatagagaagattttgactcacaaggaaagggaatcaagttccaaatcctttcaaaccctgaattcntgctgagggaactgcaatccaagatcttttcaacccggatcgagtcctaattggaggcagggagaccccacaaggccaaa

SEQ ID NO: 280964 - DNA, 264 bp, Glycine max
gcctaagcagatccacgagattaaggattttcttctgacggcgcggaggaaggatgcgaggtcggtgaaaatgcaagaggagcagggatgtcgttaagtttaaggttcgatgctccaagtacttgtacacgctttgtgtcttgaccctgagaaagccgataagttgaagcaatctcttcctcccggtttgagtgttcaagacctgtagagctgttgagtgtggcagcatgcgtttgtttctcttttgttacctgatgctctaga

SEQ ID NO: 280965 - DNA, 264 bp, Glycine max
  unsure (1)..(264): unsure at all n locations
gccgagggtgtgagccaagaatgctccccttgagttccaaaacacaaagctcatgacacgtttgacctacactcctggatgagattgagggaccctttgnggtgtcttctgatggcactgtcaagtttgnggagaaggatggcattgactacgccgccgtgacagttcagctaccgggaggcgaacgtgtgccctttctcttcaccatcaagcagttggtggcatcagggaagccagatagctttagtggggatttctagtccc

SEQ ID NO: 280966 - DNA, 273 bp, Glycine max
  unsure (1)..(273): unsure at all n locations
ggcatacaaaactaactttttcccgcgagtgtttggagtcccaactcttgaaaaaactgctcatgatgattaccggaaacttgcctctgcaatctatcttcaagtgagcactattagtcaggctcttatatttgnaactcgatctcgaggttggtcttatgttgagcgtcctggtttattgctggtgtttgcttttattgtngctcaactgattgccaaccttggattgcagtatatggaaactgggagctntgctcaattgaaggaataggt

SEQ ID NO: 280967 - DNA, 264 bp, Glycine max
  unsure (1)..(264): unsure at all n locations
ggagaagagaagctaaagaaagaaaggagatgggagtggagaagcagttgttgaggtctggcaccggtccgaagccaattcccggtcagaacgtaaccgttcactgcactggtttcgggaagaacggtgacctttctcagaaattctggagcacaaaggatcctggccagaacccattcactttcaaaatcggccaaggttctgttatcaaaggatgggatgaaggtgtgcttggcatgcaantggtgaagttgctcgtctccg

SEQ ID NO: 280968 - DNA, 261 bp, Glycine max
  unsure (1)..(261): unsure at all n locations
cttccttgttggaacatcatggcttgcgcgcaacagtggcgantgcnccgtttctggcaagccattggaccgttcccttattcgcagccttgcccaatcgcacgaggttttgatcactgtggaagaagggtcaataggggattcggatctcatgttgttcagttcatggcccttnatggccttcttgatgggaaattaaagtggaggccaattgttcttcctgattgttacattgaccatggatcaccggttgancaatga

SEQ ID NO: 280969 - DNA, 251 bp, Glycine max
  unsure (1)..(251): unsure at all n locations
gtgtggctgtgaagagcggttgggatgagtatggtatagcttatggaatgccaacnaagcagcttgtaattagaagactcacttgtatttctccattcagtgctgtgattgctttagggattgagatgtctggtggattcaggacgtcagagctgaggacattgtagccatcaattcagaatcaggggtcagaatcaaaatgctgtaggaagaggggttatgtcaaggacatattgttagagatgacagaa

SEQ ID NO: 280970 - DNA, 264 bp, Glycine max
  unsure (1)..(264): unsure at all n locations
tgtctctnccgcagcagccttcttcgccgtttcagctcaagagccaccagcaggtaagatatggttaagcataacaacgttatccccaatgggcacttcaggaaacactggcaaaactatgtgaagncttggtttaatnaaccagcacggaagaccagaaggcgtttagctcggcagaagaaggctgtcaagattttcccaaggcctactgctggacctctcaggccaattgttcatggccagactctgaaatacaacatgaaa

SEQ ID NO: 280971 - DNA, 267 bp, Glycine max
  unsure (1)..(267): unsure at all n locations
caccatcagaggcaccaacaagatcgtaagantggggactgtgtgctgatgcgcccctctgataccagcaagccaccgtacgtngcgcgcgtngagaagatcgaacaggataataggaacaacgtgaaggtgcgtgtgaggtggtattataggcctgaagagtctattggaggacgcaggcagttccatggagcaaaggagctgtttttgtctgaccattatggatgttcagagtgctcacacaattgaagggaagtgtgttgtgca

SEQ ID NO: 280972 - DNA, 266 bp, Glycine max
  unsure (1)..(266): unsure at all n locations
ctccatttataaaacatcgtgtgcgcactctctcttctcctaggtttcgctcccatcaacagcaacgatggtgcagaggctcacttatcgcaagcgccatagctatgctaccaaatccaaccagcaccgggttgttaagacccctggtgggaagttggtgtaccagaccactaagaagagntcaagtggacctaagtgccctgtcactggcaagaggatccaagggattcnacattaagacctgctgantacaagnggttagattg

SEQ ID NO: 280973 - DNA, 222 bp, Glycine max
  unsure (1)..(222): unsure at all n locations
gttctggttacctcanttagtcaggtcatgacaaaaagtaatgggaaagagtatccncaatagtcaatgatgttgcagagcagattgtnatggaaactttatatggtgatagtcttaggcttcagcaggtattggctgacttttacttatttccatcaatttcactccaaatggaggtcaggttgttgtagnaggcatctaaccnaagaacngtgggcnaat

SEQ ID NO: 280974 - DNA, 261 bp, Glycine max
cgacgatccaagtgatagacactcgtcgcgatggaacgtgtagctgaatccgagcgaactctgtacccatacgtgactggatcctctgtagtcgctatcaaatacaaagatgggattctaatggccgctgacatgggaggttcgtatggatctaccctgcggtacaagagtgttgagcgtatcaagcctattggaaagcattctcttcttggtgctagcggggagataagtgactttcaggagatctgcgttaccttgatg

SEQ ID NO: 280975 - DNA, 256 bp, Glycine max
aaagaacgaggcggacgacgagaagcgagagtggtgttcaaggaggacgggcaggagtacgcgcaggtgctccggatgctgggtaacgggcggtgcgaggcgatgtgcatcgacgggacgaagaggctctgcacatccgcgggaagatgcacaagaaggtgtggatcgccgccggagacatcatcctggttggactcagggactaccaggacgacaaggctgacgtcatcctcaagtacatgcccgacgaggccag

SEQ ID NO: 280976 - DNA, 267 bp, Glycine max
ctaaagccgagcagcgagagagagaaaccctagcaaaaatgccggctggtcacggtttgagatcccgcaccagagattccttctctcgtcccttcaggaagaagggtaccatcgccctcaccacatacctcagaacctaccacgtgcggcgattatgtcgacgtcaaggttaacggcgccgtccacaagggaatgcctcacaagttctaccatggccgcaccggtcgcgtctggaatgtcaccaaacgtgctgttggggtcgaagtc

SEQ ID NO: 280977 - DNA, 271 bp, Glycine max
  unsure (1)..(271): unsure at all n locations
gtatgnatcctgttcgtcatgccagaaaggttccccatacctcctgctatctggcagtggaaggcgtganaagtgtggcattgagaagngagaacaacttcnagcagcccggagagagataccggtcttgggcacctgacaggcaagttagatttngctcggcgatggggttgatgctttatcngacccacgggtcaaccatgangatccgcaatgtctngatntccaactggttctcnagcngnaccgtctctaggccaaaaaataagnt

SEQ ID NO: 280978 - DNA, 259 bp, Glycine max
  unsure (1)..(259): unsure at all n locations
gttgtgttgancaganaganggatcaagaaangataanaagaaaganggaatagggttagggttagggttagggttaggttgaggatgccgaagancaagggaaangnaggtaagaacaggcagangggaaagaacgaggcggacgacgagaagcgagagctggtgttcaaggaggacgggcaggagtacgcgcaggtncttccggatgctgggtaacgggcggtgcgaggcgatgtgcatcgacgggangaaaangct

SEQ ID NO: 280979 - DNA, 256 bp, Glycine max
  unsure (1)..(256): unsure at all n locations
agaagaacaagtagttgagaactaagaaggagaagcaaatggcttcctacaatnatctcttccccagctgttaccactgtcaaccgtgccggtgccggcatggttgctccattcactggcctcaagtccatggtggcttccccaccaggaagaccaacaatgacattacctccattgctagcaacggtggaagagtgcaatgcatgcangtgtggccaccagttggcaagaagaagttgagactctttcctacctg

SEQ ID NO: 280980 - DNA, 265 bp, Glycine max
cagagcgacaacagattctctgtgatatccaaatggataataaaatcacgaaggaactcactgaggaggagctaatccacactcagggacgaggtctccaaatacatgattgaaggcgacctgagacggttcaatgcgttaatataaagagactgaaggatattcagtgctacagaggaataaggcatattcaggggcttccttgcagaggccagcgaaccaagaataattgcagaaccttgaagggtaagaaggttgccattgc

SEQ ID NO: 280981 - DNA, 255 bp, Glycine max
gggatacagaattgttggaatcattggagaccaatggagcgatctgcttggagaccacagaggcgaaagcaggacctttaagcttcctaatcccatgtactacattgagtagtaccttcacctctctcaacatctagctagagtttgctcctatctatatgtaataaggtatgctgatatgcactattcaaataggagcattagctatgtttgttaatgtcatttatgttatgtgggtaagtcacctaagacact

SEQ ID NO: 280982 - DNA, 256 bp, Glycine max
  unsure (1)..(256): unsure at all n locations
gactcttccttttctcttctctgtctaaggggtgccctgagatcacattgaacaatggtgaaggctgtgnccgttcttggcagcagtgagggtgtcactggaactattcacttcgttcaggagggaagtggtccaaccaccgtaaccaccatctcttgctggtcttaagcctggtctccatggtttccatgtccatgccttgggggacactaccaatggttgcctctcaactgggatcacatttcaatcctaataa

SEQ ID NO: 280983 - DNA, 260 bp, Glycine max
  unsure (1)..(260): unsure at all n locations
caagcctcaggtaagccaaaaccacacntaagcataacaatgttatcccaaacggacactttccgtaagcnctggcagaactatgtgaagacttggttcaatcagccagcacggaagacaaggagacgattggctgtcagaagaaagctgtgaagatattccccagacctacggctggacctctcaggcccattgtacatggtcaaactttgaaatacaacatgaaagtgagaggtggaaggggatttctcttgaagaac

SEQ ID NO: 280984 - DNA, 263 bp, Glycine max
  unsure (1)..(263): unsure at all n locations
ggctggagttgtcttaaaccccggtacccccttaagtgcaatagaatatatccttgatgtggttnatttggtcttaattntgtaccgtaaaccctggctttggtggccagagttttattgagagtcaagtaaagaaatttctgatttgagaagattgtgtgcggagaagggagtgaatccatggattgaagtagatggtgggngttggtccagcaaatgcatacaggtgatnggaggctggnagccaaaccntggtgcaggcc

SEQ ID NO: 280985 - DNA, 187 bp, Glycine max
  unsure (1)..(187): unsure at all n locations
atttggggccgcaaccgggttcgaggaagagggctaagagaaagggtagaggaatatccgcagggcaaggggcaagttgtggttttgggatgagaggtcagaaatctcgatctggacctggcgttaggaagggttcgaaaggtggccagatgccgctttatcgccgaattccccaaactcaagagna

SEQ ID NO: 280986 - DNA, 258 bp, Glycine max
  unsure (1)..(258): unsure at all n locations
gcagagctcaaaaccctagagaggaggaagagagagcgtgcaagttccggccaccaccgaccatgacattcaagcgcanncatggaggtcgcaacaaacacggccgcggccacgtcanattcatncggtgctcnaactgtggcaaatgctgtcccaaggacaaggccatcaagaggtttctggtgaggaacattgttgaacaggctgcagtcagagatgtgcaggaagcttgtgtctatggaacatgatattcttccg

SEQ ID NO: 280987 - DNA, 258 bp, Glycine max
  unsure (1)..(258): unsure at all n locations
aaactgataaggcagggatacaacattgttgggatcattggagaccaatggagcgatctcctcggaggccacagaggcgaaagcaggacctttaagcttcctaatcccctgtactacattcagtagttcctcacctctcaacaatctagcttgctcctatctatgctatatgtaataagatgcgttcaaattaggggcactagcttcactttatgttgtttcagctgtgtgtccacaagtcatgtaagaganttcact

SEQ ID NO: 280988 - DNA, 256 bp, Glycine max
gttgtagacagcttcaagctgaagatgtcacagtcaagggtaagattgtgggggtgaacaaaggtggagtggtggctgagttggaagggcttagagggtttgttccattgtctcaaatatcaacgaactcaatgtagaagagcttcttgataaggagcttcctcttaagtttgtggaggtggatgaggaacaatctagacttgtcctcagcaaccgcaaggccgtagctggcaaccaggcacagctaggaattgga

SEQ ID NO: 280989 - DNA, 268 bp, Glycine max
  unsure (1)..(268): unsure at all n locations
cttatgagaggccaagtgaacttaaaggatgctgtggctggganccataagcttgcatgacaaagcaagaaacagggtttacaagctcaatgatcaaacagcaaagctttttgtgcgaccaagaggttggcacctaccggaggcacatattctgattgatggtgaacctgcaactggttgccttgttgattttggcctctatttctaccacagctactcagcattccggcgcactcaaggtgctggctttggccctttcttttatctt

SEQ ID NO: 280990 - DNA, 266 bp, Glycine max
gtttgttgtgagctataagctagtttatcgtgaggagaatatgaagttgtttgttttctttgttgctgcagtagttttggtagcatggccatgccatggcgcaggctaccaaaggttccctctccgaatgaaaactggctatggtgagcgttcttcggaggtaaaatgcgcaagttttaggcttgctgtggaagcacacaacatccgagcctttaaaaccattcctgaagagtgcgttgaaccaacaaaggactacattaatggcg

SEQ ID NO: 280991 - DNA, 271 bp, Glycine max
  unsure (1)..(271): unsure at all n locations
gtgaatgcagcattcagaganagtgcanncaatganctcaagggaatccncttctgtgtgtnatgagccacttgtntccgttgactncaggtganctnangtgtcctcaaccgttgactcctcgttnaccatggtcatgggagatgacatggtnaaggtcattgcttggtatgacaatgaatggggctactcccaaagggttntggatttggctnanattgtngccaacaaatggaagtnagagccaaacaaattctcattggtaattaaa

SEQ ID NO: 280992 - DNA, 276 bp, Glycine max
  unsure (1)..(276): unsure at all n locations
gcaanaataaagaaagaatcccagggcgaggagaaagatggaggggaaggagcaggatgtgtcgttgggagcgaacaagttccccgagagacagccgattgggacggcggcncagagccaagacgacggcaaggactaccaggagccggcgccggcgccgctggttgacccgacggagtttacgtcatggtcgtttnacagagcagggatagcagagtttgtggccacttttctgtttctctacatcaccgtcttaaccgttatgggantcgccgg

SEQ ID NO: 280993 - DNA, 243 bp, Glycine max
  unsure (1)..(243): unsure at all n locations
ttgttgtttgtgtgtttgttttttctctcacctgaaaatnccttgctgcggtggtaactgtggttgcggaagcgcctgcaagtgcggcaacggctgcggaggctgcaagatgtacccagacttgagctacaccgagtccaaccaccaccgagacttggtcatgggagtggcaccagttaagggctcaattcgagagtgctgaaatgggtgttcccgctgagancgatggctgcaaatgtggag

SEQ ID NO: 280994 - DNA, 268 bp, Glycine max
gtttgttgacaggacatgtcaaagcagccacctacccaggagttggtggccaaggatctgcacgccaacgagtggcgattcaggcatatttttcggggtcaaccgcgtagacacttgctgcaaagtggttggagtgtttttgtcagctccaagagactagttgctggggatgcgtttatatttttaaggggtgagaatggggaacttcgagttggtgttaggcgtgcaatgagacaacagggtaatgttccatcatcagttatctcaa

SEQ ID NO: 280995 - DNA, 265 bp, Glycine max
  unsure (1)..(265): unsure at all n locations
gctaaatccctagtaagccgccatggtgaagtactcaagggagcctgnccaatccaaccaagtcttgcaaggctagaggcgccgaccttagggttcattttaagaacactagggaaactgcctttgcaatcaggaagttgcccttggttaaagctanaaggtacttggaagatgtncttgcgcacaagcaggccattccgttcagacgtttctgtcgtggtgttngaaggacagctcaagcaaagaatagacnctctaatggcca

SEQ ID NO: 280996 - DNA, 264 bp, Glycine max
gatgatgctggggtacaacctctctccatctttcaactgggatgcttctggcatgagtgatgaacaaatgagggacttcattccaaagattgcaaagttggggtatgtgtggcagttcatcacagtgggagggctgcattctaatgcactcattacttcaacatttgcaagggattttgccaataggggaatgctagcttatgtggagaggattcagagagaggagaggaacaatggggttgacacacttgctcaccagaaatg

SEQ ID NO: 280997 - DNA, 264 bp, Glycine max
  unsure (1)..(264): unsure at all n locations
ggccaggcaagccccactcaacnaccacacctctcctcgttcacgctacccctttctgctcttcttctacctttcaagttttaaaagtataaagatggcagagacattcctatttacctcagagtcggtgaacgagggacaccctgacaagctctgcgaccaaatctccgatgctgtcctcgncgcttgcctcgagcaggacccagacagcaaagttgcctgcgaaacatgcaccanaaccaacttggtcatggtcttcggaga

SEQ ID NO: 280998 - DNA, 267 bp, Glycine max
caaacacaacacaaggagaagaaccagatctctctttctcaaatcaccaagaatagttgaaaatggggctgtctttcacgaagctgttcagccggctctttgcgaagaaggagatgcgtattcttatggtgggtctcgacgccgccggtaagaccaccattctctacaaactcaagctaggagagatcgtcacaaccattcccaccattgggtttaatgttgaaactgtggaatacaagaacatcagcttcactgtctgggatgttg

SEQ ID NO: 280999 - DNA, 267 bp, Glycine max
  unsure (1)..(267): unsure at all n locations
agtntgttgtgagctataagctagtttatcgtgaggagaatatgaagttgtntgttttctttgttgctgcagtagttttggtagcatggccatgccatggcgcaggctaccaaaggttccctctccgaatgaaaactggctatggtgagcgttcttcggaggtaaaatgcgcaagttttaggcttgctgtggaagcacacaacatccgagccttaaaaccattcctgaagagtgcgttgaaccaacanaggactacattaatggcga

SEQ ID NO: 281000 - DNA, 272 bp, Glycine max
agcgtaggttctggagccatttacgcagcaactaaagctgctattgatcagcttaccaaatattttgcttgtgaatgggcaaaagacaatataaggagcaacggtgttgcaccctggtataccataacttcacttgtggaacctttgcttgcgaacaaacagcttgttagtgagataatatctcgaacgccgataaagcggatggcagaaacacatgaagtttcatccttggtgactttcctttgcctgccagcagcatcctacatcactgg

SEQ ID NO: 281001 - DNA, 273 bp, Glycine max
aaaaatgtggtcacatggctgggaaagtgcttgttgccatcagtgaacacatcaacaggcttgtggctgcaaggcttcagtttgatgtcatgggggtggaaactgttctggtggcaagaacagatgcagaagctgctaatttgattcaatcaaacattgacacaagggaccatcaatttatcttgggagtgaccaaccccaaccttaaggggaagagcttagcaactcttatgcaacaaggcatggctgctggaaaaaatggagctgagcttc

SEQ ID NO: 281002 - DNA, 271 bp, Glycine max
agcaactgggtttggaaccactttcatgatggacaatgttttgaccgagggtccagagctgagctcgaagcacgttgggagggctcaggggctgtttggcttggcctctttggaggaccgtggaatggtgatgctcattaacttggctttcagtgagggtgagtatgctggcagcactctcagcatgcttgggaggaaccctgttcaggacactgttagggaaatgcccattgttggaggcacgggcgtgttcagtttgccaagggctatg

SEQ ID NO: 281003 - DNA, 262 bp, Glycine max
gcttaaaggagttaaagagtaaaagcaccgtctccgtctccactctcggcttcttcttcgttgcgctttttcccaaaaccaattgcatcactctcgtccgttaccgccgctgccctagaccaccgcaagcgacgtcgcacaccgccttcatccgttagggcaaaaatgagtcgaggaagtggaggtggatacgatcgtcacatcactattttctcccctgaaggacgtctctttcaagtggagtatgctttcaaggctgtga

SEQ ID NO: 281004 - DNA, 272 bp, Glycine max
ctaattctcatttcttcatcgttcgattcttctcctcctaaagatgcagatcttcgtgaaaactttgaccggtaagaccatcacccttgaggtggagtcctccgacaccatcgataacgtgaaagctaagattcaagacaaggaagggatcccacctgaccagcagagacttatctttgcgggtaaacagcttgaggatggtcgaacccttgccgactacaacatccaaaaggaatccactctccacctcgtgcttcgcctcaggggtggca

SEQ ID NO: 281005 - DNA, 273 bp, Glycine max
agaacaggcccaagccgcctctcataataacgcgcgaacccgagcccgccatgagcccgttcattctagaaatcccgggcggaagcgacgtcgtcgaagccctagcccggttcagccgcagaaaaaacactggcctgtgcgtgttaaccggttcgggaaccgtcgccaacgtcactctccgtcaaccttctttctctcccgccggcgccaccgtcgccaccgtcactttccacggccgcttcgatatcctctccatgtccgccaccttcctcc

SEQ ID NO: 281006 - DNA, 262 bp, Glycine max
  unsure (1)..(262): unsure at all n locations
cgaaggggaaagagagtaatcagcagagaaattcatcgtcgtagttatgggtaaagttcacggatcacttgcacgtgccggtaaggttagaggccaaaccccaaaagtggccnnnnnnnnnnnnnnnnnnnnnccacgtggccgcgctcacaagaggatgcagtataatcgccgattcgtcaccgccgtggtgggattcggcaagaagaggggacctaactcgtctgagaagtgaggctgangcttaaagaatatgtcacta

SEQ ID NO: 281007 - DNA, 259 bp, Glycine max
  unsure (1)..(259): unsure at all n locations
gaaggacttggggatagacttggtgattgaaggaaccggggtgtttgtgcacagagaaggtgcagggaaacacattcaagcaggagctaagaaggtgctcatcactgctcctggtaaaggagatatccccacctacgtggttggtgtcnntgagtangnctacagcnctgatgancccatcatcagcaatgcctcnngcancactaactgccttgcaccctntgncaaggtcctngatcagaaattcggtatcatcaag

SEQ ID NO: 281008 - DNA, 269 bp, Glycine max
  unsure (1)..(269): unsure at all n locations
gtgatttcngtgagtgatcggtgttcacttgatctcatcataatcgtcagcgtcaattgnagncagatgccgntcagaaacatcgccgtcggaaggcctgaagaggcgantcaccccgacacgttgaaggcggctttggctgagttcatctcaaccttcatcttcgtgttcgccggctcaggctccggcatcgcctacaacaagctcaccgaancgggcgctnccacccctgccggcctcatctccgcctccatcgcccagcattncgc

SEQ ID NO: 281009 - DNA, 271 bp, Glycine max
gtctgaaagctattctccaccgtagccgcaagcttcgccgtttgaaacagtgcctcaaccatggcagaacaaacagagaaggcttttctgaagcaaccaaaagtgtttctatgctctaagaaaggtgggaagggaaagaggcctgggaaaggtgggaatcgcttttggaagtcaattgggcttggattcaagactcccagagatgccattgaaggaacatatattgacaagaagtgccccttcactggcaatgtttccattcggggtcgta

SEQ ID NO: 281010 - DNA, 258 bp, Glycine max
gttgcgttgaagcaggccactactcccgaatatagagcatatcaagagcaagttctcagcaacagctttaaatttgcacaggctctgagtgagagaagctatgagcttgtctctggtggaaccgagaatcacctggttttggtgaatctgaagaataagggtattgatggctccagagttgagaaggtgttggaagcagttcatattgcagctaataaaaacactgttcctggagatgtgtctgccatggttcctggt

SEQ ID NO: 281011 - DNA, 255 bp, Glycine max
atcttatcttatccctctaatcactctagctgttgcaaatttctactatttttcaatggcttctgcagatgttgagttccgttgctttgttggtgggcttgcttgggtcaccggcaacgatgccctcgagaaagccttttcaatctacggcgacatcgttgaatcgaaggttatcaacgaccgtgagactggaaggtccagaggattcggatttgtgaccttcgcctcagagcagtcaatgaaagatgcgatcgc

SEQ ID NO: 281012 - DNA, 255 bp, Glycine max
  unsure (1)..(255): unsure at all n locations
ggttatgatggagtcactgatgtgcctccgaagggccggtgctgatatcatcctcacatattctgctctgcaagctgccagatgtttgtgtggagagaagaggtgaagttctctgattatgtagggcgttgttcatgtagaaggttgaagagtttataataccagtatctgctggattttggttattgtaaattgtttaagagggacatggnggtttgtgtatagagagacattcctaattaaatattagggccc

SEQ ID NO: 281013 - DNA, 260 bp, Glycine max
  unsure (1)..(260): unsure at all n locations
aatagctaagggcattggaaatggcattccccttggtgctgttgtaactactccagagattgcagaggtcttaacccgccggagctacttcaacacctttggtggcaaccctgtttgcactgctgcagggttggctgtnttgaaagtaatagagaaagagcagcttcaacagaacgcgtttgtggttggatcccatttgaaagaaaggctcactgccctcaaggacaaatatgaattaattggtgatgtcagaggaagng

SEQ ID NO: 281014 - DNA, 264 bp, Glycine max
  unsure (1)..(264): unsure at all n locations
gtgcgcagggcctgctatggtgttttgaggtttnttatggagagtggtgctaagggatgcgaggtcattgtgagtggtcaattgagagcccagagagccaaatctatgaagtttaaggatgggtacatgatttcttctgggcaacctgtcaaagattacattgactctgcagttgagacatgtgctcctgagacagggtgttcttggcattaaggtgaagatcatgcttgattgggatcctaaggggaaacagggtcctaaaac

SEQ ID NO: 281015 - DNA, 267 bp, Glycine max
  unsure (1)..(267): unsure at all n locations
gcagaagagcgtcgcagtcgcaaccctaatcagaagaagcgcanttcaagcgagtgacagccaccagccatgggtcgtatgcacagccgcggtaagggtatatcctcttctgctttgccctacaaaaggacacctcctagctggctcaagatctcttcgcaagatgtcgaagaaaatatctgcaagtttgcgaagaaaggtttgaccccgtctcagattggtgtcattctcagagattctcacggtattgctcaggtcaatagcgtc

SEQ ID NO: 281016 - DNA, 272 bp, Glycine max
gctgcagttgactggtggacatttggagtttttctctacgaacttttgtacggcagaacaccctttaaaggttcaaacaatgaagaaacattggccaacgtagtgttgctgggtcttcgattccccgagcacccaaatgttagtttccaagcaaaggatctgataagagggttgttggttaaagagcctgaaaaccgtttgggttcagagaaaggggctgccgagattaaacagcatcccttcttcgagggccttaactgggccttaattcg

SEQ ID NO: 281017 - DNA, 258 bp, Glycine max
  unsure (1)..(258): unsure at all n locations
gttagaggttgggcttttgctccacatgctgatgtgatatggatggaaactgnaagcccaaatgtgattgagtgcacacagttttctganggggttaggtcaaagnaccctcagangatgctggggtacaanctctcnccatctttcaantgggatgcttctggcatgantnatgnacaaatgagggacntcattccaaagattgcaangttggggtatgtgnggcagtncatcacagtgggagggctgcattctnat

SEQ ID NO: 281018 - DNA, 255 bp, Glycine max
  unsure (1)..(255): unsure at all n locations
aggaaatgaattcaaacgtgaaggttcaggacgtggtaactggggagcccaaactgatgaacttgctcaggtaactgatgaggttgcgaatgaaactgaaaagaatttgggtgatgagaagcctgcagttgaagaagatgtagctgatggtaacaaggacagccctactaatgaaactgaagaaaaannncctgaagataaggagatgactctggangnnnnngaaaaagtgttggaagagagaaggaaggcctt

SEQ ID NO: 281019 - DNA, 257 bp, Glycine max
  unsure (1)..(257): unsure at all n locations
gaaaatggcgcagtgtgtgaccaacacattcgtgcaaggaaaaccctttcttccagttgcagcagctcccactaaaaatgttcggagagcggttcagtgcggtgtgtggtgcaagaagaaggagatacacccgcaattctacgaggaatcgaaggtgtactgcaacggggagctggtgctgacgacaggtgggacccagaaggaatacgtnntggacgtgtggtcggggaaccaccccttctacctcggaagccggt

SEQ ID NO: 281020 - DNA, 261 bp, Glycine max
aaagaagtctcactaccaccagaaccatcctcagatgatgataatgccgtgaacttgatggtaaaaatgccagatggcaatcgtcgtggacgtcgattcctaagatctgataggctacagtctctttttgactacatagatattggtagggtggtgaaaccaggcaattacagactggtgagaccatatcctaggcgtgcttttagtgatggagaaagtgctgcgacattggatgaacttggcctaaccaacaagcaagaa

SEQ ID NO: 281021 - DNA, 260 bp, Glycine max
  unsure (1)..(260): unsure at all n locations
gcctcggctagggttcggaaacgaagaagggttctgttttcttttcgcgatgagggccaagtggaagaagaagcgtatgaggaggctgaagaggaagcgccgaaagatgagacagagatccaagtagtgcgttaaacctagtttgtttccgttgcttttacaattgcttatgttgtcaaataggacacccagttgttagtggcactggtctctcctttttgatgttttganacattttgttggatttattcgtcttatgt

SEQ ID NO: 281022 - DNA, 266 bp, Glycine max
  unsure (1)..(266): unsure at all n locations
gtgtcgcaatagtaattcaacctagtacgagaggaaccgttgattcgcacaattggtcatcgcgcttggttgaaaagccagtggcgcgaantaccgtgcgttggattatgactgaacgcctctaagtcagaatccgggctagaagcgacgcgtgncgcccgccgtccgtttgccgaccagcagtagggggcctcggccccccaaaggcacgtgccgttggtgaccctcgtgaggcggattagccctacgagacgccttgaagcgca

SEQ ID NO: 281023 - DNA, 267 bp, Glycine max
gaagagaattgccaaggccaaatcggaggcagcagagtaccagaaactccttgcctccaggttgaaggagcagagagaccgccgcagtgagagtttggctaagaggagatccaagctttccagtgctgccaaggcagctgtgtaagctgctttcagatataaagagatatggtgaagttttaatcatcatatttagtttttgtttgttattttataaccggctgttgtgataaactctggttttgctatttttgattacattgagtt

SEQ ID NO: 281024 - DNA, 270 bp, Glycine max
ggcaagatgtcgaagagaggacgcggtggttcggcggggaacaagttccggatgtcgctgggtctgccggtggcggcgacggtgaactgcgccgacaatacgggggcgaagaacctctacatcatatcggtgaaagggatcaaagggcgtttgaaccgtctcccctcggcttgcgttggcgacatggtgatggccaccgtgaagaaggggaaacccgatctgaggaagaaggttttgccagctgtcattgttcgccagcgcaaccatggc

SEQ ID NO: 281025 - DNA, 266 bp, Glycine max
gccgtgtggttcaaggctggttcacagatcttctcggagggaggacttgactacttgggcaacccaaacctgatccatgctcaaagcatccttgccatctgggctgttcaggttgtgctcatgggttttgttgaaggttacagagttggtggaggaccccttggtgaaggacttgaccctatctaccctggtggtgcatttgaccctcttggtctggctgatgaccctgatgcattcgctgagttgaaggtcaaggaactccaaga

SEQ ID NO: 281026 - DNA, 276 bp, Glycine max
ccctcttcaacttcttccactttccgaccaacgttgattcgctgcgccaggccaatgagcggcaggcgctgtttagccgcattgctcctgtctatgataacctgaatgatttgctgagccttgggcaacaccggatttggaagagaatggcagtgtcctggactggagcgaaaatgggagactgtgtgttggatgtttgctgtggaagtggggacttatcctttctcttgtccgacaaagttggctctcatggcaaggtgattggtcttgattctc

SEQ ID NO: 281027 - DNA, 274 bp, Glycine max
aagtagttgagaactaagaagaaggaaatggcttcctcaatgatctcctccccagctgttaccaccgtccaaccgtgccggtgccggcatggttgctccattcaccggcctcaaatccatggctggcttccccacgaggaagaccaacaatgacattacctccattgctagcaacggtggaagagtacaatgcatgcaggtgtggccaccaattggcaagaagaagttcgagactcttcctacttgccagacctcgatgatgcccattggcaaa

SEQ ID NO: 281028 - DNA, 272 bp, Glycine max
ggttgatgaacagatgatcaatgttcagaacaagaactcatcgtacttcgtggaatggatccccaacaatgtgaaatccactgtctgtgacatccctccaactgggttgaaaatggcatcaaccttcattggcaattctacctctattcaagaaatgttcaggagggtgagcgagcaattcacggctatgttccgcagaaaggccttctgcattggtatactggagaaggtatggatgaaatggagttcatgaagctgagagcaacatgaat

SEQ ID NO: 281029 - DNA, 268 bp, Glycine max
  unsure (1)..(268): unsure at all n locations
ggatagggatggagaaagtgaaggtgcttcggcgactcctcgagacaccaggggttcaccaggggccagcctgttncgacgctctgggtgcgaantccatagaatccgctggcttcccctactgcatcaccagtggcttctccatcgccgcttccaggttggctctgcccgacaccggcttcatctcctacggcgaaatgctggagcagggccaactcatcacccaagccgtttccatcccgtcattggcgacgccgacaacggctac

SEQ ID NO: 281030 - DNA, 268 bp, Glycine max
  unsure (1)..(268): unsure at all n locations
ctggtgaggaacattgttgaacaggctgcagtcagagatgtgcaggaagcttgtgtctatgaacaatatactcttccgaaactctatgtgaagatgcagtactgtgtttcttgtgctatccactctcatgttgtgagggttcgatcccgcactgacaggaggaaacgtgagcctccacagagattcatcaggcgcagggatgatgcacctaggcctggtcagcccggcggccaaggacctcgtcctgctggnacagcagcacctgtnc

SEQ ID NO: 281031 - DNA, 264 bp, Glycine max
  unsure (1)..(264): unsure at all n locations
gtggaccacaggagcttgttcagcaggtattgagtggaggttggagagaagantccaagttgctggagaaaatgcacttccaaggtatgatgctacagcttacaaccaaatcatactgaatgcaagaccacaaggtgtcaacaacaatggccctccaaaactaagcatgtttggagtaacataccttcgtctatccagatgatctactgcaaaaatcaaattttaatatgttcaaaaaatttgtgctaaagatgcatgcagatc

SEQ ID NO: 281032 - DNA, 264 bp, Glycine max
cttcccttctccaacatgccaaacgacagcgttctgagtcttttcttcttcgttaccctcttcacatgccttctctctgctaattcccacgatgaccatattttcctaccgagtcaactccatgacgatgactcagtgagttgcactgctaccgacccaaaccttaactacaagccggtgatcggaatcctgacccaccccggcgacggtgcctctggccggctcagcaacgccaccggggtttcttacatcgccgcctcctag

SEQ ID NO: 281033 - DNA, 271 bp, Glycine max
  unsure (1)..(271): unsure at all n locations
gcggtggnngtggtgacggcgaggaccccgagcaggccaagctccgggccgggctcaactcggccatcataagggaaaagcccaacgtgaagtggaacgacgtcgcagggttggagagcgccaaacaggccttgcaggaggctgtgattttgcctgtgaagttccctcagttctttactgggaaaagacgaccctggagagctttcttgttgtatggacctcctggaacgggaaaatcatatttagccaaggcagttgcaacagaagctga

SEQ ID NO: 281034 - DNA, 268 bp, Glycine max
gttgtgtagtatttggagcgacgggaatgtgaatatgacagaaagactcttgtaaacttcttcaaggaaggagattcactgcaccctactttaactgatgtaatagtattcacatctactccagacaaagtgaacaacaaatactacctgggacctgctccacttgaagacatggctaggcaaatagcaactgcatatggccctgcggaaacaacagggattacattttccttctagaaaaggccatgtatgatattggtaagttatc

SEQ ID NO: 281035 - DNA, 262 bp, Glycine max
  unsure (1)..(262): unsure at all n locations
gcagaagancaagtagttnagaactaagaangagaagcaaattgnttcctcaatgatctcttccccagctgttaccactgtccaaccgtgccggtgccngcatggttgctccattcactggcctcaagtccatggctggcttccccaccaggaagaccaataatgacattacctccattgctagcaacggtggaagagtgcaatgcatgcaggtgtggccancattggcaagaagaagtatgagactctttcctacctgcca

SEQ ID NO: 281036 - DNA, 268 bp, Glycine max
  unsure (1)..(268): unsure at all n locations
gggatgaggaggttaattacttcccttcaaggtatgatcctgttcgtcatgcagaaacgttccccatacctcctgctatctgcagtggaaggcgtgaaaagtgtggaattgagaaggagaacaactttaagcagcccggagagagatacnnatcttgggcacctgacaggcaagatagatttaatcnncgatgggttgatgctttatctgacccacgggtcacccatgaaatccgcagtgtctggatatcttactggtctcaggctga

SEQ ID NO: 281037 - DNA, 260 bp, Glycine max
  unsure (1)..(260): unsure at all n locations
gcactgaaaggggcccatttcattgaattatgcactcaacgtaacattcccttggtcttccttcagaacatcactggattcatggtnggctcaagatctgaggcaaatggcatagcaaagtctggtgcaaaaatggtgatggctgtttcttgtgcaaaggtacctaaagtcactataatggttggaggaagcntggtgcaggaaactatgcaatgtgcggtcgtgcctatagtcccatttcttgttccttggcctaatgc

SEQ ID NO: 281038 - DNA, 264 bp, Glycine max
  unsure (1)..(264): unsure at all n locations
agcatttctactctccaaacactcgaattcgcattctcttcactctttccccaatccatggccaagggagagaagaaaccggcggagaagaagcccgcggagaaggctccggcggagaaaacaaaagccgagaagaagatcccaaaggaacccgcctcgggcgnnnnnnnnnnnnnnnnnnnnnnnnnnnnnagcgtggagacgtacaagatctacatattcaaggtgctgaagcaagtgcaccctgacatcgggatctccagc

SEQ ID NO: 281039 - DNA, 262 bp, Glycine max
  unsure (1)..(262): unsure at all n locations
ggnagtatccgaattcttacgtgttcgagatcgacatgccgggtttgaaatctggggacataaaggttcaagttgaagacgacaacctgcttctgatatgtggggaacgaaagagggacgaagagaaagaaggggcgaagtatttgagaatggagagaagggttgggaagttaatgcgcaagtttgtgctgcctgagaatgccaacactgatgcaatctctgctgtgtgccaagatggtgtgctagtgtaaccgtgcagaaa

SEQ ID NO: 281040 - DNA, 258 bp, Glycine max
agaacaaatatcctccacttcttctacccccagcagtagaacaagaggtgccggagcaagtttcgtcacgccggaacgatgaccggcggcggatccacggggaggttgccgacgtggaaggagagagagaacaacaagaggagagagagaagacgaagagcgattgcagctaagatctacactggccttcgagcccaggggaactacaagcttccaaagcactgcgacaacaacgaggtcctgaaagctctctgcgcc

SEQ ID NO: 281041 - DNA, 257 bp, Glycine max
  unsure (1)..(257): unsure at all n locations
gtttgtntttnctctcacctgaaaatgncntgctgcgntggtaactgtggttgcggaagctcctgcaagtgcggcaacggctgcggangctgcaagatgtacccagacttgagctacactgagtcaaccaccaccgagaccttggtcatgggagtggcacctgttaaggctcantttgagggtgctgaaatgggtgtgcccgctgagaacgatggctgcaaatgtggaccaaactgctcctgcaacccctgcacttg

SEQ ID NO: 281042 - DNA, 257 bp, Glycine max
  unsure (1)..(257): unsure at all n locations
acaacattttggntgtcacgtttctttgcagatgtttggatgcttntccccaanngaggaagagtatattgagtggtttcagaaggcagggtttaaggacgtccaactaaaaaggattggcccaaaatggtatcgtggggttcgccgtcatggcttgattatgggttgttcagtgaccggtgttaaacctgcatctggagattctccttgcnccttggtccaaaggaagaagatgttgaaaagcccgttaatccttt

SEQ ID NO: 281043 - DNA, 261 bp, Glycine max
gcttcttcttccgttttcctgaatcggtgtgaacaatggcgacgtacgctgcgatgaaacccaccaagccagggttggaggagtcccaggaacagatccataagataaggatcaccctttcttccaagcacgtcaaaaacctcgagaaggtttgtgcggacttggttcgtggtgcaaaggacaagcgcctcagggttaagggacctgttaggatgcccactaaggttcttcacatcactaccaggaagtccccctgtggtg

SEQ ID NO: 281044 - DNA, 258 bp, Glycine max
ctaatctttggtatggcatggagggttcatttgaagagcccatgggaagggaaagtttgcagaagctttggcaaaagtacaaagtagacattggattttatggtcatgtccataactatgaaagagtatgccccatttatcagaatcaatgtgtgaatgaagaaaagcatcactactctggcactgtgaatggaacaattcatgtggttgttggtggagggggaagtcacctgtcagacttcacaccatcacccccta

SEQ ID NO: 281045 - DNA, 258 bp, Glycine max
ctcaacagttataaggctgacagattttggtgtagaaggagctgatgcgaaaaacatcttttatttgagggaggttgatgatgctgacaaattgtatgaggcaatcaaggcaaagaagaatgggaaagctgtggttgttgggggaggatacattggtctggagcttagtgcagtgttgaaactcaacaatattgatgttaccatggtctacccggagccttggtgtatgccacgactttttacggctggtatagctga

SEQ ID NO: 281046 - DNA, 258 bp, Glycine max
aaactgataaggcagggatacaacattgttgggatcattggagaccaatggagcgatctcctcggaggccacagaggcgaaagcaggacctttaagcttcctaatcccctgtactacattcagtagttccttcacctctcaacaatctagcttgctcctatctatctatatgtaataagatgcgttcaaataggggcactagcttcactttatgttgtttcagctgtgtgtcaacaagtcatgtaagagacttcacta

SEQ ID NO: 281047 - DNA, 249 bp, Glycine max
  unsure (1)..(249): unsure at all n locations
tnnnttgtnagnatgcaataantccatcagggganntatctttnctagangccanccctcgagcttctcgtacagatccatntgtancanaagcaattgggcatcccttggctnaatatgcntcnctngtcatgtctgnaaagaccctcnatgatttaacgtttncaaaagangttatccctaaatatgngtcagtcnnggaagctgtccttccttttcaaagttcccaggctgtgacgtgtntttaag

SEQ ID NO: 281048 - DNA, 252 bp, Glycine max
gcaaacgctgccgaattcgttatcgctttgcactagcagctttgaaacccggttcatccgaagcccttcaccgaaccatgtcgaggagaaaggttagagagccaaaggaggaaaatgtgactctgggtccagctgttagagatggtgaacacgtttttggcgttgctcgcatctttgcctccttcaacgacaccttcatccatgtcactgatttgtctggcagggaaacccttgtccgaatcactggtggta

SEQ ID NO: 281049 - DNA, 251 bp, Glycine max
  unsure (1)..(251): unsure at all n locations
caactttcgatggtaggatagtggcctaccatggtggtgacgggtgacggagaattagggttcgattccggagagggagcctgagaaacggctaccacatccaaggaaggcagcaggcgcgcaaattacccaatcctgacacggggangtagtgacaataaataacaataccgggctcattgagtctggtaattggaatgagtacaatctaaatcccttaacgaggatccattggagggcaagtctggtgc

SEQ ID NO: 281050 - DNA, 255 bp, Glycine max
  unsure (1)..(255): unsure at all n locations
gttctcttctgtcattgcttctcctccacacacgcacagaganacacacttttgcagtcacattgagaatggggcgtgttcgcacgaagacggtgaagaaatcctcgcggcaagtgatagagaggtactactcccgcatgacgctggacttccacacgaacaagaaggttctggaagaggtggccatcattccctccaagaggctccgcaacaagatcgcggggttctccacccatctcatgaagcggatccagg

SEQ ID NO: 281051 - DNA, 261 bp, Glycine max
  unsure (1)..(261): unsure at all n locations
ccttctcttngtttttgccggtgttggttcagccatagccnatgctaagttgacatcagatgcagctcttgatccaactgggttggtagccgttgctatttgccatggttttgctctcttcgttgctgtttctgttggagccaacatttctggtggccatgtgaacccggcgtntgaccttngggttgcgcgttggggccacagnaccagnctcacgngctctttngncgngattncacagcgtctcggcgccanagggca

SEQ ID NO: 281052 - DNA, 261 bp, Glycine max
  unsure (1)..(261): unsure at all n locations
ccgagtagcnacaatgtcgaatcgaggtcgcggaggatcggcgggaaacaagttccgcatgtcgctgggtctnccggtggcggcgacggtgaactgcgccgacaacaccggcgcgaagaacctctacatcatatcagttaaggggatcangggtaggctgaaccggttgccgtcagcttgcnttcggagacagnggttatggccaccgtcaagaaggganagcccgagngncggnagaatgntcatccgccggcatntgnc

SEQ ID NO: 281053 - DNA, 257 bp, Glycine max
  unsure (1)..(257): unsure at all n locations
accataaccatgtcagacgaggagcaccacttcgagtcaaaggctgatgctggagcatcaaagacattnccccagcangctggaaccatccgcaaaaacggttacattgtcatcaagaacaggccatgcaaggttgtggaggtttcaacttccaaaactggcaagcatggacacgcaaagngtcactttgttgcaattganatcttnactggnaaaaagcttgaggatattgtccagctnccaaactgtgatgtccc

SEQ ID NO: 281054 - DNA, 257 bp, Glycine max
  unsure (1)..(257): unsure at all n locations
cgcatcgctgcgttttccgaatcgaaaggtacgtaagtnacaatggtggaggccaagggtaggaaagaggaggtcgtcactcgagagttcaccatcaacctccacaaacgcttgcntggntgcacattcaagaagaaggctcctaaagcaattaaggagataaggnagtttgctcagaaagcgatggggacgaatgatgtgagagtggatgtgaagctgaacaaggctgtgtggagccaggggatcggagcgnccga

SEQ ID NO: 281055 - DNA, 262 bp, Glycine max
  unsure (1)..(262): unsure at all n locations
agcaaatggcttcctcantgatctcttccccanctgttaccactntcaaccgtgccggtgccngcatgnttgctccattcactgncctcaagtccatggctgtcttccccnccagananaccannaatganattacctccattgctagcaaccgttggaagantgcaatgcaggcnntgtggcnaccagtnggcaagaagaattttgagantctttccgacctnnnagannttgntgatgcncnntgggcagantaagtngt

SEQ ID NO: 281056 - DNA, 256 bp, Glycine max
  unsure (1)..(256): unsure at all n locations
agctgacagaccagcatccatggctttcgtcaaccagattggtcgtcaagccagacatgctgttcgggaagcgcggcaagagtggcttagttgcnctcaatttagacatagctcaagtagccgagttcgtcaaagcacgcctcggcgtttaaggttnggatggaaggttgcaaggngcctataacnacnttnatngcngaacggttngttcccnaggacnatggntcngntncggccaagggtntnnaggntnggc

SEQ ID NO: 281057 - DNA, 250 bp, Glycine max
  unsure (1)..(250): unsure at all n locations
ttggatgaggataccaaggtcaaggggaaggcagccattgatgttgtgtgcaacccattggggaaatctggaggagctctaattcagcagttcatgaacttaacttttggttcactagctaactcaactccgtacctaggaggggtccttctggtgattgttcttgcctggttatcagcagccaagtcgctnatancnngttactgccntncgtcgagaagaagaactnagaaaggatngagagagcagt

SEQ ID NO: 281058 - DNA, 255 bp, Glycine max
  unsure (1)..(255): unsure at all n locations
atgcaatcatggaaatatgccgctcatttgatcaaatatttaaagaccatcttgatggcgtgcggcctggaggtgataaaatttataatgnctttgacaatcagctccccgctgctttaaaaaggttgcagtttgataagcagctttcaatggaaaatataaggaaacttattactgaagctgatgggtatnagcctcatcttatagctccagaacaaggatatcgtcgtctaattgaacngctctaataactag

SEQ ID NO: 281059 - DNA, 256 bp, Glycine max
  unsure (1)..(256): unsure at all n locations
acagagatgacgacccgattcaagaagaaccgcaagaagcgcggccacgtgagcgccggtcatggccgtatcggaaagcaccgtaagcaccccggcggccggggaaacnccggtggcatgcatcaccacaggatcctgttcgacaagtaccatccgggcttcttcggtaaggtgggaatgaggtacttccataagcttcgcaataaattctactcccccatcgtcaacgtcgaaaagctaggtctctcataccccg

SEQ ID NO: 281060 - DNA, 257 bp, Glycine max
  unsure (1)..(257): unsure at all n locations
cacactcagatcaggaaaatgaaagggttgaagcagaagaaagcccatatcatggaaattcaggttaatggtggtagtattgcacaaaaggtggactttgcatacagtttctttgagaaacaggttcctattgatgcagtgttccagaaggatganatgattgacatcattggtgtgaccaagggtaaaggttatgagggttttgtcacgcgttggggtnttacccgcttncccngnaaccgcangngtttgggggg

SEQ ID NO: 281061 - DNA, 255 bp, Glycine max
  unsure (1)..(255): unsure at all n locations
gaagatgttaaggttggagcacagaanttctcggagaggcaagcactgggtacaggagctaagagtgacaaggactacaaggaggcaccaccagcacccttgtttgagccaggggagttacnagtcatggtctttttacagagctgggatcgcagagtttgtggccacattcttgttcctctacatcactgtcttgactgtcatgggtgtnaacagggcgccaaanangtgctcttgtgtggnttnngggttttg

SEQ ID NO: 281062 - DNA, 264 bp, Glycine max
  unsure (1)..(264): unsure at all n locations
cacaaacccagctcaatctgatcctggnactattcgtggtgacnttgctattganattggaaggantgttatccatggaagtgnttcagtggagantgctaacaaggnaattgcattgtggttncctgaggtgnccctgctaactggcaaagctcccagcantcttggatctntgagtaatacaaatgcctcaagttgatcttgaaattgggccttaggttgatccagattatctacatgttttctgtttttgtccattgttgg

SEQ ID NO: 281063 - DNA, 265 bp, Glycine max
  unsure (1)..(265): unsure at all n locations
ctttcagattgtgtgaagatgggggcgggtgagccgaactgatgtncctcctngccaacaggaagtcagaggttgaccctttgaagcgggtgccatttgaaaaacctccatttagtctcagccnaatcaagaaggtcattccacctcactgtttccagcgttctgttttccgctcattctcctatgttgtttacganctcaccatagccgtctgcctctattatgttgccacccattanttcnacntcnttnccaggcctctgtg

SEQ ID NO: 281064 - DNA, 270 bp, Glycine max
  unsure (1)..(270): unsure at all n locations
gntgactacaccatggacaagagtgcaaatcaaggtgcctgtaaaattcattgcaggtgaattggacatggtatacacctcgctangaatcaaggagtatatccacggtggaggtttcaaggaagacgtgccgaatttagaacaagtgattgtgcagaaaggagttgctcacttcaataatcaggangcngcagagggntatcagtanattanttncgnggttttttgnacnaanttctgantntgancnaaantggntccccacctggg

SEQ ID NO: 281065 - DNA, 270 bp, Glycine max
  unsure (1)..(270): unsure at all n locations
gcagcggcggcaacagngagagaagatgaagttcaatccacgtgtgtcgagcagccgccgcaagagccgaaaggctnattttcacggcgccatcgagcgtgcggcgggtgcttatgagcgcncctctgtcggcggagtggcggtctaagtacaacgtgaggtcgatncccagtacggaaggaggangangtgcaggtnatgcgaggaacatanaagggtcgcgagggganggtnactcaggtctancgtccgaaagtgggtgattcacat

SEQ ID NO: 281066 - DNA, 252 bp, Glycine max
  unsure (1)..(252): unsure at all n locations
catttctggtgtctccgttgatccaaagcttgccaaattacaagaaaaggatatcatagagatgatattctttcctgtggtgaatgaggcttgtcgggtccttgatgaaggtatcgcagtcaaagcancagatcttgatatttctgctatcatgggcatgggttttcncccttacaggggaggcatcatattctgggctgattctcttggatccaagtacatatattcaagattggagaaatggtcagagtt

SEQ ID NO: 281067 - DNA, 252 bp, Glycine max
  unsure (1)..(252): unsure at all n locations
aatgagtcacctgagaaccttaacaagaagctcgatttggtcaatggagtgctcttcactggtgggtgggctgtttactggtccatatttggatactcttggaaacatttttaagaaagctttagagaaaaatgatgctggagaccatttcccagtaattgccttcannttaggtggaaacctcgtnataaggatcgtaagcgagcnaactgatattcttgaaccatttactgcgtcgagtttgcnaagttc

SEQ ID NO: 281068 - DNA, 254 bp, Glycine max
  unsure (1)..(254): unsure at all n locations
ctcttcctcaccgattgcnagaatggaatttcgatgctcagncatctcttttaccattctcttctctcttgctcttgcaggagagagccatgtccatgcatcgctacctgaggaagattattgggaagctgtttggccaaacactcccattcccactgcactgcgagagcttctaaagcctctccctgcaggtgtncgaaatcgatgaactccctaagcaaattgatgatacacagtacccaaaaacattcttc

SEQ ID NO: 281069 - DNA, 262 bp, Glycine max
  unsure (1)..(262): unsure at all n locations
tgtccaaacctccagagagcaanacaccaaagggaacatcagtcatcaacctttttaccacagccttctgcaaaggcatgcctcaaagcaagaggaacatcagtcatcaacctttttaccacagccttctcaaaggcatgcctcanagcaagaggatcataaggtgctgagggaatagcctcagagaaccatggaggattgtaccatctgcggaacgtctctctttgctagagtacaagtgaccaggtggaaaagactcaaa

SEQ ID NO: 281070 - DNA, 265 bp, Glycine max
  unsure (1)..(265): unsure at all n locations
gtccaaacctccagagagcaaaacaccaaagggaacatcagtcatcaacctttttaccacagccttctcncaggcatgcctcanagcaagaggaacatcagtcatcaacctttttaccacagccttctcaaaggcatgcctcanagcaagaggatcataaggtgctgagggaatagcctcagagaaccatggaggattgtaccatctgcggaacgtctctctttgctagagtacaagtgaccaggtggaaaagactcaaaatgtt

SEQ ID NO: 281071 - DNA, 250 bp, Glycine max
  unsure (1)..(250): unsure at all n locations
gttatntaaaagctgttagagatctttgctccaaatantnatgtcttgatgattgctgatgaaattcaaactgggttagcaagaacggggaagatgctggcttgtgagtgggaagaagttcgcccagatgttctgatactagggaaancattgggtggaggagttataccagttagtgcagttcttgcagacaaagatgtgatgctttgtatacaacctggacagcatggaagtacctttggtggaaatc

SEQ ID NO: 281072 - DNA, 262 bp, Glycine max
  unsure (1)..(262): unsure at all n locations
aagagggtagtctttttgaagcagcttccttctggattgcttcttgtaactggtcctttcaaggttaatggagttcctttgagacgtgtgaatcaggcctatgttattggcacatcaaccaaagtagatatctctgctgttaatgttgaccagctttgggngacaaatnctttncggagggaaagcncagaggaggaagaagganggggngaanggcgaagttctttnaggctnagnaagggggaaanagttttttcccccc

SEQ ID NO: 281073 - DNA, 255 bp, Glycine max
  unsure (1)..(255): unsure at all n locations
gggaagaagagaagaagcgaaaatgaacagcaacagcaacgttggagggggattcaggtcaaggttgaatcactacctctatagcggtgacaagaaacatgtcttcgttggtttaactctcatcaccgctgtctttaccatcccatggtactttatgagcagagggaccaaacaccagtctcatcaagattacttggaaaaagctgataaagccaggagccanagactctcatcnnttngnaanantttnaaant

SEQ ID NO: 281074 - DNA, 262 bp, Glycine max
  unsure (1)..(262): unsure at all n locations
aacagatttgcnccttttcaaggaaggaatccgtcctctatgggaggactctgctaantgcaatggtggtanatggantatacgattgcaaaaaggttgtctcaggtcgtttttgggaggacctggttcttgccnnggtgggtgaccaattggattatggggataacatatgtggtgcagtacttagcattcgattcantgaggatatattgagtgtctggnatcgcaatgcttcggaccatcaggctgtaatggctctgng

SEQ ID NO: 281075 - DNA, 248 bp, Glycine max
  unsure (1)..(248): unsure at all n locations
agtngtcattgattctaatactggccgntcaanaggctatggttttgttaggtttggtgatgnnaacgagagaacgagggcaatgaccgaaatgaatggcgtttattgttctagtaggcccatgcgaataggtgttgcaactcccaagaaaacttatggcttccaacaacaatattcttctcaagctgtggtattggctgggggacactcagctaatggtgctgtggcccaaggttcccattctgnag

SEQ ID NO: 281076 - DNA, 247 bp, Glycine max
  unsure (1)..(247): unsure at all n locations
gcagttcaacaccattccaggactgatggagggtcatgccaagcntgattatgccacctgcgtcaaaatttctactgatgcatccatcaaggagatgattcctccgggtgcccttgtcatgctcacaccactcnttgttggantcttcttcggggtggaaacactttcaggtgttcttgccggggctctagtttctggtgtacagattgcnatatcagcatccaacactggcggtgcttgggataat

SEQ ID NO: 281077 - DNA, 261 bp, Glycine max
  unsure (1)..(261): unsure at all n locations
gctnntntnagtatgatnggacagtttgtgtgtggggtncnactctncatattcttgtnnncgaaaaggtcnttggtaccnccaagcanantgatnatnagcagtacgnttgtnagtcccaagctggaggttcattcactgtcnccagggatacctcnggtgaggttctntgcangggtactannatcactctcttcctcaaggaggatcagctagagtaccttgaggagcgccggttnaaggatttgattaagaagcatt

SEQ ID NO: 281078 - DNA, 244 bp, Glycine max
  unsure (1)..(244): unsure at all n locations
gcaagantggnacttcgttgnttngtgatgtccctttctgttctnttcactcttggtnttngcgagagnnagcnatgccaganacgaagatntttggcatgctgtttngccaaacantnccatnccaagttcattgcgagatcttctaaagcctgncnctgcnagtgttnanatcgntgatcacnctntgcaaattgaagaaacacagtgcccganancctncttctatnaagaagacctncat

SEQ ID NO: 281079 - DNA, 247 bp, Glycine max
  unsure (1)..(247): unsure at all n locations
gaagtttaagctttcaccagctttgacagaagttcttggtattgaggttgatacccgcccgagaattgttgctgcgatctggcactatgtgaaggctaggaaattgcaaaacccaaatgaccnttctnactttcactgtgatccgcctcttcagaaagtatttggagaagaaaatatgaagtttacaatggtttctcagaaaatatcatctcatttgttccccccacagcctatacttttggagcat

SEQ ID NO: 281080 - DNA, 248 bp, Glycine max
gaaaaaatggcagcaccaacgccgattcacaaaactgaagaggaatggaaggtcattctctcccccgagcagtttcggatccttcgccagaaaggaactgaattgaagggtacaggagaatataacaagttttttgaagaaggaatttacaactgtgctggctgtgggactcctctttacaagtcttcaaccaagtttgattctggttgtggttggcctgctttctttgagggttttcccggcgccat

SEQ ID NO: 281081 - DNA, 247 bp, Glycine max
  unsure (1)..(247): unsure at all n locations
anaggtgcngctngnatccacattgaggnccagtcttcagtnaccananngatgtggtcacanggctggganagtncttgttgccatcagtgaacacatcnacaggcttntggctgcaaggcttcagtttgatgtcatgggggtggaaactgttctggtggcnagnncagattncagaatctgctaatttgattcnnncaaacttgacacaagggacnntcaatttntcntgggagtgnccaacccc

SEQ ID NO: 281082 - DNA, 243 bp, Glycine max
  unsure (1)..(243): unsure at all n locations
cgacccgattcaagaagaaccgcaagangcgcggccacgtgagcgccggtcatggccgtatcggaaagcaccgtaagcnccccggcggccggggaaacgccggtggcatgcatcaccacaggatcctgttcgacaagtaccatccgggcttcttcggtaaggtgggaatgaggtacttccataagcttcgcaataaattctactcccccatcgtcaacgtcgaaaagctatggtctctcatac

SEQ ID NO: 281083 - DNA, 244 bp, Glycine max
gttctctccgaggaatcaatcaccgttgatgacaaattaggccgaattctgataacttttacgccgaccgtacagcactgtagcatggccacggttattggtctttgtctcagagttaaactgaagcactacttccctcctcatttcaaagtggacatcaaggtttctcctggatctcatgccgacgaagaatcagtcaataagcagttaaatgataaagaaagagtcgctgctgccttggaga

SEQ ID NO: 281084 - DNA, 240 bp, Glycine max
  unsure (1)..(240): unsure at all n locations
cgtgctgtatgcatgatcagcaacaacaccgcagttgctgaggtgttctctcgcattgaccacaagtttgatctgatgtatgccaagagggcttttgttcactggtatgttggtgngggtatggaaganggggagttttctgaggctcgtgaggaccttgctgctcttgagaaggactatnaggaggttggagctgaaggagcggaagatgatgaggaaggagaggactattgataatcg

SEQ ID NO: 281085 - DNA, 246 bp, Glycine max
  unsure (1)..(246): unsure at all n locations
ctcgcgtcgctgctccgtaccagtttcactgcataaatttgagananaactctgcaaacatgttggtttatcaggacctccttacaggtgatgagcttctctcggactccttccgttacaatgaaattgagaatggaatgctgtgggaagttgaggggaagtgggttgttaagggagcagttgatgttgacattggtgcaaaccctccgctgagggtgganaaatttagggggtcnnttncccccc

SEQ ID NO: 281086 - DNA, 247 bp, Glycine max
aagaaaagaaaatcctcaattttctgagcagccaaacactctctctctgtctctcgaaaattctcagtttgcagagaaaatctgaatcatgtcgtggcaagcgtatgtcgacgatcaccttctgtgtgacatcgaaggtaaccacctcactcacgctggctatcatcggccaagacggcagcgtttgggctcagagtaccgacttccctcagttcaaacctgaggagataactggccatcatgaatg

SEQ ID NO: 281087 - DNA, 261 bp, Glycine max
  unsure (1)..(261): unsure at all n locations
ctcatttcanttngcatttgcntatcntttgggcganaangttcccttactngangcttcangtcggnatccatggcgtcgtttcgaagaagctcctcccggaaactccaagaacggcgagaagatcttcaagaccaagtgcgctcagtgccacaccgtggacaaaggtgccggtcacaaacaaggacccaatctgaatggtttgtttgganggcaatctggcacaactcctggatatccnattctactgcttaacaaaaa

SEQ ID NO: 281088 - DNA, 249 bp, Glycine max
  unsure (1)..(249): unsure at all n locations
aacagatttgcaccttttcaaggaaggaatccgtcctctatgggaggactctgctaactgcaatggtggtanatggattatacgattcaaaaaggttgtctcaggtcgtttttgggaggacctggttcttgccttggtgnncgaccaattggattatggggataacatatgtggtgcagtacttagcattcgattcaatgaggatatattgagtgtctggaatcgcaagtcggaccatcagggctgtaa

SEQ ID NO: 281089 - DNA, 250 bp, Glycine max
  unsure (1)..(250): unsure at all n locations
cttcttccaaaatgggtatctctcgtgattccatgcacaagaggcgcncccaccggcgcaagaagaaagcttggaggaagaagagaaagtatgagcttgggangcagccagcaaannntaagctatcaagcaacaagacggttaggaggattngggttcgcggtgggaacgtgaagtggcgcgctttgaggcttgatactgggaactactcttgggggagtgaggctgcaacccgcaagacaaggttctt

SEQ ID NO: 281090 - DNA, 201 bp, Glycine max
  unsure (1)..(201): unsure at all n locations
gtgtttgtgtttnctttttctctcacctgaaaatgtcttgctgcggtggtaactgtggttgcggaagctcctgcaagtgcggcaacgnctgcggaggctgcaagatgtacccagacttgagctacactgagtcaaccaccaccgagaccttggtcatgggagtggcacctgttaaggcccattngagggtgcnnaaagggc

SEQ ID NO: 281091 - DNA, 246 bp, Glycine max
  unsure (1)..(246): unsure at all n locations
gtaaaaatggcgcagtgtgtgaccaaaaacacattcgtgcaaggaaaacccttccttccagttccagcagctcccactaaaaatgttcggagagtggttcagtgcggtgtgtggtgcaggaagaaggagatacacccgcaattccacgaggaagcgaaggtgtactgcaacggggagctggtgctgacgacaggtgggacccagaaggagtacgtggtcgacgtgtggtcggggacnnccttttct

SEQ ID NO: 281092 - DNA, 251 bp, Glycine max
gttgctgtatttggtgtcgactgtgcatcaggagatacttttactgacggttcagttaaatacacaatgacttctatgaatgttcctgagccagtgatgtcattagctgtacagccagtctctaaagattctggagggcaattttcaaaagctttgaatcgcttccaaaaagaagatcctacttttcgtgttggcttggacccggagagtgggcagacaatcattctggaatgggggaactgcatttagat

SEQ ID NO: 281093 - DNA, 251 bp, Glycine max
  unsure (1)..(251): unsure at all n locations
gtactgaggagggcctttgatgatgancaacatccttatctgccaaagnacattttatacaggcagaaagnncaattcagtgatggagttggctatggttggattgatggccttaaagctcatgctgagaaacatgtgactgatagaatgatgctcaatgctgctaacattttccccttcaacacaccaaccaccaaagaagcatactactatagaatgatcnttgagagttcttccctcagaactcagcc

SEQ ID NO: 281094 - DNA, 253 bp, Glycine max
  unsure (1)..(253): unsure at all n locations
ctacgaccntttcaggaaganagaagtgcaatggacatcggaacctatggnctatcctacaccagcagtgaaacngattgagtctanctatgatgtgncngagggagtggatattcggggaagatatgatgcagagtttgcanaaatcctgcacanaagatgctttgaaattccgttgctgnctgcaacgtgagttgcaggaaccactcaagtatgcattagagtgcncntgagnagcnaagaagangtacaa

SEQ ID NO: 281095 - DNA, 248 bp, Glycine max
  unsure (1)..(248): unsure at all n locations
cttgggaaccgttcttcgtgttctccattcncgctctcantccttcatctacgtnannnnnnnnnnnnnnnnnnnnnnnnnnnnnnnnnnnnnnntctcatttnnctcaatacaattntnttctttntttctnaagttttgntacttttctcttcttaaccatagttcacatattatatcatcacatatcatagtgatatcatatcacaatgtgtggcatactngcggtgnggggtngctctgattca

SEQ ID NO: 281096 - DNA, 253 bp, Glycine max
  unsure (1)..(253): unsure at all n locations
gagacacaccttcagcagcagcagccatggttctcaaaaccgaactatgccgattcagcggtgccaagatctacccagggaaaggcatcagattngttcntggtgattctcaggtttaccctgtttgctaactcgaaatgtangaggtatttccacaacaggttgangccatcaaagctcacctggactgcaatgtacagaaagcaacacaagaaggacattgctcaagaagctgtgaagaaaagaagacgtg

SEQ ID NO: 281097 - DNA, 254 bp, Glycine max
  unsure (1)..(254): unsure at all n locations
ctcatncttcatccatngncatggccaccgtcacttntcccnccgttgctattccctcattcactggcctcaaggcaagcgcaggnnaagtgagtgccgcagttaaagtctcagctccccaagccacaaggttgggcatcaaggcttcgctgaaagacgttggagtcgctgttgtggccactgccgcgagtgcagtgctggttagcaacgccatggccattgaagtgttgctgggtggtgatgacgggtctctg

SEQ ID NO: 281098 - DNA, 248 bp, Glycine max
  unsure (1)..(248): unsure at all n locations
gcaaaatctaaatgcccttgttaaggttcttcctggtctacttggtgnncgtgcagatcttgcctcttccaacanngaccttgttgaaatcatacggagatttccaaaagaatactcccgaagagcgcaatgttagatttggtgttagagaacatggaatgggagcaatctgtaatggtattgcncttcatagccccggattcatccatactgtgcaacttttnttgtcttcatggactacatgagag

SEQ ID NO: 281099 - DNA, 248 bp, Glycine max
  unsure (1)..(248): unsure at all n locations
cttcttttgttgtttgtgtgtttgttttttctctcacctgaaaatgtcttgctgcggtggtaactgtggtngcggaagcgcctgcaagtgcggcaacggctgcggaggctgcaagatgtacccagacttgagctacaccgagtcaaccaccaccgagaccttggtcatggnngtggcaccagttaaggctcaattcgagagtgctgaaatgggtgttcccgctgagaacgatggctgcaaatgtggag

SEQ ID NO: 281100 - DNA, 247 bp, Glycine max
  unsure (1)..(247): unsure at all n locations
catcccgtaaccatgtctcagactgttgtcctcaaagttggtatgtcatgtgaaggatgtgttggagcagtgaagagagttctaggaaaattggatggnnnggaatcatatgacattgatttgaaggaacaaaaggtggtagtgnnaggnaatgtccagccagacacagttctgcagaccgtttccanaactgggaagangactaccttctgggaaggtgaagcagcaacatctgaaactagcacag

SEQ ID NO: 281101 - DNA, 246 bp, Glycine max
  unsure (1)..(246): unsure at all n locations
caagtagttgagaactaagaaggagaagcaaatggcttcctcaatgatctcttccnccagctgttaccactgtcaaccgtgccggtgccggcatggttgctccattcactggcctcaagtccatggctggcttccccaccagaaagaccaacaatgacattacctccattgctagcaacggtggaagagtgcaatgcatgcaggtgtggccaccagttggcaagagaatttnaanacntttcccnt

SEQ ID NO: 281102 - DNA, 249 bp, Glycine max
  unsure (1)..(249): unsure at all n locations
atttgagcttaaaccctagccgctcttctcttcattcttcactttggaaacaatcataatggcgttctgtaataaggttggaaatgtcttgaggcagggtgctgctcgcagcacacatgcccctgttgcgtccatgcttaattacatccgctgnntgtcttcaagcaagcttttcattggaggcctttcatatggagttgatgaccagtctcttaaggatgcatttctggcttggagatgtggttgatg

SEQ ID NO: 281103 - DNA, 250 bp, Glycine max
  unsure (1)..(250): unsure at all n locations
atttgttagccccatggtcatgctagggaggaagtcaataacgggaagcttcattgggagcatgaaggagacagaggagatgttggagttctggaaagagaagggtctgagttcgatgattgaaatggtaaacatggattacattaacaaagccttgaaaggttggagaagaatgacgtgagatacaggtttgtngtggatgtcaaaggcagcaaattgtcgatcataanagangaagttactactagcc

SEQ ID NO: 281104 - DNA, 251 bp, Glycine max
  unsure (1)..(251): unsure at all n locations
gggtggtcttgcctgtaaggtcaaagaatgctcgtgggcagcagggttcatatccaatgcaaattgttttatacctccaatatgcccatcattcttcagtctgcccttgtttccaancncgtacttcatctcccagctgctccaccgtaagtacagcggaaacttctttgtagatctattgggaaaatggaaggaatctgaatatggaggtggtcagtctgttccngttggtggtattgcatacacatcat

SEQ ID NO: 281105 - DNA, 248 bp, Glycine max
atggtggtgacttctggacttctgatgctggtccactagaggccttcaagaggtttggaaagaagcttcatagagattgaacataagcttatacagaagaacaaggatgagacgttgagaaaccgcactgggccagctaaaatgccttacactctgctctatccttctagtgaggagggattgacttcagaggaattcccaacagtatctctatctaagggctctctcatgaggttgctgtactactc

SEQ ID NO: 281106 - DNA, 247 bp, Glycine max
  unsure (1)..(247): unsure at all n locations
gcaagatgtcgaagagaggacgcggtggttcggcggggaacaagttccggatgtcgctgggtctgccggtggcggcgacggtgaactgcgccgacaatacgggggcgaagaacctctacatcatatcggtgaaagggatcaaagggcgtttgaaccgtctcccctcggnttcgnttggcgacatggtgatggccaccgtgaagaaggggaaacccgatctgaggaagaagttttgccagctgttctt

SEQ ID NO: 281107 - DNA, 248 bp, Glycine max
  unsure (1)..(248): unsure at all n locations
cgaacgaaaagctccttaacttgcacagtgttgccacaaaaaatggtgacgtgcagttggctgactttgtggaaactgagtatctgggtgaacaggtggaagcaatcaaaagaatatccgagtatgttgctcagctcagaagagttggcaaaggacatggtgtttggcactttgatcagatactcctccacganggaggagatgcagcctgatgattactatattacctcccccnccntncncccntc

SEQ ID NO: 281108 - DNA, 249 bp, Glycine max
ggcaatggcaagagatgaatttgaggacaactctgcctccagccagatattttggctattgaaagaaagtgagctaactcccagtaatgccaatatattggatggtcgatatgcagtctttggctatgtaacagaaaatgaggattacttggcagacctcaaagttggtgatgtcatagaatccattaaagtagtttctgggctggataatttggtaaatccaacctacaaaattgctggctagttctg

SEQ ID NO: 281109 - DNA, 241 bp, Glycine max
  unsure (1)..(241): unsure at all n locations
gctgggcaagcagctcgaggatggaaggaccctcgctgactacaacatccagaaggaatcaacccttcaccttgttcctccgtctccgtggnnggttttaagctcgttgtgtaatgttggatgtgttcccaaaacatttgaagaactttgatgtttnatgggtctgtaataatgtccctgaaaataagttcggtttgtgttgaactcaattgtgtcccataataatagtactctaatatcc

SEQ ID NO: 281110 - DNA, 255 bp, Glycine max
  unsure (1)..(255): unsure at all n locations
cttgacaatgaaggaaagggatgtgtcttcacatatgatgctgttggttcttatgagagggttggatatagctctcagggttctggatccacacttnttatgcnatttcttgataaccagtgcaagtctcctagcccactcctgttactggcccaggatgctgttatccattgtcgaagcngaagcagttgatctggtccaaaactgttttngcatctgcaactgagagagatatntccnccggagataaggttc

SEQ ID NO: 281111 - DNA, 246 bp, Glycine max
caaacccggtgaggatgcggacacattgggattaactggtcatgaacgttattcaattgacctaccaagtaaaatcagtgagattaggcctggccaagatgtgacagtcacaaccgataatggaaaatctttcacctgcacagtacgctttgacactgaggtcgaacttgattacttcaaccatggaggcatacttcccatatgtcataaggaacctcattaagcagtgaaggccattgtcgatgg

SEQ ID NO: 281112 - DNA, 248 bp, Glycine max
  unsure (1)..(248): unsure at all n locations
caggaaagagacttgcacaggttgtgagtgatccaagcctaacaaaatcaggtgtttactggagctggaacgcggncctgctgcttcgtttgaaaaccaattgtgcccaagaagccagcgatgcagataaggctncgcaaggtttgggagattagtgagaaacttactggtttgggctaagtggtactttggcagcttcccaatatccatctgatttagggacattgtcaggagttcaataacatctc

SEQ ID NO: 281113 - DNA, 240 bp, Glycine max
  unsure (1)..(240): unsure at all n locations
gcctcggctagggttcggaaacgaagaagggttctgttttcttttcgcgatgagggccaagtggaagaagaagcgtatgaggaggctgaagaggaagcgccgaaagatgagacagagatccaagtagtgcgttaaacctagtttgtttccgttgctttacaattgcttatgttgtcaaatncgacacccagttgttagtggcactggtctctccttttgatgttttgatacattttgttg

SEQ ID NO: 281114 - DNA, 244 bp, Glycine max
gtgaaacgcgaagatggggcaaacatcaccgagcaagacctcttgcagataccaagaggagcccgcaccatggaaggtctcagattgaacacaagggtgggaattcagtacgtggcggcgtggctcaccggaagcggttcggtgcctctatacaacctcatggaggatgctgccactgctgagatcagcagggtgcagaattggcagtggctccaagtatggagtggagctcaatggggatggt

SEQ ID NO: 281115 - DNA, 277 bp, Glycine max
  unsure (1)..(277): unsure at all n locations
cttcccttctccaacatgcnaaacgacagcnttctgagtcgnttcgtcttcgttaccctnttcacatggccttctctctgctaattcccacgatgaccatattttcctaccgagtcaactccatgacgatgactcagtgagttgcntgctaccgacccaaaccttaactacaagccggtgntcggnatcntgacccaccccggcgacggtgcctctggccggctcagcaacgccaccggggtttcttacatcgccgcctcctangctaaattcgtgg

SEQ ID NO: 281116 - DNA, 266 bp, Glycine max
  unsure (1)..(266): unsure at all n locations
cagattccaagggaaattcctgcacgtaaatacccatcgtggcttcttgttcttggtgctggaactcttccatttggaaccctcttcattgagcttttcttcatcctttccagtatttggcttgggaggttctattatgtgttggtttcctgttggttgttcttctattgctaattattgtntgtgctgaagtgtctgtggtcctcacttatatgcatctctgngtggaagactggcggtggtggtggaaggcattctttgcatca

SEQ ID NO: 281117 - DNA, 267 bp, Glycine max
  unsure (1)..(267): unsure at all n locations
ctnctgctgttggntccaaagtccaacctgctgatgcagcctatggtgaagctgccantgtgtttggaaagccaaagacagacacagatttcctgccatacaatggagatggattcaaactatctattccctcaaagtggaacccaagcaaagaagttgagtacacgggtcaggttgttagatatgaggataactttgactcaaccaccaacgtggttgtcaccatcactccaactgataagaagtncatcactgactatggttcac

SEQ ID NO: 281118 - DNA, 253 bp, Glycine max
  unsure (1)..(253): unsure at all n locations
tttatttgaaataatgtncgggatcatccacaagattgaggagaccctccatgtgggagggcacaaganagaggagcacaaaggagaacaccatggtgagcacaaaggtgaacacaaaggagaacacatggtgagcacaaaggtgaacacaaangagaacaacnccatggggagcacaaggntngacttgtggataagatcaaggacaagatccatggtgatggccatgacaagggtgagaaaaagaagaaga

SEQ ID NO: 281119 - DNA, 274 bp, Glycine max
  unsure (1)..(274): unsure at all n locations
catngaggcanattcaggngccagcnaccgaattgtcgagaatcgcnggccacntnccgcccccagnaganaggatgatgtntgntcctcagcgtaggnttngccgtncaaaaggtggggtctccggattcaaggtggccatattggtgtccgcaggaggcatagggcaacctctggcgatgttgatgaagatgaatccactcgtttcacttntccacctctacgatgnngttaacacccctggcggtcatnctgatataaagtcacatggaca

SEQ ID NO: 281120 - DNA, 264 bp, Glycine max
  unsure (1)..(264): unsure at all n locations
cgagcttcnttnctcgtacgagttccccggcgacgatgttccgattatcgnccggttccgctttgcttgctttgncagctttgatggccaaccctgccatcaagcgcggcgaaaaccaatgggttgataaaatttagagcttatggatgctgtggataactactctcccacncctcagcgtcaaactgaacttccctttttgctggcnattgaggatgttttcaccatcaccggtcgcggaactgtcgccaccggaagggggtt

SEQ ID NO: 281121 - DNA, 264 bp, Glycine max
  unsure (1)..(264): unsure at all n locations
gggnnatttgcnttgtttttcgcggtacagctcacacacactgaacggtaagtatggcggacaaggctgttacaatccgaacccgaaagttcatgaccaacaggcttctttccangaagcagtttgtacgttgatgtncttcatccanggagggcaaatgtttccaaggctgaacttaaggagaagctagctaggatgtatgatgtgaaagaccctaatactgtatttgtcttcaaattccgaacacattttggaggtggcaaa

SEQ ID NO: 281122 - DNA, 187 bp, Glycine max
  unsure (1)..(187): unsure at all n locations
gtgcagtgcatcannttcatcgcctacaagcccccagggcttgctaagtgtgaaaaatttgcaaagcatttgtagccgccaccccactttgtttgtttgtacttaaactacattcccatttgtttttgctttttgagattcatcatcctgtatttttggtttctgttttcggacttcaatggaaatt

SEQ ID NO: 281123 - DNA, 269 bp, Glycine max
  unsure (1)..(269): unsure at all n locations
ccctaanaacacaggcgcanacgcaaacgncaaangcngacgcaaacgcaaacgcagagcgtgatgccattgacgaagatggtgcagcgtctcacctaccgcaagcngcacagctatnncaccaagtccaaccaacacagggtcgtcanaacccctggtgggaagctcgtttatcagactaccaagaagatggccagcggacccaagtgccccgtnactggcaagaggattcaggggattccacattgaggctgcagagtacaagaggt

SEQ ID NO: 281124 - DNA, 256 bp, Glycine max
  unsure (1)..(256): unsure at all n locations
ctatttttcantggcttctgcagatgttnagntccggtgcntgatttggttggcttgcttggggtcaccggcaacgatgccctcnagaaagcctnttcaatctacggcgacatcgttgaatcgaaggttatcacgaccgtnagactggaaggtccagngnattcggatttgtgaccttcgcctcagagcagtcaatgaaagatgcgatcgcaggtatgaacggccaggacttgacggtcgtaacatcatgtcaacg

SEQ ID NO: 281125 - DNA, 270 bp, Glycine max
  unsure (1)..(270): unsure at all n locations
cgcanccatgagngcggagacctgcgnnngtgttntaggnaaattaagancaagccananccccaaagtgagcgtttctgccgtagtgttcctnatcccaagatcangatttatgatgttggtatgaagaagaagggtgttgatnagtttcctttctgtgtncatctngttagttggganaaggaaaatgtttcaagtgaggccctggaagctgctcgcattgcttgcaanaagtacatngccacatttgctggaanggtggtttccact

SEQ ID NO: 281126 - DNA, 260 bp, Glycine max
  unsure (1)..(260): unsure at all n locations
aanaaggaagtgaaagtnnaaccctaccngcgaccggctggtgtggnttcctaatgcggagcgccggagnggctcgacggaagcatgatcggcgaccgcnggttcgacccgttcggtttcgcgaagcccgcgnagtacctgcagttcgacctngactcgctggaccagaacctcgcgaanaacgtcgccggcgatgtgatcggaaccagggtggaggtcgccgaggttaaaaccaacgccgtttcagcctatcggaggtt

SEQ ID NO: 281127 - DNA, 256 bp, Glycine max
  unsure (1)..(256): unsure at all n locations
caggaaagagacttgcacaggttgtgagtgatccacnccctaacaaaatcaggtgtttactggagctggaacgcggcctctgcttcgtttgaaaaccaattgtcccaagaagccagcgatgcagataaggtcgcaaggtttgggagattagtgagaaacttactggtttggcttaagtggtactttggcagcttccaatatccatcttgatttagggacatttgtcatggagttcaataacatctcagaagagttt

SEQ ID NO: 281128 - DNA, 252 bp, Glycine max
  unsure (1)..(252): unsure at all n locations
gcgttccgcagatggtacaatcctccatggttctctgaggctattccatctngccccttatgatcctcttgctttgaggcatgcctttgagaaggctgtggtaaaaaggttgatgactgatgtgccctttggtgttttgctctctggaggtttggactctcattggttgcagccgtcacggctcgctacctggcnggcacaaaagctgcgaagaatggggaactanattacactctttctgtgtaggccttg

SEQ ID NO: 281129 - DNA, 252 bp, Glycine max
  unsure (1)..(252): unsure at all n locations
cgtgagcatgctcttcttgctttcacccnaggtgtgaagncagatgatctgttgctgtaacaagatggatgccactacccccaagtactctaaggctaggtatgatgaaatcgtgaaggaagtctcttcttacttgaagaaggttggttacaacccagacagattccctttgttcccatctctggttttgagggtgacaacatgattgagaggtccaccaaccttgactggtacaagggaccaactctcctt

SEQ ID NO: 281130 - DNA, 248 bp, Glycine max
  unsure (1)..(248): unsure at all n locations
gatggacagactcgtgaacatgctctgctttcattcacccttggtgtgaaacagatgatttgctgctgtaacaaaatggatgctactacacccaagtattccaaggccaggtatgatgaaattgtgaaggaagtctcttcctacttgaagaaagtagatacaaccctgacaagattccttttgttcctatctcnggtttngagggagacaacatgattgagaggtccacaaaccttgactggtacaag

SEQ ID NO: 281131 - DNA, 247 bp, Glycine max
gggtttttgtgatctgcaagctacgatgggtaagggaacggggagtttcggtaagagaaggaacaagacccacaccctctgtgtgaggtgtggccgccgcagtttccacctccagaagagtcgttgcgccgcgtgcgctttccccgctgcgcgcacaggaaatataactggagcgtgaaggccattaggagaaagaccaccggaactggaaggatgaggtacttgcgtaacgtgccccgtagattta

SEQ ID NO: 281132 - DNA, 245 bp, Glycine max
  unsure (1)..(245): unsure at all n locations
gggtttttgtgatctgcaagctacgatgggtaagggaacggggagtttcggtaagagaaggaacaagtcccacaccctctgtgtgaggtgtggccgccgcagtttccacctccagaagagtcgttgcgccgcgtgcgctttccccgctgcgcgcacaggaaatataactggagcgtgaaggccattaggaganngaccaccggaactggaaggatgaggtacttgcgtaacgtgccccgtagatt

SEQ ID NO: 281133 - DNA, 245 bp, Glycine max
gactttttttcttcttctattctcacacatacccatctactccttccctcatggctgaacaatcttccaactccatttacgatttcactgtcaaggacatcagtggaaatgatgtgagtctgaatgattacagcgggaaggttctactgattgtgatgtcgcctctcaatgtggtttgacacagacaaattacaaagaattgaatgtattgtacgagaagtacaagaatcaaggatttgaaatct

SEQ ID NO: 281134 - DNA, 245 bp, Glycine max
  unsure (1)..(245): unsure at all n locations
tgggccacattcagtgccggggaaagacgttcctccgatgctacttcggatctctctatatttgttggggacttggccattgangttaccgatgctatgctgcaggatanttttgctggccgatattcgtctattaagggagcaaaagttgtcatgattctaatactggccgctcaaaaggctntggttttgttaggtttggtgatgaaaacgagagaacgagggcaatgaccgaaatgaatggc

SEQ ID NO: 281135 - DNA, 244 bp, Glycine max
  unsure (1)..(244): unsure at all n locations
ccaggtatggcttcgaaacgcatcctganggagctcaaggatttgcagaaggatcctcctacgtcatgcagcgcaggtncctgtggctgaagacatgtntcactggcaagccacaatcatgggacctgctgatagcccatatgcaggtggtgtttcttagtttcaattcattttcctcctgactatcccttcaagccaccaaaggttgcttttcggactaaggtgttccacacaacatctanna

SEQ ID NO: 281136 - DNA, 244 bp, Glycine max
  unsure (1)..(244): unsure at all n locations
cccgattcaagaanaaccgcaagangcgcggccacgtgagcgccggtcatggccgtatcggaaagcaccgtaagcnccccggcggccggggaaacgccggtggcatgcatcaccacaggatcctgttcgacaagtaccatccgggcttcttcgtacggtgggaatgaggtacttccataagcttcgcaataaattctactcccccatcgtcaacgtcgaaaagctatggtctctcataccccaa

SEQ ID NO: 281137 - DNA, 242 bp, Glycine max
ctcgtacccagggaaccaagattgcatccgaaggactcaaacatcgggtttttgaggtctcattggctgatctccaaggggatgaagaccactccttcaagaagattcgtttgagagctgaggacgttcaagggaagaatgttctgacaaactctggggaatggatttcacaactgacaagttgaggtctttggtgcgaaaatggcaaactttaattgaagctcatgtggatgttaagacca

SEQ ID NO: 281138 - DNA, 246 bp, Glycine max
  unsure (1)..(246): unsure at all n locations
gggaatctccccttcagtgtcgacagtgcgcggctcgcggagctacttcgagagtgcggggnatgtggaggtggttgaggttatttatgataagactactgggaggagcagggggtttgggtttgtgaccatgtcttccgttgaggaagctgaacggctgctaagcagttcaatggctatgaacttgctggaagatcattgagagtgaattctggaccacctcctgctcggaatgagagtgctcct

SEQ ID NO: 281139 - DNA, 244 bp, Glycine max
gggagtagcggcattaaaaatgcagatcttcgtgaaaactctgacagggaagactataaccctcgaggtcgagagcagcgacaccatcgacaatgtcaaggccaagattcaagacaaggaaggcattcctccggatcagcagcgtttgatttcgccggaaagcagcttgaagatggaaggaccctggccgattacaacatccagaaggaatcaacccttcatctcgtcctcaggcttcgtggtg

SEQ ID NO: 281140 - DNA, 240 bp, Glycine max
  unsure (1)..(240): unsure at all n locations
acccattgtacatggtcaaactttgaaatacaacatgaaagtgagagctggaaggggattttcccttgaagaactcaaggcagcagggattcccaaaaagcttgcaccaacaattggtattgctgttgatcatcgccgcaagaaccgttctngaaagtctgcaagctaatgtgcagaggctgaaaacatacaaggccaaattggttgtgttcccaagacgggcacagaaggttaaggctg

SEQ ID NO: 281141 - DNA, 239 bp, Glycine max
  unsure (1)..(239): unsure at all n locations
cctttgttcactcttcntcncntgcggctagggttttagcgcanttcttctagatttaaggnagatgggtaaggaaaaggttcacancagtattgtggtcattggccatgtcgactctgggaaatcnactaccactggtcacctgattncaagcttggaggcattgacaagcgtgtnatngagaggcntgagaaggaagctgctgagatgaacaagaggtctttcaagtatgcctgggt

SEQ ID NO: 281142 - DNA, 245 bp, Glycine max
  unsure (1)..(245): unsure at all n locations
gcaaaagctgcactcacggctgcaagaaccgctgcaaatgctatatatgtgcccccagctcaancaaggtgccataganctgcagagtggaatanttcatgctgaagagaaggattataaaactgcttatagttatttctttgaagcttttgaacattcaatnctcttgatgaccccaaggctgtttttancctgaagtatatgttgctgtgtaagatcatggtgaatcaagctgatgacgtagg

SEQ ID NO: 281143 - DNA, 242 bp, Glycine max
gttgctgccctaacgactatcccatctgcaacacttatgctggaacttgtctcaagagcaagaacaacccattcggagtgaaggcattgaggcgtactccggctaaaccccattggacctttgggcgtaagaacaaggtcagcagtgcttagcagataaaggaaatgtgaacgtgcaggaaggagccaatgatgaagtaaatgaaagacgaagaattaaaacaccagctgatacacttcccc

SEQ ID NO: 281144 - DNA, 243 bp, Glycine max
  unsure (1)..(243): unsure at all n locations
caaagctgaagtgtctgcttcttccgattccggcacgcccccatcaccatggtgaacgttccgaaaacaaagaagacatactgcaagagtaaggngtgcaggaagcacaccctgcacaaggttacccaatacangaagggtaaagatagcatgctgcccaaggaaaacgccgttacgatcgcnaacaatctggttatggcggacaaactaagcccgtcttccacaagaaggctaagaccacca

SEQ ID NO: 281145 - DNA, 241 bp, Glycine max
gattggtgtcattctcagagattctcacggtattgctcaggtcaatagcgtcactggcagcaaaatccttcgcatcctcaaagctcacggacttgcgcctgaaattccagaggatctgtaccatttgattaagaaggcagtttcaattagaagcatcttgagaggaacaggaaggacaaggactccaagttcaggttgattcttgttgagagcagaatccaccgacttgctcgctattaca

SEQ ID NO: 281146 - DNA, 241 bp, Glycine max
gctgttgcaaatttctactatttttcaatggcttctgcagatgttgagttccgttgctttgttggtgggcttgcttgggtcaccggcaacgatgccctcgagaaagccttttcaatctacggcgacatcgttgaatcgaaggttatcaacaccgtgagactggaaggtccagaggattcggatttgtgaccttcgcctcagagcagtcaatgaaagatgcgatcgcaggaatgaacggcca

SEQ ID NO: 281147 - DNA, 241 bp, Glycine max
ggtggcaagaagaaggcagctgatccctttgccaagaaggattggtatgacattaaggctccttctgtttttcaagtgaaaaatgttggcaaaaccctcgtctctcgtactcagggtaccaagattgcttctgaaggactcaagcatagaggtttgaggtctccttggctgatcttcaaggggatgaggatcatgcattcaagaagattaggttgagagctgaagatgtgcaagggaagaa

SEQ ID NO: 281148 - DNA, 243 bp, Glycine max
  unsure (1)..(243): unsure at all n locations
ggagaagagaagctaaagaaagaaaggagatgggagtggagaagcagttgttgaggtctggcaccggtccgaagccaattcccggtcagaacgtaaccgttcantgcactggtttcgggaagaacggtgacctttctcagaaattctggagacaaaggatcctggccagaacccattcactttcaaaatcggccaaggttctgttatcaaaggatgggatgaaggtgtgcttggcatgcaaat

SEQ ID NO: 281149 - DNA, 240 bp, Glycine max
gttcgcaagctcactcaacttgggttcactaatctggtcttgcactcccatgccgagcttgatctcactcgacaatctgatgttgaagccttctttgcctctgaaaaacctgaatttgtcattgtagctgcagccaaagttggtggcatcatgccaacaacacctaccctgccgatttcattgccatcaacctccaaatccagaccaatgtcattgattctgcttatcgcaacggtgcta

SEQ ID NO: 281150 - DNA, 242 bp, Glycine max
  unsure (1)..(242): unsure at all n locations
caccgccaccgtggagtacgagaccgagaaccgccactacgcccacgtggactgccccggccacgctgactacgtgaaaaacatgatcaccggcgcagcccaaatggacggcgccatattagtcgtctccggcgccgacggccccatgcncaaaccaaagaacacatcctcttagcgaacacaagtcggtgtccccaacatggtcgtgttcttaaacaagcaagaccaagtcgacgacgaag

SEQ ID NO: 281151 - DNA, 240 bp, Glycine max
  unsure (1)..(240): unsure at all n locations
gtgtgggagagagaagagcggaagagaaaatgacgaccaggttcaagaagaacaggaagaagagaggtcacgtcagcgccggacacggccgtatcggaaagcaccgcaagcatcccggaggtcgcggtaacgccggtggcatgcatcacaccgtatcctcttcgacaagtaccatcctggtttcttcgggaaggtaggcatgcgctacttccacaaacttngcaacaaattctacaatcg

SEQ ID NO: 281152 - DNA, 238 bp, Glycine max
  unsure (1)..(238): unsure at all n locations
gccccagcttctcccgcgaccttaagctctttgtcgggaatctccccttcagtgtcgacagtgcgcggctcgcggagctcttcgagagtgcggggnatgtggaggtggttgaggttatttatgataagactactgggaggagcaggggtttgggtttgtgaccatgtcttccgttgaggaagctgaagcggctgctaagcagttcaatggctatgaacttgatggaagatcattgaga

SEQ ID NO: 281153 - DNA, 239 bp, Glycine max
  unsure (1)..(239): unsure at all n locations
gccaaacccaaaagctggcactgtaacaccaaatattccccaggctatagcagaattcaagcagggaaaagttgaatacagggcagacaaaactggaatcgtgcacttaccttttggaaaagctgactttccagaagaggatcttcttnaaacttgcttgctgcagtaaaatcagtagaggctaacaaaccttcaggtgctaaaggtgtgtactggaaaagtgctcacatatgctcggc

SEQ ID NO: 281154 - DNA, 264 bp, Glycine max
caagtttgcacaaactgtggtgtcagaatgggagaatatttctgcagcatctgcaaattcttcgatgatgataccgggaaacaacagtttcattgtgatgattgtgggatttgtagaattggtggtcgagagaattatttccactgcaataagtgtgggtcttgctattcaactagtctgcgtgataatcatatgtgtgtggagaattccatgaggcatcattgccccatttgttatgagtacctttttgactcttgaaagaca

SEQ ID NO: 281155 - DNA, 261 bp, Glycine max
gcaatggcttctctggcaagcttagctgttgttcaaccatctactgtcaagggccttgctggaactaagctctctttcaagccctctcgccagagcttcagacccaagaatttcaggagtggtgccgttgtagcaaagtacggtgacaagagtgtgtactttgatttggaggatctaggcaacactactggtcagtgggacttgtacggctccgatgcaccttcaccctacaaccctcttcagagcaagtcttcgagacat

SEQ ID NO: 281156 - DNA, 262 bp, Glycine max
  unsure (1)..(262): unsure at all n locations
ggattaactggtcatgaacgttattcaattgacctaccaagtaaaatcagtgagattaggcctggccaagatgtgacagtcacaaccgataatggaaaatctttcacctgcacagtacgctttgacactgaggtcgaacttgattacttcnaccatggaggcatacttccatatgtcataangaacctcattaagcagtgaaggccattgtcgatggaaaattcnaaggtcattgtcccagtatgcttttaagttgtaaaat

SEQ ID NO: 281157 - DNA, 263 bp, Glycine max
  unsure (1)..(263): unsure at all n locations
ctcgttcttcttcttctgttgtnctgtgnttgtgtntgntttttctctcacctgaaaatgtcttgctgcggtggtaactgtggttgcggaagctcctgcaagtgcggcaacggctgcggangctanaggatntacccagacttgagctacactgagtcaaccaccaccgagaccttggtcatgggantggcacctgttaaggctcaatttgagggtgtanaaatgggtgtgcccgctgagaacgatggctgcaaatgtggacc

SEQ ID NO: 281158 - DNA, 265 bp, Glycine max
  unsure (1)..(265): unsure at all n locations
aggtaaacgaagctgagaaattttcgaaggaagacaaagagaagagggatgctattncacacaaagaaccaggcagactctgtggtataccagacagaaaagcaattgaaagagcttggagacaaggttcctggccctgtgaaagagaaggttgaagtaaaactaggagagcttaaagacgccatttctgggggttcaacccaagctatcaaggatgccatggctgcactaaatcaggaagtcatgcagcttggtcagtcccttt

SEQ ID NO: 281159 - DNA, 270 bp, Glycine max
  unsure (1)..(270): unsure at all n locations
acattttcgcacccaacaaatcaaactcagctgacgggcttgccttcttcttggcacccgtcgggtctcagccnnnatccgacgatggatttcttggtcttttcaacagtcccttaaaggacaagtctctccaaaccgtggcgattgagttncatactttctcgaacaaaaaatgggatcctgtaaaccgacacatcggcattgacgtgaactcgatcaagtccgtcaaaacggcatcgtgggggttgtccaatggacaatggcggagat

SEQ ID NO: 281160 - DNA, 274 bp, Glycine max
  unsure (1)..(274): unsure at all n locations
aagaatgggtgagaaaagcaagatttgatcataggaggcaccgncctacatcggcaaanaatgaagtggaagcaagcgcaaaggctggaaatcccacttttgctttggtgagggaatccacactctctgacccctccaaggcacaactcatccacaattttgaggctttgggcgttaatttggtccgcggggatctgtacgatcatgagaagttggtgaaagctatcaagcaagtagatgtcgtcatatccacgctgggtcactgcagcttgcc

SEQ ID NO: 281161 - DNA, 263 bp, Glycine max
  unsure (1)..(263): unsure at all n locations
catccatagacatggccaccgtcacttctgcagccgttgctattccctcattcactggcctcaaggcaagcgcaggcaaagtgagtgccgcagttaaagtctcagctccccaagccacaaggttgggcatcaaggcttcgctgaaagacgttggagtcgctgttgtggccactgccgcgagtgcagtgctggctagcaacgccatggccattgaagtgttgctgggtnnngatgacgggtctctggctttcgttcccaacaat

SEQ ID NO: 281162 - DNA, 260 bp, Glycine max
  unsure (1)..(260): unsure at all n locations
ccagcaccaacagcatcggcggcgacagtcactctccgacaacaacacttccgcggcgaaaaatgtctctggtggcgaacgaggatttccagcacattctgcgtgtgctgaacaccaacgtggatgggaagcagaagataatgttcgctatgacctccatcaagggtattggaaggagattcgccaacatcgcttgcaagaaggccgatgttgacatgaacaaaagggctggtgagttgagtgctgcanagttggatagt

SEQ ID NO: 281163 - DNA, 246 bp, Glycine max
aactgctgcaatgggaaaaggccaagaaagagttagcagcaagcattgagaagggcatttctttcatcagaaaatgagtagttgatgatagtacgtcccgaaaataaatggttagattgtgctgtgtccattgtgagatcatatagatttataattagttatgtgatatgtatgaatatcgagttctatctagaaacatgtaaatgtaataattggaataccgaattccatttattattccgtctc

SEQ ID NO: 281164 - DNA, 261 bp, Glycine max
  unsure (1)..(261): unsure at all n locations
gagaattccccctgctgtccctggnattatgtttttgtctggtggacagtctgaggttgaagctaccctcaatttgaatgccatgaaccaatctccaaacccgtggcacgtgtcattctcgtatgccagagccctccaaaacactgccttgaagacatggggaggccgcccagagancgtgaaggcagcacaagatgcactcgcattccgtgccaagtccaactcactcgctcagcttgggaagtacactggtgagggtga

SEQ ID NO: 281165 - DNA, 274 bp, Glycine max
  unsure (1)..(274): unsure at all n locations
ctctttctctgtctgcttcttcactttctctcgtttcaatcgaaaaaaatcatgggcagaaaattcttcgtcggtggcaactggaaatgcaatgggaccactgaggaggtgaagaagattgttactactttaaatgaagctaaagtccctggagaagatgttgtagaagttgttgtgagccntccttttgtgttccttccttttgtaaaaagtttgctgcgccctgatttccatgtctcggcccaaaattgttgggttcgcaaagtggtgctta

SEQ ID NO: 281166 - DNA, 262 bp, Glycine max
ctgctgttcctgcgcgtgaacaagcctcaggtaagccaaagccatggttaagcataacaatgttatccccaacggacacttccgtaagcactggcagaactatgtgaagacctggttcaatcagccagcacggaagacaagaagacggttggctcgtcagaagaaagctgtgaagattttccccagacctacagctggacctcttagacccattgtacatggtcaaactttgaaatacaacatgaaagtgagagctggaagg

SEQ ID NO: 281167 - DNA, 258 bp, Glycine max
  unsure (1)..(258): unsure at all n locations
gacagtatccatatggaggtttaatcctgaataggccaactattagcaggagattcatgcctgagaaagggtctcctgaatatgatgcgttagtaagaaccctgagaaggagtttttgaagacnattactggcaagaaagagaccctcattgaccttacnattatagaaattttatcaaggcncgcatctgatgagttctaccttgggcagagagatggcggtgactactggacttctgatgccgggcattagaggcc

SEQ ID NO: 281168 - DNA, 262 bp, Glycine max
  unsure (1)..(262): unsure at all n locations
atacaagggtccaactctgcttgatgcacttgaccagattagtgagcccaagaggccctctgacaagcccctcaggcttccccttcaggatgtgtacaagattggaggtattggaactgtgccagtgggacgtgttgagaccggtgtcttgaagcctggaatggtggtgacttttgcaccaactnggcttnnnnaactgaagtcaagtctgtggagatgcaccatgaatctcttacagaggcacatcctggtacaatgtggg

SEQ ID NO: 281169 - DNA, 219 bp, Glycine max
tgaagagtagagaagagggtgaaccggggcaaattattaagattgaaggtcctatccacagctcaaatgtgatgctctactccaaagatcagaaggtagcaagtcgtgtggggcataaagtcctagataatggtaaaaaagtccgctaccttataaaaactggagaaataattgatagttcagagaactggaagaaactgaaggaggctactaagaaat

SEQ ID NO: 281170 - DNA, 262 bp, Glycine max
  unsure (1)..(262): unsure at all n locations
ctagggtttacagagaagcgaagaggcgcancgtnaggcagtaactacgtggaattgctagcantggcgaggatcaaggtttacgagctgaggcagaagacgaaggctgatctgttgaatcagctgaaggacctcaaggccgagcttgccttgcttcgtgttgctaaggtcaccggcggtgcacctaacaagctctctaagatcaaggtggtgaggttgaacattgcccaggttttgacggtgatttctcagagcagaaggc

SEQ ID NO: 281171 - DNA, 260 bp, Glycine max
ccgtcattggcgacgccgacaacggctacggcaatgccatgaacctcaagcgaaccgtcaagggtttcattgccgccggtttcgcaggaatcattctggaagaccagattgcgccgaaagcgtgtgggcacacgcgcgggaggaaagtgataccgagagaggagggcgttatgaagattagagccgccgtggatgcgagaagagagagtgggtctgacattgtgattgtggcgcgcacggatgctcggcaagctgtgtcc

SEQ ID NO: 281172 - DNA, 259 bp, Glycine max
  unsure (1)..(259): unsure at all n locations
agaagagcgtcgcagtngtaaccctaatcagaagaagcgcagcttcaagcgagtgacagccaccagccatgggtcgtatgcacngccgcggtaagggtatatcctcttctgctttgccctacaaaaggacacctcctagctggctcaagatctcttcgcaagatgtcgaagaaaatatctgcaagtntgcgaagaaaggtttgaccccgtctcagattggtgtnatnctcagagattctcacggtattctcaggtcaat

SEQ ID NO: 281173 - DNA, 262 bp, Glycine max
aagcaataatgatcagtgatgcaatggaaacgggaacagttcagataaattctgccccagctcgtgggccagatcattttccctttcagggtataaaggacagtggcattggatctcaagggattaccaacagcataaacatgatgaccaaggtcaaaacgactgtgatcaacttacccagcccttcctatactatgggctagtagtgtaatacacacatgcatgggggaacatcattatatagcatgttcctaaatcatag

SEQ ID NO: 281174 - DNA, 265 bp, Glycine max
ctcacctgaaaatgtcttgctgcggtggtaactgtggttgcggaagctcctgcaagtgcggcaacggctgcggaggctgcaagatgtacccagacttgagctacactgagtcaaccaccaccgagaccttggtcatgggagtggcacctgttaaggctcaatttgagggtgctgaaatgggtgtgcccgctgagaacgatggctgcaaatgtggaccaaactgctcctgcaacccctgcacttgcaagtgaggtgtgggagagca

SEQ ID NO: 281175 - DNA, 221 bp, Glycine max
  unsure (1)..(221): unsure at all n locations
gtgnagagtagagnagagggtgaaccgggggcaaattattaagattgaaggtcctatccacagctcaaatgtgatgctctactccaaagatcagaaggtagcaagtcgtgtggggcataaagtcctagataatggtaaaaaagtccgctaccttataaaaactggagaaataattgatagttcagagaactggaagaaactgaaggaggctactaagaaat

SEQ ID NO: 281176 - DNA, 257 bp, Glycine max
gggtatgtgtggcagttcatcactgtgggaggtcttcattccaatgcactcataacttcaacatttgcaagggattttgccaataggggaatgctggcttatgtggagaggattcagagagaggagaggaacaatggggttgacacactagctcaccaaaaatgggctggtgctaattactatgataggtacctcaagactgtccagggaggtgtggcttcaactgctgcaatgggaaaaggagtaactgaagagca

SEQ ID NO: 281177 - DNA, 264 bp, Glycine max
gcacgaatatcttgttgtttggagcgatccgagaaaaactctgtaaacatgttggtttaccaggacctccttacaggtgatgagcttctctctgactccttccgttacaaggaaattgagaatggaatgctgtgggaagttgaggggaagtgggttgttaaaggagcagttgatgtagacattggtgcaaacccttctgctgagggtggaggagaagatgagggagttgatgatgcagctgttaaggttgttgcattgttgaca

SEQ ID NO: 281178 - DNA, 268 bp, Glycine max
  unsure (1)..(268): unsure at all n locations
anagaaagaaaggagatgngagtggagaagcagttgttgaggtctggcaccggtccgaagccaattcccggtcagaacgtaaccgttcactgcactggtttcgggaagaacggtgacntttctcagaaattctggagcacaaaggatcctggccagaacccattcactttcaaaatcngccaaggttctgttatcaaaggatgggatgaaggtgtgcttggcatgcaaattggtgaagttgctcgtctccggtgctctccggattatg

SEQ ID NO: 281179 - DNA, 262 bp, Glycine max
aagcatcacgatgtcaccgttaaggacgagaagacccttctcttcggtgacaagccagtcactatttttggacacagaaaccctgaagagatcccatgggggtcaactggagctgacatcattgttgagtccaccggagttttcaccgataaggacaaggccgccgcacatttgaagggtggtgcaaagaagttattatttctgcccccagtaaggatgcccccatgtttgttgttggtgtcaagagcacgagtacaagcca

SEQ ID NO: 281180 - DNA, 263 bp, Glycine max
  unsure (1)..(263): unsure at all n locations
attttggctttcctcttctacaattctatnatcacgcaaatggcatccaaganaatactgaaggagctcaaggacttacagagagatccaccaacttcatgcagtgcaggacctgtgggtgaggacatgttccattggcaagcaaccatcattggtcnnaatgacagtccctatgctggtggtgttttccttgtgaccatccatttccctcccgattatcccttcaaacctcccaaggttgcattcaggaccaaggttttcca

SEQ ID NO: 281181 - DNA, 264 bp, Glycine max
  unsure (1)..(264): unsure at all n locations
gggaagaccttggttctgctccatctggatctattgttttgctacatgcatgcgcacataaccccactggtgtggatccaacccttgagcaatgggagcagattaggcagctaatancgatcaaaagctttgttacctttctttgacagtgcttatcagggttttgctagtggaagtctagatgcagatgcccaacctgttcgtttgtttgttgctgatggaggcgaattgctggtagcacaaagctatgcaaagaatctgggt

SEQ ID NO: 281182 - DNA, 258 bp, Glycine max
  unsure (1)..(258): unsure at all n locations
aaggatgaccctgcaaaggaggctgctaacttcacagcccaagtcatncatcatgaaccaccctggtcagattggaaatggctatgcccctgtcctcgactgccacacttctcacattgctgtcaagtttgctgaactcatgaccaagattgacaggcgatccggcaaagagcttgagaagnnccccaatttttgaagaacggtgatgctggttttgttaagatgatccaaccnaancccanggttgttgnaacttcc

SEQ ID NO: 281183 - DNA, 251 bp, Glycine max
atctgctgcaatgggaaaaggccaagaaagagttagcagcaagcattgagaagggcatttctttccatcagaaaatgagtagttgatgatagtacgtcccgaaaataaatggttagattgtgctgtgtccattgtgagatccatatagatttataattagttatgtgatatgtatgaatatcgagttccatcctagaaacatgtaaatgtaataattggaataccgaattcccatttattattcccgtctc

SEQ ID NO: 281184 - DNA, 269 bp, Glycine max
  unsure (1)..(269): unsure at all n locations
ggtnaatgngctcactggtagcttnagcctcactagtcacttcacactttatcttgacaaagatgctgttctccttgnttctcaggatataactgagtggcctgtgctcgaacccctcccatcatacggtagaggaagagacgcaccggnannaagattcacaagcctcatatttggaacaaaccttactgatgttatgtcacaggtgaaaatggnnncatagagggcaggtgagttttggtgggcagcaatttcacaggaagaagttg

SEQ ID NO: 281185 - DNA, 259 bp, Glycine max
  unsure (1)..(259): unsure at all n locations
tgcttcaactgctgcaatgggaaaaggagtaactgaagagcagtttaaagaatcatggactagatcaggagctgtaaacattgatagaggcagtattgtgnttgcnaaggccagaatgtgaaagtgctacttctgccgaactatgctgcatgctgnccgtggaacttaatggaaaattcaccaatttctgtgttggattggaataaatgtcctcaataatataaacaggccatgaatcatctgctatttttcctggcat

SEQ ID NO: 281186 - DNA, 259 bp, Glycine max
  unsure (1)..(259): unsure at all n locations
accgtgccgctgatgtgttgaccgttgaccagattaagcagtgtgaggagcttgggattcttgttgacaganatgatcagggcactctgcttcagattttcaccaagcctgttggggacaggccantcgatattcatagagataattcagaggatcgggtgcatggtggangatgangaagggaaggtgtacatccanggtncatgtgggggttttgggaaaggcanttttctgagctttcaaatccattgaagatatg

SEQ ID NO: 281187 - DNA, 263 bp, Glycine max
  unsure (1)..(263): unsure at all n locations
gcgatctnggtgaaacatgtntggggaagnggaagaaaacgncgnagagcnncaaaattggagacgngtttttgaaggcaaagtgcttaatgaantgtgaagntgngcntgattctngagncanaagnntgagcagcttcaanagacatcngatgnccccatgaatcaagtttctcaggtatttgaaaagtgctggcagtatgtgnagcgcttcagccgntataaaaatnccgnggttgttaganaattngagaaattctcgc

SEQ ID NO: 281188 - DNA, 251 bp, Glycine max
catgcttcatgaactcatgggagttgatcctggaactaaccctgtttgccatttccttggaagcaaggccattttatgggtacccaatttatctatggacactgcctatcagactaacgttgttgtttaattagtccatgcatctgcatcttgggcaccataagattgtatataaaataaattatggtgtgttgtgtatgttgtgcaagaccggaacttcacctttctacgtacgtgtgctgttaggatgc

SEQ ID NO: 281189 - DNA, 255 bp, Glycine max
  unsure (1)..(255): unsure at all n locations
gcggaagangaagacgccgcagccatggtgaagtactccagagaacccgacaatnccaccaagtcctgcaagccncagaggcgctgacctttagagtgcatttcaagaacactagggagactgcctttgccatcaggaagttgcccctggttaaagctaaaagatacctggaggatgttttggcccacaaacaggccatccctttccgacgcttctgtggtggtgttgggaggacagcccaggctaaagagcaga

SEQ ID NO: 281190 - DNA, 258 bp, Glycine max
  unsure (1)..(258): unsure at all n locations
gtaagcagancagaacaaaaggttgcagcaacaatggcagccatggctgcactccngagctcaatggccggtctctccctctcttccaaatctttcttagncccaactccttcctcccatcactctcccttctcttcttccgggtaagtcaacagagaagcaatgtcccattgtaatgaggcttaaagatgggagcggaaggagtgtaaaccaaacagtcttcctatcttgcacaaaatggcatgttaaacttggaga

SEQ ID NO: 281191 - DNA, 246 bp, Glycine max
  unsure (1)..(246): unsure at all n locations
cnggattttgctcactacaaatccaggagtttacaaacacatcacaggttatgaactnggtngtcatgcagtaaagctaattggatggggaacaactgaagatggggaggattattggcttcttgcaaatcagtggaacagagaatggggagatgatggttacttcaagatccgaagaggnacaaacgaatgtgggattgagaggtgtaactgccggttngccttccaccaaaaaccngtccgggg

SEQ ID NO: 281192 - DNA, 245 bp, Glycine max
gatgggtatttggagattaaggataggtcaaaggatgtgataataagtggtggtgagaatttgagtagcgtggaggtggaggcggtgttgtacgatcacccggcggtgaacgaggtggcggtggtggcgcggccggacgagttctggggggagacgccgtgcgcgtttgtgatgctgaaggaggggctggtggcgccaccgtcggagaaggaggtggtggagttttgcagagagaggttaccgca

SEQ ID NO: 281193 - DNA, 257 bp, Glycine max
accctagcaaaaatgccggctggtcacggtttgagatcccgcaccagagattccttctctcgtcccttcaggaagaagggtaccatcgccctcaccacatacctcagaacctaccacgtcggcgattatgtcgacgtcaaggttaacggcgccgtccacaagggaatgcctcacaagttctaccatggccgcaccggtcgcgtctggaatgtcaccaaacgtgctgttggggtcgaagtcaacaagcaggtcggaaa

SEQ ID NO: 281194 - DNA, 252 bp, Glycine max
  unsure (1)..(252): unsure at all n locations
gacgcagtgaactaaaccaaacctctcactcgccgtcgtagggtttctcctttccgtttagcaacaacaacaatggttgcagccaagaaaaccaagaagacccatgagagcatcaacaacaggctcgctcttgtcatgaagagtggaaaattcaccctcggttacaagacggttctcaaatcanttaggagctccaaagggaaattgattatcattgctaacaactgccccctttgaggaaatcagagttga

SEQ ID NO: 281195 - DNA, 248 bp, Glycine max
  unsure (1)..(248): unsure at all n locations
tcttctctctccccgccntaaccctaactccctaccctattcngctttncnctcatccatcatgaaaggaggaaagtccaagaccgaatctaagagagccgatgccaaacttgctgtgaataagaagggcgccgccaccaagactaggaaacccgccggaaaggggaaggcagcgaaagatcctaacaagccaaagaggctccaagtgctttcttcgttttcaggaggattcagganggtgtncaaca

SEQ ID NO: 281196 - DNA, 247 bp, Glycine max
  unsure (1)..(247): unsure at all n locations
agcatttggatcatggggttcttctagttggttatggtgaaggtgcatatgctcccattcgttttaagaacaaaccttactggatcattaagaattcatggggcgagagctggggagagaatggatattacaagatctgcagaggtcgaaatgtgtgtggagtagattccatggtctcaactgtagctgtatatatcccatccagccattaaatacaaagatatgcctgattgtggttgtganagna

SEQ ID NO: 281197 - DNA, 252 bp, Glycine max
ggatcatggggttcttctagttggttatggtgaaggtgcatatgctcccattcgttttaagaacaaaccttactggatcattaagaattcatggggcgagagctggggagagaatggatattacaagatctgcagaggtcgaaatgtgtgtggagtagattccatggtctcaactgtagctgctatatatccatccagccattaaatacaaagatatgcctgattgtggttgtgatgtgatactggactaag

SEQ ID NO: 281198 - DNA, 252 bp, Glycine max
  unsure (1)..(252): unsure at all n locations
agatgatccacgttcttttcctctttgctcttgtctcgttcacttcnnntgcttctgtcnntgatttctgtgtagcagacctaaaaggtccagatagcccttcangctatcagtgcaagccacctaacacagtcacagtggatgactttgtgttctctggctttgtagctggaaacaccacaaacatttcaatgctgcattaacctccggatttgttactgattttccaggtgtgaatggtcttggtgnanc

SEQ ID NO: 281199 - DNA, 256 bp, Glycine max
  unsure (1)..(256): unsure at all n locations
ctcgttcttcttcttttgttgttctgtgtttgtgtttgttttttctctcacctgaaaatgtcttgctgcggtggtaactgtggttgcggaantcctgcaagtgcggcaacggctgcggaggctgcaagatgtacccagacttgagctacactgagtcaaccaccaccgagaccttggtcatgggagtggcacctgttaaggctcaatttgagggtgctgaaatgggtgtgcccgctgagaacgatggctgcaaatg

SEQ ID NO: 281200 - DNA, 262 bp, Glycine max
  unsure (1)..(262): unsure at all n locations
catttttggnagcaatatcaaaatcataatgatcctgtcactactattgatccgaagcgtacttacggagttagagctcccacaatgcatcccatatttgaaaatttccgagtcgtgaccttgaaagcacttttaacatctgcagcttcaacctatcagcttacagccttaggagaattgctatatcagtgccaccacagctacggtacttgtggacttggctctgatggancagataggctgtaaacttagtgcaagagtg

SEQ ID NO: 281201 - DNA, 251 bp, Glycine max
  unsure (1)..(251): unsure at all n locations
aaaaatgctgagagcaatgctgaagtgaaaggtttggatgttgatgcactgtacatttcgcatatccaagtcaatcaagcacanaagcaaagacgccgaacataccgagcccatggaagaatcaatcctatatgtcatctccgtgccacatagagttaatattatctgaaaaagaagaacctgtgaagaaggagcccgagactaagttaacaacaagcaagaaatcccagctcttcgaagtggtgtggggt

SEQ ID NO: 281202 - DNA, 247 bp, Glycine max
  unsure (1)..(247): unsure at all n locations
tcaaatttgaagatgcctgattaccgatatgttcctggcgaaaacgcatgcttcatgaatgacaaaatgtcaaagattngaaaagatgtcacggtccgcttctcggtgataggtacaaagtggatggaanccagaaagggaatttcaggcattggtcagtttggaaggggattatctgggaccaatttcaactccggatatttagctacattttctttgttgcttgtcttctgaaatggatgaatat

SEQ ID NO: 281203 - DNA, 249 bp, Glycine max
cgaagtccatcacaacgacatatttatattcggcatagataacaccgtactctctaatatcccatactatgaaaaacatggatatggggtggaggaatttaatgaaaccttatatgatgaatgggttaacaagggcgacgcaccggcattgccagagactcttaaaaattacaacaagctgttgtctcttggcttcaagattgtattcttgtcaggaagatatcttgacaaatggccgtaacagaagca

SEQ ID NO: 281204 - DNA, 257 bp, Glycine max
  unsure (1)..(257): unsure at all n locations
gngccgcccagatggncggcgccatccttgngcgtctccggcgcngacngccccatgcncnaaaccaaagaacacatcctcntagcnnaagcaagtcggtgtccccaacatggtcgtcttcctcaacaantcaagaccncgtcgacgacgaagagcttctccaactagtcgaactcgaagttcgcgaccttcttacctctacgaattccccggtgacgatacccccatcgtctccggctcgnnatcttagcctagaa

SEQ ID NO: 281205 - DNA, 253 bp, Glycine max
  unsure (1)..(253): unsure at all n locations
ctacttcactggatctaaagacaaccttaaaagatggattggccatccaagatttgagctaattngtccatgatgtccacagagcaattgttgattgaggttgatcaagnctatcatcttgcatgccctgcttctccaatcttctacaaatacaaccctgtaaagacaataaagacaaatgtgattggaacactgaacatgcttgggcttgctaagcgtgtgggagcaaggattttgcttacatctacttcag

SEQ ID NO: 281206 - DNA, 249 bp, Glycine max
  unsure (1)..(249): unsure at all n locations
gtagttgagaactaagaaggagaagcaaatggcttcctcaatgatctcttccccagctgttaccactgtacaaccncgcaggtgccggcatggttgctccattcactggcctcaagtccatggctggcttccccaccaggaagaccaacaatgacattacctccattgctagcaacggtggaagagtgcaatgcatgcnaggtgtggccaccagttggcaagaagaagtttgagactctttcctacctg

SEQ ID NO: 281207 - DNA, 250 bp, Glycine max
  unsure (1)..(250): unsure at all n locations
ggcaagaccatcaccctcgaggtcgaatcctcggacaccattgatcaatgtcaaggccaagatccaggacaaggagggtatccctccagatcagcagaggttgatatttgctggtaaacaacttgaggatggaagaacccttgctgattacaatattcagaaggagtctaccttacacttggttcttcgtttaagaggtggcatgcagattttcgtcaagactttgacgggaaagaccattcacttgngg

SEQ ID NO: 281208 - DNA, 245 bp, Glycine max
  unsure (1)..(245): unsure at all n locations
gaaaccggtagcgttgcnagcttcgncgnttcntnnnaacttcacnnnntatgcccctgacacaaaaaggcttgcagatgggcttgccttctttgctcgcaccaattgacactaagccacaaacacatgcaggntatcttggtnttttcanagaaaacgantctggtgatcaagtcgtcgctgttgagtttgacactttccggaatcttgggatccaccaaatccacacatcggaatancntcat

SEQ ID NO: 281209 - DNA, 245 bp, Glycine max
  unsure (1)..(245): unsure at all n locations
caccagtcacaatccctcccattgttaatccaccagtgacagttccacccgttntnncccngtgctagtgaagccnnangggttttcnccctccaattcttaacccancaagtacaccaacaccgtcgcnggngaagggagggaacatccatgtccaccaccaaagtctcctgcacaggctacatgccccattgacacgntcaaactaggtgctgtgtggatcttcttggtggttggttcacatt

SEQ ID NO: 281210 - DNA, 244 bp, Glycine max
  unsure (1)..(244): unsure at all n locations
gagatattgtcaaggcatgcttctgatgagatataccttggaganntcggagannccaaattggactactgataagaaggcattagaagctttcaaaaggtttggaagcaactgactggaattgaaggaaaaatcatgcaaggaacagtgatccaagtctgagaaaccggactgggccagttcagctgccatacactttgctccatcgttcagtgaggaagggttgactttcaaaggantccca

SEQ ID NO: 281211 - DNA, 247 bp, Glycine max
  unsure (1)..(247): unsure at all n locations
gctaaaganagaaaggagatgggagtggagaagcagttgttgaggtctggcaccggtccgaagccaattcccggtccagaacgtaaccgttcactgcactggtttcgggaagaacggtgacctttctcagaaattctggagcacaaaggatcctggccagaacccattcatttcaaaatcggccaaggttctgttatcaaaggatgggatgaaggtgtgttggcngcaattggtgaagtnncncnnc

SEQ ID NO: 281212 - DNA, 252 bp, Glycine max
agaagcctgttgtggagaaagaagctccagggcatgccatatgagggcatgcacgtacggcctcggaggggaaccagaaaattatgttaacaaaataatctggaaccctaatgtatcagtgtcatcatcagtgtgtagtttaagctagctttgctatggttacgttctttgagatgagagtcttgatgaacagtaccattctgatgtattgctttccttgaaagttaatgccagcttcttatcttctgtcta

SEQ ID NO: 281213 - DNA, 257 bp, Glycine max
ggccaggagctgtagaaattgatagaggcagtattgtggttgctaaggccagaatgtgaaagtgctacttttgcagaactatactgccgagagtggaacttggggaaaattcaccaatttctgtgttggattggaatttggaataaatgtcctcaataattgaagtattaaacgggccattgaatcattctgctatttttgccttcataatttccttatatttctacttgttcagactcttggccatgtgggcaagg

SEQ ID NO: 281214 - DNA, 245 bp, Glycine max
  unsure (1)..(245): unsure at all n locations
gtcgggcagantttcttaaatactgctaagtggattgaagangtgcgaacagaaagaggcagtgatgtcattattgttcttgttgggaacaaaactgatcttgttgagaaaagacaagtctctatagaggaaggagaagcanaagcacgtgagctcaatgtcatgtttattgaaactagtgctaaggctgggtttaatataaaggccctatttcgaaaaattgctgcagcattaccggnatggaa

SEQ ID NO: 281215 - DNA, 242 bp, Glycine max
acaaggcagaaagcaagctcatcctagagttttaaaaatggcagcagcctcctccatggctctctcttccccatccttggctggcaaggccgtgaagctgggcccatcagcccccgaagtcgggagggtcagcatgaggaagaccgtcaccaagcaggcctcctccggaagcccatggtacggcccagaccgcgtcaagtattgggcccattctctggcgagcccccgtcctactcactggc

SEQ ID NO: 281216 - DNA, 242 bp, Glycine max
  unsure (1)..(242): unsure at all n locations
cggcaaannacggaggagaggtcgcaaacgcaaaaatggtgaagtttctganaccatacaaggccgtccattgtcccttccagggacgctacgccggcaagaaagccgtgatcgttcgaaccttcgacgaaggaactcgcgagcgcccctacggccactgtttggtggcggggataaagaagtacnctgcgaggtgatcaagaaggactcggcgaaaagacggcgaaaaantcccgctgaag

SEQ ID NO: 281217 - DNA, 248 bp, Glycine max
ggcgatagcgagtctgaaggagagaaccggttcgagccaatacgcgataaccaaattcatcgaaggcaagcacaaggagttgcctccaacctacaagaagcttgttctcgttcatctcaagaagtctgttgctgctggcaagctcgttaaggtcaaaaactctttcaagctcgcaccgactaagtctgctcctgttaaagccgctgctgctcccaagaagcccaccaaagctgcggctaagcccgccg

SEQ ID NO: 281218 - DNA, 247 bp, Glycine max
  unsure (1)..(247): unsure at all n locations
ggtggagngaagaaaaacgctatgaagctatgttgctcccatcagttgggtcttatttttcagaaaagatatctgaagaaatctgcaattcagctgctaagatggccaataatttagaggtggatgcgcttttgtgtacacaaagacagggcacatggcgtctctattgtctcgttgccgtcctgactgccgaatctttgcttttactaccattcatctgtgccgtaggcgactgaatcttcagtgg

SEQ ID NO: 281219 - DNA, 253 bp, Glycine max
  unsure (1)..(253): unsure at all n locations
gcacggtttcgtgtaccgtgagcacaacaggtcaccaggatactacgatggacgctactggaccatgtggaagctgcctatgtttggttgcactgatgcttctcaggtgttgaaggagcttcaagaggctagncatgcataccccaacggcttcatccgtatcatcggattcgacaacgttcgccaagtgcagtgcatcagttcaatcgcttacaagcccccaggttctaagtgtgaaaaatttncaaagcct

SEQ ID NO: 281220 - DNA, 253 bp, Glycine max
ctcataacacaaagcacaaagcaaagctcatccttgagttaaaaaatggcagcagcttcttccatggctctctcatccccattccttggctggcaaggccgtgaagctgggcccatcagccccagaagtgggaagggtgagcatgaggaagaccgtcaccaagcaggtctcctcaggaagcccatggtacggcccagaccgagtcaagtacttgggcccatctctggcgagcccccgtcctacctaaccggtg

SEQ ID NO: 281221 - DNA, 239 bp, Glycine max
gcagcggcaacagaggagagaagatgaagttcaatccacgagtgtcgagcagccgccgcaagagccgaaaggtcacttcacggcgccgtcgagcgtgcggagggtgctgatgagcgcccctctgtcggcggactccggtcgaagtacaacgtgcggtcgatcccagtccgcaaggaggacgaggtgcaggtggtgcgcggaacatacaagggtcgcgaggggaaggtgacgcagtgtac

SEQ ID NO: 281222 - DNA, 245 bp, Glycine max
  unsure (1)..(245): unsure at all n locations
gcgaanaatggggaactaaattacactctttctgtgtaggccttgagggtgcacccgacctaaaggctgcaaaggaagtagcagagtacataggaactgtccatcatgaatttcactacactgttcaggatggcatagatgccatcgaagattgatctntcacantgagacattgaggtgacaacaanttgngcaagcattcccagtcttntanntcccgaangannnagccagnggagccaaag

SEQ ID NO: 281223 - DNA, 254 bp, Glycine max
  unsure (1)..(254): unsure at all n locations
ggagttgctgccaagatcacccccaccgtcctgnttttgacaggagttggtttcttttctcttatattatttggtggcccaattgctcctgttattgcaaagtttggaatgactccactgctagcngctgtatatgtgggtgccatgcagaacatattcagcaagagtgcgaaggaacagttatcganccagncaaagaaagggccacaaanccntggaannggaancaagggccaaggggaaggcagccattt

SEQ ID NO: 281224 - DNA, 241 bp, Glycine max
  unsure (1)..(241): unsure at all n locations
atgcaccacaggttcttcttagtggttcatttgatcatactgtcgtctnaagggatggaaggatgccatcacattctggctacaagtggtcagtcacagctgatgtagagagcttggcatgggatccgcacactgagcactcttttgtggtgagtcttgaagatggtattgtcaagggttttgatatacggacngccaactctgnttctcgtcagatccgattctacttttacactccagg

SEQ ID NO: 281225 - DNA, 238 bp, Glycine max
  unsure (1)..(238): unsure at all n locations
aagcaactataatgggtccccctgatagcccttatgctgggggtgtttttctagttactattcattttcctccggattatccattcaagccacccaaggttgcatttaggactaaagttttccacccaaatatcaacagcaatggtagtatttgtcttgatatcttaaaggagcagtggancccagcttgacaatatcnnnggggtngcncncnattngcccctnngggangaacaaa

SEQ ID NO: 281226 - DNA, 241 bp, Glycine max
  unsure (1)..(241): unsure at all n locations
gatttgttgacacagctgaagacagattgtctcgtcctgcacaatcatcgttatgccatatnccccacgcaagcttcaatataataccaagttatctgacttttttgagattctggcaantctgaggatagagatggaaagactttcgtttccacagcacgtggtaggaaatatcccgtgactgtcaacctatggcaaccagagaaaaatgcttttgaatgggctacatctttgaaagccc

SEQ ID NO: 281227 - DNA, 237 bp, Glycine max
ctctttcctacctgccagaccttgatgatgcacaattggcaaaggaagtagaataccttcttaggaagggatggattccttgcttggaattcgagttggagcacggtttcgtgtaccgtgagcacaacaggtcaccaggatactacgatggacgctactggaccatgtggaagctgcctatgtttggttgcactgatgcttctcaggtgttgaaggagctcaagaggctaagactgc

SEQ ID NO: 281228 - DNA, 244 bp, Glycine max
  unsure (1)..(244): unsure at all n locations
caccaaacntgctgttggcgtcgaagtcaacaagcaggttggcaacagaattataaggaagaggattcatgtgcgggtagagcatgttatgccttcaaggtgcactgaggagttccgcctcaggaagattaagaatgatcagctaaaggccgaagccaaggtcaagggnagaagannagcaccaagagacagccgnnnnntttccaaacccggnttcagtgngtgagggngcgaccccttagac

SEQ ID NO: 281229 - DNA, 238 bp, Glycine max
  unsure (1)..(238): unsure at all n locations
ggcaaatcagcttttatcctctctgctgaacttgctgcagcccataatttgaaagcttaaaagttttggaaaaaagaatanaagatgatgcaacagcaacacaatctgttttctacatcataaagagaacggagctagaaattaatttgcatccaatgtaactctaatttgttcccacgtttctttaactgcttcttgtaacgtacgttgtagatatgtatgattaatcttcttccca

SEQ ID NO: 281230 - DNA, 234 bp, Glycine max
  unsure (1)..(234): unsure at all n locations
atgtcgttngtttcaagcatgttcgggtgtggagtggtgatggcggcgtcgcaagcaatgggaattggaangagaagcgatggtggattgacgatagtgtgttcgtctaggccgcagaagaaagcnacggcgcatcacatgaagactcggcctcggaagacgcaggcatgggatagaaaccgcaagcccaccgtctacgatccactccctcctttcctcctgattgganccncc

SEQ ID NO: 281231 - DNA, 234 bp, Glycine max
  unsure (1)..(234): unsure at all n locations
gaaccccaacagctttgatgggcatgggaactacagcattggcattaaggaccagggtgtcttcccagagatcagagctgatgttgttggtaagcctcggggaatggatatctgcatcgcaacaacagctaaaaccgaccaagaagcacacaaattgttggctcttatgggtatgcccttcagagagggaagtggtcccgccaccacaattcggaaaagaagctcagtctcntc

SEQ ID NO: 281232 - DNA, 239 bp, Glycine max
  unsure (1)..(239): unsure at all n locations
gaaaaagcctaagangggttcancnaatgctaaaccaattaccaaaactgaaaattgtgaaagcttcttcaatttcttcaacccaccgcaagnccctgaagatgatgaagacattgatgaagatgcggctgaggaacttcagaatcagatggaacaagattatgacatagggtcaacaannagagncaagatttccccancnnnncnagggnttncttgggaggnccattnagggggat

SEQ ID NO: 281233 - DNA, 259 bp, Glycine max
  unsure (1)..(259): unsure at all n locations
ctcataacacaaagcatcnangcaaagctcatccttgagttaaaaaatggcagnncgcttcttccatggctctctcatccccataccttggctgngcaaggccgtgaagctgggcccatncagccccagaagtgggaagggtgagcatgaggaagaccgtcaccangcaggtttcctcaggaagcccatggtacggcccagaccgantcaagtacttgggcccattntctggggagccccctnnntacnaagggtaant

SEQ ID NO: 281234 - DNA, 269 bp, Glycine max
taacgtgaagtggcgtgctttgaggcttgataccgggaactactcttgggggagtgaggctgtgacccgcaagacaaggattcttgatgttgtgtacaatgcatccaacaatgagcttgttcggactcagacgctggtcaagagtgccattgttcaggtcgatgcagcgcccttcaagcagtggtatctgcagcattatggcgttgaggttggccgcaagaagaagagtgcagcagcttctgtcaagaagaagggaggatggtgaagct

SEQ ID NO: 281235 - DNA, 270 bp, Glycine max
  unsure (1)..(270): unsure at all n locations
ctaatttcaccaatatccctgctgatgagaaccaaattgccgcatatttagtaaaaaatggtccacttgctatgggcgtgaatgcaattttcatgcaaacatacattggtggtgtctcatgccctctcatatgtagcaagaaaaggctgaaccatggtgtgttacttgtgggatatggtgcaaaaggcttctcaattctnaggcttggcannaaaccatactggatcatcannattcgtggggggaaaatggggnaaagtngctantnnc

SEQ ID NO: 281236 - DNA, 276 bp, Glycine max
  unsure (1)..(276): unsure at all n locations
gttattctttggggagttccgtgtgttggacatcaatggctcacagtgctttcttacccggacagggtatactggagaagatggatttgagatctcagttcctcngagcatggactagatcntgccaaggcaatactggaaaaatctgaagggaaggtaaaattnncangattnggaccnagacanantctgcgattgaanctggntgtgcttatanggaatgacatgggacagcaccatnanactattgaggcaggactcnnanggncnaaggga

SEQ ID NO: 281237 - DNA, 262 bp, Glycine max
  unsure (1)..(262): unsure at all n locations
tccgaacgggttgcttagtaggatgctatagaaaattgtcaaaaatgntgcttgtcatctgtctttgatgaataccaacgctttgcagctgccaaagcaagagtttcagatcagaggtttgtagagttgttngatatttccagcctgaaacattttccnatacccttttcatgtttgaagaggtgacatatataccaagctatnctgagtngggntacttccttagttngtgaantnaacccaggtcngccttgaanaaaag

SEQ ID NO: 281238 - DNA, 268 bp, Glycine max
  unsure (1)..(268): unsure at all n locations
ttcggaagnaaccctagccactctcccggcgtcacgatgcagatcttcgtgaaaaccctaacgggtaaaacgatcacgttggaggtggagtcttcggacaccatcgacaacgtgaagncccaagatccaggacaaggaaggtntccctccggaccagcagcgcctcatcttcgccgggaagcagctggaggacggccgcaccctcgnccgactacaactccagaaggagtccagcttcactncgtcctccgctcgtggcggcgcnaaa

SEQ ID NO: 281239 - DNA, 268 bp, Glycine max
  unsure (1)..(268): unsure at all n locations
ttgaaatgtcatcagttgtttacaaganttgggttttcactgaccaagcnttaccagctgatcttgtcaagagaggattggcagttgaggatccctctgccccacatggtcttcgccttgtgatagaggactacccttatgctgttgatggacttgaaatatgggatgctattaagacatgggtccatgagtatgtctctgtgtattacccancaaatgcagcaatcaacaagacnctgacttcaacaggtggaaggaattgtggana

SEQ ID NO: 281240 - DNA, 276 bp, Glycine max
  unsure (1)..(276): unsure at all n locations
gtgggattctattctaagattttgagaatgtctagctgtgggtgtggaagcagctgcaactgtggcagcaactgcggttgcaacaagtactcttttgacttgagttacgttgagaagacaaccacagagactctagttttgggtgttgggcctgtgaaggccaattggagggtgctgaaatgggtgttgcatctgagaacggtggctgcaactgtggatcaagctgcacctgtgncccatganactgcaataaggncaagatgtannccttgacgc

SEQ ID NO: 281241 - DNA, 266 bp, Glycine max
  unsure (1)..(266): unsure at all n locations
ttcaggacaaggagggaatccccccagaccagcagaggctgatcttcgccgggaagcagctcgaggacggacgcanccttgctgactacaacatccagaaggagtcaactctccacttggtgttgcgtctncgtggtggtatgcagattttcgtgaagactcttacgggtaagactattaccctcgaggtggagagctctgcacaccattgacaatgtgaaggccaagattcaggacaaggaaggctcccaccggaccagcagagc

SEQ ID NO: 281242 - DNA, 265 bp, Glycine max
  unsure (1)..(265): unsure at all n locations
gttgctattgcaaggctttcctatttctacaagcntgaaagctntgggcagtgcaccccatgcagagaggggactggttggctttggacgatcatggaaagaatgaaagttgggaatgccacgttcgaagaaattgatacgcttcaggagttgactaaacaaattgaagggcatacaatttgngccttgggngatgcnnctggcaggccatgcagggncttatcaagctttcaggccnnaacttgagagangnatagagncnacc

SEQ ID NO: 281243 - DNA, 278 bp, Glycine max
  unsure (1)..(278): unsure at all n locations
gtccaaggttggtaccgtgtgtttcggagtagctgcaagccaaggagccttctccttgctggaggagagaagggaatgcgctacgcgatgccaaatgctcgcataatgatacatcaaccacagagtggatgtgggggtcatgttgaggatgtcagangccaagtgaatgaagctgttcnatctcgccataaaattgacaagatgtatagtgtttttactggacagccattagagaggtgcaacagtaccagagagggaccgtttctgnngttnctggg

SEQ ID NO: 281244 - DNA, 265 bp, Glycine max
  unsure (1)..(265): unsure at all n locations
gtnacactcaaatgactcaacnagccatggctaccttctccaaggaacgcgagaactttgtctatgttgccaagttagctgaacaagctgaacgctatgatncnaatggtggatgccntgaagaaggtggcgaantggacgttgaattnagtgtggaagagaggaacctgttctctgttgggtacaagaatgtggtggggtcacggagagcttcaggaggatcttgtcatcgatagagcagaaagaggagtcaaagggangagtt

SEQ ID NO: 281245 - DNA, 263 bp, Glycine max
  unsure (1)..(263): unsure at all n locations
angtggaacgccgtcgctctctgggcttgggacatcgttgtcgataactgtgctatctcccggaaccacatcatggatctctgcatcgagtgccaagccaaccaggctagcgccactagcgaggaatgcactgtggcttggggagtttgtaaccatgcctttcacttccattgcatcagtcgatggctcaagactcgtcaagtttgtctctagataacagtgagtgggatttcagaaatatggccactagattatgatgtggt

SEQ ID NO: 281246 - DNA, 265 bp, Glycine max
  unsure (1)..(265): unsure at all n locations
tcgttggtttcaagcatgttcgggtgtggagtggtgatggcggcgtcgcaagcaatgggaattggaaggagaagcgatggtggattgacgatagtgtgttcgtctaggccgcagaagaaagcgacggcgcatcacatgaagactcggcctcggaagacgcaggcatgngatagaaaccgcaagcccaccgtntacgatcccactccctctcttcntcctgattggaccctcgtnatncccnctgncgcttnttcngccccttacc

SEQ ID NO: 281247 - DNA, 261 bp, Glycine max
  unsure (1)..(261): unsure at all n locations
tttgagaggttcttccctcaganctcagccaggctgagtgttcctggaggaccaagtgttgcatgtagcacagccaaagctgtagagtgggatgctgcttggtctaacaaccttgatccatctngtagggcagcacttggagtgcatgcatcagcttatggaaatcaggtcaaagctgtagaaccagagaagtcatacacacgatggaagtttccccantaggagttgccatatagactagtatgagccatcgcaatacta

SEQ ID NO: 281248 - DNA, 266 bp, Glycine max
  unsure (1)..(266): unsure at all n locations
gtgaccatgtggaagctgcctatgtttggttgcactgatgcttctcaggtgttgaaggagcttcaagaggctaagactgcataccccaacggcttcatccgtatcatcggattcgacaacgttcgccaagtgcagtgcatcagcttcatcgcctacaagcccccaggcttctaagtgtgaaaaatttgcaaagcatttgtagccgcnacccccatttgtttgttcgtccttaaatncatcccatttgttttnnctttatgagatnc

SEQ ID NO: 281249 - DNA, 223 bp, Glycine max
ttgttgtttgtgtgtttgttttttctctcacctgaaaatgtcttgctgcggtggtaactgtggttgcggaagcgcctgcaagtgcggcaacggctgcggaggctgcaagatgtacccagacttgagctacaccgagtcaaccaccaccgagaccttggtcatgggagtggcaccagttaaggctcaattcgagagtgctgaaatggtgttccgctgagaacga

SEQ ID NO: 281250 - DNA, 268 bp, Glycine max
tatcttaggagaattggaaccaatgttcactcttatgtcaatatggtctgtgcaagtctgcggcattcaattcccaagtcaattgtctattgtcaagtgagggaagcgaaacgaggcctactagatcactttttcactgagctaggcaaaattgagcccaagcgtctgtcctcattgctgaatgaggatcctgcaatcatggaaaggcgaatgccctctcaaagaggcttgagttataccggagtgcacaagctgagatcgatgcatt

SEQ ID NO: 281251 - DNA, 262 bp, Glycine max
  unsure (1)..(262): unsure at all n locations
ggtaagaaaccctagcaagcggnncaatggcagacgttnnggtcnatntggcggctgcancngcagnaggggcagccgaagangagancgttnaagaagttcagtttcangggcntggatcncnatgcgcttctggncatgtccaccgatganctcgtgaagatgttcagtnctcgcgcacgtagnaggttccagagaggcctcaccagaaagcccatggccttgatcnngaagcttcgcaaagcgaaaagagaagctccac

SEQ ID NO: 281252 - DNA, 262 bp, Glycine max
  unsure (1)..(262): unsure at all n locations
cagaaaaacaagtagttgagaactaagaagaagganctggcttcctcaatgatctcctccccagctgttaccaccgtcaaccgtgccggtgccggcatggttgctccattcaccggcctcaaatccatggctggcttccccacgaggaagaccaacaatgacattacctccattgctagcaacggtggaagagtacaatgcatgcaggtgtggncaccaattggcaagaanaagttcgagactctttcctacttgccagacc

SEQ ID NO: 281253 - DNA, 262 bp, Glycine max
  unsure (1)..(262): unsure at all n locations
aaggagcgttctggattcgagggtccctggacctctaatcctcttattttcgacaactcatacttcaaggagttgttgagtggtgagaaagaaggcctccttcagctacctnctgacaaggcacttttgtctgaccctgtgttccgccctcttgttgagaaatatgcatcggacgaagatgccttcttcgctgattacgctgaggctcaccaaaagctttctgagcttgggtttgctgaagcctaagcaacgttttggggat

SEQ ID NO: 281254 - DNA, 263 bp, Glycine max
  unsure (1)..(263): unsure at all n locations
aggaatccccccggaccagcaacgtctcattttcgcnggaaagcaacttgaggacggccgtacccttgctgactacaacattcagaaggagagtactcngnacctcgncctccgtctccgtggtggcatgcagatcttcgtnaagacactcaccggcaagaccataaccctagaggttgaaagctccgacaccatcgataacgtcaaggccaagacccaggacaaggagggtatccccccggaccagcaacgnctcatcttcg

SEQ ID NO: 281255 - DNA, 264 bp, Glycine max
  unsure (1)..(264): unsure at all n locations
aattgcgaaggggacgatatgttgaattcaatttggtatatgatagnggtacaacatttggnctgaaaactggagggagaatagagagtatacttgtttctctcccactgactgctcggtgggaatacgatcataaaccggaagaaggaagcgaagaatggaaactcttggacgcatgcatcaaccccaaggaatggatctaattcatcagttgaccccccaatttgtcagctttttaatttaataataagggagcttgtttct

SEQ ID NO: 281256 - DNA, 263 bp, Glycine max
  unsure (1)..(263): unsure at all n locations
gtcagcccagacctctctgttttgaacttggtaattgtgaagaaaggtgagaatgatttaccaggattgactgatgttgagaagccaaggatgagaggcccaaagagagcatccaaaatccgtaaactgttcaacctgtctaaggaggatgatgttaggaagtatgtcaacacctaccgtcgtacatttggngacaaaagctgggaaaaaggtgagcaaagctcccaagatacaaagactggtcactcctcttacgctccaaa

SEQ ID NO: 281257 - DNA, 263 bp, Glycine max
  unsure (1)..(263): unsure at all n locations
cttgagtntnaccaagtccaagcctgagactggtgaggttattngggtgttcgagagtgttcagccttctganactgatttgggggctaaagctcctaaggatgtngagattcaaggcatctggtatgctcagcttgactcatagaccttttcttaatgttgtaactctacnttcttgtaactccntccacggtcttgtgaccccagttggcgaacactcagagcgttatcatgtgtgtatattataatgacttcgattataa

SEQ ID NO: 281258 - DNA, 258 bp, Glycine max
  unsure (1)..(258): unsure at all n locations
ggtctttccagatgggattttgtatgcttcacgggantcacattattctgtgtttaaagctgctcgaatgtacagaatggaatgtgagaaggttgatactctttggtctgtggaaattgattgtgatgatttcaaggccaagcttcttagtcaccaggataagccagcaattataaatgtgaacataggtacaactgtgaaaggggctgtggatgatcttgatctggacataaaaaaacttgaagaagctggattttc

SEQ ID NO: 281259 - DNA, 259 bp, Glycine max
aaagactttgccaccgactcaatcaaacgaagacttgcttatcctttatggattgtacaagcaggccaccgttggacctgtcaacaccagccgtccgggaatgttcaacatgagggacagagctaaatgggatgcatggaaggctgttgaagggaaatccaaggacgaagcaatgagtgattacatcactaaggtgaaacagctgctggaagcaccggcatgcctgcttgataacattgtcatgccttgctttcttatt

SEQ ID NO: 281260 - DNA, 261 bp, Glycine max
  unsure (1)..(261): unsure at all n locations
gacttaccccttgctaccaacactgagcttaaccgagcttcgcaaagatgaatcgggaaaagttaatnannatggccggttacggttagaactggaggaaagggtactgtgagangaaagaagaaggctgtccacaagacaacaaccanagatgacaanaggcttcagagcacccngaagagaataggggtgaatgccatccctgctattgaagaggtcaatatctttaangatgacgtagtatcnagtttctaantccca

SEQ ID NO: 281261 - DNA, 257 bp, Glycine max
  unsure (1)..(257): unsure at all n locations
gagataaaggngtgtgagagggtcctcaccactcacactcctccacttaaaacagtttgttttggcttagctttggcttctctaatcaacaagggatgtgttctancattctctcttgagtggcagaagcagatatgcattctccaaaggaggagaggctttggctacagcctggcaaaccggcaagtcacgaaaaggcaatggactccattggggtctctatggctatctattgctcatctatgtagttcttctng

SEQ ID NO: 281262 - DNA, 259 bp, Glycine max
  unsure (1)..(259): unsure at all n locations
ggcacacacagacacacacatttcgtcggaatgggaagggtgattcgcgcacagcgtaaggntgcggggtctgtgttcaagtcccacacccaccaccgcaagggtccggcgaggttccgcagcctcgacttcggcgagcgcaacggctacctcaaaggggncgtcaccgatatcatccaccaccctggtcgcggtntcctctagccaaggtggcgttccgccaccccttccgctacaagaagcagatggagtcttcgtt

SEQ ID NO: 281263 - DNA, 263 bp, Glycine max
  unsure (1)..(263): unsure at all n locations
cgaaaccctaggttttagtgagtggcgnaaatngcggtnattttttcaagtgcaataccaggaggggcagcaccagcancaatcgagcaagtgcagtgcttcnggcggaagangacggcggtggcagtgacctactgcaagcgcggccgaggcctcattaagatcaacggctgcccgatcgagctggnngagccggagatcctccgcttcaaggctgngtgtccaatcctcctcctcggtcgccaccgcttcgccggcgtgga

SEQ ID NO: 281264 - DNA, 263 bp, Glycine max
  unsure (1)..(263): unsure at all n locations
gttgaaantgcaaagcaattagcactccaggaaggcttgctggtgggaattnccttcaggagctgcagctgcagctgctttgaaggttggaaagaggcctgagaatgcaggaaagcntattggggttgtcttcccaagctttggtgaaagatatttgtcaactattcttntccantcaatacgggaagaatgcgagaaaatgcaacctgagccatgaattgactttgcttgntaatgtttcatactcattttccacaagtatg

SEQ ID NO: 281265 - DNA, 256 bp, Glycine max
ctccagcttgtgacccaagtgggggcttcagagtgatagaacagctttcgggcttgctgggttggactgtagctgtcatctgcgggcctgcccgctccaagttgggagttgagcctcgagtcttgagcgaaggcccaagtttcgtggctcctagacttgagggcacagcgtgaggctggtttaacagagcagcgaacacctcaggctcccaacagtggagggataacaggttgctgcacccacagtccacaatggc

SEQ ID NO: 281266 - DNA, 259 bp, Glycine max
  unsure (1)..(259): unsure at all n locations
gaaaattgtgagaggagttttcacgtctttgagaaatgggtgcttcgctatcggtctcggaaaaatccatccatgaattcatggtcaaggatgctaagggcagagacgtgaacctgnngcatctacaaagggaaggttcttcttgtagtaaatgtcgcttcaaaatgtggatttacgaataccaattacacccagttaactgagctttacagcaaatacaaagacagaggccttgagatactggcanttccatgcaacc

SEQ ID NO: 281267 - DNA, 256 bp, Glycine max
  unsure (1)..(256): unsure at all n locations
aaggagcggctcttnaagagggctcaggctgangccgatgggaagcctgttgaggccaagaagcctattgttgtcaaatacggtctcaaccatgttagttaccttattgagcagaacaaggcacaactggttgtgattgctcacgacgtggacccaattgagctggtggtctggcttctcgcattgtgcaggaagatggaaattccatactgcattgtcnagggcaaagcacgcttgggaacgattgtncacaaga

SEQ ID NO: 281268 - DNA, 258 bp, Glycine max
  unsure (1)..(258): unsure at all n locations
ggtttatagatctttgcgaaggaggtttacagcgctcaaccaaagatgcagaacgaggaangacagatcactgagcttacattcctaggaagtgctccgccacaaacagattgattancgcnaaggaccatgcttcggttcagatcaacattgggcatgtggatgagaatggcgtctacaatggccatttctccacttttgccctctgcggattcatccgtgctcagggtgatgctgacagtgctctagaccgcttgt

SEQ ID NO: 281269 - DNA, 267 bp, Glycine max
  unsure (1)..(267): unsure at all n locations
gcgcggcataacctaaacctatctttcttctctctctgtgtgtgcgcttcanccggcaaccagaagcagccatggccactgcaaggactgtgaaggatgtttcacctcatgagttcgttaaggcgtactcctctcacctcaagcgatccggcaagatggagctgccagagtggactgatattgtgaaaactgcaagatttaaggagttggctccttatgatcctgactggtactatgtcagagctgcttccatggcaagaaagatct

SEQ ID NO: 281270 - DNA, 266 bp, Glycine max
  unsure (1)..(266): unsure at all n locations
gttgaaactgcaaagcaattagcactccaggaaggcttgctggtgggaatttcttcaggagctgcagctgcagctgctttgaaggttggaaagaggcctgagaatgcagganagcttattggggttgtcttcccaagctttggtgaaagatatttgtcaactattcttttccagtcaatacgggaagaatgcgagataatgcnacctgagccatganttgactttgcttgttaatgtttcatactcattttccacaagtatctgtt

SEQ ID NO: 281271 - DNA, 268 bp, Glycine max
  unsure (1)..(268): unsure at all n locations
actactatagaatgatatttgagaggttcttccctcaganctcagccaggctgagtgttcctggaggaccaagtgttgcatgtagcacagccaaagctgtagagtgggatgctgcttggtctaacaaccttgatccatctggtagggcagcacttggagtgcatgcatcagcttatggaaatcaggtcaaagctgtagaaccagagaagatcataccaaagatggaagtttccccactaggagttgccatatagagctagtatgagcc

SEQ ID NO: 281272 - DNA, 269 bp, Glycine max
  unsure (1)..(269): unsure at all n locations
gagtgatttcagtgagtgatcggtgttcacttgatctcatcataatcgtcagcgtcaattgaagaagatgccgatcagaaacatcgccgtcggaaggcctgangaggcgactcaccccgacacgttgaaggcggctttngctganttcatctcaaccttcatcttcgtgttcgccggctcaggctccggcancgcctacnacaagctcaccgacaacggcgctgccacccctgcnggcntcatctccgcctccatcgcncatgcattcg

SEQ ID NO: 281273 - DNA, 275 bp, Glycine max
  unsure (1)..(275): unsure at all n locations
ancactgccagannanatggcggtnnctnttctctcgaagaanatcgnnaagnagaggctgaagangttcaagaggcctcaaagtgacaggaagatttctgtgaagacaaactggcgcagaccaaagggtatcgattcccgtgttaggagananttcaagggatgcactntgatgccgaacattggttntgctncagacaaganganccgccactatctnccgaatggtttcaagnaatttgtngtncacaatgtgaaggantnggaactgctca

SEQ ID NO: 281274 - DNA, 269 bp, Glycine max
  unsure (1)..(269): unsure at all n locations
agaaagccgtcnctatcctagtctcttcttcccctctacccatttcagtttcaggatggaatctcaggtgaagcacgcccttgttgtcaaagttatgggtcgtactgggtctagggggcaggtgactcaggttagagtgaagtttttggatgatcaaaaccgacacatcatgaggaacgtgaagggacccgtgagaganggagacattctcaccctacttgagtctganagagaagcaagaaggttgcgctagaggatctcttcatggt

SEQ ID NO: 281275 - DNA, 271 bp, Glycine max
  unsure (1)..(271): unsure at all n locations
tgctgatcttcgttaagaccctcaccggcaagactataaccctagangtcgagagctccgacaccatcgacaacntcaaggctaagatccaggacaaggagggtatccccccagaccagcagaggctgatcttcgccggcaagcagcnccgaggnccggacgtacccttgctncctacaacatcncgaaggagtcaactctccactttgtgttgcgtcttcgtggtggnctgcagatcttcgtcaagacccttacgggtaagactatttac

SEQ ID NO: 281276 - DNA, 204 bp, Glycine max
ggctgggaaaggatatgatcaagtgtatctctttgaataattctatctgtaggaggtgtccttgaattttcttttatgcacaataaattatgaactggggatgtagtttgaagaaataaaaatttgtgcacagtgatgtttgtaagatgcttaatttcagggcaatgctctgcttatcaatgtgttatatcttgttattgcccc

SEQ ID NO: 281277 - DNA, 263 bp, Glycine max
  unsure (1)..(263): unsure at all n locations
ccgaggnagctaaaacaatacttcaggccagaatttttgaataggttggatgaaatgatagtcttcaggcagctcacaaaactggaggtgaaggagattgctgacataatgctcaaagaggtgtttgaaagactgaaggtgaaagatattgaacttcaagtgacaganagatttagggacagagtggtggaggaaggttataaccctagttatggagctagacctctgagaagagccataatgcgacttttggaggacagcat

SEQ ID NO: 281278 - DNA, 265 bp, Glycine max
  unsure (1)..(265): unsure at all n locations
gtaancctggaaaccccagttanntcnagccctttaatcgnntgnnantggtcnaacntgccngantanngaacngnatnnagcnantactaagagggatcnaggtgggcctggcccacggntaccttctggtgggcccattcgtgaaggccgggcctcttaggaacaccgagatcnccgggcaagcgggntctctggccgccgtgggcttgtggtgatcctcagccttgcctcacaatctatgggatttcaatccttcaacgaa

SEQ ID NO: 281279 - DNA, 261 bp, Glycine max
  unsure (1)..(261): unsure at all n locations
ancttgtgccctaccctaggatccacttcatgctttcgtcctatgctccggttatctctgccgccaaggcctaccacgagcagttgtcggtgccggagatcaccaatgccgtgttcgagcccgccagcntnatggccaagtgtgatccaaggcacggcaagtacatggcttgctgnctgatgtaccgtggtgatgttgtccctaaggatgtcaatgctgctgttgccaccatcaagactaagaggactgttcagtttgttg

SEQ ID NO: 281280 - DNA, 265 bp, Glycine max
  unsure (1)..(265): unsure at all n locations
atgtaccgtggtgatgttgttcctaaggacgtgaatgctgctgttgccaccatcaagactaagaggactgttcagtttgttgattggtgtccaactggattcaagtgtggtatcaactacnagcctccttctgttgttcctggtggtgaccttgccaaggtgcagcgggctgtatgcatgatcagcaacaacactgcagttgcngaggtgttctctcgcattnnccacaaatttgatctgatgtatgccaagagggcctttgttc

SEQ ID NO: 281281 - DNA, 261 bp, Glycine max
  unsure (1)..(261): unsure at all n locations
ctaaactaaatcgaagcaaacaatagtgagtgagatcgtgaagaaattagtttggnaatggcagtggcaggttgtcagaagcttctggaactgagcaccaagatcgtcgctgttggcagaaactacgctgctcacgccaaggaattaggcaacgccgttcccaaggagccggtgttgtttctgaaaccgacgtcgtcttacnnnaaaaacggcggaaccatccaaattccacacaacatngcnnnngaaanangnnnaggt

SEQ ID NO: 281282 - DNA, 257 bp, Glycine max
ttttggagctgggtttgttgcaggaactttagcagctggagccacatgtccactagatgttgcaaaaactcgaaggcagatagagagggatcctgttagggcattgaaaatgactacaagacagacactgatggaggtgtggagagatggaggtttgaaaggattgtttacgggtgttggtccacgagttggtcgagcaggcccctccgttggaattgtgatttcattttatgaagttgtaaagtttgttctacatc

SEQ ID NO: 281283 - DNA, 259 bp, Glycine max
  unsure (1)..(259): unsure at all n locations
gacagcacngttggtgacggttgaggttctgaaaaagtacctggaggagagggttttcccgaanctgatggggaagangaaattcgcggtgctgtacgtgcacaccggcgtccagaggagcgagaattttcccggaatctccggtctccggtggatctacgatgcgattccggcgaacgtgaaggagaatctcgaagccgtttattttattcacccgngcttgcaggcccgccttttccacacaacaagnnnnnngnaa

SEQ ID NO: 281284 - DNA, 264 bp, Glycine max
  unsure (1)..(264): unsure at all n locations
cctacctctccctttcaagatgcngntcttcgtcaagacnctcaccgggaagacnatcacccttgaggtggaaagctctganaccatcgacaacgtcaaggccaagatccaggncaaggaacnanttcccccggatcagnancgtctcatcttcgccggnaagcagctcgnggacgggcgtaccctcgccgactacaacatccagaaggagtcaacncttcacntngtcncncgtntcntnggtggcnngtccantagctgngg

SEQ ID NO: 281285 - DNA, 258 bp, Glycine max
  unsure (1)..(258): unsure at all n locations
gtccagaggctccgcaagnngtgccccancgccgagtgcggcgcccggcaccttcatggccaaccacttcgaccgccactactgcggcaagtgcggcttgacctacgtctaccagaaggccgatgcttaatttgcggttttaattttattttagtatttaaaagttttggtttatgtttttgttcaattagtgttatncnngtttgggctttgattaaacctttattcaatactgttttgcgttggattacttatcat

SEQ ID NO: 281286 - DNA, 255 bp, Glycine max
  unsure (1)..(255): unsure at all n locations
ctcattcttcatccatagacatggccaccgtcactnctgcagccgttgctattccctcattcactggcctcaaggcaagcgcaggcaaagtgagtgccgcagttaaagttctcagctcnccaagccacaaggttgggcatcaaggcttcgctgaaagacgttggagtcgctgttgtggccactgccgcgagtgcagtgctgnctagcaacgccatggccattgaagtgttgctgggtggtgatgacgggtctctg

SEQ ID NO: 281287 - DNA, 256 bp, Glycine max
  unsure (1)..(256): unsure at all n locations
ccgagtagcaacaatgtcgaagcgaggtcgcggaggatcggcagggaacaagttccgcatgtcactgggtctnccggtggcggcgacggtgaactgcgccgacaacaccggcgcgaagaatctctacatcatatcagtgaaggggatcaagggaaggctgaaccggttgccgtcagcttgcgtgggtgacatggttatggccaccgtcaagangggaaagcctgatctccgtaaaaaggtgctccccgccgtcatc

SEQ ID NO: 281288 - DNA, 260 bp, Glycine max
ccgctctcctagtcccgtacttttcatggaaatacagccatcgccgtcaccactccaacacaggttctcttgagcgagatgaagtatttgtgccaaagcagaagtccagtatcatgtggtactctaaataccttaacaatccaccaggcagagtcctcactcttgccgtcaccctcacgcttggttggcccttgtacttggcttttaatgtttctggaaggccttatgatagatttgcttgccactatgacccttatggt

SEQ ID NO: 281289 - DNA, 256 bp, Glycine max
  unsure (1)..(256): unsure at all n locations
cctncatnctgntgntaacttnggacagtatccatatggaggtttaatcctaaacangccaactattagcacgagantcatgcctgcaaaggggtctcctgaatatgatgcgttagctaagaaccctgagaaggagtttttgaagactattactggcaagaaggagaccctcattgaccttacagntanccaaatcttgtcaaggcacgcatctgatgagttctaccttgggcagagagatggtggtgactactgg

SEQ ID NO: 281290 - DNA, 251 bp, Glycine max
  unsure (1)..(251): unsure at all n locations
cccgattcaagaagaaccgcaagaagcgcggccacgtgagcgccggtcatggccgtatcggaaagncccgtaagcaccccggcggccggggaaacgccggtggcatgcatcaccacaggatcctgttcgacaagtaccatccgggcttcttcggtaaggtgggaatgaggtacttccataagcttcgcaataaattctactcccccatcgtcaacgtcgaaaagctatggtctctcataccccaagacgcg

SEQ ID NO: 281291 - DNA, 247 bp, Glycine max
  unsure (1)..(247): unsure at all n locations
gtgtacagattgctatctctggcatccaacancggtggtgcttgggataatgccaagaagtacattgaggctggtgcttctgagcatgcaaggnaccttggtccaaaagggtcagnttgtcacaaggcagctgttattggtgacaccattggagaccccctcaaggatacatcagggccttcacttaacatccttatcaagctcatggccgttgagtctcttgtgtttgctcccttctttgcganac

SEQ ID NO: 281292 - DNA, 247 bp, Glycine max
gcaacaaacaagaggggtttgccttgtgccgtttgtgttgttttcgggacgaagaagaagatggtgtcaggttctggaatctgcgcaaagcgggtggtggtggacgcgcgccaccacatgctgggtcgtctagcctccatcgtggcgaaggagcttctgaacggccagaaagtggtggtcgttcgctgtgaagagatttgcatctcgggcgggctggtgaggcagaagatgaaatacttgaggttcc

SEQ ID NO: 281293 - DNA, 251 bp, Glycine max
cgcaccaaggacatcctcagcgtcgccctcgccctcctcttcggtgtcggctgcggcgccctcaccgccgccaccatgtacctcgtctggtccgtcttctccacgcgccaccccaccgccgccttcgacgacttctcctccgacgaagacgagatcgagagccccaagaagctaggctacgtcaagattcctgccaccgagaccaccgctgctgtctccaccgctccggcgccgtccaagggttcggtatg

SEQ ID NO: 281294 - DNA, 254 bp, Glycine max
  unsure (1)..(254): unsure at all n locations
ggcggtccaaacactcttctctgcagcttttgcctacaactncccttcaccatggctgaacaaaccgagaaagcttttctgaagcaaccaaaagtgtttctcagcacaaagaagactgggaagggaaagagacctggaaaaggtgggaaccgcttttggaagtccattgggcttggntttaagactcccagggaagccatcgaagggacctatattgacnagaagtggccctttcactggcaatgtttccatcc

SEQ ID NO: 281295 - DNA, 280 bp, Glycine max
  unsure (1)..(280): unsure at all n locations
ctanaaagtatgcagcaatgcttggctgaaaagatncagaagcatggtgctactggatggcttgttaacactggttggtctnctggaagctatggtaatggaagccgtattaaactacaatacacaaggaaaatcattgatgctattcactccggaagtctcctgaatgcagagtacaagaagactgaaatttttgggcttgagattcccaccgaagtggagggtgtcccttcagaaattctggatcctatgaacacttggtcaaacaaaaaggcctacg

SEQ ID NO: 281296 - DNA, 276 bp, Glycine max
  unsure (1)..(276): unsure at all n locations
aatagaatgggatctggaagtggaaaacacactggagagttcttcaggagaagggatgcatggaggaagcatccgatgctcaccaatcagctccgccacgccacccctggccttggcatcgccgtcgtcgccttcggtatctacctcgtcggcgaacaagtctacaataggctctatgctcccgatcctcattcgatttctcacgtgaaagccggggatcaccactaaacgtttggacggacgcactccattccatcatcacttaataancttgct

SEQ ID NO: 281297 - DNA, 279 bp, Glycine max
  unsure (1)..(279): unsure at all n locations
gagggtgtgngagagngactggantngntcctggtaaatctattcttgtncnaaatggttctggnngagttggtagcctagtgattcagctagctaagcaagtttttggagcttcaagagttgctgccacttcgagtactagaaatttggacctattgaaaagcttgggagctgatttggctattgantacacaaaagaganctttgaagattngccagagaaatttgatgtagtgtatgatcccattgggcaangtgncagggcagtganggtnacaa

SEQ ID NO: 281298 - DNA, 271 bp, Glycine max
  unsure (1)..(271): unsure at all n locations
tcgctccgcaccagtttcaccgcacgaatatcttgtngtttggagcgatccgataaaaactctgtaancatgtnggtttaccaggacctccttacaggtgatgagcttctctctgactccttccgttacaaggaaattgagaatggaatgctgtgggaagttgaggggaattgggttgttaaaggagcagttgatgtagacattggtgcaaacccttctgctgagggtggatgngaagatttnggagttgatgatgcagtgttaaggtttt

SEQ ID NO: 281299 - DNA, 275 bp, Glycine max
  unsure (1)..(275): unsure at all n locations
aaacgcagtgtnggaagatgccgacacgttntgaaatatgctgcgagataatgatcgcgatcttgatccctcctctcggagtttgctttcgccacggttgttgcagcgtcgaattcatcatctgcttgctcctcacaattctaggttatattcctggtataatctatgctctctatgctattatcttcgtcgatcgtgaccagtactttgatgaatacaggcggtcctctctatgcacaatactgatgataattttagtttgtatgcctatgagt

SEQ ID NO: 281300 - DNA, 227 bp, Glycine max
  unsure (1)..(227): unsure at all n locations
aaaagagggaatttgaaaggaggattggtgccatcccttgaagaatttgagtcaagaagcaagggaaaactaccttaagagctattggactaagaggcactccaaattgagtgaaccatcaaagagagaacaaccaccaaaattgaggaccttgntgtaattttgtaattgacaatttacttactttcattgctttcaaattttgtaacaaaaaggcctttcattgg

SEQ ID NO: 281301 - DNA, 276 bp, Glycine max
  unsure (1)..(276): unsure at all n locations
gaaaatngcggtacccttgctctccaagaggatcgtgaagaancgcgtcaagaagtttatacgcccccagattgatcgcaagatctccgtcaagccaanctggcgcagacccaagggtattgattctcgtgtcaggagaaagttcaaaggatgcactttgatgcccaacattggttatggctcagacaagaaaacccgccattatctaccaaatggtttcaagaaatttgtcgtgcacaatgtgaaagacctggaacttctcatgatgcataacag

SEQ ID NO: 281302 - DNA, 270 bp, Glycine max
  unsure (1)..(270): unsure at all n locations
gcacaatcaggtcngttgccnagtaganatccggaaggaagtttggtggcctnngggttctccaangcatacngtgtgaatgangacnccacttacaaatatnttgaggtcattcttgtggatgttgcccacactgctgtnagaaatgatccaagaatcaantggctcngnaatccagtccataaacacagggaactgcgtggcctcnnttctnctggnaanagcnataggggtttacgttgngaggacatctctaccacaaaaatcgnc

SEQ ID NO: 281303 - DNA, 271 bp, Glycine max
  unsure (1)..(271): unsure at all n locations
ctataagctagtttatcgtgaggagaatatgaagttgtgtgtttactttgttngcggcagtagttttggtancatggccatgccatggcgcaggctaccaaaggttccctctccgaatgaaaactggctatggtgagcgttcttcggaggtaaaatgcgcaagttttatgctngctgtggaagcacacaacatccgagcntttanaaccagtcctgangagtgcgttgtnccgacaaaggactanatttatggcgnacaatttngatcagg

SEQ ID NO: 281304 - DNA, 269 bp, Glycine max
  unsure (1)..(269): unsure at all n locations
atnattgttgtgactcgntcttcttcgtctttatcttcntcttttgttgtttgtgtgtttgttntcgtctctcacctgaaaatgtcttgctgcggtgngaactgtggttgcggaagcgnctgnaagngcggcaacggctgcngaggcngcaatatttacccagacttgagctacaccnagtcaancaccaccganaccntggtcatggtagtggcaccagttaaggctcaattcgagagtgctnaaatgtgtgttcccgctgagaacga

SEQ ID NO: 281305 - DNA, 269 bp, Glycine max
  unsure (1)..(269): unsure at all n locations
acctttctctctcttctttttactctctctctgtctctctctacgcttacctcgtncgagatccacncaagggatccactaactgaatgaganatngngttgacattcaccaagctnttcagccggcttntcgccangaagganattcgaattctgatggacggtctcgatgcagctggtaagaccaccatcctgtacaagctcaaacttggagagntcgttaccacaattcccaccattgggttcaatgtggagactgtggaatacag

SEQ ID NO: 281306 - DNA, 266 bp, Glycine max
  unsure (1)..(266): unsure at all n locations
aattttttntnatgnnaaataatgtccgngatcanccacaagattgnggagaccctccatgtgggattgcacnataaagatgngcncaaaggatnacnccatggtgagcacaaatgtgaacacaaagtagancnccatggtnagcacaaaggtgaacacanagganaacaacaccatggggagcacaaggagggncttgttgataagatcnnggacaagatccntggtgatngccatgacaagggtgagananagaagnagantgg

SEQ ID NO: 281307 - DNA, 265 bp, Glycine max
  unsure (1)..(265): unsure at all n locations
agggatcgaggtgggcctggcccatggnnaccttctggtgggcccattcgtgaaggccgggcctntgaggaacaccgagatcgccgggcaagcaggctctctcgccgctggtacagcttgtggtgatcctcagcctttggcctcacaatctatgggatttcatcttttaacgnagggcagccatccactgccccgtcactgaccttgacnggccgcaagaaggngcccgatnagtccaaactgctgatgggtgngccaagttcac

SEQ ID NO: 281308 - DNA, 271 bp, Glycine max
  unsure (1)..(271): unsure at all n locations
gtgtctgcattgccgatgangttcaaactgggttnggtcgannatgaagccattattgggganttncagacacagggtgtcattcctgatanagttaccatggcaaagggnattggcaatngtctnccattnngagctgnagttanaactccagaaattgcaagtgtgttgggcccaaaagattcaatttnataccttgggtgggaaccccgtntggctctgctggtggactttcagtgcttagggttcttnanaaggagnagcgtcaanc

SEQ ID NO: 281309 - DNA, 265 bp, Glycine max
  unsure (1)..(265): unsure at all n locations
ctctgattccacttttngangaatnncaaagtgtagttcctgangncttncgtcccaananacccgttaancctangggcaactgcaggcttaaggcttttgaaatntantgcttctnancaaatattgcaatcnnttcagnatatnctgagtaacataagtaccctgaacctncaatctgatgcagtaactattcntgatggaaaccaagnntctgcttatatgtgggtggcatganctatctnttgggcaattttggaaaagt

SEQ ID NO: 281310 - DNA, 262 bp, Glycine max
  unsure (1)..(262): unsure at all n locations
tcgggtaggngcactgcgtgcagctctggatgctgaaggctttcagcatgtttctataatgtcctatacagcaaagtatgcaagttcttttnatggtccatttagagaggcactagactcaaacccccggtttggagacaagaaaacttatcagatgaacccagctaattacagagaggctctgactgagatgcgggaggatgaatctgaaggagctgacattctcttggtgaagcctggtcttccttacttggatatcata

SEQ ID NO: 281311 - DNA, 280 bp, Glycine max
  unsure (1)..(280): unsure at all n locations
agttctcacactcattccgtgntctaaatctcaaattctagggttagggttcccaatttctccgccaatcagaagatgagttccaccggttgttctaccaagggcggaaggggcaagcccaangcctccaaatccgtttcaagatcgcagaaagctggtctccaattccccgttggaagaatcgctcgattccttaangctgggaaatacgctgagcgtgttnggtgctggtgctccctgtgtacctctctgcagtgctcgagtatctcgctgctgaggt

SEQ ID NO: 281312 - DNA, 276 bp, Glycine max
  unsure (1)..(276): unsure at all n locations
ctcaggcactgagccttacattgttgcccacaatttgatattntcgcatgcagcagctgttcaaagataccgagcgaagtaccaagaaaagcaaaagggaaggattgggatcctcttggattttgtttggtatgagcctcttacaagatcaaaggctgacaattttgcagctcaaagagccagagactttcatattggatggttcattcatccccttgtttatggagagtatccaaaaaccattcaaaatattgttgggaatagactccccaaatt

SEQ ID NO: 281313 - DNA, 274 bp, Glycine max
  unsure (1)..(274): unsure at all n locations
ggcaagcncttctcctctttgtgttctggctatgcttcttggcaagagttagatcggacgaggattgcntgtacacggtgtacgttcggacgggttcgatcatcaagggaggcaccgattcagtaattggtctgaagctatacgacaagtccggctacggcatatacatcaccaacctcgaggcatggggcgggttaatggatccgggtcacaactactacgagcggggcaacctcgacatattcagtggtagaggcccttgcttggnagcacc

SEQ ID NO: 281314 - DNA, 270 bp, Glycine max
  unsure (1)..(270): unsure at all n locations
atggatnaaacctggagccagagtcctttacctaggagctgcttctggaaccactgtttctcatgtatcanacgttgttggccctactggagttgtcnatgcagtagaattttcccatagaagtggacgtgacctggttaatatggcaaagaagcgaactaatgttattcccattattgaagatgctagacatccagctaagtataggatgctggtcggnatggntgatgtcatattttctgatgttgctcagcccgatcaggcaaggat

SEQ ID NO: 281315 - DNA, 267 bp, Glycine max
  unsure (1)..(267): unsure at all n locations
gtccatcacaaatccgtggancctttagtatcantaaaagaactcttcattgtccgngggattctgctgggttactttgtgggaagctttctgattgagaccgtngggggatggcggttcatgtatggatttagtgctccagttgctgtattaatggggcttggaatgttgactcnccccaattctccacggtggttgcttctcagagcagtgcaaggaaaaggttcttttcaagatttgaaggaaaaggccattttttccctgagc

SEQ ID NO: 281316 - DNA, 265 bp, Glycine max
  unsure (1)..(265): unsure at all n locations
ccaaaatctatgatatttccctagaggctcacataaaacctgctgggcatgaagattcggaggtggtgtcacggactaatctaaagcacttatattggacattgacccaacaacttgctcaccatacaatcaacggttgcaacctntggccaggcgatctccttggaactgggacagttagtggtcctgagccagagtcccgtgcatgcttgctagaattaacatggaatggacaaaacacagtgtcagtgaatgagttaaatcg

SEQ ID NO: 281317 - DNA, 270 bp, Glycine max
  unsure (1)..(270): unsure at all n locations
gagtttgttgtgagctataagctagtttatcgtgaggagaatatgaagttgtntgttttctttggtgctgcagtagttttngtagcatggccangccatggcgcaggctaccaaaggttccctctccgaatganaactggctatggtgagcgttcttcggaggtaaaatgcgcaagttttangcttgctgtggaagcacacaacatccgagcntttaanaccattcctgaagagtgcgttgnaccaacaaaggactacattaatggcgat

SEQ ID NO: 281318 - DNA, 269 bp, Glycine max
  unsure (1)..(269): unsure at all n locations
canaaagcncnaagcaaagctcanccttgagntanaanatggcagcagcttcttccatggctctctcatccccatccttggctggnaaggccgtgaagctgggcccatcagccccagaagtgggaagggtgagcatgaggnagaccgtcaccaagcaggtctcctcaggaagcccatggtacggcccagaccgagtcaagtacttgggcccattctctggcgagcccccgtcctacctaaccggtgagttcccaggcgactacggctng

SEQ ID NO: 281319 - DNA, 267 bp, Glycine max
atactatgaaaaacatggatatggggtggaggaatttaatgaaaccttatatgatgaatgggttaacaagggcgacgcaccggcattgccagagactcttaaaaattacaacaagctgttgtctcttggcttcaagattgtattcttgtcaggaagatatcttgacaaaatggccgtaacagaagcaaacctaaagaaggctggcttccacacatgggagcagttaattctcaaggatccacatcttatcactccaaatgcactttc

SEQ ID NO: 281320 - DNA, 265 bp, Glycine max
aattaatggtggcatggctttgagggaaggagttgatgcatctggcaggaaaggaaagggaaagggcgtttaccagtttgtagacaaatacggtgctaatgtcgatggttacagtcctatctacgacaccaaggactggtctccaaccggtgatgtctacgctggcggtacgactggcttggctatctgggctgtgactctacttggtcttcttgctggtggtgcacttcttgtctacaacacaagtgctttggcgcaataaact

SEQ ID NO: 281321 - DNA, 261 bp, Glycine max
  unsure (1)..(261): unsure at all n locations
ctaagaaggagaagcaaanngnttccncaatgatctcttccccanctgttaccactgtnaaccgtnccggtgccggcatggttgctccantcantggnctcaagtccatggctggnttccccaccaganagaccaacaatgacattacctccantgctagcaacggtggaagagtgcaatgcatgcagntgtggctaccagttggnaagaagaagtttgagactctttcctacctgcnagaccttgatgatgcacaattgg

SEQ ID NO: 281322 - DNA, 270 bp, Glycine max
  unsure (1)..(270): unsure at all n locations
gccgcagcaagtgatcgaagcganaagagagaaattcatcgtcgcagtaatcatgggtaaggttcatggatcacttgcacgtgctggtaaggttagaggnnaaaccccgaaggtggccnnnnnnnnnnnnnnnnnnnnnccacgtggccgcgcccacaagaggatgcagtacaatcgccgattcgtcaccgccgtggtgggattcggcaagaagaggggacccaactcgtctganaagtgaggccgaggcttgaggaatatgttgctact

SEQ ID NO: 281323 - DNA, 271 bp, Glycine max
ctgcttcgttaaggcgaaagtcacagatcctccacagatatccatctcttaatgtgcaggaaaatttccgtggcaatgtccaaacaaggttaagaaaactcaatgagggggttgtccaagctacactattagcattagctggactcaaacgcttaagtatgacagaaaatgtgacttcaatcctatcaatagatgatatgcttccagctgttgcccaaggtgccattggaattgcctgtagaagtgatgacgataaaatggcagaatacat

SEQ ID NO: 281324 - DNA, 263 bp, Glycine max
  unsure (1)..(263): unsure at all n locations
cgtcaaaatttctactgatgcatccatcaagnagatgattcctccgggtgccctncgtnangctcanaccactcattgttggnatcttcttcggggtggaaacactttcaggtgttcttgccggggctctagtttctggtgtacagattgcaatatcagcatccaacactggcggtgcttgggataatgctaagaagtacatagaggctggtgcgtctgagcatgcaaggaccctgggcccgaaggatctgaaccacataagg

SEQ ID NO: 281325 - DNA, 260 bp, Glycine max
  unsure (1)..(260): unsure at all n locations
tgttgttgtaactcgttcttcttcttgtgttgttctgtgtnngtgttngtnttntctcgcacctganaatgtcttgctgcngtggtaactgtggttgcggaagctcctgcaagngcgncaacggctgcggaggctgncaagatgtacccagacttgagcttcactgagtcaaccaccancgagaccttggtcatgggagtggcacctgttaaggctcaatttgagggtgctganatgggtgtgcccgctgagaacgatgg

SEQ ID NO: 281326 - DNA, 262 bp, Glycine max
  unsure (1)..(262): unsure at all n locations
gnaagattaagcagagaanggaaggntctgtctcaggttgagatagtggggaaatttgctggtgcggntggaaattacaatgcacatattnttgcatatcctgatgttaactggcctcacattgccagaacagtttgtacactctcttggattaagcncncnnnccttatgttgctcagattgaaactcatgactacatngncanagctttttcattgctacancnattgcananacttatcgatttgncacacngtngggg

SEQ ID NO: 281327 - DNA, 256 bp, Glycine max
  unsure (1)..(256): unsure at all n locations
catctgttcaganggaagggtgctttngngtgcatccaaacttgntcctgttgnatacggtattaagaaactgcaaattatncttactattgnggatgacctantttctgttgatactcttattgnngaacatctcacagttnancccatcaatgaatatgtccanngttgtgacattgnggccttcaataaaatataaactacaatcggngggatttggagatcaggcnctgggngaatgcaanttttanaatat

SEQ ID NO: 281328 - DNA, 257 bp, Glycine max
  unsure (1)..(257): unsure at all n locations
aaaccttttccaactttctcgataaatccaaaaaagaaagatatagattacttttgtggctgctgatttcaanctcataggctatgatcctcaccagaagattgatatgaagctggctgtctaaaatcnnnggattctcactccttcgggctgtttctgctttttgaaatgagaaccatggtgagcatggatgctgatgtgctgtgcaagatagctcataattattatcaacaccttaggggctgtatggcaactaa

SEQ ID NO: 281329 - DNA, 179 bp, Glycine max
  unsure (1)..(179): unsure at all n locations
gcttcatcgcctacaancccccaggcttctaagtcattgaaaaatttgcaaagcatctgtagccaccccactttgtttgttgtacttaaactacattcccatttgtttttgctttatgagatttcatcatcctgtatttttggtntctgttttcggacttcaatggaaattaatggntg

SEQ ID NO: 281330 - DNA, 257 bp, Glycine max
  unsure (1)..(257): unsure at all n locations
gtgcggcggtccaaacactcttctccacagcntttgcctacaactnncttnaccatggctgaanaaaccgagaaagcttttctgaagcaaccaaaagtgtttcncagcacaaagaagactgggaagggnaagagacctggnaaaggtgggaaccgcttttggaagtccattgggcttggatttaagactcccagggaagccatcgnaaggaacctcanatngacnncaanngccccttcatggcatgtttccangng

SEQ ID NO: 281331 - DNA, 283 bp, Glycine max
  unsure (1)..(283): unsure at all n locations
ggnaaaccgccaaggactggaagggcctccgcgtcacngtcaagctcaccgtgcagaaccgtccaggccaaggtcacggtggtcccatccgccgccgcgctcgtcatcaaggccctcaaggagcccgagcgtgaccgcaagaaaacgaagaacatcaagcacaacggcaacatctcgctagacgacgtcatcgagatcgctagggttatgaggccgangtcaatggcgaaggacctcagcggccagcattaaggagntctcgggactgntctncgtcggatna

SEQ ID NO: 281332 - DNA, 278 bp, Glycine max
  unsure (1)..(278): unsure at all n locations
ttnaangnanaatcnntgcaaggancngtgatccaagtctnnnnnaccggactgggccanttcagatgccatacactttgctccatcgttcaagtgannnngggttgacnttcaaaggaattcccaacagtatctctatctaattccnaaagagtttgtggtttcctatctatgttgtcactctgnatatcatagacntctgcatgtctatgcgtagttantgcctgaanttctgcnctatgtatntggatgctctcggtntncatataatanagngt

SEQ ID NO: 281333 - DNA, 275 bp, Glycine max
  unsure (1)..(275): unsure at all n locations
ggtaaatgatgtgacagcagaagtngtggaaggtgatcctagaaatgttctttgtgatgctgtagataagtaccgtgctgcaatgttggttgtgggtagtcatggttatggggctataaaaagggcggttttaggtagtgtcagtgactattgtgctcatcatgctcactggcactgtgatgatcgtgaagaagccaaaaatcaaacactgatctgtantggctgcgtctatatattcaacaataaacataatccttcagccaaagagagagaaa

SEQ ID NO: 281334 - DNA, 276 bp, Glycine max
  unsure (1)..(276): unsure at all n locations
gnagaaaatcattccaatacacatgnncttccgaaaggcaagcgttaatgcttattctcttaacaacattcttcttcaccataaagccttcacaggccagtactactggtggcataacaatctactggggccataacattgacgacggcaccttgacttccacatgcgacactgganacttcgagattgtcaacctagctttcctcaatgcgtttggttgcggcataactccatcatggaattcgctggccatgtggggactggaaccttgttcca

SEQ ID NO: 281335 - DNA, 277 bp, Glycine max
  unsure (1)..(277): unsure at all n locations
gtgatgagcactgcttgaagtttttgaagaactgctacgaggcactaccagacaatgggaaggtgnttgtggcagaatgcattcttccagtggctccagactctagcttggccacaaaaggtgtggttcacatcgatgtgatcatgttggcacataatccaggtgggaaagagagaacagagaaagagtttgaggctctggccaaagggtctggatccaaggtttccgagttgtttgctgtgctttcaataccaacatcatgganttctcaaaaaga

SEQ ID NO: 281336 - DNA, 285 bp, Glycine max
  unsure (1)..(285): unsure at all n locations
gnaaccctagctagggtttggaagangctgatccgagaagatnaccgcagcgtctcacntaccgcaaatgntanagctntgactaccaaatncnaaccagcacagagtcgtcaagactccnggtggcaagcttgtttatcagaccacgaagaagagggccagcggacccaagtgccctgtcactggaaagaggattcaagggattccacatttaaggccagcagagtataatagatcaaggttacacaganaccgaaggactgtgaagctgcatatggtggtgtg

SEQ ID NO: 281337 - DNA, 277 bp, Glycine max
cgaccacagcttcaggatgggcagccttctgattatatatatgagcattttaacaatgaggcttttattattctctgatttttttggttctttattttgagaaaagaaacagtggaagaatctgcagaaagagatttcataagtaaagttagcacaaagtaccaagtaattcgattgcttgaggaatgaatatcctggaaatatttatgtttttcttgtttgtaataacagttttctcatatctctataaaaagaatcaccccccgaaaagatcttc

SEQ ID NO: 281338 - DNA, 280 bp, Glycine max
  unsure (1)..(280): unsure at all n locations
gcagatattcgtgaaanccctaaacggggaagacgataaccctagaggtagagtcatcggacacaatcgacaatgtgaaggcgaagatccaggacaaggagggcatcccgccggaccagcagcgcctgatcttcgccggtaagcagctggaggacggccgcaccctcgccgactacaacatccagaaggagtccacgcttcacctcgtcctccgcctccgcggcggcgccaagaagcgcaagaagaagacctacaccaagcccaagaagatcaagcacaa

SEQ ID NO: 281339 - DNA, 276 bp, Glycine max
  unsure (1)..(276): unsure at all n locations
tcttatcactccaaatgcactttcatacaaatncagnaatnnngagagaatctgttgaggcagggatacagaattgttggaatcattggagaccaatggagcgatctgcttggagaccacagaggcgaaagcaggacctttaagcttcctaatcccatgtactacattgagtagtaccttcacctctctcaacaatctagctagagtttgctcctatctatatgtataaggtatgctgatatgcatattcaaataggagcttagctagtttgttaa

SEQ ID NO: 281340 - DNA, 219 bp, Glycine max
  unsure (1)..(219): unsure at all n locations
ggctgccgaagaagagaacgtncaagaagttcagttttcgaggcgtggatctcgatgcactnctcgacatgtccaccgatgaactcgtcaagatgttcagtncacgcncctcgtagaaggttccagagaggcctcancagaaagcccatggccttgatcaagaagctccgtaaagcgnnaagggngctccaccaggtgagaagccagaaccatacgcac

SEQ ID NO: 281341 - DNA, 276 bp, Glycine max
  unsure (1)..(276): unsure at all n locations
ggagtatcngaattcttacgtgttcgagatcgacatgccgggtttgaaatctggggacatatcggttcaagncgaannccgacaacctgcttntgatatgtggggaacgaaagagggacgaagagaaagaaggggcgaagtatttgancatggagagaagggttgggaagttaatgcgcaanctgtgctgcctgagaatgccaacactgatgcaatctctgctgtgtgccaagaggtgtgcttagtgtaaccgtgcagaaattgcctccacctgag

SEQ ID NO: 281342 - DNA, 278 bp, Glycine max
  unsure (1)..(278): unsure at all n locations
tacaacctcatggaggatgctgccactgctgagatcagcagngnngcagaattggcagtggctcaagtatggagtggagntcaatggggntggtcttggagtgaaagtgaacaaagaactttttnntanggttgttgaagaagngatggctaggattgaaaaggaagtggggacagagaagttcaagaagggaatgtacaaggaggcttgcaagatcttcactcgccaatgcacgtcaccaatgcttgatgattttctcatctggatgcttatattac

SEQ ID NO: 281343 - DNA, 274 bp, Glycine max
  unsure (1)..(274): unsure at all n locations
caggacgtgccacaggcgcggcgtgcatgctatgggaggnatggcngcgcagattccantcaaagaagatccncatggctaacgaggtagcactggaacttgtaaggnnggacaagcttaganaagtgaaggcagggcacgatggaacttgggctgcgcaccctggtctcattccagcctgcatggagatttcaacaacaacatggnnaacncttccanncagatagacacnctgaaagcgatgatggggcaaactcacgagtcagactcttgc

SEQ ID NO: 281344 - DNA, 278 bp, Glycine max
  unsure (1)..(278): unsure at all n locations
gttcgccggctcaggctccngcatcgcctacaacaagcncaccgacaacggngntgncacccctgccggcctcatctccgcctaccatcgcccatgcattcgccctcttcgtngccgtctccgtcggcgccaacntntccggcggccacgtnaaccccgccgtnaccttcggcgcnttcgtcggcggcaacatcaccttcctccgcggcatcgtctncgtcatcgcccagctcctcggntccatcgtcgcntnccantcctngattcgtcaccgcctc

SEQ ID NO: 281345 - DNA, 275 bp, Glycine max
  unsure (1)..(275): unsure at all n locations
ggagttggctccatatgatcctgactggtactacattagggctgcctcaatggcaagaaagatctatttgagaggtggtcttggtgttggtgctttccagaggatctatggtggaagcaaaagaaatggaagccgtcccccacatttctgcaagagcagcggtgcaattgccagacacattctgcatncagttgcaaaacatgagcatgttgagattgatacaaaaggaggtaggaaaatcacttctagtggtcgaagggatcttgaccaagttg

SEQ ID NO: 281346 - DNA, 277 bp, Glycine max
gctgaagataggcatgccaaattgtttttgcctcacagaagcatgtcagagttgaaaaaacgtcatgctgaggatttcttagtttcggacaaaacaaaagtgccaagatcgtattctgctcagtcacctgcgcaatctgcgatgggtgcatatccaaatgcgcagaaccagtggactaattatggagttcaacctcaaacttggcctccagttactcaagctcaagggcaacaatggactgctggctacacccagcaggcttcctacggggcttatg

SEQ ID NO: 281347 - DNA, 277 bp, Glycine max
  unsure (1)..(277): unsure at all n locations
gtaaccaatcatctttagttcttcagtaatttattgtgggattctattctaagattttgagnntgtctagctgtgggtgtggaagcagctgcaactgtggcagcaactgcggttgcaacaagtactcttttgacttgagttacgttgagaagacaaccacagagactctagttttgggtgttgggcctgtgaaggcccaattggagggtgctgaaatgggtgttgcatctgagaacggtggctgcaactgtggatcaagctgcacctgtgacccatg

SEQ ID NO: 281348 - DNA, 268 bp, Glycine max
tcagtggaaagggggtgaccacaattatcggaggaggagattctgttgcagctgtggagaaagtaggagttgctagtgtcatgagccacatatctactggtggtggtgccagtttggagttattggaaggcaaagagcttccaggagtccttgctctcgatgaagccgtcccagttgccgtgtaagacaattttcagctggaaaattttccatcctcagattcggtgttgtcaatctgtaaaagagcatatgttgtaggaccctcgga

SEQ ID NO: 281349 - DNA, 272 bp, Glycine max
  unsure (1)..(272): unsure at all n locations
gaggagacacaccttcagcagcagcagccatggttctcaaaaccgaactatgcngattcagcggtgccaagatctacccagggaaaggcatcagatttgttcgtggtgattctcaggttttcctgtttgctaactcgaaatgtaagaggtatttccacaacaggttgaagccatcaaagctcacctggactgcaatgtacagaaagcaacacaagaaggacattgctcaagaagctgtgaagaaaagaagacgtgctgccaaaaagccttat

SEQ ID NO: 281350 - DNA, 272 bp, Glycine max
  unsure (1)..(272): unsure at all n locations
ganaggagggatcaggttcaccatcaatggtcactcttacttcnacttggttctcatcacaaatgttggtggagctggagatgttcattctgtgtccatcaaagggtctagaactgggtggcaaaccatgtctagaaactgggggcagaattggcaaagcaactcctacctgaatggccaaagcctctcttttcaggtcactacaagtgatggcaggactctcactagcaacaacattgtgcctgctaactggcatttggacaaactttgaa

SEQ ID NO: 281351 - DNA, 275 bp, Glycine max
  unsure (1)..(275): unsure at all n locations
gagcaaacaaaagcaattgcagctaaaatntcaaattgggacaatgtcgttttggcctatgagccagtttgggccattggaacaggaaaggttgcaactcctgctcaggctcaagaggttcatgctgatttaaggaaatgggttcatgacaatgtgagtgctgaagttgctgcatctgtaagaattatctatggaggctctgtaaatggaggaaactgcaaagaattggcagcacagcccgatgttgatggatttttggttggtggtgcatccct

SEQ ID NO: 281352 - DNA, 272 bp, Glycine max
ggcaaaaaccaacatgaacgtggaagaggtcttcttttcaatagcaagagatattaagcaaaggcttgcagacacagattcaagagctgagcctcagactatcaagattaaccaacctgaccaggcaaccagtggtggtcaacctgcgcaaaagtcggcttgctgtggttcatgaaaagaatcagtatctgtagaaagaggtgcacaggtttctgcaatagcactcatctgggtgctaatgttattctgatgacttataagtgggagctgta

SEQ ID NO: 281353 - DNA, 270 bp, Glycine max
  unsure (1)..(270): unsure at all n locations
gaacaagtagttgagaactaagaaggagaagcaaatggcttcctcaatgatctcttccccagctgttaccactntcaaccgtgccggtgccggcatggttgctccattcactggcctcaagtccatggctggcttccccnccaggaagacnccccaatgacattacctccattgctagcaacggtggaagagtgcaatgcatgcangtgtggccaccagttggcaagaagaagtttgagactcttcctacctgccagacctgatgatgca

SEQ ID NO: 281354 - DNA, 271 bp, Glycine max
  unsure (1)..(271): unsure at all n locations
cagagagagacaagaaacaatgaagtttaaccctagggtttcctcaagccgtcgcaagagccgcaaggctcacttcaccgctccgtcgagcgtgcgccgcgnacctgatgagcgcgcctctctccaccgatctccggtcanagtacaacgtgcggtccattccggttcgcaaggacgacgaggttcaggtcgtgaggggaacctacaagggccgcgaggcaaagtggtccaggtctatcgccgcaatgggtcatccacatcgagcgcatca

SEQ ID NO: 281355 - DNA, 273 bp, Glycine max
  unsure (1)..(273): unsure at all n locations
gcaatgttgtggttcgatatgtcacaattttggctcctcgtgactctcctaatactgatggaattgatccagattcaagttcaaatgncctgcatagaggactcatacatatctaccggagatgatcttgtggctgtaaagagtgggtgggatgagtatggtattgcgtacggtcgccctagctacggtatcaccatccggcgtgtaacagggtcatctcnctttgccggtattgcaattggcagtgaaacctctggaggggtggagantgtg

SEQ ID NO: 281356 - DNA, 266 bp, Glycine max
  unsure (1)..(266): unsure at all n locations
tgaaccctaaaaacaagcctggaagaattacagtcattgttagaatgggagctgagaatatgcgagtgaagcttcncacatcttatcagggcngttcgcagagcaggtcaaattgtcacttggtnnagtgaccccatgcatgggaacaccattaaagctccatctggacttaaaacccgctnttntgatgcaataagggctgagctgagggcnttnnncnnngtgcagatcaagaaggaagctacccaggaggggttcattagaga

SEQ ID NO: 281357 - DNA, 268 bp, Glycine max
  unsure (1)..(268): unsure at all n locations
aganaaacaagtagttgagaactaagaagaaggaaatggcttcctcaatgatctcctccccagctgttaccaccgtcaaccgtgccggtgccggcatggttgctccattcaccggcctcaaatccatggctggcttccccacgaggaagaccaacaatgacattacctccattgctagcaacggtggaagagtacaatgcatgcaggtgtggccaccaattcggcaagaagaagttcgngatctttcctattgccagactcgatgatg

SEQ ID NO: 281358 - DNA, 266 bp, Glycine max
gcttttggttatggctcctatttttcactctcaatgatggacagacactaccatagtggaatgtcagttgaagaagcaattgatctcgttgataagtgcattatggaaatcagatccaggcttgttgttgcgccgcccaactttgttattaaaatcgtggacaaggatggtgcaagagagtacgcatggcgtgagtcagtcaaggatactcctgttcctcagcttgagtaactcttccctaattttcgttggacttcttcttctat

SEQ ID NO: 281359 - DNA, 269 bp, Glycine max
gcttttggttatggctcctatttttcactctcaatgatggacagacactaccatagtggaatgtcagttgaagaagcaattgatctcgttgataagtgcattatggaaatcagatccaggcttgttgttgcgccgcccaactttgttattaaaatcgtggacaaggatggtgcaagagagtacgcatggcgtgagtcagtcaaggatactcctgttccttcagcttgagtaactcttccctaattttcgttggacttcttctttctatt

SEQ ID NO: 281360 - DNA, 272 bp, Glycine max
  unsure (1)..(272): unsure at all n locations
cgcacgaatatcttgttgtttggagcgatccgagaaaaactctgtaaacatgttggtttaccaggacctccttaccaggtgntgancttctctctgactccacccgttcanaggaaattgagaatngaatgctgtgggaagttgaggggaagtgggttgttaaaggagcagttgatgtagacataggtgnaaacccttctgctgagggtggaggagaagatgagggagttgatgaagnagctntataaggttgttgacatgttgacacatca

SEQ ID NO: 281361 - DNA, 273 bp, Glycine max
  unsure (1)..(273): unsure at all n locations
accgatgaaacccccgagtacatgcccctcagccatgtccttgcaaccaaacttggtgctcgcntcacagaggttaggaagaatggnacctgtgcttggttgaggccagatggtaagaccaagtaaccgtngagtactacaatgacaatggtgccatggttccagttcgtgtccacactgtnctaatttccacacaacanaaaanncttanaaannaatgatcatattgctgcggacttaaagagcagttattnaagcctgtgnatctgagaa

SEQ ID NO: 281362 - DNA, 268 bp, Glycine max
  unsure (1)..(268): unsure at all n locations
gggctgtttttggcgaggaagttgtcgttgcccagggcgattttctacnnnaaaatagcaatgcttgggcngctatttgtggcgctggcgtggtgaagggtttcgaggggaaaacaaatacggtacgttgaatggtggtgccaactttgttgcccctggttacaccaagggtgatggtcttggtgctgagattgttggcactttcgtccttgtttacaccgttttctccgccaccgatgccaaacgtaacgccagagactctcagtcc

SEQ ID NO: 281363 - DNA, 271 bp, Glycine max
  unsure (1)..(271): unsure at all n locations
cggagaagcaaatggcttcctcaatgatctcntncccagctgttaccactgtcaaccgtgccggtngccggcatggntgctccattcactggcctcaagtccatggctggcttccccaccaggaagacncaacaatgacattanctnncattgctagcancggtggaagagtncaatgcatgcaggagtggccaccagttggcaagaagaagtttgagatctntcctacctnnacagacanaaagntcaaaaaaatggcaaaggaatagaa

SEQ ID NO: 281364 - DNA, 267 bp, Glycine max
  unsure (1)..(267): unsure at all n locations
ctttcctacctgccagaccttgatgatgcacaattggcaaaggangtagaataccttcttaggaagggatggattccttgcttggaattcgagttggagcacggtttcgtgtaccgtgagcacaacaggtcaccaggatactacgatggacgctactggaccatgtggaagctgcctatgtttggttgcactgatgcttctcaggtgttgaaggagcttcaagaggctaagactgcataccccaacggctttcatccgtatcatcgg

SEQ ID NO: 281365 - DNA, 268 bp, Glycine max
  unsure (1)..(268): unsure at all n locations
gccatataatttttttttatttgaaataatgtccgggatcatccacaagattgaggagaccctcccatgtgggagggcacaagaaagaggagcacaaaggagaacnccatggtgagcacaaaggtgaacacaaaggagaacaccatggtgagcacaaaggtgaacacaaaggagaacaacaccatggggagcncaaggagggacttgtggataagatcaaggacaagatcctggtgatggccngcacaagggtgagaaaaagaagaag

SEQ ID NO: 281366 - DNA, 266 bp, Glycine max
cgggaacagttcagataaattccgccccggctcgtgggccagatcattttccctttcagggtataaaggacagtggcattggatctcaagggattaccaacagcataaacatgatgaccaaggtcaaaacgactgtgatcaacttacccagcccttcctatactatgggctagtagtgtaatagttatacacatacatgcatggaggaaaatcaatttatatcatgttccataatcatagtgaagttcaaaagtatgagttcaaca

SEQ ID NO: 281367 - DNA, 199 bp, Glycine max
aagacatcgatgaagatgtggctgaggaacttcagaatcagatggaacaagactatgacatagggtccacaataagagacaagattattccccatgctgtatcatggtttactggggggccattcagggggacgagtttggagatctggaggacgatgaggatgatgaagatattgaagaggacgatgatgaagatgaa

SEQ ID NO: 281368 - DNA, 267 bp, Glycine max
  unsure (1)..(267): unsure at all n locations
gnggaagatatcttgacaaaatggccgtaacagaagcaaacctaaagaaggctggcttccacacatgggagcagttaattctcaaggatccacatcttatcactccaaatgcactttcatacaaatcagcaatgagagagaatctgttgaggcagggatacagaattgttggaatcattggagaccaatggagcgatctgcttggagaccacagaggcgaaagcaggacctttaagcttcctcatcccatgtactacntgagtagta

SEQ ID NO: 281369 - DNA, 263 bp, Glycine max
  unsure (1)..(263): unsure at all n locations
cttcaccaatcagcttcaaacttctttcagcgagcctcgtcncccttattcttaccgatccaagaacagattcaccagcctattaaggaagctgctcttgggaatattcccacattgctttctgtgacaccgattcacctatgaggtacgtggacattggaattcctgccaacaacaagggcaaacacagcattggttgtctcttctggctccttgcaaggatggtgttgcagatgaggggtaccattcgccctggcctcaaa

SEQ ID NO: 281370 - DNA, 262 bp, Glycine max
ggcgccggagcccccgtctacctcgccgccgttctcgaatatctcgctgctgaggttttggaattggctggaaacgctgcgagagataacaagaagactcgaattgttccacgccacatccaattggcggtgaggaacgacgaagagttgagcaagcttctaggagatgttaccattgctaacggcggtgttatgcctaacattcacaaccttcttcttcccaagaaggctgggggctcatccaaggtgctgctgctgacga

SEQ ID NO: 281371 - DNA, 232 bp, Glycine max
  unsure (1)..(232): unsure at all n locations
gttctattcttcttccacaatgggtatctctgcgtgattccatgcacaagaggcgcgccaccggcggcaagaagaagtcttggaggaagnagagaaagtatgagcttgggaggcagccagcaaacacaaagctatcaagcaacaagacggtgaggaggattagggttcgcggtggaaacgtgaagtggcgtgctttnaggcttgataccgggaatactcttgggggatgnag

SEQ ID NO: 281372 - DNA, 259 bp, Glycine max
ggcctcaagtccatggctggcttccccaccaggaagaccaacaatgacattacctccattgctagcaacggtggaagagtgcaatgcatgcaggtgtggccaccagttggcaagaagaagtttgagactctttcctacctgccagaccttgatgatgcacaattggcaaaggaagtagaataccttcttaggaagggatggattccttgcttggaattcgagttggagcaggtttcgtgtaccgtgagcacaacaggtc

SEQ ID NO: 281373 - DNA, 259 bp, Glycine max
  unsure (1)..(259): unsure at all n locations
ggcctcaagtccatggcnggcttccccaccaggaagaccaacaatgacattacctccattgctagcaacggtggaagagtgcantgcatgcaggtgtggccaccagttggcaagaagaagtttgagactctttcctacctgccagaccttgatgatgcacaattggccaaaggaagtagaataccttcttaggaagggatggattccttgcttggantcgagttggagcaggtnannnaaaancgtgagcacaacagtc

SEQ ID NO: 281374 - DNA, 257 bp, Glycine max
  unsure (1)..(257): unsure at all n locations
cgaccacagcttcaggatgggcagccttctgattatatatatgagcattttaacaatnnggcttttattattctctgatttttttggttctttattttgagaaaagaacagtggaagaatctgcagaaagagatttcataagtaaagttagcacaaagtaccaagtaattcgattgcttgaggaatgaatatcctggaaatatttatgtttttcttgtttgtaataacagttttctcatatctctataaaaagatca

SEQ ID NO: 281375 - DNA, 265 bp, Glycine max
  unsure (1)..(265): unsure at all n locations
gatttcagtgagtgatcggtnttcacttgatctnatcataatcgtcagcgtcaattgaagaagatgccgatcagaannatcgccgtcggaaggcctgnagaggcgactcaccccgacacgttgaaggcggctttggctgagttcatcnccaacttcatcttcgtgttcgccggctacaggctccggcatcgcctacaacaagctacaccgacaacggcgctgccacccctgccggcctccatctccgccttccatcgcccagnca

SEQ ID NO: 281376 - DNA, 262 bp, Glycine max
  unsure (1)..(262): unsure at all n locations
atctgggaaccacacacacaaacncattcccttttctcactacggcaatgaccacccaagcttccaccttcgtngtcgccgttccctccgtcgcaacccctttccgccgccaccggaatcccttcgttgttcgagcccaagcggaaccttcaantaaaatccgttgaaattatgaggaagttctcagagcaatacgcccgtaagttcaggaacatacttttgtgttgacaagggggncattctgttgttatcaaggggttgg

SEQ ID NO: 281377 - DNA, 264 bp, Glycine max
  unsure (1)..(264): unsure at all n locations
gttgnaganagcntcaagctgaagangtnacngtcaagggccagattgtgggggtgaacaaaggtggagnngngganngatgnaacggcttanncnggtttgttccccngtctcaaatatcaacganctcaaatgtagaagagcttcttgataaggagcntcctcttaagtttgtggaggtggatgaggaacaatctagacttgtcctcagcanccgcaaggccgtagctggcaaccaggcacagctaggaatgggangggggc

SEQ ID NO: 281378 - DNA, 264 bp, Glycine max
  unsure (1)..(264): unsure at all n locations
gtgcaaaangcactgatagctcctgcagcattgattgctcaaaatgctggaatagaaggtgaagttgttgtggagaaaataaagagtggtgaatgggaggtcggttacaatgccatggcagacaggtatgagaatttagtggaggctggagttatcgaccctgccaaggtaactaggtgtgctttgcagaatgctgcttcagttgctggaatggtgttgaccacgcangccattgtggtggagaaacctaagcccaaggcacct

SEQ ID NO: 281379 - DNA, 260 bp, Glycine max
  unsure (1)..(260): unsure at all n locations
gaagcaaacctaaagaaggctggcttccacacatgggagcagncgnttctcaaggatccacatcttatcactccaaatgcactttcanacaaatcagcaatgagagagaatctgttgaggcagggatacagaattgttggaatcattggagaccaatggagcgatctgcttggagaccacagaggcgaaagcaggacctttaagcttcctaancccangnactaactngggaagaacctncacctctctnaaaanccggg

SEQ ID NO: 281380 - DNA, 258 bp, Glycine max
  unsure (1)..(258): unsure at all n locations
ctgcttcttccgattccggcacgcccccatcaccatggtgaacgttccgaaaacaaagaagacatactgcaagagtaaggngtgcaggaagcacaccctgcacaaggttacccaatacaagaagggtaaagatagcattgctgcccaaggaaaacgccgttacgattgcaaacaatctggttatggcggacaaactaagcccgtcttccacaagaaggctaagaccaccangaagattgttctgaggttgcaatgccg

SEQ ID NO: 281381 - DNA, 253 bp, Glycine max
  unsure (1)..(253): unsure at all n locations
aatttnntagggtttatacaattttngatggcttcttcagatgttgagtaccgttgcttngtcggtgngctcgcttgggccantgacgaccaagctctcgagaganccttctctcagtacggcgaaatcgttnaaacgaagatnatcaacgatcgtnagactggaagatccaggggttttggatnngtgaccnncgcctcggancagtccatgaaagacgccancgaagggangaacggnaaaccctnggggg

SEQ ID NO: 281382 - DNA, 269 bp, Glycine max
  unsure (1)..(269): unsure at all n locations
ggcgcggcgtgcatgctatgggagnaatggcagcgcagattccaatcaaagaagatccagtggctaacgaggtagcacnggaacttgtaaggnaggacaagcttagagnagtgaaggcanggcacgatggaacttgggctgcgcaccctggtctcattccagcctgcatggagattttcaanaacaacatgggcnctgcttncaaccanatagacacantgaaangcgaagatggggcnaacatcancgagcaaganctcttgcagatt

SEQ ID NO: 281383 - DNA, 263 bp, Glycine max
  unsure (1)..(263): unsure at all n locations
atgtntttggagtcgctcgcatctntgcntncttcaatganacctnncagtcangtcantganctgtctgggagggaaacacntgtccgcatnactggcgggatgaaggttaaagctgaaggagatgaatcatctccatatgcggcnatgcntgctgcgcaggatgttgctgcnagatgcaaggaantgggcanaactgctctnaanataaagnnccgggccanagggggaaagngggnanaananggggccgggggnnaang

SEQ ID NO: 281384 - DNA, 267 bp, Glycine max
  unsure (1)..(267): unsure at all n locations
anacctctcactcgccgtcgtagggtttctcctttcgtttagcaacaacaacaatngttgcagccaagaaaaccaagaagacnnatgtgagcatcaacaacaggctcgctcttgtcatgaagagtggaaaattcaccctcggttacnagacggttctcaaatcanttaggagcnccanagggnnatngatntcattgctactcaactgcccccctttgaggaaatcagaggttgagtactatgctatgttggccaanggtnggggtt

SEQ ID NO: 281385 - DNA, 264 bp, Glycine max
  unsure (1)..(264): unsure at all n locations
cacaaggcagaaagcaagctcatcctagagttttaaaaatggcagcagcctcctccatggctctctcttccccatccttggctggcaannccgtgaagctgggcccatcagcccccgaagtcnggtnggtcagcatgaggaagaccgttcacgaagcaggcctcctccggaagcccatggtacggcccagaccgngtnaagtaattngggccatttntggggngccnccgcccaanttgatgggggnttnccnggntggntatg

SEQ ID NO: 281386 - DNA, 265 bp, Glycine max
  unsure (1)..(265): unsure at all n locations
caacaacacttccgcggcgaaaaatgtctctgntgncgaacgagcatnnccagcacattctgcgtgtgctgaacaccaacgtggatgngaagcagaagataatgttcgctatgacctccatcaagggtattggaaggagattcgccaacatcgcttgcaagaaggccnatgttgacatgaacaaaagggctggtgatttganttncngcananttggatantgtgatnactgtggtggcgacccntnggnnttttcaagnncggg

SEQ ID NO: 281387 - DNA, 254 bp, Glycine max
  unsure (1)..(254): unsure at all n locations
ctcccatcaacagcaacgatggtgcagaggctcacttatcgcaagcgccatanctatgctaccaannccaaccagcaccgggttgttaagacccctnntgggaagttggtgnaccagaccactaagaagagagcaagtggacctaagtgccctgtcactggcaagaggatccaagggattccacacttaagacntgctgaatacaagaggtctagattgcctaggaaccgcaggaccgtaaaccgtgcntangg

SEQ ID NO: 281388 - DNA, 254 bp, Glycine max
  unsure (1)..(254): unsure at all n locations
ctcccatcaacagcaacgatggtgcagaggctcacttatcgcaagcgccatagctatgctaccaaatccaaccagcaccgggttgttaagacccctggtgngaagttggtgtaccagaccactaagaagagagcaagtggacctaagtgccctgtcactggcaagaggatccaagggattccacacttaagacctgctgaatacaagaggtctagattgcctaggaaccgcaggaccgtaaaccgagcctatgg

SEQ ID NO: 281389 - DNA, 261 bp, Glycine max
aagagagatggatccagacgcgttggcaaaggcattcgtggagcactactacagcaccttcgacaccaacaggaacggcttagcgaatctctaccaggagggttccatgctcactttcgaagggcagaagatccaaggcgcttccaacatcgttgccaagctcacctccctcccttttcagcagtgccaccactcaatctccaccgtcgactgccagccctccggcgtcaacgccggcatgctcgtcttcgtcagcggaaa

SEQ ID NO: 281390 - DNA, 254 bp, Glycine max
  unsure (1)..(254): unsure at all n locations
gcacgcaggaggaggagattgatcgagagantngaagatgactacacngcttcaagaagaacaggaagaagagaggccacgtgagtgccggccatggccgnatngggaagcaccggaagcaccctggaggacgcggtaatgccggaggtgcaccaccaccggatcctctttgacaagtaccaccctgggttcttcggcaaggtcggaatgcgctattttcacaagctccgcaacaaattctactctccgatcct

SEQ ID NO: 281391 - DNA, 257 bp, Glycine max
  unsure (1)..(257): unsure at all n locations
cttccttgttggaacatcatngcttgcncgcaacagtggcggatncacgtttctgcaagccattggaccgttcccttattcgcagccttgcccaatcgcacnaggttttgatcactgtggaagaagggtcaataggaggnttcggatctcatgttgtncagtnnangncccnananggccttcttggtngtnaattnnaggngagtttccccncctgcnngatnannaaattggcggtggtccccccggttnanatt

SEQ ID NO: 281392 - DNA, 121 bp, Glycine max
catttttaattaattaatttttgccgttttatacagcttctctactttgcttgccctttttcttatactttaattgtatttgtaggatgcctattattggataataatatttttctatccc

SEQ ID NO: 281393 - DNA, 171 bp, Glycine max
  unsure (1)..(171): unsure at all n locations
antngaganctaagaaggagangcaantggcttcctcaatgatctcttccccagctgttaccactgtnaaccgtgncggtgccggcatggttgctccattcagntggcctcaagtccatggctggnttncncncnaganaggncacgnaatgacatnnnctccantgctag

SEQ ID NO: 281394 - DNA, 257 bp, Glycine max
  unsure (1)..(257): unsure at all n locations
ctctcactcacaaacgcacactgaattcaaaaacnatcgaaaganagaggcatggccgagcaaaccttnatcatgatcnagccanatggcgttcaaagaggccttattggcgagattattagcagatttgagaggaagggtttttanttgaaagggttgaaactcgttactgtggancgtccttttgctgagnagcactatgctgattgtctgcaaanctttcttaggggnttggggganaaantgcnncgggccct

SEQ ID NO: 281395 - DNA, 249 bp, Glycine max
  unsure (1)..(249): unsure at all n locations
gagaagaagagaatcataagaaagcaaganagaaaatgggagtggagaagcagttgttgaggcctggcaccggtcccaagccaatncccggtcagaacgtcaccgtncactgcactggtttcgggaagaacggtgacctttctcagaaattctggagcaccaaggatcctggccaggaccctttcactttcaaaatcggccaaggttctgttatcaaaggatgggatgaaggtgtgcttggcatacaat

SEQ ID NO: 281396 - DNA, 268 bp, Glycine max
  unsure (1)..(268): unsure at all n locations
attgttgaacaagggtttctctgtctgcttctncactttctctcgtttccaatcganaccagnaccnnaacatgggcagaaaattcttcgtcggtggcaactggaaatgcaatgggacaacnaaagaggtaaagaagattgttactactttgaatgaggctaaagtccctggagaagatgtcgtagaagttgttgtgagccctccttttgtgcnacntcctgttgtaaaaagtttgctgngccctgatttccagtntcggcacaantc

SEQ ID NO: 281397 - DNA, 265 bp, Glycine max
atcaagtatgatccttcaactggtatttatggaatggatttctttgttgttctggagcgacctggctatcgtgttggacgtcgccgaagatgcaagtcccgtgttggaattcagcaccgagtcacaaaggaggatgctatgaagtggttccaggtgaagtacgagggagtgatccttaacaagtcccaggctattctttagttagattgagttcactttaggagtgtgttatcagttttgtcaactatagctcgatctttctgtg

SEQ ID NO: 281398 - DNA, 265 bp, Glycine max
  unsure (1)..(265): unsure at all n locations
gggatataaaaataacgtggatgccaatacggcggcgtttttgtttggttggtttcacaccggtgatgttgggtacttggnctctgatgggtatttgcatctcgtgggtcggatcaaggagctcatcaaccgaggaggagaaaagatatcaccaatagaagtggatgctgtccttctttcacacccagacattgctcaggcagttgcttttggagtgcctgatccaaagtatggggaggagatatactgtgctgtaatcccaaga

SEQ ID NO: 281399 - DNA, 267 bp, Glycine max
ataactagaaacagtgtgatgaaaatgaaggtccttgttttcttcgttgctacaattttggtagcatggcaatgccatgcgtacgatatgttccctctccgaatgaacactggctatggtgcccgtactccggaggtgaaatgcgcaagttggaggcttgctgtggaagcacacaacatctttggctttgagaccattcctgaagagtgcgttgaagcaacaaaggaatacatccatggcgaacaatatagatcagactccaaaaca

SEQ ID NO: 281400 - DNA, 264 bp, Glycine max
  unsure (1)..(264): unsure at all n locations
caaccttcgtgaagaggcatctcactggtgaattcgagaagaaatatgaaccgaccattggtgtggaggttcatccgttggattttttcacgaactgtggaaagattcgcttctattgttgggatactnctgggcaagagaagtttggtggcctcagagatggatattatatccatgggcaatgtgcgattatcatgtttgatgttactgcccgtctaacatnccaaaaatgtcccnacctgcaccgtgantttcgggcntnta

SEQ ID NO: 281401 - DNA, 262 bp, Glycine max
  unsure (1)..(262): unsure at all n locations
agagctgcttcatttaacatcattcctagcagcactggagctgccaaggctgttggaaaagtcntccctgctttgaatggaaaattgactggtatggcattccgtgttcccactgtggatgtctctgttgttgacctcacagtgaggctggagaaggaagcctcctacgatgaaattaaaaatgctatcaaggaggaatcagagggcaagttgaagggaatcttgttcactgaagatcatcnggctcacgacttttggcgaa

SEQ ID NO: 281402 - DNA, 267 bp, Glycine max
  unsure (1)..(267): unsure at all n locations
gctgaagctggtggaggggtggtttccgtggtgttacttgcacgttggagaggagttgcagttggaccataagaaatccccgtttctcaaccctgacggggatgcttcctgcgcccataacttggaggctcacttgcacttgctagatggataccatgggaagaatcgtggatttgagcgaacaagtgagaggacccttctctctggtgaacaaggactgtgacttcttgaaagatgagcatnggcnccaccaggngaggccaaant

SEQ ID NO: 281403 - DNA, 270 bp, Glycine max
  unsure (1)..(270): unsure at all n locations
gattgctagaatggaatttcgatgctcagtcatctcttttaccattctcttctctcttgctcttgcaggagagagccatgtccatgcatcgctacctgaggaagattattgggaagctgtttggccaaacactcccattcccactgcactgcgagagcttctaaagcctctccctgcaggtgttgaaatcgatgaactccctaagcaaattgatgatacacagtacccaaaaacatnnttcngnaagaagaccgtnagtcaggcaaaaca

SEQ ID NO: 281404 - DNA, 259 bp, Glycine max
gttgtgaatgattcgtgctaccatcaactcgtcagccactggctaaacactcatgcggttgttgagccattcgtcatagcaacaaacaggcatctgagcgtggttcaccctatttacaaacttttgtttcctcactatcgtgacaccatgaacattaattcacttgcccgcaaatccttggtcaatgcagacggtattatagagaaaacattcttgtggggtaggtatctttggaaatgtctgctgttatttacaagac

SEQ ID NO: 281405 - DNA, 268 bp, Glycine max
  unsure (1)..(268): unsure at all n locations
gagagccgagagccgcaaacttcatctacaacagagctaagcagtacgctaaggagtacgatncaccaggagaaggaattgattcggttgaaacgcgaggccaagctgaaaggtggattctatgtcgatccagaggctaagctcttgtttattgttcgcattcgtggtattaatgccatggatcccaaatcaaggaagatcctggcagctgttgcgattgagcacagattttcaatggtgtatttctcaaagttaacaaagccacagt

SEQ ID NO: 281406 - DNA, 263 bp, Glycine max
gcggcataacctaaacctatctttcttctctctctgtgtgtgcgcttcaacggcaaccagaagcagccatggccactgcaaggactgtgaaggatgtttcacctcatgagttcgttaaggcgtactcctctcacctcaagcgatccggcaagatggagctgccagagtggactgatattgtgaaaactgcaagatttaaggagttggctccttatgatcctgactggtactatgtcagagctgcttccatggcaagaaagatc

SEQ ID NO: 281407 - DNA, 256 bp, Glycine max
  unsure (1)..(256): unsure at all n locations
ctgccagtagtcatatgcttgtctcaaagattaagccatgcatgtgtaagtatgaactaattccagactgtgaaactgcgaatggctcattaaatcagttatagtttgtttgatggtatctactactcggataaccgtagtaattctagagctaatacgtgcaacaaaccccgacttctggaagggatgcatttattagataaaaggtcaacacagctctgcctnttgcttncatgattcatgataacngccggga

SEQ ID NO: 281408 - DNA, 261 bp, Glycine max
  unsure (1)..(261): unsure at all n locations
gggtttaagatgtgtcaagagcttgggcttgtggataagattccaaggcttgtttgtgctcaggctgccaatgcngatcctttgtatttgtactttaaatccgggtggaaggagtttaagcctgtgaagtcgagcactacatttgcctctgccattcaaattggtgatcctgtttccattgacagggcggttcacgcgctaaagagttgcgatgggattgtggaggaggccacggaggaggagttgatggatgctacagcg

SEQ ID NO: 281409 - DNA, 247 bp, Glycine max
  unsure (1)..(247): unsure at all n locations
gtnctccnannnctacaagggcaanctcnatggcattgcantcccgtgtgccaacaccaaacgtctcagtggnggacctcgttgttcaggtctcaaagaagacctttgcagaagaagtgaatgcagcattcagagagagtgcagacaatgagctccagggaatcctctctgtgtgtgatgagccacttgtgtctgttgncttcaggnggcactgatgtgtnctcaaccgttgantcatcgttgacca

SEQ ID NO: 281410 - DNA, 256 bp, Glycine max
  unsure (1)..(256): unsure at all n locations
tcaagggtgagggccttccatggcttccgcttgtgcttcctctgcaattacagctgttgccatctctacgccgagttccgggcagaagaatggatcaggaggttgttttcttagtggaaggaaattgagggtgaaaaaggagagagcagcaattggaggacgatcgatgggcactacagtgtgcgcagttgctgagcctgacagacctctatggntccagggcagcacccctcctccatgcttangcactctacct

SEQ ID NO: 281411 - DNA, 262 bp, Glycine max
  unsure (1)..(262): unsure at all n locations
accgtgccggtgccggcatggttgctccattcaccggcctcaaatccatggctggcttccccacgaggaagaccaacaatgacattacctccattgctagcaacggtggaagagtacaatgcatgcaggtgtggccaccaattggcaagaagaagttcgagactctttcctacttgccagacctcgatgatgcccaattggcaaaggaagtcgaataccttctaaggaaagganggattcctngctngaatngagctnggag

SEQ ID NO: 281412 - DNA, 256 bp, Glycine max
  unsure (1)..(256): unsure at all n locations
caatattcttgtgatttgtgatgtttacacccccgctggtgagccacttccaaccaacaagaggtacaatgctgccaaaattttcagccaccctgacgttgctgctgaggaaccatggtatggtattgagcaagaatataccttgttgcagaaagatgtaaattggccacttgggtgcncacttggtgggtttcctggaccacagggcccatactactgtggaatggtgctgataaagcatatggccgtgatattg

SEQ ID NO: 281413 - DNA, 258 bp, Glycine max
  unsure (1)..(258): unsure at all n locations
ggaagggagtggtgaggcaaagctgaaggatggaccaaaacgctgcagcagctgcaacaagcgagttggtttgacagggtttaattgtcgatgtggtgaccttttttgtgctgtacatcgctactcagacaagcataattgcccatttgattacngcactgctgctcgggatgccatagctgnagcaaacccagttgtcaaggctgagaagcttgataagatctaagattngaagtcaaagttnatgcctgagatgaa

SEQ ID NO: 281414 - DNA, 262 bp, Glycine max
  unsure (1)..(262): unsure at all n locations
cgaaggcanaagagagtaatcagcagagaaattcatcgtncgtagttatgggtaaagttcacggatcacttgcacgtgccggtaaggttagaggccaaaccccaaaagtggccnnnnnnnnnnnnnnnnnnnnnccacgtggccgcgctcacaagaggattcngtataatcgccgnttcttcacnccccggtngtgggattcggcaagaagaggggacctaactcgtctgagaagcnaggcttaggcttaagaatntcnact

SEQ ID NO: 281415 - DNA, 260 bp, Glycine max
  unsure (1)..(260): unsure at all n locations
ctcgaagaagatcgtgaagaagagggtgaagaagttcaagaggcctcagagtgacaggnaaatttccgtcaagacaaactggcgtagaccaaagggtatagattcccgtgttaggagaaagttcaagggatgcactttgatgccaaacatcggttatggttctgacaagaagacccgccactatctccctaatggttttaagaaatttnttgttncaatntgaagggacttgaacngctcatgatcacaacaggacttct

SEQ ID NO: 281416 - DNA, 255 bp, Glycine max
  unsure (1)..(255): unsure at all n locations
accaaccccaaccttaaggggaagagcttagcaactcttatgcaacaaggcatggctgctggaaaaaatggagctgagcttcaggctttggaggatgagtggctctcaaaggcacagttgaagacnctctcagaagcagttgtggaggcaattgagaggcagaacaacattggactcgaagaaaaaagaaggaagctaaatgagtggatgcaccattcaagctatgaaaggtgcctttctaatgaggaaggtagg

SEQ ID NO: 281417 - DNA, 254 bp, Glycine max
  unsure (1)..(254): unsure at all n locations
caaggtgcttgccttcagggacataactcctcaagctcctacacatattcttatcattcctaaattcaaagacgggttaagtggtctatccaaggctgaggagaggcactttgagattcttggccgccttctgtacactgccaagctggttgcgaagaagaaggactcgacgacggcttcaggattgtaattaacgatggccgaaagatgccaatcagtttaccacattcatcngcacctcctgggggaagaca

SEQ ID NO: 281418 - DNA, 250 bp, Glycine max
  unsure (1)..(250): unsure at all n locations
gcctcaagtccatggctggcttccccaccagaaagaccaacaatgacattacctccattgctagcaacggtggaagagtgcaatgcatgcaggtgtggccaccagttggcaagaagaagtttgagactctttcctacctgccagaccttgatgatgcacaattggcaaaggaagtagaataccttcttaggaagggatgattccttgcttgaaatcgagttgagcaggttcgnctacgcnagcacaacag

SEQ ID NO: 281419 - DNA, 256 bp, Glycine max
  unsure (1)..(256): unsure at all n locations
atcgctcttctccgccacttcngaatctattgaatcaacaatcatgtcggacgaagagcaccatttcgagtncaaggcngacgccggagcctcccaaaacctaccctcagcaagcnggtaccatccgcaagaacggctacatcgtcatcaaaggcngccctgcaaggttgtggaagtttcgacttccaaaactggaaagcacggtcacgctaagtgtcactttnttggaatgatattttactgccaaganaaantt

SEQ ID NO: 281420 - DNA, 250 bp, Glycine max
  unsure (1)..(250): unsure at all n locations
cctagtctccatacatcaacttgggaggttaaagagacggcaacgttgtgctgtccgccttgaccgagccagagcttcgtcttggccctcgattttgccctgtaaaactaatcccagtcacaacagaaataatcaatggcaccgaaacagaccaaggctgagaagaagatcgcttacgatgngaantgtgcgacctaatggaggagtacggccaaatcctcgttntaaactttttaagtgggangaacca

SEQ ID NO: 281421 - DNA, 253 bp, Glycine max
  unsure (1)..(253): unsure at all n locations
gtgggagcaagaggaatggtagtcgccctcctcatttttgcaagagcagtggtgccattgctcgtcacattcttcaacagttgcagaacatgaacatcattgaactggacaccaagggtggcaggaaaatcacttccagtggccgacgggatcttgaccaagtggctggacgcattgtggttgcaccatgattcatgatttgaaaatgccataagcatattagttttgggccttttaaagagagatngataac

SEQ ID NO: 281422 - DNA, 274 bp, Glycine max
cactcacaaacgcacactgaattcaaaaacatcgaaagagagaggcatggccgagcaaaccttcatcatgatcaagccagatggcgttcaaagaggccttattggcgagattattagcagatttgagaggaagggtttttacttgaaagggttgaaactcgttactgtggaccgtccttttgctgagaagcactatgctgatttgtctgcaaagccttcctttagtggtttggtggatacatgtctctggccctgttgttgccagatctgggag

SEQ ID NO: 281423 - DNA, 273 bp, Glycine max
  unsure (1)..(273): unsure at all n locations
gggaaacatagttgctaatgcagagggggttgcagaggctacaattgtggataatcagataccactctctggccccaattcagtagttggaagagccttggtggtccatgagcttgaggatgaccttggaaagggtgggcatgaactcagtttgacaactggaaatgctggtggaagattagcatgtggtgtggttggtttgactccagcataatcagtgcagcgaattttttgtagcagtcgtgttatgttatcagatatatgttccngtga

SEQ ID NO: 281424 - DNA, 263 bp, Glycine max
  unsure (1)..(263): unsure at all n locations
atgaggagctccggaaagtggggtcgcgtggtggctattgtgaaagagtttgaggagcagtgtaggaccccaattgggaagctgagacaggttgctgacgccatggacgttgagatgcacgcgggtactgcttctgaaggtggcagcaagctcaagatgttgatcacttatgttgataatctccctctggggatgagaaaggactctttatgcnttagacctggtggcacaaacttccgaaccctcgctgcattagtgggaag

SEQ ID NO: 281425 - DNA, 280 bp, Glycine max
  unsure (1)..(280): unsure at all n locations
cgatgcagatcttcgtgaaanccctaacgggtaaaacgatccacgttggaggtggagtcttcggacaccatcgacaacgtgaaggccaagatccaggacaaggaaggcatccctccggaccagcagcgcctcatcttcgccgggaagcagctggaggacggccgcaccctacgccgactacaacattccagaaggagttccacgcttcacctcgttcctccgcctccgtggcggcggccaagaagcgcaagaagaagacttacaccaagcccaagaagat

SEQ ID NO: 281426 - DNA, 271 bp, Glycine max
  unsure (1)..(271): unsure at all n locations
gtttgttgtgagctataagctagtttatcgtgaggngaatatgaagttgtttgttttctttgttgctgcagtagttttggtagcatggccatgccatggcgcaggctaccaaaggttccctctccgaatgaaaactggctatggtgagcgttcttcggaggtaaaatgcgcaagttttaggctgctgtggaagcacacaacatccgagccttaaaaccattcctgaagagtgcgttgaaccaacaaaggactacnttanggcgaacantta

SEQ ID NO: 281427 - DNA, 275 bp, Glycine max
  unsure (1)..(275): unsure at all n locations
gtcgaagcgtggtcgtggtggttcggcggggaacaagttccgcatgtcgctgggtcttccagtggcggcgacggtgaactgcgccgacaacacgggggcgaagaacctctacatcatttcggtgaaagggatcaaaggccgtttgaaccgtcttccctcggcctgcgttggcgacatggtgatggacaccgtgaagaagggaaaacccgattctgaggtaagaaggtcttgaccagctgtccatcgttncgccagcgccaaccatggcgccgaaa

SEQ ID NO: 281428 - DNA, 267 bp, Glycine max
  unsure (1)..(267): unsure at all n locations
cttgggagaagaggtcgagtttcanagcagcaatggtgtacgtgcaaggctcagaaatcaaaagcctacttcaagagatatcaagtccaagttcaagagaagaagagagggaaaaaccgattaccgtgccaggattcggttgattaatcaggacaagaacaaatataacactccgaaataccgatttgttgttcgcttagcaacaaggacttgttgacacaaataatatctgctngcatgcggcgatttgttctgctgcagcnntgc

SEQ ID NO: 281429 - DNA, 263 bp, Glycine max
  unsure (1)..(263): unsure at all n locations
cgaagccctcaagttctccagaacaatcagagcagcagccgccgacgagaccacagaggcaccagcaaaagtagaggctgcaccggtcgggttcaccccaccagaacttgacccaaacaccccttccccgatcttcgggggcagcaccggcgggctcctgcgcaaggcacaggtggaggagttttatgtcattacgtgggactcacccaaagaacagatctttgaatgcccatggcggcgcgctatcngagggaggtcnnaac

SEQ ID NO: 281430 - DNA, 266 bp, Glycine max
  unsure (1)..(266): unsure at all n locations
gtgcattattcaatggccaccacagcagctctatccggaaccatggtgagcacctccttcatgaggaagcaacctatgacgaccaagagcctaaagacattccccaacgctctttttggtctgaaaggtggacgaggtggtcgtgtaacttgcatggcctcgtacaaggtgaagctcataaccccagaaggagaagtggagtttgaatgcccagatgatgttttccatgttgacaagctgaggaagangcntgaattccctatcgt

SEQ ID NO: 281431 - DNA, 263 bp, Glycine max
  unsure (1)..(263): unsure at all n locations
gggactcgcttgctgatgcaaagtctgatattgtggtcaaggttgggctcaggaaaggttctcgctccctttaatgaggctcncgcactggttttagtgaggagaatggaactttgggtgacatatgggaaactatctcaggcagtgatctgtgttgctctgatttctgatgctgcacaggctgataattatgaaaaaatattttcccacatgaaaccaaatagnatactgggtctgtcccaggtttctcttggggcattaca

SEQ ID NO: 281432 - DNA, 267 bp, Glycine max
  unsure (1)..(267): unsure at all n locations
ggctgaatgagtggatgcaccattcaagctatgaaaggtgtctttccaatgaggagggtagggagatagctgaaaagttaggagtaaggaacctcttttgggattgggacttgcctaggactagagaagggttctacaggttcaaagggtcagtgattgcatcagttgttagaggttgggctttgctccacatgctgatgtgataggatggaaactgcagccccaatgtgattgantgcacacattttcgagggggttagtcaaagc

SEQ ID NO: 281433 - DNA, 270 bp, Glycine max
gtcaatttgttgataactttaggcaatcaggccggccactggatgtgcttgtttgcaatgctgcggtttacttgccaactgccagggaacctacatatactgctgatggctttgaactcagtgttggaaccaaccatctcgggcatttcctcctttcgcgccttttgcttgacgacttgaacaaatctgactacccttcgaagcggttgatcatgtaggctcaatcacaggaaacaccaacacattggctggaatgtgccacccaggcta

SEQ ID NO: 281434 - DNA, 267 bp, Glycine max
  unsure (1)..(267): unsure at all n locations
gggatgggtttatcatcaggaagccaaccaagattcactcacgctcgcgtgctcgtaggatgaaggaggcaaagaagaagggccggcactctggttatggtaagagaaagggtacaagggaggcgaggcttcccaccaagatactttggatgagaaggatgcgtgtgctcaggcggttgcttcgtaagtacagggaatcaaagaaattgacaagcactgtaccatgatatgtacngaaggtgaaaggtangttttcaagaacaagag

SEQ ID NO: 281435 - DNA, 268 bp, Glycine max
ggagtagctgcaagccaaggagcacttctccttgctggaggagagaagggaatgcgctacgcgatgccaaatgctcgcataatgatacatcaaccacagagtggatgtgggggtcatgttgaggatgttcagacgccaagtgaatgaagctgttcaatctcgccataaaattgacaagatgtatagtgtttttactggacagccattagagaaggtgcaacagtacacagagagggaccgttttctgtctgtttctgaggcttggagt

SEQ ID NO: 281436 - DNA, 268 bp, Glycine max
  unsure (1)..(268): unsure at all n locations
anaggaacggcttagcgaatctctaccaggagggttccatgctcactttcgaagggcagaagatccaaggcgcttccaacatcgttgccaagctcaccttccctcccttttcagcagtgccaccactcaatctccaccgtcgactgccagccctccggcgtcaacgcggcatgctcgtcttcgtcagcggaaaccttcagctcgccggcggaacagcacactctcaatttcagccagatgttccattgatnaccaacacttcaggaag

SEQ ID NO: 281437 - DNA, 272 bp, Glycine max
  unsure (1)..(272): unsure at all n locations
ttggtcttataaatgcattaagacaacggtttgagaaaagatttagtgttcttccatgtttcaaatatgacacttgccattggaagcatgttgtaccatgccacgctggcaacatgtgcaacagcaaagtgatgaaactcctatggtatgggaggtgttgctgtacatgtacatcctctactctccagattgggcnttaccggcagtaacaatgncccatcttcctcttcgtgtaggtgctctgtttgccgttgncncnttcatgtttcatt

SEQ ID NO: 281438 - DNA, 265 bp, Glycine max
cggcgctgccacccctgccggcctcatctccgcctccatcgcccatgcattcgccctcttcgtcgccgtctccgtccggcgccaacatctccggcggccacgtcaaccccgccgtcaccttcggcgccttcgtcggcggcaacatcaccttcctccgcggcatcgtctacgtcatcgcccagctccccggctccatcgtcgcctccctcctcctggccttcgtcaccgcctccatgttccagcatcggatctccgctggattgga

SEQ ID NO: 281439 - DNA, 269 bp, Glycine max
  unsure (1)..(269): unsure at all n locations
gnacgattgctggtttaaatcnaaatgtcattaagattatagaggagttcccactaagtagcaagctagatactgcaagcctatggtgatacatacctgtataatagcnaaagaacatttggagcctaacttaggtgggctcactgttgagcaggctatccaaaacaagaagttgttcatcttcgatncaccatgactatcctcattcctattgaggnnaaataaatgcaaataccacaaagacttatgctacaagaaccatnttttct

SEQ ID NO: 281440 - DNA, 268 bp, Glycine max
gccattaaccaggtcaatggaaagaagccatggtcactctctttctcctttggaagggcacttcaacagagcacccttaaggcatggagtggaaaagaggagaatgtgaagaaggctcaggaagcccttttggtaagagccaaggccaactcagaggcaactctgggaacctacaagggtaacttcaaagcttgctgatggtgcctcagagagcctccagttgaggactacaattactgattcaatctaagtgcgggtaggaatcggt

SEQ ID NO: 281441 - DNA, 257 bp, Glycine max
  unsure (1)..(257): unsure at all n locations
gctttcttttatgctagtgaacgcgaagtccatcacaacgacatatttatattcggcatagataacaccgtactctctaatatcccatactatgaaanacatggatatggggtggaggaatttaatgaaaccttatatgatgaatgggttaacaagggcgacgcaccggcattgccagagactcttaaaaattacaacaagctgttgtnctctggctcaagatgtatctgtcagaagatatctggacaaanggccgt

SEQ ID NO: 281442 - DNA, 265 bp, Glycine max
  unsure (1)..(265): unsure at all n locations
acttccaagttaggtcactcttccagatggcgcgtacaaagcaaactgctcgcaagtncaccggcggcaaggctccccggaagcagctggcgacgaaggccgctcggaagtctgctccggcgaccggcggagtgaagaagccgcacaggttcaggcctggaacatggccctgagggagattcagaaagtaccagaagagcacggagcttctgatccgaaagcttccgtttccagcgtttggttctgaattcgctcagattccaaa

SEQ ID NO: 281443 - DNA, 265 bp, Glycine max
  unsure (1)..(265): unsure at all n locations
gngagcttcacaaagatgaatcgggaaaaattgatgaagatggccggttcggttagaactgggggaaagggcaccgtgagaagaaagaagaaggctgtccacaagacaacaaccacagatgacaaaaggcttcagagcaccctgaagagaataggggtgaatgccatcccggctattgaggcggtgcaatatctttaaggatgacgtattatccatttctcaaatcccaaagttcaagcatccatgctgnctcannantgggttg

SEQ ID NO: 281444 - DNA, 257 bp, Glycine max
  unsure (1)..(257): unsure at all n locations
gcaccctgcaaattcaatggcttcagagaagaaactatcgaacccaatgagggaaataaaggtgcagaaactcgtcctcaatatctccgttggtgagagtggagatcgtctcaccagagccgccaaggtgttggaacagcttagtggccaaaccccagtgttttccaaagcaaggtacactgttcggtcnttgggattagaagaaatgagaagatgctgctatgtcactgttagagtgataggctagcaantttgga

SEQ ID NO: 281445 - DNA, 264 bp, Glycine max
  unsure (1)..(264): unsure at all n locations
cctagattcagccacagtttcggaggagaagaaaatagtcgttcgagatggcccgtacgaagcaaactgctacgtaagtnccacaggaggaaaggctcctaggaagcagcttgnaaccaaggctgcacgtaagtctgcaccaactactggtggtgtgaagaagccacatcgttaccgtcctggtaccgttgactctacgtgagattaggaatcaccagaagataccgagcttttgatccaggaagctcccctccanngcggttc

SEQ ID NO: 281446 - DNA, 264 bp, Glycine max
  unsure (1)..(264): unsure at all n locations
gnataccagttgctcctatagccggcgctcaacaacatggcggacaaggcagtcaccatccgaaccagaaagttncatgacgaacaggcttctctccagaaagcaattcatcgttgatgtccttcatccagggagggctaatgtttccaaggctgaactgaaggagaaattgggcagaatgtatgacgtgaaagacactaacactgtatttgtcttccagtttcgaactccatttggtggtgggcagtccatgggtttggtttg

SEQ ID NO: 281447 - DNA, 269 bp, Glycine max
  unsure (1)..(269): unsure at all n locations
ctcattcttcacccgctcagacgcagaggagcagaagcctaagcctncaaacatggcgagagggttaaagaaacacctgaagaggctcaatgctccaaaacattggatgcttgacaagcttggtggtgcctttgcacccaagccatcatctggaccccacaagttcccgggagtgtcttcctctgatcctcatcctacgaaacaggctaaagtatgctctaacatatagagaagttattgccatcttgatggcagcgccagttcttgtt

SEQ ID NO: 281448 - DNA, 265 bp, Glycine max
  unsure (1)..(265): unsure at all n locations
agcaaaaggccatataattttnttttatttgnnataatgtccgggatcatccacaagattgaggagaccctccatgtgggngggcacaanaangnggagcacannggagaacaccatggtgagcacanaggtgaacacaaaggagancaccatggtgancacaaaggtgancacaaaggngaacnncaccatggggagcacaaggngggacttgtggataagattcaggacaagatccatggtgatggcctgcacaaggtgagaa

SEQ ID NO: 281449 - DNA, 259 bp, Glycine max
  unsure (1)..(259): unsure at all n locations
ggcatctcactggtgaattcgagaagaaatatgaaccgaccattggtgtggaggttcatccgttggattttttcactaactgcggaaagattcgattctattgttgggatactgctgggcaagagaagtttggcggcctcagagatggatattatatccatgggcaatgtgcgattatncatgtttgatgttactgcccgtctaacatacaagaatgtccctacctggtcaccgtgatctttgcaggtcgtgaaaacat

SEQ ID NO: 281450 - DNA, 258 bp, Glycine max
tcgaaatcggcggagatggttgccatgaggtttcaccagtaccaggtggtgggaagggctcttcctaccgaatccgatgagcatcctaagatctaccgcatgaaactctgggccaccaacgaggtccgtgccaaatccaagttctggtattttttgagaaaattgaagaaggttaagaaaagcaatggacaagtgctagccatcaatgagattttgagaagaatcctaccaagattaagattatggatttggctgcgt

SEQ ID NO: 281451 - DNA, 258 bp, Glycine max
  unsure (1)..(258): unsure at all n locations
gttttgagagaagatcaggagcaaatgttaattgggaagagtttcccgagaaggttgcagtgcagatgaatgatactcacccaacgtngtgcatcccagagctacatgagaattttaatagatgtaaagggcttaaattggaaggatgcttggaatattacacaaaggactgtagcatatacaaaccacactgttcttaccagaggcttagagaggcggagctggatctatgcgaaacgcttccacacaacanncgag

SEQ ID NO: 281452 - DNA, 249 bp, Glycine max
  unsure (1)..(249): unsure at all n locations
caaaattcaggtggaatactatggaagcccagttagcttgaagagcatcgctcaaattagcactcctgatgccagttctcttttggtacagccatatgacaaatcaagcttgncaggctatagagancagccatagttagctctgatcttggtatgactccaaataatgatggagaattgatacgactgagcatcccacagttgacatctggaaggtgannagcngnnnngaaangaagnagngggggg

SEQ ID NO: 281453 - DNA, 251 bp, Glycine max
  unsure (1)..(251): unsure at all n locations
gngccttatggactatgcattcgaattcatcattcaaaatggtggcattgncacagacaaagattacccataccgtggctttgatggcatctgtgatccaactaagaaaaatgcaaaggcggtgaacattgatgggtacgaggatgtnccaccgtatgatgagaatgnccttgaaagaaaagctgtcgctacgnnaacccgtagcattgctatngaagcctnnggcagagctttganaactttatcagncg

SEQ ID NO: 281454 - DNA, 260 bp, Glycine max
gtttgttgttgtaactcgttcttcttcttttgttgttctgtgtttgtgtttgttttttctctcacctgaaaatgtcttgctgcggtggtaactgtggttgcggaagctcctgcaagtgcggcaacggctgcggaggctgcaagatgtacccagacttgagctacactgagtcaaccaccaccgagaccttggtcatgggagtggcacctgttaaggctcaatttgagggtgcgaaagggtgtgccgctgagaacgatggc

SEQ ID NO: 281455 - DNA, 259 bp, Glycine max
  unsure (1)..(259): unsure at all n locations
gcggaatttactttctgttgggtacaagaatgtgattggtgctcggagagcatcgtggaggatcctgtcttccattgagcaaaaggaagaaacaaaagggaacgagttgaatgcgaacggattaaggagtacaggcagaaggttnaattggagtttcaaacatctgtaatgatgttatgacagtgattgatgancacctatcccntcggctgcagctggtgaatccactgtgttttactataagntgaaagggagatat

SEQ ID NO: 281456 - DNA, 249 bp, Glycine max
  unsure (1)..(249): unsure at all n locations
gggtgccatgcaggaaggcaggggggatcagattcacaatcaacggtttccgttacttcaacctggtgctgatcaccaacgtcgcaggtgcaggggatatcgtgcgcgtgaggtgnaaaggaagcaaaaccgcgtggatgagcatgagccgcaactgggggcaaaattgggcaatccaacgccggttctggtgggcnaggcctttcctttagggttcccggacantaaccnngcacctnaacctcctgg

SEQ ID NO: 281457 - DNA, 244 bp, Glycine max
  unsure (1)..(244): unsure at all n locations
ctgaactaaaaaacatcaaaagagacatggctgagcaaaccttcatcatgatncaagcctgatggcgtccaaagaggccttattggcgagatcattagcagatttgagaagaaaggtttctacttgaaaggtttnaaacttgttactgtggaccgtccttttgctgagaagcnctatgntgatttgnctgccaagcttnctttagggggntggtggangacattatctcggcncctgnngttgc

SEQ ID NO: 281458 - DNA, 259 bp, Glycine max
  unsure (1)..(259): unsure at all n locations
gctgcctgcttctcatgttattcacactgttggcccaatatacagtgctgatattaatcctgctgcctctctggcaagtgcttacaggaatactttgatggttgcgaaagaaancaacnttcagtatntagcattcccanccatatcatgtggtgncaatggntacccttaggatgaagcggcnacnggggnantttcaacagtcnaagganttcccaaanngacttnnggngnccnnttggggcaanacnccccccng

SEQ ID NO: 281459 - DNA, 256 bp, Glycine max
  unsure (1)..(256): unsure at all n locations
gttagaggttgggcttttgctccacatgctgatgtgatatggatggaaactgcaagcccaaatgtgattgagtgcacacagttttctgagggggttaggtcaaagcaccctcagntgatgctggggtnacaacctctctccatctttcaactgggatgcttctggcatnagtgatgaaacaaatgagggacttcattncnaaagatngcaaagttggggtatnnanngacaatncatcanntgagagggcngcntc

SEQ ID NO: 281460 - DNA, 253 bp, Glycine max
  unsure (1)..(253): unsure at all n locations
gcgatatgatgaagccatgaaaaagctagtgggaaagctgatgtggctgatgttggattctctgggtattacaaaggaagacctgaaatgggccgggtccaaaggccaattcaaaaagacatgcgcancntgcaattgaactcttacccgacttgtccggatccggatcgggccatgggtctggccgcccacaccgaactccaccctctcanaatntttaccaaaacaaaatgggggngntgcnngtnnacgg

SEQ ID NO: 281461 - DNA, 240 bp, Glycine max
  unsure (1)..(240): unsure at all n locations
gcacaaagcaaagctcatccntganttaaaanatggcagcagcntcttnnatggctgctnctcatccccatccttggtctgggaaggccgngaanctnggcccatcagncccagaagtgggaagggtgnaccatgatgaanaccgtnaccaagcaggtctccttcaggaagcncatngtacggncccggnnccnnnnangagnttggggncctttncttgggggnccccctccaaaaaag

SEQ ID NO: 281462 - DNA, 247 bp, Glycine max
  unsure (1)..(247): unsure at all n locations
gtttttttcaactttatgtgtttaaagacagaaatgtggttncctcagcttgtgagaagagctgaaagagctggtttcaaggcaattgcccttactgtcgacactccaattcttggtcgtagggaggctgacatcaaaaacagatttacattgccaccaaacctggttttgaagaattttgaaggattggatcttggaaagctggacaagactagtgactccggtcttgcctcttatgttgctggac

SEQ ID NO: 281463 - DNA, 266 bp, Glycine max
  unsure (1)..(266): unsure at all n locations
tcaccactccaaccagagcttcatcacagcgcttagttgtgagcaccaaaccaaaccacattgtttgcaaggcacaaaagcaggttgtccaagagggtgaggacactactaacattgtctctcgcaggttggccctcactgttctcattggtgctgctgctgttggctcnaaggttgcacctgtgatggctgcctatgggagagctgccaatgtgtttggaaagnccaangacaaacactgatttccttncatacaatggggangg

SEQ ID NO: 281464 - DNA, 258 bp, Glycine max
  unsure (1)..(258): unsure at all n locations
ctcatgaccaagattgacaggcgatccggcaaagagcttgagaaggagcccaagtttttgaagaacggtgatgctggttttgttaagatgattccaaccaaacccatggttgttgaaactttctccgagtatcctccacttggtaggtttgctgttagggacatgcgtcaaactgttgctgtgggagtcatcaagnaacgttgagaagaaggatcctaccggagccaggtcccaaggctgcccnaaagagaagtgatc

SEQ ID NO: 281465 - DNA, 253 bp, Glycine max
  unsure (1)..(253): unsure at all n locations
gcttaaagaagaagagaaaccattatgttgangtccaacagtgaagatctgatccatgagatcatcactgttggacctcactttaaggaggctaacaacttcctttggccattnaagctcaaggctcctttgggtggcttaaagaagaagagataccattatgttgnagggaggtgatgctggaaaccgggagaattacatcaatgagctaatcaggagaatgaattgagctgtagcactgttcatcatttga

SEQ ID NO: 281466 - DNA, 257 bp, Glycine max
  unsure (1)..(257): unsure at all n locations
gatgagttccactggtggttctaccaagggcggaaggggcaagcccaaagcctccaaatccgtttcaagatcgcagaaagctggtctccaattccccgttggaagaatcgctcgattccttaaggctgggaaatacgctgagcgtgtnaacncangntgctcctgtgtacctctctgcagtgctcgagtatctcgctgctgaggttttggaattggctgggaatgctgctagggataacagagnattcgtattgtcc

SEQ ID NO: 281467 - DNA, 254 bp, Glycine max
  unsure (1)..(254): unsure at all n locations
gagagantaggaaaaaggganatatggcatttgcaggaacaactcagaagtgcatggcttgtgacaaaacagtttatcnggttgataagttgacagcagataaccgngtgtaccataaggcttgcttcagatgccaccactggcaaaggaacactcaagcttagcaactataactcttttgagggggttctttactgcaggccacacttcgaccnaactggtcaaaagnactgggagtcttgacaaaagcttcc

SEQ ID NO: 281468 - DNA, 258 bp, Glycine max
  unsure (1)..(258): unsure at all n locations
caggaaacaccaacacattggctggaaatgtgccacccaaggctaaccttggtgacatgaggggactagctggaggcttgaatgggctaaacacttcagccatgatagatggaggatcctttgacggcgctaaggcatacaaggacagcaaagtctgcaacatgcttacaatgccagaattccaacaggaggtcccngttganaccnnggnatnacatntgcncccntancccngggttnttcncccaaangggnttt

SEQ ID NO: 281469 - DNA, 170 bp, Glycine max
  unsure (1)..(170): unsure at all n locations
gttgttgtaaatgactcgtgctaccatcaactcgttagccattggctaaacacncatgcggttgttgagccattcgtcatagcaacaaataggcatctgagtgtggctcaccctatttacaaacttttgtttcctcactatcgtgacaccatgaatattaattcacttgc

SEQ ID NO: 281470 - DNA, 247 bp, Glycine max
  unsure (1)..(247): unsure at all n locations
gggatgaggaggttaattacttcccttcaaggtatgatcctgttcgtcatgcagaaacgttccccatacctcctgctatctgcagtggaaggcgtgaaaagtgtggaattgagaaggagaacaactttaagcagcccggagagagatacggatcttgggcacctgacaggcaagatagatttnatcgccgatggggttgatgcttaatctgacccacgggtcnaccntggaaatccgcnttcggant

SEQ ID NO: 281471 - DNA, 171 bp, Glycine max
  unsure (1)..(171): unsure at all n locations
gttgattgaagangatgccgatcagaaacatcnccatcggaaggcctgaagaggctactcaccccgacacgttgaagggggggttggctgagttcatctccaccttggatcntcgtggtcgncggttcnggttccgggcatcgcctacnaacnaggntnaccgannaangg

SEQ ID NO: 281472 - DNA, 182 bp, Glycine max
  unsure (1)..(182): unsure at all n locations
tgattgaagaagatgccgatcagaaacatcgccatcggnaggcctgaagaggcnacttcaccccgaaangtnnaaggngganttgggntaagtncatctccaccttgatctncgnatncgccggtnnaggttccggnatggcctanaacaanctcaccgacnacggcgccgnnactcccgcc

SEQ ID NO: 281473 - DNA, 253 bp, Glycine max
  unsure (1)..(253): unsure at all n locations
gaaatttctgcagaccaaagcaaagcaaagattctcaagtaccatgttgttaaaacaccaaggtcagtttacaaaactgttccaaattgtgaaccttgtcgtcccttacaaagatctcctttagaaggtttctatttagctggagattacacaaaacaaaaatatttagcttcaatggaaggcgctgttctttctgggaagctttgtgcacaggcnattgtacaggattctggagctactagctactcggggc

SEQ ID NO: 281474 - DNA, 258 bp, Glycine max
  unsure (1)..(258): unsure at all n locations
gcagaaagcaagctcatcctagagttttaaaaatggcagcagcctcnnccatgggctctctcttccccatccttggctggcaaggccgtgaagctgggcccatcagcccccgaagtcgggagggtcagcatgaggaagaccgtcaccaagcnggcntcttccgnaagccnntgttacggcccagaccgcgtcaagtacttgggcccattctctggcgaagccccntctnacctnnanggggnttccccggggactagg

SEQ ID NO: 281475 - DNA, 252 bp, Glycine max
gaattcgtggggggagaaatggggagaagatggctattacaagctctgcagagggcatggcatgtgtggaataaacactatggtttctgctgcaatggtgcctcaaccacaaacaacacctacaaagaattatgcttcttattagctatgcacttaaggaaatctaaataaatatttttcattctaggtgatgtatcatgtatgtaccaaaatattttggtacgtaagtcttttaaaaagtttgcatctcct

SEQ ID NO: 281476 - DNA, 137 bp, Glycine max
  unsure (1)..(137): unsure at all n locations
tgcaacaaggcatggctgctggaaaaaatggagctgagcttcaggctttggaggatgagtggctctcaaaggcacagttgaagactctctcagaagcagtngtggaggcaattgngaggcagancancattgggggg

SEQ ID NO: 281477 - DNA, 259 bp, Glycine max
ctggaggaaaacaagattgttgattttatcaaatttgatgttgggaatgtagttatggtaacaggtgggagaaacagggggcgtgttggagtgatcaagaacagggagaagcataagggtagctttgagacaattcacgtgcaggattccactggacatgaatttgctactcgcatgggcaatgtgttcactattggcaagggcacaaagccatggatatcactgcccaagggtaagggtattaagctatcaatcattg

SEQ ID NO: 281478 - DNA, 260 bp, Glycine max
  unsure (1)..(260): unsure at all n locations
gctagtttatcgtgaggagaatatgaagttgtttgttttctttgttgctgcagtagttttggnagcatggccatgccatggcgcaggctaccaaaggntccctctccgaatgaaaactggctatggtgagcgttcttcggaggtaaaaatgcgcnagttttaggcttgcttgggaagnaccacaaacatccgagcctttaaaaccattcntgaagagtgcgtgaaccaacnaaggctacattaatggcngaccatttaga

SEQ ID NO: 281479 - DNA, 257 bp, Glycine max
ctgaaggcccctgggtttggagagcgcaagagccagtaccttgatgatattgccatcttgactggaggtactgtaatcagagaagaggttggccttactttggacaaagctgggaaagaggttctcggatatgcctccaaggtggtgctcaccaaggatacaaccacaattgttggtgatggaagtacccaggaagcagtgaacaagagagttgcacaaattaggaacctaattgaggctgctgagcaagagtatga

SEQ ID NO: 281480 - DNA, 257 bp, Glycine max
gaacactccatgtccaccaccaaagtctcctgcacaggctacatgccccattgacacgctcaaactaggtgcttgtgtggatcttcttggtggcttggttcacattggcttgggagaccctgttgcgaaccagtgctgccccgtgcttcaaggcctggttgagcttgaagctgcggtgtgtctttgcaccactcttaagctgaagcttctcaacctcaacatttatgtcccacttgcccttcagcttctgtggcttg

SEQ ID NO: 281481 - DNA, 238 bp, Glycine max
  unsure (1)..(238): unsure at all n locations
ctcgttgtagcgtaggagcaattgaatttngaaaacaagatgtctcaccgcaagttcgagcacccgagacacggttcccttggctttctcccaaggaagcgagcttctcgtcatcgcggaaaggtgaaggctttcccaanagacaatcctagtcaaccatgcaggttgactgcctttgtgggctacaaagctggaatganccacattgttagagaggttgagaaacctggatcnaant

SEQ ID NO: 281482 - DNA, 261 bp, Glycine max
gctccgatgggcgggcgatgagggagatgatattccgaatagcggttatgcagcccgttcacatcgatcctgaatccataaagccacccaagagaaggaacgtgaagatctccaaggatccgcagagcgtggcggcgcggctcagaagagaaaggataagcgagagaataaggattcttcagagattggtccctggcggcaccaagatggacactgcttctatgttggacgaggccattcactacgtcaagttctgaagaa

SEQ ID NO: 281483 - DNA, 252 bp, Glycine max
cacagctttcagtagcaggaagaggcgtgattccgttagagagacttggatgcctcaaggtgaacaacttctccaattggagcgggagaagggaattgttatcagattcatgattggtcacagtgcaacttccaacagcattctagatcgagctattgattcagaagaagctcagcacaaagacttccttcgcctagaacatcttgaagggtatcatgagctgtctgcaaagacaaagattttcttttccac

SEQ ID NO: 281484 - DNA, 256 bp, Glycine max
  unsure (1)..(256): unsure at all n locations
gtttttgtctaggctccttgtcaaagagggtcaccaggtgactttattcacaagaggtaaagcgcctgtcactacaacagttgccaggtgaatcagacagtgattatgctgatttttcttccaagatcttgcatttgaaagganttcaggaaggacttcgactttgtaaaatccagtctctcagcagagggatttgatgttgtttatgacataantggacgcgaggcagatgaagttgaacccatactggatgctc

SEQ ID NO: 281485 - DNA, 247 bp, Glycine max
  unsure (1)..(247): unsure at all n locations
gtaactatcggttacacgntaacggnttcaattagtatggncggcggtgaagaggncgaattgttntcacaaacatggtcatcatgttaagtgctatacgncaaacaaccctntcatgatcctctttgcctgcattcnaatcgtgcttagccagatatcagatttccataagctctggtggctctccattgttgcagcagttatgtctnttgcttattcttccattggcnncgggctctnagtagct

SEQ ID NO: 281486 - DNA, 201 bp, Glycine max
  unsure (1)..(201): unsure at all n locations
gggaaagccttatgacaaacccaacattgtcactggagccaacgttcaggtttgctgggagaaatttgcaaggtantttgnggtggagttaaaggaggtgaagctccgtgatgattattatgtaatggaccctgaaaaggcctggaattggtggatgagaacactatttgtgttgctgctatcctggttccacacaacata

SEQ ID NO: 281487 - DNA, 254 bp, Glycine max
gtcttacaacggctttagagttggactaaatgcggagaaaagtggtgacgttggacgtataatgattgttgcaatcactgatggcagagccaatatatcattgaaaaggtcaactgaccctgaagctgccgcagctactgatgccccaaaaccttcagcacaagaattgaaggatgaaattcttgaggtggccggaaagatatataaagcaggaatgtctctccttgtcatcgacactgaaaataagtttgtct

SEQ ID NO: 281488 - DNA, 254 bp, Glycine max
ccactgaggaaatcgaacaagctcactacttggactgggctgtccatgccttcagaatcaccaatgttggtgtgcaggataccactcagatccacacccacatgtgctactccaacttcaacgacatcatccactccatcatcgacatggacgctgatgttatcaccattgagaactctcgctccgatgagaagctcctgtcagtcttccgtgaaggtgtgaagtatggtgctggaattggccctggtgtctat

SEQ ID NO: 281489 - DNA, 253 bp, Glycine max
  unsure (1)..(253): unsure at all n locations
gttaacgtacctagtgttggtctttatatttagttattgacatcaacncagtcatggaggaagttaatgtggttcaaaccaagaatggaactgtttcagtagcttctgcgtttgctggccataaggaagctatacagcaaagggaccacaaatttttaagaattgctgttgaagaagcgtataaaggggtagactgtgaagatgggggtccctttggtgctattatagtttgtaatgatgaaattgttgctag

SEQ ID NO: 281490 - DNA, 253 bp, Glycine max
attgaaggaaaaacaatgcaaggaacagtgatccaagtctgagaaaccggactgggccagttcagctgccatacactttgctccatcgttcaagtgaggaagggttgactttcaaaggaattcccaacagtatctctatctaattaaaaagagtttgtggtttccttatctatgttgtacttctgaataacatagactttatgcatgtctatgcgtaattattgcctgaacttctgcactattgtatttggat

SEQ ID NO: 281491 - DNA, 252 bp, Glycine max
gcgacacgtatctcatcaataatcgcagaagcagtttccggtgcatctcatcgtcttccaaaatgaacgacgcagatgtctcgaagcaaatccagcagatggtgcgtttcatccgccaggaagctgaggagaaagccaacgagatctctgtatctgccgaagaggaattcaatatcgagaagctgcagttggttgaagccgaaaagaagaagatcaggcaagaatacgaacgcaaagagcgccaagtcgaaa

SEQ ID NO: 281492 - DNA, 256 bp, Glycine max
  unsure (1)..(256): unsure at all n locations
cagccgaaaatgccttcaagaggtacgttgagatcgggagggttgctcaaatnaactacggcaaggaatatggcaggctcgtcgtcatcgtcgacgtcattgaccagaacagagcacttgtcgatgcccctgatatggtgaggtcccaagtcaatttcaaaaggctttcccttaccgacatcaagattgacatcaagagggtccctaagaagaaagatcttgtcaaagccatggaggatgctgatgttaagaacaa

SEQ ID NO: 281493 - DNA, 251 bp, Glycine max
  unsure (1)..(251): unsure at all n locations
aagctgagaagtagcaggcatcgaaagaggaagcataagggcaactgttctgatagaaacacttccngcagtgtttcaaatgaatgaaattttgtatgaactgaaggaccattcagtgggtttgaactgtgggcgttgggattacattttcagttatgttaagaccttccaagctcatccagatcgcctcttaccagatagggtcctagttggcatgactcaacacttcatgaaaagttattctgatcttc

SEQ ID NO: 281494 - DNA, 251 bp, Glycine max
cagcaacgttgagagggagacttttgggggagagtgagtgagagtaaaaagatgtttctgcgtgcggtggcgcggccgttgatggcgaaggtgaaggcttcgacggggatcgtggggctggacgtggtgccgaacgcgagggaggtgctgattgggctgtacagcaagacgctgaaagagatccagaaggttcccgaagatgaagggtaccgcaaggccgtggagagcttcaccaagcacaggctcggcgt

SEQ ID NO: 281495 - DNA, 251 bp, Glycine max
  unsure (1)..(251): unsure at all n locations
accaacttggnatggtcttcggagaaatcacgaccaaggccaacgttgactacgagaagatagtgcgtgacacctgcaggaacantcggcttcgtctcaaatgatgtgggactggatgccgacaactgcaaggtcctcgtcaacattgagcagccgagccctgatattgctcagggtgtacacggccaccttaccaaaaaacctgaagaaattggtgctggtgaccagggtcacatgtttggctatgccat

SEQ ID NO: 281496 - DNA, 249 bp, Glycine max
  unsure (1)..(249): unsure at all n locations
gtgatatttgccttaaaccctagccgctcttctcttcattcttcactttggaaacaatcataatggcgttctgtaataaggttggaaatgtctngaggcaggntgctgctcgcagcacacatgcccctgttgcgtccatgcttaattacatccgctgcatgtcttcaagcaagcttttcattggaggcctttcatatggagttgatgaccagtctcttaaggatgcatttctggcttggagatgtggtt

SEQ ID NO: 281497 - DNA, 248 bp, Glycine max
  unsure (1)..(248): unsure at all n locations
aacaaatgaggatttcattccaaagattgcaaagttggggtatgtgtggcagttcatcactgtgggaggtcttcattccaatgcactcataacttcaacatttgcaagggattttgccaataggggaatgctggcttatgtggagaggattcagagagaggagaggaacaatggggttgacacactagctcaccaaaaatgggctggtgctaattactatgatangtacctcaagactgtccagggag

SEQ ID NO: 281498 - DNA, 250 bp, Glycine max
cagaagtggttagaagcagcagggtggaaaatcaggacaatacaaagaatcagaaatccaaaggctgaaaaagatgcttacaatgaatggaactacagcaagttccgtttgtggcagcttacagaatatgacaagataatattcattgatgcagatttgctcatcctaagaaatatagatttcctatttggaatgccagaaatcactgcaactggaaataatggcactcttttcaactcaggtgtcatgg

SEQ ID NO: 281499 - DNA, 250 bp, Glycine max
  unsure (1)..(250): unsure at all n locations
gcgtctcttcncctctctctgcatcgctgcgttttccgaatcgaaaggtgaggttagtaagtaacaatggtggagaaggccaagggtaggaaggaggaggttgtcactcgagagtacaccatcaacctccacaaacgcttgcatggctgcacatttaagaagaaggctcctaaagcaattaaggagataaggaagtttgctcagaaagcgatggggacgaatgatgtaagagtggatgtgaagctcaaca

SEQ ID NO: 281500 - DNA, 251 bp, Glycine max
gagaaaagcgtaatcatgtcggacgaagagcatcacttcgattctcaggcggatgcgggagcgtccaagacgtatcctcagcaggctggtaccattcgcaagaatggctacatcgtcatcaaatccaggccttgcaaggttgtagaggtctctacgtcaaagacaggcaagcatggacatgcaaagtgtcactttgttgcaattgatatttttaatgggaaaaagcttgaagatattgttccatcatccca

SEQ ID NO: 281501 - DNA, 250 bp, Glycine max
tgagaggggctagccgagattccgtgagttgcaaaaatgaagacgattctttccaccgagaccatgaacatcccggacggcgtgagcatcaaagttcatgccaaggtcatcgaagttgagggcccccgcggaaaattggtgcgagacttcaagcatttgaatctcgattttcagctcattactgacgaaaacggtaaaagaaagctgaaaatcgacgcgtggtttggttctcggaaaacatccgccgcca

SEQ ID NO: 281502 - DNA, 253 bp, Glycine max
aaacagcatcgacccgtcgtagcagaaaaacttgtcaccatggtttcttccgacaaggatccacgagaggatgtccttcaagcctggtacatggatgatagtgatgaagatcaaagactcccccaccacaaagaacccaaggagtttgtctcgttggaccaacttgctgaacttggagtccttagctggaaactagatgctgataaccatgaaaatgatccagagctgaagaagattcgtgaagagcgtggtt

SEQ ID NO: 281503 - DNA, 249 bp, Glycine max
aagaaaatattccaatacacatggcttccgaaaggcaagcgttaatgcttattctcttaacaacattcttcttcaccataaagccttcacaggccagtactactggtggcataacaatctactggggccaaaacattgacgacggcaccttgacttccacatgcgacactggaaacttcgagattgtcaacctagctttcctcaatgcgtttggttgcggcataactccatcatggaacttcgctggcc

SEQ ID NO: 281504 - DNA, 250 bp, Glycine max
gggttttcctcaccggtgtgcagtcgagcccccgaagaaaaagcgaaaatgccgtcgcacaagacattcagaatcaagaagaagttggcgaagaagatgaggcagaacaggcctatcccctactggatccgcatgaggaccgacaacaccatcaggtacaacgcgaagcccgtcactggcgtcgcaccaagcttggattctgaggtgcttgctttgcctcggttctgtttatccaattaattagtgtttt

SEQ ID NO: 281505 - DNA, 249 bp, Glycine max
attgctgtgagaatattgaaaacaagtatttgcaatgcccacttatagcatcgatatgggtgtatggaaacagctttgagtcattcttggtagctgttgtgatccctgaaagaacggtcattgaggattgggcaaaagagcacaatgtgacagatgattttaaatctttatgtgataatcttaaagcaagaaagtacattttggatgagctcaacagcactggtcagaaacaccaacttagaggatttg

SEQ ID NO: 281506 - DNA, 248 bp, Glycine max
  unsure (1)..(248): unsure at all n locations
agtttgtgaagggaagaagatggtgtcaggttctggaatctgcgcaaagcgagtggtggtggacgctcgccaccacatgttgggtcggctagcgtccatcgtggcgaaagagcttctgaatgggcagaaggttgcggtggtgcgctgcgangagatttgcatctccggcggtctggtnaggcagaagatgaaatacttgagattcctccgcaaacgcatgaacaccaaaccctcccatggccctatcc

SEQ ID NO: 281507 - DNA, 243 bp, Glycine max
  unsure (1)..(243): unsure at all n locations
gagtangaattcttacgtgttcgagatcgacatgccgggtttgaaatctggggacataaaggttcaagttgaagacgacancctgcttctgatatgtggggaacgaaagagggacgaagagaaagaaggggcgaagtatttgagaatggagagaagggttgggaagttaatgcgcaagtttgtgctgcctgagaatgccaacactgatgcaatctctgctgtgtgccaagatggtgtgctagt

SEQ ID NO: 281508 - DNA, 245 bp, Glycine max
aattctcagagagaagaagaaacttaatcgatcatcacttcacttcactaatacatcatggcagacgagacccagaacaagtatgagagctctgaggttgaggtccaggatcgtggtgtttttgactttctcggtaagaaaaaggatgaagaagacaagcctcatcctcaggaggaggtcatcgccaccgagtttcaaaaagtcactgtctcagaccaaggagagaacaagcacagcctcttaga

SEQ ID NO: 281509 - DNA, 248 bp, Glycine max
  unsure (1)..(248): unsure at all n locations
agagagantccatccatcaattccaatggccgatcagctcaccgacgaacagatctccgagttcaaggaagccttcagcctcttcgacaaggacggggatggttgtattaccaccaaggaacttgggaccgtgatgcggtcacttggccagaacccaactgaggcagagctgcaggacatgataaatgaggttgatgctgatgggaatggtaccattgatttcccagaattcctgaatctcatggctc

SEQ ID NO: 281510 - DNA, 249 bp, Glycine max
ggagtggagagcagttgttgaggtctggcaccggtccgaagccaattcccggtcagaacgtaaccgttcactgcactggtttcgggaagaacggtgacctttctcagaaattctggagcacaaaggatcctggccagaacccattcactttcaaaatcggccaaggttctgttatcaaaggatgggatgaaggtgtgcttggcatgcaaattggtgaagttgctcgtctccggtgctctccggatatgc

SEQ ID NO: 281511 - DNA, 247 bp, Glycine max
tacacctcatggaggatgctgccactgctgagatcagcagggtgcagaattggcagtggctcaagtatggagtggagctcaatggggatggtcttggagtgaaagtgaacaaagaactttttggtagggttgttgaagaagagatggctaggattgaaaaggaagtggggacagagaagttcaagaagggaatgtacaaggaggcttgcaagatcttcactcgccaatgcacgtcaccaatgcttga

SEQ ID NO: 281512 - DNA, 245 bp, Glycine max
gagagcaagatgtcgaagagaggacgcggtggttcggcggggaacaagttccggatgtcgctgggtctgccggtggcggcgacggtgaactgcgccgacaatacgggggcgaagaacctctacatcatatcggtgaaagggatcaaagggcgtttgaaccgtctcccctcggcttgcgttggcgacatggtgatggccaccgtgaagaaggggaaacccgatctgaggaagaaggttttgccagc

SEQ ID NO: 281513 - DNA, 245 bp, Glycine max
  unsure (1)..(245): unsure at all n locations
gtcanacccctttttcatttgaagggcgaagaanggcagtncaccncacaagaaggaattgctgcattaagagataatgttgatacactgatagttattccaaatgacaaactgctgactgcagtttctcaatctacccctgtaactgaagcattcaatctggctgatgatattcttagacaaggtgttcgtggtatatctgatattattacgataccaggattggtgaatgtagacttgcagat

SEQ ID NO: 281514 - DNA, 246 bp, Glycine max
  unsure (1)..(246): unsure at all n locations
aaatcagtacgtggcggcgtggctcaccggaagcggttcggtgcctctatacaacctcatggaggatgctgccactgctgagatcagcagggtgcagaattggcagtggctcaagtatggagtggagctcaatggggatggtcttggagtgnaagtgaacaaagaactttttggtagggttgttgaagaagagatggctaggattgaaaaggaagtggggacagagaagttcaagaagggaatgta

SEQ ID NO: 281515 - DNA, 242 bp, Glycine max
gtcgtgacgttgagcttaattcttgattattgtcgttttcatcaagtaccaggtcgctcaaacaaggaacgaaagtcttatgatgagaaattcattaggatggacacaaagcggctatgtgagttgacatctgctgcagacagccttcagttgaagccattggttgatcttacaagtcgtgcacttgctcggataattgaaggaaaatctccagaggagatacgtgagatatttcatctgcc

SEQ ID NO: 281516 - DNA, 243 bp, Glycine max
  unsure (1)..(243): unsure at all n locations
cttgaaccgttcttcgtgttctccattccctctctcactccttacatctacgtaatnnnnnnnnnnnnnnnnnnnnnnnnnnnnnnnnnnnnnnnnnnnnnnnnnnnnnnnnnnnnnnnnnnnnnnnnnnncaagttttgctacttttctcttcttaaccatagttcacatattatatcatcacatatcatagtgatatcatatcacaatgtgtggcatacttgctgtgcttggttgctctga

SEQ ID NO: 281517 - DNA, 243 bp, Glycine max
gtttgggcacaggagcctggatctaatgaacagatacaagagtttgtttgtactcgcttcaaggctgagtttcccgtttttgacaaggttgatgtgaatggtgacaaagctgctccactgtacaagtatctaaaatcaagcaaaggtggactctttggggatggtatcaaatggaacttctccaagttcctgttgataaagagggaaatgtggttgatcgctatgcacccacaacttctcctc

SEQ ID NO: 281518 - DNA, 247 bp, Glycine max
  unsure (1)..(247): unsure at all n locations
gctctcgtgttcgtgatttgttcaagaaggcgaaagagaatgccccttgcattgtctttgtngatncaattgatgctgttggaagacaaagagggactggaattggtggagggaatgatgaaagagagcagaccctcaacnaacttttgacagaaatggatgggtttgagggtaacacaggtatcattgtcgttgcagcaactaacagggctgacattcttgactcggccttgttgagacctggccg

SEQ ID NO: 281519 - DNA, 242 bp, Glycine max
  unsure (1)..(242): unsure at all n locations
agctgagaaggtagcaggcatcgaaagaggaagcataagggcaactgttctgatagaaacacttcctgcagtgtttcaaatgaatgaaattttgtatgaactgaaggaccattcagtgggtttgaactgtgggcgttgggattacatnttcagttatgttaagaccttccaagctcatccagatcgcctcttaccagatagggtcctagttggcatgactcaacacttcatgaaaagtnatt

SEQ ID NO: 281520 - DNA, 245 bp, Glycine max
  unsure (1)..(245): unsure at all n locations
aaagagataaccctgaagcaatggaagaggatgatgttgaagatgaaatagcagaaatcaaggctgctcattttgaggaatcaatgaaatatgctcgaaggagtgttagcgatgctgacattcgcaagtaccaggcattcgcccaaacattacagcagnnctagaggatttggaagtgagttcaggtttgcagattccacctccgccggtggtacagctgctgcatctgacccattttcctctgc

SEQ ID NO: 281521 - DNA, 244 bp, Glycine max
  unsure (1)..(244): unsure at all n locations
ttaccttgttggccattctgttacccttgcngacatcataacaacntgcaacnngtatttaggattcagccagctcttagttaagagcttcacctctgagttcccncacgttgaacgatnccttttggaccttggtcaaccagcctanccttcagaaagantctaggtcaggttaagcaaactgaggctgttccacctattccannaaccaaaaaattcanancagtctaaggnatctaagccc

SEQ ID NO: 281522 - DNA, 241 bp, Glycine max
gcgctcttaatgctacaaaggcagctgtagaggaaggtattgttgttggtggtggttgcactcttctgagacttgcatcaaaggtggatgcaatcaaggatagccttgataatgatgaagaaaaagttggagctgatattgtgaaaagagctcttagttaccctttgaaattaattgccaagaatgctggtgtcaatggtagtgttgtcagtgagaaggtattgtccagtgacaatccaag

SEQ ID NO: 281523 - DNA, 242 bp, Glycine max
aagcactattcaatttgttgactggtgccccactggtttcaagtgtggaatcaattaccagcctccaactgttgttcctggcggtgatcttgccaaggttcagagggctgtgtgcatgatctccaattccaccagtgttgttgaggtcttctctcgcatcgaccacaaatttgacctcatgtatgccaagagggctttgttcattggtatgttggtgagggtatggaagagggagagttctc

SEQ ID NO: 281524 - DNA, 244 bp, Glycine max
tggcaatataattcaggaccttctaaagcttgaaaaaatccaggaggatcttgccagaaagatttggcagtcagcccacgtttgctcaatgggcagcagtggcaggggtagatcagaaaacacttaggaaacgtttaaattatggtatattttgcaaagacaaaatgattaaaagcaatatacgacttgtcatatccattgctaagaattatcagggatctgggatgaatctgcaagatcttgt

SEQ ID NO: 281525 - DNA, 241 bp, Glycine max
cctatgtttggttgcactgatgcttctcaggtgttgaaggagcttcaagaggctaagactgcataccccaacggcttcatccgtatcatcggattcgacaacgttcgccaagtgcagtgcatcagcttcatcgcctacaagcccccaggcttctaagtgtgaaaaatttgcaaagcatttgtagccgccaccccactttgtttgtttgtacttaaactacattcccattgtttttgctttt

SEQ ID NO: 281526 - DNA, 262 bp, Glycine max
atttctcagtctctgtgtttgcggctgaggattccgaacgagtgaccttcttcgtttctcgcaaagtttaagtaatcatgggtaaggaaaaggttcacatcaacattgtcgtcattggacatgtcgactctgggaagtcaactaccactggtcacttgatctacaagcttggaggtattgacaagcgtgtgattgagaggttcgagaaggaggctgccgagatgaacaagaggtcattcaagtatgcctgggtgctcgacaa

SEQ ID NO: 281527 - DNA, 260 bp, Glycine max
cagccatgggccagtaccctgagaaggccttaactgttttaaggagtgtcagtttgagaattgagaaatggtggagggaagagaaacgctatgaagctatgttgctcccatcggttgggtcttatttttcagagaagatatctgaagaaatctgcaattcagctgctaagatggccaataatttcgaggtggatgcactttttgtgtacacaaagacagggcacatggcatctctattgtcacgctgccgtcctgactgc

SEQ ID NO: 281528 - DNA, 254 bp, Glycine max
  unsure (1)..(254): unsure at all n locations
gtttgttgtgagctataagctagtttatcgtgaggagaatatgaagttgtttgttttcttgttgctgcagtagttttggtagcatggccatgccatggcgcaggctaccaaaggttccctctccgaatgaaaactggctatggtgagcgttcttcggaggtaaaatgcgcaagttttaggcttgctgtggaagcacacaacatccgagcntttaaaaccatcctgaagagtgcgttgaaccaacaaagactaca

SEQ ID NO: 281529 - DNA, 257 bp, Glycine max; identical to SEQ ID NO: 132614

SEQ ID NO: 281530 - DNA, 257 bp, Glycine max
aaaacactcataacacaaagcacaaagcaaagctcatccttgagttaaaaaatggcagcagcttcttccatggctctctcatccccatccttggctggcaaggccgtgaagctgggcccatcagccccagaagtgggaagggtgagcatgaggaagaccgtcaccaagcaggtctcctcaggaagcccatggtacggcccagaccgagtcaagtacttgggcccattctctggcgagcccccgtcctacctaaccgg

SEQ ID NO: 281531 - DNA, 256 bp, Glycine max
  unsure (1)..(256): unsure at all n locations
ctccgatctcctcaaactctatcagcgcagaaccaagcctctatcaccatggggaagacacatggaatgggagctgcccgcaancctgaagtctcaccgtaggagacaaaggtgggctgacaagtcatacaaaaagtctcatctgggaaatgaatggaagaagccttttgctggttcatcccatgccaagggtattgttcttgaaaagattggtattgaggctaagcagcccaatctgccattcgaaaatgtgcca

SEQ ID NO: 281532 - DNA, 259 bp, Glycine max
  unsure (1)..(259): unsure at all n locations
ggaaaaaagaaaaagaaaaatgttagaggtnaagagaatcggtgtggtggggagtggccaaatgggatcgggaatagcccaagtacgctgccatgcacggcatcgacgtttggcttcacgacctcgaccctcaagctctctccaaagcctcctcttccatctcttcctccatcaaccgtttcgtttccaaaaaccacatctctcaggttgcgggtgctgatgctttgaaacgactgcgtctcacgacggatttggagga

SEQ ID NO: 281533 - DNA, 261 bp, Glycine max
atccaacaagcagatcaatctctctctctgtctcccaatcaaaacagacatgggtttgaaggaggattttgagcagtatgctgagaaagcaaagactttgccaccgactcaatcaaacgaagacttgcttatcctttatggattgtacaagcaggccaccgttggacctgtcaacaccagccgtccgggaatgttcaacatgagggacagagctaaatgggatgcatggaaggctgttgaagggaaatccaaggacgaagc

SEQ ID NO: 281534 - DNA, 258 bp, Glycine max
gttgaggaagctgaagcggctgctcagcagttcaatggctatgaacttgatggaagagcattgagagtgaattctgggccacctcctgctcggaatgagagtgctcctcgttttagaggtggttcttctttcggttccagaggtggtggtccttcagatagtgaaaaccgtgttcatgtaagtaatcttgcttggggtgttgacaatgtagcacttaagtcattgtttcgtgaacaagggaatgtcttggaagctagg

SEQ ID NO: 281535 - DNA, 255 bp, Glycine max
ggacgaagagcaccatttcgagtccaaggccgacgccggagcctccaaaacctacccttcagcaagccggtaccatccgcaagaacggctacatcgtcatcaaaggccgcccctgcaaggttgtggaagtttcgacttccaaaactggaaagcacggtcacgctaagtgtcactttgttggaattgatattttcactgccaagaaacttgaggatattgtgccctcttctcacaactgtgatgttcctcatgtga

SEQ ID NO: 281536 - DNA, 254 bp, Glycine max
  unsure (1)..(254): unsure at all n locations
ggcgaagatccaggacaaggaaggaatcccaccggaccagcagaggcttatttttgctggcaaacagctagaggatggaaggaccctcgctgactacaacatccagaaggagtcaactcngcacttggtgttgcgtcttcgtggggggttttaagctggagctgatttctgtgtgatgttcgatgttggattttcccaaacattttaagaagaaatgtgatgtgtaatgggtctgtaatgacctttgaaaataa

SEQ ID NO: 281537 - DNA, 253 bp, Glycine max
  unsure (1)..(253): unsure at all n locations
gaagaagcagagggagtagcggcattaaaaatgcagatcttcgtgaaaactctgacagggaagactataaccctcgaggtcgagagcagcgacaccatcgacaatgtcaaggccaagattcaagacaaggaaggcatncctccggatcagcagcgtttgattttcgccggaaagcagcttgaagatggaaggaccctggccgattacaacatccagaaggaatcaacccttcatctcgtcctcaggcttcgtg

SEQ ID NO: 281538 - DNA, 250 bp, Glycine max
gtagatcgaaagggaatcttcttccatggcctccaagcggattctgaaggagcttaaggacctccagaaagaccctccaacctcttgcagcgccggtcctgtagcggaagatatgtttcattggcaagcgactataatgggtccccctgatagcccttatgctgggggtgtttttctagttactattcattttcctccggattatccattcaagccacccaaggttgcattaggactaaagttttccacc

SEQ ID NO: 281539 - DNA, 252 bp, Glycine max
  unsure (1)..(252): unsure at all n locations
cgcanagccttcttcgccgtttcagctcaagagccaccagcaggtaagatatggttaagcataacaacgttatccccaatgggcacttcaggaaacactggcaaaactatgtgaagacttggtttaatcaaccagcacggaagaccagaaggcgtttagctcggcagaagaaggctgtcaagattttcccaaggcctactgctggacctctcaggccaattgttcatggccagactctgaaatacaacatga

SEQ ID NO: 281540 - DNA, 251 bp, Glycine max
cgtgttgcctctctgcaatctacagccaaaatgcctttcaagaggtacgttgagatcgggagggttgcccaaatcaactacggcaaggaatatggcaggctcgtcgtcattgtcgacgtcattgatcagaacagagctcttgtcgatgcccctgatatggtgaggtcccaagtcaatttcaaaaggctttccctaaccgatattaagattgacattaagagggtccctaagaagaaagatcttgtcaaagc

SEQ ID NO: 281541 - DNA, 209 bp, Glycine max
ttctgaccatggctgcatcattatttatgccttcatccatagtggacgaagaagcgaggtttgaagccgaagtggcggaggtgcaagcatggtggaactctgagaggttcaggctaacaaaaagaccatacacagcaagagatgtggtgtccctccgaggcaacctcagacaaacctatgcctcgaacgagatggcgaaaaagctctgg

SEQ ID NO: 281542 - DNA, 251 bp, Glycine max
ctggacttgggaggagttcaccagacacaagctcggcgctccttcagaattgctctgccacgctcaaaggcaaccacaggctcaccgatgctgttcttcctgacgagaaagactggagaaaagaaggtatagtcagccaagttaaagatcaaggcaactgcggatcttgctggacattcagcacaactggtgcattggaggcagcttacgcacaggcctttgggaagaatatcagtctttctgagcagcag

SEQ ID NO: 281543 - DNA, 254 bp, Glycine max
  unsure (1)..(254): unsure at all n locations
aactaaagccgagcagcgagagagagaaaccctagcaaaaatgccggctggtcacggtttgagatcnnngcaccagagattccttctctcgtcccttcaggaagaagggtaccatcgccctcaccacatacctcagaacctaccacgtcggcgattatgtcgacgtcaaggttaacggcgccgtccacaagggaatgcctcacaagttctaccatggccgcaccggtcgcgtctggaatgtcaccaaacgtgct

SEQ ID NO: 281544 - DNA, 252 bp, Glycine max
  unsure (1)..(252): unsure at all n locations
gngtctgtgacacacacagactcacttcaagttcccagcttttgccatttttcccactgtttattgagaagaactgcagaacatggcacagattttggctccctctacgcaatggcagatgagaatctcaaaatcctctcccaatgcaactcccattacatcaaacatgtggagttctttattgtggaaacaaaataagaaagtttcacctaccagttctgctaaatttagagtgctggcaattaagtctga

SEQ ID NO: 281545 - DNA, 250 bp, Glycine max
gttttgaagagctatgcatcaagaaagaagccattgagggagaagagaagttttgtgcaaaatccttgggaacagtaattggttttgccatttcaaagctgggaaagaacattcaagtactttcaagttcctttgtcaataagcaagaccaatacactgtggaaggagtgcagaatcttggagacaaagcagtgatgtgtcataggctaaatttcagaactgcagtattttactgccatgaagtccgtga

SEQ ID NO: 281546 - DNA, 248 bp, Glycine max
  unsure (1)..(248): unsure at all n locations
aagtagttgagaactaagaaggagaagcaaatggcttcctcaatgatctcttccccagctgttaccactgtcaaccgtgccggtgccggcatggttgctccattcactggcctcaagtccatggctggcttccccaccagaaagaccaacaatgacattacctccattgctagcaacggtggaagagtgcaatgcatgcaggtgtggccaccagttggcaagnagaagtttgagactctttcctacct

SEQ ID NO: 281547 - DNA, 251 bp, Glycine max
  unsure (1)..(251): unsure at all n locations
ctctgcctccgccgcggaggtgctggcgacggcgaacgctcgtgacatgatcggcgagatcgagaaccgttcgactcacttgttggcgataaaaacagatgtagcaacacaaggagactttattagatacctgatcaaagaggtggagagtgcagcattcacggacattgaagatgtggtacctttngtcaaatggcttgacgacgaactctcttatttggtggatgaaagggcagtactgaaacacttcg

SEQ ID NO: 281548 - DNA, 251 bp, Glycine max
  unsure (1)..(251): unsure at all n locations
gcgactgcgcttcagcacaatgggtgccnccaagtatgtttcggagctatggcgcaagaagcagtctgatgttatgagattcttgcagcgggtgaggtgctgggagtatcgccagcaaccttctattgtccgtttgacaaggtctactcgcccagataaggctcgtcgcttgggtttcaaggctaagcagggttacgtgatttaccgtgttcgcgtacgaagggtggccgtaagagaccagttccaaaggt

SEQ ID NO: 281549 - DNA, 248 bp, Glycine max
gaggacccaaaagctttacaggaggcactctggacgacctggtggtatgaccgtggagacatttgcccagctgcaaaacagaattcctgaaagaattattgaacacgctgttcgtggcatgcttccaaaaggaaggcttgggaggagactattcacccaccttaaggtttataaaggcccagatcatccacatgcggcgcagaagcccgttgagttgccaataagggataagagaatacatttgcaga

SEQ ID NO: 281550 - DNA, 250 bp, Glycine max
  unsure (1)..(250): unsure at all n locations
tnatcttctnctnttgttgtttgtgngtttgttcnnnntctcacctgaaaatgtctgctgcggtggnaactgnngttgcgnannngctntncaagtgcgncaacggntgcggaggctggcaagatgtacccagacttgagctacaccgagtcaaccaccaccgagaccttggtcatgggagtggcaccagttaaggctcaattcgagagtgctgaaatgggtgttcccgctgagaacgatggctgcaaat

SEQ ID NO: 281551 - DNA, 245 bp, Glycine max
ggcaggaactggaatagcagaactaatagctcttgagatgtcaaagcagacaaagacacctatagaggagactcgcaagaagatatggcttgtagactcaaagggtttgattgttggttcaagaaaggcttcacttcaacacttcaagcagccttgggctcatgagcatgagcctgtaggcagtctcttagaagctgttaaggtaatcaagcctacagttttgattgggtcatcaggagtgggaa

SEQ ID NO: 281552 - DNA, 243 bp, Glycine max
  unsure (1)..(243): unsure at all n locations
agtgcaatggacatcggaacctatggctatcctacaccancagtgaaaaagattgagtcttactatgatgtgccagagggagtggatattcggggaagatatgatgcagagtttgcaaaaatcctcacaaaagatgcttngaaattcgtngctgacttgcaacgtgagttcaggaaccatatcaagtatgcattagagtgcagaagagaagcaaagaagaagtacaatgaaggggctcttcca

SEQ ID NO: 281553 - DNA, 244 bp, Glycine max
gttgcaaagcaatataaattacatcagagagctgctcatgtgtattcagaagccaagagggtacatgctttcaaggatgttgtatcctcaactctaagcgacgaggacatgctaaagaagcttggcgaccttatgaacgaaagtcatcatagctgcagcgttttatatgaatgcagctgtccggagttggaagaacttgtaaatatttgtcgtaacaatggtgctcttggggcaaggcttactg

SEQ ID NO: 281554 - DNA, 242 bp, Glycine max
agcaggttgtagaaaatatggccaagcatcatcctgatttgattatgtgccggaagcagccagggattgccattggacgactgtgcgagaaatgtgacggcaaggtcgatgtgtcatatgcggaggagttggaatatctgatgcctactactgcaaggaatgcacacagcaggagaaagatagagatggttgccccaaaattgttaatttagggagtgccaaaactgatttattttatgaac

SEQ ID NO: 281555 - DNA, 111 bp, Glycine max
  unsure (1)..(111): unsure at all n locations
aaaacactcataacacaaagcacaaagcaaagctcatccttgagttaaaaaatggcagcagcttcttccatggctctctcatccccatcctnggctggcaaggccgtgaag

SEQ ID NO: 281556 - DNA, 244 bp, Glycine max
  unsure (1)..(244): unsure at all n locations
cttgcttgcactcttcaccgtgtctatcagctccaccgtcggagtcacttgcgccaacaccgacgggaaaattgtgcttgaggccttgattttgacctccgctgtggtttcatctcttaccggctatgccttttgggcgtccaagnagggcaaggnttttagcttccttggcccagtgttgttcacctccctctttactctcatcctcactggcatgatgcagatgttcttccctcttggacca

SEQ ID NO: 281557 - DNA, 241 bp, Glycine max
  unsure (1)..(241): unsure at all n locations
gtgcaaaaggcactgatagctcctgcagcattgattgctcaaaatgctggaatagaaggtgaagttgttgtggagaaaataaagagtggtgnatgggaggtcggttacaatgccatggcagacaggtntgagaatttagtggaggctggagttatcgaccctgccaaggtaactaggtgtgctttgcagaatgctgcttcagttgctggaatggtgttgaccacgcaggccattgtggtgg

SEQ ID NO: 281558 - DNA, 242 bp, Glycine max
gaatttcaaatgaagcatgctcacttgccggtcactggggtctagggaagcttattgctttatatgatgacaaccacatttccattgatggggacactgagattgcattcactgagaatgttgatcaacgttttgaggcacttgggtggcatgtaatttgggtgaagaatggaaatactggatatgatgaaattcgtgcagccattaaggaagcaaaggctgtcaaagacaaacccactatg

SEQ ID NO: 281559 - DNA, 242 bp, Glycine max
attcattcaagattcagcaagtgcgttttggaagcagagaccgaaatacttcgagatggcccgtacaaagcaaactgctcgtaagtcaactggaggaaaagctcccaggaagcagcttgcaaccaaggctgcacgtaagtctgcaccaacaactggtggtgtgaagaagcctcatcgttatcgccctggaactgttgctcttcgtgagattaggaaataccagaagagcactgagctcctaa

SEQ ID NO: 281560 - DNA, 241 bp, Glycine max
  unsure (1)..(241): unsure at all n locations
cgacgcagaaggttcatccaatctccgaatcctttaatcgcattgcaaccatgtcgaggagaaaggtcagagagccaaaggaggaaaacgtgactcttggcccagctgttagagatggcgaacatgtctttggcgtcgctcgcatatttgcctcctttaatgataccttcattcatgtcactnatctgtctgggagggaaacgcttgtccgcatcactggtggaatgaaggttaaggctga

SEQ ID NO: 281561 - DNA, 242 bp, Glycine max
  unsure (1)..(242): unsure at all n locations
acaacagctttcatggttccattggtggctggtgatggaaccaaaactcaggcacttgctatttgccactcaaatacttctngaatgaatcatcaaatgcttcatcaacttatgggagttgatcctggaantaaccctgtttgccatttccttggaagcaaggccattttatgggtacccaatttatcngnggaacanngcntatcagcccaacatgggggctnaatangcccaggcatcgg

SEQ ID NO: 281562 - DNA, 239 bp, Glycine max
ctttgatgcttcggttgatgctgtttatgctgcattggagaaagcaggaggagggtcattgaacatagttgtgtctgagagtggatggccttcttctggtggaactgcaacttcacttgataatgcaagaacttacaacacaaacttggttcggaatgtgaagcaaggaacccctaaaaggcctggtgcaccccttgaaacttatgtgtttgccatgtttgatgaaaatcagaagcagc

SEQ ID NO: 281563 - DNA, 238 bp, Glycine max
  unsure (1)..(238): unsure at all n locations
gctcgtgcctctagggttatcatatctccatttccattncntctctctcagtttccaagaatcttaagctatgggaaagtcntacccaaccgtgagcgctgattancagaaggccgttgagaaggcgaagaanaagctcagnggcttcatcgctgagaaganatgcgctcctctaatgctccgtttggcatggaantctgcngnaattacgnngngagctcgaaaagggtnntcnctt

SEQ ID NO: 281564 - DNA, 245 bp, Glycine max
  unsure (1)..(245): unsure at all n locations
ccatctttcaactgggatgcttctggcatgagtgatgaacaaatgagggacttcattccaaagattgcaaagttggggtatgtgtggcagttcatcacagtgggagggctgcattctaatgcactcattacttcaacatttgcaagggnttntgccaataggggnntgctagcttatgnggagagnattcaganagagganaggnacaanggggttnncncnctngccnacnagaaggggnctnc

SEQ ID NO: 281565 - DNA, 238 bp, Glycine max
cggcggcgacagtcactctccgacaacaacacttccgcggcgaaaaatgtctctggtggcgaacgaggatttccagcacattctgcgtgtgctgaacaccaacgtggatgggaagcagaagataatgttcgctatgacctccatcaagggtattggaaggagattcgccaacatcgcttgcaagaaggccgatgttgacatgaacaaaagggctggtgagttgagtgctgcagagttg

SEQ ID NO: 281566 - DNA, 240 bp, Glycine max
gccgcggttgcaagcagagcacaccatcgaaatgggcgaacgaaggcgttggttccggaatcggtggtgaagaaggagaagaggaacgaggagtgggctttggagaagaagcaggaactcgatgccgcaaagaaaaagaggttcgaaacgcggaagctgatttttaacagagccaaacagtactcaaaggaatatgacgagcagcaaaaggagttgattaggttgaagcgtgaagccaag

SEQ ID NO: 281567 - DNA, 243 bp, Glycine max
  unsure (1)..(243): unsure at all n locations
ccgctacccagaccctctcatcagagctaatgacaccattaagttggatttggangagaacaagattgtccgatttcatcaagtttgatgttgggaatgtagtcatggtgacaggtggaaggaataggggtcgtgttggagtgatcaanaacagagagaagcataagggnagctttgagnctatccatgttcaggatgccactggccacgagtttccaaccccgtacgggcaaangtgncccc

SEQ ID NO: 281568 - DNA, 237 bp, Glycine max
  unsure (1)..(237): unsure at all n locations
gtgatggctccttctgatgaagccgaacttttccacatggttgccactgcagcagccattaatgatcgacctagttgtttccgatatccaaggggaaatggcattggngttcaactaccaactggaaataaaggaactcctcttgagattgggaaaggtaggatattgattgaaggggaaagagtggctctcttgggctatggatcagctgttcagaactgtttggctgcagcttcc

SEQ ID NO: 281569 - DNA, 236 bp, Glycine max
aaaggtttcaaggaggggcatacaaggattcttgttgcaacagatttggttggaagagggattgatattgaacgtgtcaacattgttataaactatgacatgcctgattccgcagacacatacttgcacagggttggtcgagctggaagatttggcaccaaaggccttgcaatcacatttgtttcttgttctactgatgtcgatgttctcaacaatgttcagtctaggtttgaggt

SEQ ID NO: 281570 - DNA, 237 bp, Glycine max
  unsure (1)..(237): unsure at all n locations
ggaaaaatggtttcgctgaaactgcagaagcggctcgccgcgagcgtgctcaagtgtggcagaggaaaggtttggcntgaccccaatgaagtcaacgaaatctccatggccaattctcgccaaaacataaggaagctggttaaggatgggtttatcatcaggaagcccaccaagattcactctcgctcacgtgctcgtcgaatgaaggaagccaagaggaaaggacgtcactctggt

SEQ ID NO: 281571 - DNA, 234 bp, Glycine max
  unsure (1)..(234): unsure at all n locations
ctggaattgccacattcacaatgatgcttgtcagccaatttatatttgacaagtatggatggggagttgctgccacgatcacccctacagtcctgcttctgacaggagttggtttcttttctcttatattgtttgggggcccgcttgcacccggtcttgcgnntattggaatgactccacttctagcagctgtatatgtgggtgccttgcagaacatatttagcaagagtgcca

SEQ ID NO: 281572 - DNA, 234 bp, Glycine max
  unsure (1)..(234): unsure at all n locations
aactaggtgcttgtgtggatcttcttggtggcttggttcacattggcttgggagaccctgttgcgaaccagtgctgccccgtgcttcaaggcctggttgagcttgaagctgcggtgtgtctntgcaccactcttaagctgaagcttctcaacctcaacatttatgtcccacttgcccttcagcttcttgtggcttgtggcaagtctcctcctcctggttacacctgctcccnct

SEQ ID NO: 281573 - DNA, 234 bp, Glycine max
ccttcattggaagccttgaaaccccagttacatccagccccttgattgcatggtacttatcgaacctccccgcatacaggaccgcagtgagcccactactaagagggatcgaggtgggcctggcccatggctaccttctggtgggcccattcgtgaaggccgggcctctgaggaacaccgagatcgccgggcaagcaggctctctcgccgctggtgggcttgtggtgatcctca

SEQ ID NO: 281574 - DNA, 234 bp, Glycine max
  unsure (1)..(234): unsure at all n locations
cggcggcgacagtcactctccgacaacaacacttccgcggcgaaaaatgtctctggtggcgaacgaggatttccagcacattctgcgtgtgctgaacaccaacgtggatgggaagcagaagataatgttcgctatgacctccatcaagggtattggaaggagattcgccaacatcgcttgcaagaaggccgatgttgacatgaacaaaagggctggtganttgagtgctgcaga

SEQ ID NO: 281575 - DNA, 237 bp, Glycine max
  unsure (1)..(237): unsure at all n locations
cccgatttaagaagaaccgcaagangcgcggccacgtcagcgccggccacggccgtattggaaagcaccgcaagcncccccggcggccggggaaatgccggcggcatgcaccaccacaggatcctcttcgacaagtaccacccggggttcttcgggaaggtagggatgaggtactttcataagctccgcaacaaattctactcccccatcgtcaacatcgacaagctatggtctctg

SEQ ID NO: 281576 - DNA, 258 bp, Glycine max
  unsure (1)..(258): unsure at all n locations
caaagtaagagtgagcaacttccaacaccatagtgaaatggcttccaaggctgcacttctcttgtgtttcaatgttctcttcttcaccgtggttagctccacatatgtgccatgcaacccacnccccaaaactccaaaacacccacctgtcccaaagccaccttccccaaagcaagcaagttgccccaaagacactattaagtttggtgtgtgtgctgatgtgttaggtctgatcaacgtgcaattgggaagccacca

SEQ ID NO: 281577 - DNA, 257 bp, Glycine max
  unsure (1)..(257): unsure at all n locations
caccaagggaactaacaagtttcgttgtgggcaaagtaagtggtgatccaatatgtcaaaaaatccaaaagttttctttgatattctaattggaaagatgaaagctgggcgantagtaatggagttgtttgttgatgcaaccccaaaaacagctgaaaacttcagggccctctgcactggggaatggggattggaaaatctgggaaacctttacntacaagggttctgcatttcatcgtattattccagagtttatg

SEQ ID NO: 281578 - DNA, 128 bp, Glycine max
ctttgatgcttcggttgatgctgtttatgctgcattggagaaagcaggaggagggtcattgaacatagttgtgtctgagagtggatggccttcttctggtggaactgcaacttcacttgataatgcaa

SEQ ID NO: 281579 - DNA, 257 bp, Glycine max
  unsure (1)..(257): unsure at all n locations
caagcgttccggcaagatggagcttcctgagtggaccgatattgtaaaaacagcaaaatttaaggagttggctccatatgatcctgactggtactacattagggctgcctcaatggcaagaaagatctatttgagaggtggtcttggtgttggtgctttccagaggatctatggtggaagcaaaagaatggaagccgtcccccacatttctgcaagagcagcggtgcattgccagacacttctgcaacagttnaaaa

SEQ ID NO: 281580 - DNA, 258 bp, Glycine max
  unsure (1)..(258): unsure at all n locations
gttgaaccaacaaaggactacattaatggcgaacaatttagatcagacncctaaaacagttaaccaacaagctttcttttatgctagtgaacgcgaagtccatcacaacgacatatttatattcggcatagataacaccgtactctctaatatcccatactatgaaaaacatggatatggggtggaggatttatgaacnccttatatgatgaatgggttaacaagggcgacgcaccggcattgccaganactcttaaa

SEQ ID NO: 281581 - DNA, 255 bp, Glycine max
  unsure (1)..(255): unsure at all n locations
gttgccattctcatcctcctctgtctcncctctctccaccattgccatggatccttacaagctccggccatccagcgccttcaatnctcccttctggactacaanttctggtgctcctgtttggaacaacaactcctctttaaccgttggagctagaggtccaattctgcttgaggattatcatcttgtggagaagcttgcaaactttgacagggaacgtatcccagaagtgttgtccatgccggggagctagtg

SEQ ID NO: 281582 - DNA, 129 bp, Glycine max
  unsure (1)..(129): unsure at all n locations
cgaacactcatttgcacaatttctagtgcctgcattggaaaacattccagagggccatttctaatgctggccttggaaaccaagtaaaagtttccactgccattgatactggtgccttgggcnncatca

SEQ ID NO: 281583 - DNA, 252 bp, Glycine max
  unsure (1)..(252): unsure at all n locations
caaaggtgatgcttagacctgcttctcccggtactggggttattgcaggtgggtctgtgagaattgttctggaaatggcaggagttgataatgctttgggaaagcaactagggagtaataatgcactcaacaatgccagagcgactgttgctgctgtgcagaaaatgaagcagtttcgtgaggttgctgaggagcgtgggattccaatggaagaattgtggaataatgaaatttgtgaaggatgtantttta

SEQ ID NO: 281584 - DNA, 261 bp, Glycine max
  unsure (1)..(261): unsure at all n locations
caggaganctgttgatgttattgcatccagactgtatnnttactattcgtatagctatgagcttacaggagatcttgctgaaattcggggcaacctccttgcattgcaccgatttgcgactctccgccatgatgagctgggacaggaaacacttcttaatttgtnacttcgaaactaccttcactacaacctatatgatcaggctgagaagttgaggtccaaggctcctcgatttgaagcacattcaaaccagcagttttg

SEQ ID NO: 281585 - DNA, 251 bp, Glycine max
  unsure (1)..(251): unsure at all n locations
atccaagtgatagacactcgtcgcgatggaacgtgtagctgaatccgngcgaactctgtacccatacgtgactggatcctctgtagtcgctatcaaatacaaagatgggantctaatggccgctgacatgggaggttcgtatggatctaccctgcggtacaagagtgttgagcgtatcaagcctattggaaagcatctcttctggtgctagcggggagataagtgactttcaggagatctgcgttaccttg

SEQ ID NO: 281586 - DNA, 250 bp, Glycine max
  unsure (1)..(250): unsure at all n locations
ctcacctgaaaatgtcttgctgcggtggtaactgtggttgcggaagctcctgcaagtgcggcaacggctgcggaggctgcaagatgtacccagacttgagctacactgagtcaaccaccaccgagaccttggtcatgggagtggcacctgttaaggctcaatttgagggtgctgaaatgggtgtgcccgctgagaacgatggctgcaaatgtggaccaaatgctcctgnaacccctgcattgnaagnggg

SEQ ID NO: 281587 - DNA, 255 bp, Glycine max
  unsure (1)..(255): unsure at all n locations
gagaatggcagcacttggtgggaatcgtgatgtgacaggaagccagaacagcgttgagatcgatgctctagctcgctttgctgttgaagaacacaacaaaaaacagaatgcccttttggagtttgaaaaggtggtaactgcgaaacagcaagtggtttctggtaccttgtacaccatcactttggaggcaaaagatggtgggcaaaagaaggtttatgaagccaaagtttgggagaatcntggttgaattcaagg

SEQ ID NO: 281588 - DNA, 259 bp, Glycine max
cgtgccacaggcgcggcgtgcatgctatgggaggaatggcagcgcagattccaatcaaagaagatccagtggctaacgaggtagcactggaacttgtaaggaaggacaagcttagagaagtgaaggcagggcacgatggaacttgggctgcgcaccctggtctcattccagcctgcatggagattttcaacaacaacatgggcaatgcttccaaccagatagacacagtgaaacgcgaagatggggcaaacatcaccga

SEQ ID NO: 281589 - DNA, 253 bp, Glycine max
ggcgtctgccaaaaccaaaaggtcagactgttggatctttccggaagggacttaccatgttgcctgatgcaatttctgccagactaggcaacaaagtaaagttatcttggaagctttcaagtattagtaaactggatagtggagagtacagtttgacatatgaaacaccagaaggagtggtttctttgcagtgcaaaactgttgtcctgaccattccttcctatgttgctagtacatgcctgcgtcctctgtc

SEQ ID NO: 281590 - DNA, 228 bp, Glycine max
  unsure (1)..(228): unsure at all n locations
gagggagagtgttgacgctccatcnagatgggtatttctagggattccatgcacaagaggcgtgccactggtggcaagaagaaggcatggagaaagaagagaaagtatgagcttgggcgtcaggccgcaaacaccaagttatcaagcaacaaaactatccggaggattcgtgttcgaggtgncatgttaaatggggggcttgaggttnnatccnggnattccccnngg

SEQ ID NO: 281591 - DNA, 253 bp, Glycine max
  unsure (1)..(253): unsure at all n locations
aggccatataatttttttttatttgaaataatgtccgggatcatccacaagattgaggagaccctccatgtgggagggcacaagaaagaggagcacaaaggagaacaccatggtgncgcacaaaggtgaacacaaaggagaacaccatggtgagcacanaggtgaacacaaaggngaacaacaccanggggagcacaaggggggtnttgnggataanntcanggacaagaccctggtgatgccccatgacang

SEQ ID NO: 281592 - DNA, 249 bp, Glycine max
  unsure (1)..(249): unsure at all n locations
gcaagtttgacaacttgtatgggtgccgtcactctctccctgatgntctcatgagggctaccgatgttatgntgctggaaaggtggctgttgtggctggatatggtgatgttggcaagggttgtgctgctgcaatgaagcaggctggtgctcgtgtcatcgtgaccgagattgatcccatctgtgcccttcaggctctcatggaaggccttcaggttctgaccttggaggatgttgtttctgaggctga

SEQ ID NO: 281593 - DNA, 251 bp, Glycine max
  unsure (1)..(251): unsure at all n locations
gccgacatgcagagaagtatgtccgaaggggtagattggactggccagagggtgcagcctcacgagagagtattaaagctgtaatgaagcttccccgactacagaacattataatgcagcntgttgatcattcagctggagatcttatacatcntttgcaggggcnacttanatatgacccctttgaaagacttacagctagggatgctttgaggcattccttctttactagagatcaacttaggagatga

SEQ ID NO: 281594 - DNA, 250 bp, Glycine max
gggaagaagtgtctctagagtcactgaaggcgaaaggtgtgattaatccatcaggaagagaaaggagacttcctttgaagatcttgggtgaaggagaactgagcaagaagttgacattaaaagctcgcgccttttccacatcagcaaaggagaaacttgagaatgctggttgttccctcaccgtgcttcctggccgcaagaaatgggttaagccatcagttgctaaaaacctgcccgcgctgatgaatac

SEQ ID NO: 281595 - DNA, 256 bp, Glycine max
gtgttatgtgtgaatacacatgaaaatgcagaagttcaaattgcttctagtgctattcttcgctacttgccactcctctttgtccatcacagatggtttgttgccaaatggagacttcgaggttggtccaaaaccatcagagttgaaaggttcaatagtgactacccccaatggcattccacattggacaatctcaggaatggttgaatacataaaatcaggggcagaagcaaggtgacatggtgctggttgtgcc

SEQ ID NO: 281596 - DNA, 256 bp, Glycine max
  unsure (1)..(256): unsure at all n locations
aagccatgaaaaagctagtgggaaagctgatgtggctgatgttggattctctgggtattacaaaggaagacctgaaatgggccgggtccaaaggccaattcaaaaagacatgcgcagccttgcaattgaactcttacccgacttgtccgganccggatcgggccatgggtctggccgcccacaccgactccacccttctcacaatcctttaccaaaacaacataagcgggttgcaggttcaccgaaaaggcggcgg

SEQ ID NO: 281597 - DNA, 252 bp, Glycine max
  unsure (1)..(252): unsure at all n locations
ggcagcacaatcaatactaaaacaggattacaaggatgatatcacaagagaagaagcagtgcaacttgcattgaaggtnttgagtaaaaccatggacagcacaagtctaacctcggaaaagcttgaacttgcagaggttttcctttcaccctctggaaaagtcaagtatgaagtttgcnccccagaggccctgataagctgttggtgaagttctggtgtancccaacctgcaacagacactgtctntttntt

SEQ ID NO: 281598 - DNA, 249 bp, Glycine max
  unsure (1)..(249): unsure at all n locations
ttcccttctccaacatgccaaacgacagcgttctgagtcttttctncttcgttaccctcttcacatgccttctctctgctaattcccacgatgaccatattttcctaccgagtcaactccatgacgatgactcagtgagttgcactgctaccganccaaaccttaactacaagccggtgnncggaatcctgacccaccccggcgaggtgcctntggcgggntaaaaaacgccacnggggtttttaacac

SEQ ID NO: 281599 - DNA, 248 bp, Glycine max
  unsure (1)..(248): unsure at all n locations
caatacccggctgaagcaaattttcagtaaacacggtaatgttgtgaatgctcgggtagtctatgacagggagtcaggtcgatcacgtggctttggctttgtcacaatgtctgatgagacagaaatgaatgatgccgttgctgctcttgatggcgagantttggacggaagggcaattaaggtgantgttgctgaggacaggccaaggcgtgnccncttttgagcgnaaanatntgnccccccccccc

SEQ ID NO: 281600 - DNA, 255 bp, Glycine max
ctctttttgtttcttcagtttggtataaccttagccgaggtcacgaggagcactagctagtttcacaatttccaaatggctaggggattgaagaagcatctcaagaggctcaatgctcctaagcattggatgcttgacaaactgggtggtgcatttgcgcccaaaccctcatctggaccacacaaatctagggagtgccttcccctcatactcatcctacgaaaccggctaaagtatgctcctgacttaccgtga

SEQ ID NO: 281601 - DNA, 272 bp, Glycine max
gcgacacgtatcttcatcaataatcgcagaagcagtttccggtgcatctcatcgtcttccaaaatgaacgacgcagatgtctcgaagcaaatccagcagatggtgcgtttcatccgccaggaagctgaggagaaagccaacgagatctctgtatctgccgaagaggaattcaatatcgagaagctgcagttggttgaagccgaaaagaagaagatcaggcaagaatacgaacgcaaagagcgccaagtcgaaattcgcaagaagattgagtt

SEQ ID NO: 281602 - DNA, 260 bp, Glycine max
  unsure (1)..(260): unsure at all n locations
gattcagcaagtgcgttttggaagcagagaccgaaatacttcgagatggcccgtacaaagcaaactgctcgtaagtcaactggaggaaaagctcccaggaagcagcttgcaaccaaggctgcacgtaagtntgcaccaacaactggtggtgtgaagaagcctcatcgttatcgccctggaactgttgctcttcgtgagattaggaaataccagaagancactgngctcctaatcaggangctnnacttccagaggttggt

SEQ ID NO: 281603 - DNA, 268 bp, Glycine max
agctagtgatctgggtctgcttgttgaaaacacctcagtggagcagcttggtttggctaggaaaattaccatctccaaggattctaccactgtcattgctgatgctgcgacaaaggatgagttgcaagccagggttgctcagttaaagaaggagctgtctcagacagactcagtatatgattctgagaaactggctgagaggatagctaaactgtctggtggagttgcagtcatcaaggttggtgctgctacagagactgagcttgag

SEQ ID NO: 281604 - DNA, 268 bp, Glycine max
gtcaggaagaacactggacaaacaggccgtaacagaagcaaacttaaagaaggctggctaccacacatgggaaaaatttctccaccccatatccatgttttttgtagtatggaatattagagagtacggtgccatctatactgaacacaaatgagaacaagtagttgagaactaagaaggagaagcaaatggcttcctcaatgatctcttccccagctgttaccactgtcaaccgtgccggtgccggcatggttgctccattcactgg

SEQ ID NO: 281605 - DNA, 265 bp, Glycine max
  unsure (1)..(265): unsure at all n locations
atcaggacgtgccacangcgcggcgtgcatgctatgggaggaatggcagcgcagattccaatcaaagaagatccagtggctaacgangtagcactggaacttgtaaggaaggacaagcttagagaagtgaaggcagggcacgatggancttgggctgcgcaccctggtctcattccagcctgcatggannttttcaacaacancntgggnnntncttccaacnagntngncncngtgaangcgnttgnggggttacatctcngnt

SEQ ID NO: 281606 - DNA, 263 bp, Glycine max
gttgcagagctgcgcgttgatctagaaaaatggcgaggataaaggtgtacgagttgaggaataagacgaaggcggagtactgaaccagctcaaggatctcaaggcggagtagccctgctccgcgtcgccaaggttaccggcggcgccccaaacaagctctccaaaattaaggtggtgaggctatcgatagcgcaggttttgacggttatttcccagaagcagaaagcggcgctgagagaggcttacaagaagaagaagtattt

SEQ ID NO: 281607 - DNA, 264 bp, Glycine max
ggaacaggagtttttcaataacatatatgaactagttggagttcctgtagtcacagtgcaacttagatacaatggttgggttacagagttgcaggatctagaaaagtcaaggcgactggggaaagctgttgggttggataaccttctctatacacccgatgcagatttttcttgctttgcagaccttgcactttcatctccagaagattattacattgagggacaaggatcattgctccaatgtgttctgacgccaggagatcc

SEQ ID NO: 281608 - DNA, 263 bp, Glycine max
  unsure (1)..(263): unsure at all n locations
atgtgatgaccactacagttgctgncctaacgactatcccattnttanaggggataagatggctcaattgcacctantcctggaccatcacccccntcacctgtgaagccaccaaatgtctgtgacaactactacagctgtgctgatagtgctacttggtgctgtattttcnagntcggaaatncttgctttgagtggggttgctgtcctcttgagggtgctacctgctgtgatgaccactacagttgctgccctaacgacta

SEQ ID NO: 281609 - DNA, 262 bp, Glycine max
agagagacctgcaaaaccgcccttgctggttatcatacaaccattgaagaggatcaaaagttgaaagaagcaaagctagattcaaggcatgctatagcagttggaattagagaaggggagaagaacctcctacagcaaattgacgagatcttcaaggaaaaagaattggaattggcccagttagaatattatcaagaaaggaggctcaaggaccttggactttgtggggaaaatggtgatatccttggggaccttggaaaat

SEQ ID NO: 281610 - DNA, 267 bp, Glycine max
tggagctaccctatgcgaccctatgggttttggactttcgaacgccacaattctcagcttgcttgggatgcacagattagccaagtggctgggaggagggacccttatgatgatatcctccaacatttctctaccccacctaagtgagtgttgctgaacttgccacaaacattgtaggtgaaaaaggatatgaacttggcgtaatttccccttgtaatatcctgtcttgttgcatgttgcatgttgcggagatcacaactggattgt

SEQ ID NO: 281611 - DNA, 265 bp, Glycine max
  unsure (1)..(265): unsure at all n locations
gggggtcagcttgcgaagattttggagatgcnatcactanatgagttgggcttttctaaaagatatgtnagatgtntgcaagtatgttattctagttcaaacttncaaagtttctgttgagtgtntagtagtatagaganaactatacatttcttattctatttntatcanggcttctaatagntgcctgctacaatggtttacagatntcggaagttgtcaatagcatganagacctaatagatatctgtgctgagcacaaaat

SEQ ID NO: 281612 - DNA, 265 bp, Glycine max
  unsure (1)..(265): unsure at all n locations
caaactcgcagtttctgctatgtctctgacatggttgatggacttatacgtctaatggaaggggaaaacactggtccaatcaacattgngaacccaggtgaatttacaatgattgaacttgccgagaatgtgaaagagcttatcaatccaaaagtgcagataaatatggttgagaacactcctgacgatcctcgtcagagaaaaccagacattacaaaagcaaaggaattgctgagatgggaaccaaaggtcaagttgtatgatg

SEQ ID NO: 281613 - DNA, 265 bp, Glycine max
  unsure (1)..(265): unsure at all n locations
agaagtggtagttattctctccgcgcgggtcccacctcggtggtgtcgctgccccggnnctgcccgctgaccatagagaacgcccacaagaagggggcgggcagcaccaagaacggccgcnactcgcagggcaagcntctcggagtcaagatatacggcgaccagntcgccaagcccggntnnatcatcgtcngnnagngcggaancnngtttcatgcagnanagantgtggtgctnggcananattatnccattntctccttga

SEQ ID NO: 281614 - DNA, 261 bp, Glycine max
tctgctgaaaaggaaattgtccgtgatgtgaaggagaaattggcatatgtggcccttgattttgaacaagaaatggagactactaagagtagttctgcagtggaaaagagctatgaattgcctgacggacaggtcattacaataggttctgagagattccgttgcccagaagtactgttccagccttctctaattggtatggaagctactggaattcatgaaacgacgtacaactccatcatgaaatgtgatgttgatatt

SEQ ID NO: 281615 - DNA, 260 bp, Glycine max
  unsure (1)..(260): unsure at all n locations
caaaaatttggccctttgagggttcagtcagtggcaacaacaactccaggagtcaccaaggcttcaccagaaggcaagaanactttgaggaaaggcagtgttattatcactggggcttcctctggattaggcctggccactgctaaggctttggctgagacaggaaagtggcatgtgataatggcctgccgggatttcctcaaagccgaaanngctgcgaaatctgccggcattgctaaggaaaactacactattatgca

SEQ ID NO: 281616 - DNA, 262 bp, Glycine max
  unsure (1)..(262): unsure at all n locations
ctcattctccatacctcaacgaagaggttaaagagacggcaacactttgctgtccgccttgaccgagcagagcttcgtcttggccctcgattttgccctaaagtactctcagtcacaactgacacnnnnnnnnnnnnnnnnnnnnnnaatggcaccgaagcagaccaaggctgagaagaagatcgcttacgatgcgaantgtgcgacctaatggaggagtacggccagatcctcgttgtgaactccgataacgtgggatcga

SEQ ID NO: 281617 - DNA, 262 bp, Glycine max
  unsure (1)..(262): unsure at all n locations
attatcggctgttggaggantattctcaaaagaggtactagaggccctcaagggttcaacatcaaccagaccancccatatttgctatgtcaaatccaacaaagaatgctgaatgcaccgctgaagaagcattctccattttgggtgacaacattatttttgcaagtggaagtccattcagtaatgtggatcttggaaatggtcatattggccattgcnaccagggaaacaacatgtacctctttccaggcattggtctcgg

SEQ ID NO: 281618 - DNA, 259 bp, Glycine max
  unsure (1)..(259): unsure at all n locations
aaaacactcataacacaaagcacaaagcaaagctcatccttgagttaaaaaatggcagcagcttcttccatggctctctcatccccatccttggctggcaaggccgtgaagctgggcccatcagccccagaagtgggaagggtgagcatgaggaagaccgtcaccaagcaggtctcctcaggnagcccatggtacggcccagaccgagtcaagtacttgggcccattctctggcgagcccccgtcctacctaacgggtg

SEQ ID NO: 281619 - DNA, 259 bp, Glycine max
  unsure (1)..(259): unsure at all n locations
atcttctcatcaggacgtgccacaggcgcggcgtgcatgctatgggaggaatggcagcgcagattccaatcaaagaagatccagtggctaacgaggtagcactggaacttgtaaggaaggacaagcttagagaagtgaaggcagggcacgntggaacttgggctgcgcaccctggtctcattccagcctgcatggagattttcaacaacaacatgggcaatgcttccaaccagatagncacagtgaaacgcgaagatgg

SEQ ID NO: 281620 - DNA, 261 bp, Glycine max
  unsure (1)..(261): unsure at all n locations
gttggaagccaaaaccctagcagccggngagaatggcagacgttgaggttgatnnnnnnnnnnnnnnnnnnnnnnnnnnnnnnnnncagccaaagaagagaangttcaagaagttcagcttcaggggggtggatctggacgcgcttctggacatgtccactgacgaactcgtgaagatgttcagtgctcgcgcacgcagaaggttccagagaggtctcaccagaaagcccatggccttgnttaaaaagctccgcaaagcgg

SEQ ID NO: 281621 - DNA, 262 bp, Glycine max
  unsure (1)..(262): unsure at all n locations
accgcgtttcggagagagacgtcgcaatggggaggaggcctgcnaggtgttatcggcagataaaaaacaagccataccccaaatcacgcttttgccgtggtgttcctgatcctaagatcagaatttatgatgttggtatgaagaagaaaggtgttgatgagtttcccttctgtgttcatctggttagctgggaaaaagaaaatgtttcaagtgaagcattggaagctgctagaattgcatgcaacanatatatggcgaaatt

SEQ ID NO: 281622 - DNA, 233 bp, Glycine max
  unsure (1)..(233): unsure at all n locations
ttgttgtttgtgtgtttgttttttctctcacctgaaaatgtcttgctgcggtggtaactgtggttgcggaagcgcctgcaagtgcggcaacggctgcggaggctgcaagatgtacccagacttgagctacaccgagtcaaccaccaccganaccttggtcatgggagtggcaccagttaaggctcaattcgagagtgctgaaatgggtgttcccgctgagaacgatggctgca

SEQ ID NO: 281623 - DNA, 260 bp, Glycine max
  unsure (1)..(260): unsure at all n locations
accctaccaaggttgacagaagtggngcctatatcgtgaggcaggctgcaaagagtgttgtggcanatggccttgccagaaggtgcattgtccaagtttcctatgccattggtgtccctgagcccttgtcagtgtttgtggacacttatggaactgggaagattcctgncaaggagattcttcaaattgtgaaggagaatttcgacttnagacctggaatgatcaccattaacttggaccttaagaggggtggccatagg

SEQ ID NO: 281624 - DNA, 255 bp, Glycine max
ttcttctcgttttcgccgattctcgccatgccgaaagctaaatccgacgccaaagccgccgatagcaggttgaagcggaagggcgctggtgctgggaggaagcaatcgaggaaagctgctaaggaccctaacaagccgaagagacctccaagcgctttcttcgttttcatgtccgagttcagagagcagttcaagaaggagcatcctaacaacaaatccgtcgctgttgtcggcaaagctggtggtgaaaaatgg

SEQ ID NO: 281625 - DNA, 255 bp, Glycine max
  unsure (1)..(255): unsure at all n locations
cagcaacanctttanatttgcacaggctctgagngagagaagcnntgagcttgtctctggtggaaccgagaatcacctggttttggtgaatctgangaataagggtattgatggctccagagttgagaaggtgttggaagcagttcatattgcagctaataaaaacactgttcctggagatgtgtctgccatggttcctggtggcatcaggatgggaacccctgctcttacttctagagganttgttgaggagga

SEQ ID NO: 281626 - DNA, 253 bp, Glycine max; identical to SEQ ID NO: 175509

SEQ ID NO: 281627 - DNA, 208 bp, Glycine max
gcggaaaccggaatatctcagttctctgatcagatccatccgacgtcgtttcagtgataatggctccgttcagcggcgatgagacggcaccgtttttcggcttccttggagccgcagctgccctcgtcttctcctgtatgggagctgcctatggcacagcgaagagtggcgttggcgtggcttcgatgggtgtgatgagaccagagct

SEQ ID NO: 281628 - DNA, 253 bp, Glycine max
agccgaaaatgcctttcaagaggtacgttgagatcgggagggttgctcaaatcaactacggcaaggaatatggcaggctcgtcgtcatcgtcgacgtcattgaccagaacagagcacttgtcgatgcccctgatatggtgaggtcccaagtcaatttcaaaaggctttcccttaccgacatcaagattgacatcaagagggtccctaagaagaaagatcttgtcaaagccatggaggatgctgatgttaagaa

SEQ ID NO: 281629 - DNA, 254 bp, Glycine max
  unsure (1)..(254): unsure at all n locations
agaaaatgttggggancttcagcagttcagtggtgtcgccgccggaggagctggtggctgctggcgncagancnccgtcgccgaagacgacggcggggaagctnctgaaccggttcgtngagagcaaggcgtcggcggtgtcgctgcaggtgggnnnacacgtngcagttggcncacacacaccacaacgaatcaccgtggcatcccagatcatttgctgtaaggatgagatattctncatgnttgagggggtc

SEQ ID NO: 281630 - DNA, 251 bp, Glycine max
  unsure (1)..(251): unsure at all n locations
atgatgtttatgtcgatggaaaacccacacagggtgnctttgctgaaaccatgatcgttgagcaaaagtttntggtgaagattccagagggtttggcgccagagcaagtggcaccattactgtgtgcgggtgtgacagtgtacagtccactggtacactttgggctgaaagagagtgggctaagaggtggaatattggggctggaggagtgggacacatgggggtgaagatagcaaaggcactgggtcatc

SEQ ID NO: 281631 - DNA, 250 bp, Glycine max
  unsure (1)..(250): unsure at all n locations
aagaaaatcattccaatacacatgggcttccgaaaggcaagcgttaatgcttattctcttaacaacattcttcttcaccataaagccttcacaggccagtactactggtggcataacaatctactngggccaaaacattgacgacggcaccttgacttccacatgcgacactggaaacttcgagattgtcaacctagctttcctcaatgcgtttggttgcggcataactccatcatggaacttcgctggc

SEQ ID NO: 281632 - DNA, 253 bp, Glycine max
  unsure (1)..(253): unsure at all n locations
ctctttttgtttcttcagtntggtataaccttagccgaggtcacgaggagcactagctagtttcacaattncccaaatggctaggggattgaagangcatctcaagaggctcaatgctcctaagcattggatgcttgacaaactgggtggtgcatttgcgcccaaaccctcatctggaccacacaaatctagggagtgccttcccctcatactcatcctacgaaaccggctaaagtatgctctgacttaccgt

SEQ ID NO: 281633 - DNA, 252 bp, Glycine max
  unsure (1)..(252): unsure at all n locations
ggtaactgtggttgcggaagcgcctgcaagtgcggcaacggctgcgggngctgcaagatgtancccagacttgagtacaccgagtcaaccaccaccgagaccttggtcatgggagtggcaccagttaagggctcaattcgagagtgctgaaaatgggtgttcccgctgagaacgatggctgcaatgtggagctaactgcacctgcnaccctgcacttgcaagtgaggtgttggagagctaaagctcaagcag

SEQ ID NO: 281634 - DNA, 276 bp, Glycine max
  unsure (1)..(276): unsure at all n locations
catgccaanacncatggcttccgaanggcaancgttantgcntatnctcttaacaacattcttcttcaccataaagccttcacaggccagtactactggtggcataacaatctactggggccaaaacattgacgacggcaccttgacttccacntgcgacactggnnacttcgagatngtcaacnnagcttncctcnatgcgncnggttgcggcntaactccatcatggnacttcgctgnncactgtggggactggnaccctggttcatactagna

SEQ ID NO: 281635 - DNA, 279 bp, Glycine max
  unsure (1)..(279): unsure at all n locations
ggtatttctaaggatggacagactcgtgagcatgctcttnttgctttcacccttggtgtgaagcagatgatctgctgctgtaacaagatggatgccactaccccgaagtactctaaggctaggtatgatgaaattgtgaaggaagtctcttcctacttgaagaaggttggttacaacccagacaagattccatttgtgcccatctctggtttcgagggtgacaacatgattgagaggtccaccaaccttgactggtacaagggaccaactctccttgag

SEQ ID NO: 281636 - DNA, 278 bp, Glycine max
  unsure (1)..(278): unsure at all n locations
ctaaggtaagtgagtaatcagtggttgagaatggtggagaaggcgaagggtagaaaggangaggtggttacacgagnagtacaccattaacctccacaagcgcctccatggctgcacatttaagaagaaagctcctaaagctattaagagataaggaaatttgcccaaaaggccatggggaccaatgatgtgagggtggatgtgaagttgaacaagtttgtctggagccagggaatcaggagtgttccaaggaggattagagtaagaattgctcgcaa

SEQ ID NO: 281637 - DNA, 277 bp, Glycine max
  unsure (1)..(277): unsure at all n locations
caagcgttccggcaagatggagcttcctgagtggaccgatattgtaaaaacagcaaaatttaaggagttggctccatatgatcctgactggtactacattagggctgcctcaatggcaagaaagatctatttgagaggtggtcttgggttggtgctttccagaggatctatggtggaagcaaaannaatggaagccgtcccccacatttctgcaagagcagcggtgcaattgccagacacattctgcaacagttgcaaaacatgagcatgttgagat

SEQ ID NO: 281638 - DNA, 279 bp, Glycine max
  unsure (1)..(279): unsure at all n locations
gccgtctccgacgatgaaaccagcaagcncctcggccgcagagacatcgttatctcgtggcgaggcaccgtcacccacgtggagtgggtggcggatttgctgaatttcctgaaaccgatctcccctgacattccctgttcagacaggaaagtcaaggtagaggccggtttcttggatctgtacacggacagggagccagggtgcggganctgtaagtactctgcgagggaacaggttttgggagaggtgaagcggttgatggagaatatgcggacgagg

SEQ ID NO: 281639 - DNA, 274 bp, Glycine max
  unsure (1)..(274): unsure at all n locations
gtgagctataagctagtttatcgtgaggagaatatgaagttgtttgttttctttgttgctgcngtagttttggnagcatggccatgccatggcgcaggctaccanaggttccctctccgaatgaaaactggctatggtgagcgtcttcggaggtaaaatgcgcaagttttaggcttgctgtggnggcacacaacatccgagcncttaaaaccattcctgaagagtgcgttgaaccaacaaaggactacattaatggcgaacaatttagatcaga

SEQ ID NO: 281640 - DNA, 279 bp, Glycine max
  unsure (1)..(279): unsure at all n locations
aactcaacaggccccctgatcagcgtcgcgcactcatcngaggtcttacaactcagctcccttaaatatggtngcatcaagaccaccagagcaagggccagtgcaattcggaagtatgttgataaaatgatcactttggcaaaggatggttctcttcataaaaggagacaagcccttgggttcatctatgagaagcaaattgttcatgctttatttgcagaggttccagaacgttatggtgaaagaaatgggggttatacaagattataagaaccctnc

SEQ ID NO: 281641 - DNA, 280 bp, Glycine max
  unsure (1)..(280): unsure at all n locations
cgttcttcttcttttgttgttctgtgtttgtgtttgttttttctctcacctgaaaatgtcttgctgcggtggtaactgtggttgcggaatgtcctgcaagtgcggcaacggctgcggaggctgcaagatgtacccagacttgagctacactgagtcaaccaccaccgagaccttggtcatgggatntggcacctgttaaggctcaatttgagggtgctgaaatgggtgtgcccgctgagaacgatggctgcaaatgtggaccaaatgctcctgcaacccc

SEQ ID NO: 281642 - DNA, 274 bp, Glycine max
cgatgatgtagaagatgattttgaaaaggataagcaggagatcctcaacgaagaaaatcctgagccagagaagcctctattacttcctggctggggccagtggacatgtacagcaaaagaaaggtttaccatcttggatgctgaaaaaacatgaagatgcccagaaaaaaagggcagaagccctcaaacagaggaaggatgctcagctaaataatgtgattatatctgagaaaatagacaagaaggctgagaaactacatactaaatcattgcc

SEQ ID NO: 281643 - DNA, 277 bp, Glycine max
  unsure (1)..(277): unsure at all n locations
gaaattttaattgacttttctcccctcataaaaaaaacctaccaatggctcccgcaaaggcagagaagncgcccgcggagaagaagccggcagagaaggccccagcggagaagaagccgaagggnaggaagaagatatcgaaggaaggaggaagcgagaagaagaagangagaacaaagaagncncttgaaccctacaagatctacatcttcaaggtgttgaagcaantgcncccngacatcgggatctccagcaaggctttggggtcatgannant

SEQ ID NO: 281644 - DNA, 270 bp, Glycine max
  unsure (1)..(270): unsure at all n locations
gtagtgtggcagcgacacgtatcaacttcaataatcgcatcgcagnagcagtttccggtgcatctcatcgtctccgaaaatgaacgacgcagatgnctcgaagcaaatccagcagatggtgcggttcatccgccaggaagctgaggaaaaggccaacgagatctctgtctccgccgaagaggaattcaatatcgagaagctgcagttggtcgaagccgacaagaagaagatcaggcaagaatacgaacgcaaagagcgccaattgaaatt

SEQ ID NO: 281645 - DNA, 273 bp, Glycine max
  unsure (1)..(273): unsure at all n locations
ccccgacgaaggcaaggggtttttctcgggcttcttcagatttctgaaatggcgcctgtttcagctttagccaagtacaagctcgtcttcctgggtgaccaatccgtgggcaaaaccagcatcatcactcgcttcangtatgataaattcgataacacctatcaggctacaattggtattgattttctatcaaaaactatgtatcttgaagatcgaactgttcgactgcagttgtgggatacagctgggcaggaaagatttagaagtcttatc

SEQ ID NO: 281646 - DNA, 272 bp, Glycine max
  unsure (1)..(272): unsure at all n locations
atgataagcaagttatgatgttctcagcaacactcagcaaggaaattcgcccagtctgcaagaaatttatgcaagatcctatgganatttatgttgatgatgaggccaagttgacacttcacgggcttgtgcagcactactcaaattgaaagaggaggaaaagaatcggaagttgaatgatcttcttgatgcactggactttaatcaagttgtgatcttcgtgaaaagtgttagcagagcagctgagctggacaaactacttgtggagtgca

SEQ ID NO: 281647 - DNA, 271 bp, Glycine max
  unsure (1)..(271): unsure at all n locations
caaagctgcacaacaagcttctgaagagtggtaccggaaagcnccaacttgctcttgcagaaaggtgaagaagatcttgctcgtgaagcacttaagaggcgtanatcttatgcggataatgccagttctttgaaggctcnacttgatcaacaaaagactgttgttgagaatcttgtctctaatacaaggcttttggagagtaagatacaggaggcaaggtcgaanaaggatactctcaaagcnagagctcaatcagcaaagactgcnaccc

SEQ ID NO: 281648 - DNA, 268 bp, Glycine max
  unsure (1)..(268): unsure at all n locations
gcaacctgactgggacatgtttcatagtttacacccagcagcagattatncatgctgcagctcgtcacnattggtggatgtcctatttatgttagtgacaagccaggcaatcacaattttgatcttcttaagaagctggttctcccggatggttcggttctccgtgctcagttacctggcaggccaactcgtgattctctatttgtggatccagccagagataggactagcttgctcaaaatatggaacctgaacaaatgctctggag

SEQ ID NO: 281649 - DNA, 268 bp, Glycine max
gagagagtgaggcttcttctacccagatttgtttcattttaaccaaagaagaatctctcacaaatggcgtcaagagcaattgttcaacaacaacaagccagaggtgaagcagtagtagggggaggaaaacagcagaagaagaacggtgttgcggatggaaggaaccgcaaggcattgggtgacattgggaatttggccaatataagaagtgccgttgaagtcaagccaaatcgccctatcacaaggagttttggtgcgcaattacttg

SEQ ID NO: 281650 - DNA, 266 bp, Glycine max
gcacactgtcacaggtgtagcggcgaaactgaggtcgtagaaagaatggcgaaaacgacgtcgttgttgctctttacactgctcctcttcggaaccttagctctcatccaggcgaagaaatcgaaggaggatttgaaggaagtgacccacaaggtttactttgatgttgagattaatggaaaagaagcaggtcgtattgtgatgggtctttttggaaaggctgttccaaaaactgcagaaaactttcgagctctttgcactgggga

SEQ ID NO: 281651 - DNA, 270 bp, Glycine max
  unsure (1)..(270): unsure at all n locations
cctctctctgcatcgctgcgttttccgaatcgaaaggtgaggttagtaagtaacaatggtggagaaggccaagggtaggaaggaggaggttgtcactcgagagtacaccatcaacctccacaaangcttgcatggctgcacatttaagaagaaggctcctaaagcaattaaggagataaggaagtttgctcagaaagcgatggggacgaatgatgtaagagtggatgtgaagctcaacaaggctgtgtggagccagggatccggagcgtc

SEQ ID NO: 281652 - DNA, 265 bp, Glycine max
  unsure (1)..(265): unsure at all n locations
atacaacctcatggaggatgctgcnactgctgagatcagcagggtgcagaattggcagtggctcaagtatggagtggagctcaatggggatggtcttggagtgaaagtgaacaaagaactttttggtagggttgtgaagaagagatggctaggattgaaaaggaagtggggacagcgaagttcaagaagggaatgtacaaggaggcttgcaagatcttcactcgccaatgcacgtcaccaatgcttgatgattttctcactctgg

SEQ ID NO: 281653 - DNA, 261 bp, Glycine max
  unsure (1)..(261): unsure at all n locations
gaagatgccgatcagaaacatcgccgtcggaaggcctgaagaggcgactcaccccgacacgttgaaggcggctttggctgagttcatctcaaccttcatcttcgtgttcgccggctcagggtccggcatcggctacnacaagttancgaccaacggcgctgcaaccctgtcggcntcatctcngcntccatcgccaatgcnttcgccctcttcgtngcgtctccgtcggcgccaacatctcggcggccagtcaaccccgcg

SEQ ID NO: 281654 - DNA, 264 bp, Glycine max
ctccatagctgcagcattagggtttttcatctgcttcaatggggaagggaacagggagttttggtaagagaaggaacaagactcacactctctgtgtgaggtgtggccgccgcagcttccatctccagaagagtgttgcgccgcttgtgctttccccgccgcacgcactaggaaatataactggagcgtcaaggcaatccgcagaaagaccaccggaactggcaggatgaggtacttgcgtaacgtgcctcgccgattcaagag

SEQ ID NO: 281655 - DNA, 265 bp, Glycine max
  unsure (1)..(265): unsure at all n locations
atttaatgaaaccttatatgatgaatgggttaacaagggcgacgcaccggcattgncagagactcttaaaaattacaacaagctgttgtctcttggcttcaagattgtattcttgtcaggaagatatcttgacaaatggccgtaacagaagcaaacctaaagaaggctggcttccacacatgggagcagttaattctcaaggatccacatcttatcactccaaatgcactttcatacaaatcagcaatgagagagaatctgttga

SEQ ID NO: 281656 - DNA, 265 bp, Glycine max
  unsure (1)..(265): unsure at all n locations
gtagttgagaactaagaagaaggaaatggcttcctcaatgatctcctccccagctgttaccaccgtcaaccgtgccggtgccggcatggttgctccattcaccggcctcaaatccatggctggcttccccacgaggaagaccaacaatgacattacctccattgctagcaacggtggaagagtacaatgcatgcagntgtggccaccaattggcaagaagaagttcgagactctttcctacttgccagacctcgatgatgcccaa

SEQ ID NO: 281657 - DNA, 262 bp, Glycine max
  unsure (1)..(262): unsure at all n locations
gggacgacggtttttggtgcaagcaaacgctcgtgaactcgccgccgtgctctccgccgggaataccaagcgcccctggctgacctggagccaccaccctgtcacccacccgcggctccggtcgggttgctcgngatgagtgattacgggtgcaatgttccggcgccggatgctcacccggcgagtcagtttatgtcggagtggtttgatatccggggcgggtttccgggtccggatatgaggctttgttctcattcgggtt

SEQ ID NO: 281658 - DNA, 265 bp, Glycine max
  unsure (1)..(265): unsure at all n locations
ggacttgcctaggactanncgaaggtctttataggttcaaaggttcagtgacnacatcagttgttagaggttgtgctttttctccacaangctgatgttatatggatangagactgcaagcccaaatgtggttgaggcacagagttttccganggggttaggtcaaagcaccctcagatgatgcttggatacaacnnctctccatctttcaactgggatgcctctggaatgagtgatgaacaaatgaaggattcattccacagat

SEQ ID NO: 281659 - DNA, 265 bp, Glycine max
  unsure (1)..(265): unsure at all n locations
gttcgtcaccatgactttcaagcgcaggaatggaggtcgcaacaaacacggccgcggccacgtcaagttcattcgatgctccaactgcggcaaatgctgccctaaggacaaggctatcaagaggtttctggtgaggaacattgttgaacaggctgcagtcagagatgtgcaggaggcttgtgtctacgaacaatacacgcttccgaagctgtatgtgaagatgcatattgngtttcctgngctatccatctcatgttgtgagggt

SEQ ID NO: 281660 - DNA, 260 bp, Glycine max
  unsure (1)..(260): unsure at all n locations
gattaactctttcttctcataactctgccgccgcaacagccccaaatccaatggcttcngagaagaaactttcgaacccaatgagggagataaaggtgcagaagctcgtcctcatatctccgttggcgagagtggagatcgtcttaccagagccgctaaggtgttggaacagcttagtggccaagcccctgtgttttcnaaagcanggtacacgnttcgtnctttggtagaagaangngaagntngcntgctatgtcntg

SEQ ID NO: 281661 - DNA, 255 bp, Glycine max
  unsure (1)..(255): unsure at all n locations
aacggtctctcactacaacaatcactatgatgactcgggctttttctggttccggtttttgtgtgggcttttggtgtttttattggggatggggattaatgtatgggctatagggttttgttgcggctcaagagcgagggaaagggctacgtggtgccgcgcggtgggttgttcgagctcgtggcgtgtccgaattactttggggagattgncgagtggcttgggccgtgatgacttggtcatgggcngggctgg

SEQ ID NO: 281662 - DNA, 261 bp, Glycine max
  unsure (1)..(261): unsure at all n locations
ggcctgaagaggcgactcaccccgacacgttgaaggcggctttggctgagttcatctcaaccttcatcttcgtgttcgccggntcaggctccggcatcgcctacaacaagctaccgacaacggcgctgccacccctgccggcctcatcncagcctccatcgcccatgcattcgccctcttcgtcgccgtctccgtcggcgccaacatctccggcggccacgtcaacccgtcaccttcggcgccttcgtcggcggcaacatc

SEQ ID NO: 281663 - DNA, 257 bp, Glycine max
  unsure (1)..(257): unsure at all n locations
cgtcgcgtgtactttcttgcgaaacagaagggcgaaggggcaaacacaacttttttgtttttttgtagagcgagagagaaaaaaatgttggggatcttcagcagttccgtggttcgccnccggaggagctggtggctgccggcagcagaacgccgtcgccgaagacgacggcggggaagctgctgaaccggttcgtggagaacaagtatcggcggtgtcgctgcgggagaacacgtgcagttggcttacacgcacca

SEQ ID NO: 281664 - DNA, 258 bp, Glycine max
  unsure (1)..(258): unsure at all n locations
cagtcattgggacttgactttcctaagaacattagtgtaattgctgtgtgcccaaagggaatgggtccatctgtaaggaggcnctatgtccaaggcaaagagataaatgggctggaattaatgcaagttttgcagtccaccaggatgtagatggcagggctactgatgttgctttgggatggtccgttgcccntggttctccattcacttttgccactacattacaggagtacaggagtgatatctttggggagagag

SEQ ID NO: 281665 - DNA, 258 bp, Glycine max
  unsure (1)..(258): unsure at all n locations
agagagtgaggcttcttctacccagatttgtttcattttaaccaaagaagaatctctcacaaatggcgtcaagagcaattgttcaacaacaacaagccagaggtgaagcatagtagggggaggaaaacagcagaagaagaacggtgttgcggatggaaggaaccgcaaggcattgggtgacantgntgctttggccaatataagaagtgccgttgaagtcaagatcgcnctatcacaaggagttttggtgngnaatta

SEQ ID NO: 281666 - DNA, 258 bp, Glycine max
cagaaattagaacagtgggtcatggagacaaatctgaagaaccatggtggccaaatctcaaaacaccaaaagaccttattgacatcatcaccaccatagcttggacagcattgctcatcatgcagctgttaactttacccaatatacttatggaggctattttcctaatcgaccgaacattgttagaaccaaaatacctacagaagatccttctaaggaagagtaaacttttctaaacaatcctgagcaaactctttt

SEQ ID NO: 281667 - DNA, 257 bp, Glycine max
gccaatgtccagaaactggggtcaaaattggcaaagcaacaactatctcaatggccaaagcctctcattcaaggtcaccactagtgatggccgtacagtggtgtcctacatgttgcccctgctggttggtccttcggccaaacctacactggtgctcaattccgctagagaggccttaataattgttcacaagttgaagttccaaatatatttagttacactatggtatatgctataattcctcaatttaagtgtta

SEQ ID NO: 281668 - DNA, 262 bp, Glycine max
  unsure (1)..(262): unsure at all n locations
gttgattttggcctctatttctaccacagctactcagacattccggcgcactcaaggtgctggctttggccctttcttttatcttcccaagatggagcattcaagggaagctagatttggaacaatgtgttggagaaagctgaaanggtagncaggcntcgaaagaggaagcatnngggnaantgtnctgatagaaacacttcctggcagtgtcanaaaggaatgnntgtntgaantgaaggcacattccagtgggttngaa

SEQ ID NO: 281669 - DNA, 253 bp, Glycine max
actttctgttgtcttgaccaaaattaacatggttgatttgccattgggagctacagaagatagagtgtgtggaacgattgacattgagaaagccctgactgagggtgtcaaggcatttgagcctggactactggctaaagctaataggggaatcttatatgttgatgaagttaatcttttggatgatcacttggtggatgtgttgttggattctgctgcggatggaacacagtagagagagagggaatttcta

SEQ ID NO: 281670 - DNA, 254 bp, Glycine max
  unsure (1)..(254): unsure at all n locations
cttccttttctcttctctgtctaaggggtgccctgagatcacaattgaacaatggtgaaggctgtggccgttcttggcagcngtgagggtgtcactggaactattcattcgttcaggagggaagtggtccaaccaccgtaactggatctcttgctggtcttaagcctggtctccatggtttccatgtccatgccttgggggacactaccaatggttgccaactggatcacatttcaatcctaatgaacaaggag

SEQ ID NO: 281671 - DNA, 257 bp, Glycine max
  unsure (1)..(257): unsure at all n locations
caaactaggtgcttgtgtggatcttcttggtggcttggttcacattggcttgggagaccctgttgcgaaccagtgctgccccgtgcttcaaggcctggttgagcttaagctgcggtgtgtctttgccttcactcttaagctgaagcttctcaacctgcaacatttatgtcccacttgncccttcagcttcttgtggcttgtggcaagtctcctcctcntggtncctgctccctctaaaccagtgaaaggattgagga

SEQ ID NO: 281672 - DNA, 251 bp, Glycine max
  unsure (1)..(251): unsure at all n locations
gcgagaagcccaaggaagagcccgaaaaaaagaaggacggtggggagaagcctaagcccgggcccgagaagcccaaggataagccaacacccgcgccgttacctgtgcagcaacatatagcggcaccgatggcggtcccagttgggatgctctatgctcctcctccgtgctacggaggcaggcccgttgggctgggctannagtaggtgggcccatgtgttacgacggttactatgcaaggcccgtttacg

SEQ ID NO: 281673 - DNA, 249 bp, Glycine max
  unsure (1)..(249): unsure at all n locations
aagtttgagactctttcctacctgccagaccttgatgatgcacaattggcaaaggaagtagaataccttcttaggaagggatggattccttgcttggaattcagttggagcacggtttcgtgtaccgtgagcacaanaggtcaccaggatactacgatgnnccgctactggaccatgtggaagctgcctatgtttggttgcactgatgcttctcagtgaaggagcttcaagaggctaagacngcatacc

SEQ ID NO: 281674 - DNA, 252 bp, Glycine max
  unsure (1)..(252): unsure at all n locations
gtcgactttttctcggcaggaacagactccacagcggtggcaacagagtgggcattggcagaactcatcaacaatcctaaggtgttggaaaaggctcgtgaggagtctacagtgttgtgggaaaggacagacttgtggacgaagttgacactcaaaaccttccttacanagagcaatcgtgaaggagacattccgcatgcacccgccactcccagtgaaaagaaagtgcacagaagagtgtgagattaatgg

SEQ ID NO: 281675 - DNA, 250 bp, Glycine max
  unsure (1)..(250): unsure at all n locations
gtgagctataagctagtttatcgtgaggagaatatgaagttgtttgttttctttgttgctgcagtagttttggtagcatggccatgccatggcgcaggctaccaaaggttccctctccgaatgaaaactggctatggtgagcgttcttcggaggtaaaatgcgcaagttttaggcttgctgnggaagcacacaacatccgagcctttaaaaccattgaagagtgcgttgaaccaacaaaggactacatta

SEQ ID NO: 281676 - DNA, 248 bp, Glycine max
cgaggtcaaagagagggaaaacaagcaagaatacaacctactctgtgattggataaaacaacaacttggtgacaaggtggccaaagttcaaatctcaaagccttgagttcatctccctgtgtgcttgtatcagggaagtttggttggtctggcaaacatggagagactaatgaaggcgcaagcccttggggacactgcaagtttggagtttatgaggaggagatattggaaattaatacagatcaccc

SEQ ID NO: 281677 - DNA, 248 bp, Glycine max
  unsure (1)..(248): unsure at all n locations
ctctcttccctctcaccaatctgcaggatttgaaaaatggcagantccaaagctggattgaggaagccagtgtttaccaaggttgatcagcttcgcccgggaccagcgggcacactttaantgtgaaggtggtcaatgctaagatggtgatgcagaaaggtcgttctgatggtcctcaatcccgtcagatgcgaattgctgaatgtttggttggtgagactggaatgatcatattcactgccagaaat

SEQ ID NO: 281678 - DNA, 249 bp, Glycine max
  unsure (1)..(249): unsure at all n locations
ctttcttccaacctctcaagtccaacctacccctttttcttctcncaccancttcaccgtcntcttcctcgancatgtctcacttcaagggcaagtaccatgtgagcttattgccaatgcnncttacattggcactcctggaaagggtattcttgctgctgatgagtcaacagggacaattggcaagcgtttggccagcatcagtgtagagaatgaatccaacaggcgtgctcttagggagctgctttt

SEQ ID NO: 281679 - DNA, 248 bp, Glycine max
  unsure (1)..(248): unsure at all n locations
ccgcagcaagtgatcgaagcgaaaagagagaaattcatcgtcgcagtaatcatgggtaaggttcatggatcacttgcacgtgctggtaaggttagagggcaaccccgaaggtggccnnnnnnnnnnnnnnnnnnnnnccacgtggccgcgcccacaagaggatgcagtacaatcgccgattcgtcaccgccgtggtgggattcggcaagaagagggccaatcgtctgagaagtgaggccgaggttgag

SEQ ID NO: 281680 - DNA, 250 bp, Glycine max
  unsure (1)..(250): unsure at all n locations
aacgcaaccaaagccttagcaaaggcatggtagcctcaagcatccttgagccaggagggtttttgggtgacgagctgctttcatggtgccttcgcaggcctttatcgatagacttccggcctcctcggctacatttgtgngtcttgaatcntcagaagcctttggccttgatgccaattcattgaggtacntcactgatcactnccggtancaatgngaccgagaggcngaagagaacagcaagnttttt

SEQ ID NO: 281681 - DNA, 246 bp, Glycine max
  unsure (1)..(246): unsure at all n locations
caaagttcaaatctcaaatcgcttgagttcatctccttgtgtgcttgtatcagggaagtttggttggtctgcaaacatggagagactaatgaaggcacagcccttggggacactgcaagtttggagtttatgagggggaggagaatattggagattaatgcagatcacccaattatcaaagacttaagtgctgcctgcaagaatgcacctggctncgaactanaggcgagcagttgacctcttata

SEQ ID NO: 281682 - DNA, 208 bp, Glycine max
  unsure (1)..(208): unsure at all n locations
ttctgaccatggctgcatcattatttatgcnttcatccatagtggacgaagaagcgagtttgaagccgaagtccncggangtgcaagcatggtggaactctgagaggttcaggctaacaaaaagaccatacacagncncgagatgtggtgtccctccgaggcaacctcagacaaatgcctcgaacgagatggcgaaaaagctctggtg

SEQ ID NO: 281683 - DNA, 246 bp, Glycine max
  unsure (1)..(246): unsure at all n locations
aaggtgagttttgtgaagaatggagagcttagattgcctccggggtttcgtttccacccgactgatgagcngctggttttgcagtacttgaagcgcaagtcttctcctgnccctctgccagcctctatcattcctgaggttgatgtttgcaagtctgatccttgggatttgccaggtganncggagcaagagagatacttctttagcaccaagccaaatatcccaacggaaatcgctctaacagag

SEQ ID NO: 281684 - DNA, 248 bp, Glycine max
  unsure (1)..(248): unsure at all n locations
ccaaaaacacattcgtgcaaggaaaacccttccttccagttccagcagctcccactaaaaatgttcggagagtggttcagtgcggtgtgtggtgcaggaaaaggagatacacccgcaattccacgaggaagcgaaggtgtactgcaacggggagctggtgctgacgacaggtgggacccagaaggagtacgtggtcgacgtgtggtcggggaacctttctacctcgnaagccggtcggcgtctatggt

SEQ ID NO: 281685 - DNA, 250 bp, Glycine max
ctctttttgtttcttcagtttggtataaccttagccgaggtcacgaggagcactagctagtttcacaatttccaaatggctaggggattgaagaagcatctaagaggctcaatgctcctaagcattggatgcttgacaaactgggtggtgcatttgcgcccaaaccctcatctggaccacacaaatctagggagtgccttcccctcatactcatcgaaaccggctaaagtatgctctgacttaccgtgaa

SEQ ID NO: 281686 - DNA, 247 bp, Glycine max
  unsure (1)..(247): unsure at all n locations
atgagattgatcctttgcaaaagcctaaacaagaccgctatgcacttaggacttcaccacaatggcttggtcctcaaattgaagtgattagattctcncaccaagtcaattgagagggagataaactcagtcaatgacaaccctttgattgatgtctcaaggaacaaggcccttcatggtggtaacttccaaggaacacctattggagtgtccatggataacacccgtttggctcttgcatcaattg

SEQ ID NO: 281687 - DNA, 251 bp, Glycine max
  unsure (1)..(251): unsure at all n locations
gggcggcttgatgggcaagggctacgactacttcgagcgcggcaacctcgacatcttcagcggaaggggaccctgtcttgacggacccgtctgtgccgttaacgttactnctgacggatcgggttctcaccagggctggtacctnaactacgtccaggtcacctcnaagtgggcccccactttctggcgctcaggatnagtacgaggtggaacagtggctcgatctaaaaantcngctaaacnangggggg

SEQ ID NO: 281688 - DNA, 242 bp, Glycine max
  unsure (1)..(242): unsure at all n locations
ctcagaagaaaaaaagtgagagatggagaactttcccgtgatcaacttggagaatctcaacggtgaggagaggaaggctacccttaaccagattgaagatncttgccagaactggggattttttgagttggtgagtcatggaataccccttgaactattggatactgtggaaaggttaacaaaagagcttatnggaatgcatggagaagaggttcaaggaggcntntcaancaangggttag

SEQ ID NO: 281689 - DNA, 253 bp, Glycine max
ctttggtcttcatcttctgttctgatccaggtatggcttctaaacgcatcttgaaggagctcaaggatttgcagaaggatcctcctacctcatgcagtgcaggccctgtggctgaggacatgtttcactggcaagccacaatcatgggacctgctgatagcccatatgcaggtggtgttttcctagtttcaattcattttcctcctgactatcccttcaagccaccaaaggttgcttttcggactaaggtgtt

SEQ ID NO: 281690 - DNA, 255 bp, Glycine max
gccattaacgggggctccttcggaccaaaaagtgatagaagaaagtgataaaaagattgagaaggtgctggatgtttatgaggagaggctgtcaaagagcaagtacttggctggtgacttcttcagccttgctgatcttagccacctcccatttggtcactatttggtgaaccaaaccgggagaggaaatttggtcagagacaggaagcatgtgagtgcttggtgggatgatattagtaacagacctgcttggca

SEQ ID NO: 281691 - DNA, 242 bp, Glycine max
  unsure (1)..(242): unsure at all n locations
gcgcggaactacagctacagcttggaggtgggaggaaatggacgtaaactaacttttgaggggagtccaagangcattngagatagccataagaaggtaanagacagccatgatggtctcatcatttaccgcnacatggcgcttttcttctcgggtggagacaggaanganttnannccncgantancangacggntntggaaagaccagcaanacccggaaggtggatntgcanacntnnc

SEQ ID NO: 281692 - DNA, 251 bp, Glycine max
  unsure (1)..(251): unsure at all n locations
agcagcggcaacagaggagagaagatgaagttcaatccacgagtgtcgagcagccgccgcaagagccgaaaggctcacttcacggcgccgtcgagcgtgcgganagtgctnatgagcgcccctctgtcggcggagttccggtcgaagtacaacgtgcggtcgatcccagtccgcaaggaggacgaggtnnaggtggtgcgcggaanatanaagggncncgngggnannnnaacgagtncncccacngannt

SEQ ID NO: 281693 - DNA, 242 bp, Glycine max
  unsure (1)..(242): unsure at all n locations
aaaatattgtacacataaatctagctccaattcctaatcacctggttnatttcttcacatagagctatcaagatccaacgttaacatgaagaatgttttagtaaggtcagctgcgcgagctctgcttggcggcggtgggcggagtactaccgccagctctcaacggcggcgatcttggaacagagnccnaancaggggggggcccctttggaancncccatgggggaggnncctccactccc

SEQ ID NO: 281694 - DNA, 240 bp, Glycine max
  unsure (1)..(240): unsure at all n locations
gccgtcaccactccaacactggttctcttgagcgggatnaagtatttgtgccaaagcagaagtcctgtatcaagtggtactctaaatacctcncacaatcctccaggcagagtcctcactcttgctgtcaccctcacacttggttggccctgtacttggctttaaatgtttctggaaggccttatgatagatttgcttgccactatgacccatatggtcccatttactctgatcgtgaac

SEQ ID NO: 281695 - DNA, 251 bp, Glycine max
  unsure (1)..(251): unsure at all n locations
gcaaaaggncatataatttntttnaaaaatgaaataatgtcagggatcatccacaagattgaggagaccctccatgtgggagggcacaaganagaggngcacaaaggngaacaccatggtgagcacaaaggtgnacacaaaggaganncccatgncgagcgccaaggtgancacaaaggagaccaaacaccatggggagcacaaggagnnacttnnnnnncagntnnnngnccggatccatggtgatggcc

SEQ ID NO: 281696 - DNA, 236 bp, Glycine max
  unsure (1)..(236): unsure at all n locations
gtgggcanagcgaggaggaggcaaccctcaacctcaacgccatgaacaagtcccagggaaanaagccgtggtccctttctttctcttttggaagggcacttcagcaaagcactctcaaggcatggggtgggaaagatgaaaacttaagaaggctcaggatgctttattngcnaggtgcaatgcaaactcacatgnattttgggaattacaaggtnatcntaccttgctgngggtnc

SEQ ID NO: 281697 - DNA, 243 bp, Glycine max
  unsure (1)..(243): unsure at all n locations
ttggaatccaaaaatgagagaaatcatcagcattcacataggtcaggccgggatccaggttggcaactcctgctgggaactctactgcctggaacatggcatccagcccgatggcatgatgccaagtgactcctccttcggtgtagcccacgacgccttcaacaccttcttcagcgaaaccggattgngcaagcacgtccctcgcgccgtcttcgtcgatctcggagcccaccgtanatcgag

SEQ ID NO: 281698 - DNA, 249 bp, Glycine max
  unsure (1)..(249): unsure at all n locations
gttgactattctctacaaaccacaaagacattggaacactatacctattattcggngcatgagctggagtcctaggcacagccctaagcctccttattcgagccgagctgggccagccaggcaaccttctgggtaacgaccacatctanaacgttatcgtcacagcccatgntttgtaataatcttcttcatagtaatacccatcanngncggaggctttggcaatgnacnaccccnanagngngngcc

SEQ ID NO: 281699 - DNA, 248 bp, Glycine max
  unsure (1)..(248): unsure at all n locations
tttcacaaatgagctttgagaaaacatttggtttgtccactgnnttcattgaatctacactaatgganaatggagggcttcctgaatctgctgatccctcaatgctgatcaaagaggccattcatgttattagctgtggatatgatgagaaaactnnngggggaaaaaganattggttggntcnatggttcagttactgaggtaccntaacggggtcccaacannnaangccggnntgaagttcacnc

SEQ ID NO: 281700 - DNA, 246 bp, Glycine max
  unsure (1)..(246): unsure at all n locations
attggatatgctcttgtccctatgattgctaggggagtgatgctgggtcctgaccagcccgtgatcctccacatgcttgacattcctcnagcagnagaatcgngaatggngttaaaatggaatnggnggatgctgcatnccctcttctnaaaggtgttntngctacaaccgatncggttgaggcatgcactggggtcaatattgcagtgatggttggagnanatcnaganaagnaggtatggagag

SEQ ID NO: 281701 - DNA, 240 bp, Glycine max
  unsure (1)..(240): unsure at all n locations
cttgatattgctcgccaaaagctgattgatgagcttctaacctttagcatgcttagagaggtcaaaatcgttgttgtcttngatgcaatgatgtctggactccccactcacaaggaagatttcgctggtctngatatcattttnnnnaggngaaacatgtgctgacacatggattgaaaaagaggttgcnagctttaaaggaggatggttgccccaaagtctgggtagagnaatctgatc

SEQ ID NO: 281702 - DNA, 241 bp, Glycine max
  unsure (1)..(241): unsure at all n locations
ggtgggcagagcgaggaggaggcaaccctcaaccttcaacgccatgaacaagtcccagggaaagaagccgtggtccctttctttctcttttggaagggcacttcagcaaagcactctcaaggcatggggtgggaaagatgaaaacattaagaaggctcaggatgctttatttgccaggtgcaatgcaaactcacatgcaatttgggaattacaaaggtgatgctaccccttgctgngggnc

SEQ ID NO: 281703 - DNA, 240 bp, Glycine max
  unsure (1)..(240): unsure at all n locations
gctcgatttgctctctgttcatgaaacctcgcaggagccattgcctgagtcgncggatgatattaactctgcccattcgttgagcgttgaggctgcttatatcaaccagaatttctctcagcaggtgcttattagggatgggaataaggttacttttgatgaggctaacccttttgctaatgaaggtgaggaggttgcttctgtcgctataggtataggaggtggaanntganatanaat

SEQ ID NO: 281704 - DNA, 245 bp, Glycine max
ggcccagcagcatcagaatcgcagcaacaccctgagcttccttgggccgaagcccatccccatgaagcacgcgggcatgcctccgaagcccacgaagctttacagaggggtgagacagaggcactggggaaagtgggtggctgagatcagacttcccaagaaccggaccaggctgtggctgggaaccttcgacaccgccgaggaagccgctctggcatacgacaaggccgcgtacaagctccgag

SEQ ID NO: 281705 - DNA, 258 bp, Glycine max
gttgtagctgaagctctcaccacagccattcaggttggatacaggcatattgactgtgctagtgcgtataagaatcaagcagagattggttctgctcttaagaagctttttgatgatggtgtggtgaagcgtgaggacttatggatcacttccaaactctggtgttcagatcatgcaccagaagatgtgccaaaagcattggataaaacattacaggaattgcaacttgactatcttgacctctatctgatccactgg

SEQ ID NO: 281706 - DNA, 257 bp, Glycine max
gacttggaagacaagcttcatccgggtggtccattcgacccattgggactagcaaaggatccagaccaagctgcacttctaaaggtgaaggaaattaagaatggtagactagctatgtttgcaatgcttggtttctacttccaagcatatgtcactggagaaggtccagttgagaacttagcaaaacatctcagtgacccttttggtaacaacttgctcactgtgattgctggctccgctgagagggctccaactct

SEQ ID NO: 281707 - DNA, 255 bp, Glycine max
gatcgagataactagaaacagtgtgatgaaaatgaaggtccttgttttcttcgttgctacaattttggtagcatggcaatgccatgcgtacgatatgttccctctccgaatgaacactggctatggtgcccgtactccggaggtgaaatgcgcaagttggaggcttgctgtggaagcacacaacatctttggctttgagaccattcctgaagagtgcgttgaagcaacaaaggaatacatccatggcgaacaata

SEQ ID NO: 281708 - DNA, 253 bp, Glycine max
attgtgttggccagagctggtgcacagtgacagtgtctcctgaaatttttggaggagatccttgtccaagtgtcatgaagaaactctcagtggaagccatttgcacctgatcattttcaatctccgaaaataagtggaataaagtttccatattgatttattctgcaattgaatacatggtctttgggtcaaagtttacacctgtagaccaccagaggcattaatttggcttaccaaggtgaagttgcaaatg

SEQ ID NO: 281709 - DNA, 253 bp, Glycine max
  unsure (1)..(253): unsure at all n locations
ggtttagtgtcaaatggcggcgagtagaagcacttttcctctgatgaaatacttgagagtgcgcgtcgacgctcttccccgcaacactcccttaaccctcgctcccaactttttgattcgccgnttctgtgaagaggttaggggttgttttctcgacaagtctgaggtcacagatcgcgtnatttcctgcgtcaaaaacttccagaaagttgatccttcaaaggttaaccctaatgctcacttccagaatgac

SEQ ID NO: 281710 - DNA, 254 bp, Glycine max
agatgagtacgttggatgcaacaagggctgaacttggtcttcttgttttatatttgggcaaggctgaagcaagggacaaaatatgcagggcaatacaatatggttccaaatttttgagtaacggggaacctggtactgctcagaatgtcgacaaaacaaccagcttggcacgaaaagtcttccgtctttttaagtttgtcaatgacctacatgctttgataagtccaacaccacagggcactcccctcccccta

SEQ ID NO: 281711 - DNA, 256 bp, Glycine max
  unsure (1)..(256): unsure at all n locations
caggaatcctttgtgtggaattgtattttcccggaaaatgttggagggtactgacttgggaacagaacagaaacaacttctgcgcactagtgctcagtgccagcagcagcttagtaaaattcttgatgactcagatcttgacaccatcatagatggttacttggatcttgagncggctgagttcaccctgcatgaagttctggttacctcccttagtcaagtcatgacaaaaagtaatggaaagagtatccgaata

SEQ ID NO: 281712 - DNA, 249 bp, Glycine max
  unsure (1)..(249): unsure at all n locations
tatttttcaatggcttctgcagatgttgagttccgttgctttgntggtgggcttgcttgggtcaccggcaacgatgccctcgagaaagccttttcaatctacggcgacatcgttgaatcgaaggttatcaacgaccgtgagactggaaggtccagaggattcggatttgtgaccttcgcctcagagcagtcaatgaaagatgcgatcgcaggaatgaacggccaggaccttgacggtcgtaacatcact

SEQ ID NO: 281713 - DNA, 250 bp, Glycine max
  unsure (1)..(250): unsure at all n locations
cgagttggagcacggtttcgtgtaccgtgagcacaacaggtcaccaggatactacgatggacgctactggaccatgtggaagctgcctatgtttggntgcactgatgcttctcaggtgttgaaggagcttcaagaggctaagactgcataccccaacggcttcatccgtatcatcggattcgacaacgttcgccaagtgcagtgcatcagcttcatcgcctacaagcccccaggcttctaagtgtgaaaa

SEQ ID NO: 281714 - DNA, 254 bp, Glycine max
  unsure (1)..(254): unsure at all n locations
aggaagtggtatgaaactgaaaagaattttgctgatgagaagcctgcaggcgaggaagatgcacctgaaggaaacaangactgtcctgccaatgaaaatgaagaaaaggagcctgaggacaaggagatgacactggaagagtatgagaaggtgctggaagagaaaagaaaggccctgcaggcacaaaaaactgaagtaagaaaggtggacatcaaggagtttgcatccatgcagccactgtctaacaagaaaga

SEQ ID NO: 281715 - DNA, 258 bp, Glycine max
  unsure (1)..(258): unsure at all n locations
anagagggtagtctttttgaagcagcttccttctggattgcttcttgtaactggtcctttcaaggttaatggagttcctttgagacgtgtgaatcaggcctatgttattggcacatcaaccaaagtagatatctctgctgttaatgttgacagctttggcgacaaatactttgcgaaggaagcccnnnnnnnnnnnnnnnnnggagaaggcgagttcttgaggcagagaaagaggaaaagagtgtgttgccccagcag

SEQ ID NO: 281716 - DNA, 262 bp, Glycine max
  unsure (1)..(262): unsure at all n locations
cttcgttggcacttcgctttttccaaaaccaatcacatcagcatcactctcgtccgccgccgtcgtcgaccaccgcaaganccatcgcactccgccgtcatccgttagggcaaaaatgagtcgaggaagtggaggtggatacgatcgtcacatcactattttctcccctgaaggacgtctcttccaagtcgagtatgctttcaaggctgttaaggccgcaggaatcacctcaattggtgtccgaggaaaggattcgatttgt

SEQ ID NO: 281717 - DNA, 256 bp, Glycine max
ctgcccatgtagccgacatgcagagaagtatgttcgaaggggtaggttggactggccagagggtgcaatctcacgagagagtattaaagctgttatgaagcttccccgactacagaaccttataatgcagcatgttgatcattcagctggagatcttatacatcttttgcaggggctacttagatatgaccccttgaaagacttacagctagggatgctttgaggcattccttctttatgagagatcatcttagga

SEQ ID NO: 281718 - DNA, 257 bp, Glycine max
  unsure (1)..(257): unsure at all n locations
caaagctgaagtgtctgcttcttccgattccggcacgcccccatcaccatggtgaacgttccgaaaacaaagaagacatactgcaagagtaaggngtgcaggaagcacaccctgcacaaggttacccaatacaagaagggtaaagatagcattgctgcccaaggaaaacgccgttacgatcgcaaacaatctggttatggcggacaaactaagcccgtcttccacaagaaggctaagaccaccaagaagattgttct

SEQ ID NO: 281719 - DNA, 253 bp, Glycine max
  unsure (1)..(253): unsure at all n locations
atcttatcttatccctctaatcactctagctgttgcaaatttctactatttttcaatggctnctgcagatgttgagttccgttgctttgttggtgggcttgcttgggtcaccggcaacgatgccctcgagaaagccttttcaatctacggcgacatcgttgaatcgaaggttatcaacgaccgtgagactggaaggtccagaggattcggatttgtgaccttcgcctcagagcagtcaatgaaagatgcgatc

SEQ ID NO: 281720 - DNA, 250 bp, Glycine max
ggcaagatgtcgaagagaggacgcggtggttcggcggggaacaagttccggatgtcgctgggtctgccggtggcggcgacggtgaactgcgccgacaatacgggggcgaagaacctctacatcatatcggtgaaagggatcaaagggcgtttgaaccgtctcccctcggcttgcgttggcgacatggtgatggccaccgtgaagaaggggaaacccgatctgaggaagaaggttttgccagctgtcattg

SEQ ID NO: 281721 - DNA, 252 bp, Glycine max
  unsure (1)..(252): unsure at all n locations
attttaattgacttttctcccctcataaaaaaaacctaccaatggctcccgcaaaggcagagaagaagcccgcggagaagaagccggcagagaaggccccagcggagaagaagccgaagggtangaagaagatatcgaaggaaggaggaagcgnnnnnnnnnnnnnnnnnnnnnnnnnnagcgttgagacctacaagatctacatcttcaaggtgttgaagcaagtgcaccccgacatcgggatctccagca

SEQ ID NO: 281722 - DNA, 247 bp, Glycine max
tcagcagcttaggctagggttcagaaacgaaaaagggttcggtgttcagttcgcgatgagagccaagtggaagaagaagcgtatgaggaggttgaagaggaagcgccgaaagatgagacagagatccaagtagtgcgttaatccaagtagttgatttccgttgcttttataattatgttgtcaaattgggcacccagttgttagaggcactggtttctccttttgatgttttgatacatttttgttt

SEQ ID NO: 281723 - DNA, 255 bp, Glycine max
  unsure (1)..(255): unsure at all n locations
aancccggcctacattgcacctgaggttctttcacgtagngagtatgntggaaagttagcagatgtatggtctgtggagtgactctttatgtaatgctggtgggagcatacccatttgaaganccaagaggntcncaaaaatttcaggaaaaccatcaatncggnttatggctgttcaatanaagnttcnagactacgttcacatatctcaagactgtagncatcttctatctcgcatttttgtggcaaatccag

SEQ ID NO: 281724 - DNA, 249 bp, Glycine max
ggttatcatttctccatttccattttctctctcacttttcaagaatcgtaagctatgggaaagtcttacccaactgtgagtgctgattaccagaaggccgttgagaaggcgaagaagaagctcagaggcttcatcgctgagaagagatgcgctcctctaatgctccgtttggcatggcactctgctggaacctttgacaagggcacgaagaccggtggacccttcggaaccatcaagcaccctgccgaa

SEQ ID NO: 281725 - DNA, 249 bp, Glycine max
  unsure (1)..(249): unsure at all n locations
ggaagtagtcgaggtaggaggcagaggcgcggagaagacgtggttcaccctctncaaggtctctttggaggacctttatcttggaacttccaagaagctctcccnctccagaaatgttatatgctccaagtgcagtggcaagggttctaagtctggtgcttcgatgaagtgtgctggttgtcaaggaactggtatgaaggtttctataagacatcttggcccatccatgattcagcagatgcagcatgc

SEQ ID NO: 281726 - DNA, 248 bp, Glycine max
  unsure (1)..(248): unsure at all n locations
gcagcacgcgcaaaaatggtgaagtttctgaaaccaaacaaagccgtcatgcgtccttgcagggacgctacgccggcaaaaaagccgtgatagtgcgaaccttcgatgaaggcacgcgcgagncccctacgggcactgcttggtggcagggataaagaagtaccctgcgaaggtgatcaagaaggattcggccaagaagacggccaagaagtcgcgtgtgaaggcgttcgtgaagctcgtgaactacc

SEQ ID NO: 281727 - DNA, 184 bp, Glycine max
caaaatcgacatgagaggatgtcgagccacactatctctcttctgtcctgattggaactgctgttgtttgttttgctattatttgaaaaaccaatttgtttttaattgagattgttgcatgtatgttttaatcctaggcaagtagcagcaaagatgcttctctgtgacaaaaaaaaaaaaaagg

SEQ ID NO: 281728 - DNA, 253 bp, Glycine max
aagccaccgtaccgtgttgcctctctgcaatctacagccaaaatgcctttcaagaggtacgttgagatcgggagggttgcccaaatcaactacggcaaggaatatggcaggctcgtcgtcattgtcgacgtcattgatcagaacagagctcttgtcgatgcccctgatatggtgaggtcccaagtcaatttcaaaaggctttccctaaccgatattaagattgacattaagagggtccctaagaagaaagatc

SEQ ID NO: 281729 - DNA, 116 bp, Glycine max
ggaagttctacacttttttgtttggattgatcgagtgtactttttcttttcgagattggcttggtgtgcagtggaaagagggtggaaaagagtggtaagggggagggcggcgcccc

SEQ ID NO: 281730 - DNA, 168 bp, Glycine max
  unsure (1)..(168): unsure at all n locations
caaaatcgacatgagaggatgtcgagccacactatctctcttctgtcctgattggaacngctgttgtttgttttgctattatttgaaaaaccaatttgtttttaattgagattgttgcatgtatgttttaatcctaggcaagtagcagcaaagatgcttctctgtgac

SEQ ID NO: 281731 - DNA, 248 bp, Glycine max
  unsure (1)..(248): unsure at all n locations
gctatgtgcagataaccatgcattaacaagagacgaccaggataactatgcaattgcagagttttgaacgtggaattgctgcccaagaaagtggngccttttcatgggaaattgctccagttgaagtctctggtggaagaggaagaccatcaacagttgttgataaggatgaaggcctaggnaagtttgatgcngccaagttacgcaaacttcggccaagtttcaaggagactggaggttctgttaca

SEQ ID NO: 281732 - DNA, 244 bp, Glycine max
  unsure (1)..(244): unsure at all n locations
gtgatggcaaggggaacttttgccaacattcgccttgttaacaagctcttgaaaggggaagttggtccaaagacagttcacattccancaggggaaaagctttacgtgtntgatgcagcaacgagatacatggcttctgggcaagacaccattgtgctggctggagctgannatggcagtggaagctctagagattgggctgccaagggtccaatgctactgggagtcaaagctgtgatagcca

SEQ ID NO: 281733 - DNA, 245 bp, Glycine max
gtttttgtgtgtcgcttcttcgtaggtgcagctgcaatggtgaagggacgccaaggagaacgtgtcagactctacgtgaggggtacaatccttggatacaaaaggtccaagtcaaaccagtatccaaatacatccctgatccaaattgagggtgtgaatgccaaagaagaagtagcatggtatgctggcaagaaaatggcctatatctacaaggctaaggtgaagaagaatggaagccattaccg

SEQ ID NO: 281734 - DNA, 225 bp, Glycine max
  unsure (1)..(225): unsure at all n locations
agacttagattttgtgaatggctgaagtgnnaagagggacaggtcatcggcgtccacaccgttgatgagtggaagctgcaactccagaatgcaaaagactccaaaaaactgattgtggtggattttactgcttcctggtgtggtccatgccgttttatggccccagttcttgcagagattgcaaagaaaactcctgaattgatcttcctcaaagtggatgtggat

SEQ ID NO: 281735 - DNA, 168 bp, Glycine max
caaaatcgacatgagaggatgtcgagccacactatctctcttctgtcctgattggaactgctgttgtttgttttgctattatttgaaaaaccaatttgtttttaattgagattgttgcatgtatgttttaatcctaggcaagtagcagcaaagatgcttctctgtgac

SEQ ID NO: 281736 - DNA, 250 bp, Glycine max
caggaatcctttgtgtggaattgtattttcccggaaaatgttggagggtactgacttgggaacagaacagaaacaacttctgcgcactagtgctcagtgccagcagcagcttagtaaaattcctgatgactcagatcttgacaccatcatagatggttacttggatcttgagatggctgagttcaccctgcatgaagttctggttacctcccttagtcaagtcatgacaaaaagtaatggaaagagtatc

SEQ ID NO: 281737 - DNA, 247 bp, Glycine max
  unsure (1)..(247): unsure at all n locations
cgaggatgttaggatgatatcagccgaagcaccagtcatctttgcaagggcatgtgaaatgttcatattagagttaaccctgcgttcttggaatcacactgaagagaacaaaaggcgaacacttcaaaaaaatgatttgctgctgcaatcacaaggactgacatctttgatttcttggttgacattgtgcctcgtgaggacttganagatgaagtgcttgcatcaatcccaagaggaacaatgcctg

SEQ ID NO: 281738 - DNA, 243 bp, Glycine max
gatattgctaggggcatgaactatcttcacgaatgcaaaccagatccggttattcactgtgatttaaagccaaaaaatattttgctggatagtggagggcaattgaagatagctggatttggcactgtgagatttcactaatttcacctgatgaagcacagctggtacagcctgagcctaacattgatctttcaagcttgtatgtggcaccggagatttacaaagatgaagtttttgatagaa

SEQ ID NO: 281739 - DNA, 231 bp, Glycine max
  unsure (1)..(231): unsure at all n locations
agaaaatgaagaacaatgccattgtttncaacattggtcactttgacaatgagatcgacatgctggggctgganaactaccccggcgtgangcgcatcaccatcaagccccaaaccgacagatggtcttccccgagaccaatgtcggcatcattgtcttggccgagggtcgtttgatgaacttgggatgcgccacaggacaccctagttttntgatgncctgctccttcac

SEQ ID NO: 281740 - DNA, 229 bp, Glycine max
  unsure (1)..(229): unsure at all n locations
ttggaatccaaaaatgagaganatcatcagcattcacataggtcaggccgggatccaggttggcaactcctgctgggaactctactgcctggaacatggcatccagcccgatggcatgatgccaatgactcctccttcggtgtagcccacgacgccttcaacaccttcttcagcgaaaccggatccggcaagcacgtccctcgcgccgtcttcgtcgttcgagccacgc

SEQ ID NO: 281741 - DNA, 235 bp, Glycine max
  unsure (1)..(235): unsure at all n locations
ttggaatccaaaaatgagagaaatcatcagcattcacagnaggtcaggccgggatccaggttggcaactcctgctgggaactctactgcctggaacatggcatccagcccgatggcatgatgccaatgactcctccttcggtgtagcccacgacgccttcaacaccttcttcagcgaaaccggatccggcaagcacgtccctcgcgccgtcttcgtcgatctcgagcccaccgtt

SEQ ID NO: 281742 - DNA, 245 bp, Glycine max
  unsure (1)..(245): unsure at all n locations
gaataattacagcgggaaggttctactgattgtgaatgtngcctcacaatgtggtttgacacagacaaattacaaagaattgaatgtattgtacgagaagtacaagaatcaaggatttganatcttggcatttcatgcaaccagtttgctggacaggaaccaggaaacaatgaagaaattcaggaagttgtttgcacaaggttcaaggctgaatttcctatctttgataaggttgangtcaatgg

SEQ ID NO: 281743 - DNA, 238 bp, Glycine max
  unsure (1)..(238): unsure at all n locations
tattnttcaatggcttctgcagatgttgagttccgttgctttgnnggtgggcncgcttgggtcaccggcaacgatgccctcgagaaagccttttcaatctactcgcgacatcgttgaatcgaaggttataacgaccgtgagactggaaggtccagaggattcggatttgtgaccttcgcctcagagcagtcaatganagatgcgatcgcaggaatgaacggccatgaccttgacggtc

SEQ ID NO: 281744 - DNA, 243 bp, Glycine max
  unsure (1)..(243): unsure at all n locations
ggagaattaggtttttagggtttacaccgagcagccacacctcccgcagcagccatggttctcaaaactgaactatgccgattcagtngtgccaagatctacccaggnnagggcatcagatttgtncgtngtgttctcaggtttncctgtttgcaaactcaaaatgtaagangtatttccacaatcgcctgaagccttcaaagctcacctggactgcaatgtacagaaagcaacacaaaaagg

SEQ ID NO: 281745 - DNA, 248 bp, Glycine max
  unsure (1)..(248): unsure at all n locations
gtccaaacctccaganagcaaaacaccanagggaacatcagtcatcaacctttttaccaccagccttctcaaaggcatgcctcaaagcaagaggaacatcagtcatcaacctttttaccacagccttctcaaaggcagcctaccagcaagaggatcataaggtgctgagggaatagcctcagagaaccatggaggattgtaccatctgcggaacgctnctctctttgctagagtacaagtgaccaggt

SEQ ID NO: 281746 - DNA, 241 bp, Glycine max
  unsure (1)..(241): unsure at all n locations
ttgccggaaccgccaccaaccccttcggaaacggctacttccagggtcccgcggangctccgctcgaagccgcgtcggcgtgccctggggtttatgggaaaggggcttaccctggttatgctggggacttgcggttgactctaccactggtgctagctacaatgtaaagggggctaatgggaggaagtaccttgttcctgctctgtatgatccttctacgtcgtcttgctcaacgcccgtg

SEQ ID NO: 281747 - DNA, 241 bp, Glycine max
  unsure (1)..(241): unsure at all n locations
gcgcggaacgacngctacagcttgnaggtgggatncaatggacgtaaactaanttttgaggggagtccaanaagcattagagatagccatanganggtaagaganagccatgatggtctcatcatttacgcancatgggcgctgttcttctcgnggnngagacangnaagagntncaagctacgagnagnaggaaggatatggaaagaacagcagganccggcnagtggagtntgcatacc

SEQ ID NO: 281748 - DNA, 237 bp, Glycine max
  unsure (1)..(237): unsure at all n locations
caatcgggtacaccattgctgcctctgtcagtatgatggccataaaaaggtcgaattgctatcacagcagtcatggaaaanatccctgccanatgtcaagcaatgggtatatgataacatttggaatagcagnagtgatattngcccaaatcccagactttgatcaggtgtggtggctatccatagttgcagctatcatgtccttcacttattcttcngttggattgagtcttggag

SEQ ID NO: 281749 - DNA, 194 bp, Glycine max
  unsure (1)..(194): unsure at all n locations
cccggaccagcaacgtctcatcttncgccggaaagcagntcgatgacggccgcancctngncgactanaacatccaganggaatcaacccttnanctcgtcctccgtntccgtggtggcattcagntctncgttaagancctcaccggcaagactattacnctagangtcnanagctccganaccatcgacnac

SEQ ID NO: 281750 - DNA, 263 bp, Glycine max
  unsure (1)..(263): unsure at all n locations
ctgctgtcatgtacaaccaacagaaggcctgggatgaccattggatcttttgggttggaccatttattggagcagccattgcagccttctaccaccaatttatcttgagagcaggtgctgctaaggctcttggatcattcaggagcaaccccactatttgagtcaatttcctcttcataatcatgggtttcaaaaaggagataattggaagcaaaatgacttgatattgtaagaataataatgttataataatggcantgctt

SEQ ID NO: 281751 - DNA, 266 bp, Glycine max
gttggattgatggccttaaagctcatgctgagaaacatgtgactgacagaatgatgctcaatgctgctaacattttccccttcaacacaccaaccaccaaagaagcatactactatagaatgatatttgagaggttcttccctcagaactcagccaggctgagtgttcctggaggaccaagtgttgcatgtagcacagccaaagctgtagagtgggatgctgcttggtctaacaaccttgatccatctggtagggcagcacttgga

SEQ ID NO: 281752 - DNA, 266 bp, Glycine max
  unsure (1)..(266): unsure at all n locations
agtgatttcagtgagtgatcggtgttcacttgatctcatcataatcgtcagcgtcaattgaagaagatgccgatcagaaacatcgccgtcggaaggcctgaagaggcgactcaccccgacacgttgaagncggctttggctgagttcatctcaaccttcatcttcgtgttcgccggcttcaggctccggcatcgcctacaacaagctcaccgacaacggcgctgccacccctgccggcctcatctccgcctccatcgcccatgcat

SEQ ID NO: 281753 - DNA, 204 bp, Glycine max
  unsure (1)..(204): unsure at all n locations
cngtgnttgnngangatgccgatncagaaacatncgccatcggaaggcctgnagaggctactncaccccgngcacgttgaaggcggggttggctgagttcatctccaccttgntcttcgtggttacgccggntcaggtttccngcatcgcctacnatncgntccaccganaacggcgccgccactcccgncggcctcatctccg

SEQ ID NO: 281754 - DNA, 263 bp, Glycine max
  unsure (1)..(263): unsure at all n locations
gagctctgacaccattgacaatgtgaaggccaagattcaggacaaggaaggcatcccaccggaccagcagaggctgatttttgctggcaagcagctcgaggatggaaggaccctcgctgactacaacatccagaaggaatcaacccttcaccttgtcctccgtctccgtggggggttttaagctcgttgtgtaatgttggatgtgttcccaaaacatttgaagaactttgatgtttaangggtctgtaataatgtccctgaaa

SEQ ID NO: 281755 - DNA, 261 bp, Glycine max
  unsure (1)..(261): unsure at all n locations
caggacanggngngnntctccccagancagcagaggctgatcttcgcngggaagcagctcgaggacggacgcanccttgctgantacaacatccagaaggagtcaactctccacttggtgttgcgtcttcgtggtggtatgcagattttcgtgaagactcttacgggtaagactattaccctcgaggtggagagctctgacaccattganaatgtgaaggccaagatcaggacaagganngcatcccancggaccagcaga

SEQ ID NO: 281756 - DNA, 262 bp, Glycine max
agcaaacaaaatcccttcattcacatgagcttcctgggtctctttactttcactgctgcctaccttccatgggttctcttggggttctctgtactcgttggtgctagtgcttgggtggatctactgggaatgattgctggccatgcatattattttcttgaagatgtttatcctcggatgacaggtcgtaggccactaaaaacaccatcattcatcaaagcactatttgcagatgacccagttgttgttgcacggcctgcta

SEQ ID NO: 281757 - DNA, 211 bp, Glycine max
  unsure (1)..(211): unsure at all n locations
cccttacccttctctatcgctcgctttccttgacgcttctgacccttgctttgtctgcgtcnnnnnnnnnnnnnnnnnnnnnnnnnnnnnngtcgtaatggctctcccagactcttcttcccgtcgcaactccctgatcccctccttcatctactcctcttcctccaaaacgntccctctccaccacatgctcaacaccgcctccgctgcc

SEQ ID NO: 281758 - DNA, 263 bp, Glycine max
cccgccggcgcgcctccggtcctcccaatctacgacgccatggcaccaggcccatccctcgcgccggcgcccggcgccgggaccgggaggcccgaagcaccacttcaacggcgagcgccaggtcaaggacttcatccacacactcttacattacggaggttacaacgaaatggctgatattctcgtaaacctaacgtctctggccaccgaaatgggaaggctagtttcagaaggttacgttctcaccgttttggctccaaacg

SEQ ID NO: 281759 - DNA, 259 bp, Glycine max
  unsure (1)..(259): unsure at all n locations
tcttactctagactcttccttttctcttctctgtctaaggggtgccctgagatcacattgaacaatggtgaangctgtggccgttcttggcagcagtgagggtgtcactggaactattcacttcgttcaggagggaagtggtccaaccaccgtaactggatctcttgctggtcttaagcctggtctccatggtttccatgtccatgccttgggggacactaccaatggttgcctctcaactggatcacattcaatcctg

SEQ ID NO: 281760 - DNA, 260 bp, Glycine max
cgggtttctgtgtctacaaaggtgacacctatcttgtgtacgagttcgcggagaatgattctcttgaggattggcttcacagtggtagcaagaagtacgagaattctacatctctgagttgggtgcagagggttcatattgctcatgatgttgctgacgcacttaactaccttcataactatactagtcctcctcacgtacacaagaatttgaagagtgggaacgtgcttttggatggcaatttagggctaaagtttcga

SEQ ID NO: 281761 - DNA, 265 bp, Glycine max
  unsure (1)..(265): unsure at all n locations
ctgggacactgctgggctttcggccgacccagaaaccttcgccagaaaccgtgagctcgaagtgancccactccaggtgggccatgctacggggccttgggctgcgtcttccccgaactgttgtcccgcaacggggtcaagtttggagaagctgtgtggttcaaggccgggtcccagatcttcagcgagggtgggctggactacttgggcaacccaagccttgtccacgcccagagcatcctcgccatctgggccacccaagtta

SEQ ID NO: 281762 - DNA, 265 bp, Glycine max
  unsure (1)..(265): unsure at all n locations
aagctantgatctagcaaatggncactgtatatggcttgggttctgctgtaatatcaaatgatctagaaagatctcagcgcattactaaggcttttaaggctggaattgtgtggattaattgctctcaaccatgcttcactcaagccccatggggaggcattaaacgcatggttttggtcgtgaattaggagaatggggactgataattacttgagtgtgaagcaagtgacccaatatatctctgatgaaccgtggggctggtac

SEQ ID NO: 281763 - DNA, 260 bp, Glycine max
  unsure (1)..(260): unsure at all n locations
gtntgttgttggtgttaacgagcacgagtacaagccagagcttgatattatttccaatgctagctgcacaaccaactgcctgctccacttgctaaggttattaatgacaggtttggcattgttgagggtttgatgaccacngttcattccatcactgccacccagaagactgttgatgggccatcagccaaagactggagaggtggaagagctgcttcatttaacatcatcctagcagcactggagctgccaagctgttg

SEQ ID NO: 281764 - DNA, 258 bp, Glycine max
  unsure (1)..(258): unsure at all n locations
atgattcacagccaagaaagaaggtccgtttagggattcctgctacacaatggatttncaatttacaatgcaagacttccaatgaaacaaaggtaccattacaatgtgtctgatgcaagattagaacagcatgtcgagagaggggttgcagatggccttcttattagttgtgtgtcttcttgttgcaatctttgggcccttattatggatgctggaactggttttacagctcaagtttacaagttgtcaaccttttct

SEQ ID NO: 281765 - DNA, 265 bp, Glycine max
ctttcttcctcttcctcagtagtgcgattttcgattctcttctcagcaactatgcctaaccctaaggtcttcttcgacatgaccatcggcggtcaacctgccggccgcatcgtgatggagctctacgccgacgtgactccgagcaccgccgagaacttccgcgcgctctgcaccggcgagaagggcgccgggcggagggcaagcccctccactaacaaaggctcgtccttaccaccgcgtgatcccgaacttcatgtgccagggc

SEQ ID NO: 281766 - DNA, 269 bp, Glycine max
aatgcaggccacacctgagttggagtacgggaggatgaacattggaagtacgaccagcaaagaggaggccaagtggaggtattgagacactccgtgccataccttggatctttgcctggacacaaacaaggttccatcttccagtgtggctaggctttggtgcagcattcaaacatgttattgagaaggatgttaggaatattcatgtgctgcaggagatgtacaatcaatggcctttctttagggtcactattgatttagtggaaatg

SEQ ID NO: 281767 - DNA, 268 bp, Glycine max
aaacagccttaaccttcgctgcccccaacgttgtgccattggcacccacaaagagtgtctcccatattaccatctttcctaccaaattgaaagccccgcgctcctcacctcgttactctccgattagggttgcaaccgtggagcccgacacttcaactgtcgactacaactctgcgttctcagtgtttcctgcagaagcatgcgaaactgtaggaggggaagcctgcatggcggagatgtaccctgaaagaagcttacagccagaggt

SEQ ID NO: 281768 - DNA, 261 bp, Glycine max
  unsure (1)..(261): unsure at all n locations
cgtanncgtcggcactttgcgttttctgcgtcatctccgattccccgacaatggncacccaaatgagcaagaagagaaagtncgtagctgatggagtgttcttcgctgaactgaacgaggttctgacaagggagttagccgaggacggatactccggcgtggaagttagggttacgccgatgcgcaccgaaatgcatcatccagagccaccagaacccaagccgttctcggtgagaagggaaggagaatcaggaacttacc

SEQ ID NO: 281769 - DNA, 241 bp, Glycine max
  unsure (1)..(241): unsure at all n locations
cttggcttcaattgttctttttgnngccaacatcattgctgtcangtctgaggttatttcagcaatttnngntgaagtgatgcaagggaagccagagttcactgaccatttgactcataanctanagcaccaccctggacagattgaagctgctgctatcatggaacacattttggaaggangctcttacatcaaagctgctaagaagttgcatgagattgatccttgcaaaagcctaaac

SEQ ID NO: 281770 - DNA, 186 bp, Glycine max
  unsure (1)..(186): unsure at all n locations
ttcgcaaaccctaatttcggaaagatcggcgatggctgcctccaaggatcgcgagaacttcgtctacatcgccaagctcgccgaacaggccgagcgatacgaagagatggtggaatcaatgaagaacgttgcgaatctcgacgttgaactgactgtggaggagcggatttattcnggcgggtacaa

SEQ ID NO: 281771 - DNA, 238 bp, Glycine max
  unsure (1)..(238): unsure at all n locations
caagttcgtgccgaagcaaccaaacatgatcctccaaggagacgctattgtgacctcctgcgggaaagttacaactcaataaggttgacgaaaacggcaccccaaaaccctcgtctcttggtcgcgccctctactccacccccatccacntttgggacaaagaaaccggtancgttgccagcttcgncgcttccttcaanttcnntttatgccctgncaaaaaaggcttgnaaatggg

SEQ ID NO: 281772 - DNA, 239 bp, Glycine max
  unsure (1)..(239): unsure at all n locations
ggcanccgnnncnggcanctgtnnncacatattgggagagtgctgccangatnantcgcngatntatcnaancccgacaannncgtggtcaagaaatcgactgtgcctgtgaaaacagctgaggcaattgagagaattctgacccataataggnaaggcatcaatttcncaattctgtnataccctgaantncntgctgagggtacagcaattgcagacctntttaagccanatcgagt

SEQ ID NO: 281773 - DNA, 232 bp, Glycine max
  unsure (1)..(232): unsure at all n locations
ggcaaatcagctttnatcctctctgctgaacttgctgcngcccatnatttganagcntaaaagttttggaaaaaagaataanagatgatgcancagcaacacaatctgttttctacatcanaaagagaacggagctagaaattaatttgcatccaatgtaactctaatttgttcccacgtttngttaactgcttcttgtaacgtacgttgtagatatgtatgatatcttctt

SEQ ID NO: 281774 - DNA, 235 bp, Glycine max
  unsure (1)..(235): unsure at all n locations
ctgccagtagtcatatgcttgtctcaaagattaagccatgcatgtgtaagtatgaactaattcagactgtgaaactgcgaatggtccattaaatcagttatagtttgtttgatggtatctactactcggataaccgtagtaattctagagctaatacgtgcaacaaaccccgacttctggaagggatgcatttattagataaaaggtcaacacaggctctgcctgtngctttgag

SEQ ID NO: 281775 - DNA, 230 bp, Glycine max
  unsure (1)..(230): unsure at all n locations
gantacggtctttgcaatgccaganacagctttgggtttatttcctgatataggttcctcatacttcttgtctagnctgcccggatttcntggagaatatgctggtcttacaggtgctaggttggatggtgcagaaatgcttgcttgtggtcttgcaacacattttgttccttcatcaaaattgtctttattggaagaagcatatgcaaggtggaaactagtgatccaaa

SEQ ID NO: 281776 - DNA, 231 bp, Glycine max
  unsure (1)..(231): unsure at all n locations
cttgcagtctggaacttttgaccttgtgggcactatcatatacgagatagatgaacatccattccaaagcaccttttttaatggcactgttgaagttgttgaatctggtgcttttctaagcatggaatctgtttttcttgtnactcttggggttgcactccttgtcctcctggggctatggattcatggtcaaatacaacacctatctaagaaaacaaagagggcgccaaa

SEQ ID NO: 281777 - DNA, 229 bp, Glycine max
  unsure (1)..(229): unsure at all n locations
ctgagttgcgaaaggcantgggngangcagcagttgcngctgctgcctcnattggttacataggtgttggaacgattgagtttcttttggatgaaagaggttccttttactttatggagatgaacacacgtanccaggttgagcatcctgtgacagaaatgatttccncaacagatttgatagaagagcaaattcgtgtagcnatgggagaanaacttcgatacaaaca

SEQ ID NO: 281778 - DNA, 266 bp, Glycine max
  unsure (1)..(266): unsure at all n locations
attgaaggnnaaatcantgcaatgaacagtgatccaagtctgaganaccggactgngccanttcagctnccatacactttgctccatcgttcaagtgaggaanggttgactttcaaaggaattcccaacagtatctctatctaattaaaaagagtttgtgggtccgtagccangntngncgtnnnaagnacananacgtatgnatgtcnatgcgnaaggattgccggnncngcttcncgagtgtnttggagcgtcgggttgcatat

SEQ ID NO: 281779 - DNA, 264 bp, Glycine max
gtttcaaaagcaaatgcagatagtcaaattgttgatccattgctgaaggataagatagaaaagctaagggtggagtttgaacagcaattgcgtgcagctcccaattatggtaggctgcagaataagtttaagtatctgagcgaattatgtaaagtaaagcttctttcagatgcaaacaaggacaatcaggctgtcacctttaagcaagagttggagaaaaaagttgataatgcctgaatgatccaaaaataagggaaactttga

SEQ ID NO: 281780 - DNA, 264 bp, Glycine max
  unsure (1)..(264): unsure at all n locations
gaaccattcttcgagcttttggagctgagttagtcctcactgatcccgccaaaggtatgaaaggagctgntcagaaggcagaagagattcgggataagactccaaattcttatattcttcagcaatttgaaaatcctgccaacccaaagatccattatgaaaccactggaccggagatctggaagggctctagtgggaaggttgatgctcttgtctctgggattgggactggaggtacattaacaggtgctggaaaatatctga

SEQ ID NO: 281781 - DNA, 262 bp, Glycine max
gcaatggcttctctggcaagcttagctgttgttcaaccatctactgtcaagggccttgctggaactaagctctctttcaagccctctcgccagagcttcagacccaagaatttcaggagtggtgccgttgtagcaaagtacggtgacaagagtgtgtactttgatttggaggatctaggcaacactactggtcagtgggacttgtacggctccgatgcaccttcaccctacaaccctcttcagagcaagttcttcgagacat

SEQ ID NO: 281782 - DNA, 265 bp, Glycine max
  unsure (1)..(265): unsure at all n locations
atccaacaagcagatcaatctctctctctgtctcccaatcaaaacagacatgggtttgaaggaggattttgagcagtatgctgagaaagcaaagactttgccaccgnctcaatcaaacgaagacttgcttatcctttatggattgtacaagcaggccaccgttggacctgtcaacaccagccgtccgggaatgttcaacatgagggacagagctaaatgggatgcatggaaggctgttgaagggaaatccaaggacgaagcaatg

SEQ ID NO: 281783 - DNA, 263 bp, Glycine max
  unsure (1)..(263): unsure at all n locations
cactttcaagtactccggtttggcgaaccagaaaactgtcactgttcaacctgctggtaaagaccagtnccgtgttgctcgnaacaaccaagacaaagaagcaaaacaagcctgctgctttgcttcacaaatctgtcatgaaaaaggagttccgtaggatggcaaaggctgtgcaaaatcaggtagcagannnctactacaggcctgatctcaaaagggcagctctggcaagattgagcgctgtcaataggagcctcagagta

SEQ ID NO: 281784 - DNA, 265 bp, Glycine max
  unsure (1)..(265): unsure at all n locations
ctaaagccgagcagcgagagagagaaaccctannaaaaatgccggctggtcacggtttgagatcccgcaccagagattccttctctcgtcccttcaggaagaagggtaccatcgccctcaccacatacctcagaacctaccacgtcggcgattatgtcgacgtcaaggttaacggcgccgtccacaagnnnngngaatacacaagttctaccatggccgcaccggtcgcgtctggaatgtcaccaaacgtgctgttggggtcgaa

SEQ ID NO: 281785 - DNA, 121 bp, Glycine max
  unsure (1)..(121): unsure at all n locations
catcatcancgttgattgnagnngatgccgatcagaaacatcgccatcggtaggcctgaagaggctantcaccccgacacgttganggcggggttggctgagttcatctccaccttgatct

SEQ ID NO: 281786 - DNA, 258 bp, Glycine max
  unsure (1)..(258): unsure at all n locations
cttccccaccaganagaccaacaatgacattacntccattgctagnaacggtggaagagtgcaatgcatgcaggtgtggccaccagttggnaagaagaagtttgagactctttcctancngccanaccttgatgatgcacaattggcaaaggaagtagaataccttcttaggaagggatggattccttgcttggaattcgagttggagcacggtttcgtgtaccgtgagcacaacaggtcaccnggatactacgatgg

SEQ ID NO: 281787 - DNA, 261 bp, Glycine max
  unsure (1)..(261): unsure at all n locations
caagtaaaagccgtggttttcctttaaaacttgatgagaaaaatatccatggngcgagtnccaagttatngtgcaattgaagctcaaggggaatccaccaataacacccgcagtgatgactcctggnggacctcttgatctctcatctgttttgtttaggaatcgtataatattcataggacanccagtcaattcacaagtggctcagagagttatatcccagcttgtgnctctanntactattgatgaaaatgcagatat

SEQ ID NO: 281788 - DNA, 257 bp, Glycine max
gtcaaagctgtgatagccaagagtttcgagagaattcatcgtagtaacttggtaggaatgggtatcattcctctttgcttcaaacccggtgaggatgcggacacattgggattaactggtcatgaacgttattcaattgacctaccaagtaaaatcagtgagattaggcctggccaagatgtgacagtcacaaccgataatggaaaatctttcacctgcacagtacgcttgacactgaggtcgaacttgattacttc

SEQ ID NO: 281789 - DNA, 262 bp, Glycine max
  unsure (1)..(262): unsure at all n locations
ctaattcccaaattctctcatttttcaagtttcaaccaagaaaagcagcaacaatgtncgggtcgcggaaagggtgggaagggtttaggaaagggaggagcaaagaggcatcgcaaggtgctccgcgacaatatccagggaatcacgaagcccgcgattcggagactggcgagaagaggtggcgtgaagagaatcagtggtttgatctacgaagagaccaggggcgtgctcaagatctttctcgagaacgtgattcgcgatg

SEQ ID NO: 281790 - DNA, 256 bp, Glycine max
  unsure (1)..(256): unsure at all n locations
gttgttcttccacnaatagtgaagcnagnaaggtattctcnctccaattcnaattattaanccaccaaccanancagggaagggagggaacactccatgcccancaccaaagtctcatnagtgnanangtgccccattganacgctcaaacttggtgcctgtgtggatcttcttggagggttggttcacattggtttgggtgaccctgttgcgaaccagtgctgccccgtgcttcaagggcttgttgaggttgaag

SEQ ID NO: 281791 - DNA, 259 bp, Glycine max
  unsure (1)..(259): unsure at all n locations
cttcagccgatcaaagacaaatattctggtgtgacatatgcagacttatttcagttggctagtgctacggctgtggaggaagctggaggccccaaantccctatgaaatatggaagagtggatgtatctggacctgaacaatgccctgaagaagggagacttcctgatgctgggcccccttcacctgctgatcatttgcgtcaagttttctaccgtatgnntttgaatgacaaggaaattgttgcattatctggtgcac

SEQ ID NO: 281792 - DNA, 257 bp, Glycine max
  unsure (1)..(257): unsure at all n locations
gttttgaagagctatgcatcaagaaagaagccattgagggagaagagaagttnntgtgcaaaatccttgggaacagtaattggttttgccatttcaaagctgggaaagaacattcaagtactttcaagttcctttgtcaataagcaagaccaatacactgtggaaggagtgcagaatcttggagacaaagcagtgatgtgtcataggctaaatttcagaactgcagtattttactgccatgaagtccgtgaaacaac

SEQ ID NO: 281793 - DNA, 254 bp, Glycine max
  unsure (1)..(254): unsure at all n locations
ctcagccgcctcggctagggttcggaaacgaagaagggttctgtnttcttttcgcgatgagggccaagtggaagaagaagcgtatgaggaggctgaagaggaagcgccgaaagatgagacagagatccaagtagtgcgttaaacctagtttgtttccgttgcttttacaattgcttatgttgtcanntagganacccagttgttagtggcactggtctctccttttgatgttttgatacattttgttggatttt

SEQ ID NO: 281794 - DNA, 259 bp, Glycine max
  unsure (1)..(259): unsure at all n locations
ctaattcccaaattctctcatttttcaagtttcaaccaagaaaagcagcaacaatgtcgggtcgcggaaagggtgggaagggtttaggaaagggaggagcaaagaggcatcgcaaggtgctccgcgacaatatccagggaatcacgaagcccgcgattcgganactggcgagaagaggtggcgtgaagagaatcagtggtttgatctacgaagagaccaggggcgtgctcaagatctttctcgagaacgtgattcgcga

SEQ ID NO: 281795 - DNA, 258 bp, Glycine max
  unsure (1)..(258): unsure at all n locations
gcacaaattcgggagaagacatcacacctccctggtgtttcgattgcaatcatgggatgcattgtaaatggaccaggggagatggctgatgcagactttgggtatgtgggaggcactcccgggaagattgacctctatgttgggaagactgtggtgaagcgtggaattgcaatggagcatgcaaccaatgccttgatcgatctaataaaagagcatggacgntgggtggnccctcctgcagnnncnnnaaaggcaaga

SEQ ID NO: 281796 - DNA, 260 bp, Glycine max
  unsure (1)..(260): unsure at all n locations
aagattcagcaagtgcgttttggaagcagagaccgaaatacttcgagattggcccgtacaaagcaaactgctacgtaaggccaactggaggaaaagctcccaggaagcagcttgcaaccaaggctgcacgtaagtctgcaccaacaactggtggtgtgaagaagcctcatcgttatcgccctggaactgttgcncttcgtgagattaggaaataccagaagagcactgagctcctaatcaggaagcttcctttccagagg

SEQ ID NO: 281797 - DNA, 252 bp, Glycine max
ggcaagtctggtgccagcagccgcggtaattccagctccaatagcgtatatttaagttgttgcagttaaaaagctcgtagttggaccttgggttgggtcgatcggtccgcctccggtgtgcaccggtcggctcgtcccttctgccggcgatgcgctcctgtccttaactggccgggtcgtgtctccggtgctgttactttgaagaaattagagtgctcaaagcaagcctacgctctgtatacatagcaggga

SEQ ID NO: 281798 - DNA, 256 bp, Glycine max
  unsure (1)..(256): unsure at all n locations
cttgcagananccaagaggagncccgcaccanncgaaggtcncagattgaacncaagggtggganttccagtacgtggcggcgtggctcaccggaagcggttcggtgcctctatacaacctcatggaggatgctgccactgctgagatcagcagggtgcagaattggcagtggctcaagtatggagtgcagctcaatggggntggtctggagtgaaagtgaacaaagaactttttggtagggttgttgaagaagag

SEQ ID NO: 281799 - DNA, 255 bp, Glycine max
gttgcctcttcgatccattcctgaaggagctgtcatctgcaacgtcgagcaccatgtcggcgaccgcggcgtcttcgctagggcgtctggagactacgccattgttatcagtcacaaccctgataatgacacctctaggattaagctcccatctggttcaaagaagattgttccaagtgactgtagggccatgattggtcaagttgcaggtggagggagaactgagaagcctcttctcaaggctggaaatgctta

SEQ ID NO: 281800 - DNA, 251 bp, Glycine max
  unsure (1)..(251): unsure at all n locations
gtgagtgatcggtgttcanttgatctcatcataatcgtcagcgtcaattgaagaagatgccgatcagaaacatcgccgtcggaaggcctgaagaggcgagttacnccgacacgttgaaggcggctttggctgagttcatctcaaccttcatcttcgtgttcgcnggctcaggctccggcatngaataangnaanntcaccgacaacggcgctgcnacccctgcnggcctcatctccgcctcnatcgtnnat

SEQ ID NO: 281801 - DNA, 254 bp, Glycine max
  unsure (1)..(254): unsure at all n locations
gcagcagccacacttcttcgccgtttcagctgaagagccatccgcaggtaaaanagcnnttaagcataataatgttntccccaatgggcacttccggaaacnctggcaaaactatgtgaagacttggtttaatcaaccagcccgaaagaccagaagacggttggctcggcagaagaaggctgtcaagattttccccaggcctactgctggatctctcaggcctattgttcatggccagactctgaaatacaaca

SEQ ID NO: 281802 - DNA, 254 bp, Glycine max
  unsure (1)..(254): unsure at all n locations
gctttcttcgttcgtcttttgcatcagccatcaggatggagtctcaggtgaagcatgctcttgttgtcaaagttatgggtcgtactggatccagaggacaggtgactcaggttagagtgaagtttttggatgatcagaaccgtcatatcatgaggaatgttaaaggaccagtgagagaaggagacattctcaccctactncgagtctgaaagggaagcaagaaggttgcgctagagggtattttttcttgatct

SEQ ID NO: 281803 - DNA, 246 bp, Glycine max
  unsure (1)..(246): unsure at all n locations
gngataganagtctgaaggagagaaccggttcgagccaatacgcgataaccaaattcatcgaaggcaagcacaaggagttgcctccaacctacaagaagcttgttctcgttcatctcaagaagtctgttgctgctggcaagctcgttaaggtcaaaaactctttcaagctcgcaccgactaagtctgctccnntnaaagccgctgctgctcaccaagaagcccgccaaagctgcggctaagccgcc

SEQ ID NO: 281804 - DNA, 244 bp, Glycine max
  unsure (1)..(244): unsure at all n locations
gtgcaaaaggcactgatagctcctgcagcattgattgctcaaaatgctggaatagaaggtgaagttgttgtggagaaaataaagagtggtgaatgggaggtcggttacaatgccatggcagacaggtatgagaattaatngnaggctggagttatcgaccctgccaaggtaactaggtgtgctttgcagaatgctgcttcagttgctggaatggtgttgaccacgcaggccattgtggtggaga

SEQ ID NO: 281805 - DNA, 250 bp, Glycine max
  unsure (1)..(250): unsure at all n locations
cgacgcagaaggttcatccaatctccgaatcctttaatcgnattgcaaccatgtcgaggagaaaggtcagagagccaaaggaggaaaacgtgacttcttggcccagctgttagagatggcgaacatgtctttggcgtcgctcgcatatttgcctcctttaatgataccttcattcatgtcactgatctgtctgggagggaaacgcttgtccgcatcactggtggaatgaaggttaagnctgacagagatg

SEQ ID NO: 281806 - DNA, 244 bp, Glycine max
ctgccagtagtcatatgcttgtcctcaaagattaagccatgcatgtgtaagtatgaactaattcagactgtgaaactgcgaatggctcattaaatcagttatagtttgtttgatggtatctactactcggataaccgtagtaattctagagctaatacgtgcaacaaaccccgacttctggaagggatgcatttattagataaaaggtcaacacaggctctgcctgttgctttgatgattcatg

SEQ ID NO: 281807 - DNA, 157 bp, Glycine max
  unsure (1)..(157): unsure at all n locations
gcatgctgagagtggaacttaatggaaaattcaccaatttctgtgttggattggaataaatgtcctcaataatataaacaggccattgaatcattctgctattttttcctgcancatttgttacanctcttactagttcagactctttagccatgtg

SEQ ID NO: 281808 - DNA, 240 bp, Glycine max
gttcacctcctcaacctctgcagcgccttcgatccagaaaacatgactaagagaacaaagaaggctggcattgttggaaaatacggtacccgttatggcgccagtctgcgtaagcagattaagaagatggaagttagtcaacacagcaagtttttctgtgaattttgtggaaagtatgctgtgaagaggaaagctgtgggaatatggggatgcaaggactgtggtaaagtgaaagctggc

SEQ ID NO: 281809 - DNA, 237 bp, Glycine max
  unsure (1)..(237): unsure at all n locations
cttttacttctcagcagcgccggctagggttcagaaacgaaaaanggttcggtgttctgttcgcgatgagagcnaagtggaagaagaagcgtatgaggaggttgaagaggaagcgccgaaagatgagacagagatccaagtagtgcgttaaacctagtttgtttctgttgcttttacaattgcttatgttgtcgaatgggacacccagttgttagtggcactggtttctccttttga

SEQ ID NO: 281810 - DNA, 240 bp, Glycine max
  unsure (1)..(240): unsure at all n locations
cttcttctcctccctctgcctgcagcggtgcaacctatcagcctcccaaatccaatggcttcagagaagaaactgtcgaacccaatgagggagatgaaggtgcagaagctcgttctcaatatctctnctggagagagtggagatcgtctcaccagagccgcnaaggtgttggaacagcttagtngccaaaccccagtgttttcnaaagcaaggtacactgttcgttccttggganagaag

SEQ ID NO: 281811 - DNA, 241 bp, Glycine max
ctaaattctcaaaggcaccaatttcattgctcagagttcccaaattctccccaagagataaaatgtctctaatcccaaacttcttcggtggccggagaaacaatgtgttcgatcctttctcactggacgtgtgggatcccttcaaggattttcctttcccaaatacgctttcttcagcttccttccctgaattttctcgggaaaattcagcatttgtgagcacccgtgtggactggaagga

SEQ ID NO: 281812 - DNA, 247 bp, Glycine max
gcttcaaaccaggatattctcttatgctgattcacaaaggcacagacttggaccaaactatctgcaacttcctgctaatgctcccaagtgtgctcaccacaacaatcatcatgaaggtttcatgaatttcattcacagggatgaggaggttaattacttcccttcaaggtatgatcctgttcgtcatgcagaaacgttccccatacctcctgctatctgcagtggaaggcgtgaaaagtgtggaatt

SEQ ID NO: 281813 - DNA, 238 bp, Glycine max
  unsure (1)..(238): unsure at all n locations
cttactgctggggagactccgacaattgtggacacagaggttggacgcattggcataggcatctgttatgacattcgatttccagaactagcaatgatatatgctgctagaggtgctcacttactctgctaccctggggcatttaanatgacaactggaccattacattgggagttattgcagagggcaagggctacagataatcagttatatgtggctacctgttcacctgcccggg

SEQ ID NO: 281814 - DNA, 237 bp, Glycine max
  unsure (1)..(237): unsure at all n locations
ggctaaccaaccctgacactccttcttctccgcttcctcttcgatcatcgcttcagaatgccgccgaagttcgacccctcccagatcgtcnacgtcttcgtacgcgtcaccggcggtgaggtcggcgcggcgagttccctcgccccgaagatcggtcccctcggtctctcccccaagaagatcggagaagatatcgccaaggaaaccgccaaggactggaagggctccgcgtcaccg

SEQ ID NO: 281815 - DNA, 237 bp, Glycine max
  unsure (1)..(237): unsure at all n locations
agttgggttatgctgatcttgtggaagagttttctcttggggatgggaagattgtgaagattactggtattaaggagatggggaagaccaccactgtgcttgtacgtgggtctaatcagnttgtgctcgatgaggctgagcggagtttgcacgatgctttgtgtgttgttaggtgtttggttgccaagaggtttctcattgccggcggtggtgcccctgagattgagctctccaggc

SEQ ID NO: 281816 - DNA, 236 bp, Glycine max
  unsure (1)..(236): unsure at all n locations
gcgtttgcttctcctccacccatccacaaacgaacacacactttgattgagaatggggcgtgttcgcacaaagacagtgaagaagtcctcgcggcaagtgatcgagaggtactactctcgcatgacgctggacttccacacgaacaagaaggttctggaagaggtggccatcattccctccaagaggctccgcanccaagatcgcgggattctccacccacctcatgaagcggatc

SEQ ID NO: 281817 - DNA, 236 bp, Glycine max
gcaaaaggccatataatttttttttatttgaaataatgtccgggatcatccacaagattgaggagaccctccatgtgggagggcacaagaaagaggagcacaaaggagaacaccatggtgagcacaaaggtgaacacaaaggagaacaccatggtgagcacaaaggtgaacacaaaggagaacaacaccatggggagcacaaggagggacttgtggataagatcaaggacaagatc

SEQ ID NO: 281818 - DNA, 237 bp, Glycine max
attgaagccaaacatggtcacccctggatcccaatctgctaaggtttcccctcaggtggttgccgagcacactgtcagagcccttcagagaaccgtgcctgctgcagttcctgctgtcgttttcttgtctggtggccagagtgaggaggaggcatccgtcaacctcaacgccattaaccaggtcaatgggaagaagccatggtcactctctttctcctttggaagggcacttcaaca

SEQ ID NO: 281819 - DNA, 238 bp, Glycine max
  unsure (1)..(238): unsure at all n locations
cgantntnctgatcgctcatngagagttcgacgcggcggttgcagaagaagattgcaagatgaagttcaacatcgcgagtcccaccactggatgccagaagaagctcgagatcgacgacgatcagnaactacgagcatttngggacaagangatctcacaggaggtcagcggagatgcacttggtgaggnatttaagggctatgtcttcannattactggaggttgtgacaaacaagg

SEQ ID NO: 281820 - DNA, 241 bp, Glycine max
  unsure (1)..(241): unsure at all n locations
cccgatttaagaagaaccgcaagangcgcggccacgtcagcnccggccacggccgtattggaaagcaccgcaagcnccccggcggccggggaaatgccggcggcatgcaccaccacaggatcctcttcgacaagtaccacccggggttcttcgggaaggtagggttgaggtactttcataagctccgcaacaaattctactcccccatctnaacntnacaagctatngtctctgatacccc

SEQ ID NO: 281821 - DNA, 260 bp, Glycine max
  unsure (1)..(260): unsure at all n locations
attacgaganccttgcggagatgtacgtgggcgatgatgtttctccagatttctacgggtgggtgtttccaaaatgtgaccatgtggctgtaggcactggaactgtgacacacaagggggacatcaagaagttccaactagcaacaaggaanagagcagaggacaagattttgggaggcaagatcatccgagtggaggctcaccctatcccggaacatcctcggccacgaaggttgttggggagagtggcgctggttggc

SEQ ID NO: 281822 - DNA, 259 bp, Glycine max
  unsure (1)..(259): unsure at all n locations
cacaactctttcacctcttgttttccccaatccttttcgcctttgtctgcnaatggcgtcgttcgatcaggcacctcccggcgatgtcaaatccggtgacaaaatcttcaggaccaagtgcgctcagtgccacaccgtcgaaaaaggtgccggtcacaagcaaggacccaatctgaatggtttgtttggaaggcaatctggcacaactcccggatattcctactcttcagctaacaagaacatggctgtgacttgggaa

SEQ ID NO: 281823 - DNA, 259 bp, Glycine max
  unsure (1)..(259): unsure at all n locations
caaagtaagagtgagcaacttccaacaccatagtgaangcggcttccaaggctgcacttctcntgtgtttcaatgttctcttcttcaccgtggttagctccacatatgtgccatgcaacccacnccccaaaactccaaaacacccacctgtcccaaagccaccttccccaaancaagcaagttgccccaaagacactattaagtttggtgtgtgtgctgatgtgttaggnttgatcaacgtgcaattgggaagccacca

SEQ ID NO: 281824 - DNA, 256 bp, Glycine max
caagatgtcgaagagaggacgcggtggttcggcggggaacaagttccggatgtcgctgggtctgccggtggcggcgacggtgaactgcgccgacaatacgggggcgaagaacctctacatcatatcggtgaaagggatcaaagggcgtttgaaccgtctcccctcggcttgcgttggcgacatggtgatggccaccgtgaagaaggggaaacccgatctgaggaagaaggttttgccagctgtcattgttcgccag

SEQ ID NO: 281825 - DNA, 252 bp, Glycine max
  unsure (1)..(252): unsure at all n locations
ccatctatctttnctaacatggctgctgggactggactctttgcagagattttgganggngatgcgtacaagtactatgctgatggagagtggaagaaatctgcttctgggaaaagtgtttccatcatcaaccccactaccagaaagactcaatacanagttcaagcttgttcacaagaggaggttaataaggtcatggacttagcaaaatctgcacaaaagttatgggcatagncccactatngaaacgtg

SEQ ID NO: 281826 - DNA, 262 bp, Glycine max
  unsure (1)..(262): unsure at all n locations
gcaaagcaatggctacttcaangttgaaaacccagaatgtngttgtatcttctccctaaccttaaccttggtactggtgctactgaccagcaaggcaaactcagcggaaactgtttctttcagctggaacaagttcgtgccgaagcaaccaaacatgatcctccaaggagacgctattgtgacctcctcgggaaagttacaactcaataaggttgacgaaaacggcaccccaaaaccctcgnctcttggtcgcgccctcnag

SEQ ID NO: 281827 - DNA, 230 bp, Glycine max
  unsure (1)..(230): unsure at all n locations
agtgagcgtgaaagatgccttgggtgaggctttcagagtctccaagnctcgacgttncctattgacatgggtaatccatttctcaatctcactgttgatggtttccttaagatcggagctgtcncagccacgcgatcagctgctgaagatacttatcatattatccaaaaggggaatatctcaagtcgtgatttcgagaaaactttgaagaagatgtgtaaagaaggtgt

SEQ ID NO: 281828 - DNA, 252 bp, Glycine max
  unsure (1)..(252): unsure at all n locations
agatgtcgttggtttcaagcatgttcgggtgtggagtggtgatggcggcgtcgcaagcaatgggaattggaaggagaagcgatggtggattgacgatagtgtgttcgtctaggccgcagaagaaagcgacggcgcatcacatgangactcggcctcggaagacgcaggcatgggatagaaaccgcnagcncanngtctacnatccactccctcctcttcctcctgattggaccctcgntattcccgctgacg

SEQ ID NO: 281829 - DNA, 253 bp, Glycine max
  unsure (1)..(253): unsure at all n locations
ccaagaccgacaacaaactcactcttaccaagtccgaggaagctttcgctgctgccaaggagcngatgcctggaggtgtcaactccccagttngtgccttcaaatccgtgggtggtcaaccaattgtgattgattcagtcaaagggtctcgtatgtgggacatcgacggcaatgagtacattgactacgtcggttcttggggtcccgcaatcattggtcacgctgatgatcaagtgctttcagctctggttgt

SEQ ID NO: 281830 - DNA, 254 bp, Glycine max
  unsure (1)..(254): unsure at all n locations
gaaaggcgcaaagggtttgataactgctaaggacaaagataagaaaaaaccaatttctcgctcctcaagagccggtcttcagtttcctgttggacgcattcatcgtcttctgaagtcaagggtgacagcacatggaagagttggggcaacagctgcagnntattctgctgccatcctggagtatttaactgcagaggtgttggagttggctggcaatgcgagcaaggatctgaaggtgaagcgtattaccccaa

SEQ ID NO: 281831 - DNA, 259 bp, Glycine max
  unsure (1)..(259): unsure at all n locations
aagtagttgagaactaagaagaaggaaatggcttcctcaatgatctcctccccagctgttaccaccgtcaaccgtgccggtgccggcatggttgctccattcaccggcctcanatccatggctggcttccccacgaggaagaccaacaatgacattacctccattgctagcaacggtggaanagtacaatgcatgcaggnctggccaccaattggnnagaagaagttcgagactctttcctacttgccagacctcgatg

SEQ ID NO: 281832 - DNA, 254 bp, Glycine max
  unsure (1)..(254): unsure at all n locations
gcaaaagcaagaagaactagtctaagcagaaatngcctcttcagtgatggcatctgtggccctcaaacctgcccctttcactgttgagaagtcctcanttagaggccttccctccctctcaaggaactcctcttcattcagagttgtggccagtggtggcaagaagatcaagactgacaagccttatggaattaatggtggcatggctttgagggaaggagttgatgcatctggcaggaaaggaaagggaaagg

SEQ ID NO: 281833 - DNA, 248 bp, Glycine max
gcacggtttcgtgtaccgtgagcacaacaggtcacctggatactatgatggacgctactggaccatgtggaagctgcctatgtttggctgcactgatgcttctcaggtgttgaaggagcttcaagaggctaagactgcataccccaatggcttcatccgtatcattggatttgacaacgttcgccaagtgcagtgcatcagcttcatcgcctacaagcccccaggcttctaagtcattgaaaaatttg

SEQ ID NO: 281834 - DNA, 248 bp, Glycine max
  unsure (1)..(248): unsure at all n locations
cggaagatgaaccagagaaatnccagtcacacttcagtgaatacatcaagcgtgngatagaagctgatggtattgaggcactgtataaaaatgttcatgctgccatccgggctgatcctactctcaagaaatctgataagcagaccccgaaggagcacaagaggtacaacttaaaaaagctgacatatgaggagaggaaggctaagttgatttcacgtgtggcagctctcaactctgctgtgataatg

SEQ ID NO: 281835 - DNA, 247 bp, Glycine max
ccttagccgaggtcacgaggagcactagctagtttcacaatttccaaatggctaggggattgaagaagcatctcaagaggctcaatgctcctaagcattggatgcttgacaaactgggtggtgcatttgcgcccaaaccctcatctggaccacacaaatctagggagtgccttcccctcatactcatcctacgaaaccggctaaagtatgctctgacttaccgtgaagtcatcgctattctgatgca

SEQ ID NO: 281836 - DNA, 244 bp, Glycine max
  unsure (1)..(244): unsure at all n locations
aaacaaagttagaagtaaagaagatcatggcttctntagcaaccttggctgctgttcaaccagctacgatcaatggccttgctggaagttccctctctggaactaagctctctttcaagccctctcgccacagtgtcaaatccaagaacttcaggagtggtgccgtggtagcnaagtatggtgacaagagtgtgtactttgatttggaggatctgggcaacactacagggcagtgggacttgta

SEQ ID NO: 281837 - DNA, 246 bp, Glycine max
gtgaatgcagcattcagagagagtgcagacaatgagctcaagggaatcctctctgtgtgtgatgagccacttgtgtccgttgacttcaggtgcactgatgtgtcctcaaccgttgactcctcgttgaccatggtcatgggagatgacatggtgaaggtcattgcttggtatgacaatgaatggggctactcccaaagggttgtggatttggctgacattgttgccaacaaatggaagtgagagcca

SEQ ID NO: 281838 - DNA, 243 bp, Glycine max
  unsure (1)..(243): unsure at all n locations
gcggaanatgaaccagagnaataccannnanacttcagngantacatcaagcgtggganagaagcnganggtattgaggcactgtataaaaatgttcatgctgccatccgggctgatcctactctcaagaaatctgataagcagaccccgaagagcacaagaggtacnacttaaagaagctgacatnngaggagaggcaggctaggttgatttcacgtgtggcagntctcaactctgctgctg

SEQ ID NO: 281839 - DNA, 246 bp, Glycine max
aacaacttgcattttgccctgccattgtggttcctggtgtatactactcagatgataagatgcttcaaaccaggatattctcttatgctgattcacaaaggcacagacttggaccaaactatctgcaacttcctgctaatgctcccaagtgtgctcaccacaacaatcatcatgaaggtttcatgaatttcattcacagggatgaggaggttaattacttcccttcaaggtatgatcctgttcgtc

SEQ ID NO: 281840 - DNA, 246 bp, Glycine max
gtttgcaggtgctgagattatgttgcaatgcaagagcagggttagcaacgaggttgtgtacacgaagaaggggtacaccgactcaaccggagcatacacaatgtacgtggatgaggatcacgcagatcagatctgcagtgccaagcttgtaagcagccctcaccctcaatgcaaggaagtcaccccaggccgcgacgaagccgtcgtgattctcacccgctacaacggcattgcctccgacgatag

SEQ ID NO: 281841 - DNA, 268 bp, Glycine max
caactttcgatggtaggatagtggcctaccatggtggtgacgggtgacggagaattagggttcgattccggagagggagcctgagaaacggctaccacatccaaggaaggcagcaggcgcgcaaattacccaatcctgacacggggaggtagtgacaataaataacaataccgggctcattgagtctggtaattggaatgagtacaatctaaatcccttaacgaggatccattggagggcaagtctggtgccagcagccgcggtaatt

SEQ ID NO: 281842 - DNA, 264 bp, Glycine max
gcttgatggggtggtagtgaatgggagcttggagaggcgctatgtggggaatttgaatttgtcgtttgcttacgttgaaggggagagtctgcttatggggttgaaggaggtggctgtgtccagtggcagtgcctgcactagtgctagtttggagccttcttatgtgttgagggcgttgggagttgaagaggacatggctcacacttctattaggtttggaattggtaggttcactaccgaggctgagattgatagggcggttga

SEQ ID NO: 281843 - DNA, 275 bp, Glycine max
  unsure (1)..(275): unsure at all n locations
catcaacccgcaagacgacatcacattcnatcccccggagcncccggaagggttncgtggcgcctccctcnttcgacgacggccctctggagacngaggacgaaatcgccgccgcctacgaggngctctacggccccggctacagcggtgtctcggtcctcggcaacgacgtgtacgtgatggacgcgaaggtgtagaaaganaccgggttcgggtccggcgccaagaaggagaangtgagggacgggttcgagganatggtggtgcatgtcagg

SEQ ID NO: 281844 - DNA, 267 bp, Glycine max
gtggagctaccctatgcgaccctatgggttttggactttcgaacgccacaattctcagcttgcttgggatgcacagattagccaagtggctgggaggagggacccttatgatgatatcctccaacatttctctaccccacctaagtgagtgttgctgaacttgccacaaacattgtaggtgaaaaaggatatgaacttggcgtaatttccccttgtaatatcctgtcttgttgcatgttgcatgttgcggagatcacaactggattg

SEQ ID NO: 281845 - DNA, 263 bp, Glycine max
gttattgcaaaatttaaaatttactggcagccaacctatcaagtgattcagccaatcaacggtgacccattcattggaagcctggaaaccccagttacatccagccctttgatcgcatggtacttgtccaacctgcccgcatacagaaccgcagtgagcccactactaagagggatcgaggtgggcctggcccacggataccttctggtgggcccattcgtgaaggccgggcctcttaggaacaccgagatcgccgggcaagc

SEQ ID NO: 281846 - DNA, 265 bp, Glycine max
  unsure (1)..(265): unsure at all n locations
caacattttggttgtnacgtttctttncagatgtttggatgcttttncccaangaggaagagtatattgantggtttcanaaggcanggnttaaggangtccaactaaaaaggattggnccaaaatggtatcgtggggttcgccgtcatggcttgattatgggttgttcagtgacnggtganttaactgcatctggagattctcctttgcagcttggtccaaaggaagaagatgttgaaaagcccgttaatccttttgtctttgc

SEQ ID NO: 281847 - DNA, 263 bp, Glycine max
  unsure (1)..(263): unsure at all n locations
ggacagaatgacatctactacattactggtgaaagcaagaaagctgtcgagaattcccccttccttgaaaagcttaagaagaagggatacgaggttctctacatggttgatgctattgatgagtatgctgttggccagcttaaggaatttgagggaaagaagttggtctctgctaccaaggaaggcctaaaacttgatgagagcgaagacgagaagaaaaagaaggaagaactanaggataaatttgagggtctttgccatgt

SEQ ID NO: 281848 - DNA, 263 bp, Glycine max
  unsure (1)..(263): unsure at all n locations
gcaccatggaaggtctcagattgaacacaagggtgggaattcagtacgtggcggcgtggctcaccggaagcggttcggtgcctctatacaacctcatggaggatgctgccacngctgagatcagcagggtgcagaattggcagtggctcaagtatggagtggagctcaatggggatggtcttggagtgaaagtgaacaaagaactttttggtagggttgttgaagaagagatggctaggattgaaaaggaagtggggacagag

SEQ ID NO: 281849 - DNA, 265 bp, Glycine max
  unsure (1)..(265): unsure at all n locations
gcataacacatngtgggagtggggtnccanaagtgttactgaatcagatgttcgganacaatgggctagaatccnaggagggtattancctatctgataagcanaaagctgctgaagctgatccnacngagatgttcgctatctaagggaagcaggcnaatcagcttntatcctctctgctgaacttgctgcagnccataatttgaaagcttaaaanttgngaaaaaanaataanagatnatgcnacagcaacacaatctgtttt

SEQ ID NO: 281850 - DNA, 264 bp, Glycine max
  unsure (1)..(264): unsure at all n locations
ggatgctcgggtggtctatgacagagagactggtcgatcacgtggttttggctttgtcacaatgtcctagtgagactgatatgaatgatgcaattgctgcccttgatggtcagagtttggacgggagggctatcagagtgaatgttgcacaggatangcctagccgcagctctttttgagtggtaacttgagtgannnnncatgtccggctgattgagtttccttttaatggctaagtatacagtggcgtttttttttttatct

SEQ ID NO: 281851 - DNA, 269 bp, Glycine max
  unsure (1)..(269): unsure at all n locations
agaagagaatcataagaaagcaagaaagaaaatgggagtggagaagcagtncttgaggccnggcaccggtcccaagccaattcccggtcagaacgtcaccgttcactgcactggtttcgggaagaacggtgacctttctcagaaattctggagcaccaaggatcctggccaggaccctttcactttcaaaatcggccaaggttctgttatcaaaggatgggatgaaggtgtgcttggcatgcaaattggtgaagttgctcgtctccggt

SEQ ID NO: 281852 - DNA, 246 bp, Glycine max
  unsure (1)..(246): unsure at all n locations
gagaagaagaagagagagtgatggagtgcgtattcggattggtgggtaatgggtttgcgatcgtggtggctgattcatcggcggtgcacagcatcctcgtccacaagtccaacgaggacaagatcatgctcctcgattcccacntcctcattgccgntagcggcgagcccggagacagggngcagttcacagagtacattcagaagaacgtcgccttgtatcagttccgtaacggcatccctctta

SEQ ID NO: 281853 - DNA, 261 bp, Glycine max
  unsure (1)..(261): unsure at all n locations
aaataaggttgaagaggtcactgccggaagaagggagcaacaccatctttcattttccggcgatctcttgtttnttccatcatcaccgttttccggcgatccctaatcctcgcaaacagaaatgacgacatcaaggcgccttgcggacaggaaggtggagaagtttgagaagaacatcacaaaaagaggatttgtgccagacactaccactaagaagggaaaagactaccctgttggcccagtgctgctcggtttcttcgt

SEQ ID NO: 281854 - DNA, 260 bp, Glycine max
aaaagagttctttcaaaatgcaaacagccttaaccttcgctgcccccaacgttgtgccattggcacccacaaagagtgtctcccatattaccatctttcctaccaaattgaaagccccgcgctcctcacctcgttactctccgattagggttgcaaccgtggagcccgacacttcaactgtcgactacaactctgcgttctcagtgtttcctgcagaagcatgcgaaactgtaggaggggaagcctgcatggcggagatg

SEQ ID NO: 281855 - DNA, 258 bp, Glycine max
  unsure (1)..(258): unsure at all n locations
caaagtctcaagatcgaattgttggagcccatttcttcagtcctgcacatgttatgccgcttctggaaattgtacgtaccaagcagacctctccccaagtgatagttgacgtgttagatatttcaaagaagataaagaaaactccagtggtggttggaaactgcacagnctttgctgttaataggatgttcttcccatacacgcaagcaggtctcttgcttgttgaacgtggtgcagatgtttatcaaattgatagaa

SEQ ID NO: 281856 - DNA, 258 bp, Glycine max
  unsure (1)..(258): unsure at all n locations
caattgttgggttctatagtcgcatgcctcctcctcaatttgatcaccgctaagagcattccaagccactcgccggctaatggtgtgaacgatttgcaagctgtagtgtttgagattgttatcacatttgggttggtttacactgtgtatgcaantgcagtagacccaaagaangggtcattgggtatcattgcacccattgctattgggttcgttgtgggtgccaacatcttagcagcaggcccattcagcggcggt

SEQ ID NO: 281857 - DNA, 262 bp, Glycine max
ggaaaattctgcattcgtgagcactcgtgtggattggaaggagaccccagaagcacacgtattcaaggctgatattccagggctgaagaaggaggaagtgaaggttcagattgaagatgataaggttcttcagataagcggagagaggaacgttgagaaggaagataggaataacacgtggcatcgcgtggagcgtacagcggcaagttcatgaggaggttcagattgccggagaatgcaaaagtggataaagtgaaggctt

SEQ ID NO: 281858 - DNA, 267 bp, Glycine max
  unsure (1)..(267): unsure at all n locations
agcataacacatggtgggagtggggtaccagaagtgttactgaatcagatgttcggaaacaatgggctagaatccgaggagggtattagnctactgataagcagaaagctgctgaagctgatgaatggagatgttcgctatctaagggaagcaggcaaatcagcttttatcctctctgctgaacttgctgcancccataatttgaaagcttaaaagttttggaaaaaagaataaaagatgatgcaacagcaacacaatctgttttct

SEQ ID NO: 281859 - DNA, 262 bp, Glycine max
  unsure (1)..(262): unsure at all n locations
gttgacacagctgaagacagattgtntcgtcctgcacaatcatcgttatgccatatccccacgcaagcttcaatataataccaagttatctgacttttttgagattctggcaacatctgaggatagagatggaaagactttcgtttccacagcacgtggtaggnaatatcccgtgactgtnaacctatggcaaccagagaaaaatgctttngantgggctacatcttggaananccctcacacagaggtngnattggggntc

SEQ ID NO: 281860 - DNA, 265 bp, Glycine max
cttgcaaggaaacttcaggaggagctggagagaaatcgaaagacattcaggttccaagtctgatggatctgcaagacggatgaaggaagttgcatgtcccatttgcactgtccatctgcaggttcaggtgcctagctcgggttcagagacaattgagtgtggagtttgccagcacccatttcttgtgagcgctcattgagttcagataaacatgaatacggaagcggtgtctacgtgtttcataagtttaaaatgcatttgtttt

SEQ ID NO: 281861 - DNA, 257 bp, Glycine max
  unsure (1)..(257): unsure at all n locations
cctcttctcttcattcttcactcaggaaacaagcataatggccttctgtaataaggttggaaatgtcttgaggcagggtgctgctcgcagcacacaagcacctgtttcatccatgcttaattacattcgctgcatgtcngcaagcaagctttttattggaggcctttcatatggagttgacgatcagtctcttaaggatgcattttctggctttggagagtggttgatgcaaaagttataactgacagagactctgg

SEQ ID NO: 281862 - DNA, 257 bp, Glycine max
  unsure (1)..(257): unsure at all n locations
ggagaatatgaagttgtttgttttctttgttgctgcagtagttttggtancntngccatgccatggcgcaggctaccaaaggttccctctccgaatganaactggctatggtgagcgttcttcggaggtaaaatgcgcaagtttnaggcttgctgtggaagcacacaacatccgatcntttaannccattcctgaagagtgcgtnnaaccancaaaggactacnttnntggcgaacaattagatcagactctaaaac

SEQ ID NO: 281863 - DNA, 254 bp, Glycine max
  unsure (1)..(254): unsure at all n locations
aaggaatcnatcantcaagcnatggcaggcttcagtggcgacgaaancgctcctttcttcggcttcctcngtgcnngctgnggncctcgtnttctcctgtatgggagcggcgtatggaacggcgaagagtggggtgggggtggcgttcgatgggagtgatnaggccggagctggtgatgaagtcgatcgtgcnggtggttatggcgggagtgttggggattacgggttgattattncggttattatcagcactg

SEQ ID NO: 281864 - DNA, 267 bp, Glycine max
  unsure (1)..(267): unsure at all n locations
gttatctgacttttttgagattctggcaacatctgaggatagagatggaaagactttcntttccacagcacgtggtaggaaatntcccgtgactgtcaacctatggcaaccagagaaaaatgcttttgaatgggctacatctttgaaagcccctcacacagagnntgcaattcgggttactcagtccacagcaaactttttcataagtgaagctaggaaatccacaaacacacctgatgctcaaaaagtgcgagataatctcatcta

SEQ ID NO: 281865 - DNA, 269 bp, Glycine max
atcttgacaaaatggccgtaacagaagcaaacctaaagaaggctggcttccacacatgggagcagttaattctccaaggatccacatcttatcactccaaatgcactttcatacaaatcagcaatgagagagaatctgttgaggcagggatacagaattgttggaatcattggagaccaatggagcgatctgcttggagaccacagaggcgaaagcaggacctttaagcttcctaatcccatgtactacattgagtagtaccttcacct

SEQ ID NO: 281866 - DNA, 267 bp, Glycine max
gatccatctgctccccatggagttcggcttttgattgaggactatccttatgcttctgatgggctagagatatgggatgccatcaagtcctgggtgcatgaatatgtctcattctactacaagtcagatgcagcaattcaacaagatcccgagctccaagcttggtggaaagaacttgtccaagtgggtcatggtgatttgaaagataagccatggtggcaaaagatgcaaactcgtgaagagttgattgaagcctcggctaccctc

SEQ ID NO: 281867 - DNA, 268 bp, Glycine max
  unsure (1)..(268): unsure at all n locations
gcagaactttgtggtggctgagcaagggggagaacaaggattggaatacgtagtgttccaagacacaccacaacgccgtgagcagctacattaaggatgtgtttagggcaatcccttcggaggttctttccaattcttacaaccttggccagagtcaagtgcgtcagtcaagtatcaangnaactccggnccntggtcaacccataaattaccaacaagcatatatgaaggtgtggtgaggccatcttatatgaataatatcaaaata

SEQ ID NO: 281868 - DNA, 264 bp, Glycine max
gttatctgacttttttgagattctggcaacatctgaggatagagatggaaagactttcgtttccacagcacgtggtaggaaatatcccgtgactgtcaacctatggcaaccagagaaaaatgcttttgaatgggctacatctttgaaagcccctcacacagaggatgcaattcgggttactcagtccacagcaaactttttcataagtgaagctaggaaatccacaaacacacctggatggctcaaaaagtgcgagataatctc

SEQ ID NO: 281869 - DNA, 260 bp, Glycine max
  unsure (1)..(260): unsure at all n locations
gtgaaagcaagaaggctgttgagaactccccattcttggagaagntnnaagaagaaagggtatgaggttctttcatggttgatgccattgatgaatatgctgttggccgcctcaaggaatttgagggcaagaagctgtctctgccaccaaggagggtctcaaacttgacgagagtgaagatgagaagaagaagcaagaggagttgaaggagaatttgacaacctatgcaaggtgatcaaggatgttttgggtgacaagtg

SEQ ID NO: 281870 - DNA, 275 bp, Glycine max
  unsure (1)..(275): unsure at all n locations
ggttccctctccgaatgaaaactggctatggtgagngttcttcggaggtaaaatgcgcaagttttaggcttgctgtggaagcacacaacatccgagcnctttaaaaccattcctgaagagtgcgttgaaccatcaaaggactacattaatggcgaacaatttagatcagactctaaacnnttaaccaacnaagcttccttttatncaantgancgcgaatccatcacaacgacatatttatattcggcatagataacaccgtactctctaatatc

SEQ ID NO: 281871 - DNA, 277 bp, Glycine max
  unsure (1)..(277): unsure at all n locations
gtgaggtagaacccttccacggtggtgactgcgcgatgggtgcctacaagtatgtttcagagctatgngcgcaagaagcagtctgatgtcatgcgcttcttgcagcgggtgaggtgctgggagtataggcagcaaccttccattgttcgcttgacaaggtcgacccgccctgacaaggctcgtcgcttgggcttcaaggctaagcagggctatgtgatataccgtgttcgtgttaggaggggtggccgaaagaggccagttcccaaaggtattgttt

SEQ ID NO: 281872 - DNA, 261 bp, Glycine max
  unsure (1)..(261): unsure at all n locations
ccagtgtagatgtgaacgccaatggcaatgaggaagatagtgatgaggccaaagtagatgatggcgtgaaccaaaatggaggccccactggtttgcatgttcccaaactctgctacccttcccctggctggcatctgaaacagaagccccgggcttaacagcacgaacagcaccactgcgatcancaccgggccccaatcagccattttccaagcagagaagagctttaaggcttctgggggacacaatagacaaagtcac

SEQ ID NO: 281873 - DNA, 261 bp, Glycine max
cgcggcataacctaaacctatctttcttctctctctgtgtgtgcgcttcaacggcaaccagaagcagccatggccactgcaaggactgtgaaggatgtttcacctcatgagttcgttaaggcgtactcctctcacctcaagcgatccggcaagatggagctgccagagtggactgatattgtgaaaactgcaagatttaaggagttggctcctatgatcctggactggtactatgtcagagctgcttccatggcaagaaag

SEQ ID NO: 281874 - DNA, 265 bp, Glycine max
  unsure (1)..(265): unsure at all n locations
agaagaacncagtagttgagaactaagaangagaagcaaatggcttcctcaatgatctcttccccagcnntnaccactntcaaccgtgccggtgccggcatggttgctccattcactggcctcaagtccatggctggcttccccacnaggaagnacnacaatnncattnacctccatngcnancaacggtggaaaagtgcnntgcatggcaggtgtggccaccagttggnaagaagaagttngagactntttcctacctgccaga

SEQ ID NO: 281875 - DNA, 272 bp, Glycine max
  unsure (1)..(272): unsure at all n locations
gtgaccaaactccatttctcactcgccgtcgtctcttccgtctagggtttctcctcttcacaaaaatggttgccgcaaaaaaaactaagaagacccatgagagcatcaacaacaggctcgctctcgtcatgaagagtggcaaattcaccctcggntacaagaccgttctcaaatctcttaggagctccaaagggaaattgattatcattgctaacaactgcccccctttgaggaagtcagagattgaatactatgctatgttggcaaaggtt

SEQ ID NO: 281876 - DNA, 256 bp, Glycine max
cacaaaggcacagacttggaccaaactatctgcaacttcctgctaatgctcccaagtgtgctcaccacaacaatcatcatgaaggtttcatgaatttcattcacagggatgaggaggttaattacttcccttcaaggtatgatcctgttcgtcatgcagaaacgttccccatacctcctgctatctgcagtggaaggcgtgaaaagtgtggattgagaaggagaacaactttaagcagcccggagagagataccga

SEQ ID NO: 281877 - DNA, 259 bp, Glycine max
  unsure (1)..(259): unsure at all n locations
ctcacaaacgcacactgaattcaaaanccatcgaaagagagaggcatggccgagcaaancttcatcatgatcaagccagatggcgttcaaagaggccttattggcgagattattagcagatttgagaggaagggtttttacttgaaagggttgaacctcgttactgtggaccgtcctttgctgagaagcactatgctgatttgtctgcaaanccttttctttagtggnttnggtggattacntggccccgggcctgtgt

SEQ ID NO: 281878 - DNA, 269 bp, Glycine max
gtcgtctcttcctcttcgcaacaatggttgccgccaagaaaaccaagaagacccatgagagcatcaacaacaggcttgctcttgtcatgaagagcggcaaatacacccttggttataagaccgttctcaaatctcttaggagctccaaagggaaattgattatcattgctaacaactgcccccctttgagaaagtcagagattgaatactatgccatgttggcaaaggttggagttcatcattacaatgggaacaatgtggatttgggc

SEQ ID NO: 281879 - DNA, 249 bp, Glycine max
  unsure (1)..(249): unsure at all n locations
gaggaaacacaagctcaagcgtcttgttcagtcaccaaactctttcttcatggatgttaagtgccagggttgcttcaacataaccactgtctttagccactctcagactgttgttgtatgcggaaactgccagactgtcttgtgtcaaccaaccggtggccgggcaaggctaaccgagggatgcccttaggaagaagggagactnantggatgccatcttttttgtttgtgatggagagtttcagtaat

SEQ ID NO: 281880 - DNA, 259 bp, Glycine max
  unsure (1)..(259): unsure at all n locations
atgaaagctgggcagaaggatatcttttacataactggaaccagcaaagaacaactggaaaactctccattccttgagcggcttaagaagaaaaattttgaggttattttcttcacggatccagttgatgaatacttgatgcnattacctgatgggntntgaagnccagaagttcccaaaatgtgtccaaggagggtttgaaactcgggaaagattcaaaagacnggnactgaaggaatccntcaanggccttaccaag

SEQ ID NO: 281881 - DNA, 262 bp, Glycine max
  unsure (1)..(262): unsure at all n locations
gcttctgattattcctcttcccattctagggttcccaaatggacgctggcggaaagatcaagaagggcgccggaggaagaaagggcggcggccctaagaagaagccggtttcaaggtccgtcaaggccggtctccaattccccgtcggaagaattggccgttatttgaagaaanganntnnccccagcgtgtcggtaccggtgctcccgtttattggccgcattctcgagtacctagctgctgaggtgcttgattggctggg

SEQ ID NO: 281882 - DNA, 263 bp, Glycine max
cttttggttatggctcctatttttcactctcaatgatggacagacactaccatagtggaatgtcagttgaagaagcaattgatctcgttgataagtgcattatggaaatcagatccaggcttgttgttgcgccgcccaactttgttattaaaatcgtggacaaggatggtgcaagagagtacgcatggcgtgagtcagtcaaggatactcctgttccttcagcttgagtaactctttccctaattttcgttggacttcttctt

SEQ ID NO: 281883 - DNA, 264 bp, Glycine max
  unsure (1)..(264): unsure at all n locations
gtcatcatccgcagctgctgttattcgcaccgcaaacaaacagtgagccatggccgtcggaaagaacaagcgcatctccaaagggaaaaagggtggcaagaagaaggcagctgatccctttgccaagancgattggtatgacattaaggccccttctctttttcaagtgaaaaatgttggcaaaaccctcgtctctcgtacgcagggtaccaagattgcttctgaaggnttanacatagagtgtttgaggtctccttggctgat

SEQ ID NO: 281884 - DNA, 263 bp, Glycine max
  unsure (1)..(263): unsure at all n locations
gttctttcgtcgtcgtcacaagtcacaactcgcaaaccacaatgcctaagcagatccacgagattaaggattttcttctgacggcgcggaggaaggatgcgaggtcggtgnaaatcaagaggagcagggatgtcgttaantttaaggttcgatgctccaagtacttgtacacgctttgtgtccttgaccctgagaaagccgataagttgaagcaatctcttcctcccggtttgagtgttcnnngangtagagctgttgagtgt

SEQ ID NO: 281885 - DNA, 264 bp, Glycine max
  unsure (1)..(264): unsure at all n locations
gttctttcgtcgtcgtcacaagtcacaactcgcaaaccacaatgcctaagcagatccacgagattaaggattttcttctgacggcgcggaggaaggatgcgaggtcggtgaaaatcaagaggagcagggatgtcgttaagtttaaggttcgatgctccaagtacttgtacacgctttgtgtccttgaccctgagaaagccgataagttgangcaatctcttcctcccggtttgagtgttcaagacctgtagagctgttgatggt

SEQ ID NO: 281886 - DNA, 266 bp, Glycine max
  unsure (1)..(266): unsure at all n locations
catgagtgttacacccatggcacaggccgcaatcacgtgcgggcaggtcgccggcgacgtgtctccgtgcctcagttatcttcgaagcggcggaaaaccgtcggacgcctgctgcaacggagtgaagtcgctcagcggcgcggcgaagaccnccgccgaccgccaggcagcctgcaattgcctgaaaaaccttgccaataatatgggacagagtttgaatgccggcaacgcagcctctctccctggcaaatgtggcgtcaacatcc

SEQ ID NO: 281887 - DNA, 263 bp, Glycine max
  unsure (1)..(263): unsure at all n locations
agaagaaggtggtaggcattcacctttctttgcagggtataggcctcagttttacatgaggacnaccgatgtgactgggaaggttacgtctatcatgaatgataaggatgaggagtccacgatggtgctgcccggtgaccgtgtcaagatggtggtggagcttattgttcctgtggcttgtcaacagggaatgaggtttgctattagggaaggtgggaagaccgttggtgctggtgttatccaatccatattgagtgaaaatt

SEQ ID NO: 281888 - DNA, 267 bp, Glycine max
  unsure (1)..(267): unsure at all n locations
ccattntacaacccaattcccttcgtcgttttcgattaagagagcaatggcacgtaccaancaaaccgctcgcaagtccaccggaggaaaggctccgaggaagcaattggcaaccaaagccgctcgcaagtncagccccggcgaccggcngagtgaagaagccccaccgcttcaggccaggaacggtggctctgaggagattcgaaagtacnagaagagcaccgaacttctgatccgaaaactcccattccagaggctcgtcagaga

SEQ ID NO: 281889 - DNA, 262 bp, Glycine max
gctggagttgtcttaaaccccggtacccccttaagtgcaatagaatatatccttgatgtggttgatttggtcttaattatgtccgtaaaccctggctttggtggccagagttttattgagagtcaagtaaagaaaatttctgatttgagaagattgtgtgcggagaagggagtgaatccatggattgaagtagatggtggagttggtccagcaaatgcatacaaggtgattgaggctggagccaatgcactggttgctggct

SEQ ID NO: 281890 - DNA, 264 bp, Glycine max
  unsure (1)..(264): unsure at all n locations
ggcaaatttgaactttctggcattcctcctgcccccaggggtgttcctcagattactgtgtgcttttnacattgatgccaatnngtattttgaacgtctctgccgaagataagaccactggccagaaaaatangatcactatcaccaatgacaagggtagactgtcaaaggaagatatcgagaagatggttcngaggctgagaagtacaaatctgaggatgaagagcacaaaaagaaggttgaggccaagaatgctttggaaaa

SEQ ID NO: 281891 - DNA, 264 bp, Glycine max
  unsure (1)..(264): unsure at all n locations
acgaccgtcttccccaatcgcctgcgtctctctctganttgacaagcttaaagacaaagtcttaaatggctggtccaaggattgcccatgctaccttgaaaggtccgagtgtggttaaggagataataattggaataacacttggcttagctgctggtagcgtgtggaagatgcaccactggaatgaacagagaaaaccaggaccttctacgatttactggaaaagggtgagatcagtgttgttgcagaggaacagtgaaaatg

SEQ ID NO: 281892 - DNA, 262 bp, Glycine max
agcttcctacgatgaaattaaaaatgctatcaaggaggaatcagagggcaagttgaagggaattcttggttacactgaagatgatgtggtctccactgactttatcggcgatagcagatcaagtatttttgatgcaaaggctggaattgcattgaataagaactttgtgaagcttgtttcttggtacgacaacgagtggggatacagctcacgtgtcattgatcttcttgtattcgttgccaagaagtctctttaaggtgtt

SEQ ID NO: 281893 - DNA, 257 bp, Glycine max
  unsure (1)..(257): unsure at all n locations
gcttctgcggatgttgaataccgatgctttgttggtgggctcgcttgggccactgacaactacgatctggagaaagccttctctcagtacggtgacgtcgttgaatcgaagattatcaacgatcgtgagactggaagatccaggggatttggatttgttaccttcgcctccgaggattcaatgagggtgcgatcgaagggatgaacggtcagaaccttgatggacgcaacatcacnctgaacgaagctcagtcccgc

SEQ ID NO: 281894 - DNA, 261 bp, Glycine max
  unsure (1)..(261): unsure at all n locations
gttgtgttgagcagagagaaggatcaagaaaggataagaagaaagagggaatagggttngggttagggttagggttaggttgaggatgccgcngaacaagggaaagggaggtaagaacaggaagaggggaaagaacgaggcggacgacgagaagcgagagctggtgttcaaggaggacgggcaggagtacgcgcaggtgctccggatgctgggtaacgggcggtgcgaggcgatgtgcatcgacgggacgaagaggctctc

SEQ ID NO: 281895 - DNA, 260 bp, Glycine max
  unsure (1)..(260): unsure at all n locations
cttccttttctcttctctgtctaaggggtgccctgagatcacattgancaatggtgaaggctgtgncccgttcttggcagcagtgagggngtcactggaactattcacttcgttcaggagggaagtggtccaaccaccgtaactggatctcttgctggtcttaagcctggtctccatggtttccatgtcatgccttgggggacactaccaatggttgcctctcaactggatcacatttcaatcctaataacaaggagcat

SEQ ID NO: 281896 - DNA, 262 bp, Glycine max
  unsure (1)..(262): unsure at all n locations
gaagcagcagagggaggagcggcattaaaaatgcagatcttcgtgaaanccctaacggggaagaccataaccctcgaggnacgaaagcagcgacaccattgacaatgtcaaggctaagattcaagacaaggaaggcatccctccggatcagcagcgtttgattttcgccggaaagcaacttgaagatggnnggaccttggccgattacaacatccagaaggaatcaacccttcaccttgtctcaggcttcgtggtggcatca

SEQ ID NO: 281897 - DNA, 265 bp, Glycine max
  unsure (1)..(265): unsure at all n locations
ggatcgtgagaggggcagtagccgagattccgtgagttgcaaaaatgaagacgattntttccaccgagaccatgaacatcccggacggcgtgagatcaaagttcatgccaaggtcatcgaagttgagggcccccgcggaaaattggtgcgagacttcaagcattgaatctcgattttcagnncattntntgacgaaaacggtaaaagaaagctgaaaatcgacgcgtggtttggttctcggaaaacatccgccgccattcgcacc

SEQ ID NO: 281898 - DNA, 257 bp, Glycine max
agaacaacagggtttggtaccccttgctggttccaacgacgagtcatggtgccaaggtcttgatggtcttgcctctcgctcggctgcatactaccagcaaggtgcccgtttcgccaaatggcgtactgttgtgagcatccccaacggtccctctgctctggcagttaaggaagctgcctggggtctgctcgctatgcagcaattgctcaggacaatggattggtcccaattgtggaaccagagatcttgcttgatgg

SEQ ID NO: 281899 - DNA, 261 bp, Glycine max
  unsure (1)..(261): unsure at all n locations
cncatactatgaaaaacatggatatggggtggaggaatttaatgaaaccttatatgatgaatgggttaacaagggcgacgcatcggcattgccagagactcttaaaaattacaacaagctgttgtctcttggcttcnagattgtattcttgtcaggaagatatcttgacaaaatgtccgtaacagaagcaacctaaagaaggctggcttccacacatgggagcagtaattctcaaggatccacatcttatcatccaaatgc

SEQ ID NO: 281900 - DNA, 253 bp, Glycine max
agcattcggactctccgctggagttggagttggcaacgccttggtgttggagatcgtgatgaccttcggtctggtatacacggtctacgcaactgccattgaccccaagaagggtaatttgggaattattgctcccatcgccattggtttcattgtcggcgctaacattttgttgggtggggccttctctggagcggccatgaaccccgctgtgacattgggcctgctgtcctgagctggacctggaccaacc

SEQ ID NO: 281901 - DNA, 257 bp, Glycine max
  unsure (1)..(257): unsure at all n locations
gccgcagcaagtgatcgaagcgaaaagagagaaattcatcgtcgcagtaatcatgggtaaggttcatggatcacttgcacgtgctggtaaggttagatnggcaaaccccgaaggtggccnnnnnnnnnnnnnnnnnnnnnccacgtggccgcgcccacaagaggatgcnctacaatcgccgattcgtcaccgccgtggtgggattcggcaagaagaggggaccaactcgtctgagaagtgaggccgaggcttgagga

SEQ ID NO: 281902 - DNA, 258 bp, Glycine max
  unsure (1)..(258): unsure at all n locations
ttctttgcgaaggaggtttacagcgctcaaccaaagatgcagaacgaggaangacagatcactgagctttacattcctaggaagtgctccgccacaaacagattgattaccgctaaggaccatgctccggttcagatcaacattgggcatgtggatgagaatggcgtctacaatggccatttctccattttgccctctgcggattcatccgtgctcagggtgatgctgacagtgctctagaccgcttgtggcagaaga

SEQ ID NO: 281903 - DNA, 261 bp, Glycine max
cgtttcctctgccctattggtcaggatacagtccagagcccaccaagaaggcggaaacacatgaagtgctgaaaccaactgcagtacattctaaaagccctatcaatgttgatgaactggttggcatatcaaaactgagtttaggggagtctattggtgactcgggtccctccaccctgtctcgaaaacttattgaagaaggaccctctagacaatcagcttttcatgcaacaccaacatgtggtgatatgaatggcagtg

SEQ ID NO: 281904 - DNA, 252 bp, Glycine max
gatgggatcaacgctgtagctgaaaacagggctgatcttgttgcttatggccgttggttcttggctaatccagatttgccaaaaagatttgctctcaatgcccctctcaacaagtatcaccgggagacattctacacttctgatccggttcttggttatactgactacccctttcttgatgtgaagaatccaatgccgtagcatcctagggtagaacctccatttttaataaccttatcttcccctgcaaat

SEQ ID NO: 281905 - DNA, 254 bp, Glycine max
gtccaatggacaagtggcggagattctcgttacctataatgccgccacgagcctcttggttgcttctctgatccacccttcaaagaaaacaagttacatcctctctgacacagtgaacttgaagagtaatcttcccgaatgggtgagcgttgggttctctgccaccaccgggttgcatgaaggctccgttgaaacccatgatgtgatttcttggtcttttgcttccaagttgtcagatggtagcagcaatgatg

SEQ ID NO: 281906 - DNA, 254 bp, Glycine max
  unsure (1)..(254): unsure at all n locations
aagtagttngagaactaagaaggagaagcnaatggcttcctcaatgatctcttccccagntgttaccantgtcaaccgtgccggtgccggcatggttgctccattcactggcctcaagtccatggctggcttccccaccaggaagaccancaatgacattacctccattgctagcaacggtggagagtgcaatgcatgcaggtgtggccaccagttggcaagaagaagtttgagactctttcctacctgccaga

SEQ ID NO: 281907 - DNA, 259 bp, Glycine max
aagcccccgctatccctctctagattgatccgttacacgaagggaaaggaggataagatagctgtggttgttggtgccgtgaccgatgacattagggtttatgaagtctctgctctgaaggtaactgccttgaggttcactgaaactgccagagctagaattgagaaggctggtggggagtgcctcacctttgatcaactggctcttagagctccacttggccaaaacacggttcttcttagaggtcccaagaatgcgc

SEQ ID NO: 281908 - DNA, 287 bp, Glycine max
  unsure (1)..(287): unsure at all n locations
tagtttatcgtgaggagaatatgaagttgtttgttttctttgttgctgcagtagttttggtagcatggccatgccatggcgcaggctaccaaaggttccctctccgaatgaaaactggctatggtgagngttcttcggaggtaaaatgcgcaagttttaggcttgctgtggaagcacacaacannncagcncttaaaaccattcctgaagagtgcgttgaaccaacaaaggactacattaatggcgaacaatttagatcagactctaaaacagttaccaacaagctt

SEQ ID NO: 281909 - DNA, 177 bp, Glycine max
  unsure (1)..(177): unsure at all n locations
tagtttatcgtgangagantatgaagttgtgtgttttctgtgtnnctgnagtagttttggnagnatggccatgncatggcgcaggctacnaaaggttccctctccgaatgaaaactggctatancagaacgttcttcggaggtaaaatgcgcaagttttaggcttnactgnggaanc

SEQ ID NO: 281910 - DNA, 175 bp, Glycine max
cgggatcagcacaagattgcaaaatgaagttcaacattgcaaatcccaccactgggtgccagaagaagctggaaatcgatgacgacctgaagcttcgagcattttgggacaagaggatctcccaggaggttcttggtgatgctctgggtgaggagtttaaaggatatgttttcaa

SEQ ID NO: 281911 - DNA, 280 bp, Glycine max
tccgaacattgaacactgtatgggctcagcacttgagtgaggaactgaaacgtaggttttataagaactggtgcaagtccaagaagaaggccttcaccaagtactcaaagcagtatgaaactgaggagggaaagaaaaacattgaggcacagctggagaaactgaagaagtatgctactgtggttcgtgttttggctcacacccagatcaggaaaatgaaagggttgaagcagaagaaagcccatatcatggaaattcaggttaatggtggtactattgc

SEQ ID NO: 281912 - DNA, 280 bp, Glycine max
  unsure (1)..(280): unsure at all n locations
agaagacaaagtctcaagatcgaattgttggagcccatttcttcagtcctgcacatgttatgccgcttctggaaattgtacgtaccaagcagacctctccccaagtgatagttgacgtgttagatatttcaaagaagataaagaaaactccagtggtggttggaaactgcacaggatttgctgttaataggatgttcttcccatacacgcaagcaggtctcttgcnttgttgaacgtggtgcagatgtttatcaaattggatggaataatanccanttgg

SEQ ID NO: 281913 - DNA, 181 bp, Glycine max
  unsure (1)..(181): unsure at all n locations
gagaagacggagttcgacgtggtgatcgaggaggtgccgagcaacgctcgaatcgcggtgattaaggcggtgagggcattgacgaacctagcgctgaaggaggcgaaggagttgatcgaagggttgccgaagaagttcaaggaagggatttcaaaggacgangctgaantgccgaaacccc

SEQ ID NO: 281914 - DNA, 279 bp, Glycine max
aaaaggacgtcttgcacaactgtgcttactctagcttaccaaagtcttggggtagtatatggtgacctcagtagtgtccctatttatgtttacaagacctcattctcagggaaattgagcctcaaagaagacaatgaagaaatttttggggtgcttcatttatcttctggacattaaccattattggtctcttcaaatatgttttcattgtgatgtctactgatgacaatggggaagtttgagcaatttgctgaaaatgttgaggttcactttgcatta

SEQ ID NO: 281915 - DNA, 275 bp, Glycine max
  unsure (1)..(275): unsure at all n locations
ggaatttcgatgctcagtcatctcttttaccattctcttctctcttgctcttgcaggagagagccatgtccatgcatncgctacctgaggaagattattgggaagctgtttggccaaacactcccattcccactgcactgcgagagcttctaaagnctctccctgcaggtgttgaaatcgatgaactccctaagcaaattgatgatacacagtacccaaaaacttcttctataaagangaccttcatccaggcaaaacaatgaaagtacattccc

SEQ ID NO: 281916 - DNA, 282 bp, Glycine max
  unsure (1)..(282): unsure at all n locations
ctttgcactagcagctttgaaacccggttcatccgaagcccttcaccgaaccatgtcgaggagaaaggttagagagccaaaggaggaaaatgtgactctgggtccagctgttagagatggngaacacgtttttggcgttgctcgcatctttgcctccttcaacgacaccttcatccatgtcactgatttgtctggcagggaaaccctgtccgaatcactggtggtatgaaagttaaagctgacagagatgaatcatctccttatgcctgctatgcttgcagc

SEQ ID NO: 281917 - DNA, 170 bp, Glycine max
  unsure (1)..(170): unsure at all n locations
cactgagcggattgaaatatctgcccagaattcttgggttggaaaaggtggtgcttttactggagaaatcagcgcggaacaactaaaagatcttggatgcaagtnggttgttcttggacattctnagcgaagacatgttattggngaaaatgatgagtttatagggaaga

SEQ ID NO: 281918 - DNA, 165 bp, Glycine max
aattgatagaggcagtattgtggttgctaaggccagaatgtgaaagtgctacttttgcagaactatactgccgagagtggaacttggggaaaattcaccaatttctgtgttggattggaatttggaataaatgtcctcaataattgaagtattaaacgggccatt

SEQ ID NO: 281919 - DNA, 167 bp, Glycine max
  unsure (1)..(167): unsure at all n locations
gttgaacatgttgatcattctcgcaaatcagctgaacaggctgtgaaggccatcaaggcagctgaggaaggaagaacagttgaggagtatgattaccttccatacttctattcccgttcatttgatctgtcttggcaattctatggcgacaatgtcggcgacanant

SEQ ID NO: 281920 - DNA, 172 bp, Glycine max
  unsure (1)..(172): unsure at all n locations
cagagagtggtttcagtgagtgatcggtgttcacttgatccttcataagtcnnnnnnnnnnnnnnnnnnnnnnnnnnntgattgaagaagatgccgatcagaaacatcgccatcggaaggcctgaagaggctactcaccccgacacgttnaaggcggggttggctnagttcc

SEQ ID NO: 281921 - DNA, 276 bp, Glycine max
  unsure (1)..(276): unsure at all n locations
ttgagttaaaaaatggcagcagcttcttccatggctctctcatccccatccttggctggnaangccgtgaagctgggcccatcagccccagnagtgggaagggtgagcatgaggaagaccgtcaccaagcaggtctcctcaggaagcccatggtacggcccagaccgantcaagtactncggcncattgcgtggcganctcccgtctantanncggnganttccaggtgnctaggcctcccacagtgttgggttgccgcagaccnanaaacntctc

SEQ ID NO: 281922 - DNA, 169 bp, Glycine max
  unsure (1)..(169): unsure at all n locations
ctaatgaggaaggtagggaaattgctnaaaagttaggagtgaganacctcttttgggattgggacttgcctaggactagagaaggtttttataggttcaaaggttcagtgactgcatcagttgttagaggttgtgctttttctccacatgctgatgttatatggatgga

SEQ ID NO: 281923 - DNA, 169 bp, Glycine max
  unsure (1)..(169): unsure at all n locations
anaaatggtttcgctgaaactgcagaagcggctccgccgcgagcgtgctcaagtgtngcagaggaaaggtttggcttgaccccaatgaagtcaacgaaatctccatngccaattctcgccaaaacataaggaagctggttaaggatgggtttatcatcaggaagcccac

SEQ ID NO: 281924 - DNA, 271 bp, Glycine max
  unsure (1)..(271): unsure at all n locations
gcgatggggatcgatcttaaggctgggggtaagagcaaaaagaccaaaagaacagcaccaaagtccaatgacatctacctcaaattacttgtcaagctttatcgattccttgttcgaaggacagacagcaatttcaatgctgtgatactcaagcgcctgttcatgagcaaggttaacaagcctccaatttctttgtcaaggttantaagtntaccgangggaaggaggataaattnctgtantagtggggnctgtacctgttnatatcanc

SEQ ID NO: 281925 - DNA, 167 bp, Glycine max
  unsure (1)..(167): unsure at all n locations
gcaaagggaccacaaatttttaagaattgctgttgaagaagcgtataaaggggtagactgtgaagatgggggtccctttggtgctattatagtttgtaatgatgaaattgttgctagatgtcacaacatggttctgaggaacacagnccccactgctcatgcagaac

SEQ ID NO: 281926 - DNA, 279 bp, Glycine max
agaatgttgcagtcaaggatctcaagcgtggttttgttgcatccaactccaaggacgaccctgccaaggaagctgccaacttcacatcccaagtcattatcatgaaccatcctggccagattggtaatggatacgcaccagtccttgactgccacacttctcacattgctgtgaagttttctgaaatcttgaccaagattgacaggcgatctggtaaggagcttgagaaggagcccaaatttttgaagaatggtgatgctggtatggttaagatggttc

SEQ ID NO: 281927 - DNA, 276 bp, Glycine max
  unsure (1)..(276): unsure at all n locations
ccaactcaagtccaccttcactaaaactcttgtagctcccaagggcctctctgcctcttcaccactccacctncctgccttctaagaggcaatttagcttcactgttagggccatccaatcagaaaagccaacctatcangtgattcaaccaatcaanggtgatcccttcattggaagccttgaaaccccagttacatccagccccttgattgcatggtattatcgaacctccccgcatanaggaccgnagtgancccactatnngnggggngggg

SEQ ID NO: 281928 - DNA, 271 bp, Glycine max
  unsure (1)..(271): unsure at all n locations
ggcctggttcccattgttgagcctgagatccttgttgatggacctcatgacattcacaagtgtgccgccgtcaccgagcgtgtccttgcagcatgctacaaggctttgaatgatcaccatgtccttcttgagggtaccctattgaagccaaacatggtcacccctggatcccaatctgctaaggtttcccctcaggtggttgccgagcaaatgtcagagccttcagagaacggtgcctgctgcagtcctgngtcgttttctggnngggggg

SEQ ID NO: 281929 - DNA, 166 bp, Glycine max
atgacaaggaaattgttgcgttatctggtgcacacacattggggcggtctagaccagatcgcagtggttggggaaagcctgaaactaaatatacgaaagatggaccaggagcacccggaggacaatcctggacagtgcaatggttgaaatttgacaactcttactt

SEQ ID NO: 281930 - DNA, 272 bp, Glycine max
  unsure (1)..(272): unsure at all n locations
gccgccacgagcctcttggttgcttctctgatccacccttcaaagaaaacaagttacatcctctctgacacagtgaacttgaagagtaatcttcccgaatgggtgagcgttgggttctctgccaccaccgggttgcatgaaggctccgttgaaacccatgatgtgatttcttggtcttttgcttccaagttgtcagatggtagcagcaatgatgctttggatcttccaagctttgtgcacaagaggncatctaattcaaacatcgnagtnaa

SEQ ID NO: 281931 - DNA, 273 bp, Glycine max
cccacactgcatgatgctttctacaattgggctatagcaatttctgatcgggcaaagatgcgtggccgcacaaaggaagctgaagagctatggaagctggcaacacggaactatgaaaaagcagttcaacttaactggaacagtcctcaggcgctccaataactggggacttgctcttcaggaactcagtggcttgttcccagctcgagaaaagcaaaagattgtgagaactgctatcagcaatttcgtgccagccatacagttgcattcctt

SEQ ID NO: 281932 - DNA, 160 bp, Glycine max
attcgagttggagcacggtttcgtgtaccgtgagcacaacaggtcacctggatactatgatggacgctactggaccatgtggaagctgcctatgtttggctgcactgatgcttctcaggtgttgaaggagcttcaagaggctaagactgcataccccaat

SEQ ID NO: 281933 - DNA, 163 bp, Glycine max
  unsure (1)..(163): unsure at all n locations
aggaaaacaaggaaggcttggaattgctgaaaactgccatcgccaaagctggttacacaggcaaagttgtcattggaatggatgtngcagcttctgaattctacaaggaagacaaaacatacgatttgaacttcaaggaagataacaatgatggcncccagag

SEQ ID NO: 281934 - DNA, 292 bp, Glycine max
  unsure (1)..(292): unsure at all n locations
cgttgattcgcacaattggtcatcgcgcttggttgaaaagccagtggcgcgaantaaccgtgcgttggattatgactgaacgcctctaagtcagaatccgggctagaagcgacgcgtgcgcccgccgtccgtttgccgaccagcagtagggggcctcggcccccaaaggcacgtgccgttggtgancctcgtgaggcggattagccctacgagacgccttgaagcgcaattcccatcgagcggcgggtagaatcctccttgggtgtgtcctcctgcgcaacagggtttccgt

SEQ ID NO: 281935 - DNA, 291 bp, Glycine max
gtggcaccttcgctagctatcatctccaattctcgcctctccaacacactctccgttcccgttctgaacaaaccaaaggttcaagggtcaagcatcaagtgcgttcgtgttggcggtgtggagattccgaacaacaagcgaatcgagtactcgctgcatacattcatggagttggaaggaccagagcgaaacagattctctgtgatatccaaatggataataaaatcacgaaggaactcactgaggaggagctaatcacactcagggacgaggtctccaaatacatgattg

SEQ ID NO: 281936 - DNA, 246 bp, Glycine max
aaattttgggggctcttttctcctataactaagcagcccaaatactcgattaatttcaattaatttttagcagaagcataatttggtgtgaaataagggccacgagtccaaatgaaacttcaataattgttttagaagaggcaggtatagaactttaattatctgcattcttgaagtctgcatgtaccatttacgagctaagttaattagctttaaataaaagttccttattaatgatcaagaaga

SEQ ID NO: 281937 - DNA, 290 bp, Glycine max
  unsure (1)..(290): unsure at all n locations
ccagcctgcatggagattttcaacaacaacatgggcaatgcttccaaccagatagacacagtgaaacgcgaagatggggcaaacatcaccgagcaagacctcttgcagataccaagaggagcccgcaccatggaaggtctcagattgaacacaaggggggaattcagtacgtggcggcgtggctcaccggaagcggttcggtgcctctatacaacctcatngaagnttcngccaantgcggaaatcagcagggtgcagattggcagtggctcaagtatggagtggagctc

SEQ ID NO: 281938 - DNA, 288 bp, Glycine max
  unsure (1)..(288): unsure at all n locations
ctgactcacacccacaatagtcgggggcagcttcaaagtacctccacattgtctcctactcttactgttctcttctcttctcatcatttttattttttccaatcaaaccaaacaaaacataagcaccgctcttttctctccgatggttctttcacactagtttcatcacaactataggcattgattttaagataagaaccattgngcttgatggcaaacggatcaagctccaaatttgggatactgcagggcaggagcggtttcggacaattacaactgcttactacc

SEQ ID NO: 281939 - DNA, 286 bp, Glycine max
  unsure (1)..(286): unsure at all n locations
agaggattggcaattgaagatccctntgcaccccatgggccttcgccttgtgatagagnnctacccttatgctgttgatggacttgaaatatgggatgcnnttaagacatgggttcatgaatatgtctccttgtattacccaacagatgcagcattcaacaagatactgaactacaagcatggtggaaggaagctgtggagaagggtcatngtgacttaaaagaaaagccttggtggcctaaaatgcagacaactgaagatctcattcaatccatgctctattatc

SEQ ID NO: 281940 - DNA, 286 bp, Glycine max
gcatgggtgaatctggattttgcactgatgcagaaaggcatcagcgggcacattctctgtggtggcaagcttctgagcagggtaatgaacatgctgctttactcattggagatgcgtattactatggtcggggtactgccagggattatgagcggctgctgaggcttatatgcatgctaaatcacaatcgaatgcacaagccatgttcaatcttggatacatgcatgagcatggccaaggacttccatttgaccttcatctagccaagcgttactatgatgaagct

SEQ ID NO: 281941 - DNA, 287 bp, Glycine max
  unsure (1)..(287): unsure at all n locations
gcttcaatgaccatgatatacaccttactctttctttctttcactttgtcatatgctattaagacctccaccatcatcaactacaccgacaatgaggtcatggccatgtacgaggagtggttggtgangcaccaaaaggtgtacaatgagttggaaagaaggacaagagattccaagttttcaaggacaacttagggttcatacaagagcacaacaacaatctaaacaacacttacaancctgggttgaacaagtttgctgacatgaccaatgaggaataccgtgcc

SEQ ID NO: 281942 - DNA, 284 bp, Glycine max
cactacggcaatgaccacccaagcttccaccttcgccgtcgccgttccctccgtcgcaacccctttccgccgccaccggaatcccttcgttgttcgagcccaagcggaaccttcagataaatccgttgaaattatgaggaagttctcagagcatacgcccgtaagtcaggaacatacttttgtgttgacaagggggtcacttctgttgttatcaaggggttggctgaccataaagatacgttgggtgcaccactgtgcccttgccggcattacgatgataaagc

SEQ ID NO: 281943 - DNA, 283 bp, Glycine max
  unsure (1)..(283): unsure at all n locations
gtagattacaaaaaaggaattaaggggcgatgtgttgtggctgcgattaacaattacacaacgcagctccttgaatatggcagtgacactaaatctagatataacctcacgcaatctctattcttcctttcacattttatgggggacaccatcagcctctacattgtggctttctctcagacaatggaggcaatgcaattactgttcgctggtacaaaaggaagcaanatctccaccatatttgggatagtaccatacttctgacagaagtcgacaaatttta

SEQ ID NO: 281944 - DNA, 282 bp, Glycine max
agggagtcagagaaaccctaggtaagaagaaaagatgccggctggtcatggtttgagatcccgcaccagagattccttctctcgtcctttcaggaagaagggaaccatcgccctcaccacatacctgagaacctaccacgtcggcgacttgttgacgtcaaggttaacggtgccgttcacaagggaatgccccacaaattctaccatggccgcaccggacgcgtctggaatgtcaccaaacgtgctgttggcgtcgaagtcaacaagcaggttggcaacaga

SEQ ID NO: 281945 - DNA, 280 bp, Glycine max
gcaccaacagcatcggcggcgacagtcactctccgacaacaacacttccgcggcgaaaaatgtctctggtggcgaacgaggatctccagcacattctgcgtgtgctgaacaccaacgtggatgggaagcagaagataatgttcgctatacctccatcaagggtattggaaggagattcgccaacatcgcttgcaagaaggccgatgttgacatgaacaaaagggctggtgagttgagtgctgcagagttggatagtgtgatgactgtggtggcgaaccct

SEQ ID NO: 281946 - DNA, 279 bp, Glycine max
cgtgaaggatgtttcgcctcacgatttcgtgaaggcttacgcctcccatctcaagcgttccggcaagatggagcttcctgagtggactgatattgtaaaaacagcaaaatttaaggaattggctccatatgatcctgactggtattatttagggctgcctcaatggcaagaaagatttatttgagaggcggtcttggtgttggggctttccagaggatctatggtggaagcaagagaaatggaagccgtcccccacatttctgcaagagcagtggggct

SEQ ID NO: 281947 - DNA, 276 bp, Glycine max
  unsure (1)..(276): unsure at all n locations
cgtgaaggatgtttcgcctcacgattnccgtganggcttacgcctcccatctcaagcgttccggcaagatggagcttcctgagtggactgatattgtanaaacagcaaaatttaaggaattggctccatatgatcctgactggtatttgttagggctgcctcaatggcaagaaagatttatttgagaggcggtcttngtntncgggcttccagaggatctatggtggaagcaagagaaatggaagccgtcccccacatttctgcaagagcagtggg

SEQ ID NO: 281948 - DNA, 278 bp, Glycine max
atgggttggtcccaattgtggagccagagatcttgcttgatggggagcatggtattgatagaacttttgaagtagcccaaaaggtctgggcagaggttttcttctaccttgctgagaacaatgtcctttttgagggtattctccttagcctagcatggttacacctggagccgagtccaaggacaaggccagtcctcagacagttgctgattacaccctcaagctccttcacaggagaattccccctgctgtccctggaattatgtttttgtctggtg

SEQ ID NO: 281949 - DNA, 278 bp, Glycine max
attaacctttctcattccccatctcctcaccttattcagccactgctaatttctagggttccgaaatggacgctggcggaaagatcaagaagggcgccggaggaagaaagggcggcggccctaagaagaagccggtttcaaggtccgcaaggccggtctccaattccccgtcggaagaattggccgttatttgaagaaaggaaggtacgcccagcgtgtcggtaccggtgctcccgtttacttggccgcagttctcgagtacctagctgctgaggtgt

SEQ ID NO: 281950 - DNA, 277 bp, Glycine max
  unsure (1)..(277): unsure at all n locations
cgcaaaatgaagacgatcttgtcgtctgagaccatgaatattcccgacggcgtgagcatcaaggttcacgctaaggttatcgaggttgagggccctcgtggaaaactcgtgcgagacttccancatctgaacttggacttccacttattaccgacgatggcggtaaaaggaagctcaagattgattcttggtttggttctcgtaaaacctccgccgccatccgcaccgccctcagccacgttgagaatttgatcaccggcgtcaccaagggataccg

SEQ ID NO: 281951 - DNA, 274 bp, Glycine max
  unsure (1)..(274): unsure at all n locations
ccggcggaaagaagatctccgccacctccatttacttcgagagtctcccttacaaggtaaactccaccaccggctacatcgactacgaccgcttggaagaaaaagccctagacttcaggccaaaactcataatctgcggtggcgcgcgtgccctcgcgattgggactacaaacgtttcagggaagtcgctgataagtncggagattgcttctctgcgacatggcgcacactagcggccttgtggccgcgcaggaagtgaacagccccttcgaat

SEQ ID NO: 281952 - DNA, 273 bp, Glycine max
aacaatcctactggtgctgcggcaacaagggaacaactgacccaactcgttcagtttgctaaggacaatggttctatagtaatccatgattcagcttatgcaatgtatatttctggtgacaaccctcgctctatttttgaaatcctggagccaaagaggttgccatcgagacttcatcatttagcaagtatgctgggttcactggagtccgattgggttggactgtggttccaaagcagttgctgttttctgatggatttcctgttgccaagg

SEQ ID NO: 281953 - DNA, 274 bp, Glycine max
gaaaatgaaggtccttgttttcttcgttgctacaattttggtagcatggcaatgccatgcgtacgatatgttccctctccgaatgaacactggctatggtgcccgtactccggaggtgaaatgcgcaagttggaggcttgctgggaagcacacaacatctttggctttgagaccattcctgaagagtgcgttgaagcaacaaaggaatacatccatggcgaacaatatagatcagactccaaaacagttaaccaacaagcttacttttatgcca

SEQ ID NO: 281954 - DNA, 276 bp, Glycine max
  unsure (1)..(276): unsure at all n locations
cttcaattccanacgncatacgataacnnnagcacaccacatgcttgcttaagagcaaacacaccacatgggtccctcatgaanccattgaaaagctaagagnacactnggngattccagaatggcaggtatntggtggatcatgggaagcacacttgcccttgcatacagccaatctcacccggacnaggttactggcatgatcctcagggggatnttcctttnaaggnagaaagaaatngnttggtnttacganggaggcgctgctgctatatt

SEQ ID NO: 281955 - DNA, 272 bp, Glycine max
  unsure (1)..(272): unsure at all n locations
agagtttgttgtgagctataagctagtttatcgtgaggagaatattcagttgtntgttttcnttgttgctgcagtagnnttggtagcatggccatgccatggcgcaggctaccaaaggttccctctccgaatgaaaactggtatggtgagcgttcttcggaggtaaaatgcgcaagttttaggcttgctgttggaagcacacaacatccgagtcttaaaaccattcctgaagagtgcgttgaaccaacaaagggnnngctaatggcgaacaa

SEQ ID NO: 281956 - DNA, 273 bp, Glycine max
  unsure (1)..(273): unsure at all n locations
cgcagncatggggcggagacctgcgaggtgttataggcaaattaagaacaagccataccccaagtcacgtttctgccgtggtgttcctgatcccaagatcaggatttatgatgttggtatgaagaagaagggtgttgatggtttcctttctgtgtccatctggttagttgggagaaggaaaatgtttcaagtgaggccctggaagctgctcgcattgcttgcaacaagtacatggccaaatttgctggaaaggatgctttccacttgagagtc

SEQ ID NO: 281957 - DNA, 272 bp, Glycine max
caactcttgtaaggtcgaagctgcttcctcctcttctgaaggttcttcgccgctttcggttctgactttcgctgacgtcagcgagccgcagtgggaaggtgattcggataattttaatctccagaagtacccctcttatggatcgactgggattctctgtgaagccgtgttttcttagtgtcctatgttgttatgtaagggtattaatcttcattatgtatggtctagtctaggtcttagtgtcttctcaggtggctgctactgcaatggag

SEQ ID NO: 281958 - DNA, 272 bp, Glycine max
  unsure (1)..(272): unsure at all n locations
cccatggttcagaaccggtgtgttcccacctgcaggaaccnacaactactgggcagactcctacacactgttcgtgtttgagatggcactgatgggatttgcagagcacagaagattccaagactgggccaaaccaggcttatgggcaaacaatacttcctaggactagagaagggtcttggaggttctggtgagccagcttacccaggaggacctttcttcaacccacttggctttggtaaggatgagaagtccttgaaggatttgaagct

SEQ ID NO: 281959 - DNA, 272 bp, Glycine max
gaagagagatggatccagacgcgttggcaaaggcattcgtggagcactactacagcaccttcgacaccaacaggaacggcttagcgaatctctaccaggagggttccatgctcactttcgaagggcagaagatccaagggcttccaacatcgttgccaagctcacctccctcccttttcagcagtgccaccactcaatctccaccgtcgactgccagccctccggcgtcaacgccggcatgctcgtcttcgtcagcggaaaccttcagctcg

SEQ ID NO: 281960 - DNA, 273 bp, Glycine max
  unsure (1)..(273): unsure at all n locations
cacttcccttctccaacatgccaaacgacagcgttctgagtcttttcttcttcgttaccctcttcacatgccttctctctgctaattcccacgatgaccatattttcctaccgagtcaactccatgacgatgactcagtggttgcactgctaccgacccaaaccttaactacaagccggtgatcggaatcctgacccaccccggcgacggtgcctctggccggctcagcaacgccaccggggtttcttacatcgccgcctccttacntttaaa

SEQ ID NO: 281961 - DNA, 269 bp, Glycine max
cccatggttcagaaccggtgtgttcccacctgcaggaacctacaactactgggcagactcctacacactgttcgtgtttgagatggcactgatgggatttgcagagcacagaagattccaagactgggccaaaccaggtctatgggcaaacaatacttcctaggactagagaagggtcttggaggttctggtgagccagcttacccaggaggacctttcttcaacccacttggctttggtaaggatgagaagtccttgaaggatttgaa

SEQ ID NO: 281962 - DNA, 269 bp, Glycine max
ggattccttgcttggaattcgagttggagcacggtttcgtgtaccgtgagcacagacaggtcaccaggatactacgatggacgctactggaccatgtggaagctgcctatgtttggttgcactgatgcttctcaggtgtgaaggagcttcaagaggctaagactgcataccccaacggcttcatccgtatcatcggattcgacaacgttcgccaagtgcagtgcatcagcttcatcgcctacaagcccccaggcttctaagtgtgaaaa

SEQ ID NO: 281963 - DNA, 269 bp, Glycine max
gaaaaaagagcgatttttccctcaccaaagaagaaccaaaacaatggcggatcaactcaccgatgaacagatctccgagttcaaggaagccttcagcttgttcgataaggacggcgatggttgcatcacaaccaaggacttggaactgttatgcgttcattggggcaaaacccaactgaggcagaactccaggacatgatcaatgaagtggatgctgatgggaatggtaccattgacttccctgagttcctaaacctcatggctaggaa

SEQ ID NO: 281964 - DNA, 271 bp, Glycine max
ctctggtatatgcttgtaaccaaggtgttgaaaagattattgacttggcaaccttgactggggcttgtgttgttgctcttggaccctcaattgctggtgtgtttacaccctgtgatgacctagcaaaggaagtttttgagcttctgatgtgagtggggagaaactatggcggctgccattagaggaaagttactgggaaacaatgaaatcaggagttgctgatatgttgaacactggtggtcgacaaggtggtgctattgttgctgctctc

SEQ ID NO: 281965 - DNA, 258 bp, Glycine max
atcaaacacaaaatggaaaagaatgtggggattctcgccattgacatctacttccctcccgcttgcgttcagcaggaagcattggagactcatgatggtgccagtaaagggaagtataccattggacttggccaagactgcatgtcattctgtaccgaagtagaagatgtcatctcaatgagtttgacagtggttacttctcttcttgagaagtatgggattgatcctaaacaaatcggtcgtctggaagttggaagc

SEQ ID NO: 281966 - DNA, 255 bp, Glycine max
gaacaggagtttttcaataatatctatgaactagttggagttcctgtagtcacagtgcaactcagatacaatggttgggttacagagttgcaggatctagaaaagtcaaggcgactggggaaagctgttgggttggataaccttctctatacacccgatgcagatttttcttgctttgcagaccttgcactttcatctccagaggattattacattgagggacaaggatcattgctccaatgtgttctgacgcca

SEQ ID NO: 281967 - DNA, 250 bp, Glycine max
  unsure (1)..(250): unsure at all n locations
gctgaagatgtgaatgcagcattcagaaaggcagctgagggtccactgaaaggtgtgttggacgtgtgtgatgttccacttgtgtctancgacttccgctgctctgatgtttcctctactattgactcctccttgactatggtcatgggagatgacatggttaaggtggttgcttggtatgacaatgaatggggttacagccaaagggtggtggatttggcacacctagtagcaagcaagtggccagggg

SEQ ID NO: 281968 - DNA, 251 bp, Glycine max
ggtgagcccccatcctacctcactggtgaattcccaggtgactatggttgggacactgctgggctttctgctgacccagagacctttgccaagaaccgtgaacttgaagttatccactccagatgggccatgttgggagccctgggctgtgttttccctgaactcttggcccgcaacggtgtcaagttcggtgaagccgtgtggttcaaggccgggtctcaaatatttagtgagggtgggcttgactactt

SEQ ID NO: 281969 - DNA, 254 bp, Glycine max
gtgtaagcaagcaaaaccctagcggcgcctgctttctttgttcgtgttttgcatcaggatggagtctcaggtgaagcacgcacttgttgtcaaagttatgggtcgtactggatccagaggacaagtgacccaggttagagtgaagtttttggatgatcagaaccgtcacatcatgaggaatgtgaaaggacctgtgagagaaggagacattctcaccctactcgagtctgaaagggaagcaagaagattgcgct

SEQ ID NO: 281970 - DNA, 257 bp, Glycine max
  unsure (1)..(257): unsure at all n locations
gtanaggcganagactttaggtttggaattgggaattagggttgttcgcgtcacgaagatgatcgaggtggtgttgaacgatcgattggggaagaaggtgcgcgtgaagtgcaacgacgatgacaccatcggcgacctgaagaagctggtggcggctcagacgggcacaagagccgacaagatccgcatccagaagtggtacaccatatacaaggatcacatcactctcaaggattacgagatccacgacggcatgg

SEQ ID NO: 281971 - DNA, 254 bp, Glycine max
gctgaagatgtgaatgcagcattcagaaaggcagctgagggtccactgaaaggtgtgttggacgtgtgtgatgttccacttgtgtctatcgacttccgctgctctgatgtttcctctactattgactcctccttgactatggtcatgggagatgacatggttaaggtggttgcttggtatgacaatgaatggggttacagccaaagggtggtggatttggcacacctagtagcaagcaagtggccaggggcagc

SEQ ID NO: 281972 - DNA, 253 bp, Glycine max
gctaatgtggttggatactttgcatggtcattgctggataactttgaatggaggttgggttacacatcaaggtttggcattgtctatgttgatttcaaaaccctcaagagataccctaagatgtcagcatactggttcaagcaactcattgccaaaaagaagtactaatagctgggctgaacatctactttctaagcttctagttgcttcagataatcatgttttagtggttttggttgagttaaaagtagtt

SEQ ID NO: 281973 - DNA, 253 bp, Glycine max
gtgggagagagaagagcggaagagaaaatgacgaccaggttcaagaagaacaggaagaagagaggtcacgtcagcgccggacacggccgtatcggaaagcaccgcaagcatcccggaggtcgcggtaacgccggtggcatgcatcaccaccgtatcctcttcgacaagtaccatcctggtttcttcgggaaggtaggcatgcgctacttccacaaacttcgcaacaaattctacaatccgatcatcaacatcg

SEQ ID NO: 281974 - DNA, 249 bp, Glycine max; identical to SEQ ID NO: 201908

SEQ ID NO: 281975 - DNA, 251 bp, Glycine max
atcaaacacaaaatggaaaagaatgtggggattctcgccattgacatctacttccctcccgcttgcgttcagcaggaagcattggagactcatgatggtgccagtaaagggaagtataccattggacttggccaagactgcatgtcattctgtaccgaagtagaagatgtcatctcaatgagtttgacagtggttacttctcttcttgagaagtatgggattgatcctaaacaaatcggtcgtctggaagt

SEQ ID NO: 281976 - DNA, 201 bp, Glycine max
  unsure (1)..(201): unsure at all n locations
gcanacatcancgngcnagacctcttgcagataccangaggagcccgcaccatgganggnctcagattgancacnagggtgggantncagnacgtgncggngtngctcaccggaancggatcggngcctctatacancctcatggaggatgctnncactgctgagatcagcagggtgcagnattngcagtggctcaagtat

SEQ ID NO: 281977 - DNA, 250 bp, Glycine max
gcttagagaagtgaaggcagggcacgatggaacttgggctgcgcaccctggtctcattccagcctgcatggagattttcaacaacaacatgggcaatgcttccaaccagatagacacagtgaaacgcgaagatggggcaaacatcaccgagcaagacctcttgcagataccaagaggagcccgcaccatggaaggtctcagattgaacacaagggtgggaattcagtacgtggcggcgtggctcaccgga

SEQ ID NO: 281978 - DNA, 248 bp, Glycine max
gaaactgcgaatggctcattaaatcagttatagtttgtttgatggtatctactactcggataaccgtagtaattctagagctaatacgtgcaacaaaccccgacttctggaagggatgcatttattagataaaaggtcaacacaggctctgcctgttgctttgatgattcatgataactcgtcggatcgcacggcctttgtgccggcgacgcatcattcaaatttctgccctatcaactttcgatggt

SEQ ID NO: 281979 - DNA, 247 bp, Glycine max
  unsure (1)..(247): unsure at all n locations
ggtgacttctggacttctgatgctggtccactagaggccttcaagaggtttggaaagaagcttcaagagattgaacataagcttatacagaagaacaaggatgagacgttgagaaaccncactgggccagctaaaatgccttacactctgctctatccttctagtgaggagggattgactttcagaggaattcccaacagtatctctatctaagggctctctcattgaggttgctgtactactctgc

SEQ ID NO: 281980 - DNA, 250 bp, Glycine max
  unsure (1)..(250): unsure at all n locations
gagatttgcagtgtatgttgtnattccaatgtgggccagaaggtgttccaacaggggctgccacacaaaggattctattttgngcagaataaaacaatgcaaatgatgtatgagacaatttacaaggctttggttgaggcagggcttgaagctgcattttctccacaagattatttgaactttttctgtcttggtaatcgagaggccatgaattgtatgataatgccggtgtgactggagctcctccccc

SEQ ID NO: 281981 - DNA, 255 bp, Glycine max
gcacactcctcccagggtttctccaccaagagggaaatggctcccaaaccgcctagtacgggtctgtttgttggactgaacaagggacatgtcgtcaccaagaaggaattgcccccacgcccctcggatcgtaaggggaaaacaagcaagagggtgcactttgtgaggaacctcataagagaggttgctggttttgcaccctatgaaaagcgtataactgagttgctgaaggttgggaaggataagagggcactt

SEQ ID NO: 281982 - DNA, 250 bp, Glycine max
  unsure (1)..(250): unsure at all n locations
ggcgaagagatggccaccgttccagggcagctcgtgtgggagatcgtcaagaaaaacaattccttcttggtcaagcagtttggancgggcacccagagcgtcgaattcagcagagagagcaacaatctctacaacctcaattcgttcaagtactctggtttggcaaacaagaaaactgttactgttcagcctgagggcaaagatcaggctgtgttgttggctacaaccaagacaaagaagcaaaacaagc

SEQ ID NO: 281983 - DNA, 248 bp, Glycine max
  unsure (1)..(248): unsure at all n locations
gagcgatctgcttggagaccacagaggcgaaagcagggacctttaagcttcctaatcccatgnactacnttgngtagtaccttcacctctctcannaatctagctagagtntgctcctatctatatgtaataaggtatgctgatatgcactattcaaataggagcattagctatgtttgttaatgtcactttatgttatgtgggtaagtcacctaagacactccacgtacctacttgttgtctcttac

SEQ ID NO: 281984 - DNA, 248 bp, Glycine max
aagagcttgagaaggagcccaagtttttgaagaacggtgatgctggttttgttaagatgattccaaccaaacccatggttgttgaaactttctccgagtatcctccacttggtaggtttgctgttagggacatgcgtcaaactgttgctgtgggagtcatcaagaacgttgagaagaaggatcctaccggagccaaggtcaccaaggctgcccagaagaagaagtgaatcgtgcgggctggttcatca

SEQ ID NO: 281985 - DNA, 249 bp, Glycine max
gggaggcaaaacgcctatacttagtcctcaagaacttgaagacgttggttataaacttgctatttatccaatttccttgattggggtttgcatacgagcaatgcaggatgcactcactgctattaaaggaggcgctgttcctcctccgggaagcatgccatcttttgaagaaatcaaggacatcgtaggtttcaactcttattataaagaagaggagcgttatgctacaagcaccaatcaccagcctta

SEQ ID NO: 281986 - DNA, 249 bp, Glycine max
cttgggaccaaactatctgcaacttcctgctaatgctcccaagtgtgctcaccacaacaatcatcatgaaggtttcatgaatttcattcacagggatgaggaggttaattacttcccttcaaggtatgatcctgttcgtcatgcagaaacgttccccatacctcctgctatctgcagtggaaggcgtgaaaagtgtggaattgagaaggagaacaactttaagcagcccggagagagataccgatcttg

SEQ ID NO: 281987 - DNA, 247 bp, Glycine max
ggttgccattcagaacctacagacctacaaagaaaagaaatttgttgatatcagcaaggaggatttggaattaggtgatgaggatgaggtcaaagagagggaaaacaagcaagaatacaacctactctgtgattggataaaacaacaacttggtgacaaggtggccaaagttcaaatctcaaatcgcttgagttcatctccttgtgtgcttgtatcagggaagtttggttggtctgcaaacatggag

SEQ ID NO: 281988 - DNA, 246 bp, Glycine max
  unsure (1)..(246): unsure at all n locations
atnaatnncaagannggcacttcgnngcatggngatgtcncntacnntcngnttcactcttggtcttgcgagagaaagccatgccagagacgaagntttttggcatgctgtttggccaaacactcccattccaagttcattgcggagatcttctaaagcctggccctgcaagtgttgaaatcgatgatcaccctatgcaaattgaagaaacacagtacccgaaaaccttcttctataaagaagacc

SEQ ID NO: 281989 - DNA, 252 bp, Glycine max
  unsure (1)..(252): unsure at all n locations
gggttactaaaccaacccgactatctccagaggcatgtgcatggaaagagagtcctagttgtaactancgaanccgttgcgccactttatctagacaaggttgttgatgctttgacaagggnaaacccgaatgtttctgtggagagtgtaattttacctgatggtgagcagtacaaggacatggatactcttatgaaagtctttgacaaggccatcgagtcgcnnnncntccnggcggtgtacatttgttgc

SEQ ID NO: 281990 - DNA, 254 bp, Glycine max
  unsure (1)..(254): unsure at all n locations
gtagcagcaactgttacaccacagcatcttcttctgaatcgtaatgctttgttccaaggtggcttacagcctcacaattactgtcttccagtgctcaaaagagagatccatagacaggctattgtntcggctgtcactagtggaagtaaacgatttttccttggaactgatagtgctccacatgataggcgtaaaaaggaatgttcctgtggatgtgctggcatatacaactcaccggttgctctatcactata

SEQ ID NO: 281991 - DNA, 248 bp, Glycine max
  unsure (1)..(248): unsure at all n locations
ctctgctcgtgncctctagggttatcatatctccatttccatttcctctctctcagtttccaagaatcttaagctatgggaaagtcttacccaaccgtgagcgctgattaccagaaggccgttganaaggcgaagaagaagctcagaggcttcatcgctgagaagagatgcgctcctctaatgctccgtttggcatggcactctgctggaacttacgacgtgagctcgaagaccggtggtcccttcgg

SEQ ID NO: 281992 - DNA, 246 bp, Glycine max
catcactctcgctcttgcaattattcctcttctcgcaatccgcactaaaattctagggttccgaaatggacgctgacggaaagatcaagaagggcgccggcggaagaaagggcggcggcccaaagaagaagccggtttcaaggtccgtcaaagccggtctccaattccccgtcggaagaattggccgttatttgaagaaaggaaggtacgctcagcgtgtcggtaccggtgctcccgtatacttgg

SEQ ID NO: 281993 - DNA, 246 bp, Glycine max
gaaagactttaggtttggaattgggaattagggttgttcgcgtcacgaagatgatcgaggtggtgttgaacgatcgattggggaagaaggtgcgcgtgaagtgcaacgacgatgacaccatcggcgacctgaagaagctggtggcggctcagacgggcacaagagccgacaagatccgcatccagaagtggtacaccatatacaaggatcacatcactctcaaggattacgagatccacgacggca

SEQ ID NO: 281994 - DNA, 250 bp, Glycine max
  unsure (1)..(250): unsure at all n locations
aattgcgnaggggangatatgntgaatncaattnggtanatgntannggtacaacanttggactgaatnctggaggggagaatagagagtatacttgtttctctcncactgactgctcggtgggaatacgatcatnaaccggnaganggaagcgaagactggnaactcttggncgcatgcatnaaccccaaggaatggatctaattcatcagttgaccccccaatttgtcagctttttaatttaataata

SEQ ID NO: 281995 - DNA, 247 bp, Glycine max
  unsure (1)..(247): unsure at all n locations
agaacaagtagttgagaactaagaaggagaagcaaatggcttcctcaatgatctcttccccagctgttaccactgtcaaccgtgccggtgccggcatggttgctccattcactggcctcaagtccatggctggcttccccaccaggaagacnaacaatgacattacctccattgctagcaacggtggaagagtgcaatgcatgcaggtgtggccaccagttggcaagaagaagtttgagactctttc

SEQ ID NO: 281996 - DNA, 242 bp, Glycine max
  unsure (1)..(242): unsure at all n locations
antctaaagaaggtgngaggaggaagcggaggagattgtgaaggagggatttgaggctgcggacaaggggttggtggcggcggagaaggggctggagacggcggagaaggggctggtggcggcggagagggagattgaggaggcggtgagttttggggggttggcgcaggcgggagcagtggcgggagcggaggtttttgggattttggttgcaacggcggtggtgaacggtattttggggc

SEQ ID NO: 281997 - DNA, 243 bp, Glycine max
  unsure (1)..(243): unsure at all n locations
gaaaatatctgcaagtttgcgaagaagggnttgaccccgtctcagattggtgtcattcttcgagattctcacggtattgctcaggtcaacagcgtcactggcagcaaaatccttcgcatcctcaaagctcacgggcttgcgcctgaaattccagaggatctttaccatttgattaagaaggcagtttcaattaggaagcatcttgagaggaacaggaaggacaaggactccaagttcaggttg

SEQ ID NO: 281998 - DNA, 243 bp, Glycine max
  unsure (1)..(243): unsure at all n locations
ctccgccacttctgaatctattgaatcaacaatcatgtcggacgaanagcaccatttcgagtccaaggccgacgccggagcctccaaaacctaccctcagcaagccggtaccatccgcaagaacggctacatcgtcatcaaaggccgcccctgcaaggttgtggaagtttcgacttccaaaactggaaagcacggtcacgctaagtgtcactttgttggaattgatattttcactgccaagaa

SEQ ID NO: 281999 - DNA, 266 bp, Glycine max
  unsure (1)..(266): unsure at all n locations
gattgtttgttgttgtaactcgttcttcttcttttgttgttctgtgtntgtgttngtttnttctctcacctgaaaatgtcttgctgcggtggtaactgtggttgcggaagctcctgcaagtgcggcaacggctgcggaggctgcaagatgtacccagacttgagctacactgagtcaaccaccaccgagaccttggtcatgggagtggcacctgttaaggctcaatttgagggtgctgaaagggtgtgcccgctgagaacgatggc

SEQ ID NO: 282000 - DNA, 271 bp, Glycine max
  unsure (1)..(271): unsure at all n locations
agaagaacaagtagttgagaactaagaaggagaagcaaatggcttcctcaatgatctcttccccagctgttaccactgtcaaccgtgccggtgccggcatggttgctccattcactggcctcaagtccatggctggcttccccaccaggaagaccaacaatgacattacctccattgctagcaacggtggaagagtgcaatgcatgcaggtgtggccaccagttggcaagaagangtttgagactcttttctactgccagaccttgatgat

SEQ ID NO: 282001 - DNA, 266 bp, Glycine max
agaagggaaagcacagtttgttttcattgggtgctgatcggaacaaacagggaatagaagagaggagaagatgtctttcataatggaatttgcggagaacttggtattaaagttgatggaagatccgaaggaaagggatcggaggttcagggagcacgtttatagagtgaaggacaggtgcgagaagacgaaggagatgtggagctaccctatgcgaccctatgggttttggacattcgaacgccacaattctcagcttgcttggg

SEQ ID NO: 282002 - DNA, 235 bp, Glycine max
ttgttgtttgtgtgtttgttttttctctcacctgaaaatgtcttgctgcggtggtaactgtggttgcggaagcgcctgcaagtgcggcaacggctgcggaggctgcaagatgtacccagacttgagctacaccgagtcaaccaccaccgagaccttggtcatgggagtggcaccagttaaggctcaattcgagagtgctgaaatgggtgttcccgctgagaacgatggctgcaaa

SEQ ID NO: 282003 - DNA, 268 bp, Glycine max
gctcgaatcatggagggtggttatgctcgtcgactcttgcaggtcggtataagatcaataaacaaagaagggcgtgaacaagccaaaaagttcggggtagagcagtttgaaatgcgacatttttcgaaagatcgtccatttttggaaaacctgaatctaggagaaggtgctaaaggagtatacatttcaatcgatgtggattgtcttgatccagggtatgctgtaggagtgtcccactatgaatcaggaggtctttctttcagggatg

SEQ ID NO: 282004 - DNA, 265 bp, Glycine max
gcaccggtcaccgctacgcgtaacagtgccggtgaccagttgccggtgcacgtggattggagggtgaagggtgcagttgctcccatcaaagatccgggaagttgtggaagttgttgggcgttctcaacggtggccacagtggaagcaataaacaagatagtgacagggaagtttgtgtccttatctgaacaagaacttgtggactgtgacagagcctacaatcaaggatgcaatggtggccttatggactatgcattcgaattca

SEQ ID NO: 282005 - DNA, 244 bp, Glycine max
gaattgcatgggaagagccatttggaccggttttaccagtaattaggatcaattcagttgaagaaggaatccatcattgtaatgctagcaactttggacttcagggatgtgtcttcacaaaggatgtcaacaaagcaataatgatcagtgatgcaatggaaacgggaacagttcagataaattctgccccagctcgtgggccagatcattttccctttcagggtataaaggacagtggcattgg

SEQ ID NO: 282006 - DNA, 261 bp, Glycine max
cgttttcctgaatcggtgtgaacaatggcgacgtacgctgcgatgaaacccaccaagccagggttggaggagtcccaggaacagatccataagataaggatcaccctttcttccaagcacgtcaaaaacctcgagaaggtttgtgcggacttggttcgtggtgcaaaggacaagcgcctcagggttaagggacctgttaggatgcccactaaggttcttcacatcactaccaggaatccccctgtggtgaaggtaccaaca

SEQ ID NO: 282007 - DNA, 267 bp, Glycine max
  unsure (1)..(267): unsure at all n locations
gttgttgtagcaggcactctaaccaaagaacagttaggcaaatccgtccatctcgttaagttagagctcagcataacacatggtgggagtggggtaccagaagcattactgaaccagatgtttggaaacaacgggctagaatccgaggagggtattagcctactgatcagcagaaagctgctgaagctgatgaatggagatgttcgctatctaagggaagcaggcaaatcagcttttatcctctctgcngaacttgcngcagcccat

SEQ ID NO: 282008 - DNA, 262 bp, Glycine max
  unsure (1)..(262): unsure at all n locations
ggattagggttcgcggtgggaacgtgangtggcgcgctttgaggcttgatactgggaactactcttgggggagtgaggctgcaacccgcaagacaaggattcttgatgtggtgtacaatgcatccaacaatgagcttgttcggactcagacattggtcaagagtgccattgttcaggtcgatgcagcacccttcaagcagtggtatctgcagcattatggcgttnaggttggccgcaagaagaagagtgcagcagcttctgc

SEQ ID NO: 282009 - DNA, 261 bp, Glycine max
  unsure (1)..(261): unsure at all n locations
gcccaagaccccactaaggatatcaggctcttcattanttccactggtggctctctcagtgctacaatggctatctatgatgccgtacagcttgtgagggccgatgtttccacagttgcactcggcnttncagcatcaacagcttctgttatccttggtggtggcaccaaaggcaagcgctttgctatgccaaatacacgaattatgattcatcaacctctaggaggtgctagtggacaagctatagatgtagaaattcag

SEQ ID NO: 282010 - DNA, 261 bp, Glycine max
acctagttgttggtctttatatttagttattgacatcaacaaagtcatggaggaagttaatgtggttcaaaccaagaatggaactgtttcagtagcttctgcgtttgctggccataaggaagctatacagcaaagggaccacaaatttttaagaattgctgttgaagaagcgtataaaggggtagactgtgaagatgggggtcccttggtgctattatagtttgtaatgatgaaattgttgctagatgtcacaacatggtt

SEQ ID NO: 282011 - DNA, 260 bp, Glycine max
gtgaggtagaacccttccactgtggtgactctgcgatgggtgcctacaagtatgtttcagagctatggcgcaagaagcagtctgatgtcatgcgcttcttgcagcgggtgaggtgctgggagtataggcagcaaccttccattgttcgtttgacaaggtctacccgccctgacaaggctcgtcgcttgggcttcaaggctaagcagggctatgtgatttaccgtgttcgtgttaggaggggtggccgaaagagaccagtt

SEQ ID NO: 282012 - DNA, 150 bp, Glycine max
cacaaatttcaccaatatccctggctgatgagaaccaaattgccgcatatttagtaaaaaatggtccacttgctatgggcgtgaatgcaattttcatgcaaacatacattggtggtgtctcatgccctctcatatgtagcaagaaaaggc

SEQ ID NO: 282013 - DNA, 262 bp, Glycine max
agagaggagaggaacaatggggttgacacacttgctcaccagaaatgggctggtgctaactactatgataggtatctcaagactgtccagggaggtgtggcttcaactgctgcaatgggaaaaggagtaactgaagagcagtttaaagaatcatggactaggccaggagctgtagaaattgatagaggcagtattgtggttgctaaggccagaatgtgaaagtgctacttttgcagaactatactgccgagagtggaacttg

SEQ ID NO: 282014 - DNA, 259 bp, Glycine max
gtaagcaagcaaaaccctagcggcgcctgctttctttgttcgtgttttgcatcaggatggagtctcaggtgaagcacgcacttgttgtcaaagttatgggtcgtactggatccagaggacaagtgacccaggttagagtgaagtttttggatgatcagaaccgtcacatcatgaggaatgtgaaaggacctgtgagagaaggagacatctcaccctactcgagtctgaaaggaagcaagaagattcgctagatggtcct

SEQ ID NO: 282015 - DNA, 257 bp, Glycine max
  unsure (1)..(257): unsure at all n locations
tttctactatttttcaatggcttctgcagatgttgagttccgttgctttgttggtnggcttgcttgggtcaccggcaacgatgccctcgagaaagccttttcaatctacggcgacatcgttgaatcnaaggttatcaacgaccgtgagactggaaggtccagaggattcggatttgtgaccttcgcctcagagcagtcaatgaaagatgcgatcgcaggaatgaacggccaggaccttgacggtcgtaacatcactg

SEQ ID NO: 282016 - DNA, 259 bp, Glycine max
  unsure (1)..(259): unsure at all n locations
canaaccttccctttccgatccctccaatctctccttccgctgctgtcctcaacccttntnagctcccttgcacaaancccaacttcatgcactccttcacgctcctcaaccacccaaattcagtgtggtctgagagaactcagaacccgcattgattccgtgaagaacactcaganaatcaccgaggctatgaagcttgtggctgcagccaaagtgagaagagctcaagangctgttgtcaacggaagacccttctca

SEQ ID NO: 282017 - DNA, 260 bp, Glycine max
ggcaaaaagaaagaatcccaggcgaggagaaagatggaggggaaggagcaggatgtgtcgttgggagcgaacaagttccccgagagacagccgattgggacggcggcgcagagccaagacgacggcaaggactaccaggagccggcgccggcgccgctggttgacccgacggagtttacgtcatggtcgttttacagagcagggatagcagagtttgtggccacttttctgtttctctacatcaccgtcttaaccgttat

SEQ ID NO: 282018 - DNA, 259 bp, Glycine max
  unsure (1)..(259): unsure at all n locations
ctccggttatctctgccgccaaggcctaccacgagcagtnntcggtgccggagatcaccaatgccgtgttcgagcccgccagcatgatggccaagtgtgatccaaggcacggcaagtacatggcttgctgcttgatgtaccgtggtgatgttgtccctaaggatgtcaatgctgctgttgccaccatcaagactaagaggactgttcagtttgttgattggtgcaatggnttncnagtgtggtaatcaactnaccancc

SEQ ID NO: 282019 - DNA, 262 bp, Glycine max
  unsure (1)..(262): unsure at all n locations
agaagatcttcaaaaccaagtgcgctcagtgccacaccgtcgacaaaggtgccggccacaaacaaggacccaatctgaatggtttgtttggaagacaatctggtacaactcctggatattcctattctactgctaacaaaaacatggccgtgatttgggaggaaaagaccctctatgattactgcctcaaccccaaaaagtatatcnccaggaacgaaangntntcccggggtntnaanaacncccngganaggnnattntt

SEQ ID NO: 282020 - DNA, 258 bp, Glycine max
ctttcacagcacactcctcccagggtttctccaccaagagggaaatggctcccaaaccgcctagtacgggtctgtttgttggactgaacaagggacatgtcgtcaccaagaaggaattgcccccacgcccctcggatcgtaaggggaaaacaagcaagagggtgcactttgtgaggaacctcataagagaggttgctggttttgcaccctatgaaaagcgtataactgagttgctgaaggttgggaaggataagaggg

SEQ ID NO: 282021 - DNA, 254 bp, Glycine max
  unsure (1)..(254): unsure at all n locations
tcgagttccgagttgcgagttgcagagagagcaatgagtcaggaatcgtttatatatagcttcgtggctcgggggacgatggtgttagccgagtacaccgagttcactgggaacttcccctccaattgcagctcagtgcctccagaaactaccctcttccaataacaagttcacctacaattgcgaccaccacaccttcaattttctcgtcgaaaggttaggctaatgtgttgttgccaggatctgtgtnagna

SEQ ID NO: 282022 - DNA, 255 bp, Glycine max
  unsure (1)..(255): unsure at all n locations
aggagcaggaggcatcaccgttaccaaacatggtgaaagggcgccaaggagagcgtgttagactttacgtcaggggttcaatacttggatacaagaggtccaagtcaaatcaatacccaaacacctcattaatccagattgagaatgtaaacactaaggaagaagttgcgtggtactgtgggaanctgnntcntttcnanccaggnaagnnggggagncccnnntccnccnnncttttgggggaanggnccccca

SEQ ID NO: 282023 - DNA, 254 bp, Glycine max
  unsure (1)..(254): unsure at all n locations
attcattctcatctttctctcttctctctccacccaaaccctaactcccgaccctgttcccctctcgtatccgtcatgaaaggaggaaagtccaagaccgaatctaagagagccgatcccaaacttgctgtgaataagaagggagccgccaccaaggctaggaaacccgccggcaaggggaaggcagcgaaagaccctaacaagccaaagaggcctccaagtgctttcttcntttcatgggangagttcaggaa

SEQ ID NO: 282024 - DNA, 256 bp, Glycine max
  unsure (1)..(256): unsure at all n locations
cagcntcaacaaccctaacgcgtncagagcagagagagacgcagccatggggcgaagacccgcgaggtgttataggcaaattaagaacaaaccataccccaagtcacggttttgccgtggtgttcctgatcccaagatcaggatttacgatgttggtatgaagaagaagggtgttgatgagtttcctttctgtgtccatctggttagttgggagaaggaaaacgtttctagtgaggccctggaagctgctcgtatt

SEQ ID NO: 282025 - DNA, 218 bp, Glycine max
  unsure (1)..(218): unsure at all n locations
agtgagcgtgaaagatgccttcggcgaggctttcagggtcaccaaggctcgacgttgctattgacatgggcaatccatttctcaatctcactgttgaggtttccttaagatcggagctgtncgcagccacgcgatcagctgctgaagatacttatcatattatccgaaacgggaatatctcaagtcatgtttcgagaaaagttgaagaagatgtgtaa

SEQ ID NO: 282026 - DNA, 252 bp, Glycine max
  unsure (1)..(252): unsure at all n locations
agcactctctctttcccttaccctttttcaggtttcaacgctccaactatccatggcaaaccgctggctcagacccgaggtgtatccactgttcgctgcggttggtgctgctgttgggatctgtggattcaactggttcgtaatatctgcatcaaccctgaagtcagggtgaacaaggagggaaggaaggcaggagttttggagaatttgctgagggagagaagtatgccgagcattcctgaggaatnagng

SEQ ID NO: 282027 - DNA, 257 bp, Glycine max
cttgggtggccacttggtgggtttcctggaccacagggcccatactactgtggaactggtgctgataaagcatatggccgtgatattgtagatgcacattacaaagcttgtatttatgctggcatcaatattagtggcatcaatggagaggttatgcctggtcagtgggaatttcaagttggtccttctgttggtatatctgctggagatgaggtgtgggcagctcggtacattttggagaggattacagagatggc

SEQ ID NO: 282028 - DNA, 245 bp, Glycine max
  unsure (1)..(245): unsure at all n locations
ctttgggacgtttggtccaaaagtnatgccaagnnttggcaaangcaagaatgattccagggcagcttcttgcattgccagancttggcatcactttgggacgtttggtccaaaactttgagctctgcctccccctggccagtcacagattgacactagtgagaaacgngggcaatttagcttgcacatactcaagcatccaccatgtggcaaagctnggnanntttnagtccaccacatgatca

SEQ ID NO: 282029 - DNA, 245 bp, Glycine max
  unsure (1)..(245): unsure at all n locations
aacgtccagatcatatgatgtttgaggtatggaacccactaggaatagttggtgtaatcagtgctttcaantttccatgcgctgttctaggatggaatgcttgcattgctntagtctgnggtaatgtgttgtgtggaagggtgctccaacaactcctngataactattgctgtggacaaaagctagtagctgaagttctgagaggaacaaattacctggtgcaatatcacctcttcgtgagggnc

SEQ ID NO: 282030 - DNA, 245 bp, Glycine max
  unsure (1)..(245): unsure at all n locations
cgttctttcggagagttcgaagancatcgggcgttaccaacaacaacgaggaagacaagaagccaaccgaacagggagcacacatcaaccttaaggtnaaggggcaggatgggaatgaagtttttttcaggatcaagagaagcactcaattgaagaagcttatgaatgcttactgtgaccgacagtcggtggatttcaactccattgcttttctgtttgatggacgccgcctccgagctgancag

SEQ ID NO: 282031 - DNA, 262 bp, Glycine max
attctctttgcgcagttccctccctctcctttcaagatgcagatcttcgtcaagaccctcaccggaaagaccatcacccttgaggtggaaagctctgacaccatcgacaacgtcaaggccaagatccaggacaaggaaggaattcccccggatcagcaacgtctcatcttcgccggaaagcagctcgaggacggccgtaccctcgccgactacaacatccagaaggagtcaacccttcaccttgtccttcgtctccgtggtg

SEQ ID NO: 282032 - DNA, 266 bp, Glycine max
  unsure (1)..(266): unsure at all n locations
ccataaccatgtcagacgaggagcaccacttcgagtcaaaggctnatgctggagcatcaaagacatttccccagcaagctggaaccatccgcaaaaacggttacattgtcatcaagaacaggccatgcaaggttgtggaggtttcaacttccaaaactggcaagcatggacacgcaaagtgtcactttgttgcaattgacatcttcactgggaaaaagcttgaggatattgtcccatcttcccataaactgtgatgttccccatgt

SEQ ID NO: 282033 - DNA, 262 bp, Glycine max
  unsure (1)..(262): unsure at all n locations
gctgtatggaaagctgaggtacgtaagcagggttgattatctgtgggagagtgtgaggaggaacgaggtggaaattccggagtttgtgtttgatcacgacgaggatttggattaccgtccgatgatggattacggattggagagcgatcacgctagagtgtacggtggtgctccaaccatggattcacccgtcaccacctactccatggttncgcatctcataggattccaggagattcataaatcctctgcgcttctgtna

SEQ ID NO: 282034 - DNA, 266 bp, Glycine max
  unsure (1)..(266): unsure at all n locations
aaacagctatcaatgcttaggcttgtaatgacatcattttttctcgccgactacaacatccagaaggagtccacgcttcacctacgtcctccgcctccgcggcggcgccaagaagcgcaagaagaagacctacaccaagcccaagaagatcaagcacaagcacaagaaagtcaagctcgccctcctccanctctacaaggtcgacgactccggcaaggtccagaggctccgcaaggaatgccccaacgccgagtgcggcgccggga

SEQ ID NO: 282035 - DNA, 266 bp, Glycine max
  unsure (1)..(266): unsure at all n locations
gctggatnggtcananatcatacatgncggacgaanagcaccatttcgngtaccaaggnngacgccggtgnctcnaanacctaccctcagcaanccggtnccattcgcaagancggctacatcgtcatcaaaggacgcccctgcaaggttgtggnngtntcganttcnanaactggnaagcacggtcncgccaagtgccactttgttggnattgntattttcantgncaagnnacttgaggatcttgtgnnctctctcncaactgt

SEQ ID NO: 282036 - DNA, 262 bp, Glycine max
  unsure (1)..(262): unsure at all n locations
aagcaaaaggccatataattttnttttatttgaaataatgtccgggatcatccagnaagattgaggagaccctcccatgtgggagggcacaaganagaggagcacaaaggagaacaccatggtgagcacaaaggtgaacacaaaggagaacaccatggtgagcacaaaggtgaacacaaaggagaacaacaccatggggagcacaaggagggacttgtggataagatcaaggacaagatccatggtgatggccatgacaagg

SEQ ID NO: 282037 - DNA, 259 bp, Glycine max
gggtttatcatctgcttcaatggggaagggaacagggagcttcggtaagaggaggaacaagacccacactctctgtgtgaggtgtggccgccgcagcttccacctccagaagagtcgctgcgccgcttgtgctttccccgctgcacgcacgcggaaatataactggagcgtcaaggcaattcgcagaaagaccaccggaactggcaggatgagatacttgcgtaacgtgcctcgccgtttcaagagtggcttcagagaa

SEQ ID NO: 282038 - DNA, 262 bp, Glycine max
  unsure (1)..(262): unsure at all n locations
gcgaggtcgcggaggatcggcagggaacaagttccgcatgtcactgggtctgccggtggcggcgacggtgaactgcgccgacaacnnccggcgcgaagaatctctacatcatatcagtgaaggggatcaagggaaggctgaaccggttgccgtcagcttgcgtnggtgacatggttatggccaccgtcaannagggaaagcctgatctccgtaaaaaggtgctccccgccgtcatcgtccgtncagcgcaagccgtggcgcc

SEQ ID NO: 282039 - DNA, 261 bp, Glycine max
caaggacacattaaagctaggtgcttgtgctgatctcttaggacttgttaacattattgttggaactcctccttacgagccagtgttgtgcattgatcaagggtttggcggatttggaagctgcactttgcctatgcaccgcaattaagagcaatgtgcttggaatcaacttgaacgtacctgtgacgctcagcgtgatccttagtgcttgtcaaaagactgtccctcctggtttccaatgtccctcctgagataatcaaa

SEQ ID NO: 282040 - DNA, 257 bp, Glycine max
cgttcttcttcttttgttgttctgtgtttgtgtttgttttttctctcacctgaaaatgtcttgctgcggtggtaactgtggttgcggaagctcctgcaagtgcggcaacggctgcggaggctgcaagatgtacccagacttgagctacactgagtcaaccaccaccgagaccttggtcatgggagtggcacctgttaaggctcaatttgagggtgctgaaatgggtgtgcccgctgagaacgatggctgcaaatgtg

SEQ ID NO: 282041 - DNA, 227 bp, Glycine max
  unsure (1)..(227): unsure at all n locations
aacagaagaacaaccaccaccacacacaatgggtcgcgtgagaacaaaaacggtgaagaaatcctcccgccaggtgattgagcgttactactcgcgcatgaccctcgacttccacacaaacaaaaagcntctcgaagaagtggccatcatcccttccaagaggctgcggaacaagatcgcgggtttctccacgcatctcatgaagcgcatccagaagggtcccgttc

SEQ ID NO: 282042 - DNA, 259 bp, Glycine max
  unsure (1)..(259): unsure at all n locations
cctagctagccacaatgcagatattcgtgaaanccctaacggggaagacgataaccctagaggtagagtcatacggacacaatcgacaatgtgaaggcgaagatccaggacaaggagggcatcccgccggaccagcagcgcctgatcttcgccggtaagcagctggaggacggccgcaccnccgccgtctacaacatccagaaggagtccacgcttcactacgtcctccgcctccgcggcggcgccaagaagcgcaaga

SEQ ID NO: 282043 - DNA, 255 bp, Glycine max
  unsure (1)..(255): unsure at all n locations
ctttcctcttaagtggcacattgttaaggatgttcctaacaatntgttgaggcacattaccttggacaacaatgagaacaaacctgtcactaacagtagggatacacaagaggttatgttggagcctncgctgaaattaattaaaattttcaaggaatataccagcaagacatgcatttttnatgattttggcttctatgaggctcgtcagaaaactattttggagaagaaagcaaagcaacaattcccaaagca

SEQ ID NO: 282044 - DNA, 256 bp, Glycine max
ctttcttcctcttcctcagtagtgcgattttcgattctcttctctgcaactatgcctaaccctaaggtcttcttcgacatgaccatcggcggtcaacctgccggccgcatcgtgatggagctctacgccgacgtgactccgagcaccgccgagaacttccgcgcgctctgcaccggcgagaagggcgccgggcggagggcaagcccctccactacaaaggctcgtccttccaccgcgtgatcccgaacttcatgtg

SEQ ID NO: 282045 - DNA, 258 bp, Glycine max
gcgttcatctcaatctagatttgtgtgcggtgcgtctccggtgaagagaagaagatggcgaccgtaccaggacagctcatatgggaggtcgtaaagaagaacaactctttcttggtgaaagagttcggaaggggcactcagagcgtgcagttcagcagagagcccaacaatctctacgccctacaacactttcaagtactccggtttggcgaacaagaaaactgtcactgttacaacctgcgggtaaagaccagtctg

SEQ ID NO: 282046 - DNA, 259 bp, Glycine max
  unsure (1)..(259): unsure at all n locations
ggctaaacagctcagccatgattgatggtggagacttcgatggtgccaaggcgtacaaggacagcaaagtctgcaatatgctcacaatgcaagaattccacagacgattccatgaggaaactggaatcacatttgcttccctttaccccggttgcattgccacaacaggcctgttcagagagcacttcccttgttcagaaactctgttnccctcccattccagaagtacataaaccaaaggctatgtctccggaagatg

SEQ ID NO: 282047 - DNA, 251 bp, Glycine max
ggagattcatgcctgaaaaggggtctcctgaatatgatgcgttggctaagaaccctgagaaggagtttttgaagactattactggcaagaaggagaccctcattgaccttacagttatagaaatcttgtcaaggcacgcatctgatgagttctaccttgggcagagagatggtggtgactactggacttctgatgccggtccattagaggcatttaagaggtttggaaagaagctgaagagattgaaaaga

SEQ ID NO: 282048 - DNA, 232 bp, Glycine max
gggagatctgattgttaaattttgttttgttgcgaatttagttttcagttggtgaattttgtaggtcaatttagattattatggcagttgctttcgttatgatctgtatcattttcccatcctgtatctacccagtgtattatgttgagctgtaagttacttgaatgtgaagcatgtaagcattcgaattcattgtttaactcctaattctagttccacatgttatgttttt

SEQ ID NO: 282049 - DNA, 253 bp, Glycine max
gctttggcatttgttattgatgggatttattatggggtatcagactttggatatgctgcttactcgatggttctagttggactagtttcttcaactttccttctggtggcggctccagtagggcttcctggagtctggactggattgtttattttcatggctttgcgtgttctagctggagtttggaggttgagcagtaaaagtgggccttgggatacaatctggtatagagatggagcagaagatgaccaac

SEQ ID NO: 282050 - DNA, 264 bp, Glycine max
agttgactctcgtccaaagcttagagggcaactcttacttcgcaggcttgtggagaaaggtcttagctgtacatatactcatataaatgctgtttcctacataatgcatgaagttactcgggtttttctgggtgcttcagcagttttgtctaatggaacagtatattcaagagtagggactgcatgtgttgcaatggttgctcatgcattccgtgtacctgtcatagtatgttgtgaggcctataaatttcatgaacgggtaca

SEQ ID NO: 282051 - DNA, 266 bp, Glycine max
  unsure (1)..(266): unsure at all n locations
ttgtcaaggagcttnatggcagttttgcctttnttgtctntgacagcaaggttggcagtgtctttgtcancactgggntcctgatggaggantgaagctgtattggggtnttgcanactgatggatctgtggtgatctcngatgatctagangtcataaaaganggttgtnccaaatcctttgctccctttccaacagggtgtatgtntcacagtgaaggaggtctgatgagctttgagcatccaatgaacaagttgaaggcaatg

SEQ ID NO: 282052 - DNA, 268 bp, Glycine max
atgatgcatgctaccatcaaatcattagccattggctaagcactcatgcaattgttgagccatttgtcatagcaacaaacaggcaactgagtgtggttcaccctatttacaaacttctgtttcctcactaccgtgacaccatgaatattaattcacttgcccggaaagccctggtcaatgcagatggtattatagagaaaacattcttgtggggtaggtactctatggaaatgtccgctgtcatttacaaggactgggttttcactga

SEQ ID NO: 282053 - DNA, 268 bp, Glycine max
caaaaccctaagacacagaggagaacacaaacagcagcgtcttggtttgtgagagagacagaggcacagagagaaaatggtttcggggtcaggaatctgcgcgaagagggtagttgtggacgcgcggcaccacatgctggggaggctggcatcgatcgtggcgaaggaacttctgaatgggcagaaggtggtggtggtgcgctgcgaggagatttgcatctccggtgggctcgtcaggcagaagatgaagtacttgcgtttcctccgc

SEQ ID NO: 282054 - DNA, 271 bp, Glycine max
  unsure (1)..(271): unsure at all n locations
caagaaggaaaccttcctgtntatggctaccataaccctaaattctttgtccaatccattcancaagccaagggtcataataatgcttgtcaaggctgntgcacctgttgaccaaaccatcaagaccctctcagcacacttnnccaagggtgattgcatcattgatggtggcaatgagtggtatgagaacactgagagaagagagaaagcgatgtccgaattgggtcttctctaccttgnggatgggagtttcaggtggtgaagaaggtgc

SEQ ID NO: 282055 - DNA, 266 bp, Glycine max
gcattcaaggggaaccagaggatggtggttgaagcacttgaggcaatggctgagaaagaagctttggatatgaaggctgctctggagtcaaaaggggaggtggagtttcaagtgtgtacactgggaaaaatgtgactattaagaagagtatgctgaccattcaaaaggagataaagaaagagcaccagcgagtttttacaccatctgtgattgaaccatcatttggaattggacgtataatctattgcctctttgagcacacattc

SEQ ID NO: 282056 - DNA, 266 bp, Glycine max
gcgtgattccttggcggagtgcgagcgtgcaccgagccgcggcgagacaaaacgctgcgttgggtcgctcgaggacatgatcgactttgccacctctgttttgggccgaaacgtcgccgttggactacccagaacgtgaacgggtccaagaagagtgtggtggtggggcccgttaggggaatcaacggtggtaaagtcacccaatccgtgtcgtgccaccagagcctgttcccttatctgctttactactgccacgcggttcctaa

SEQ ID NO: 282057 - DNA, 266 bp, Glycine max
  unsure (1)..(266): unsure at all n locations
ctcacaaacgcacactgaattcanaaacatcgnaagagagaggcatggccgagcaaaccttcatcatgatcaagccagatggcgttcaaagaggncttatnggcgagattattagcagatttnagaggaagggtttnnacttgaaagggttgaaactcgtnactgtggaccgtcanttgctgagangcactatgctgatttgtctgcaaagcctttctttagtggnntggtggattacnttgtctctggccctgttgtngccatga

SEQ ID NO: 282058 - DNA, 266 bp, Glycine max
  unsure (1)..(266): unsure at all n locations
agcgaaaaacctacaaggagagaacgaaggggaagacaagggagccattgtgacagtgaaaggaggtctgagcgtgataaaaccacccacggacgagcagcaacaaagaccccnnnnnnnnnnnnnnnnnnnnnnnnnnnngaagccacagtgcaagggtaaagacaaacactgccaacgcccccgaggaagccaaagcaaaagcagaagaaatggcattgacgagaccatatgcaccatgagacttcgccacaacattggccaga

SEQ ID NO: 282059 - DNA, 267 bp, Glycine max
  unsure (1)..(267): unsure at all n locations
caagtagttgagaactaagaagaaggaaatggcttcctcaatgatctcctccccagctgttaccaccgtcaaccgtgccggtgccggcatggttgctccattcaccggcctcaaatccatggctggcttccccacgaggaagaccaacaatgacattacctccattgctagcaacggtggaagagtacaatgcatgaccgtgtggccaccaatnggcaagangaagttcgagactctttcctacttgccagacctcgatgatgccca

SEQ ID NO: 282060 - DNA, 266 bp, Glycine max
  unsure (1)..(266): unsure at all n locations
gccgttcggtcgcctatgatactaggaccaataggtcaaaaatgggtttgtgccgcaggtgttgaacgatctactctacacaggtgtgggcttacagggctagggctcataaagcctttcttcattcccctggtcggtcacttttccgggccgggatcgatagataagtggaagtcatanaaaagagatctttctcttcgcacctaagatcaagaggaagggtagcttgtcaagctggcctatataaaatatctttttcattatta

SEQ ID NO: 282061 - DNA, 266 bp, Glycine max
tgataagcaaccgagaagttgttgcagtaaatcaagacaaacttggaatacagggaaagaaggtgaaaaacaataatggtttggaggtgtggacaggtcctcttcgtggtaacaaggtagagtgatcttatggaacagaagttcatcaaatgcaacagtgactgcatgttggtctgacattggcttggaaccaggaactatagttgatgcaagagatttatgggagcactcaacgcaaacatcggtttcaggaaaaatatctgctg

SEQ ID NO: 282062 - DNA, 266 bp, Glycine max
  unsure (1)..(266): unsure at all n locations
agaagaaggaaatggcttcctcaatgatctcctccccagctgttaccaccgtcaaccgtgccggtgccggcatggttgctccattcaccggcctcaaatccatggctggcttccccacgaggaagaccaacaatgacattacctccattgctagcaacggtggaanngtacaatgcatgcaagtgtggccaccaattggcaagaagaagttcgagactctttcctacttgccagacctcgatgatgcccaattggcaaaggaagtc

SEQ ID NO: 282063 - DNA, 264 bp, Glycine max
  unsure (1)..(264): unsure at all n locations
cgaanctttccccgttactgtactcaatttattgagatatgcatcatgctatgtgccgaccatggtccttgtgtctctggtgctcacaatactattgtgacagcaagggcagggaaagacctagtttccagtctcgtatcaggtttgctaacaattggtcctcgatttgggggtgccatcgatgatgctgctcgctacttcaaggatgctcatgacagggcacttactccttatgagtttgttgaaggtatgaaaaagaaggga

SEQ ID NO: 282064 - DNA, 261 bp, Glycine max
ggagggactcctgcagttatccgctaccttcttgagcaaggctttttagatggtgactgtatgactgtcactggaaaaaccctagctgaaaatgcagaacttgtccctcctctgtccaacgggcaggaaataataaggccagtagaaaatcccatcaagaagacggctcacattcaaatattatatggaaaccttgcaccacagggttccgttgctaaaattactggaaaagaagggctgtacttctctggtcctgcactt

SEQ ID NO: 282065 - DNA, 229 bp, Glycine max
  unsure (1)..(229): unsure at all n locations
gntcnccgtgcngtgcttatngatcncgaacctggaaccatggacagcatcagatctggcccctnacggcaagatcttccgccccgacaacttcgtcttcggccagtccggcgccggtaacaattgggccaaaggtcattatactgaaggcgccgagctgatcgactccgttctcgacgncgttcgcanagaggctgaaaactgcgattgcttgcaaggttttcaagtt

SEQ ID NO: 282066 - DNA, 263 bp, Glycine max
gccgggtcccagatcttcagcgagggtgggctggactacttgggcaacccaagccttgtccacgcccagagcatcctcgccatctgggccacccaagttatcctaatgggtgctgttgagggttatcgtattgctggtgggcccctcggtgaggtcactgacccaatctaccctggtggcagctttgacccattgggccttgctgatgacccagaggcttttgctgagcttaaggtgaaggaactcaagaacgggagattggc

SEQ ID NO: 282067 - DNA, 263 bp, Glycine max
gttggcttaacacctgggtcggctgggggacttgatggtcctgatcgggtttttgttggtggacttccttattactttactgaaacacagatcagagagcttttagagacttttgggctctacggggttttgatctagtgaaagatagagaaacgggcaactcaaagggttatgcgttttgtgtttaccaggatcttgcagttacagatattgcatgtgctgctctaaatggaataaagatgggagataagactcttacagtt

SEQ ID NO: 282068 - DNA, 263 bp, Glycine max
agcaaaggcaggtgcagggtctgctaccttgtcaatggcgtatgcagcagctagatttgttgaatcgtctcttcgtgcccttgatggagatggggatgtgtatgagtgctcatatgtcgaatcagatttgactgaccttccattctttgcttcaagggtgaagcttggtaggaaaggagttgaggcattaattccatctgacctccaagggttgactgactatgagcagaaggctttggaatcacttaagccagaactcatgg

SEQ ID NO: 282069 - DNA, 260 bp, Glycine max
caaatcctctaattcaagtttgcaccaagttttcctgagaaaatgtctggtcgtggaaagggtggaaagggtttgggaaagggaggtgccaagaggcacaggaaggttcttcgcgacaacattcagggcattacgaaacctgcgattcgtaggttagcgagaagaggtggcgtgaagaggatcagtggtttgatctacgaggaaaccagaggggttctgaagatattcttggagaacgtgattcgcgatgctgtgactta

SEQ ID NO: 282070 - DNA, 261 bp, Glycine max
  unsure (1)..(261): unsure at all n locations
gaagactattactggcaagaaggagaccctcattgaccttacagttatagaaatcttgtcaaggcacgcatctgatgagttctaccttgggcagagagatggtggtgactactggacttctgatgccggtccattagaggcatttaagaggtttggaaagaagcttgaagagattgaanagaagcttatagagaagaacaaagatgagacattgagaaaccgctatgggccagctaaaatgccttacactctgctctatcc

SEQ ID NO: 282071 - DNA, 262 bp, Glycine max
aagaactagaactagggtttcatctttgccatcagtaaacgacaatgatttacgacgttaactctcctcttttccgatccttcctcagccagaagggaggctcctctgataagaggaatcggacgaacagaagccaaaagagcagaaacccaaagccagcgagaacaaacctataatgactgagtgataacagctgagctgcattcagttgtagaatgaaaataggtggtaggtattgtatttggtgctaaactaagatctt

SEQ ID NO: 282072 - DNA, 264 bp, Glycine max
gatgctccagattcagcccgagaaagaaatcgtcattgagttcataaaaaacgaggattacaagtacgttaggattctcggtgctttttacttgcgtatcactggttctgacattgacgtctaccgctacctcgaacctttatacaatgactatcgcaaacttagacgaaagctcgctgatggacagtttacattgacgcacgtggatgaggttatagatgaacttctcacaaaggattattcttgtgatattgctctgccacg

SEQ ID NO: 282073 - DNA, 261 bp, Glycine max
  unsure (1)..(261): unsure at all n locations
agagtttgttgtgagctataagctagtttatcgtgaggagaatatgaagttgtttgttttctttgttgctgcagtagttttggtagcatggccatgccatggcgcaggctaccaaaggttccctctccgaatgaaaactggctatggtgagcgttcttcggaggtaaaatgcgcaagttttaggcttgctgtggaagcacacaacatccgagcnttaaaaccattcctgaagagtgcgttgaancaacaaaggactacatt

SEQ ID NO: 282074 - DNA, 261 bp, Glycine max
ggaggttcgtaggcagttcaacaccattccaggactgatggagggtcatgccaagcctgattatgccacctgcgtcaaaatttctactgatgcatccatcaaggagatgattcctccgggtgcccttgtcatgctcacaccactcattgttggaatcttcttcggggtggaaacactttcaggtgttcttgccggggctctagtttctggtgtacagattgcaatatcagcatccaacactggcggtgcttgggataatgc

SEQ ID NO: 282075 - DNA, 255 bp, Glycine max
gttggcttaacacctgggtcggctgggggacttgatggtcctgatcgggtttttgttggtggacttccttattactttactgaaacacagatcagagagcttttagagactttgggcctctacggggttttgatctagtgaaagatagagaaacgggcaactcaaagggttatgcgttttgtgtttaccaggatcttgcagttacagatattgcatgtgctgctctaaatggaataaagatgggagataagactc

SEQ ID NO: 282076 - DNA, 256 bp, Glycine max
gcttgaggtgagtgacagacaaacattcactggtccaccagaaaatgtaagagatcatgttatggctgccacgaggtttcttagcaagggagacttccagaaggcttttgacttattgtgtctcttgatgtgtggaaatttgtgagaaatcgagacactgtgcttgaaatgcttaaggacaaaatcaaggaggaggcattgaggacatacctctttaccttctcttcatcttatgaatccttgagcctggatcagc

SEQ ID NO: 282077 - DNA, 260 bp, Glycine max
  unsure (1)..(260): unsure at all n locations
cttccgccatcaagccctacaggaacttccagaaggagaagaagctcgaggacaacgacttcaccggngccgttttcgaaggcaagttttacggccccgatgaggttaagaaccggaatccttgnccacgcgcgctgagatttacgccacccttttgggggctttgaagagccctgcttccgctcttgttggcactcttcagtctcctgctagggaatttntnacggttctcaaggcgcatattaagaaccttgaagaac

SEQ ID NO: 282078 - DNA, 260 bp, Glycine max
cccgccgcaactcacactgtcttccttctctagggtttttagctcctccaaattcttcgcccaacatggttcttcaaaatgatattgatttgctaaatcccccggctgagcttgagaagaggaaacacaagctcaagcgtcttgttcagtcaccaaactctttcttcatggatgttaagtgccagggttgcttcaacataaccactgtctttagccactctcagactgttgttgtatgcggaaattgccagaccgtcttg

SEQ ID NO: 282079 - DNA, 260 bp, Glycine max
gagtgatcggtgttcacttgatctcatcataatcgtcagcgtcaattgaagaagatgccgatcagaaacatcgccgtcggaaggcctgaagaggcgactcaccccgacacgttgaaggcggctttggctgagttcatctcaaccttcatcttcgtgttcgccggctcaggctccggcatcgcctacaacaagctcaccgacaacggcgctgccacccctgccggcctcatctccgcctccatcgcccatgcattcgccct

SEQ ID NO: 282080 - DNA, 255 bp, Glycine max
  unsure (1)..(255): unsure at all n locations
gttgccattctcatcctcttctttctctctctaccattgccatggatccctacaagcaccggccatccagcgccttcaattctcccttctggactacaaattctggtgctctatttggaacaacaactcctctttaaccgttggagctagaggtccaattctgctggaggattatcatcttnnggagaagcttgcaaattttgatagggaacgtatcccagaacgtgttgtccatgccaggggcgctagtgcaaa

SEQ ID NO: 282081 - DNA, 257 bp, Glycine max
  unsure (1)..(257): unsure at all n locations
gggaaaccccagagggtcaaaaggctattcattctctgaagaatgtttatgcccattgggttcctgaggacagaatcctttgcaccaatttgtggtctgctgaactctcaaagcttgcagccaatgctttcctggcccagaggatctcctcggtgaatgccatgtcggcactttgtgaggcaactggtgctgatgtctcccaggtgtcacattnaatcggcacagactcaagaattggaccaaagttcctgaatgcc

SEQ ID NO: 282082 - DNA, 255 bp, Glycine max
ggttggagacagagagagagaagttttcagtttcagaaagaaagcaaaagcaatagcaatgggttggatcggtgagactgttgattccatcaaatctcttcagatccgccagtcctcacccaggctgtgagcctaggcatgattgttacgtctgcactgataatatggaaggcattgatgtgcgttactggcagtgaatctcccgttgttgttgttctttctggaagcatggaacccggattcaagcggggagac

SEQ ID NO: 282083 - DNA, 239 bp, Glycine max
  unsure (1)..(239): unsure at all n locations
cctgttacanttattganacccctccaatggttnttgttggtgttgtgggttatgtnaaaactccacgtggtctccgaacattgaacactgtgctgggctcagcatttgagtgangaattgaaacgtaggttctacaagaactggtgcaagtccaagaagaaggccttcaccaagtnctctaagcagnatgaaactgangnggganaganaancttgaggngcactgganaaatnangt

SEQ ID NO: 282084 - DNA, 241 bp, Glycine max
  unsure (1)..(241): unsure at all n locations
agggagggtcctaaccttctcaagttggccaggaangagcagtgcttggctcttgggactaggctcaggtccaagtacaagatcaagtaccagttctacagggtcttccctaatggggaggttcagtatttgnaccctaaggatggngttnacccngagaaggtcaacgccggacgccaaggggtgggtcaaaacttcaggtctatgggcaagaatgttatcctattgaggtcaatttcac

SEQ ID NO: 282085 - DNA, 242 bp, Glycine max
  unsure (1)..(242): unsure at all n locations
cacanacacacactgaactannnaacatcaaaagagncatggctgagcaaaccttgcatcatgatccaagcctgatggcgtccaaagaggccttattggcgagatcattagcagntttgagaagaaaggttnctacttgaaaggtttgnaacttgttactgtggaccgtccttttgctgagaagcactatgctgnttngtctnccaagcntttctttagtggttgggtgntncntnacccct

SEQ ID NO: 282086 - DNA, 243 bp, Glycine max
  unsure (1)..(243): unsure at all n locations
gttgaaaagaaaccctagcaagtggagcaatggcagacgttgaagtcgatgtgnnnnnnnnnnnnnnnnnnnggctgccgaagaagagaacgttcaagaagttcagttttcgaggcgtggatctcgatgcacttctcgacatgtccaccgatganctcgtcaagatgttcagtgccggcgctcgtagaaggttccagagaggcctcaccagaaagcccatggccttgatcaggaagctccgta

SEQ ID NO: 282087 - DNA, 240 bp, Glycine max
  unsure (1)..(240): unsure at all n locations
cacaaacacacactgaactaaaaaacatcaaaagagacatggctgagcaaaccttcatccatgatcaagcctgatggcgtccaaagaggccttattggcgagatcattagcagatttgagaagaaaggtttctacttgaaaggtttgaaacttgttactgtggaccgtccttttgctgagaagcactatgctgatttgtctgccagccttcttagtggtttggtggatacntaaccccgg

SEQ ID NO: 282088 - DNA, 242 bp, Glycine max
aaagagccaaaatcccagacccaagtgctgtgaagccagatgactgggatgaggatgcacccatggaaatcttagatgaagaagcagagaaacctgaaggatggttggatgatgagccagaggaaattgatgacccagaggcaactaaaccagaagactgggatgatgaggaggatggtgaatgggaagccccaaagattgaaaacccaaagtgtgaggccgcccctggttgtggtgatgga

SEQ ID NO: 282089 - DNA, 241 bp, Glycine max
cagttggtggcatctgggaaaccagacagcttcagtggggagttcctagtgccgtcttaccgtggttcctctttcttggaccccaagggaaggggtgcctcaactggttatgacaatgctgttgctttgcctgctggtggaagaggagatgaagaggaacttgccaaggagaacaataaaagtgcttcatcttccaaagggaaaatcaccttgagtgtcaccaagtccaagcctgagatgg

SEQ ID NO: 282090 - DNA, 244 bp, Glycine max
  unsure (1)..(244): unsure at all n locations
gagcagcagccgccgacgagaccacagaggcaccagcaaaagtagaggctgcaccggtcgggttcaccccaccagaacttgacccaaacaccccttccccgatcttcgggggcannaccggcgggctctgcgcaaggcacaggtggaggagttttatgtcattacgtggggactcacccaaagaacagatctttgaaatgcccactggcggcgccgctatcatgagggagggtcctaaccttct

SEQ ID NO: 282091 - DNA, 241 bp, Glycine max
tctggttgtgatgggggatatcccttgtatgcgtggcaatacttagcccaccacggtgttgtcactgaagagtgcgacccatattttgatcaaattggctgttctcatcctggttgtgagccagcttaccggactcccaagtgtgttaaaaagtgtgtaagtgggaaccaagtttggaagaagtcaaaacactatagtgtcaatgcatacagagtgagctctgatccccatgatatcatga

SEQ ID NO: 282092 - DNA, 242 bp, Glycine max
gggtcttccccaatggggaggttcagtatttgcaccccaaggatggtgtgtaccctgagaaggtcaacgccggacgccaaggggttggtcagaacttcaggtctattggtaagaatgttagtcctattgaggtcaagttcactggcaagcaaccctatgatttgtgagcaactctatcatcattcccccatgcttcttccattcgtttatatgctatattgtcatctcatgtcatgccagga

SEQ ID NO: 282093 - DNA, 239 bp, Glycine max
  unsure (1)..(239): unsure at all n locations
ctttgcgaaggaggtttacagcgctcaaccaaagatgcagaacgaggaaggacagatcactgagctttacattcctaggaagtgctccgccacaaacagattgattaccgctaaggaccatgcttcggttcagatcaacattgggcatgtggatgagaatggcgtctacaatggccatttctccactttgnncgggatcatccnccnaggngaggtgatgctgacagtgctctagaccg

SEQ ID NO: 282094 - DNA, 245 bp, Glycine max
  unsure (1)..(245): unsure at all n locations
agctagtttatcgtgaggngantatncaagttgtttgttttctttgttgctgcagtagttttggtagcatggccatgccatggcgcaggctaccaaaggttccctctccgaatgaaaactggctatggtgagcgttcttcggaggtaaaatgcgcaagttttaggcttgctgtggaagcacacaacatccgagcctttaaaaccattcctgaagagtgcgttgaaccaacaaaggactacataat

SEQ ID NO: 282095 - DNA, 131 bp, Glycine max
agctataagctagtttatcgtgaggagaatatgaagttgtttgttttctttgttgctgcagtagttttggtagcatggccatgccatggcgcaggctaccaaaggttccctctccgaatgaaaactggcaa

SEQ ID NO: 282096 - DNA, 237 bp, Glycine max
gttgtttctcagccgcctcggctagggttcggaaacgaagaagggttctgttttcttttcgcgatgagggccaagtggaagaagaagcgtatgaggaggctgaagaggaagcgccgaaagatgagacagagatccaagtagtgcgttaaacctagtttgtttccgttgcttttacaattgcttatgttgtcaaataggacacccagttgttagtggcatggtcctccttttgatgtt

SEQ ID NO: 282097 - DNA, 111 bp, Glycine max
gctggagctggttctgcaacactatcaatggcatatgctgctgttaaatttgcagatgcatgccttcatgccctgagaggagatgctggcatcattgaatgtgcatatgtt

SEQ ID NO: 282098 - DNA, 240 bp, Glycine max
  unsure (1)..(240): unsure at all n locations
gttgtttctcagccgcctcggctagggttcggaaacgaagaagggttctgttttcttttcgcgatgagggccaagtggaagaagaagcgtatgaggaggctgaagaggaagcgccgaaagatgngacagagatccaagtagtgcgttaaacctagtttgtttccgttgcttttacaattggcttatgttgtcaaataggacacccagttgtnantgcactggtctctccttttgatgttt

SEQ ID NO: 282099 - DNA, 242 bp, Glycine max
  unsure (1)..(242): unsure at all n locations
ctcagcctcacactcacatatacacatatctgaacgcgtatcgtccctcctatggcttcaaagcgcatcctcaaggagctcaaggacttgcagaaagacccaccaacttcttgcagcgctggtccagtagctgaggacatgttccattggcaagcaacaataatgggtcctgctgatagtccttatgctggnggtgtatccnnannctntnnacattccncccnggnttaccttttnaggcc

SEQ ID NO: 282100 - DNA, 243 bp, Glycine max
  unsure (1)..(243): unsure at all n locations
ctgagttccgccattacactgacatcaatgagcttcctccacatcggcttgctgaaatcagaagattctttgaggactacaagaagaatgagaacaaaatagttgatgttgaagactttctaccggctgaagctgccattgatgccatcaattactccatggacttgtatgctgcttacatagttgagagctaaggnactaacttctctanagacnntgtancncnntnngngngctctccaa

SEQ ID NO: 282101 - DNA, 238 bp, Glycine max
  unsure (1)..(238): unsure at all n locations
agaaaatcctcacccattttcttcgtagccaaacactctgaaattctcagttatgtcgtggcaagcgtatgtggatgatcaccnactgtgtgaaatcgaaggtaaccacctcactcacgccgctatcatcggccaagacggaagcgtttgggctcagagcaccaacttccctcagttcaaacctgaggaaataactgccatcaataatgntttagtgngnnnggatcnctngcccnaa

SEQ ID NO: 282102 - DNA, 240 bp, Glycine max
  unsure (1)..(240): unsure at all n locations
aagaaaatggcgggtggtggaaaggtttcgttcaaagtcacactcacctccgatccaaagttacccttcaaagtgtttagcgttccagaggcggcaccttttactgccgttctcaaattcgccgccgaagaattcaaagtcccgccccagaccagcgctatcatcaccaacgatggtgttggcataaatccccagcagagcgcaggcaatgtcttccttnaagcatggttcagaatgcgc

SEQ ID NO: 282103 - DNA, 238 bp, Glycine max
  unsure (1)..(238): unsure at all n locations
gtgggagtgtgggagggctcgaagagttctgcaataattttgaacacgtttgatgccttagagcacgatgttttggaagcgntctcgtccattttgcctccagtttattccataggtcctttgaatttacacgtgaagcatgttgatgacaaagagttgaatgctattgggtctaatctttggaaggaggagtccaagtgcgtggagtggctcgacactaaacaaccnntaatgttnt

SEQ ID NO: 282104 - DNA, 241 bp, Glycine max
  unsure (1)..(241): unsure at all n locations
gataacttcagaagatcggaaatgccgttagatgtgctggtttgcaatgctgctgtttacttgccaactgctaaggaacctaccttcactgctgagggctttgaacttagtgttgggacaaatcatctggggcatttcctcctctcgcgcctgttgcttgaggacttggaaaaatccgattacccttcaaagcgcttgatcatcgttggttcaataacagggnacacaaacacattggctg

SEQ ID NO: 282105 - DNA, 237 bp, Glycine max
  unsure (1)..(237): unsure at all n locations
gcgcctatccgagcaaactgccttgaagagattaaatgcattaagttacatgaaaaggcaaatcaggaatcctttgtgtggaattatattttcccggaaaatgttggagggtactgccttgggaacagagcagaaacaacttctacgcactagtgctcagtgccagcagcagcttagtaaaancttgatgactcagtctttgatagtntcntagatgggtacttgggtcttgaaatg

SEQ ID NO: 282106 - DNA, 237 bp, Glycine max
  unsure (1)..(237): unsure at all n locations
aacagttagagagaaggcaagcttgttgtcggagtcccaagacatactatccaccattgaaattgagactcaggatattccagatgctcggacctatcttctgactttgaaggaaataagagtcaagaaaggtcttacagatgatcttggtgcagaggctctgatgatagatgcattggacaaaattganaaggnttaaaaccacctttactggatnatgatnagaaaggatggncc

SEQ ID NO: 282107 - DNA, 239 bp, Glycine max
gctgaagaggcttatcaatggagtgagggtcgtgcaatttttgctagtggaagtccatttgatcctgtagaatacaagggcaaagtgtactattctggccaggccaacaatgcttacattttcccgggctttggtctggggttggtaatctcaggagcaatcagagtgcatgatgatatgcttctagcagcttcggaagcctggctaaactaatgtccaacgagaactacgaaaagggc

SEQ ID NO: 282108 - DNA, 235 bp, Glycine max
  unsure (1)..(235): unsure at all n locations
gcagatttcaagatgaagttcaacattgcgaatcccaccaccggttgtcagaagaagctggagatcgatgatgacctgaagctgcgagcattttgggacaagaggatctcacaagaggttgttggtgatgctctgggtgaggaattcaaaggttatgtcttcaaaatactggaggttgcgacaagcaaggnttccnatgaaccaagagtgttttancccnggttntgntccncnc

SEQ ID NO: 282109 - DNA, 239 bp, Glycine max
  unsure (1)..(239): unsure at all n locations
ctcaacctctgcagcgccttcgatccagaaaacatgactaagagnacaaagaaggctggcattgttggaaaatacggtacccgttatggcgctagtctgcgtaagcagattaagaagatggaagttagtcaacacagcaagtttttctgtgaattttgtggaaagtatgctgtgaagaggaaagctgtgggatatggggatgcaaggactgtggtaaagtgaaagctggcggtgctaca

SEQ ID NO: 282110 - DNA, 241 bp, Glycine max
  unsure (1)..(241): unsure at all n locations
ctgcaatgtatggcattgctgtggctgcccttgggatgctgagnaccattgcgacagggttggctattgatgcctatgggccaatcagtgacaatgcaggaggtattgctgagatggcaggcatgagccatcgtattcgtgagagaactgatgcccttgatgctgctggcaacactactgncgccataggcaagggatttgctattgggtctgccgctctgtctcggccctatttggtgca

SEQ ID NO: 282111 - DNA, 291 bp, Glycine max
  unsure (1)..(291): unsure at all n locations
ctcacgatttcgattcaccctttctcccacacactccgattcnncttgtaaacagcggtgccangtctgggatcttggtggacaagaaagattgaggacatcatgggcaacatattaccgaggaacgcatgctgttattgtggtgatagacagcagtgatagaccaggatctctatcataaaggatgaactttttaggttgttggggcatgaagatttacaacattctgttattcttgtcttcgctaataaacaagatatcaangatgctatgactcctgctgagatcact

SEQ ID NO: 282112 - DNA, 287 bp, Glycine max
  unsure (1)..(287): unsure at all n locations
gttttcgcagcagcacactaacaaattactcatatcatatantaagatggccccgctctctcnngcnanctnaacgtattggtgtccttgntgctcaatctatctccctaattcccgttcatcggcgaggttacgcagnggcatccgatgtatcggtaagagntgattgggnaatatnggncgaacgaatggaatcgtgggnngtgtagaaganaagcctgatacaagagatggttcaaaagcctactcaactgattgggccccanacccagtaacagttatatagt

SEQ ID NO: 282113 - DNA, 288 bp, Glycine max
  unsure (1)..(288): unsure at all n locations
gtntgtggaatggcagcagttngagtaactgcaacagacgtanattttggtttcggtcacacactgctgcagaaatccgatggggnngtgcaaagcatgaagctggaganaaagatgatggtangaggatgcatccaagatcatcattcaaggttttccttgagttgtgaaggcaaggagcttaccatgganggaatatgnaatagatnctatgcattccttgcagttaatatgagcaatgcattcaaagataccgcgagtatggatttaaacacaaaancantaata

SEQ ID NO: 282114 - DNA, 312 bp, Glycine max
  unsure (1)..(312): unsure at all n locations
aagaatcacagaaaggggnggtggctgcttcgaaagcttaataatttgtttatttccagaacatcatagttttcgcagcagcanactaacaaattactcatatcatataataagatggcccgttctctctcgcnagccaaacggtattggtgtccttgttgctcaaatctatnctcctaatttcccggtcatcngcggaggttacgcaatgggcatccgatgtatcggtaanaagttggatggggacatttgggnanaggaatggaatccggggaaggnacaananaaccccntnnnacagaattgtnccaa

SEQ ID NO: 282115 - DNA, 287 bp, Glycine max
  unsure (1)..(287): unsure at all n locations
agnaagtgctttnnacagttangccacaatangganttggtgngaangggaagccanaacaangtgatgaangtgcagttccaccacatgcaacatngcagattactcttgaattagtttcatggaaaactgtntctgaagtaactgatgacaagaaggncaaaagaagatcctgaangaaggggnaggatatgagcgtccaaatgagggggccattgntanagtgnaataattggtaagctacaagatggngctgcctttttgaaaaanggccatgctgaagaaga

SEQ ID NO: 282116 - DNA, 287 bp, Glycine max
  unsure (1)..(287): unsure at all n locations
gcggactatatacttgccaacaccaacttggggcaatcacccgangttttcaacttagcaggcttgtctgtacaaaacataccgctactatgctccagcaacacgaggacttgactttcaaggacttctggaagaccttggttctgctccatctggatctatgttttgctacatgcatgcgcacataaccccactggtgtggatccaacccttgagcaatgggagcagattangcagctaataagatcaaaagctttgttactttctttgacagngcttatcagggt

SEQ ID NO: 282117 - DNA, 201 bp, Glycine max
  unsure (1)..(201): unsure at all n locations
agaaaggcaagaattgatcgttgaaaatgcagggaggaaagaaagcgggagagtccattaaggaaacagctacaaacattggtgcttctgccaaggctggcatggagaagaccanggccactgtccangagcaggcagaanatgacagcnngtganccgntgcaaagntgggcaccccaaagcaggaggcaaatgancccg

SEQ ID NO: 282118 - DNA, 260 bp, Glycine max
  unsure (1)..(260): unsure at all n locations
ttggtgctccgtctgcgcggtggtatgcaaatctttgtncaagaccttactgggaagaccatnactttggaggnagagagctcagacacaattgacaatgtgagggcaaagatccangacaaggagggtattcctccagancanaaaggttgattttgctggaaagcagcttgaagatggncgtacactggcagatacaacatccanaaggagtccaccttcacttgtcttcgtctcaggggagtatncagactttgtga

SEQ ID NO: 282119 - DNA, 283 bp, Glycine max
  unsure (1)..(283): unsure at all n locations
caggntagttttaccctactgatgacagtgtcgcaatagtaattcaacctagtacgagaggaaccgttgattcgcacaattggtcatcgcgcttggttgaaaagccagtggcgcgaantacccgngcgttggattatgactgaacgcctctaagtcagatccgggctagaagcgacgcgtgcgcccgccgtccgtttgccgaccagcagtagggggctcggccccccaaaggcacgtgccgttggtgacctcgtgaggcggattagccctacgagagccttga

SEQ ID NO: 282120 - DNA, 283 bp, Glycine max
  unsure (1)..(283): unsure at all n locations
ctcgagcgcaacttctgctacttcctactncaaccgcanttctgctccgcaattatcatnggcaangtcaagatcggaatcaacggatttggaagaattggccgnttggtagccanagnggctctgcagagagacgatgttgaactcgntgccgttaacaccctttcatcaccaccgattacatgacatacatgtttaaatacgacagtgttcatggcacatggnagcatcacgatgtcaccgttaagacgagcagaccttctcttcggtgacaagccagtca

SEQ ID NO: 282121 - DNA, 294 bp, Glycine max
  unsure (1)..(294): unsure at all n locations
cgcaacgancgaccttatncgtttctcgcaaagtttaagtcatcatgggtacggaaacgcctnacatcaacattgtcgtcattngacatgtcgcctctgggaagtcaactaccactggtcatttgatctacaagcttggaggtattgaccaagcgngtgattgcnggntcgannangnggctgctangatgaacnagaggtcattcaagtatgccngggngcttgcacaagctcaaggcngagcgcganagnggcattaccattgatattgctttgnggcagtttgaaaccaca

SEQ ID NO: 282122 - DNA, 301 bp, Glycine max
  unsure (1)..(301): unsure at all n locations
gangaagtgaagctgttgagctntnttgcgagtccatttggcaaaagggnngaatgggcattgaaactgnagggngtggagtatgngtacatagaacaagatatcttcaacaagactagtctccttctccagttgaacccggttcacaagaaggttccggttcttgttatgcccacaaacccatcgctgagtcattcgtcatcgntgaatacgttgatgaaacatggaagcagtatccatgttgcctcgagacccttatcaaagagcacttgctcgattttgggctaatttgctggagcaa

SEQ ID NO: 282123 - DNA, 283 bp, Glycine max
  unsure (1)..(283): unsure at all n locations
gcatattattggagcacacagttggaaatcttgatcccctttacattgtacataaggttcctaatgggttggaaatccctcggctccgggatcggctggttangattatcaccgactacaggactgaaacatcgctcagacatggatgcaatgatatcataaggcggactgngtcactccncccanttaagtattacaaagaggcaaggcatgggctttctttaggtaatgaagatgagccgcgggttaaatgagtgatatcgtgcttctcagnatttgacaa

SEQ ID NO: 282124 - DNA, 282 bp, Glycine max
  unsure (1)..(282): unsure at all n locations
ctacnagaaagaacttccttataaccaaaaccaacaacaactatggcaagttatcagaagcactacgatgatcanggtcgcaaggtcgacgngtatggcaatgttgagaggcaaactgacgaatatggcaacccggttcatgccactagtgtcacttagcngccaccaaaagtgttggnggctacaatgatgacgctaataagcaacatgatattactggtgtctatcccgagaaagacacggtagacatcattttggtcgtggttacgaggngcacactaa

SEQ ID NO: 282125 - DNA, 286 bp, Glycine max
cagcagagggagtagcggcattaaaaatgcagatcttcgtgaaaactctgacagggaagactataaccctcgaggtcgagagcagcgacaccatcgacaatgtcaaggccaagattcaagacaaggaaggcattcctccggatcagcagcgtttgattttgccggaaagcagcttgaagatggaaggaccctggccgattacaacatccagaaggaatcaacccttcatctcgtcctcaggcttcgtggtggcatcattgagccttccctcatggctttggctcgc

SEQ ID NO: 282126 - DNA, 283 bp, Glycine max
  unsure (1)..(283): unsure at all n locations
gggagagnngcgccgctgnaccatgttgaagctgagagacaaagacgtgagaagcttaatcagaggttttatgccttgagagctgttgtccctaatatatctanaatggacanggcatctttgcttggtgntgccattacctttatcactgatctgcagtgaagatcaaggngntggaagctgngaagaacatgggtaacaataaggaccanaaattgtcattgccagatatggntttcaggaagagaggntgacacagntgtgacagtgcgatgccccttag

SEQ ID NO: 282127 - DNA, 293 bp, Glycine max
  unsure (1)..(293): unsure at all n locations
gttctatgcggctttctctaagaacttaaagcttggtatccatnangattcccagaacaagggacagattgctgaattgctcaggtaccactccaccangagnggngatgngctgacaagcctcaaggattatgngaccaggatgnaggnaggtcanagtgactctactacatcaccggtganagcaagaaggctgttgagaatccccattcttggagaagttgaagaaganagggnatgaggttcttttcatggntgatgccattgatgnatatgctgttggccagctcaag

SEQ ID NO: 282128 - DNA, 283 bp, Glycine max
  unsure (1)..(283): unsure at all n locations
cagagccnctgatattgctcanggtgtacacggccaccttaccaaaaaacctgaagaaattggtgctggtgaccagggtcacatgtttggctatgccactgatgaaacccctgaattgatgccatngagccatgttcttgcaacaaaactcggtgctctctcaccgaggttcgcaagaacggtactgcgcttggctgnggctgatgggaagacccaagtgaccnttgagtattacaatgacaatggtnccagggntcntattcgtgtacacaccgtgctaatc

SEQ ID NO: 282129 - DNA, 279 bp, Glycine max
  unsure (1)..(279): unsure at all n locations
caaggctgttcatttctatttacaagagcatccggatcttatcaatgatgttttgaatgtccttgcacttcgtgttgatcatgcacgtgntgttgacatcatgcgaaaggctggtcatctccgtcttgtcaagccatacatggttgcagttcagagaacaatgtgtctgctgttaatgaagcccttaatgaactatatgttgaggaggaagactatgatagattgcgcgagtcgattgatttgcacgataattcgaccanataggctagcacagaagat

SEQ ID NO: 282130 - DNA, 286 bp, Glycine max
  unsure (1)..(286): unsure at all n locations
gagaangagagacaaatcggcagaagcaangaggctgagagcganagagcaactnccacgcactgtaactcctaacttcccagattcgtncttcttcctcttttctctccggtgattgttggaactcagagagnttctttgatggaacagtacgaganggtgagaagataggcgaaggaacatacggcgtcgtttacaagggtcgcgaccgcgtcaccaacgngaccatcgcgttgaagaagattcgcctcgagcaggaggatgagggggttcccagcaccgccat

SEQ ID NO: 282131 - DNA, 286 bp, Glycine max
  unsure (1)..(286): unsure at all n locations
atcatgcacaagagctcttcagattccacgntgggcccgggcnccctggnacctctcccaggccttcttcaggcccataaacaaagccgcccctccctcaccgaccaagcgccacaacaagatctccgtcatcggcgccggcaacgtgggaatggccatgcgcagaccatcctcactcaggacctcaccgacgagctcgtcctcgtcgacaccaatccgcacaagctccgcggccgagatgctcgacctccagcacgccgccgcnttcntcnncgcaccaagatcc

SEQ ID NO: 282132 - DNA, 286 bp, Glycine max
aaagttcaaaggatgcactttgatgcccaacattggttatggctcagacaagaaaacccgccattatctaccaaatggtttcaagaaatttgtcgtgcacaatgtgaaagacctggaacttctcatgatgcataacaggacatactgtgctgagattgctacaatgtatccacaaggaagaggaaagacatagttgagagagctgctcagcttgatgttgtcttgacgaacaagacggccagactacgtagccaggaggatgagtagatccaatatatgggagagt

SEQ ID NO: 282133 - DNA, 346 bp, Glycine max
aaagaatcaaagaaaggggtggtggctgcttcgaaagcttaataatttgtttatttccagaacatcatagttttcgcagcagcaaactaacaaattactcatatcatataataagatggcccgttctctctcgcaagccaaacgtattggtgtccttgttgctcaatctatctccctaattcccgttcatcggcgaggttacgcagtggcatccgatgtatcggtaagagttggattgggtaatattgggcgaaggaatggaatcgtgggaggtgtagaagagaagcctgatacaagagatggttcaaaagcctactcaactgattgggccccagacccataacag

SEQ ID NO: 282134 - DNA, 350 bp, Glycine max
cacttgtgctcaagaggagaagctcaacgtgtcagtggtgccatccaatgagaagagtgattggggagtgtttcccattcaaactatgtatggaagcaatggttgtgactcttatgcatgtgggttccgagcagattaccctcgagtggaaattgtgatccataaccctggcgtggatgaggatcctgcttgtggtcctcttattgattctgttgccttgaaactcttgcactcacccaaacgaactagagacaatttgttgaagaatggaaactttgaagagggtccatatgtgtttcccaaagaatcttggggggttctaattccacctcacatagaggatgcctaca

SEQ ID NO: 282135 - DNA, 341 bp, Glycine max
  unsure (1)..(341): unsure at all n locations
gcaccccccacaaaaatgacaggagagacagtgaacccaaaagcttaccctttggccgatgcgcaactcgcaataacaatcctgggatcttgtggcaacaagctgccaactacaagcaactaaaaaagggtgctaatgangcgactaagacactgaacagaggcatttctgagttcgttgtgatggccgcagacactgagcctcttgagattcttctccatcttcctctccttgctgaggataagaatgttccctatgtattcgttccatcaaaacaagcacttgggcgagcagtggagtcacaggccagtgattgcngttctgtaacaataatgaaggaa

SEQ ID NO: 282136 - DNA, 338 bp, Glycine max
gaggaagctccggcaggtgattatgccatcacagatttcaatgcaggtgctattgctgctgatggccagtggctggtacaattgatccaatcatggagtgatgcagttccacaacctattccagcagcacctggtgtcaactggggggcacctgcagaagcacctgctgctgttgcagaaggagattggggtgaagctgttccaccaccacaacaaatccctgttcctccctctggaattgactctgtccaaccaactggctgggaataaactagtgttttttgatgctatgatttgccctgtccttcaatttagttgtcttcttagaagtaaaatat

SEQ ID NO: 282137 - DNA, 340 bp, Glycine max
aaaagacttcgtcatccaaacattattctctttatgggggctgtgacttcacctcaacatctatgcattgtaacagagtttctcccacgagaaacacatccaaaattgattggagacggcgagttcatatggccttagatgttgcacgaggtgtaaattatcttcatcattgcaacccacctatcatccatcgagatttgaagtcttcaaatattctagttgataagaattggactgtgaaggtcggtgattttggtcttcacgtcttaaacatgaaacatatctcatactaagacaggaaaggggacgcctcaatggaggcacagaagttctcgtaatg

SEQ ID NO: 282138 - DNA, 345 bp, Glycine max
agataaagcagtttctaatcttaccaagggtattgaaggtctattcaagaaaaacaaggtaaactatgtcaaaggttatggccaattagtttcaccatctgaggtctctgtggacaccactgaaggtggaaatactgttgtgaaaggcaagcatattataattgccactggctcggatgtgaaatctctgcctgggatcactattgatgaaaagaaagttgtttcatcaacgggagctcttgctttgactgaaatccccaagagactcatagtcattggggcaggctacattgggctggaaatgggctcagtatggggccgacttggctccgagataacagttgt

SEQ ID NO: 282139 - DNA, 344 bp, Glycine max
gcaccccccacaaaaatgacaggagagacagtgaacccaaaagcttaccctttggccgatgcgcaactcgcaataacaatcttggatcttgtgcaacaagctgccaactacaagcaactaaaaaagggtgctaatgaagcgactaagacactgaacagaggcatttctgagttcgttgtgatggccgcagacactgagcctcttgagattctctccatctcctctccttgctgaggataagaatgttccctatgtattcgttccatcaaaacaagcacttgggcgagcatgtgggagtcacaggccagtgattgcatgttctgtaacaactaatgaaggaagtc

SEQ ID NO: 282140 - DNA, 340 bp, Glycine max
gccggtgacactgctcagaaaaccaaggactatgccggtgacactgcacagacatcaaaggactatgccggtgatgctggctcagaaatcaaagggctatgtcggtgatgctgcacaaaagaccaaagaatatgttggtgatgctgctcagaagaccatggattatgccactgatgcagcacagaagaccaaagattatgctactcagaagactaaggactatgcaagtgatgcaactgatgctgcaaaaaagactaaagattatgctgctcagaagaccaaggattatgcaagtgatgcaactgatgctgcaaaaaagctaaggattatgctgcgcaga

SEQ ID NO: 282141 - DNA, 344 bp, Glycine max
  unsure (1)..(344): unsure at all n locations
ggcaaaggcacaaggcaaaatttctgtggctattgattggcttaataaatatctggaaacattcatgggcagatcatgatgccatggagangaattggctgaaatatacatctccctgcaaatgtataaacaagcagcgttttgctacgaggagttgatattatctcagcctactgttccactctaccacttagcatatgctgatgtactttatacgcttggtggattagaaaacctccaaactgccaagaaatactactcatctactattgacttgaccggaggcaaaaataccagagcactctttggtatatgcttgtgcacctctgctgttacacagctta

SEQ ID NO: 282142 - DNA, 342 bp, Glycine max
ccaaattagaaagtgttccagcatcaaatatttatgcaccagagtctcttagggctggatatgcaatctttgcatcgggattaattgtggggcttcgcaaatcttgtttgtgggttgtgtgtcaggaataattggaagcagctgtgcattgtctgatgcccagaactcctctctctttgtgaaaattcttgtgatcgagatctttggtagtgcgctggggctatttggagttattgttggaataattatgtcagctcaagcaacatggccaacgaaagtttagtttcccttgtatcagaatgtggtgttggaatgcaattatggtatagcgcaatatatctt

SEQ ID NO: 282143 - DNA, 347 bp, Glycine max
  unsure (1)..(347): unsure at all n locations
ctaaagccgagcagcgagagagagaaaccctagcaaaaatgccggctggtcacggtttgagatcccgcaccagagattccttctcttcgtncccttcaggaagaagggtaccatcgccctcaccacatacctcagaacctaccacgtcggcgattatgtcgacgtcaaggttaacggcgccgtccacaagggaatgcctcacaagttctaccatggccgcaccggtcgcgtctggaatgtcaccaaacgtgctgttggggtcgaagtcaacaagcaggtcggcaacagaatcataaggaagaggattcacgtgcgtgtggagcatgttatgccatcaaggtgcatga

SEQ ID NO: 282144 - DNA, 339 bp, Glycine max
  unsure (1)..(339): unsure at all n locations
caacggtgctaganaccgcgtcactagtaataactattggattgagacatgcacttaacagtaaggctcccaactaatnatatacanccagtnatngggtgtgttactcatcagcnactacaacgtgaganacatggcttccttaagctccttagtgctgctccttgcagctctaattctatcccctcaagttcttgcaaactatgagnatcccccagtgtacaagcctnccactgagaaaccaccagtttataagccnccagttgagaagcctcctgtttacaancctccagttgataannctccagtttataagcctncagtagagaagccaccatg

SEQ ID NO: 282145 - DNA, 339 bp, Glycine max
  unsure (1)..(339): unsure at all n locations
agaggcatgatgacaaagccaaaaagcggaaggaccanacatgatgctaatttagctggaatgggcctgaatccagcntatgctggtggcttatggtgcagcacctgctatagcttatccaggcggtgcaaaatctatggtacctgaggctcctgcaccaccgaataatattctctttattcagaatcttcccaatgactcaactcccatgatgctgcaaatgctctttcttcaatatcctggatttaaggaagttagaatggttgaaacaaagccagggattgcctttgtggaatatggagatgaaatgcaatccacagtggctatgcagacgctgca

SEQ ID NO: 282146 - DNA, 336 bp, Glycine max
gtctagtagctggttccctccgaagtttccctcaggatagctggagcccgcgggcgagttctatcgggtaaagccaatgattagaggcatcgggggcgcaacgccctcgacctattctcaaactttaaataggtaggacggtgcggctgctctgttgagccgcgccatggaatcgagagctccaagtgggccatttttggtaagcagaactggcgatgcgggatgaaccggaagctgggttacggtgcccaactgcgcgctaacctagaccccacaaagggtgttggtcgattaagacagcaggacggtggtcatggaagtcgaaatccgctaaga

SEQ ID NO: 282147 - DNA, 337 bp, Glycine max
  unsure (1)..(337): unsure at all n locations
cacaatgccgaggtaatatatggagacacagattcagtcatggtacaatttggtgtttctgctgtagaagaagctatggaacttggggagagnagctgctgaatatattagtggaactttcacaaaacccatcaaactagaatttgagaaggtttactatccatatctcttgattagcaagaagagatatgctggattgttttggacaaaaccagacaactttgacaaaatggacactaaaggtattgaaacagttcgaagagacaattgtttattggtaaaaaaccggtgaacgattgccttcacaaaatattgattgacagggacattccggggc

SEQ ID NO: 282148 - DNA, 340 bp, Glycine max
caaaaccatcgcaaaacatttctcattcctttgaagcatgccggggttaacgtgcaacgcttgtaacaccgaattcaaagatgacacagagcaaaagctccattacaaatccgagtggcatcgatacaatctcaagcgcaaggtggctggggttcctggggtgactgaagctctatttctggctagacaatctgtgcttgctcaagagaaaaataaactgggtgaaatcccatgctctactgctgtggtctttgtggaaaggatataaaagttccaaggctcatgctgagcaccttaaatcacgtggtcatatgatgcgggcctctgaaggaatagtcaa

SEQ ID NO: 282149 - DNA, 334 bp, Glycine max
gctagtactttgatgggtcttggtgcttatcccattgctgatgagaattctcttcagatgcttgggatgcacgggactgtttatgctaattatgctgtggacaaggctgatattttgcttgcgtttggggtgaggtttgatgaccgtgtcacggggaagctcgaggcttttgcgagccgggctaagatagttcacattgatattgattcggcagagattggaaagaacaagcagccgcatgtttcggtttgcgctgatttgaagctggcgttgaagggataatcacatgttggagagcagagggttggggggaacttgatttagaggtggagga

SEQ ID NO: 282150 - DNA, 339 bp, Glycine max
catttaccaaactcactcatcaattctcatctttcttctcactaactattaattcatcatgtcgagcacagctggccaagtcatcaaatggcaaagctgcggtttcatgggaggcagggaagccacttgtgattgaagaagtagaggttgcgccaccacaagctggtgaagtgcgtttgaagatcctctacacctctctttgccacactgatgtttacttctgggaagctaagggccaaactccatgtttcctcgtatattggtcatgaagctggagggatgtggagagcgtagtgagggtgtgactcatctgaaaccagggaccagccctcccgtgtt

SEQ ID NO: 282151 - DNA, 344 bp, Glycine max
cttttgctgaagagttatttagttctgagctgttagacaagttgtctttgcatcctctcagccaagatatgacaacactgaagacacctactggttactgtggataactcactgagcccagttcataccctgcttcagatacaatgcgttgatcagaagggcttgtgttatgacattatgaggatttctaaagactctgatattaaggttgcttttggtcgattttcttcaagtgtgaaaggctttcggaatatagacttgtttgtccagcacaacgatgggaaaaagatcatagatcctgaaagccagaaaacctgtgttcagcttaaaagaagagatgctca

SEQ ID NO: 282152 - DNA, 339 bp, Glycine max
  unsure (1)..(339): unsure at all n locations
gatttatagctcaagacatatggtttcaaaacacagcaggcccacagaagcaccaagcagtggctcttcgtgtaggcgctgaccaatccgtcataaaccgctgtcgcattgatgccttccaagacactctctacgctcactccaacaggcagttctaccgagactcttttattactggcactgttgactttatatttggaaatgcagctgttgttttccaaaagtgcgacttggtggcccgaaagcccaggataaacagaacaacatggtcatgcccaaggacgagaanntccacaccagcacacgggctntcaattcaacaatgtaactaacaccaag

SEQ ID NO: 282153 - DNA, 338 bp, Glycine max
gggagtgtgcttcaaagggttctagtgctccacatgtggaaactgaagcagcccctcctgccaaggctaagatagtggggtgggcaaccaatcagatcctacagaaagaacagccttcaggagaatgatggtgctgggatttatgtgaaagtgagcatggatggagctccttacctcagaaagatagacttgaaggtctatggaggctacacacaactcctcaaagctctagaaaacatgttcaagttgaccataggtgagtattctgaaaaagaaggttataagggatctgactatgcacctacatatgaagacaaagatggtgactggatgttagt

SEQ ID NO: 282154 - DNA, 339 bp, Glycine max
  unsure (1)..(339): unsure at all n locations
gaagttaganattggtgtnttcaagttttccaaggccttgcttacatgcaccagcgtggatacttccatcgcgacctgaagcctggaaaacttgctggttaccaaggattttatcaaaatcgctgattttggcctagcccgagagatcagttcacaaccaccctacactgagtatgtctccacacgatggtatcgtgctcctgaggtgctgcttcagtcttatctgtatacctctaaagttgacatgtgggcaatgggtgctataatggctgagcttttctctcttcgtcctcttttcccaggtgccagtgaagcggatgagatttacaaaatatgtgg

SEQ ID NO: 282155 - DNA, 341 bp, Glycine max
  unsure (1)..(341): unsure at all n locations
ctggcttccaatccaagaaagagtacttatttggaaggatcgatatgcagctcaagctcgttgctggcaactctgccgggcactgtcatggcttactacttgtcgtctcaagggccaactcatgacgagattgattttgaattcttgggaaacgtgagcggtgacccttacattctccacacaaacgtgtttanccaaggccaagggaacagagagcaacaattctacctctggttcgaccccaccagaaacttccacacttactccatcatctggaagccccaacacatcatattcttggtggataacattcccataagggtgttcaagaatggtgagac

SEQ ID NO: 282156 - DNA, 346 bp, Glycine max
  unsure (1)..(346): unsure at all n locations
ggccatcatcccttccaagaggctgcggaacaagatcgcgggtttctccacgcatctcatgaagcgcatccagaagggtcccggttcgcggcatctccttcaagctccaggaggaggagcgcgagcgccgcatggacttcgtccccgacgtctccgccatcaacaccgaccacatcgaagtcganaaagaaacccttgacatgcttcattccctcggaatcaacgacatccccggcatcacacaggttgaccctgttcctgttcaacaggccttccccttcaccaggaggtactgatgttgatgttgttcatggagactcttttggcttcagatgtaagactttgt

SEQ ID NO: 282157 - DNA, 332 bp, Glycine max
  unsure (1)..(332): unsure at all n locations
gaggaaggtagatctaagaaattatacaatgtaccaggaactgtcttctgcccttgagaaaatgttcagctgtttcactctagggtcatgtggttcccatggagctccaggaagagaaatgttgagtgagagcaagctgaaggacctcctgcangntcagaatatgtactcacttatgaagataaagatggtgactggatgcttgtcggagatgtaccatgggatatgttcattgacacatgcaaaagactgaaaatcatgaagggttctgatgccatggcttagctcccagggccatggaaaaatccaggagcaggtgctagttggtattg

SEQ ID NO: 282158 - DNA, 333 bp, Glycine max
  unsure (1)..(333): unsure at all n locations
cttgagagttgccttcgccacaagtcagacantcgtgatttttgaagctgccaggggcaataacaganctcaatgggcgtaacaagccgagaaattaactccagcaatactgttctcagcttttcttaagttcgactaagccagtcttgagatttgctgctgtccgcaccttgaacaaggtggcaatgacgcatccaatggcagtcaccaactgcaacattgatatggaaagtttaatctctgaccagaacagaagcatgctacccttgctattactacacttttgaaaacaggaaatgaatctagtgtggatcgtcttatgaagcagatcac

SEQ ID NO: 282159 - DNA, 334 bp, Glycine max
ggtttatcactcttacggtgggttctgccgctgactctgttgctcacctgcgccctaggtttccaatcggacgagcttctcctcgacgacgaagagttcggcatcgaaggaggacgaacctcctttgattccgattcgcatccaccttccaccgcctccacctcgaggaagaggctttccgactcctcctccgattccaagatccagttccctctccaacacgctttcggcgactccgatttctccgacgccggcaacttctccgctcgcctcaagacttggagccacggcgcccagacgctgacgaagctgcggtttaagcgtgatcttttga

SEQ ID NO: 282160 - DNA, 338 bp, Glycine max
  unsure (1)..(338): unsure at all n locations
acggtagaggagcaagtgtgcacattgctggtggaccttgcatcactatacagtatgtgaccaacattatcattcatgggnttaaccatccatgactggcaagcaaggagggaatgcctatgtgagggattcccctacacattatgggtggaggacactctcggatggtgatggagtgtcaatctttggtgggantcatgtttgggtggaccactgctctctctccaattgccgcgatgggttaattgatgccatccatggatccacaggcatcaccatatccaacaattacttgacccaccataacaaggtcatgcttttgggccacagtgacactt

SEQ ID NO: 282161 - DNA, 340 bp, Glycine max
cgagagaacaagaacataagggaaccacagcggcggtaacagaagaacaagcagagaatgggtcgagtgagaacgaagacggtgaagaaatcctctcggcaggtgatagagcgtcactactcgcgcatgaccctggacttccacacgaacaagaagcgcctggaggaagtggcgataatcccgtcgaagaggctaaggaacaagatcgcggggttctcgacgcacctgatgaagcgcatccagaagggccctgtgcgcggcatctccctcaagctccaggaggaggagcgcgagcgccgcatggacttcgtccccgacgtctccgccatcaacaccgacc

SEQ ID NO: 282162 - DNA, 342 bp, Glycine max
  unsure (1)..(342): unsure at all n locations
gggcacggttcttcgtttggccaaggatttggctgagaacaacaagggtgcacgtgtgcttgttgtctgctctgagatcactgcagtcacattccgtgggccaagtgacattcaccttgatagtcttgtgggccaagcattgtttggagatggagctgctgcagtcattgttggttctgaccccattccacaaagttgagaagctttgtatgagcttgtttgggactgcacaaacaaattgcttccagaacagtgaaaggtgctattgattggacacttcgtnnaagtngactcanattcacctnctcnagggtggtnccgggantgtctcnaagaacatga

SEQ ID NO: 282163 - DNA, 338 bp, Glycine max
ctcgagcgctgatacgaaagggtatcacaacttacgagtatgttgtggccatgcgaactctaagtgaaccacctggggcttcagttgttgggggtgaacagcagagtctaccatcgtctcctactagttcagctatcactgcaataagtggaagaagctctgttggaatgagtatacagtacaaaggtgcctggtgtacaccgccaaggatctttatggaccacccggatgaaattataccacatttggagccaggacgcctaccatccactgttgatccagatgcagtacaatcacctgacaaaggagaaaatgaaccagcgccctgtgcgaataag

SEQ ID NO: 282164 - DNA, 337 bp, Glycine max
  unsure (1)..(337): unsure at all n locations
gtcagttgcaggaaaaatggtttcgctgaaactgcagaagcggctcgccgcgagcgtgctcaagtgtggcagaggaaaggtttggcttgaccccaatgaagtcaacgaaatctccatggccaattctcgccaaaacataaggaagctggttaaggatgggtttatcatcaggaagcccaccaagattcactctcgctcacgtgctcgtcgaatgaaggaagccaagaggaaaggacgtcactctggatacggtaagcgtaagggtacaagggaggcaggcttcccataaattctatggatgaggagatgcgtgtgctcagagcttgttcgcaatana

SEQ ID NO: 282165 - DNA, 338 bp, Glycine max
  unsure (1)..(338): unsure at all n locations
gtcagttgcaggaaaaatggtttcgctgaaactgcagaagcggctcgccgcgagcgtgctcaagtgtggcagaggaaaggtttggcttgaccccaatgaagtcaacgaaatctccatggccaattctcgccaaaacataaggaagctggttaaggatgggtttatcatcaggaagcccaccaagattcactctcgctcacgtgctcgtcgaatgaaggaagccaagaggaaaggacgtcactctggatacggtaagcgtaagggtacaagggaggcaagcttcccataaaattctatggatgagagatcgtgtgtcagngctgttcgcaattacagga

SEQ ID NO: 282166 - DNA, 341 bp, Glycine max
  unsure (1)..(341): unsure at all n locations
cgagctagctagctagcaancaagcacagagatggaggcaaagcgaggccatgccctcatgtgcttggcacgtgtttcactcttcctctgcgctctaaccctatccgctgctcacggaagcaccacggttcaagacatcgcgagaaagttgaaactcggggacaacgagcttctgcgcacggagaagaagttcaaggttttcatggagaattacgggaggagctactccacagaggaggagtatttncnccgtttggggttttcgcccagaacatggtcagagcggcggacatcaggcgctggacccacgcgtccagggtcngcattctcgatctcacgag

SEQ ID NO: 282167 - DNA, 327 bp, Glycine max
  unsure (1)..(327): unsure at all n locations
acttttgatgtctcccttctcaccattgaggagggtattttcgaagtgaaagccactgctggtgatactcacttgggaggtgaagattttgataacagaatggtgaaccattttgttcaggaattcaagaggaagaacaagaaggatattagtggaaatgccagagcattgaggaggttgagaacagcatgtgagagggccaagaggactctctctccactgctcaaaccaccattgagntgattcctgtatgaggtatgactctacacaaccatcacggcagncgttcgaagagctaacaggactatcagaatgcaggagccggga

SEQ ID NO: 282168 - DNA, 332 bp, Glycine max
gttccacgaggttgctgcttctggatgaacgctacgccgatcgcggtttcgaggagttgcctgaggcaactaaggctgttttgaaggagtatgcagaaaagagtacaaatttgatgcttgagctagttagatgcaagttgacactattctatgattactggcagatgaatgaggtcttggagaccttgctgcctgagggtatgattattccttccgcttttgagactgttggtcatatagcacacctgaattgagagacgaacattaccatacaagtggctaatagctaaggtgtgctggatagataagccaaggatacaacggtgtgaaca

SEQ ID NO: 282169 - DNA, 336 bp, Glycine max
  unsure (1)..(336): unsure at all n locations
ctcgatttgagttcaaatcagctttcagcgcttcctgactctatagggtcgcttgttagactaaaaatattgaatgtgganacaaatgatatagaggaacttccacattctgttggtagttgttcttcccttagggagcttcgcgttgactataaccggcttaaggccctgcctgaagccgttggaaagattcagagcctggagattttgtctgtgcggtacaataacatcaaacaactacctacaacaatgtcatctctaacaaacctcaagganttatgtgagtttcatgagctcgagtcggtgccagagagcttgtgtttgccacctctctgt

SEQ ID NO: 282170 - DNA, 337 bp, Glycine max
aatcaaagaaaggggtggtggctgcttcgaaagcttaataatttgtttatttccagaacatcatagttttcgcagcagcaaactaacaaattactcatatcatataataagatggcccgttctctctcgcaagccaaacgtattggtgtccttgttgctcaatctatctccctaattcccgttcatcggcgaggttacgcagtggcatccgatgtatcggtaagagttggattgggtaatattgggcgaaggaatggaatcgtgggaggtgtagaagagaagcctgatacaagagatggttcaaagcctatcactgatgggcccagaccataacagt

SEQ ID NO: 282171 - DNA, 333 bp, Glycine max
gcgcgggtgaggtagaacccttccacggtggtgactgcgcgatgggtgcctacaagtatgtttcagagctatggcgcaagaagcagtctgatgtcatgcgcttcttgcagcgggtgaggtgctgggagtataggcagcaaccttccattgttcgcttgacaaggtcgacccgccctgacaaggctcgtcgcttgggcttcaaggctaagcagggctatgtgatataccgtgttcgtgttaggaggggtggccgaaagaggccattcccaaggtatgtttatgggagcccacaaaccaggtgttaccactgaatttcacgtacaagaggtcatt

SEQ ID NO: 282172 - DNA, 336 bp, Glycine max
  unsure (1)..(336): unsure at all n locations
ggaagagataatattattaatgatgatgataataataacaagtctgaggcgcatttgacttctgccgctgcttttgtggagggtggaattcaggacgcttgtgatgatgcttgcagtatatgccttgaagctttctgtgatagtgatccttccacggtgacgagctgcnagcatgagtttcatcttcagtgcattnnnnnatggtgtcaaagaagctcccagtgccccatgtgttggcagcctatcagtctcaaagatccaacaagcaagaatactgaggcagggaagangacggaanttaggtcanncactagnatgcncatattcatcatccac

SEQ ID NO: 282173 - DNA, 325 bp, Glycine max
  unsure (1)..(325): unsure at all n locations
ggtgtgtgtgacaggtgctggatgattcgtagcgtcntggcttgttaagcttcttctttccaaaggctacattgtccatggaactgtganagacctgaacctgctactcagaaatatgaacacttgctcaaactccacggagcttctgaaaacctcactcncttcaaggcagatctcttggactacgaatctcttcgctcagcaatttctggatgcactgcagtntccatcttgcttgcctgtacctcatcagtgttccaacctcagntgaatgatgagctgtgtgaagggacactatgtnttgagtaggcttgagtaagtgcac

SEQ ID NO: 282174 - DNA, 331 bp, Glycine max
  unsure (1)..(331): unsure at all n locations
aagtccttgttgacatatcaaaagttcaagatgatgaagttggggatggaactacctcagttgttgtgttggctggtgaacttttaagggaggcagaaaagctggttgcaaccaagattcatccgatgacaataatatcaggttttcgaatggcagcagagtgtgctcgtaatgctttgttggagaaggttgtggacaataaagcagattctgagaaattcaggtcagacttattgaacntgcatgactacttgagctccaagatctctcacaggacaggagcatttgcaaattagctgtggngctgtatgagctaaggggagcaccattt

SEQ ID NO: 282175 - DNA, 329 bp, Glycine max
  unsure (1)..(329): unsure at all n locations
gtttccttgtgttgcttcttttctccctcttaggtctctcttctagttccagcatatcaactcatcgttccatattggaccttgacctaaccaagtttaccacacagaaacaggtgtcttcactgttccaactatggaagagtgagcatggacgtgtctaccataaccacgaagaagaggcaaagagacttgagattttcaagaataacttgaactatatcagggacatgaatgcaaacagaaaatcaccccattctcatcgttcgatgggtttagaacatggtgggntgccatgatgatgatatcctacagactaagaggtagtgcaa

SEQ ID NO: 282176 - DNA, 336 bp, Glycine max
  unsure (1)..(336): unsure at all n locations
caaanaatggcatcggataaggtggtggaaacggtcatagcagggaactacgtggaaatggaaactgaagggaagcccaaggacgtaaaaaccaagctatcaagcttgttgtggcatggaggttctgtttatgatgcttggtttagctgtgnttctaaccaggtggcccaagtgctgcttacgttgccatactcattctcccaactgggaatgctttctggcatacttttccaaatcttctatggtttactcggaagttggacagcttacctcatagcatctctacgtgaatanagaacaagaaagagagagaaaagttaacttcagaaacagtca

SEQ ID NO: 282177 - DNA, 328 bp, Glycine max
  unsure (1)..(328): unsure at all n locations
aacatttctaatctcattctccttctgttcaaacactctctctcatggcatcagataagaagattaggatcggcatcaacgggtttggaaggattggccgtttggtggccagggttgcccttcaaaggaatgatgttgaacttgttgctgtcaacgatcctttcatcaccactgattacatgacatacatgttcaagtacgacaccgttcatggccagtggaagcattttgatgtgaaggtgaaggactctaagaccttctcttggtgagaagcccgtcacgttttggaatcaggaacctgaggaaatccnggggtgagttgtgngtt

SEQ ID NO: 282178 - DNA, 332 bp, Glycine max
  unsure (1)..(332): unsure at all n locations
gattatcctaagtctttgggaatagtgctgcaatggcttcaagtcaggaggaggtgacnctnntgggagtactggaaggccatttgtgtncanggttcatatggccctcaagtngaagggagttcaatacaaatatgtcgaagaaaatttgaggancaagagtgaactgcttctcaaatccaacccagttcanaagaanggtccagtgtntattcacaatgagaagnccatagcagagtcnctgtgattgttgcatacatgatgagactggagtncnanccatcttgcttctganccttacaaagagctttgccgnttctggtccaatcatg

SEQ ID NO: 282179 - DNA, 334 bp, Glycine max
  unsure (1)..(334): unsure at all n locations
atgggaacgtggtggacttgcagagaaggtggtcagagacaaagttttggtatttcgttttactgatgttgggaaacttccccctccagttctccagtttgttgaggtgtcatttggttatactcctgataatctcatctacaagaacattgactttggggttgatttagattctcgggttgcgctggttgggcccaatggtgctgggaagagtacactactgaagctaatgacaggtgactgatgcctagtgatggcaggtccgacgtcataatcacttcgantgcacaatatcaccagcattggccgaaagctagacatggaatgctgtctc

SEQ ID NO: 282180 - DNA, 329 bp, Glycine max
  unsure (1)..(329): unsure at all n locations
gatgggaagacccaagtgaccgttgagtattacaatgacaatggtgccagggttcctattcgtgtacacaccgtgctaatctccacccaacacgacgaggctgtcaccaatgacgaaattgctgctgacctcaaagagcatgtgatcaagcctgtgatcccagagaagtaccttgatgagaagaccattttccacttgaacccttcaggccgttttgtcatggtggccctcatggcgatgctggtctcaccggccgcaagatcatatcgatatttggagnggggtgctcnggtggtggtgtttctcgggaaggacctacaaggtgatta

SEQ ID NO: 282181 - DNA, 329 bp, Glycine max
  unsure (1)..(329): unsure at all n locations
ggcgggtagggtttcgacgtgcttcttcttcgtgtttgctctttctctccttcttccttttcagatctccgctgaggaatcatcggagaaagagttcgtactcacattggatcactctaactttcacgacactgtcagcaagcacgatttcatcgtcgtcgagttctacgctccatggtgtggccactgtaagaagctgctcccgagtatgagaaagctgcttctatcttgagtagtcagatcctccggttgttttggctaaaatgatgccaatgaggagagaacaaagacttgcatctcaattatgngttagggataccaacaataga

SEQ ID NO: 282182 - DNA, 326 bp, Glycine max
  unsure (1)..(326): unsure at all n locations
aatctgcgtgtgtttgtgaattgttgttgagatctgaatcaaaatcagaaacgataatggctacaccggaccacctcttcaacctcngcaacaacttctacctcggcgcttaccaagccgccatcaacagcagcgacgttgccaacctctcccaagaagataccctcgagcgcgacaccctcgtccaccgctgctacatcgccctcggccagctccagttcgtcatctccgagatccacgacgatgctcccacaccactccaagccgtcaaatctcgcctctattctctctccgncacaaggatcgccatgcgntctcaggntggt

SEQ ID NO: 282183 - DNA, 327 bp, Glycine max
  unsure (1)..(327): unsure at all n locations
gtgggcttgcttgggccaccgaccacgatgctctcgagaaagccttctctcaatttggcgaaatcgtcgaatcgaaggtcatcaacgatcgtgaaactggaagatccagagggtttggatttgtgaccttcgccacagagcaggcgatgagagacgcaattgaaggaatgaacggccagaacctcgacggtcgtaatataaccgtgaacgaggctcaatcccgtggaaaannnnnnnnnnnnnnnnnnnnnnnnnnnnnnnnnntggtngtggttacggtggcggcggagttacagccgcgtggagagatntgtggcgagagccgcc

SEQ ID NO: 282184 - DNA, 322 bp, Glycine max
  unsure (1)..(322): unsure at all n locations
ttgnatgtcangattcatacaagcatatgtctgtgatagtcgtattaaattctctggaaatgctggttgatcttatgcnatttccaggccaattgttaccnngatcaaccaagtcagtttttatgactcacatttctgcaggagagagtgattcagcagaaaatgattcttgtgattcaccattagaaccanacagccctnatttggggtttcagagagtgctgannaggaggaaaacctccaattccatagagattgaanctcttcgatgtattcaggccttcctgagaangtgngtacgntcantagcattagttgtcac

SEQ ID NO: 282185 - DNA, 329 bp, Glycine max
  unsure (1)..(329): unsure at all n locations
attcgtcgctcatggcactctcttctcgtctcttttccaaatccaaattgatctatggcagtcaaatacttctacaaaaggagcatgctattccagttcgtcactttgctaaagagtctgcccctcctgcccttaagggagacgagatgctgaagaacatttttgtggaggtgaagaacaaatttgagaccgccataggaatattaaagaaggagaaaatcaccattgacccagaagatccagctgctgtttctcatatgcaaggtcatgaaacattagagagaaggcagcttatgtcggaggcccaagcatatatccacntgnaatga

SEQ ID NO: 282186 - DNA, 331 bp, Glycine max
  unsure (1)..(331): unsure at all n locations
ccctaagtcatggcaggaattgcacccgagggatcacagtttgatgctcgtcaatatgataccaagatgaatgagctgcttacgtccgatggtcaggatttcttcacatcctacgatgaggtttatgacagttttgatgctatgggcttgcaagagaatctcctgagaggcatttatgcatatggttttgagaagccatcagctattcagcaaaggggaatagttccattctgcaagggattgacgttatacaacaggcccatctggantgggaaacagcaatttctgctctggaatctgcagcaattgctatntgtgctgaagccagcct

SEQ ID NO: 282187 - DNA, 323 bp, Glycine max
  unsure (1)..(323): unsure at all n locations
cgcataataaccgtcctaagtttattgagagaattttgcaagtgtgagaaacatggcatctcgtcaaaacaacaagcaagagcttgatgaaagagcaaggcaaggagagactgttgtcccgggtggaactggtggcaagagcctggaggctcagcaacaccttgctgaaggaaggagcaagggagggcaaacaaggaaggaacagctgggtacagaagggtaccaggaaatgggacgcaaaggagggttgagcatgtggacaaatcaggagaagacgtgctcagaggaagcntggcatcgngatccagttcagatgtatacag

SEQ ID NO: 282188 - DNA, 325 bp, Glycine max
  unsure (1)..(325): unsure at all n locations
actgcttgtgagagggccaagagaacattgtcatccactgcccagaccaccattgaaattgattctctctatgagggaattgattctactccactgttactcgtgccagattcgaggaactgaacatggatctctttaggaagtgtatggagccggtggagaaatgtttgagggatgctaaaatggacaaaagaagtgttgatgatgttgtcctgttggtggttctaccagaatcccaagttcaacaactgctgcaggactctttatggaaggagctgtgcaagagcatcancctgatgagctgttgcntnggtgcgctgttcag

SEQ ID NO: 282189 - DNA, 329 bp, Glycine max
  unsure (1)..(329): unsure at all n locations
gagctctgcgagatcttcattcgccgattttaaaagatgagtaagcttcagagtgatgctttgcgtgaagccatttcaggaatcatggccgattccaaggagaagaatcgcaaatttgtggagaccatcgaactccaaatcgggttgaaaaactacgatccacagaaggacaagcgtttcagtggctctgtcaagctgccccacatccctcgccccaagatgaaaatttgcatgcttggtgatgctcagcatgttgaagaggcggagaagtaggatggatggatggagtggaagcctgaagagctaaccaaaataganttggtgagaac

SEQ ID NO: 282190 - DNA, 334 bp, Glycine max
  unsure (1)..(334): unsure at all n locations
gttctctcacacactcattcggtgctccgaatctcagattctagggttagggttcccaatttctccaccgatcagaaaatgagttcaactggtggttctaccaagggcggaaggggcaagcccaaagcctccaaatccgtttcaagatcgcagaaagctggtctccaattccccgttggaagaatcgctcgattccttaaggctgggaaatacgccgagcgtgttggtgctggtgctcctgtgtactctctgcagtgctcgaatatctcgctgctgagtttggaattgctggganctgctaggataacagagancgtatgtctagnacatcact

SEQ ID NO: 282191 - DNA, 350 bp, Glycine max
  unsure (1)..(350): unsure at all n locations
agcgtaanaagcggctaccctaacctcgtcttcctctctactaatttcagctatggccgacgaagctgtggttgttccagatcccacccagatcgatgtcaagctctttaaccgctggagcttcgaggatattgaggttactgacatttcactggctgattacattggagttgcggcatccaagcacgccacatatgttcctcacaccgccggaagtactccgtgaagcggttcaggaaggcgcagtgccccattgttgagaggtcaccaactctctcatgatgcaggtagaacatggcaagaantcttggctgttaggncatcaagcattgtatggagattatcattng

SEQ ID NO: 282192 - DNA, 342 bp, Glycine max
  unsure (1)..(342): unsure at all n locations
gctgcaaagagtgttgtggcaaatggccttgccagaaggtgcattgtccaagtttcctatgccattggtgtccctgagcccttgtcagtgtttgtggacacttatggaactgggaagattcctgacaaggagattcttcaaattgtgaaggagaatttcgacttcagacctggaatgatcaccattaacttggaccttaagaggggtggccataggttcctcaagacagctgcttatggacactttggaagggatgacctgacttcacctgggaagttgtgaagccatcaagtctgagaagccncaacttagatgtgtgagttaaccatcccttcatggngc

SEQ ID NO: 282193 - DNA, 339 bp, Glycine max
  unsure (1)..(339): unsure at all n locations
gggcaagaggtgttgttcatgagcttgcaaaaagtagactatctaactcattggttcaggccgtgtctctactaagacagagaaatcacaagggagtggtttcttcactcaatgacttgctggcatgtnccnaagcagtaccctcacagccagtttcatgggaagtgccagaggagcttgctgatctatacaccatatacttgaagagtgatccaactcctgagaatttgtctcgnttgcagtatctgttgggtataaatgattcaacagctgctgctcttagggagngggagatagatactcataccatgctgaggagagagttgtatctatgtgtga

SEQ ID NO: 282194 - DNA, 338 bp, Glycine max
  unsure (1)..(338): unsure at all n locations
gctgatatatgtgaaactctatacataccagatctttagggcgttatcttatattcatcgttgtattggagtctgccatcgggatatcaagcctcaaaatctattggtcaatccacacactcaccaggtnaaattatgtgactttggaagtgcaaaggttttggtaaaaggcgaaccaaatatatcatacatatgttctagatactatagagcacctgagctcatatttggcgcaactgaatatacttcagccattgacatctggtctgttggatgtgttttagctgagctgctgcttggacagcctctgttcctggtgagagtggagttgatcactt

SEQ ID NO: 282195 - DNA, 340 bp, Glycine max
  unsure (1)..(340): unsure at all n locations
ctcatgcaaaggtcttcttctacttcactngctgctgggaggttgttctccacaacaacagcaaccattattgattccccttcacttgctcagagaatcagagatttgcctaaggacctccctggaaccaacatcaagaaacatgtttctcagctcattgggaggactccacttgtttatcttaacaaagtcactgaaggatgtggagcttatgttgctgtcaagcaagagatgatgcaacctactgccagcatcaaagacagaccagcatatgcaatgatcacagatgctgaggaaaagaatctgataatcctggaaagacaatctgattgagcccngt

SEQ ID NO: 282196 - DNA, 328 bp, Glycine max
  unsure (1)..(328): unsure at all n locations
cgtctgaaggatttgataaagaagcattctgaattcattaggtatccaatttctctttggattgagaggaccactgaaaaggagatttctgatgatgaggacgaggaagagaagaaggatgaggagggtaaagttgaagatgtggatgaagataaggagaaggaggagaagaaaaagaagaccattaaggaggtatctcatgagtggtcttggtgaacaagcagaagcctatttggatgaggaaacctgaagagatcacaaagaagatatgctgcttctacagagtcttaccatgatggagacnttggctgtnagcntttctgtgagg

SEQ ID NO: 282197 - DNA, 345 bp, Glycine max
  unsure (1)..(345): unsure at all n locations
attcattanactatccaatttctctttgggattgaggagaccactgaaaaggagatttctgatgatgaggacgnggaagagaagaaggatgaggagggtaaagttnaagatgtggatgaagataaggagaaggaggagaagaaaaagaagaccattaaggaggtatctcatgagtggtcattggtgaacaagcagaagcctatttggatgaggaaacctgaagagatcacaaaagaagaatatgctgctttctacaagagtctaccaatgattgggaagagctttggctgttaacactttctgttgagggtcactggatttaaggctgtcctcttatcccaagag

SEQ ID NO: 282198 - DNA, 335 bp, Glycine max
aacaaaccgcattcgcactgtgcatccctttcttccttcctcgtcttattctccaaccctctccaaaacctccttctcactcttcttctttctgctactctccctctaaacaacgtcgtttctcgtcgtacagccatgtcatacgactacctcttcaagtacatcatcatcggcgacacaggtgtagggaaatcgtgcctgctcctgcaattcaccgataagaggttccaaccggttcatgatctcaccattggtgtcgagttcggcgctcgcatggtctccatcgattctcgacccataagcttcagatagggatacgctgggcaagagtcttt

SEQ ID NO: 282199 - DNA, 334 bp, Glycine max
  unsure (1)..(334): unsure at all n locations
caggttggagtgttctctgcnacaatgccaccagaagcccttgagattacaagaaagttcatgaataagccagtgagaatcctggtaaagcgtgatgaactgaccctggagggtatcaagcagttttatgtcaatgttgacaaggaagagtggaagctggagacattatgcgacctttatgagactctggctancacccagagtgtcatttttgtgaataccaggcgcaaggtggactggctcatgacaagatgcgaanaatgancacacagtctctgccacccacggtgacatggaccaaaataccgtgtatctcatcgtgattccggtcccg

SEQ ID NO: 282200 - DNA, 333 bp, Glycine max
  unsure (1)..(333): unsure at all n locations
gcagaacagagagagcaaaaccctagagcatccatcacaagcagaggaagaagatggtgaagttcctgaagcctaacaaggcagtgatcgtcctgcagggccgctacgccgggcgcaaggcggtgatcgtgaggnccttcgacgagggaaccagggagcgcccctacggccactgcctcgtcgccggaataaagaagtacccaagcaaggtcatcaagaaggatccgcgaagaagaccgcgaagaaattagggttaaggccttcgtgaactcgtgaattaccagcactcatgcccagcgctacngctcgagtggtctaaagagtgttaccccg

SEQ ID NO: 282201 - DNA, 340 bp, Glycine max
cgttctcgttctggtttatagatctttgcgaaggaggtttacagcgctcaaccaaagatgcagaacgaggaaggacagatcactgagctttacattcctaggaagtgctccgccacaaacagattgattaccgctaaggaccatgcttcggttcagatcaacattgggcatgtggatgagaatggcgtctacaatggccatttctccacttttgccctctgcggattcatccgtgctcagggtgatgctgacagtgctctagaccgcttgtggcagaagaagaaagttgaagttaagcaacagtagacaccattgatagtttgttattcgttatgtataa

SEQ ID NO: 282202 - DNA, 334 bp, Glycine max
  unsure (1)..(334): unsure at all n locations
aaaganaggaaataattgatctttganaatgcagggaggaaagaaagctggagagtccatcaaggaaacagctgcaaacattggtgcttctgccaaggctggcatggagaaaaccaaggccactgtccaggagaaggcagaaagaatgacggcacgtgatccgatgcaaaaggagttggcaacccagaagaaagaggcaaagatgagccaggcagagtggacaagcaggcggcgcgtcacataacacggcggcgaacangctgccacggcaggcactgggacaacccttggggaccatcagagtcactatgccggtcntggacggacanccccg

SEQ ID NO: 282203 - DNA, 334 bp, Glycine max
  unsure (1)..(334): unsure at all n locations
aaaaaaggatgctgatgaagnatcaatggcattaacaagtagtatagcttccgaagcactgcatggtgatatatctcagcatcagagagagagaacattgaatggttttcggcaagggaaattcacagtgcttgttgccactgatgttgcagctcgtggacttgatattcccaatgttgatttggttanncattatgaacttcccaatgatgctgagactttgtacatcgttctggtcgtactgggcgtgcaggaaaagagggtatgccatctgatgtacaccagtagccagaggagaacagttagatccttgagcgtgagtaggctgcaaatt

SEQ ID NO: 282204 - DNA, 330 bp, Glycine max
  unsure (1)..(330): unsure at all n locations
cnangctgcttccttggaggnatgtctagaccaatttactgccaaggagtggcttcatggggataatatgtataaatgtgatgggtgcaagggttatgtcaaggcatggnaacgtctcacagtgaaacaagctccaaatattctcacaattgccttgaaaagatttcagagtgggaggtttggaaagcttaacaagagagtaactttccctgagactttagatcttagtccttacatgagtgagttggagatggatctgatatttataagctatatgctgtcgtagtacatatgatngctgatgcttcattttggtcntaccnctgctac

SEQ ID NO: 282205 - DNA, 327 bp, Glycine max
  unsure (1)..(327): unsure at all n locations
aganaggnaataattgatctttgaaaatgcagggaggaaaganagctggagagtccatcaaggaaacagctgcaaacattggtgcttctgccaaggctggcatggagaaaaccaaggccactgtccaggagaaggcagaaagaatgacggcacgtgatccgatgcaaaaggagttggcaacccagaagaaagaggcaaagatgagccaggcagagctggacaagcaggcggcgcgtcanataacacggcggcgaanaggctgccacggcaggcactgggacaaccatggggaccatcagngtcactatgccggtcntgaacggacac

SEQ ID NO: 282206 - DNA, 330 bp, Glycine max
  unsure (1)..(330): unsure at all n locations
cnacaagcagatccattagccatagatttgttgcaaaanatgcttgtgttcgatccaaccaagagaattactgtcttggaagctctccaacacccgtatatggctagccnatangatccaaggtgcgaccctcctgctcaggttcccatcagtctcgacatagatgaacattggggagaaccgatgattagggaaatgttttggaatgagatgctacattatcatcctgaagctgcttccgccaatgcataaatgattaattcttccaaggcttcagtcttgttgcttgctctaggatagtctgtttttctagacaantgtaatctaaag

SEQ ID NO: 282207 - DNA, 333 bp, Glycine max
  unsure (1)..(333): unsure at all n locations
gnagctttgaacgacgcagaaggttcatccaatctccgaatcctttaatcgcattgcaaccatgtcgaggagaaaggtcagagagccaaaggaggaaaacgtgactcttggcccagctgttagagatggcgaacatgtctttggcgtcgctcgcatatttgcctcctttaatgataccttcattcatgtcactgatctgtctgggagggaaacgcttgtccgcatcactggtggaatgaaggttaaggctgacagagatgaatcatctccttatgctgctatgcttgcagctcaggatgttgctgccagatgcaaggaattggcatatgctct

SEQ ID NO: 282208 - DNA, 325 bp, Glycine max
  unsure (1)..(325): unsure at all n locations
tcggcgatggcaacgacgtcggtggtgccggcgaaccggcgtcgcgcggcgaaccccgcggaggagatggacttcgagacgacggagggcgtgaaggccatcgcaagcntcgagganntggggatcaaggacgatctgctccgcggaatctaccagtacggcttcgagaagccctccgccattcagcagcgggccgtcacgcccatcattcagggccgtgacgtcatcgtcaggcccaatccggaacgggaaaccgtccatgattgnctcaccgtttgccagtctcgatactcctcagggagttaggcattgatntgtcacanga

SEQ ID NO: 282209 - DNA, 331 bp, Glycine max
  unsure (1)..(331): unsure at all n locations
anacaatgctttaccaaacaatgcaggagggtggtgcaaccctccaatgcaccattttgacctctctcaacctgttttccttcgcattgcacaatacagagcaggnattgtgcctgtttcctacagaagggtaccctgcaggagaaggggaggcataaggttcacaatcaatggccactcctacttcaacttggtcctcataacaaacgtaggaggtgctggggatgttcatggtgtggccatcaaggggtcaagaacagggtggatgccatgtccagaaatggggtcaaaattggcaagcaacaatatctcatggccaagctctcatcag

SEQ ID NO: 282210 - DNA, 332 bp, Glycine max
  unsure (1)..(332): unsure at all n locations
gcgcgatggggtgcctacaagtatgtttcagagctatggcgcaagaagcagtctgatgtcatgcgcttcttgcagcgggtgaggtgctgggagtataggcagcaaccttccattgttcgcttgacaaggtcgacccgccctgacaaggctcgtcgcttgggcttcaaggcnaagcagggctatgtgananaccgtgttcgtgttaggaggggtggccgaaagaggccagttcccaaaggtattgtttatgggaagcccacaaaccagggtgtnacccaatgaattncagcgnanaagaggtcattctgaggacgagctagacggaactagtg

SEQ ID NO: 282211 - DNA, 340 bp, Glycine max
ctgcgttcctgtgagaacccacgttctctaacgcgcttctccttcaaagttcaaattcctatacatttgcgtaatcgcttctcaaatctcaacaaaagtattcccaaaaaaccctaattattattattaaacatgaggccgattctgatgaaaggccacgagaggccactgacgttcctcaagtacaacagggacggcgatctccttttctcctgcgccaaggaccacaaccccaccgtctggttcgccgacaacggcgaacgcctcggcacctaccgcggccacaacggcgccgtttggtgctgcgacgtctcaagagattcgggtcggctcataacgg

SEQ ID NO: 282212 - DNA, 331 bp, Glycine max
  unsure (1)..(331): unsure at all n locations
cggaattgtgagcaattggggatgatatggaaaagatttggcatcataccttctataatgagcttcgtgttgccccagaagagcatccagttctcttaactgaggcccctcttaaccctaaggctaatcgtgagaagatgacccaaatcatgtttgagacctttaacacccctgctatgtatgtagccatccngctgttctttcactttatgcaagtggtcgtacaactggtattgtgttggatctggtgatggtgtcagccacactgtccctatctatgagggttatgccctcccacatgccatccttcgtctgatctggcggtcgtgac

SEQ ID NO: 282213 - DNA, 332 bp, Glycine max
  unsure (1)..(332): unsure at all n locations
ctctcctctggttttggggttagattaggtcttcctacccaaaanaaaacttcaatttctgtttcagttcgcggagatcaatattttatctaggtccatcgtcgatagaagatacgngaaaccaaaggcaatgtttttgtgggattggttttatgggattctagcgtcgctcgggctgtggcagaaggaggccaagatcttattcttgggcctcgataacgctggcaaaactaccttgcttcacatgctcaaagatgagagattagtccagcatcagctacccagtatcctacatcggaggagttgatatgggaagatcagttaagctttgt

SEQ ID NO: 282214 - DNA, 329 bp, Glycine max
  unsure (1)..(329): unsure at all n locations
gcggactatatacttgccaacaccaacttggggcaatcacccgaagttttcaacttagcaggcttgtctgtcaaaacataccgtactatgctccagcaacacgaggacttgactttcaaggacttctggaagaccttggttctgctccatctggatctattgttttgctacatgcatgcgcacataaccccactggtgtggatccaacccttgagcaatgggagcagattaggcagctaataagatcaaaagctttgttactttctttgacagtgcttatcagggtttgctatggnatctagattgcagatgccaactgtcgttgttgt

SEQ ID NO: 282215 - DNA, 335 bp, Glycine max
gggaaatgtagctaccgaagatgttgtgtacatgctgaatggacttggggtgaaaaccaacgttgatctcggaaagctcatgttagccggtgagttcatcggcaagcatttggggcgcccatctggctcaaagaccgcggtagcctttagccgagtcacagctgatgcttccaagatatgataatatgttctaccataaaaataaaaataaaaattggatgcttcaagcagtgagaggacaccctattcgtttcatcaccctattgtttcatcttattaaccccgtattatagaaaaagaataaaatgcccatcacgttgatgagttggaaggag

SEQ ID NO: 282216 - DNA, 328 bp, Glycine max
  unsure (1)..(328): unsure at all n locations
ctcttcttctcttgcggnntnggtttagcgcanttcttctagatttaaggaagatgggtaaggaaaaggttcacatcagtattgtggtcattggccatgtcgactctgggaantccactaccactggtcacctgatttacaagcttggaggcattgacaagcgtgttattgagaggtttgagaaggaagctgctgagatgaacaagaggtctttcaagtatgcctgggtgctggacaaacttaaggctgagcgtgaaagaggatcaccatgatattgctttgtggaagtttgaaacaacaaagtatatgcacattatgatgcgcctgg

SEQ ID NO: 282217 - DNA, 330 bp, Glycine max
ctgcgttcctgtgagaacccacgttctctaacgcgcttctccttcaaagttcaaattcctatacatttgcgtaatcgcttctcaaatctcaacaaaagtattcccaaaaaaccctaattattattattaaacatgaggccgattctgatgaaaggccacgagaggccactgacgttcctcaagtacaacagggacggcgatctccttttctcctgcgccaaggaccacaaccccaccgtctggttcgccgacaacggcgaacgcctcggcacctaccgcggccacaacggcgccgtttgtgtgcgagtctcaagagttcgggtcggctca

SEQ ID NO: 282218 - DNA, 320 bp, Glycine max
  unsure (1)..(320): unsure at all n locations
gnaaccctacnctcacccacacccagtgtaccantccccaccaccaacacctaagangccctacaaatacccatcacctccgccaccagttcacacctaccctccccatgtncccaccccagtctaccactctcctccaccaccancatacaagaagccttataagtacaagtctcctcctcccccagtccactctccacctccaccacactactactacaaatcaacccctccacctaccatactagatatagcctttcatatcacacccccactggtgtatacggaagtggaaatgaagctggaggggangggcntgc

SEQ ID NO: 282219 - DNA, 329 bp, Glycine max
  unsure (1)..(329): unsure at all n locations
gtgntgttagatctgtacccgcctagccattgatttngaaaagtccaancttcaangntgagtaagcttnagagtgangctctnagagnagctatctcangaatcatgactgattccaagganaagaacaggnaatttgtgganaccattgnactccaaattgggctganannctatgatccccagaaggacaagcgttttagtngcnctgtnaagttgcctcacattcctcgcnccaagatgaagctttgtatgcttggagcaggccaanacgttgnagaggctgannagataggaatggactacatgggtnttgatgccttnnagaa

SEQ ID NO: 282220 - DNA, 302 bp, Glycine max
  unsure (1)..(302): unsure at all n locations
ctctaattacactttctatctcatttccaatctcattttcgttcggttcaaacactctcatggcatcagacaagaagattaggatcggcatcaacggatttggaaggattggccgtttggtggccagggttgctcttcagaggaatgacgttgaacttgttgctgtcaacgatcctttcatcancactgattacatgacatacatgttcaagtagacaccgttcatggcagtggaacatttgatgtgaactgaaggntntagacctccgtcgggagagccgcacgtttggatcagactggag

SEQ ID NO: 282221 - DNA, 327 bp, Glycine max
  unsure (1)..(327): unsure at all n locations
gattatcctaagtctntgggaatagtgctgcaatggcttcaagtcaggaggaggtgacccttttgggancnactggaagcccatttgtgtgcagggttcatattgccctcaagttgaagggagttcaatacaaatatgtcgaagaaaatttgaggnacaanagtgaactgcttctcaaatccaacccagttcacaagaaggttccagtgtttattcacaatnagaagcccatagcagagtctcttgtgattgttgaatacattgatgagacatggaagaacnaccccatcttgccttctgatccttaccaaagagccttggctcgtt

SEQ ID NO: 282222 - DNA, 331 bp, Glycine max
  unsure (1)..(331): unsure at all n locations
gaganaacccggaaaatttgttgacatggtttatcatgaaaatgcccgtgntcttctccatgatgagaacatatatcgtattgaatattcacctggaccaatgaaactgtctatncaactgatggactctggacatgataaacctgaagtgactgctgtgtcaatggaccctaatttttcaacctatctacacaatgacttcctatctgtcgtccctgacaanaaagagnagtcaggaatttcttgaagaggnataaacgtagatatgctggtaatgatgaantttcaagccaggctatggaaggactacnaattatnaatggtctggagt

SEQ ID NO: 282223 - DNA, 336 bp, Glycine max
gtttctagtgaggccctggaagctgctcgtattgcttgcaacaagtacatggccaaatttgctggaaaggatgctttccacttgagagtcagggtgcacccattccatgttcttaggatcaacaagatgctttcgtgtgctggagctgataggctccaaactggaatgagaggtgcttttggaaagccacagggtacttgtgctagagtggctattggacaggtccttctttctgtccgctgcaaggacagcaacagccatcatgcccaggaggcccttcgccgtgccaagttcaagttccctggtcgtcaaaagattattgttagcaggaaatgg

SEQ ID NO: 282224 - DNA, 339 bp, Glycine max
  unsure (1)..(339): unsure at all n locations
ctgtganttctcagcgcgtaaagcatggctttgttggtggagaaanccacgagtggtcgcgantacaangtgcaagganctttcccaggccgacttcggcngnctcgagatcgagctggccgaggttgagatgcccggcctcatggcctgtcggnccgagttcggcncctcccagcccttcaagggggcncgcatcaccggntccctccacatgaccatccagancgccgttctcatttgagatcctnatcgcccttggngccgnaggtccgctggtgctcctgnaacatcgtctccatccaggaccacgccncngccgctattgcccgganagtgccg

SEQ ID NO: 282225 - DNA, 338 bp, Glycine max
  unsure (1)..(338): unsure at all n locations
gaaagtcttacccaaccgtgagcgctgattaccagaaggccgttgagaaggcgaagaagaanctcagaggcttcatcgctgagaagagatgcgctcctctaatgctccgtttggcatggcactctgctggaacttacgacgtgagctcgaagaccggtggtcccttcggaaccataaagcacccctccgaactcgctcacggcgctaacaacggtcttgacatcgctgttaggcttttggagccactcaaagcggagtttcctattttgagctacgccgatttctaccagttggctggcgttgntgccgttgagtcaccggtggactgaagttccctt

SEQ ID NO: 282226 - DNA, 229 bp, Glycine max
  unsure (1)..(229): unsure at all n locations
gctcctcaagcccgaagaactcaatctcgaactcatcagatctgcaaaagttttccattacggatcaatcagtttgatcgtggagccatgcagatcagcacacttgaaggcaatggaagtagccaaggaatctgggtgcttgctctcctatgaccccaaccttcgtctacctntgtngccttcggctgaggaagctcgtaagcaaatactgagcatttgggagaaggct

SEQ ID NO: 282227 - DNA, 325 bp, Glycine max
  unsure (1)..(325): unsure at all n locations
caatacggaacccaaaattagctcgattaaatccaaatctgagagaagcattgattngtacggtaatggnggaagggaangnagagaggaaatctagcgaggaaagtgtgaanctgttcgtagggcaagtgccgaagcacatgaccgancccgaactgcttgcaatgttcaaggagttcgcgctcgtcgacgaatcaacataatcaaagacaaagcgactcgtgcttcccgaggtngttgcttcgtaatttgtccgtcaagggaggatgcggataaggccntcaatgcgtgtcacaataaaangacggtacccggggcactantt

SEQ ID NO: 282228 - DNA, 219 bp, Glycine max
cagattggcatataaaagaggcgctactgagatcaagcaacaccccttttttgaaggtgtgaattgggcattgatcagatgtgctaccccacccgagatccccaaggctgtagagtttgagaagataccctcaccagcttcatcaagtggtggtgaaaaggctgttaaccatatgtcaatagctaatcagaaaggttctgataattatctggagtttga

SEQ ID NO: 282229 - DNA, 340 bp, Glycine max
  unsure (1)..(340): unsure at all n locations
agattacctangttgcaccacctggccaatattccttacaggatactgtattggaacttgagtttcaaggtgtcaaaaaganattcactatgcttctgacttggcctgtacgtanacncaggcctgtngcatcanaacttgcagctgatactcctcttcttactggtcagcgtgttcttgatgcccttttcccctcagttcttggcgggacttgtgccattcctggtgcttttggttgtngtaaaacagtcattagtcaggctctttctaagtattccaattctgatgcgttgtatatgtcggctgtggggaacgtggnaacgaaatggcagaggttcnt

SEQ ID NO: 282230 - DNA, 324 bp, Glycine max
  unsure (1)..(324): unsure at all n locations
cggatgcattgcgtgtatgtgtcacaacactgatggactttatagtgctaagcagactgctattgtgagagcttctgatgatttttaccctcgtgatcctgcttcccataccatccatatttcttctgttgcatacaactcactattccttggaganttcatgcaacctgactgggacatgtttcatagtttacacccagcagcagattatcatgctgcagctcgtgcaattggtggatgtcctatttatgttagtgacaagccaggcaatcacaattttgatcttcttaagaagctggttctcccggatggttcggttctccg

SEQ ID NO: 282231 - DNA, 326 bp, Glycine max
tgagaggggcagtagccgagattccgtgagttgcaaaaatgaagacgattctttccaccgagaccatgaacatcccggacggcgtgagcatcaaagttcatgccaaggtcatcgaagttgagggcccccgcggaaaattggtgcgagacttcaagcatttgaatctcgattttcagctcattactgacgaaaacggtaaaagaaagctgaaaatcgacgcgtggtttggttctcggaaaacatccgccgccattcgcaccgccttgagccacgtggagaatcttatcaccggcgtcaccaagggctaccgctacaaaatgaggttc

SEQ ID NO: 282232 - DNA, 349 bp, Glycine max
  unsure (1)..(349): unsure at all n locations
caagacccagattgatnacatccttgganataacccaaggaaaatgagctatgttgtaggttttggtaatcattacccaaaacatgtncacctagaggagcatctataccgagaagcacgatcaagtatagctggtaagggtggatggnaatngagggacactttctaagccaaacccaaatacaattgttggtgccatngttgctggtcctgacaagcatgatggcttccatgatgttcgtacaaactacaattacacagagccaactcttgctggaaatgctggtttagttgcagcatagtggcattgtcaggcgacaaaagcacatcgattgacaaaaataccatt

SEQ ID NO: 282233 - DNA, 325 bp, Glycine max
  unsure (1)..(325): unsure at all n locations
ccaaaccttaaaaagattcagtgaagaacaacgttaatggcatctcttggtgtgcaagcagttcatcctcctccatnaacatccacctccgacccacctcctctttttgatggcaccaccaggttgtacatcagttattcttgcccctatgcacaacgtgtatggatcgctcggaacttcaagggactaaaagacaagatcaatttggnccctataaaccttcaagacaggccancttggtataaggagaaagtctaccctgnaaataaggtgccatccttggagcacaatggcaaggtgttgggagaaagtcttgatttgatcc

SEQ ID NO: 282234 - DNA, 323 bp, Glycine max
  unsure (1)..(323): unsure at all n locations
caagaatgctgagactattggccgttcctttcccgaagaaccaacccatgagaatctattctagcttgtggaacgctgatgactgggnccaccagaggtggtttggtgaaaactgattggtcaaaagcaccctttacagcanactaccgcaatttcaaagccacagagttctccacctcttcttccaattccttctctgatgctgcatggcagagcaacgagcttgatgcctatggcagaagaagactgagatgggctcagaagtacttcatgatctataactactgcaacgatcttaagcgattcccacaaggcattcccgc

SEQ ID NO: 282235 - DNA, 321 bp, Glycine max
  unsure (1)..(321): unsure at all n locations
accagatttcgcaaggcgtgccttccccgggttccattgggttaaganagcgcttcagtggcatgtttgctaagaaacttgactgggtttcactcaagaagatgtgtttagaatggtttagggacccaatgaacatancccttttngtgtggancttgtgtggtgctatntcaggtgcaattctgttccttgtcatgactggtatgttgaatgctgtgcngccaaggaagtcacagagaaacgcgtggtttgangtgaacaatcaaatactcaatgcactgtttaccctcatgtgtttgtaccagcatccaaagnggatct

SEQ ID NO: 282236 - DNA, 327 bp, Glycine max
  unsure (1)..(327): unsure at all n locations
cncaacttccgctacttcctactccnaccactttcttttttcccgcagtcatgggcaaggtcaagatcggaatcaacggatttggaagaattggccgtttggtggccagggtggctctgcagagagacgatgttgaactcgttgccgttaacgatcctttcattaccaccgattacatgacatacatgtntaaatacgacagtgttcacgggcactggaagcatcacgatgtcaccgttaaggatgagaagacccttctcttcggtgacaagccagtcactgtttttgganacaggaaccctgaagagatcccatggaagtngactt

SEQ ID NO: 282237 - DNA, 341 bp, Glycine max
  unsure (1)..(341): unsure at all n locations
ananaattcanggntcccttggatnttcttgattgcttcatcacctgataactgacttggcggaaggagctgtcatcgccggggttatncangagttccctgagaggaacatggacggtgccgatgacggtgtcgccgagggtgcggtcggagatgagcttgatctcaagaaaatccaagggatccttgaatttctcctacaaattcggcgaacatgttcccgccccggccgccaagacacccaaagcggccaaggcgggacncnagccggtgatggcttatcctcctgctggggcgggatccagttcgatgccctatggtacgccacaccctccnccgcc

SEQ ID NO: 282238 - DNA, 344 bp, Glycine max
  unsure (1)..(344): unsure at all n locations
ttgaacaagggtntctctgtctgcttcttcactttctctcgtttcaatcgaaaccaaaacaaaaacatgggcagaaaattcttcgtcggtggcaactggaaatgcaatgggaccactgaggaggtaaagaagattgttactactttgaatgaggctaaagtccctggagaagatgtcgtagaagttgttgtnagccctccttttgtgttccttcctgttgtaaaaagtttgctgcgccctgatttccatgtttcggcacaaaactgttgggttcgcaaaggtggtgcttataccggtgaggttagtgctgaaatgcttgttaatttgggaattccttgggttat

SEQ ID NO: 282239 - DNA, 321 bp, Glycine max
  unsure (1)..(321): unsure at all n locations
gtctctgccgaggacaagaccacagggcagaagaacaagatcaccatcaccaacgacaagggtagactatcgaaggatgagattgagaagatggtccaagaggcggagaagtacaaggccgaggatgaggagcacaagaagaaggtcgacgcaaagaatgctttggagaactatgcctacaacatgnggaacaccattanggatgagaagattgcatcaaagctttctgatgacgacaagaagaaaatcgaagatgccatcgagagtgctattcagtggttggatggaaaccagctagcggaggctgacgagttcgaagac

SEQ ID NO: 282240 - DNA, 324 bp, Glycine max
  unsure (1)..(324): unsure at all n locations
ccgtgaagcactagaagttgttcttgatgtcaggaaccacccagttataattcactgtaagcggggaaagcaccgaacaggttgcttggtaggatgctatagaaaattgcaaaaatggtgcttgtcatccgtctttgatgaataccaacgctttgcagccgccaaagcaagagtttcagatcagaggttcgtagagttgtntgatatttccagcatganacatttgcccatacccttttcatgtttgaagaggtaacataccaagctatgctgagttgggtttacttgctgtagtttgtgaaagtgaagccaaggttcttcctt

SEQ ID NO: 282241 - DNA, 329 bp, Glycine max
  unsure (1)..(329): unsure at all n locations
cattcttgtcctatctttntntntcttttagatttttctttaaaattctctatcgaccaaagntcttcaacaaaccggttaagtntgtgtagtttggtaagatgggtggtggatttagagtgcttcacttagttagaccatttctctcgtttcttcctgaagttcagactgctgacaggaaagtgccatttagagagaaggtcatatatactgtgatctctctgtncattntccttgtttgcagtcagcttcctctgtatggcatacactcaacaacaggtgctgatccattctattggatgcgtgttatccttgcttcaaaccgtgga

SEQ ID NO: 282242 - DNA, 320 bp, Glycine max
gaaaatggtgtggattactggctggtgaggaattcatggggcactggatggggtgaggatggctatttcaagatgcaacgcaatgtgagaacccccacgggcaagtgtggaattacaatggaggcctcctacccagtgaagaatggtttaatctctgctaattcagtttatgaaagcaatgaggtgtatgttagcagtgcttgatataacaaccatcatcgttatttatgatctttggaattgggaagaggaacaagtgctcaagttgcaaatgtttctgctatctttgatgcttctattgaatatgtctgttgggctat

SEQ ID NO: 282243 - DNA, 320 bp, Glycine max
  unsure (1)..(320): unsure at all n locations
gttccttgtagtgcagacaagggcatggtctttttgcagagtttgagtgattctgctacttactatactagttagtttgacatcttgancgggtgtagaatgggatctggaaatgaggttcactcaattgtggagttcaatttggatgctaagtggcntatagatcccaagnaactatttgttgggcctaaaattggggaaggtgctcacgccaaagtgnatgangganaatataanaatcagaatgttgctgttaagattattaataagggtgaaaccccagagcagatttctaggagagaggctcggtttgccagagt

SEQ ID NO: 282244 - DNA, 325 bp, Glycine max
  unsure (1)..(325): unsure at all n locations
ccggattggcttcctacggagagaaagagtggtacttcttttcaccacgggaccggaaatacccgancggttccaggccgaaccgggcggcgggaaccggttactgggaggcaaccggggcggataagcccattggccaccccaaaccggttgggataaaaaaagctttggtgttttacgcagggaaanctccgaaaggggacaagagcnattggatcatgcacgngtatcgtctcgccgatgtagatcgctccgttcgcnaaaagaacagcctaangttagatgattgggtgctttgccgtatttactacnagnagggcacgnt

SEQ ID NO: 282245 - DNA, 326 bp, Glycine max
ctggtgttgtcccaatccaagagagaagtaaagtaaagcaaaggaatggcgaacatagacatcgaagggatcttgaagcagcagcctgatgatgggcgcgttccgaagacgaaaatagtgtgtactttgggccccgcttctcgatccgtggaaatgactgagaagcttcttagggctgggatgaacgttgctcgtttcaatttctctcatggcacccacgactatcatcaggaaaccctcaacaatctcaagactgctatgcacaacactggtatactctgtgccgtcatgcttgacactaagggacctgagattcggactggttt

SEQ ID NO: 282246 - DNA, 302 bp, Glycine max
  unsure (1)..(302): unsure at all n locations
gaggaagctccggcaggtgattatgccatcacagatttcaatgcaggtgctattgctgctgatggccagtggcctggtacaattgatcaatcatggagtgatgcagttccacaacctattccagcagcacctggtgtcaactggggggcactgcagaagcacctgctgctgttgcagaaggagattggggtgaactgttccacacacaacaaatcctgttctccctctggaatgatctgtccaacantggtgggataatagtgttttgatntagattgcctgcctcattatgcttctagaga

SEQ ID NO: 282247 - DNA, 339 bp, Glycine max
  unsure (1)..(339): unsure at all n locations
caagagcttattacaatcgaagaagacctcttctcatccctgggattgcattttaaaactttggatatggcntctgaagatttaggtgcacctgcctatcagaaattcgatgtggaggcttggatgcctggtttagaacggtttggtgagatctcaagcgcatcaaattgcacagactatcagagccgtcgtttgggaataaggtatcgtcctgcatcagaagcacaagccacaagtgcaaaaaaatctaaaggcaatcttgccccacctcagtttgttcatacattaaatgcaacagcttgtgctgtaccacggatgattatatgnttgcttgagaat

SEQ ID NO: 282248 - DNA, 197 bp, Glycine max
gaccagctcaccgacgaccagatcgccgagttcaaggaggccttcagcctcttcgacaaggacggcgatggttgcattactaccaaggaacttgggactgttatgaggtcacttggtcaaaacccaactgaggcagaactgcaggatatgataaacgaggttgatgctgatggcaacggaaccatcgatttcccaga

SEQ ID NO: 282249 - DNA, 337 bp, Glycine max
  unsure (1)..(337): unsure at all n locations
cttttcccaccgattatgtgccgactgtttttgacaatttcagcgcaaatgtggttgtcaatgggagcattgtgaatctgggtttgtgggatactgctggacaagaggattataacagattaagacctttgagttaccgtggtgccgatgtttcatactggcttctctctcataagcaaggccagtatgaaaatgtctctaaaaagtgggatncggagttganncataagctcctgnggtcccataatcntggttgcanaancttgacctccgggtganaaccagtcngcattgncaacctgggccgnanntatancnaacccagggnnnaganctt

SEQ ID NO: 282250 - DNA, 336 bp, Glycine max
  unsure (1)..(336): unsure at all n locations
cgatttgggaatcaacttcaggtatgatccttcaactggtatttatggaatggatttctttgttgttctggagcgtcctggctatcgtgtcggacgccgccgtaggtgcaagtcccgtgttggaattcagcaccgtgtcacaaaggaggatgctatgaagtggttccaggtgaaatatgagggantgatccttaacaagtcccaggcaattgttagttagaatgagttcactttangagcgtgttatcagtttgtcnanatagctcgnccttccgnganatngccaatttaagncantttgaacatggtgncaatcaattcgggattaancaatgg

SEQ ID NO: 282251 - DNA, 246 bp, Glycine max
  unsure (1)..(246): unsure at all n locations
attccaatatattccattctctctgtgtatttccctacctctcccttcaagatgcagatcttcgtcaagaccctcaccgggcaagaccatcacccttgaggtggaaagctctgacaccatcgacaacgtcaaggccaagatccaggacaaggaaggaatccccccggaccagcaacgtctcattttcgccggaaancaattgaagagggcgtaccctgntgatacaacantcagaaggagagtatt

SEQ ID NO: 282252 - DNA, 125 bp, Glycine max
  unsure (1)..(125): unsure at all n locations
gctgatctcgtcaagagaggattggcaattgaagatccctctgcacnccatggccttcgccttgtgatagaggactacccttatgctgttgatggacttgaaatatgggatgctattaagacatg

SEQ ID NO: 282253 - DNA, 125 bp, Glycine max
  unsure (1)..(125): unsure at all n locations
caaaganaggggtggtggctgcttngaaagcttaataatttgtttatttccagaacatcatagttttcgcagcagcaaactaacaaattactcatatcatataataagatgggccgtcctctctc

SEQ ID NO: 282254 - DNA, 331 bp, Glycine max
  unsure (1)..(331): unsure at all n locations
cacctgtggaactcattaggaagggagacaaggttggatcttctgaagctgcattgcttgccaagctaggcataaggcccttctcatatgggcttgtggttctctctgtttatgataatggttcagtgttcagcctgaggtcttgatctactgaggatgacctcattgggaagtttgctgctggtgtctcaatggttacttcacttccattggcatttcaatccaacattgctgnagcaccacacagttggtnatgctacaagaagtcttgctgttncggttgagacagattatctttcccggaggcagacaggcaaggagtatctgaagg

SEQ ID NO: 282255 - DNA, 346 bp, Glycine max
cgaatatcttgttgtttggagcgatccgagaaaaactctgtaaacatgttggtttaccaggacctccttacaggtgatgagcttctctctgactccttccgttacaaggaaattgagaatggaatgctgtgggaagttgaggggaagtgggttgttaaaggagcagttgatgtagacattggtgcaaacccttctgctgagggtggaggagaagatgagggagttgatgatgcagctgttaaggttgttgacattgttgacacattcagacttcaggtttgggcaaccttacacctcttcttatattttgatggacactttctttgtcatgatttgtcttgaatca

SEQ ID NO: 282256 - DNA, 336 bp, Glycine max
  unsure (1)..(336): unsure at all n locations
aaagaaaggaaataattgatctttgaaaatgcagggaggaaagaaagctggagagtccatcaaggaaacagctgcaaacattggtgcttctgccaaggctggcatggagaaaaccaaggccactgtccangagaaggcagaaagaatgacggcactgatccgatgcaaaaggagttggcaacccagaaganagaggcaaagatgagccaggcaganctggacaagcaggcggcgcgtcacataacacggcggcgaacangctgcnacggcanggcactgggacaacnctggggacccatcanacgtcgctatcncggtctggaaccggacagccca

SEQ ID NO: 282257 - DNA, 334 bp, Glycine max
  unsure (1)..(334): unsure at all n locations
caacctctcaagtccaacctacccctttttcttctcccaccaacttcaccgtcnccttcctcgatcatgtctcacttcaagggcaagtaccatgatgagcttattgccaatgctgcttacattggcactcctggaaagggtattcttgctgctgatgagtcaacagggacaattggcaagcgtttggccagcatcagtgtagagaatgttgaatccaacaggcgtgctcttagggagtgcttttcaccgctcccggtgctcttaaatatctcagtggtgtcatcctctttgaggaaatcttaccagagcacagtgcagcaagccttgtggagtc

SEQ ID NO: 282258 - DNA, 344 bp, Glycine max
  unsure (1)..(344): unsure at all n locations
ctactgctagctgtgacttgttttgagttcaatcaaatcgcattggtatctgaaatcaggaaagatggttagcgtantggangatcaggcaggcacaaagggcagaaggcccagcaaccatccttgccattggaactgcaaacccaccaaaccgtgttgatcagagcacctatcctgattactacttcagaatcaccncacagtgaccacatgaccgagctcaaagagaaatttcagcgcatgtgtgacaagtctatgatcaagacgagatatatgtacctaaacgaagagatcttgaaagagaatccagacatgtgtgcttacatggcaccttctttggngta

SEQ ID NO: 282259 - DNA, 328 bp, Glycine max
  unsure (1)..(328): unsure at all n locations
gggacagggcagataagttttgatgagaattctattcccattaggtccatcttgatttggggttattaggttttgttagttgagtgtctatttttcttgtttgctttaattgctactacttctctgctccctagttatcctacttgtttgctctgtcccttgtttttagtagcttcggtagctgtgtctcaccatgctttgttactctccgttttcatcnnnnnnnnnnnnnnnnnnnnnnnnnnnnnnacctagaacaattgggatgcattgtgtttttttaaatgtgggtggctaagctgttaatattttatatttttgccagtga

SEQ ID NO: 282260 - DNA, 339 bp, Glycine max
  unsure (1)..(339): unsure at all n locations
agttgctgcttcttccgccactcagcacttcgctccctctgtgcttcaccaaccatggccgaaatcgaagctaccgttccagatccctcttcaaatcgacgtcaaacttttcaaccgctggagctncgacgacgttactgatatgtctctggctgattacattggagtgtccccgtcaaagcatgctacatatgttcctcacactgctggtaggtactcagtgaagaggttcaggaaggcgcagtgccccattgttgagagactcaccaactctctcatgatgcacggaangaacaatggacagaagcttcatggctgtcaggattatcaagctgnaat

SEQ ID NO: 282261 - DNA, 342 bp, Glycine max
  unsure (1)..(342): unsure at all n locations
gtcgccaccgccgagangctagttagagctgcacataaacagggtgcgaacatcattctcattcaggaactctttgaaggttattacttctgtcaggcacaaagagaggatttcattcaaagagctaagccacataaggaccatcccacaatcctcaggatgcagaaacttgcaaaagagttaggtgtagtcattccagttagcttctttgaggaggcaaacaatgcacattataactcaatagccataattgatgctgatggaactgatcttgggatttatagaaagtcccatattccagatggaccaggttatgaggaaaagttctattttaatccaggt

SEQ ID NO: 282262 - DNA, 335 bp, Glycine max
  unsure (1)..(335): unsure at all n locations
gaaggaagcctcatatgatgaaattaaaaatgctatcaaggaggaatcagagggcaanttgaagggaattcttggttacactgaagatgatgtggtctccaccgactttgttggtgataacagatcaagtatttttgangcaaaggctggaattgcattgaataagaattttgtgaagcttgtctcttggtatgacaacgagtggggatacagttcacgtgtcattgacctgcttgtaatcgttgccaagaagtcttttaattaaggtggttctaacattagtgctggtcagctgcgatttagtgtctgctcgtgcaaaaattgagaagtatgaa

SEQ ID NO: 282263 - DNA, 337 bp, Glycine max
  unsure (1)..(337): unsure at all n locations
ctcctctcactttcatttctacatccctggctctgttccgtcgaagacgatggcntntagggtgcgaaaccctgacctccgctttctcattcttctctctctcttgtccatcacttccgccaaggtcttcttcgcaggagcgtttcgatgacggatggggaaatcgttnggttaaatcagattggaanaagatgagaacctggctggggagtggaaccacacctctggccaatggaatggagacgctaacgacaaaggtattcaaaccagtgaggattacagattcnnacgctattncagctcnataccctgaattcagcaacaaggataagacata

SEQ ID NO: 282264 - DNA, 333 bp, Glycine max
  unsure (1)..(333): unsure at all n locations
aattgntgnaatntntgantcctacattctctnaaattcgaaattctaatttcgttaggggaaagagattgnttgtgtgtgagtgagtatggctggaaaangcganggtctngctatcggnatcgatttgggaacgacgtactcttgcgtcggcgtgtggnancacgatcntgtngaaatcatacccaacgataagggtaacngaactaccccatgccnangtggctttcancgcacatcnnaacggttgatnngcgcatgcancaagaacncaggtcgctatgcccccacncaacaccgttcntgatgcnangcgtcttnatggangggttt

SEQ ID NO: 282265 - DNA, 330 bp, Glycine max
cagcagaaatgatatgatgggttgtggcggtgcattctcagtgtggctgccagtgtttgtgtcttgttttacagcaatagcattgggctgggactgggtgcgataaggcaccggtggtgttcgtgttcggcgattcgaactcggacacgggtggactcgcttccggtctgggtttccctatcaatcttcccaatggccgcaatttctttcacagatccactggccgcttgtccgatggacgcctcgtcatcgacctactctgccaaagtttgaatgcaagtttgttggtaccatatttgggacgcctgtctggaactcatcacaaatgga

SEQ ID NO: 282266 - DNA, 334 bp, Glycine max
gcaggggctccaattcctactcttagccgcagatctctcagggcttgcatcttctcaggtaagttgtgaagatgtacacatcaaggaagaaaatccacaaggataaggatgctgaaccaactgagtttgaagagtcagttggacaggcattgtttgatctggaaaataccaaccaggagcttaaaagtgatctgaaggatttatacataaactcagctgtgcaagttgatgtttctgggaaccgcaaggctgttgttattcagtcccttacagattaaggaaaggtttccgtaagattcatgtcaggcttgtcagggagcttgagaaaaagttt

SEQ ID NO: 282267 - DNA, 339 bp, Glycine max
gcatgactggcctggatagagagaaagcacaggttttctacaaagaacaatctgcttcagctgccatgatgactgttaattccggcattagaaaaattcttccagattccgagatttgtgactttgactttgaaccatgtggttattcaatgaactctgttgaaggcgctgctgtttctacgattcatgttaccccagaagatggtttcagttatgcaagcttcgaaactgttggttatgacttcaaagcggtgaatctgaacgaaatggttcagagggtattggcatgtttcctcccaactgagttttctgttgcagttcatgtggatggtgcaagca

SEQ ID NO: 282268 - DNA, 330 bp, Glycine max
  unsure (1)..(330): unsure at all n locations
ggctatatatgaggagatgataaataatgggttgacaccaaattggcctacctatgcagctttgttacaagcctattgtagagcacggtttaacagagatgcactgaatgtttacaaggaaatgaaggagaaggggaaggatttggatatacttctttataacatgctttttgacatgtgtgcaaatgttggatgtgagggtgaagctgttaaaatttttgaagacatgaaaagttctgggacttgccgtccagacagttttacatatgcatcctgatcaacatgtactccagcatgggaaaattcagagaggaagccagttcatgaang

SEQ ID NO: 282269 - DNA, 334 bp, Glycine max
  unsure (1)..(334): unsure at all n locations
actacaagtacttccttacaatcaaaaccaacaacaactatggcaagttatcaaaagcactacgatgatcagggtcgcaaggttgacgagtatggcaacgttgagaagcaaaccgacgaatacggcaaccctgttcatgctgctagtgtcacctatgtagccaccagaactgctgctggtggttacagtgatgacattaataagcaacatgataccaccaatgcctacggcgtagacactggtagacagcattctagtggtggctacgatggtgacactaataaacatcatggaatactggtggctataatgatgacaccaatagacatcngga

SEQ ID NO: 282270 - DNA, 332 bp, Glycine max
  unsure (1)..(332): unsure at all n locations
ggcaggggctccaattcctactcttagccgcagatctctcaggggcttgcatcttctcangtaagttgtgaagatgtacacatcaaggaagaanatcccacaaggataaggatgctgaaccaactgagtttgaagagtcagttggacaggcattgtttgatctggaaaataccaaccaggagcttaaaagtgatctgaaggatttatacataaactcagctgtgcaagttgatgtttctgggaaccgcaaggctgttgttattcatgtcccttacagttaaggaaaggttccgtaagatcngtcaggcttgtcaggagctgagaaangttat

SEQ ID NO: 282271 - DNA, 332 bp, Glycine max
  unsure (1)..(332): unsure at all n locations
aaagaaaggaaataattgatctttgaaaatgcagggaggaaagaaagctggagagtccatcaaggaaacagctgcaaacattggtgcttctgccaaggctggcatggagaaaaccaaggccactgtccaggagaagaaagaatgacggcactgatccgatgcaaaaggagttggcaacccagaagaaagaggcaaagatgagccaggcagagctggacaagcaggcggcgcgtcanataacacggcggcgaanaggctgccacggcagggcacatgggacaacccatggggaccatcagacgtcactatgccggtcatggaacggacagcca

SEQ ID NO: 282272 - DNA, 325 bp, Glycine max
  unsure (1)..(325): unsure at all n locations
cgggactttcactagccgcagcagcctcaggaggagaataaggatgtctcacaggaagttcgagcacccaaggcacgggtcactgggatttctccccaggaagcgtgctgctcgtcacaggggaaaagtgaaggcattccccaaggatgacccatccaaggcacccaagctcactgcattcttgggttacaaggctggtatgactcacattgttagagaggtcgagaagccagatcaaagcttcacaagaagaaacatgtgagctgttacaatntgagaccctccatggttatgttggtgttgtgggttngtgaaatcccgtggt

SEQ ID NO: 282273 - DNA, 331 bp, Glycine max
gttggtgcaaagcatccttcgtttcaatttctctctctcagcgctttctgcaatcgaacctttcatctccaaagggatccacaggccgaaggagaaatggggctgacattcacaaagcttttcagtcggcttttcgcgaagaaggaaatgcgaattctgatggttggtcttgatgctgctggtaagaccactatcctgtacaagctcaagctcggagagatcgttaccacaattcctaccatcgggttcaatgttgagactgtggaatacaagaacattagcttcactgtttgggagttggtggccaggacaagattcgtccctgtggagg

SEQ ID NO: 282274 - DNA, 337 bp, Glycine max
  unsure (1)..(337): unsure at all n locations
tggngtcgaaagtgcnttngacanttaagccacaatatggattnggtgagaaggggaagccagaacaaggggatgaaggtggcagttccaccaaatgcaacattgcagattactcttgaattagtttcatggaaaactgtttcagaagtaactgatgacaagaaggtcataaagaagatcctcaaggaaggggaaggatatgagcgtccaaatgagggggccattgttaaagtgaaactaattggtaagctacaagatggtaccgcttttttgaaaaagggccatgatgaagaagagaagctgtttgaattcaaaacagatgaggaacaagttgttg

SEQ ID NO: 282275 - DNA, 340 bp, Glycine max
cctggatttgcggatcgtgcatacatatattggcgtctcctctcaactgaccccgaggcagctaaggatgttgtgttagctgagaagcctgtgataactgatgactcaaaccaacttgatccttctctacttgatgagcttcttgtcaacattgctacattatcttccgtctatcacaagcccccagatgcatttgtaacccgcacatacttgtctgcccagaaaaccgaagacgatgactatcctgagggaagtgaaacagggtattctgagtcacctggaaatcatgctaatggccctgcttcacctccacctactgcacctgtgcctgatttacttg

SEQ ID NO: 282276 - DNA, 333 bp, Glycine max
agttgctttgatgatgaatggaagaaacaggtttccctttaccccatcacagtggcaagagcttgaacaccaagctctcatctacaagtacatggcttcaggcatttccattccccctgatcttctcttcaccataaaaaggagctattttgattcccctctctcctcaaggcttttgcctaaccagccacaacactttggatggaactaccttcagatgggtttgggaagaaaaatagaccctgagccaggtaggtgtagaagaactgatggcaagaaatggagatgctcaaaagaagctacccagattctaagtatgtgagaggcactgca

SEQ ID NO: 282277 - DNA, 336 bp, Glycine max
  unsure (1)..(336): unsure at all n locations
ctttcatcctctctctcgaacttatttatctctctctgtttctctgttttgctctgcttctcaaaacataaccttttattattatagtattttactattataaactaattttncattgctaatgcaatggccatagagtgcataacaaatatacaatcaatgtctcaaccacaaaagcaccaccaagagcacaaagaagatgaagcaccattggtttttgatgcctcacttctcaggcaccaactcaacctaccaaaacagttcatttggcctgatgaggaaaagccatgcatgaatgtgcctgagcttggtgtccctctcattgacttggggggg

SEQ ID NO: 282278 - DNA, 336 bp, Glycine max
  unsure (1)..(336): unsure at all n locations
ccatcctcatgcaaaggtcttcttctacttcacttgctgctgggaggttgttctccnccaacaacagcaaccattattgattccccttcacttgctcagagaatcagagatttgcctaaggacctccctggaaccaacatcaagaaacatgtttctcagctcattgggaggactccacttgtttatcttaacaaagtcactgaaggatgtggagcttatgttgctgtcaagcaagagatgatgcaacctactgccagcatcaaagacagaccagcatatgcaatgatcacagatgctgaggaaaagatctgataactcctggaaagacaatctgat

SEQ ID NO: 282279 - DNA, 336 bp, Glycine max
gaagagccaagcacggatgatgttattcgtgagaaagttataaactttgttcgagataaggttttccctatcaaagctgaattgttgaaaccacaggaggaaatggaaagacacataactgatctcattaaaaagagtttagaagatgttactggcatagaatttcgaatgtttatggattttctgaagagtttgagcctatttggagaaaaggctccggctgagcggatgaaagagcttattggaatcattgaagggcaagctgatttagatgcacagttcaatgtatcagatgcagatcatattgaccggttgatatcttgccttcacaggcac

SEQ ID NO: 282280 - DNA, 276 bp, Glycine max
  unsure (1)..(276): unsure at all n locations
tgaagccatcgatgctcagatctctccacttccgccgccacccgcggcgcctctcatctcttccgccgtgggtacgcctccgagccggtgccggagcgcaaggtagccgttctcggcgccgccggcgggatcgggcagcctctctcccttctcatgaagctcaatcccctcgtttcgagcctctcnctttacgatatcgccggaactcccggcgtcgccgccgatatcagccacataaacaccagatctgaggtatggggtacaagtgatgaagac

SEQ ID NO: 282281 - DNA, 325 bp, Glycine max
aaattatgcagcagcttattgcactggtctcctgttggcccgaagagtcctcaaaacacttgaaatggatgaggagtatgaaggaaatgttgaggctactggagaggattattcagtggaacctgccgagagcaggaggccattccgtgcactccttgatgttggtcttgttaggactacaacaggaaatcgcgtctttggtgccctaagggagctctggatgggggtttggatattcctcacagcgacaagaggtttgctgggtttgataaggagaagaaggagttgatgctgaggttcatcgcaaatatgtttttggtggaca

SEQ ID NO: 282282 - DNA, 330 bp, Glycine max
caagagttgaaggaaatggctgaagcacaactacgagaccagcatggcaaccctgtcccactcaccgatcaatacggtaatccggttatcttaactgacgagcgcggtaatcccgtccaactcactggtgtcgctaccaccgctaccggcacagcaggttctgggtttgggtctatggtaccggtgcttacggtggtggtgcaagtgcaaccaccgttgcagatcttttggcaacccaaccaaggagtggcagggaggctagagagcttcgtcgttcctccagttcaagctctagctcgtctgaggatgatgggcaagtgggaggaggaa

SEQ ID NO: 282283 - DNA, 335 bp, Glycine max
caacttacggctaaattctcaaagatttaaactttgtctcagagtttccaaattcacccaaccccagagagaaaatgtctctaatcccaaatttcttcggtggcagaaggagcaacgttttcgatcctttttccctcgacgtctgggaccccttcaaggattttcctttcccaaacactctttcttcagcttcctttcctgaattttctcgggaaaattctgcattcgtgagcactcgtgtggattggaaggagaccccagaagcacacgtattcaaggctgatattccagggctgaagaaggaggaagtgaaggttcagattgaagatgataag

SEQ ID NO: 282284 - DNA, 327 bp, Glycine max
  unsure (1)..(327): unsure at all n locations
cctttgttcactcttcttctcttgcggctagggttttagcgcanttcttctagatttaaggaagatgggtagggaaaggttcacatcagtattgtggtcattggccatgtcgactctgggaaatccactaccactggtcacntgatttacaagcttggaggcattgacaagcgtgttattgagaggtttgagaaggaagctgctgagatgaacaagaggtctttcaagtatgcctgggtgctggacaaacttaaggctgagcgtgaaagaggaatcaccatgatattgcttgtggaatttgaaacaacaagtattatgcacagttat

SEQ ID NO: 282285 - DNA, 333 bp, Glycine max
cacacaactactacaagtacttccttacaatcaaaaccaacaacaactatggcaagttatcaaaagcactacgatgatcagggtcgcaaggttgacgagtatggcaacgttgagaagcaaaccgacgaatacggcaaccctgttcatgctgctagtgtcacctatgtagccaccagaactgctgctggtggttacagtgatgacattaataagcaacatgataccaccaatgcctacggcgtagacactggtagacagcattctagtggtggctacgatggtgacactaataaactcatggaactactggtggctatatgatgacaccaatag

SEQ ID NO: 282286 - DNA, 329 bp, Glycine max
ggggaggcctgactacggtgtcctcagctgggataacaagcttactggtgctcaggttcttctcagtcgtttgaggttgttcctgagtcctggttttccctatgaagatattctaaccacatttcacaatcagacaggcatagtcatgtgctcctacctcccaatgttcaccagctttaatagaacaaggggtggctgattcaattaaaccatggtaggcctcagcctctccaatatgttgtcaatgccgcctttttggctgccctttacagtgattatctcgatgctgctgatacacctggatggtatgtggacccaattcttctcaa

SEQ ID NO: 282287 - DNA, 330 bp, Glycine max
  unsure (1)..(330): unsure at all n locations
gggagaatatgggatcttatatttggcagaaccactggatgcatgtacagaattgacaaataaagttgaacaacttcccaatgcgagttcaccttttgctttggtggttagagggggatgtagctttgaggaaaaagtcagaagggcacaaaaggctggcttcaaagctgtaattgtctatgacaatgaagatggtggcatcttggttgcgatggcaggaaattctgctggtataaaaatacacgctgtatttgtatctaaagcttcaggtgaaatactaagcaaatatgctgggttgactaatgtggaaatanggctcatccacttttg

SEQ ID NO: 282288 - DNA, 328 bp, Glycine max
  unsure (1)..(328): unsure at all n locations
ctctatactataggtctcgcccaatacctactctccgctcccaagagcacgcnnccaccactattgcacttcttcctcgnnnnnnnnnnnnnnnnnnnnnnnngctaaacccttttttctatctcactaacacaacaatgggagacgagaagaagggcaagcctgctgcttccggcgtgtggtccaccatcaagcctttcgtcaatggtggagcctccggcatgctcgccacctgcgtcattcaacccatcgatatgatcaaggtgaggattcaacttgggcaaggatcagctgcgcagtcacttccaccatgcttaagaatnagggt

SEQ ID NO: 282289 - DNA, 325 bp, Glycine max
  unsure (1)..(325): unsure at all n locations
aaatgcttgaaaagaggagtgaaggaggtcgttaaaagtataaggagaggtcntaaaggattgtgtgtgattgctgggaacatatcaccgattgatgtcatcactcatgttcctattctttgtgaagagtctgacattccttatatttatgtcccatctaaagaagatcttgcaggcgcaggagcaacaaagaggcctacttgctgtgttctggtacagacaaagcctgcaaaggtgaaatagagcaagggaacaagagaaactaaagtcagattatgatcaagttgtagcggaagttactgagcttacaacttcactcttttga

SEQ ID NO: 282290 - DNA, 328 bp, Glycine max
  unsure (1)..(328): unsure at all n locations
cgttgagaaataaggggaaaaaatggtgtcgctgaaactgcagaagcggctggccgctaagcgtgctcanngtgtggcagaggaaaggtgtggcttgaccccaatgaagtcaacgaaatctccatgggccaattctcggcanaacatcaggnanttggttaaggatgggtttatcatcaggaagccaaccaagattcactcacgctcgcgtgctcgtaggatgaaggaggcaaagaagaagggccggcatctggttatggtaagagcaagggtacanggaggcgaggctcccaccaagatactttggatgagaaggatgcgtgtntca

SEQ ID NO: 282291 - DNA, 323 bp, Glycine max
  unsure (1)..(323): unsure at all n locations
gcaaaggaatacatgtagttactccanataagaaggcanattcaggaccacttgatcagttatatggctgtcactaacgtgtagttagctgcgtcagactcagcatagtattcagttaggctaaatttcaaagtgataggcggttattgaagtgcaagctaaagttcacnatacaagactatggagccaacaaaattaatgattcaatgcatctttcagttttaaacatttttctcagtcttntctctgtttctctctctaaacccaggttcactggatcnttgactagtggcacnatgttctaacagangattatagtntag

SEQ ID NO: 282292 - DNA, 330 bp, Glycine max
gagagagcaatggctggctcgtgggcacgccgttctctgattgttctagccatcatttccttcggatgtctatttgcgttttccattgctaaggaggaagccaccaagttagggacggtcatcggcattgatcttggaacaacctattcatgtgtcggtgtttacaagaatggccatgttgaaatcatagccaacgaccaaggtaaccgtatcaccccatcgtgggttgctttcaccgacagtgagagactcattggggaggctgccaagaatcaggcagctgtcaacccagaaaggaccatctttgatgtcagagacttatcggaagaa

SEQ ID NO: 282293 - DNA, 328 bp, Glycine max
  unsure (1)..(328): unsure at all n locations
tttgagtcttcttgatccttctnnntctccttgaactcanacatggcagangangtggttctgctagatttctgngccaagtccatttgggatgagggtcaggattgcacttgctgaaaagggtatcaaatatgagtacaaagaagaggacttgaggaacaagagtcctcttctcctccaaatgaacccggttcacaagaagattccggttctcatccacaatggcaaacccatttgtgatccctcatgctgttcagtacatgaggaggtttggnatgacagaaatcccttgntgccttctgacccttaccagagagctcagctagat

SEQ ID NO: 282294 - DNA, 327 bp, Glycine max
atttagctccatagctgcagcattagggtttttcatctgcttcaatggggaagggaacagggagttttggtaagagaaggaacaagactcacactctctgtgtgaggtgtggccgccgcagcttccatctccagaagagtcgttgcgccgcttgtgctttccccgccgcacgcactaggaaatataactggagcgtcaaggcaatccgcagaaagaccaccggaatggcaggatgaggtacttgcgtaacgtgcctcgccgattcaagagtggcttcagagaaggtaccgaagctgcacctaggaagaagggagcagctaccatgca

SEQ ID NO: 282295 - DNA, 327 bp, Glycine max
  unsure (1)..(327): unsure at all n locations
gcagaacagagagagcaaaaccctagagcatccatcacaagcagaggaagaagatggtgaagttcctgaagcctaacaaggcagtgatcgtcctgcagggccgctacgccgggcgcaaggcggtgatcgtgaggnccttcgacgagggaaccagggagcgcccctacggccactgcctcgtcgccggaataaagaagtacccaagcaaggtcatcaagaaggactccgcgaagaagaccgcgaagaaatctagggttaaggccttcgtgaagctcgtgaattaccagcactcatgcccacgcgctacagctcgacgtggatctaaag

SEQ ID NO: 282296 - DNA, 321 bp, Glycine max
  unsure (1)..(321): unsure at all n locations
catccactttcactgggaatcacaatcctgaaacaaaaacatcttagcattaacatactactagacaanatgaccaaccacattggaaagaggtttctcggaagaggcaagaagctctggtggtgaagtcatggaatgtcatgaagaagaattctggagagttgggtctcaagttttcttgaaaatatttgagattgctccatcagcttcagaaatgttctcattcttgagagatcaacgggtcctttggaggcaaatcccagctcnagccccatgccgtgtctgtcttgtatgactgtggatcagcagttcagctgcggg

SEQ ID NO: 282297 - DNA, 325 bp, Glycine max
aagaatcaaagaaaggggtggtggctgcttcgaaagcttaataatttgtttatttccagaacatcatagttttcgcagcagcaaactaacaaattactcatatcatataataagatggcccgttctctctcgcaagccaaacgtattggtgtccttgttgctcaatctatctccctaattcccgttcatcggcgaggttacgcagtgggcatccgatgtatcggtaagagttggattgggtaatattgggcgaagaatggaatcgtgggaggtgtagaagagaagcctgatacaagagatggttcaaaagcctactcaatgattg

SEQ ID NO: 282298 - DNA, 331 bp, Glycine max
aaaattagggtttgtagtgtagcaggaacaagcagcaatggcgccgaaggtaacacgcaaggttagcagaaaccccgaattgataaggggaattggaaagtactcgaggtcgcagatgtaccacaagaggggcatttgggctatcaaggccaaaaatggtggcgttttacctcgccacgaccctaaacccaaacctgaaacacccgctgaaaaaccacccaaattttaccctgctgatgatatcaagaagccccttgtcaacaagcacaaacccaaacccgctaagctcaggctagcattactccgggaacagtgttgattcttcttgctg

SEQ ID NO: 282299 - DNA, 363 bp, Glycine max
  unsure (1)..(363): unsure at all n locations
atcggcgatggcaacgacgtcggtggtgccggcgaaccggcgtcgcgcggcgaaccccgcggagnagatggacttcgagacgacggagggcgtgaaggccatcgcaagcttcgaggagatggggatcaaggacgatctgctccgcggaatctaccagtacggcttcgagaagccctccgccattcagcagcgggcngtcacgcccatcattcagggccgtgacgtcatcgctcaggcccaatccggaacggggaaaacgtccatgattgctctcaccgtttgccaggtcgtcgatacctccgtcagagaggttcangcattgatattgtcaccaacgaggantnggctcacagctgagaaatt

SEQ ID NO: 282300 - DNA, 363 bp, Glycine max
  unsure (1)..(363): unsure at all n locations
atgagcctactgcagctgccattgcatatggtcttgataagaaggccacgagtgttggtgagaagaatgtgttgatttttgaccttggtggtgggacatttgatgtgtctttactcaccattgaggagggtatctttgaggtgaaagccactgctggtgacacccatcttggaggtgaagattttgataacaggatggtgaaccactttgttcaagagttcaagagaaagaacaagaaggacattagtggaaaccccagagcacttagaaggntgaggactgcttgtgagagggccaagagaacactttcatcgactgctcagaccaccattgaaatgattctctatacgagggattgatttc

SEQ ID NO: 282301 - DNA, 359 bp, Glycine max
  unsure (1)..(359): unsure at all n locations
ccaaaccaaaaatgccagggtttcggtttcaacccactgacgttgagctgattgagtattttctgaagangaaggttcggggtaagaaattcccttccgaaataattgctgaacttgacttgtacaagtttnctccgtgggacctcccagatatgtctttgctcaagaatggggatttgaattggtacttcttttgccctcggggaaagaagtattcgactggtgggaggttgaatcgggccacggaggctgggtatggaagactactgggaaggatagagcantgaacacaataatagagttgtggggagataaaaacactggttttcacactggtanttacaaatnanatcgactga

SEQ ID NO: 282302 - DNA, 360 bp, Glycine max
  unsure (1)..(360): unsure at all n locations
cgactaagagttgctgcttcttccgccactcagcacttcgctccctctgtgcttcaccaaccatgggccgaaatcgaagctaccgttccagatccctnctcaaatcgacgtcaaacttttcaaccgctggagcttcgacgacgttgaggttactgatatgtctctggctgattacattggagtgtccccgtcaaagcatgctacatatgttcctcacactgctggtaggtactcagtgaagaggttcaggaaggcgcatgccccattgttgagagactcaccaatctctcatgatgcaggaaggaacaatggaaagaactcntgctgtcaggattatcagcatgcaatggaatatcactg

SEQ ID NO: 282303 - DNA, 362 bp, Glycine max
  unsure (1)..(362): unsure at all n locations
atggtatggtattgagcaagaatataccttgttgcagaaagatgtaaattngccacttgggtggccacttggtgggtttcctggaccacaggggcccatactactgtggaactggtgctgataaagcatatggccgtgatattgtagatgcacattacaaagcttgtatttatgctggcatcaatattagtggcatcaatggagaggttatgcctggtcagtgggaatttcgnnntggtcctctgttggtatatctgctggagatgaggtgtgggcagctcggtacatttggagaggatacagagatggccggagtaatgttcattgatcccaagcctattccgggagatggaaggagtgga

SEQ ID NO: 282304 - DNA, 362 bp, Glycine max
cttgggaactgcaacaatggtgccgcaacccattttgcatctaacccttttgtcattaataatctctctgaccactcttttccttggtcgatgccgccgatcccacatttggcttcacccctcttggattatctagtagctcaaacttgcaaatccaaaagccttacgacgttgcagtcaacgagcgctacagcttttcaaatggagtgcacagattttgggtatactccacggacaagcctcatatgcaaggcagcaatacgaagccacgaactgagattcgtatcgctgggatacgattatacatccggtgtgtggcaatttcaaggggttttttacgtgcctagtgggcacaagcgggg

SEQ ID NO: 282305 - DNA, 354 bp, Glycine max
  unsure (1)..(354): unsure at all n locations
gaagtgctgcagcatcatccatggctgctttaaaacagccaacaattagagntgttgctattattgctgaaggagtacccgagtcagacactaagcaattgattgcatatgcccgatcaaacaataaggttgttattggcccagccacagttggaggcattcaagcaggtgcttttaaaattggtgacacagctggaacaantgacaatataattcagtgcaagctctacaggcctggatctgttggatttgtttctaaatctggtgggatgtccaatgaactatacnncactattgnccgcgtaactgatgggatttatgaaggcattgctatggnggagatgtttccctggt

SEQ ID NO: 282306 - DNA, 356 bp, Glycine max
tcaggttgaaatgattgagcctgctgtgaaaggaacaactaatgtacttgaagctagccttgaagctaaagtgcaacgacttgtctttgtatcatctttagctgctatttccaatagccccaatttgcctaaagataaagtgattgatgagtcctattggtctgataaagattactgcaaaacaactcagaactggtactgtttttccaagacagaggcggaggagcaggccttggactttgccaaaagaactggccttgatgtggtaagcatttgcccttcccttgttctcgggccaattttacagtcaaccactgttaatgcaagtagcctggctctcctcaaacttttaaaag

SEQ ID NO: 282307 - DNA, 357 bp, Glycine max
agaagagatctgcctcctttttatcaaatctatctcttcttcaagttgaaaatggggctgtctttcaccaagttgttcagccgactgtttgccaagaaagagatgcgtatactgatggtgggtctcgatgctgcgggtaagaccaccattctgtacaagctcaagcttggagagattgtcaccaccattcccaccattgggtttaatgtggaaactgtggaatataagaacatcagcttcactgtctgggatgttggaggtcaggacaagatccgtcctttgtggagacattacttccaaaatacacaaggacttatttttgtggttgatagcaatgacagggacgagttgttgaag

SEQ ID NO: 282308 - DNA, 351 bp, Glycine max
  unsure (1)..(351): unsure at all n locations
gaccagctcaccgacgaccagatcgccgagttcaaggaggccttcagcctcttcgacaaggacggcgatggttgcattactaccaaggaacttgggactgttatgaggtcacttggtcaaaacccaactgaggcagaactgcaggatatgataaacgaggttgatgctgatggcaacggaaccatcgatttcccagagttcctcaacctgatggctcgcaagatgaaagacaccgactcagaggaggagcttaaggaggcttccgtgtgtttgacaaggatcagaatggttcatctctgcactgactccgccatgtcatgacaancttggggagagctgcggcgaggagtg

SEQ ID NO: 282309 - DNA, 358 bp, Glycine max
  unsure (1)..(358): unsure at all n locations
ttcaacctctcatcattaggcattcagcaagcaagaggaaaaaatgggcaaaatgggcaaaattatgcttgttttgggtagcctcattggattatgctgtttttcaatcaatacctatgccttctcaccttctggatggaccaatgcccatgccactttttacgggggtagtgatgcttcaggaactatggggggagctgtgggtatgggaatctgtatgcaactgggtatggaactagaactgcagctttaagcactgccttatttaatgatggagcttcctgtggtcagtgctacaaaattatatgtgattacaaagcagactctagatggtgcatcnaaggaagactgtaaccat

SEQ ID NO: 282310 - DNA, 364 bp, Glycine max
  unsure (1)..(364): unsure at all n locations
taaggtaagtgagtaatcagtggttgagaatggtggagaaggngaagggtagaaaggaggaggtggttacacgtgagtacaccattaacctccacaagcgcctccatggctgcacatttaagaagaaagctcctaaagctattaaggagataaggaaatttgcccaaaaggccatggggaccaatgatgtgagggtggatgtgaagttgaacaagtttgtctggagccagggaatcaggagtgttccaaggaggattagagtaagattgctcgcaagagaaatgatgatgaagatgccaaggaagagctgtactctcttgttaccgntgttgagatcctaagacgagctccaanggttaggcct

SEQ ID NO: 282311 - DNA, 340 bp, Glycine max
  unsure (1)..(340): unsure at all n locations
tatttctttttctcttctcactgcatcgcttcaggttcttctgaaaagatgtctcgcgtgtatgttggtaacttggattcacgagtcactgagagagatctcgaagacgaattccgcgttttcggagttattcggagtgtttgggttgcacgtagaccacctggtnatgcttttattgactttgatgaccgcagagacgcacaggatgctatccgtgaatggatggcaagaatggttggagggttgagctttctcacaactctagagtggagtngtggcgtggtggcgcctggtggtctgattgaatgttacagtgtgtgaacnngtcatttccntgatg

SEQ ID NO: 282312 - DNA, 349 bp, Glycine max
  unsure (1)..(349): unsure at all n locations
tctagatggccttggtcagcgttgtgccaagtgctacgaagctggtgcacgttttgccaaatggcgtgcagtgctgaagattggtcccaacgagccatctgagctgtctatccatgagaacgncctatggcttggctagatacgctgtcatatgccaggagaatggcctggttcccattgttgagcctgagatccttgttgatggacctcatgacattcacaagtgtgccgccgtcaccgagcgtgtccttgcagcatgctacaaggcttgaatgatcaccatgtccttcttgagggtacctatgaagccaaaccatggtcaccctggatcccaatctgtaaggttccc

SEQ ID NO: 282313 - DNA, 349 bp, Glycine max
  unsure (1)..(349): unsure at all n locations
tgaagaggtacatgatgtaccaacaaggttgctttgcaggtggcacggttcttcgttggccaaggatttggctgagaacaacaagggtgcacgtgtgcttgttgtctgctctgagatcactgcagtcacattccgtgggccaagtgacactcaccttgatagtcttgtgggccaagcattgtttggagatggagctgctgcagtcattgttggttctgacccaattccacaagttgagaagcctttgtatgagctgtttggactgcacaaacaattgctccagacagtgaaggtgctattgatggacaccttcgtgaantggactcacattcacctcctcaaggagttc

SEQ ID NO: 282314 - DNA, 346 bp, Glycine max
  unsure (1)..(346): unsure at all n locations
cacacaactactacaantacttccttacaatcaaaaccaacaacaactatggcaagttatcaaagcactacgatgatcagggtcgcaaggttgacgagtatggcaacgttgagaagcaaaccgacgaatacggcaaccctgttcatgctgctagtgtcacctatgtagccaccagaactgctgctggtggttacagtgatgacattaataagcaacatgataccaccaatgcctacggcgtagacactggtagacagcattctagtggtggctacgatggtgcactaataaacatcattggactatggtggtatatgtgcacaagnagatcatggactacggtgct

SEQ ID NO: 282315 - DNA, 364 bp, Glycine max
  unsure (1)..(364): unsure at all n locations
tagctcgcactctctctacgcacgcctcaacatcccttctctgntccattcattatgtctccgtcgttggatcttccccccaagggtgggcttcagttttgatctatgccgaagaaacgcaatgcttcaaaacaagggcctcaaagccccaacctttctcaaaactgggcaccactattgtcgntttagttttccaggatggtgtcattcttggggctgatactagggcaactgaaggacctatagtggctgataaaaactgtgagaaaattcattatatgggcacccaacatatattgctgtgggagcaggcacagctgctgatacagaggctgtaacagacatggttagctcacagctgcaa

SEQ ID NO: 282316 - DNA, 360 bp, Glycine max
  unsure (1)..(360): unsure at all n locations
ccgagtagcaacaatgtcgaagcgaggtcgcggaggatcggcaagggaacnaagttccgcatgtcactgggtctgnccggtggcggcgacggtgaactgcgccgacaacaccggcgcgaagaatctctacatcatatcagtgaaggggatcaagggaaggctgaaccggttgccgtcagcttgcgtgggtgacatggttatggccaccgtcaagaagggaaagctgatctccgtaaaaggtgctccccgccgtcatcgtccgtcagcgcaancgtggcgccgaaangacggtgtttacatgtacttcgaagataatgctngggtcatagtgaatcccaaggtgaatgaaagtcttctatc

SEQ ID NO: 282317 - DNA, 361 bp, Glycine max
  unsure (1)..(361): unsure at all n locations
taagcatctaggttcattttcagtgaaataagccaaaagtttcccatcatgcccttctctgcaagggctttggaagagaaaagagctcgtttgggtttagtggaatgtgtgaatcatgagtcctgcaaccttatcctgttctgcatgaaaagcctggtgattatgttgcacatatcaaattcactgtcttgctaatgcccaatggatcagatcgtgttacgtctcactcactccaggagttgcagcccaccaaaacaatagatgatcccganatcaaggcgtggctagcattgggcacaaagacaaagaagaaaggcggtggaaagaagaagaaagtaagaaggggcagaactgaaccatg

SEQ ID NO: 282318 - DNA, 347 bp, Glycine max
ccccatttatctgtgagttcttcaagggatgcactgaataaagttctgccatatatggactacgtttttggtaatgagactgaagcaagaacattttctaaagctcaaggctgggagactgataatgttgaggaaatagctttgaagatttctcagttgccaaaggcatcggaaacacataaaaggattacggttatcacccaaggtgcagatcctgtttgcgttgccgaggatggaaaagtgaaaatttaccccgtgataccgttacctaaagagaattagttgacacaatggagcaggagatgctttgttggaggattctttcacaatggttaagcataagccat

SEQ ID NO: 282319 - DNA, 353 bp, Glycine max
  unsure (1)..(353): unsure at all n locations
aggcgcggagtagagcagcagagaagagagaaaacggcactgcagccgtagaaggaaaaccgaccatggtgcacgtctccttttacaggaactatggtaagacgtttaagangccccgccgtccgtacgagaaggagcgtctagacgcggagtgaagctggtgggggagtacgggctgcggtgcaagagggagctgtggagggtgcagtacgcgctcagccgcatccgcaacaacgcgcggaatctccttaccctcgacgagaagaacccgcgccggatcttcgagggcgaggctcttctccgcagaatgttccgtacggactcctcgacgagacttcagaacaagcttcgat

SEQ ID NO: 282320 - DNA, 350 bp, Glycine max
ataggtcaaaatgatcttacagctggattttctggtaacatgaccctactgcaagtaatgcttcaatacctgatataatcaaaagtttcacatcaaatataaagaacatatacaatatgggggccagatcgttttggatacacaacacaggacccattggttgcctccctttaattttggccaattttccatctgctgaaagggatagctatgattgtgcaaaggcatataatgaggtggctcagtcttttaaccataatttaaaggaagcctagctcagcttcgtacgaagcttccatggctgcaatacatacgtagatatctactctgcgaagtacttgcttcaaaaa

SEQ ID NO: 282321 - DNA, 351 bp, Glycine max
cttcgccgtttcagctcaagagccaccagcaggtaagatatggttaagcataacaacgttatccccaatgggcacttcaggaaacactggcaaaactatgtgaagacttggtttaatcaaccagcacggaagaccagaaggcgtttagctcggcagaagaaggctgtcaagattttcccaaggcctactgctggacctctcaggccaattgttcatggccagactctgaaatacaacatgaaagtcagatctgggagaggatttctctcgaagattgaagctgtgggaatcccaagaaattggtccaactattgggattctgttgatcaccggagaagatcgttctttgga

SEQ ID NO: 282322 - DNA, 350 bp, Glycine max
  unsure (1)..(350): unsure at all n locations
gcgtccttcagagcattctggaacagtccagttggtcccaaaacaactcacttttggggacctattgccaactggggattgtagcagctggattggctgacctgaacaaacctccagaaatgatctctggcaacatgacaggagcaatgtgngtctattcagcattgntcatgagatttgcatggatggttcagccacgcaactatctactttttgcttgccatgcctcaaatgagactgttcaactctatcattttcccgatgggcaaaggcacagggcttctgtcggaaaagaaggaggaagctcatcccagtgattgatgatgctaacacatcttgagtggagcgat

SEQ ID NO: 282323 - DNA, 353 bp, Glycine max
gaagagatctgcctcctttttatcaaatctatctcttcttcaagttgaaaatggggctgtctttcaccaagttgttcagccgactgtttgccaagaaagagatgcgtatactgatggtgggtctcgatgctgcgggtaagaccaccattctgtacaagctcaagcttggagagattgtcaccaccattcccaccattgggtttaatgtggaaactgtggaatataagaacatcagcttcactgtctgggatgttggaggtcaggacaagatccgtccttgtgggagacatacttccaaaatacacaaggacttattttgtggttgatagcaatgacagggacgagttgttgga

SEQ ID NO: 282324 - DNA, 353 bp, Glycine max
  unsure (1)..(353): unsure at all n locations
ttgcagaaaganaagaccatcaaagtttcacttcagccttatccggtttagggttcggtttttgacccaacctttgacgtatcgaaaccttaagtttcggatcaggtctgagcaatctggttggtagaaccttggtcttagagagtcaagttttatgtctgaattagacgatcaaattcctactgccttcgatcctttgctgatgcaaatgctgatgactcgggtgctgggtcaaaggagtatgtgcatatcgcgtacagcagcgaaatggaaggaaaagcctgacaaccgntcagggattgaaaaaagaattcagctataacaagatacttaaagatgttaagaaagagntc

SEQ ID NO: 282325 - DNA, 359 bp, Glycine max
  unsure (1)..(359): unsure at all n locations
angcaganaaacctgaaggatggttggatgacgagccagangaaattgatgacccanangcgacaaaacccgaagactgggatgatgaggangatggtgaatgggaagccccaaagattgaaaacccgaagtgtgaggcagcccctggttgtggtgaatggaagaggccaatgaagaggaatccagcttataagggaaagtggagtgctccttacatcgataacngattacaagggcatatggaagcctcgcgagattccaaaccctgaatactttgaactcgagaaacctgattttgagcccattgctgctcttgcattgagatttggacaatgcaggatggcatctattgacaatat

SEQ ID NO: 282326 - DNA, 336 bp, Glycine max
  unsure (1)..(336): unsure at all n locations
ggttttagcgcantttcttctagatttaaggaagatgggtaaggnaaaggttcacatcagtatnntggtcattggccatgtcgactctgggaaatccactaccactggtcacctgatttacaagcttggaggcattgacaagcgtgttattgagaggtttgagaaggaagctgctgagatgaacaagaggtcttcaagtatgcctgggtgctggacaaacttaaggctgagcgtgaaagangaatcaccattgatatgcttgtggaatttgaancacaaatatattgcacagttattgatgcgcctggacaagggattcattagatagatactggg

SEQ ID NO: 282327 - DNA, 342 bp, Glycine max
ctttgaatacaaaaccaagttaatgttgcaatcgcataataataaccatccaaagtttattgagagaaatttgcaagtttgaaaagaaacatggcatctcatcaacaaaacaagcaagagcttgatgaaagggcaaggcaaggagagactgttgttccgggtggcactggtggcaagagccttgaggctcagcaacatcttgctgaaggaaggagcaggggagggaaaacaaggaaggagcagctggggacagaaggtaccatgaaatgggacgcaaagtgggttgagcctatggacaatcaggagaagacgtgctcagaggaagccatgcatcgtgatcca

SEQ ID NO: 282328 - DNA, 351 bp, Glycine max
  unsure (1)..(351): unsure at all n locations
aatatctctttcatagaacggagaaagacacgatgcaggaagcgacgaaggtgataataatcngtgccggaacttctggtatcgccaccgccggttgcttaacgaagcaatcaataccttacataatgctcgagagagaagactgtttcgcttcgctgtggcagaaatacacctacgatcgtctccaccttcatttgaggaagcaagtttgcgagttaccgcacttaccgtttcccaagtcttaccctcactacgtgcctcggaagcagttcatagactacttgggaaactacgttaaccactttgagatcaagcctctgtaccagcgtgcagtggagttggtggagtaga

SEQ ID NO: 282329 - DNA, 349 bp, Glycine max
  unsure (1)..(349): unsure at all n locations
gcttctttgaagtgagttgatcatttcatcagagcgaggcttccatgttcaccacagccatgccagaatccaatgattccgtttccgttgacatggagaagatctacctcggtggaaaggagcatcatattcgaactggctgtggtactgtgtctgtcatagtctatggcgatcctgacaagccagctctgatcacttatccagatttggctctaaactatatgtcatgcttccaaggactatttttctgtccagaagcagcttctttactgcttcacaactttgcatatatcatatcagtcctcctggacatgagagtcttgcagttgnnagcantgcaattgtgtca

SEQ ID NO: 282330 - DNA, 353 bp, Glycine max
tcactcctccgatattcttttctgctttaatcttcgctctgttttcgggggtcagatcttaatgccgaaggttccgtattctgtttgaattttgttatctattgggagtggagtagtatttgagatcgagcgtaaaatatataaaaataataaaagaagcaaaggcgatgtttttgtttgattggttttatgggattctggcatcgcttgggttgtggcagaaggaggccaagatcttattcttaggtctcgataatgccggaaagaccaccttgcttcacatgctcaaagacgagagactagttcagcatcagcctacacagtatccaacatcagaggagttgagtatggga

SEQ ID NO: 282331 - DNA, 340 bp, Glycine max
  unsure (1)..(340): unsure at all n locations
antcgctgcaangtagttggctgggattgctgttaaggctgttcttgctgttgctgatctggcgaggaangatgttaatttggatctgattaaagtggaaggganagttgggggtaaaatggaggataccgagttgatctatggaattgttgtggacaaggatatgagtcatcctcaaatgcctaagcaaattgaggatgctaaaattgctatcctcacttgccccttgagcctcccaagccaaagaccaagcataaggttgatattgatacagtggagagttcagacgtgaggtgcaggaccagagtatttgtgcatggtcagaatgcaaggagtggtg

SEQ ID NO: 282332 - DNA, 362 bp, Glycine max
  unsure (1)..(362): unsure at all n locations
atgctctggagttgttggtgtatttaactgccaaggtgctggatggtgcaagatagagaagaaaacccgcatcccatgatacattctcctggtacactcaccgcctctgtctgcgcctctgatgttgactcatcacacaagtagcaggtgctgaatggcttggagatacaattgtttatgctacagatcaggtgaggtgattcggctaccaaaaggggtttcaattccagtgacactaaaagttctggagtttgagcttttccacttctgtccaatccaagaaatagctccaagtatatcattgcagcaatanggctactggatatgttcaacactggaggagcagtggagcaggttgagat

SEQ ID NO: 282333 - DNA, 348 bp, Glycine max
caaggctggcatggagaagaccaaggccactgtccaagagaaggcagaaagaatgacagcacgtgatccggtgcaaaaggagttggcaacccaaaagaaagaggcaaagatgaaccaggcggagtggacaagcaggcggcgcgtcagcataacacggcggccaaacagtccgccaccacggctgggcacatgggacatggccaccacaccaccggaaccgggactggaaccgccacgtattccaccaccggggaatatggtcagcccatgggggcccaccagacgtcggcaatgcctggccatggaaccgggcagcccagggccatgtcaccgaaggagtggtgggtc

SEQ ID NO: 282334 - DNA, 350 bp, Glycine max
taagcctaaaaattgggccaaaaagatccaggaggaatggaaaattttagaggaaaatctgccagagacaatctttgtgagagttagtgaatcaaggatggagcttctaagggctgttataattggacctcaaggcaccccataccatgatggtcttttctttttcgattgcctctttccttctacctaccctgcaggtccaccgaaagttcactaccattcaggtggcctaaggctaaatccaaatttatataattgtggaaaagtctgcctagtctcttgggcactggcatggtagtaatagtgaaaatggataccagaaaaatcaaccagctacaagtgttggttcg

SEQ ID NO: 282335 - DNA, 361 bp, Glycine max
  unsure (1)..(361): unsure at all n locations
gttaggttctgcacgctctgcttccagcgagtgttctttcttcgtttcaacaccttaatttgcatnacgctgctttcttnngacntgaggaatgggcacaagaaaccttttctattcacatctgaatctgtaaacgagggttcaccccgacaagctgtgcgaccagatctctgatgcagtgctcgatgcgtgccttgaacaggaccctgacagcaaggttgcctgtgagacatgcaccaagaccaacatggtcatggtctttgggagagatcacaaccaaggccaacgtagactatgagaagattgtccgtgacacatgccgcgaaattggattcatctctgatgatgttggtcttgatgc

SEQ ID NO: 282336 - DNA, 203 bp, Glycine max
caccgccccaatctctgcagcgccttcgatctagaaaacatgactaagagaacaaagaaggctggcattgttggaaaatacggtacccgttatggtgccagtctgcgaaagcagattaagaagatggaagttagtcagcacagcaaatttttctgtgaattttgtgggaagtatgctgtgaagaggaaagctgtaggaatatg

SEQ ID NO: 282337 - DNA, 340 bp, Glycine max
  unsure (1)..(340): unsure at all n locations
cacagccaagtcgtaaaagggtttcaagggatggaaaacatgcagagcttctggcaattgggtgatgaactccgtgggcactcaaaagcatcggaggatcacaagtggttaatggttgcctcgaaactggccgaacagacaagattgaagggggagcgtgtgaacaaccttgatctttcaaagggacccattgaaacaaggtcaagggataaatttgggttccaggaagagaacaaatttgattctcttaacttgagcatgttgaacctggactctaaattactgagatgtgagcaaaagctcanttngaanggtgtttanggtagantncagtgtacca

SEQ ID NO: 282338 - DNA, 329 bp, Glycine max
  unsure (1)..(329): unsure at all n locations
aaggtgccatagatctgcagagtggaatacttcatgctgaagagaaggattataaaactgcttatagttatttctttgaagcttttgaatcattcaatgctcttgatgaccccaaggctgtttttagcctgaagtatatgttgctgtgtaagatcatggtgaatcaagctgatgacgtaggaggaattatttcttctaaagcaggcctgcaatatcttggccctgacttggatgctatgaaagctgttgctgatgcacattctaagcggncctaattgtttgaattgcttgagggctacaggcacantggagaagcccattgtacnngc

SEQ ID NO: 282339 - DNA, 336 bp, Glycine max
  unsure (1)..(336): unsure at all n locations
cgacgttgtatagcagtccttcttcttctttctgtgttgacggtggcgttgatctgattggaattcaggatcaatggcaggggcagcctctgctctgttcctcctcgacatcaaaggccgcgtcctcatctggcgcgactaccgcggcgacgtctccgccctcgacgccgaacgcttcttcaccaaactcatcgaaaaacaggccgatccgcaagctcaagatccggttgtgcacgacaacggcgtgacctacatgttcatccagcacagcaacntntacctcatgatagccaccagacataatgnnatgcggcnagccccttttttnctgaaagg

SEQ ID NO: 282340 - DNA, 333 bp, Glycine max
  unsure (1)..(333): unsure at all n locations
ctcttctttttctctaagncctaaggggtgccctgagatcactttgagcaatggtgaaggctgtggcagttcttggcagcagcgagggtgtcactggaactattttcttcactcaggagggaaatggtccaaccaccgtaactggatctcttgctggtcttaagcctggtctccatggcttccatgtccatgccttgggggacactaccaatggttgcctgtcaactggagcgcatttcaatcctaataacaacgagcacgntgccctgaggacgagatcgncagctggtgatcttgggatttnaatgncggtnangntgnaccgtaacctcc

SEQ ID NO: 282341 - DNA, 343 bp, Glycine max
  unsure (1)..(343): unsure at all n locations
aaaaaaaaaaagttgttcgagatggcacgtacgaagcaaactgctcgtaagtccacaggaggaaaggcacctaggaagcagctcgcaaccaaggctgcacgtaagtctgcaccaactactggtggtgtgaagaagccacatcgttatcgtcctggtaccgttgctcttcgtgagattaggaaataccagaagagtaccgagcttttgatcaggaagctccccttccagaggctggttcgtgaaattgctcaggacttcaagactgatctgcgtttccagagccatgctgtgcttgcattgcaaaangctgctgaggcataccttgttggactctttgaggaaa

SEQ ID NO: 282342 - DNA, 200 bp, Glycine max
catcaccaggctcttccttgccttcttaatctgttgaccaataattataaaaaaagcatcaagaaggaagcttgttggaccatatccaatatcacagctggtaataaacagcagattcaggctgtgattgaggctaatctaattgctcctttggtcatcctgcttcaaaatgctgagtttgatatcaagaaagaagctgc

SEQ ID NO: 282343 - DNA, 339 bp, Glycine max
aaagaaaggaaataattgatctttgaaaatgcagggaggaaagaaagctggagagtccatcaaggaaacagctgcaaacattggtgcttctgccaaggctggcatggagaaaaccaaggccactgtccaggagaaggcagaaagaatgacggcacgtgatccgatgcaaaaggagttggcaacccagaagaaagaggcaaagatgagccaggcagagctggacaagcaggcggcgcgtcacataaacacggcggcgaacaggctgccacggcagggcacatgggacaacccatggggacccatcagacgtcagctatgcccggtcatggaaccggacac

SEQ ID NO: 282344 - DNA, 336 bp, Glycine max
gaaagaaggtgactgctgtgcacaaagcaaacattatgaaacttgcagatggtttattcttggaatcttgtcgagaggttgccacaaggtatcctggaatcaagtacaatgaaattattgtagacaactgctgcatgcagcttgtttcaaaaccggagcagtttgatgtcatggtaacccccaatctttatggaaatcttgttgcaaatacagcggcaggtattgctggaggcactggagtcatgccgggaggtaatgttggggctgatcacgctgtgtttgaacaaggtgcttcagcaggaaatgttggcaatgataaagtagtagaacaacaga

SEQ ID NO: 282345 - DNA, 308 bp, Glycine max
  unsure (1)..(308): unsure at all n locations
gttgcaatcgcataataataaccatccaaagtttattgagagaaatttgcaagtttgaaaagaaacatggcatctcatcaacaaaacaagcaagagcttgatgaaagggcaaggcaaggagagactgttgttccgggtggcactggtggcaagagccttgaggctcagcaacatcttgctgaaggaaggagcaggggagggaaaacaagaaggagcagctggggcagaaggtaccatgaatggagcaaagtgggttgacactatggcantcagagagacgtctcagagagcatgcngtgatcagtcag

SEQ ID NO: 282346 - DNA, 335 bp, Glycine max
caaagaatcaaagaaaggggtggtggctgcttcgaaagcttaataatttgtttatttccagaacatcatagttttcgcagcagcaaactaacaaattactcatatcatataataagatggcccgttctctctcgcaagccaaacgtattggtgtccttgttgctcaatctatctccctaattcccgttcatcggcgaggttacgcagtggcatccgatgtatcggtaagagttggattgggtaatattgggcgaaggaatggaatcgtgggaggtgtagaagagaagcctgatacaagagatggttcaaaagcctactcaactgattgggcccca

SEQ ID NO: 282347 - DNA, 338 bp, Glycine max
gggactaattggtatataccatgattggtgtgaatcatttggcacttatccaagaacatatgaccttttgcatgctgatcatttgttctcacggctcaaaaacaggtgcaagcagcctgtgaccattgttgtcgagatggaccgtatattacggccaggaggttggataattatacgtgacaaagttgaaattctaaatccgttggaggaaatattgaaaagtatgcagtgggagattagaatgacttttgctcaagacaaggagggtatctgtgtgcacggaaaactatgtggaggcctgagtctctattatatgcaattttctcttgtataacatc

SEQ ID NO: 282348 - DNA, 329 bp, Glycine max
  unsure (1)..(329): unsure at all n locations
ccatgatatggttggcggtgcttactatgttgctcctgaggtattgcgtcgtagttatggaaaggaaatagatatttggagtgcaggcatcatattgtatattcttctgagtggtgtaccacctttttgggctgaaactgaaaagggaatatttaatgccatattggaaggtgaaattgattttgtaagtgaaccatggccatccatatcagacagtgctaaagacctagtcaggaagatgctgacacaggatccaaacaaggggnttanttcttctnaagccttgaacnccatggtganaaaggtggagatgctctganacccatcgt

SEQ ID NO: 282349 - DNA, 332 bp, Glycine max
agcatttcgagagcgtggtttatgtaacaggaatgggacctttttttacaaggatcatctacacaaaagcaatacccctatcttagctattgctggagaccaggatctgatttgcccacctgaagctgtggaagaaaccgttaagctaattcctgagcacctggttacctataaagtttttggagaacctggaggctcacattatgctcattatgatttggttggaggaaggctggcggtggagcaggtgtatccatgtataattgaatttcttagctgtcacgacaagtgatgtacaccgtcaattttcatctaatacatccttcttggat

SEQ ID NO: 282350 - DNA, 328 bp, Glycine max
  unsure (1)..(328): unsure at all n locations
ctgctgcaaaacctagggttgagccttttgctcaggttttcagngcttctttcttacaatggttctacagaacgatattgatttgctgaatcctccagctgagttggagaagagaaagcacaagctcaagcgtcttgtgcagtcaccaaactctttcttcatggatgttaagtgccagggctgcttcaacataacaactgtgtttagccactctcagactgttgtggtttgcggaaactgccagactgtgttgtgccaaccaacaggcggangncaaggtaacccgggggtnctttttaggaaagaggggttttgnntgttttccanc

SEQ ID NO: 282351 - DNA, 331 bp, Glycine max
gcaaaggatgctactgaatgtttggtacaagaaggagcacagtttgctactaggttgactggtattaaagagaatactaaatttcaaaagaaattacagaacaatgagcagatgtcaggtctgaagcatctagtacatggagcaaagcagcatcacaatgtgaaaaatgtatatgtatggcatgcactagctggttattggggtggagtgaagccagcagcaaccggcatggaacattatgacactgccttggcatatccagtgcagtcaccaggcgtgctaggaaaccaaccagacattgtcatggacagcttggctgtacatggccttg

SEQ ID NO: 282352 - DNA, 333 bp, Glycine max
  unsure (1)..(333): unsure at all n locations
attctttcccagagctatggaatttggagaaaaggtttggctccattatagccggggcattgcaatctaagttattcgccaaaagggaaaaaaactggagaaaataggactgcactaagaaaaaacaaacacaagcgtggttcgttttctttccagggtgggatgcagacactgacagatacattgtgcaaagagcttgggcaaagacgaccttaaattaaatgaaaaggttttgacattagcttatggtcatgatggaagttcctcttcacaaaactggtctattactagtgcttctaaccaaggtacccagnatgttgatgcntaatcatg

SEQ ID NO: 282353 - DNA, 339 bp, Glycine max
  unsure (1)..(339): unsure at all n locations
aacactagggtttacagagaagcgaagaggcgcagcgtaagcagtaactcgtggaattgctagcaatggcgaggatcaaggtttacgagctgaggcagaagacgaaggctgatctgttgaatcagctgaaggacctcaaggccgagcttgccttgcttcgtgttgctaaggtcaccggcggtgcacctaacaagctctctaagatcaaggtggtgaggttgaacattgcccaggtttgacggtgatttctcagaagcagaaggccgcnttgagggatgcctacaagaacaagaagtantgcctctcgatctccgccctannaaaccagggcnttcgagg

SEQ ID NO: 282354 - DNA, 330 bp, Glycine max
gctggttattggggtggagtgaagccagcagcaaccggcatggaacattatgacactgccttggcatatccagtgcagtcaccagggcgtgctaggaaaccaaccagacattgtcatggacagcttggctgtacatggccttggcctagtgcacccaaagaaggttttcaatttctacaacgagctccatgcttacttagcttcttgtggagtagatggagtggaggttgatgtgcagaacattattgagacccttggtgcgggacatggtggccgagtgtcattactcgcagctatcatcacgcgttgaggcttccattgctacaattt

SEQ ID NO: 282355 - DNA, 326 bp, Glycine max
  unsure (1)..(326): unsure at all n locations
ccatgatatggttggcggtgcttactatgttgctcctgaggtattgcgtcgtagttatggaaaggaaatagatatttggagtgcaggcatcatattgtatattcttctgagtggtgtaccacctttttgggctgaaactgaaaagggaatatttaatgccatattggaaggtgaaattgattttgtaagtgaaccatggccatccatatcagacagtgctaaagacctagtcaggaagatgctgacacaggntccaaacaggcggattacttcttctcagtcccttgancncccnggntgagananggtggcccccncnctnatnc

SEQ ID NO: 282356 - DNA, 325 bp, Glycine max
acagacccgtgagcatgctcttcttgctttcaccctaggtgtgaagcagatgatctgttgctgtaacaagatggatgccactacccccaagtactctaaggctaggtatgatgaaatcgtgaaggaagtctcttcttacttgaagaaggttggttacaacccagacaagattccctttgttcccatctctggttttgagggtgacaacatgattgagaggtccaccaaccttgactggtacaagggaccaactctcttgaggctcttgaccaaatcaatgagcccaagaggccctccgacaagcctctaaggttccattgcagga

SEQ ID NO: 282357 - DNA, 327 bp, Glycine max
ggaagccagtgtttaccaaggttgatcagcttcgcccggggaccagcgggcacactttaactgtgaaggtggtcaatgctaagatggtgatgcagaaaggtcgttctgatggtcctcaatcccgtcagatgcgaattgctgaatgtttggttggcgatgagactggaatgatcatattcactgccagaaatgatcaagtggatatgatgaaagaggctgctactgtgatcctgcgcaatgccaaaattgacatgttcaaaggatcatgaggcttgctgtggacaagtggggccgtgtggaagtcacagacctgctatttactgtgag

SEQ ID NO: 282358 - DNA, 321 bp, Glycine max
  unsure (1)..(321): unsure at all n locations
gtcgggccttgggtggacatttgacagtgcagaaactaacaagttaataaatgcattagggaactgcttgttgaccttcaggcagtataagcagagctgggaagggctccaacggcgagggatgacgcaggatcttagttgggacaatgctgctcagcagtatgaggaggttcttgttgctgctaagtaccaatggtaaattcttgggcttctactctacctaagcagactgatcatatggagtgctctcatgctgagtgatatcaaggtctgtgcagggaaaggattggtcaattgttaaaacctncatgttgcnggccg

SEQ ID NO: 282359 - DNA, 325 bp, Glycine max
agagcacacacaaacccgtccctcacactctccaaaccctagcggcactacacactagttctatcgctatctccccaagatgtcgagcgccgatcccgagcacagagaagaggaggaggcacccgccgttggcgacgacgaggacaccggagctcacgtcgctccaatcgtcaagctcgaggaggttgctgtcaccaccggcgaggaggacgaagatgcaatcctggatctcaaatcgaagctttaccggttcgacaaggacgggaaccagtggaaggagcgtggcgccggcactgtgaagttcctgaagcataaggttccggca

SEQ ID NO: 282360 - DNA, 321 bp, Glycine max
  unsure (1)..(321): unsure at all n locations
gtgtaagcaagcaaaaccctagcggcgcctgctttctttgttcgtgttttgcatcaggatggagtctcaggtgaagcacgcacttgttgtcaaagttatgggtcgtactggatccagaggacaagtgacccaggttagagtgaagtttttggatgatcagaaccgtcacatcatgaggaatgtgaaaggacctgtgagagaaggagacattctcaccctactcgagtctgaaagggaagcaagaagattgcgctagatggtcccttttttnggcttgcntccaattcgaacaaaagcaatatttnctggatatggggggag

SEQ ID NO: 282361 - DNA, 323 bp, Glycine max
gccatttgggagttaggttctgcacgctctgcttccagcgagtgttctttcttcgtttcaacaccttaatttgcacacgctgcttcttcagcttgagaaatggcacaagaaacctttctattcacatctgaatctgtaaacgagggtcaccccgacaagctgtgcgaccagatctctgatgcagtgctcgatgcgtgccttgaacaggaccctgacagcaaggttgcctgtgagacatgcaccaagaccaacatggtcatggtctttggagagtcacaaccaaggccacgtagattatgagaagttgtccgtgacacatgccg

SEQ ID NO: 282362 - DNA, 325 bp, Glycine max
  unsure (1)..(325): unsure at all n locations
gtgcagaagagcgtcgcagtcgcaaccctaatcagaagaagcgcanttcaagcgagtgacagccaccagccatgggtcgtatgcacagccgcggtaagggtatatcctcttctgctttgccctacaaaaggacacctcctagctggctcaagatctcttcgcaagatgtcgaagaaaatatctgcaagtttgcgaagaaaggtttgaccccgtctcagattggtgtcattctcagagattctcacggtattgctcaggtcaatagcgtcatggcagcaaatccttcgcatcctcaaagctcangganttgcgcctgaaaattcca

SEQ ID NO: 282363 - DNA, 323 bp, Glycine max
  unsure (1)..(323): unsure at all n locations
gggcgaggttacgcagtgggcatccgatgtatcggtaagagttggattgggtaatattggggcgaaggaatggaatcgtgggaggtgtagaagagaagcctgatacaagagatggttcaaaagcctactcaactgattgggccccagacccagtaacaggttactataggcccattaaccacacccctgaaattgacccggtggagcttcggcataggttgctccgatcacctccatagagcctagaggagttgctggacacccatgacatgcccaanttttacttaggattggttggttggttggttgggaagggaaccttt

SEQ ID NO: 282364 - DNA, 328 bp, Glycine max
ggcagaaggagcaaaagcaatggcgccgaagaagccgagaaccacgacaaggaaccctgatttggttagggggattggcaagtattcgaggtcgcagatgtaccacaagaggggcatctgggccatcaaggccaaaaacggtggctctttgccccgccacgatcccaagcccaagcccgaggccccggcccagaagccgcccaagttctaccccgcggacgatgttaagaagcccctcgtcaacaagcacaagcccaaacccgcgaaactcagggctagcattactccagggatgtgttgatcctgcttgctgggaggttcaagggaa

SEQ ID NO: 282365 - DNA, 322 bp, Glycine max
  unsure (1)..(322): unsure at all n locations
gttcggtgaagtgagtagtgagtgctgaatcgaatcgaatcgattctccgaacatggcggcgagcgatcgcacagtgttgcaattcnnnnnnnnnnnnnnnnnnnnnnngcagatcttgtccgcgaaggtccaccctctggtcatcttcaacatctgcgattgctatgttcgacgccctgaccaagccgaccgcgtcatcggaaccctactcggctccgtccttcccgacggaaccgtcgatatccgaaattcctatgctgttcctcacaacgagtctatngaacaggttgcattggatatagagtaccaccacaatatgtt

SEQ ID NO: 282366 - DNA, 320 bp, Glycine max
atctgaagctaagtttcgttgccactgaggaatgaaatggccaatggtaacaacattagtcatttcttcaagctcttgcttttccttctaactttccactcttgtctcgctgagattttcttccaagagagattcgaagatggatggaagagccgttgggtgctatccgattggaaaaggagcgagggaaaagcgggtaccttcaagcacacagcagggaaatggtctggggatcctgatgacaaaggtcttcagacatataatgacgccaagcatttcgccatatctgcaaagataccggagcttagtaacaaggacag

SEQ ID NO: 282367 - DNA, 323 bp, Glycine max
  unsure (1)..(323): unsure at all n locations
gttagaagcaacaagaagcagcagaaatccaggaagaagaagcctgaaaagaagaatggaaagaagggtcaaaagggaaattcatctcgagggggcagcaacaaagataagcaggttcgcaagctaggtgggacttctggtttgtgctacaagtcaatggattcttgtgataaagtgcttggagcttctactgaattagatgctcttgaagttcgaagccaggttccatactgtggaactagcttcctgaaaaaatcagttactgaagtgcactactcggttgcagaagcctatgagtgaaatctctgaatgtcttncctatt

SEQ ID NO: 282368 - DNA, 186 bp, Glycine max
gctaaggcgtgttcaacaatcggcggcgaaaatgccttcccgagaccttcaggatcaagaagaaactcgccaagaagatgaggcagaacaggcccatcccttactggatccgcatgagaaccgacaataccatcaggtacaatgctaagcgcaggcatggcgccgcaccaagcttggattttaagg

SEQ ID NO: 282369 - DNA, 371 bp, Glycine max
aacaggtcggcggcgagggcctatcggttaacctggctggaatgtcgaagaaccagctctacgatatcatgtctcagatgaagagtttgatcgaacagaaccagcaacaggccaagcagatcctaatccaaaaccccatgttaaccaaagcgcttttccaggcacaaattatgcttggaatggtgcaagcacctcaaacggttccaaaagttcagccaatggttccgcagaacaatctgcagtcagtacaaccaacacaaaaaccagatattcagcctgctccattattgcctgggcttggtggtgcacaggatcaagcaggtgtatctcaaacccagattcctctgaggaaacaccagaaccaacttcag

SEQ ID NO: 282370 - DNA, 367 bp, Glycine max
  unsure (1)..(367): unsure at all n locations
cccttgctgattacaatattcagaaggagtctaccttacacttggttcttcgtttaagaggtggcatgcagattttcgtcaagactttgacgggaaagaccatcaccttggaggtggagagttcagataccatagacaatgtgaaagccaagattcaagataaggagggtatccccccagaccagcagaggcttatctttgctggtaaacagcttgaagatggacgaacccttgcagattataacatccagaaggaatctaccctgcacttggttttgaggcttcgtggtggcatgcaaatctttgttaagactttgaccggaaaaacaataactttagaagttganagttctgataccatcgataa

SEQ ID NO: 282371 - DNA, 297 bp, Glycine max
ccgagctaaggttgggaagtaccatctgttggtttgtggaacaacacccttgtatgataagaggttcacgaggaattgaagaagccttattgaaacacttgggagtgaagcgcaatgaagtaacaccagatggtttgttttctgttggagaaatggaatgcatgggatgctgtgtgaatgctcctatgattacagtggccgatatcaaatggatcggagggatatacttataattactttgaagatataaccccagagaagtagttgagatagtagaaactgagaagggtgagagcc

SEQ ID NO: 282372 - DNA, 368 bp, Glycine max
cgcaattatcatgggcaaggtcaagatcggaatcaacggatttggaagaattggccgtttggtagccagagtggctctgcagagagacgatgttgaactcgttgccgttaacgaccctttcatcaccaccgattacatgacatacatgtttaaatacgacagtgttcatggacactggaagcatcacgatgtcaccgttaaggacgagaagacccttctcttcggtgacaagccagtcactatttttggacacagaaaccctgaagagatcccatgggggtcaactggagctgacatcattgttgagtccaccggagttttcaccgataaggacaaggccgccgcacatttgaagggtggtgcaaaga

SEQ ID NO: 282373 - DNA, 364 bp, Glycine max
ctctttcgtcagtttcgggggaagagatccagcagcaatggtgtacgtcaaggctcagaaatcaaaagcctacttcaagagatatcaagtcaagttcaagagaagaagagagggaaaaaccgattaccgtgccaggattcggttgattaatcaggacaagaacaaatataacactccgaaataccgatttgtggttcgctttagcaacaaggacattgttgcacaaataatatctgctagcattgccggcgatttagttcttgctacagcatattcacatgagctgccacgatatggtcttgaagtaggacttacaaattatgcagcagcttattgcactggtctcctgttggccgaagagtcc

SEQ ID NO: 282374 - DNA, 367 bp, Glycine max
cgtttcgccaccacgcgccccgcgagtagcgtgatttcgagattggaagatttagcgaaggcggtgaagttcgacgtgaaaaagagcgagactaaggtgaggttgcagggtcaagaaaatgggcgaaaaggtaaactcgctattgctgcggatttgtacgccgtgacgccgtcgtttttggtcgtggaggttaagaaagacaacggtgacaccttggagtataaccagttctgcagcaaggagcttcggccagcgctcaaggacatcgtgtggaggacttctcctgcagagaatcctacactcgcttgaacaacaaattcaattcaattgtcgttcctttgtagttttcttgtttcagaacagagac

SEQ ID NO: 282375 - DNA, 313 bp, Glycine max
  unsure (1)..(313): unsure at all n locations
cttagagagaaanaaaaatggctgatacaggtggaggagatgcagtgagaccagtggtaatatgtgntancaagtgtggctgcacacttccatgnactggtggttccacttgcaggtctcttaagttcatgatttcaacaaagtgcacaagtgctggcactgccacaggagggggtgatcacgtgacatgctcgtgcggagagcactgtggttgcaatccatgctcatgtcccaagattgcggctgctggangtggntgcagatgtggcacagattgtgcatgtgcctcctgccgcacttagtatcacacctt

SEQ ID NO: 282376 - DNA, 368 bp, Glycine max
  unsure (1)..(368): unsure at all n locations
anaagacttcgtcatccaaacattattctctttatgggggctgtgacttcacctcaacatctatgcattgtaacagagtttctcccacgagaaacacatccaaaattgattggagacggcgagttcatatggccttagatgttgcacgaggtgtaaattatcttcatcattgcaacccacctatcatccatcgagatttgaagtcttcaaatattctagttgataagaattggactgtgaaggtcggtgattttggtctttcacgtcttaaacatgaaacatatctcactactaagacaggaaaggggcgcctcaatggatggcacagaagtctcgtaatgactgccagatgagagctgatgttacac

SEQ ID NO: 282377 - DNA, 359 bp, Glycine max
ccctgttatcattgttggtgctggggtttttgagaggaaggaccaggatgcaatttttgccgctgttgaaaccattgcgcaaaaagcaaatgttgtcagacctgactggaatggccttaatgttttacttctccatgctgcccaggctgctgcccttgaccttggacttgttccacaatctgagaaaagccttgagtctgcaaaatttgtatatttgatgggtgctgatgatgtaaacttagacaagatcccagatgatgcttttgttgtttatcaaggtcaccatggtgacaagagtgtttatcgagcaaatttatttgccagcagcagcattcagtgagaaggaaggaactatgaaa

SEQ ID NO: 282378 - DNA, 372 bp, Glycine max
aatcataacagcaacaacccctatcaacctggtgcagaacaatatcacatgttggagtcggcacattcatggcctcattctcagttcaatgttgcttgtcactatagccagtcttttggggacaataatgttattttcccacaggggggttttggtggtggctatggcaataaccagtacccttaccagttttttcatggccctggtgatacgttgatgaggttggggccctcggcgacgaaggaagcgaggaagaagagaatggcgaggcagagaaggtttctgtctcatcacaggcatcataatggtaatcaccagaattcagggtcagacccacatgcaagattggggggtggtgataattgcaccact

SEQ ID NO: 282379 - DNA, 274 bp, Glycine max
  unsure (1)..(274): unsure at all n locations
gaagacccttactgggangaccattacnttggaggtagagagctcagacacaattgacaatgtgaaggcaaagntccaagacnaggagggtattcctccagaccagcnaaggttgatttttgctggaaagcagcttgaagatggacgtacactggcagactacaacatccaaaaggagtccacccttcaccttgtccttcgtctcaggggaggtatgcagatctttgtgaagactttgacaggcaagactattaccttggaagttgaaagctca

SEQ ID NO: 282380 - DNA, 205 bp, Glycine max
  unsure (1)..(205): unsure at all n locations
agagaatggctcccaaggggttaacctcnactggctgtgttaatatgcgtntcagcactgtcactgagtccnnctgntgcgggggaagggcancatngtggcctnnttatgaacttctacaaggaatcatgccctcaggctgaagacatcatcacagaacaagtcaagcttctctacaagcgccacaagaacactgctttctcct

SEQ ID NO: 282381 - DNA, 357 bp, Glycine max
  unsure (1)..(357): unsure at all n locations
ctatttttcttcctcagtagtgtcatttacgcttctcttctctgcagcaactatgcctaaccctaaggtcttcttcgacatgaccatcggcggtcaatctgctggccgcatcgtgatggagctctacgccgacgtcactccccgcaccgccncgaacttccgcgcgctttgcaccggcgagaagggcgtagggcggacggcaagcccctccactacaagggctcgtccttccaccgcgtgatcccgagtttcatgtgtcagggtggcgattcaccgccgganacggaacggcggcgagtcgattatggcgcaaagttcgccgacgagaattcgtgaagaagcacacggtccggcatc

SEQ ID NO: 282382 - DNA, 354 bp, Glycine max
ctttcttcaccgttcgctctttctttctcccctacacaaaacatggctttgcccaatcagcaaaccgtcgattaccccagcttcaagcttgtcatcgtcggcgacggtggcacaggaaagacaaccttcgtgaagaggcatctcactggtgaattcgagaagaaatatgaaccgaccattggtgtggaggttcatccgttggattttttcacgaactgtggaaagattcgcttctattgttgggatactgctgggcaagagaagtttggtggcctcagagatggatattatatccatgggcaatgtgcgattatcatgttgatgttatgcccgctaacataccaaaatgtccta

SEQ ID NO: 282383 - DNA, 362 bp, Glycine max
ctgtatccttggtggagaaccattctgcttgcagaacaaataggggctggtcagagagtattgccaaatggccaggtttggaaacctcatctgttacttctatcttttgcctccaaaattctggctgaagcaaatgctcttctcaagttacaagatagtccacctgggaagccatatgtagctcgaacaagagcgcctccattaccttttcttttgtcaacccttctccaatcaagaccgcagttaaagttgccagaggagcagtttggtgatgaggacagtcttgatgatgaccttggtgaatcatcagagtctgatgatgaaaatgaacatgatgacttgccgccatttaaaccttaact

SEQ ID NO: 282384 - DNA, 369 bp, Glycine max
  unsure (1)..(369): unsure at all n locations
aganaaagaatggnaattgaagtataacatgaatgatttgttgccttatggcaaggttggatatgnagccttcctcatattccttggctatgtatatactggtaaactcaagccctctccaatggaggtgtctacttgtgttgacaatgtttgtnctcatgatgcgtgtagacctgccattaactttgctgtngagttaatgnatncctcttccatttttcaaataccagagttggtatcacttntccagagacgtctacttaactttataggaaaggnccttgtggaagatgtcatcccaatcctcactgttgctttccattgtcaatccnatcaacttgtcaatcaatgtattgatagggtgggcag

SEQ ID NO: 282385 - DNA, 362 bp, Glycine max
ccgagggagacacaccttcagcagcagcagccatggttctcaaaaccgaactatgccgattcagcggtgccaagatctacccagggaaaggcatcagatttgttcgtggtgattctcaggttttcctgtttgctaactcgaaatgtaagaggtatttccacaacaggttgaagccatcaaagctcacctggactgcaatgtacagaaagcaacacaagaaggacattgctcaagaagctgtgaagaaaagaagacgtgctgccaaaaagccttactccaggtccattgtcggtgccactttggaagttatccagaaaaagagagctgagaagccagaagttcgagatgcaaatagggaactg

SEQ ID NO: 282386 - DNA, 351 bp, Glycine max
  unsure (1)..(351): unsure at all n locations
anaggnttggtcagtctgctgtcttgntgcctctacgcttatggagaatggtggtgttcctcagtctgctactccagaaactcttcttaaggaggctattcatgttatcagctgtggttatgaggataaaactgattggggaagtgagataggatggatttatggttctgtcacagaagatattcttaccggatttaagatgcatgcccgcggttggcggtctatatactgcatgcctaagcgcccagcgtttaaaggttctgctcccatcaatctttcagatcgctnaaccaagtgcttcgatgggctttaagttccgtggaaatctcttagccggcatgtcccactggt

SEQ ID NO: 282387 - DNA, 358 bp, Glycine max
  unsure (1)..(358): unsure at all n locations
agaaatccaccgccaaactccaagactccaggtcggtgaggaagatagtgaatctggacgaccacattgcgctggcctgcgcggggctgaaggccgacgcacgcgtgctcataaacagggcacgtgtggagtgccagagtcacaggctcaccgtggaggatcccgtcacggttgagtacataacgcggtacattgcggggctccagcagaagtacacgcagagcggcggcgtgangccctttgggctttcgactctgattgtcgggtttgatccctacactcactcgcnctccctctaccagacggatccctctggcacgttctcggcgtggaaggcgaacgcaccgggatgaatcga

SEQ ID NO: 282388 - DNA, 356 bp, Glycine max
gcctaatgttgtaaagttgcttgacattgttagagaccagcaatcgaagaccccaagtcttatatttgaatatgtcaataacactgattttaaagtgctctatcctacattgtcagactacgacatacgatattatatttttgaacttctgaaggcactggattattgccattcacaaggaatcatgcatcgtgatgtgaaaccacataatgtaatgattgatcatgagcagcgtaacttcgccttatagattgggggcttgcagagttctatcatcctgggaaagaatataatgttcgtgtggcatcaagatatttcaaaggtcccgagcttcttgttgatcttcaagactatga

SEQ ID NO: 282389 - DNA, 356 bp, Glycine max
gtgcaagttccaaggcggagaaaacaataatggccaccaacgaggagagggatatggagaacaagaagagtgaggaagaactgaagcatctcgggtttgtgaagattgcggcaatgaaagccttagtgtgtgtgtcgaatctctacggcttcgcaaagcaaaactcgggacttttgagatctgctgttggaaccgtggaagacactgtaaccaccgttctgggtcccgtctaccacaaattcaacgctgttcccaaccacatcctcctttttgtcgacaacaaggtggatgaagctgctcacaaattcgatgagcatgcaccttctttggccaagcaggttgcaagccaagtcact

SEQ ID NO: 282390 - DNA, 329 bp, Glycine max
  unsure (1)..(329): unsure at all n locations
gtgagaaacatgggcttccttaagctccttagtgctgctccttgcagctctaattctatcccctcaagttcttgcaaactatgagaatcccccagtgtacaagcctcccactgagaaaccaccagtttataagcccncagttgagaagcctcctgtttacaaacctccagttganaagccnccantttataagcctccagtagagaagccaccagtgtacaagccccagttgagaacctccagtgtacagccccatgagaaccnccagtgtacagcccngttggaaccacgtgtacagcncattggaacccggttaagtnngtggannt

SEQ ID NO: 282391 - DNA, 359 bp, Glycine max
ggcaacagtgacagtaacggtggaagagagaaaggattcgctctcctcaatccttatataagctccagcgacccaatttcttctcttatcgatttgattgtttctgagtaatggcttcgtcgcgagtagatctggatgggaaccccataaagcccatcaccatttgcatgattggcgccggtggcttcattgggtcccacctctgcgagaagctcatgtcggagacccctcacagtgtcctcgccttgggatgtctacaatgacaagatcaaacacctcttggaaccccacacgctcccttgggcctctcgcatccagttccatcgcctcaacatcaagcacgattcccgtctcgaagg

SEQ ID NO: 282392 - DNA, 358 bp, Glycine max
ctctgcttcccctgggcaaccttcttcttagttctctccgcttcatatctccagattgctggggcgaaagcacaaccgttgactagtctcaagcttaactctccgatccttcaggagtctattgctaaagagatcaatgaaaatcctgaggcaggatgggaggctgctataaatcctcatttctccaattatacagttgaacaatttaagcgccttcttggagtcaaaccaacgcctaagaaggaactgagaagtacacctgctatatctcacccaaagtcattgaaattgccaaagaattttgatgcaaggacagcttggtctcagtgtagcactattggaagaattctagatcagg

SEQ ID NO: 282393 - DNA, 363 bp, Glycine max
aacaaattgactcagtactgtagaacactgcgactcttcacacttttcttcttcccttcgtcttcagcttctgcttcttctcttgttgctgcttcaaaacagtgagaaaaatatggggttctcctcctttctgggtcgcgtcctctttgcttccctcttcatcctctcagcatggcagatgtttaatgaatttgatgacactggtggaccccattgcaaaggagttgattcccaagttcactgttctgaagagaaatttatcctccaaactgggggtaaagacaccagatattaatgtgcggtcagtcattgctctatcatattctaaagggggttggaggaatctattcgtgcttggcagta

SEQ ID NO: 282394 - DNA, 324 bp, Glycine max
  unsure (1)..(324): unsure at all n locations
ggatcatttattttgaaagacaagtttgtgtgacaatcttatagttctaagaagggtgcaagtgagagctttgctgtgatggcaacccgtagatattcttttggaagggctgatgaggccactcatccagactccatgagggccactttggctgaatttgcatccactttcatnttgtctttgctggagaaggctctagccttgctttggttaagatttaccaggattcagctttctcagctggtgaattgttggcagttgcacttgcacatgcatttgctctatttgctgctgtttcttctagcatgnatgtatcagggggcc

SEQ ID NO: 282395 - DNA, 327 bp, Glycine max
cacaaacacacactgaactaaaaaacatcaaaagagacatggctgagcaaaccttcatcatgatcaagcctgatggcgtccaaagaggccttattggcgagatcattagcagatttgagaagaaaggtttctacttgaaaggtttgaaacttgttactgtggaccgtccttttgtgagaagcactatgctgatttgtctgccaagcctttctttagtggtttggtggattacattatctctggccctgttgttgccatgatctgggagggcaagaatgttgttacaactggccgaaagattatcggagcccacaaacccagctccat

SEQ ID NO: 282396 - DNA, 265 bp, Glycine max
  unsure (1)..(265): unsure at all n locations
ggctgccgaagaagagaacgttcaagaagttcagttttcgaggcgtggatctcgatgcacttctcgacatgtccaccgatgaactcgtcaagatgttcagtgcccgcgctcgtaaaggtgccagagaggcctcaccagaaagcccatggccttgatcaagaagctccgtaaagcgaaaagggnagctccaccaggtgagaagccagaaccagtacgcacccacctccgcnacatgattattgtgcctgagatgattggtagnatt

SEQ ID NO: 282397 - DNA, 330 bp, Glycine max
  unsure (1)..(330): unsure at all n locations
gagaggaagaagcttggaagcataaagagcagcaataacaatgaactaaaatgcgctattgaccacattttggatgttccagngaaaaggcgagatcaacgaagacaacgtcctngacattgttgaaaacattaatgtcgctgcaattgagacaactctatggtcgattgaatggggattgctgagcttgtgaaccacccagagatccagcagaaggtgagggatgaaattgatagagttcttgaagcagggcaccaagtgactgagccagacatccaaaagctgccataccttcaagcagttgtgaaggaaactcttcggcttcgaatg

SEQ ID NO: 282398 - DNA, 335 bp, Glycine max
  unsure (1)..(335): unsure at all n locations
caagataataaagatgaattgaaaacaaaattaaaggagatacttcgtgaganatctgatgtattcaactcaaagaatgcctgaagaggataagattaaattgggagaacctggctggaaagagaggtattatgatgaaaaattttctgccaaaactcctgaggaacttgaagcgatacgtaagatgttgtcttgaaatacactgaagggctatgttgggtgatgcactattattatgaaggtgtttgttcttggaattggttttatccttatcactatgctccctttgcgtctgatctcaagggccttggtgaacttgatatagctttaactgg

SEQ ID NO: 282399 - DNA, 339 bp, Glycine max
  unsure (1)..(339): unsure at all n locations
aagtctatgatcaagacgagatatatgtacctaaacgaagagatcttgaaagagaatccaaacatgtgtgcttacatgggcaccttctttggatgctaggcaagacatggtggtggtagaggtaccaaagctagggaaagaggctgcagtaaaggccataaaggagtggggccagccaaagtaaagattacccacttgatcttctgcaccactagcggtgtggacatgcctggtgctgattaccaactcnccaaacaattgggccttcgcccttatgtgaagaggtacatgatgtaccaacaaggttgctttgcangtggcacggttcttcgttggcna

SEQ ID NO: 282400 - DNA, 335 bp, Glycine max
  unsure (1)..(335): unsure at all n locations
ggagggtaaggtggaggatgttgacgaagagnaggngaaggangannngnagtnaaagaagnttaaggnagtgtcacatgaatggtccttggtgaacaagcagaagcccatttggntgagaaagcctgaggngatcacaaaggaggagtattctgctttctacaagagtctcaccaatactgggaagagcatttggctgtcaagcacttctcagttgagggacagttggagtttaaggctatccctttgttcctaagagggcaccttttgacctctttgacacaaggaagaagcctaacnatatnaagctttatgtccgccgtgtctntatcagg

SEQ ID NO: 282401 - DNA, 324 bp, Glycine max
  unsure (1)..(324): unsure at all n locations
ggcgttatggcttactcggattaaatggttgtggaaaatctacactgcttacagccatcngttgtcgggaacttccaattcccgaccacatggacatatatcatctaaccagggagattgatgcctctgatatgtctgcattggnagctgtcataagctgtgacgaaganagttgaaattggngaaagangcagaagctttagctgcacaggatgatggaggtggtgaatcccttgaacgcatttatgaacgattggntgccctagatgcagccatgcagaaaagcgtgctgctgaaatcttacatggnctggctttgacaagc

SEQ ID NO: 282402 - DNA, 322 bp, Glycine max
gtcatagtcaatttttctcaggataagtcatggcgtgttcgttacatggttgctaatcaactatatgagctatgtgaagctgttggtcctgaccccaccagatcagaattggtccctgcatatgttcgtctgctgcgtgataatgaggctgaagtacgtattgctgctgctggaaagtaactaagttttcccgcatattaaatcccgatcttgcgattcagcatattctaccatgtgtgaaggagttatcaactgattcttctcaacatgttcgctctgcactggcttctgttataatgggtatggcaccggtgttagggaa

SEQ ID NO: 282403 - DNA, 294 bp, Glycine max
  unsure (1)..(294): unsure at all n locations
ttgttgtttgtgtgtttgttttttctctcacctgaaaatgtcttgctgcggtggtaactgtggttgcggaagcgcctgcaagtgcggcaacggctgcggaggctgcaagatgtacccagacttgagctacaccgagtcaaccacaccgagaccttggtcatgggagtggcaccagttaaggctcaattcgagagtgctgaaatgggtgttcccgctgagaacgatggctgcaaatgtggagctaactgcacctgcnacccctgcacttgcaagtgangtgttggagagtaaagc

SEQ ID NO: 282404 - DNA, 324 bp, Glycine max
  unsure (1)..(324): unsure at all n locations
aggctcagaaatcaaaagcctacttcaagagatatcaagtcaagttcaagagaagaagagagggaaaaaccgattaccgtgccaggattcggttgattaatcaggacaagaacaaatataacactccgaaataccgatttgttgttcgctttagcaacaaggacattgttgcnaaataatatctgctagcattgctggcgatattgttcttgctgcagcatatgcacatgagctgccacaatatggtcttgaagtagggcttacaaattatgctgcagcttattgcactggtctcctgttggcccgaagagtcctcaatacact

SEQ ID NO: 282405 - DNA, 324 bp, Glycine max
  unsure (1)..(324): unsure at all n locations
gggaaggatcgtcaatattgcatcagttgttggtttggttggcaatgttggacaagccaattatagtgctgcaaaagcaggagtaattggcctgacaaaaactgttgcgaaggaatatgctagtagaaacatcactgttaatgcagttgctccagggtttattgcatctgactgactgccaagctaggacaagacattgagaaaaagattttggagacaatcccattaggaagatatggccagccagaggaagttgctgggactggttgaattcttggctcttaatcaagctgccagttacatcactgggcaggtttcaccntg

SEQ ID NO: 282406 - DNA, 335 bp, Glycine max
attattttgaagaattggaagaggagtctcttagggataactttgttgttgtgtatgaattacttgatgaaataatggactttgggctacccgcaatacactgaggcaaagattcttagtgagtttatcaagacggatgcctatagaatggaagttacacagagacctcccatggctgtacaaatgctgtatcctggcgcagtgaagggataaactacaagaaaaatgaggttttcttggatgtggtggagagtgttaacatacttgtcaatagcaatggacaaataataggtctgatgttgttggggcattgaagatgagaacatactgagtgg

SEQ ID NO: 282407 - DNA, 324 bp, Glycine max
  unsure (1)..(324): unsure at all n locations
aganaaagaagggnnattgaagtataacatgaatgatttgttgccttatggcnaggttggatatgaagccttcctcatattccttgngctatgtatatactggtaaactcaagccctctccaatggaggtgtctacttgtgttgacaatgtttgtgctcatgatgcgtgtagcctgccatcaactttgctgttgagttaangtatgcctcttccatttntcaaanaccagagttggnatcactttnccagagacgtcnacntaactttataggnaaggcccttgtggnagatgtcatcccaatcctcactgttgcgtccaatgg

SEQ ID NO: 282408 - DNA, 324 bp, Glycine max
  unsure (1)..(324): unsure at all n locations
aaagaatcaaaganaggggtggtggctgcttcgaaagcttaataatttgtttatttccagaacatcatagttttcgcagcagcaaactaacaaattactcatatcatataataagatggcccgttctctctcgcaagccaaacgtattggtgtccttgttgctcaatctatnccctaattcccgttcatcggcgaggttacgcagtggcatccgatgtatcggtaagagttggattgggtaatattgggcgaaggaatggnatcgtgggaggtgtagaagagaagcctgatacaagagatggttcnaaagcctactcaactgat

SEQ ID NO: 282409 - DNA, 327 bp, Glycine max
  unsure (1)..(327): unsure at all n locations
ttgcngcttccattctactaggggacctgcctttatatcggagttgctttcagttataccaaatgcacattacttcaagagaggnacatatgatctgaaaaagattgtagaatatgcaaagnagaaggacttcacctctgttatagttgttcacaccaatcgtagggnaccagagctcttttaattattggtgtacccgatgggccgactgctcatttcaagctctcaaagcttgttttgcgcaaggatatcaagaatcatggaaatccaaccggtcacaagcctgagcttgtatngaataactcacaacaggctagggcntcgagt

SEQ ID NO: 282410 - DNA, 327 bp, Glycine max
  unsure (1)..(327): unsure at all n locations
ccggcttgttcagtctttcttggaactttgttactctcacacatgtctcgctccgtgcctttggtttcaaccatttttntcttgcttctgcttctggtggccactgagatgatggggccaacaatggtggcagaagcaagaacttgtgagtctcagagccaccgtttcaagggccatgtttgagtgacaccaactgtggctctgtttgccgaaccgaacgtttcactggaggacactgccgtggcttccgtcgcagatgcttctgcaccaaacattgttaattttaaaaaatnaatnaagagtgctttgatagaagatgatagatct

SEQ ID NO: 282411 - DNA, 325 bp, Glycine max
  unsure (1)..(325): unsure at all n locations
gaaagaggagacgaagcaatggcgccgaagaagccccgaaccacgtcgaggaaccctgatttggtcaggggnattggcaaatattcgaggtcgcagatgtaccacaagangggcatctgggccatcaaggccaaaaacggcggtgttttgcccctccacgatcccaagcccaacncgaggccccggcccagaagccgcccaagttctacccggccgatgacgtgaagnagcccctcgtcaacaagcacaagcccaagcncgcgaaactcagggctagcattactccagggactgttctgatcctgcttgctgggaggttcnaggg

SEQ ID NO: 282412 - DNA, 321 bp, Glycine max
  unsure (1)..(321): unsure at all n locations
gcctaatgttgtaaagttgcttgacattgttagagaccagcaatcgaagaccccaagtcttatatttgaatatgtcaataacactgatttgaaagtgctctatcctacattgtcagactacgacatacgatattatatttttgaacttctganggcactggattattgccttcacaaggnatcatgcatcgtgatgtgaaaccacataatgtaatgattgatcntgagcngcgtaacttcgccttatagattgggggcttgcngagttctatcatcctgggnnagaatataatgttcgtgtggcatcnngatattcanagt

SEQ ID NO: 282413 - DNA, 324 bp, Glycine max
  unsure (1)..(324): unsure at all n locations
cganaaangggcaccaccgtgtcaacaagtagnagcngnagctgtttttgttcttcgccgctgacactaatcgtttcttcaatgccttacgagaaggnnttcgccgctgcaaaaanagcagccactctcgctgctcgtctctgcaaganagtacagaaggctcttctgcaaccgatgtgcactcaaagtcagacaaaagtcctgtcacagtggctgattatggttcacaagcattggtcagctttatacttgngagagaacttccttctgaaccattttcattagtagctgnggnggattcaggtgatcttcgtaangagagtg

SEQ ID NO: 282414 - DNA, 323 bp, Glycine max
  unsure (1)..(323): unsure at all n locations
ataggtttggcattcatggcagctgctaagggttataaacttattataaccatgccttcttcgatgagtctcgaaagaagaaccattcttcgagcttttggngctgagttagtcctcactgatcccgccaaaggtatganaggngctgttcaganggcagaagagattcggataagactccaaattcttatattcttcagcaatttgaaaatcctgccaacccaaagatccattatgaaaccactggaccggngatctggnagggctctagtgggnangntgatgctcttgtctctggggattgggactggaggtactatnac

SEQ ID NO: 282415 - DNA, 321 bp, Glycine max
gaagacccttactgggaagaccattactttggaggtagagagctcagacacaattgacaatgtgaaggcaaagatccaagacaaggagggtattcctccagaccagcaaaggttgatttttgctggaaagcagcttgaagatggacgtacactggcagactacaacatcaaaaggagtccacccttcaccttgtccttcgtctcaggggaggtatgcagatctttgtgaagactttgacaggcaagactattaccttggaagttgaaagctcagacacaatcgataatgtcaaagcaaaaatccaggacaaggagggtatc

SEQ ID NO: 282416 - DNA, 320 bp, Glycine max
gaagcatatatatcaaaatggctgcagagatggagagggagtcattgataactgaagctcctaatgcaccagttactgcacagagaagggtcagaaatgacttagaaaattctctaccaaaaccatacttgccaagagcattgaaagctcctgatacgggtcacccaaaggaacagcaggccacaggcaccacaacttatctgttcttcagcagcattgtgctttttttgatcaagatgacaatggaatcatttacccttgggaaacttacatggggctgcgttctattggatttaatgttgttgcatctgttattatgg

SEQ ID NO: 282417 - DNA, 319 bp, Glycine max
  unsure (1)..(319): unsure at all n locations
gaaaggggtggtggctgcttcgaaagcttaataatttgtttatttccagaacatcatagttttcgcagcngctnantnacanattantcatatnananaataagatggcnngttctctctcgcaagccaaacgtattggtgtccttgttgctcaatctatctccctaatcccgttcatcggcgaggttacgcagtggcatccgatgtatcggtaagagttggattgggtaatattgggcgaaggaatggaatcgtgggaggtgtagaagagaagcctgatacaagagatggttcaaaagcctactcaactgattgggcc

SEQ ID NO: 282418 - DNA, 319 bp, Glycine max
  unsure (1)..(319): unsure at all n locations
ctagaaccttacacgcgtctgggtaaagacttttccttatctctgcgtncacttcacccacccacttcctccgtgccaactgctcccccaggcgcattgcngcctccaccgtgctctccgcgctatcgtgcgccgaatccacgattcccatcctcacngcctccgccgcgttngcttcgcgccgcccagcaccaagtcgcgcatcaccgccggggacctgatcttggaccttatgacggcggcgaagtngcccggcngcggcagcccgaggtctacctccggcatgtngagcacgcngggtcgctgcgcntgaagagtt

SEQ ID NO: 282419 - DNA, 320 bp, Glycine max
  unsure (1)..(320): unsure at all n locations
gttaccccactctacctaattggttcccttctctcctttttcctatctacatacacaacatacacaangcaaagcatgggngtgactctggagtttatgacacagaaggacgttatgtgccagcaaatattgagaacatattcagtaagtatgctcgtacagtacctgacagctcacacttggggagctctgggacttgacagagggaaaccgaaatgcttttgacatatttggctggcttgcagcaaaatttgaatggggggttctgtacattctggcnagggatgaggaaggttcctgtctaaagaagctgttagang

SEQ ID NO: 282420 - DNA, 323 bp, Glycine max
  unsure (1)..(323): unsure at all n locations
gaggnccaccggccctataaggcgtgctaagggcggttggnctgcncaagnagatgagacattaaggaatgctgttgcngttttgaagggaaagagttggnagaaaatagctgagttttttcctgatagatcagaagttcagtgtctgcacagatggcaaaaagttcttatccagaacttgtnaanggnccttggacacaggnggaggatgataanattgttgaactggtgtcaaantatgggcctacnaaatggtctttgatagccaagtctttacctggtcgaataggcnnacaatgncgagagcggtggcncaatcntct

SEQ ID NO: 282421 - DNA, 330 bp, Glycine max
  unsure (1)..(330): unsure at all n locations
agaanaggtttggtcagtctgctgtctttgttgcctctacgcttatggagaatggtggtgttcctcagtctgctactccagaaactcttcttaaggaggctattcatgttatcagctgtggttatgaggataaaactgattggggaagtgagataggatggatttatggttctgnacagaagatattcttaccggatttaagatgcatgcccgcggttggcggtctatatactgcatgcctaagcgcccagcgtttaaaggttctgctcccatcaatctttcagatcgtctaaaccaagtgcttcgatgggctttaggttccgtggaatt

SEQ ID NO: 282422 - DNA, 320 bp, Glycine max
  unsure (1)..(320): unsure at all n locations
ggggattacactctgggccgttacttttacctctgtgaagaagacgctgtcgcggcttctactgttggttgtctctatgggttatggggttgtccgccccacgctaggcgggaacgtgattgcctacagagtgctgcttcttgggctgctgtatttcagcgcctccgagcgcttganctcgtcgagcatttggggaacatcaatgacttctccgggaagactaagctgcttttggtgctccctgtggtttgcctcgactcgtgcttcattctttggatttctcgtccttgtccaagaccttggagaaatgcagacaagga

SEQ ID NO: 282423 - DNA, 322 bp, Glycine max
ctcagcctctcaccaagggaactaacaagtttcgttgtgggcaaagtaagtggtgatccaatatgtcaaaaaatccaaaagttttctttgatattctaattggaaagatgaaagctgggcgagtagtaatggagttgtttgttgatgcaaccccaaaaacagctgaaacttcagggccctctgcactggggaaatggggattggaaaatctgggaaacctttacattacaaaggttctgcatttcatcgtattattccagagtttatgtgtcagggaggagattttacaaaagggaatggaacagggggtgagtcaatctac

SEQ ID NO: 282424 - DNA, 319 bp, Glycine max
aacctgaaggatggttggatgatgagccagaggaaattgatgacccagaggcaactaaaccagaagactgggatgatgaggaggatggtgaatgggaagccccaaagattgaaaacccaaagtgtgaggccgcccctggttgtggtgaatggaagaggccaacgaagagaatccagcttataagggaaagtggagtgctccttacatcgataaccccagttacaagggcatatggaagcctcgcgagattccaaaccctgaatactttgaactcgcaaaacctgattttgagcctattgctgctattggcattgagatt

SEQ ID NO: 282425 - DNA, 323 bp, Glycine max
  unsure (1)..(323): unsure at all n locations
gcagatcttcgtcaagaccctcaccggcaagaccatcacccttgaggtggaaagctctgacaccatcgacaacgtcaagggccaagntccaggacaaggaaggnatccccccggaccagcaacgtctcattttcgccggaaagcaacttgaggacggccgtacccttgctgatacaacattcagaaggagagtactcttcacctcgtcctccgtctccgtggtggcatgcagatcttcgttaagacactcaccggcaagaccataaccctagaggttganagctccgacaccatcgataagtcnaggcaagatncaggacaag

SEQ ID NO: 282426 - DNA, 331 bp, Glycine max
  unsure (1)..(331): unsure at all n locations
ctaaaacaaaaggcaacgaaggacagagtattcaactatgtgaatcaactgtgtgagagcctgccaagtccatctggagagtcagtgataagctgtaatagtctttccaagatgccaaacattacgttcacaattggaaataaaccttttgtcctcacaccagagcagtatatntaagaactggagaaggcattacagaagtctgccttagtgggtttattgcttttgatgttcctcctccaaagggtccattgtggattcttggcgatgttttcatgagggcatatcacaccgtctttgactatggaaatctccaagttggctttgccga

SEQ ID NO: 282427 - DNA, 317 bp, Glycine max
  unsure (1)..(317): unsure at all n locations
cccaggttgtgatggcagcagcaccagcagctaccttcgctattggaaccaccggttccctcggccaaagaggaagctcgcttcctcaatcaaagtcctttgggttgaaattcaactctctgaatcatttgaagagcttctgtggcctcaaggccatgtcatccggagatgtgagtcggaatcctccttcttcggtaacaaaaccggtgctgctctacgggcgtcttttgcatccaaagctcaaaaggaaaacaaccacaactcgcagcctcaggcttcgtacaaagttgcgggtcttgggtgctgctggnggataa

SEQ ID NO: 282428 - DNA, 325 bp, Glycine max
  unsure (1)..(325): unsure at all n locations
caatgcttatctctcgaagcgtgcaagatcgattcgggtcgaacatggatgggaaatcgccggagaaactaatactggtgaaccgcgagccaaacggcgtcgcactggtgacgattaaccgtcccggttcccttaactcgctgacccggcccatgatggtggacctggccaggctttcaagaggctcgaccgggacgagttggtgcgggtcattatattaaccgggtcgggccggtcattctgttcgggcgtggatctcacggccgctgaggacgtgttcnagggcgatgtgnangacccggagagcgatccggtggtgcnaatt

SEQ ID NO: 282429 - DNA, 351 bp, Glycine max
  unsure (1)..(351): unsure at all n locations
caataatgcaagcggcacaagaagtagccgagggaaaactaaacgaacattttcctctcgttgtatggcaaactggcagtggcactcaaagtaacatnaatgctaacgaggttattgcaaaccgccnagcagagattcttggccataagcgcggtgggaagttcgtgcacccaaatgaccatgcaatagatcgcagtcttctaatgatacattcccaaccgtaatgcacattgcagccacaatggaaataaactcaagactaattcccagcttgaaaaccttacacggtacactaaactcanagtcaattgaattcaaagatattgtcaagattggagcactcatactcaa

SEQ ID NO: 282430 - DNA, 344 bp, Glycine max
gtcgccaccgccgagaggctagttagagctgcacataaacagggtgcgaacatcattctcattcaggaactctttgaaggttattacttctgtcaggcacaaagagaggatttcattcaaagagctaagccacataaggaccatcccacaatcctcaggatgcagaaacttgcaaaagagtaggtgtagtcattccagttagcttctttgaggaggcaaacaatgcacattataactcaatagccataattgatgctgatggaactgatcttgggatttatagaaagtcccatattccagatggaccaggttatgaggaaaagttctattttaatccaggtgac

SEQ ID NO: 282431 - DNA, 341 bp, Glycine max
  unsure (1)..(341): unsure at all n locations
ccgagctaaggttgggaagtaccatctgttggtttgtggaacaacaccttgtatgataagaggttcacgaggaattgaagaagccttattgaaacacttgggagtgaagcgcaatgaagtaacaccagatggtttgttttctgttggagaaatggaatgcatgggatgctgtgtgaatntcctatgattacagtggccgattattcaaatggatcggagggatatacttataattactttgaagatataaccccagagaaagtagttgagatagtagaaaagctgagaaagggtgagaagccaccgcacggcacccaaaatcccgccgaattaagagtggt

SEQ ID NO: 282432 - DNA, 342 bp, Glycine max
  unsure (1)..(342): unsure at all n locations
gganaagcactggcgcantaccctgaggcttctcttctcttctcttctctgtcgtgagtcaccatggtgagggttagtgtgctgaacgatgctctgaagagcatgtacaatgctgagaaaaggggaaagcgccaagtcatgattaggccatcctccaaagtcattatcaaattccttttggtgatgcaaaagcacggatacatcggagagtttgagtatgttgatgaccacagggctggtaaaatcgtggttgaattgaacggtagactgaacaagtgtggggttattagtccccgttttgatgtgggcgtcaaagagantgaaggttggactgctaggctt

SEQ ID NO: 282433 - DNA, 323 bp, Glycine max
  unsure (1)..(323): unsure at all n locations
gacaggttagttttaccctactgatgacagtgtcgcaatagtaattcaacctagtacgagaggaaccgttgattcgcacaattggtcatcgcgcttggttgaaaagccagtggcgcgaantaccgtgcgttggattatgactgaacgcctctaagtcagaatccgggctgaagcgacgcgtgcgcccgccgtccgtttgccgaccagcagtagggggcctcggcccccaaaggcacgtgccgttggtgaccctcgtgaggcggattagcctacgagacgcttgaaggcaatcccatcgacggcggagaatcttganaaaaaat

SEQ ID NO: 282434 - DNA, 339 bp, Glycine max
agagaattcaatttggagaaagtccctggccttgatgggacgaagattactgatattgctgccggagctgagcattctgtcattgtcacagagcatggagaaataaagacatggggttggggtgagcatggtcaacttggtttaggggatactcgcgaccaaaccagtcctgttacgtaagtctcgattatgatctgaatgaagctgcatcaattagagttttctgtggaagtgggttcacgtttgctgtaaccatgccctagagtctactcaaacttgattaaatgctaatttgatatgcatgtcaaaagaagttgccatcagcttggttctggttct

SEQ ID NO: 282435 - DNA, 336 bp, Glycine max
  unsure (1)..(336): unsure at all n locations
attggatcctttgggtaggctggtgtctcttgagatgggaaaaattctcccagaaggaattggggaagttcaggaaattattgatatgtgtgattattgtgttgggctaagcagacaattgaatggatcaattataccatcagaacgtccagatcatatgatgtttgaggtatggacccactaggaatagttggtgtaatcagtgctttcaactttccatgcgctgttctaggatggnatgcttgcattgctttagtctgtggtaactgtgttgtgtggaagggtgctccaacaactcctttgataactattgctgtgacaaagctagtagctgaa

SEQ ID NO: 282436 - DNA, 335 bp, Glycine max
  unsure (1)..(335): unsure at all n locations
ctcacgatttcgattcaccctttctcccacacactccgattctncnttgtaaacagcggtgccaggtctgggatcttggtggacaagaaagattgaggacatcatgggcaacatattaccgaggaacgcatgctgttattgtggtgatagacagcagtgatagagccaggactctatcataaaggatgaactttttaggttgttggggcatgaagatttacaacattctgttattcttgtcttcgctaataaacaagatatcaaggatgctatgactcctgctgagatcactgatgcactatcccntcacagcatcaaggatcatgattggcatt

SEQ ID NO: 282437 - DNA, 336 bp, Glycine max
  unsure (1)..(336): unsure at all n locations
attttcgagttcggaaatgcttgctttgagtggggttgctgtcctcttgagggtgctacctgctgtgatgaccactacagttgctgccctaacgactatcccatctgcaacacttatgctggaacttgtctcaagagcaagaacaacccattcggagtgaaggcattgaggctaccccggctaaaccccattggacctttgggcgtaagaacaaggtcagcagtgcttaagcagataaaggaaatgtgaacgtgcaggaaggagccaatgatgaagtaaatganagacgaagaattaanacaccagctgatacacttcccctttaccttcacataa

SEQ ID NO: 282438 - DNA, 368 bp, Glycine max
  unsure (1)..(368): unsure at all n locations
gaagattttcatcagttgagttgagagaaggaaagggaaaatgggtaaggatctgagcgaggaacaagtgtcttccatgaaggaagccttctctctattcgacactgacggagacggtcggatcgctccgtcggagctggggatcctgatgaggtctctgggaggtaacccgacgcaggcccaactcaaagccacgtggctgaagagaacctcacggcccccttcgacttcccccgattcctcgatctaatggccaaacacattaaacccgaacccttcgatcgccaactccgcgacgccttcaangtcctcgacaaggactccacggcttcgtcgccgtctccgagtccgcaatcctcacaacatcg

SEQ ID NO: 282439 - DNA, 348 bp, Glycine max
  unsure (1)..(348): unsure at all n locations
cgttctcgttctggtttatagatctttgcgaaggaggtttacagcgctcaaccaaagatgcagaacgaggaaggacagatcactgagctttacattcctaggaagtgctccgccacaaacagattgattaccgctaaggaccatgcttcggttcngatcaacattgggcatgtggatgagaagagtctacaatggccatttctccacttttgccctctgcggattcatccgtgctcagggtgatgctgacagtgctctagaccgcttgtggcagaagaagaaagttnaagttaagcaacagtagacacccatgatagttgttacttcgtatgtataaattcnacncct

SEQ ID NO: 282440 - DNA, 336 bp, Glycine max
  unsure (1)..(336): unsure at all n locations
cgcgtttactacgtctttgggtttcntcttcgttgtnttgatccttcttgnggtggtttgtgccgaggtatctctagttctgacttacatgcacctgtgtgtggaggattggaaatggtggtggaaatcgttctttgcctccggttctgtcgccatatacatctttttgtatctgttaactatcttgtgtntgacctcaagagtttgagcggtcctgtgtctgcaactctttacttaggctactcactcttcatggttctagcaatcatgctttctacaggtacaattgggttcctctcttcattctgggtcgtgcatacttgttccctnggtcaa

SEQ ID NO: 282441 - DNA, 346 bp, Glycine max
  unsure (1)..(346): unsure at all n locations
gcaaggagagactgttgtcccgggtggaactggtggcaagagcctggaggctcagcaacaccttgctgaagganggagcaagggagggcaaacaaggaaggaacagctgggtacagaagggtaccaggaaangggacgcaaagganggttgagcactgtggacaaatcaggagaagaacgtgctcaagaggaaggcattggcatcgatgagtccaagttcaggactggtaataacaagaaccagaatcagaacgaagaccaggataagtgataatgtaacacccttcactagcatgtgtagtgtgttcttatgctagcttaaatgtgagtgtcaagtgtttaggaa

SEQ ID NO: 282442 - DNA, 295 bp, Glycine max
  unsure (1)..(295): unsure at all n locations
gataatgtcaaggccaagatcnatgacanggagggtatcccgccagatcancagaggttgatatttgctggtaaacaacttgaggatngaagaacccggnctgatnacaatattcagaaggagtctaccttacacttggttcntcgtttaagaggtggcangcagnttttcgtcaaacttntacnggaaagaccatcnccttggaggtggaganttcanatnccananacaatttgaaagccaagnttcangagnaggngggtagccccccagnccagcngaggcttatctttgt

SEQ ID NO: 282443 - DNA, 338 bp, Glycine max
  unsure (1)..(338): unsure at all n locations
aagaatcaaagaaaggggtggtggctgcttcgaaagcttaataatttgtttatttccagaacatcatagtttncgcagcagcaaactaacaaattactcatatcatataataagatggcccgttctctctcgcaagccaaacgtattggtgtccttgttgctcaatctatctccctattcccgttcatcggcgaggttacgcagtggcatccgatgtatcggtaagagttggattgggtaatattgggcgnaggaatggaatcgtgggaggtgtagaagagaagncctgatacnagagatggtcaaagcctactcaactgattggcccagancagtac

SEQ ID NO: 282444 - DNA, 333 bp, Glycine max
aagaatcaaagaaaggggtggtggctgcttcgaaagcttaataatttgtttatttccagaacatcatagttttcgcagcagcaaactaacaaattactcatatcatataataagatggcccgttctctctcgcaagccaaacgtattggtgtccttgttgctcaatctatctccctaattcccgttcatcggcgaggttacgcagtggcatccgatgtatcggtaagagttggattgggtaatattgggcgaaggaatggaatcgtgggaggtgtagaagagaagcctgatacaagagatggttcaaaagcctactcaactgattgggcccag

SEQ ID NO: 282445 - DNA, 364 bp, Glycine max
  unsure (1)..(364): unsure at all n locations
gaagaagtatcggataagattgagaggaatctaatccttctgggtgccactgctgtagaggacaagctccaaaatggggttcctgattgtatcgacaagcttgcccaagctaagattaagatttgggttttgactggggataaaatggagactgccatcaatattggtttctcttgtcgcttgcttaacaaggaatgaaacagattataattcatttggagattccagatattcaagcattagaaaaggttggagacaagatggctattgncaaggcatcaaggganagtgtgcatcatcagatatctgangctgctcaantgctttcagcatccagagggacctgccagacatctgctctgat

SEQ ID NO: 282446 - DNA, 326 bp, Glycine max
  unsure (1)..(326): unsure at all n locations
caacccagaagaaagaggcaaagatgagccaggcagagctggacaagcaggcggcgcgtcanataacacggcggcgaanaggctgccacggcagggcacatgggacaacccatggggacccatcagacgtcagctatgcccggtcatggaaccggacagcccacgggcatgtcaccgagggagtggtgggctcacaccctattggaaccaacagaggcccgggtgggactgctacggcccataatacccgtgcggggggaaacccaaatgattatgggtatggaatgggggtattacaattaaataatgatgattagaaaaggaaa

SEQ ID NO: 282447 - DNA, 331 bp, Glycine max
ataacacatggtgggagtggggtaccagaagcattactgaaccagatgtttggaaacaacgggctagaatccgaggagggtattagcctactgatcagcagaaagctgctgaagctgatgaatggagatgttcgctatctaagggaagcaggcaaatcagcttttatctctctgctgaacttgcagcagcccataatttgaaaggttaaaagttttggaaaaaagaataaaagatgatgcaaccagcaaaacacaatctgttttgtacatcataaagagaacggagctagaaattaattgcatccaatgtaactctaatttgttccacgtt

SEQ ID NO: 282448 - DNA, 337 bp, Glycine max
  unsure (1)..(337): unsure at all n locations
gtttgctgctgatgctancngcaagactgtgcnggcatcaagcatcccagatgcgtggatggggttggacattngtcctgattccatcaanacatttggtgaagcattggatacgactcagnncattattggantggaccaatgggtgtcttgagtttganaantttgccacaggaacannggctatngccaaganactggcagagctgagtgggaagggagtgacaaccatcattggaggaggtgactccgttgccgctgtggagaangntggactgcagacaagatgagccacatctccacggcngtngtgccatctagagctctngagggaaac

SEQ ID NO: 282449 - DNA, 363 bp, Glycine max
  unsure (1)..(363): unsure at all n locations
ttcatatttttcttggaaagcttctgctatggggaaaaatgtttctaatgcaaagacgtttcttgagaagaggtacacagatgatatggagcttgatgatgcagtccacacagcaatattgactctgaaggaagggtttgagggacagatctcaggaaaaaacattgaaattggcataattggagntgataaaaagttcagggtattgacaccagctgaaattgacgactatttggctgaagtagaataatctgcaatgaagaactcttgtgttcctgaagttgtttgtttcacagttgggtttaattggtagcttaattattgacattgtgatggcaatagtgaatttgcgactactcgtgt

SEQ ID NO: 282450 - DNA, 344 bp, Glycine max
  unsure (1)..(344): unsure at all n locations
cctanacataaactgaatntcccnaatccccttcccaatttncnnnantacctaatgactcccaaaccacngcttcgancatggccgccnaatcacnacctcaactaatcnnagagagangngaggagcnagtactgaagtacctggaatttgtgcaattcgcgaccagccaggccctgatgcgctgcgccatcctctactcctatgccaaggagctcgcgggnccncggangcccgtcgtcaacancgtcgatgnngccgtgnagaccgtcgtggcnccgggctacgacaggttcnacctcgtcnccngcgaggtncgcaaatactngatcgcaaggttgcgt

SEQ ID NO: 282451 - DNA, 343 bp, Glycine max
  unsure (1)..(343): unsure at all n locations
cctaaacataaactgaanttcccaaatccccttcccaattttcaccaaaacctaatactcccaaaccaatcttcgatcatggccgccgaatcacaacctcaactaatcgaagagagaagagaggagcaanaacttaagtacctggaatttgtgcaattcgcgaccatccaggccctgatgcgctgcgccatcctctactcctacgccaaggagcgcgcgggtcctctgaagcccggcgtcaacaccgtcgaggaggccgtgaagaccgtcgtggctccggttacgacaggttccaccncgtccccggcgaggtcctcaaatacgncgatcgcaaggtcgccgt

SEQ ID NO: 282452 - DNA, 342 bp, Glycine max
  unsure (1)..(342): unsure at all n locations
ggatcgtgagaggggcagtagccgagattccgtgagttgcaaaaatgaagacgattctttccaccgagaccatgaacatcccggacggcgtgagcatcaaagttcatgccaaggtcatcgaagttgagggcccccgcggaaaattggtgcgagacttcaagcatttgaatctcgattttcagctcattactgacgaaaacggtaaaaganagctgaaaatcgacgcgtggtttggttctcggaaaacatccgccgccattcgcaccgccttgagccacgtggagaatcttatcaccggcgtcaccaagggctacgctacaaaatgaggntcgtttatnnccc

SEQ ID NO: 282453 - DNA, 338 bp, Glycine max
  unsure (1)..(338): unsure at all n locations
ggactaattggtatataccatgattggtgtgaatcatttggcacttatccaagaacatatgaccttttgcatgctgatcatttgttctcacggctcaaaaacaggtgcaagcagcctgtgaccattgttgtcgagatggaccgtatattacggccaggaggttggataattatacgtgacaaagttganattctaaatccgttggaggaaatattgaaaagtatgcagtgggagattagaatgacttttgctcaagacaaggagggtatcttgtgtgcacggaaaactatgtggaggccttgagtctctattatatgcaattcttcttgtatacacac

SEQ ID NO: 282454 - DNA, 341 bp, Glycine max
  unsure (1)..(341): unsure at all n locations
gcaactntggcactgcntgcatctgttactgcacctgtatcggcaccttctccagcncnagccccagctcctgctccnatatcttcaggaactgcttttgaagggtctgatatcnatnggcaggctgcgtccaatctggttgctggaagcaacttggagggancaantcagcnaattcntgatacgngtggagggngctgngacanggatactgtggtccgtgctcntcgagctgccnacaacanccctgagagagctgttgaatatntgtatacngnnatccctgagcaagctgangctccacttgtagctcgggcgcctgtnagtgctcnanctacaag

SEQ ID NO: 282455 - DNA, 342 bp, Glycine max
  unsure (1)..(342): unsure at all n locations
cacacaatgacnacaagtacntccttacaatcaaaancanccaataactancngcattnancaaaagcactacgatgatcagggtcgcnaggttgacgantatggcaacgttgagaagcataccgacgantacggcaaccctgttgcatgctgctagtgtcacctatgtagccnccagnactgctgctggtggttacagtgatgtcattaatnatcaacatgataccaccaatgcctacggcgggggtactggtagacagcattctagtggtggctacgatggtgacactantnaacagcatggnactactggtggctataatgatgacaccaatagtcatc

SEQ ID NO: 282456 - DNA, 337 bp, Glycine max
  unsure (1)..(337): unsure at all n locations
ggaagccagtggttaccaaggttgatcagcttcgcccggggacnagcgggcacacnttaactgtnaaggtggncaatgctaagatggtgatgcagaaaggtcgttctgatggtcctcantcccgtcagatgcgaatttctgaatgtttggttggcgatgagactggaatgntcatatncactgccaganatgatcaagtggatatgatgaangaggctgctactgtgatcctgcgcaatgccanaattgacatgttcaaaggatcaatgaggcttgntgttgacaagtggggncgtgtggaagtcacagancctgcgagtttactgtgaaggtagat

SEQ ID NO: 282457 - DNA, 341 bp, Glycine max
  unsure (1)..(341): unsure at all n locations
ccaagcacctccctaatccagatngagaatgtaaactctaaggangaagttgcgtggtactgtgggaagcgcatggcttacatctacaaagcgaaggtaaagaagaacggaagccactatcgctgcatttggggtaaggtcaccaggcctcatggtaacagtggtatagttcgagctaagttcnagtccaatctgccacctaggtcaatgggtncaagggttagagtattcatgtatccaagcaatatatgagatcatgaagtgtaaaacctttctgcttgngctancncttnnccgngaaattgntccnatnttctccaggttngtgttngtggggctnt

SEQ ID NO: 282458 - DNA, 339 bp, Glycine max
  unsure (1)..(339): unsure at all n locations
ctcttcctgggccagtgantgaccctgcaaagcttccaaagtggnactacgatggctctagcacagaccaagctccaggggatgacagtgaagtcatcctatacccacaagctattttcaaggacccctttaggagaggcaacaatattcttgtgatttgtgatgtttacacccccgctggtgagccacttccaaccaacaagaggtangatgctgccaaaattttcagccancctgacgttgctgctgaggaaccatggtatggtattgagcaagnatataccttgttgcagaaagatgtaaattggccattgggtggccacttggtgggtttcctgg

SEQ ID NO: 282459 - DNA, 324 bp, Glycine max
  unsure (1)..(324): unsure at all n locations
cggangacgaagctgaataagatggtgccaatattgatcttgactcanaaagnaagggaaagtntgttgtgctaaagacttctactcgacaganaatcnttcnacctgntgttgggcttgttgacccttacaagttaaaacccggtgatctggttggtgnaacaaggatngtaannnaatctggaataacctgcctccgatatgntnctatngttagggcaggnagttgttgaanngcgatagcggttaccatggcttggggattaagatngnttccagattgggtagngncagggtttgccatgncccngncggncaangtgt

SEQ ID NO: 282460 - DNA, 338 bp, Glycine max
  unsure (1)..(338): unsure at all n locations
accaacataacaatgtcgttgattccaagtttcttcggcaccgggcgaagaaccaacgtcttcgaccccttctccctcgacgtgtgggacccattccatggcttccccggcacnaccgccctctccgctccgcgctccgagacggcggccttcgccaacacgcgcatcgactggaaggagacggcggaggcgcacgtgttcaaggcagacctgccggggctgaagaaggaagaggtgaaggtggagatcgaggaggagggaagggtgctgcagataagcggacagagaacaaaggagaaggaggacaagancgacacgtggcaccgcctcgaacgctt

SEQ ID NO: 282461 - DNA, 331 bp, Glycine max
  unsure (1)..(331): unsure at all n locations
gnacgtcgtcgatgncgagcaggcccgcatcgnggangaggccggtgcctgcgcggtgatggccctggagcgtgtccccgccgacatccgggctcagggcngcgtggcccgcatnagcgatccgtgctcatcaaggatatcaagcgggccgtcaccatccccgtgatggccaaggcccgcatcggccacttcgtcgaagcccagatcntcgaagccatcggcatcgactacgtcgacganagcgaggtcctcaccctcgccgacgacgccaanacatcaacaaacacaacttccgcatcccctngtctgtggctgctgaactngggagcnt

SEQ ID NO: 282462 - DNA, 335 bp, Glycine max
  unsure (1)..(335): unsure at all n locations
gactaatgagtntaaaaatgaagttacantannagttaaactccaanacagaaatctggngaggttgcttggttgttgctttgaaaaggaagnaaggatgctagtttgtgaatactgaatacctaccaaataaaagcttggatgtcntnatttncggtcaatncagataaaaaccgaagctcgtcactgacttggaataagcgctttgaaatcattttggggattgctcaaggtgttttatatctntcatcaagattcaaggctgaaaataattcatagagatctaaaagccagcaatgtactacttgatgctgcaatgaatccaaaaatctcag

SEQ ID NO: 282463 - DNA, 330 bp, Glycine max
  unsure (1)..(330): unsure at all n locations
gtacgagaggaaccgttgattcgcacaattggtcatcgcgcttggttganaagccagtggcgcgaantaccgtgcgttggattatgactgaangcctctaagtcagaatccgggctagaagcgncgcgtgcgcccgccgtccgtttgccgaccagcagtagggggcctcggccccccaaaggcacgtgccgttggtnaccctcgtgaggcggattagccctacgagacgccttgaagcgcaattcccatcgagcggcgggtagaatcctttgcagacgacttaaatacgcgacgggtattgtaagtggcagatggcttntgcacgatcat

SEQ ID NO: 282464 - DNA, 341 bp, Glycine max
  unsure (1)..(341): unsure at all n locations
agctctaatgcattgttttggtcaaaaccccgagttaagagtgaattctacaaaatctatgattggtcatctactaggggcagctggcggtgtggaagctgtggccacaatacaggcaattagganagggtgggttcatcccaatatcaacctagaaaacccagataacggagtggatgctaaagtgcttgttggctcaaagaaagagagactggatgtcaaggcagccttgtcgaattcatttggttttgggggtcacaattcntcaatcatatttgcaccatactagtgaaacagatttcagagcagtacntncttattattataagttactgagtanc

SEQ ID NO: 282465 - DNA, 332 bp, Glycine max
  unsure (1)..(332): unsure at all n locations
cacaaatcttagncgccattgatttttcctcttccatttctcttacttnctcagcctttttcgattacccatttggttatttcgcccnaatggctcttgctccatccaaagtttccaccttntntggtttttctcccaaacccagtgttgggggtgctcagaaaaacccaacttgctctgtttctctgagctttttgaatgagaaactggaagcagaaaccttagggttgtgcctcaacggtgcctctcactggggtgatntgtgaaccgtttgatgaggtaagaanagcgagcttgctgtnncaactgctcccnaagtctcgttgnctcgt

SEQ ID NO: 282466 - DNA, 332 bp, Glycine max
  unsure (1)..(332): unsure at all n locations
ganagctttgacgtaatcaattcaggatcaaagcctctcgctgcatatatatttacaaataccaagaagcttaaggagcaatttgttatgactatttcagctggcggtttggttgttaatgacactactttacatcttgcagttcatactttaccatttgggggagttggtgagagtggagtgggtgcataccatgggaaattcacatttgaagcttttagccacaaaaaagcagttctatatcgcagatttattggtgatgcaccagtaaggtacccaccatacacaaatacaaagatgagattgctgaaantctcataggtggtggcata

SEQ ID NO: 282467 - DNA, 334 bp, Glycine max
cacaaatcttagccgccattgatttttcctcttccatttctcttactttctcagcctttttcgattacccatttggttatttcgccctaatggctcttgctccatccaaagtttccaccttttctggtttttctcccaaacccagtgttgggggtgctcagaaaaacccaacttgctctgtttctctgagctttttgaatgagaaacttggaagcagaaaccttagggtttgtgcctcaacggtgcctctcactggggtgatttttgaaccgtttgaggaggttaagaagagcgagcttgctgttccaatgctccccaagtctcgttggctcgc

SEQ ID NO: 282468 - DNA, 337 bp, Glycine max
  unsure (1)..(337): unsure at all n locations
ccctgttatcattgttggtgctggggtttttgagaggaaggaccaggatgcaatttttgccgctgttgaaaccattgcgcaaaaagcaaatgttgtcagacctgactggaatggccttaatgttttacttctccatgctgcccaggctgctgcccttgaccttggacttgttccacaatctgagaaaagccttgagtctgcaaaatttgtatatttgatgggtgctgatgatgtaaacttagacaagatcccagatgatgcttttgttgtttatcaaggtcaccatggtgacaagagtgtttatcgagcaaattntattttgccagcagcagcattc

SEQ ID NO: 282469 - DNA, 272 bp, Glycine max
  unsure (1)..(272): unsure at all n locations
anagaaaggaaataattgatctttgaaaatgcagggaggaaagaaagctggagagtccatcaaggaaacagctgcaaacattggtgcttctgccaaggctggcatggagaaaaccanggccactgtccaggagaaggcagaaagaatgacggcactgatccgatgcaaaggagttggcacccagagaagggaantgaccagaactggcacaggnggnanataccggcganagtcagnagnctggcacctggnctantattccgntgacgcac

SEQ ID NO: 282470 - DNA, 350 bp, Glycine max
  unsure (1)..(350): unsure at all n locations
acagcatcgaacccgtcgtagcagaaaaacttgnccaccatggtttcttccgacaaggatccactataggatgtccttcaagcctggtacatggaatganantgatgaagatcnnagactcccncaccanaaanaacccaaggagtttgtctcgttggaccaacttgctgaacttggagtccttagctggaaactagatgctgataaccatgaaaatgatccaganctgaagnngattcgtgaagagcgtggttacacctacatggatgtttgtgaggtctgcccagaaganttgccaaattatgaacagaaaatcaaaagcttctntgaagagcatcttcacactgatg

SEQ ID NO: 282471 - DNA, 345 bp, Glycine max
acagcatcgaacccgtcgtagcagaaaaacttgtcaccatggtttcttccgacaaggatccacgagaggatgtccatcaagcctggtacatggatgatagtgatgaagatcaaagactcccccaccacaaagaacccaaggagtttgtctcgttggaccaacttgctgaacttggagtccttagctggaaactagatgctgataaccatgaaaatgatccagagctgaagaagattcgtgaagagcgtggttacacctacatggatgtttgtgaggtctgcccagaaaagttgccaaattatgaacagaaaatcaaaagcttctttgaagagcatcttcacactg

SEQ ID NO: 282472 - DNA, 349 bp, Glycine max
  unsure (1)..(349): unsure at all n locations
acagcatcgaanccgtcgtagcagnnnaacttgtcancatggtgncttcnnaganngatccacgagangatggcctgtnaagcctggtganatggatganagtgattaagatcaaagactctcccaccacaaagnacccaaggagnttgtctcgttggaccaacttgctgaacttggngtccttagctggaaactagatgtctgataaccatgagaatgatccagagctgaagaagattcgggaagagcgtggttacacctacntggatggtttgtgaggtctgcccagaaaagttgcnaaattatgaacaganantcgaaagctctttgaanagcatcntcgnnctnt

SEQ ID NO: 282473 - DNA, 344 bp, Glycine max
  unsure (1)..(344): unsure at all n locations
gagcgatttgtctggttaattccgttaacgaacgagacctcagcctgctaaatagctatgtggaggtaaccctccnacggccagcttcttagagggactatggccgcttaggccacggaagtttgaggcaataacaggtctgtgatgcccttagatgttctgggccgcacgcgcgctacactgatgtattcaacgagtctatagccttggccgacaggtccgggtaatctttgaaatttcatcgtgatggggatagatcattgcaattgttggtcttcaacgaggaattcctagtaagcgcgagtcatcagctcgcgttgactacgtccctgccctttgtacac

SEQ ID NO: 282474 - DNA, 344 bp, Glycine max
  unsure (1)..(344): unsure at all n locations
ctcgtcttctacaaaattttctgttcgatctcaaccaaggttgttccttccaccgccatgagtttcatcttcggaaaagcgaaaaacacccgcagagcttctgcgggaaaataagaggatgctggacaaatcaatcagagaaattgagcgcgagggncaaggcttgcaaacgcaaganaagaaattgattgcggagataaagaaaagtgccaaacagggccagatgggagctgttagagttatggcaaaagatcttgttagaacaaggcatcaggttgagaaattttataagctaaaatctcagctccaaggtgtatcactcagaattcagactttgaaatcaa

SEQ ID NO: 282475 - DNA, 341 bp, Glycine max
gatcttccaagaattgtgcaatatgtcttcctcaacgagtcagtcctgcgacgttgagcttaattcttgattattgtccattgtcatcaagtaccaggtcgctcaaacaaggaacgaaagtcttatgatgagaaattcattaggatggacacaaagcggctatgtgagttgacatctgctgcagacagccttcagttaaagccattggttgatcttacaagtcgtgcacttgctcggataattgaaggaaaatctccagaggagatacgcgagatatttcatctgcctgatgatcttactgaggaagagaagtggagccttgaaaaacacaactgatgacc

SEQ ID NO: 282476 - DNA, 338 bp, Glycine max
  unsure (1)..(338): unsure at all n locations
gccaaaattttcagtcaccctgatgttgctgctgaggaaccatggtatggtattgagcaagagtataccttattgcagaaagatgtaaattggccacttgggtggccccttggtgggtttcctggaccacagggcccatactactgtggaattggtgctgataaagcctatggccgtgatattgtagatgcacattacaaagcttgtatttatgctggcattaacattagtggcatcaatggagaggttatgcctggccagtgggaatttcaagttggtccttctgttggtactctgctggagatgagtgtgggtgccgntacatttggagaggatac

SEQ ID NO: 282477 - DNA, 285 bp, Glycine max
  unsure (1)..(285): unsure at all n locations
ctggtttcttcgggaaggtaggcatgcgctacttccacaaacttcgcaacaaattctacaatccgatcatcaacatcgannagctgtggtccctcctcccccaggaggccaaagacaaggccaccgccgacaaggcacccttgctcgatgtcacccagttcggttactttaaggttttgggtaaaggggttttgcctcagaaccagcctcttgtcgtcaaggccaagcttatttccaagatcgctgagaagaagatcaaggaggccggtggagccgtcgttctca

SEQ ID NO: 282478 - DNA, 281 bp, Glycine max
  unsure (1)..(281): unsure at all n locations
acaaaatgaaggaattggaaagcatctgcaatccaatcattgccaagatgtaccaaggtggtgctggtccagacgtgggtggtgctggtgcagcagaggatgagtatgctgctcctccttctggtggaagtggtgctggccccaagattgaggaagtggactaaatgtagttgctttcctccagatacctgttttaaaaacttattttactttatgcttttttaattggattttaatcgcatgatttttgttggatgggattcanactatttttcccttct

SEQ ID NO: 282479 - DNA, 284 bp, Glycine max
  unsure (1)..(284): unsure at all n locations
aaagaattgatcgttgaaaatgcagggaggaaagaaagcgggagantccattaaggaaacagctacaaacattggtggcttctgccaaggctggcatggagaagaccaaggccactgtccaagagaaggcagaaagaatgacagcacgtgatccggtgcaaaaggagttggcaacccaaaaganagaggcaaagatgaaccaggcggantggacaagcaggcggcgcgtcanataacacggcggccaaacagtccgccaccacggctgggcacatgggacatgg

SEQ ID NO: 282480 - DNA, 338 bp, Glycine max
  unsure (1)..(338): unsure at all n locations
gagaganagaganacaaaaccctaattggtgagtggcgaaaatggcgcanggtcggcggnatcannagcaacagtngnagcagtaaatcgangcangtgcagtgcttcgggcngangnagacagcggtggcagtgacctactgcaagcgtggtcgaggcctcatcangatcaatggcngcccgatcgagctggtgnagccggagatcctccgtttcaaggccttcganccaatcctcctcctcggccgcnancnctcgccngngtgganatgcncatcagantcaagggcggcggtcanacctcccanatctacgncatnaggcagagcatngctaat

SEQ ID NO: 282481 - DNA, 279 bp, Glycine max
  unsure (1)..(279): unsure at all n locations
ccactcgatgtttccatttgcctgcatgcctttggtattgtggggtgtggttcgtttagtggtgtcaagtcttgcganacgtgatggtgcatgagtggtaatcgggatgtttttgttgcacggctccatgcttgcgcatgcaacgtgtgacatgcatccttttcattgtcaccttagccttcgtggcttangtgctgacgattggttcctgtgttgcctacctaccaaacggtattcgtgtggctagtcagacccattccatccaggcctctttgttng

SEQ ID NO: 282482 - DNA, 335 bp, Glycine max
  unsure (1)..(335): unsure at all n locations
ggatgagggagggcgacacactgctttcttctctaactacaaacctcagttttacttgaggactgctgatgtcactggaaaagtagagttgcccganaatgttaaaatggttatgcctggagacaatgttactgccgtgtttgaattgatttcagcagttccacttgaagcaggacaaagatttgccttgagagaaggtggaagaacagttggtgccggtgtggtgtcaaaagtactgagctagtgcatttgccatgattcaagttttagtctacccatttgcaaagggggttggaaaccctgagacctgactttatcttgagaaatacaaacat

SEQ ID NO: 282483 - DNA, 335 bp, Glycine max
gctttgtttaagaatctctcaagaggacattatgaagcatcaaggatgtcagttgaaactggcccttatgtttttcatatattatagaaggacgtgtctgttacttgacaatgtgtgatcgtgcataccctaagaaactagcctttcaatatcttgaagagctgaggaatgagtttgagcgtgttaatgggtctcaaattgaaactgctgctagaccttatgccttcattaagtttgatacatttatgcagaagacaaagaaactttaccaggatacacatactcagcgcaatattgcaaaattgaatgatgaactctatgaagtcaccagataa

SEQ ID NO: 282484 - DNA, 335 bp, Glycine max
  unsure (1)..(335): unsure at all n locations
ttgtcctcaggcttcgtggtgncatcatcgagccttccctcatggctttggctcgcaaatacnaccaggacnagatgatttgncgcnaatgctatgctcgtctgcaccctagggctgtgaactgccgtaagangaagtgcggtcatagtaaccagttgaggcctaagaagaagatcaagtaaattctgggtgggatattgttggtctctactttcgttttgtttgtcttagaacagtgacttgtttggtatttatcgtttctggtttggattaatgttaattgttttgagacaatagtttgaactagtcaattatatttntatgatgccattttg

SEQ ID NO: 282485 - DNA, 337 bp, Glycine max
  unsure (1)..(337): unsure at all n locations
aaagatgcctgaggagattggtgctggtgaccaaggtcatatgttcggctatgccactgacgagactcccgatctcatnncttgagccatgtccttgccacgaagctcggngccaagctcaccgaggttcgnaagaacgggacatgcccttggctgagacctgatggcaagacccaagtcactgttgagtactacaatgacaagggtgccatggttccaatccgcgtccacactgtgctcatctccacacagcatgatgagccctgtcacaaatgatgagattgcagctgatcttaaagaacacgtgantaagcctgtgattcctgagaagtacctt

SEQ ID NO: 282486 - DNA, 333 bp, Glycine max
  unsure (1)..(333): unsure at all n locations
aaacagagcaaagagagagtgtgtgaaaagtgaaacaanaaacanaacaacaatggcnacacttaaggttcctcagcctcttccccccgttgcagatgattgtgagcagctccgaaaagccttctcaggttggggaactaacgangagctgattgtatcgatcttggctcataggaatgctgctcagnggaagcttatcaganaaacttatgcccagacctatggagaagatctcctcaaggccttggacaaagaactcacgagtgatttgagangctggttcatcttggacacttgaatctgctgaacgtgatgcattttggcaaacgaggc

SEQ ID NO: 282487 - DNA, 329 bp, Glycine max
  unsure (1)..(329): unsure at all n locations
cgttgggagcgttcgcgtttgtnctgcttttcctatcggcctcagcagacgangtcgttgtgctctctgaagataacttcgngaaggaagttggtcaggacagaggagctctcgttgagttctatgctccttggtgtggacactgcaaaaagcttgctccagaatatgaaaagcttggtagcagcttcaagaaagccaaatctgttttaatcggcaaggttgactgtgatgagcacaagagtttgtgcagcaaatatggagctctgggtancaacaattcagtggttncaaaaggacctcttgaaccaaaaagtatgaagggcngnntg

SEQ ID NO: 282488 - DNA, 233 bp, Glycine max
  unsure (1)..(233): unsure at all n locations
gacaatctttacaaggactgtatggaaacttgctctcaatctggtgaccgtgaactctcggaggatttgcttgtntactttattgagcaggagaagaaagaatgttttgcatcttgcctctttgtctgttatgatataatacggccagatgttgctcttgagctagcttggatgaacaatatgattgattttgctttcccatacctcttacagtttattcgagagtatactgg

SEQ ID NO: 282489 - DNA, 273 bp, Glycine max
attttagtaacctcaatggggacaagaggggtgacacaatggccctattgcacgaagcttgtgaaaaatggggctgcttatggttgagaaccatgaaattgacacacaactgatggagaagttgaagcagttaatcaatacatactatgaggaagacctaaaggaaagcttctaccagtctgagatagccaagaggttggagaaagagcagaacacctctgatatagattgggaaattaccttcttcatttggcatcgcccacctctaacatt

SEQ ID NO: 282490 - DNA, 332 bp, Glycine max
  unsure (1)..(332): unsure at all n locations
tggcttctaagcctgagaaacttgacacttcagtggttgataatggagataactggagtgtggggcagaggcagtgctttgtttagggagggttatgcttaagcaaagcaggctgttgtttatggatgaggcaacagcttctgttgattcccaaaccgatgctgttattcagaagatcatcagagaggactttgcagctcgtaccatcatcagcattgctcatagaataccaacagtaatggactgtgatagagttctagttgtagatgcaggcgggccaaagaanttgattcaccagccaacttgctccaaaggccattctcttngggnat

SEQ ID NO: 282491 - DNA, 360 bp, Glycine max
  unsure (1)..(360): unsure at all n locations
catccacagaaacaagagggcctaagctatgttgggattcacattccagttggtagagtccaagcagatgacatgnatgagttggctcgtttagccgacgaatacgccaccggtgagctcaggctcacagtggagcagaacattataatcccaaatgtggacaataacaaaattgatggcttgctcaatgagcctctcttgaaggggagattctcacccgaaccttctctattgatgaagactctggtggcatgcactggtatcaattttgtggacaagctataattgagacaaaggaaagggcattgaagtgactgaggaattggagaggcagtgctgtgactaggcctgtgagaatgc

SEQ ID NO: 282492 - DNA, 354 bp, Glycine max
cgcacgaatatcttgttgtttggagcgatccgagaaaaactctgtaaacatgttggtttaccaggacctccttacaggtgatgaagcttctctctgactccttccgttacaaggaaattgagaatggaatgctgtgggaagttgaggggaagtgggttgttaaaggagcagttgatgtagacattggtgcaaacccttctgctgagggtggaggagaagatgagggagttgatgatgcagctgttaaggttgttgacatgttgacacattcagacttcaggagcaacccgcattcgataagaagcagttgttaccttcatgaagaggttatccagaattgactcccaactcgtg

SEQ ID NO: 282493 - DNA, 357 bp, Glycine max
gggaagccagtgtttaccaaggttgatcagcttcgcccggggaccagcgggcacactttaactgtgaaggtggtcaatgctaaagatggtgatgcagaaaggtcgttctgatggtcctcaatcccgtcagatgcgaattgctgaatgtttggttggcgatgagactggaatgatcatattcactgccagaaatgatcaagtggatatgatgaaagaggctgctactgtgatcctgcgcaatgccaaaattgacatgttcaaaggatcaatgaggcttgctgtggacaagtggggccgtgtggaagtcacagaacctgctagttttactgtgaaggagataataacttgtctctcatg

SEQ ID NO: 282494 - DNA, 355 bp, Glycine max
  unsure (1)..(355): unsure at all n locations
ttcccacattgctgtcaagtttgctgaactcatgaccaagattgacaggcgatctggcaaagagcttgagaaggaacccaagtttttgaagaatggtgatgctggttttgttaagatgattccgaccaaacccatggtggttgaaactttctctgagtaccccccacttggtcgctttgctgtcaggggatatgcgtcaaactgttgctgtgggagtcatcaagaacgtgggagaagaaggatcctactggagccaaggtcaccaagctgcccagaagaagaatgaatcgtgcggtttngttcatcaggggtgtcgttcttatggttacnataatgttggttccttnccctgtgg

SEQ ID NO: 282495 - DNA, 355 bp, Glycine max
  unsure (1)..(355): unsure at all n locations
cgtgaagttttttctttgagaagtaaaagatctagtgcaagtnattaacatggaatctcagcaagcaaaccgtgaagaacttgatgagaaggcaaggcaaggtgaaactgttgttcctggaggaactggtgggaagagtcttgaggctcaagaacatcttgctgaaggaaggagccgtggagggcagacgaggaagcagcagctagggtcagaggggtatcatgaaatggggaccaaaggagggcagacaaggaaggaacagatggggagagaagggtaccaagagatgggacgcaaaggaggactcagcaccatggacaagtctggtggagacgtgctgaagaggaaggcatag

SEQ ID NO: 282496 - DNA, 360 bp, Glycine max
  unsure (1)..(360): unsure at all n locations
gctgatatatgtgaaactctatacataccagatctttagggcgttatcttatattcatcgttgtattggagtctgccatcggggatatcaggcctcaaaatctattggtcaatccacacactcaccaggttaaattatgtgactttggaagtgcaaaggttttggtaaaaggcgaaccaaatatatcatacatatgttctagatactatagagcacctgagctcatatttggcgcaactgaatatacttcagccatgacnctggtctgttggagtgtttcagctgagcngctnttgananctctgttccctggtgagatggagntgacaacttgttgagacaccaggtctgggncnccna

SEQ ID NO: 282497 - DNA, 362 bp, Glycine max
  unsure (1)..(362): unsure at all n locations
gtttgttgttcctcactgacctcaccatggcgaccagagccaagctttctttagctatcttccttttctttcttttagccttgatttcaaacctagccttgggcaaacttaaagaaaccgaggtcgaagaagatcccgagctcgtaacatgcaaacaccagtgccaacagcaacggcaatacactgagagtgacaagcgaacatgcttgcaacaatgtgacagtatgaagcaagagcgagagaaacaagtcgaagaggaaactcgcgagaaggaagaagaacatcaagagcagcatgaggaggaggaagaccaaaatccctacgtttttgaagagntaggnttttttcgaccagagtcgaaa

SEQ ID NO: 282498 - DNA, 353 bp, Glycine max
  unsure (1)..(353): unsure at all n locations
gcatccgcggcaggacggtaaccctccnacaacaacacttccgctgcgaaaaatgtctctggtggcgaacgaggatttccagcaacattctgcgtgtgctgaacaccaacgtggatgggaagcagaagataatgttcgcaatgacctccatcaagggtattggaaggagattcgccaacatcgcttgcaagaaggctgatgttgacatgaacaaaagggctggtgagttgactgctgctgagttggatagtgtgatgactgtggtggcgaaccctaggcagttcaagatcccagatggtttttgaacagaaagaaggattacaaggatggcaaatactctcaattgtgtctaa

SEQ ID NO: 282499 - DNA, 352 bp, Glycine max
aggctcagaaatcaaaagcctacttcaagagatatcaagtcaagttcaagagaagaagagagggaaaaaccgattaccgtgccaggattcggttgattaatcaggacaagaacaaatataacactccgaaataccgatttgttgttcgctttagcaacaaggacattgttgcacaaataatatctgctagcattgctggcgatattgttcttgctgcagcatatgcacatgagctgccacaatatggtcttgaagtagggcttacaaattatgctgcagcttattgcactggtctcctgttggcccgaagagtcctcaatacacttgaatggatgaggagtatgaaggaaat

SEQ ID NO: 282500 - DNA, 350 bp, Glycine max
atagagaccagcttttgcttctttgtgaacatggagatgaggaaatcatgtggcttcttcttcttgctcctcctccttgtcttgcttcccaggtggtggtgcagacggagggaagagtgtgtgagtcacaaagccacgggttccatggtttgtgtaatagagaccacaactgtgctttggtctgcaggaacgaaggtttctccggtggcaggtgcaaaggcttccgccgccgctgcttttgcaccaggatttgttgagatctcatcaaacactactcttgccatgcaaattaataaatcatagctaggccaaataaatgcatctactctttatccattggggagctagct

SEQ ID NO: 282501 - DNA, 347 bp, Glycine max
  unsure (1)..(347): unsure at all n locations
gcctaatgttgtaaagttgcttgacattgttagagaccagcaatcgaagaccccaagtcttatatttgaatatgtcaataacactgattttaaagtgctctatcctacattgtcagactacgacatacgatattatatttttgaacttctgaaggcactggattattgccattcacaaggaatcatgcatcgtgatgtgaaaccacataatgtaatgattgatcatgagcagcgtaagttcgccttatagattgggggctgcagagttctatcatcctgggaaagaatatatgttcgtgtggcatcaagatattcaangtccgagcttcttgttgatcttcagntat

SEQ ID NO: 282502 - DNA, 347 bp, Glycine max
  unsure (1)..(347): unsure at all n locations
gnggcgcancatggnattcggagtnccccancaaagcgttaangagcacgcgtttttccgacctgaatccaccantctctgaaccggttctcaangccctatnacactctggcttcnagttctgcacccctgtcnaagctgccactattcctctgctctgcagcttcaaggacgtcgccgtcgacgccgccaccggttccggcaaaactctagcttttgncgttcctctcgtcgagattctangccgntcctcttctcatcccaagcntcaccaggtgctaggantaattatatcccctacaagggagctatcaactcaagtatatctgttgaanactnnnntttca

SEQ ID NO: 282503 - DNA, 343 bp, Glycine max
gagagggagtcagagaaaccctaggtaagaagaaaagatgccggctggtcatggtttgagatcccgcaccagagatttccttctctcgtctttcaggaagaagggaaccatcgccctcaccacatacctgagaacctaccacgtcggcgactatgttgacgtcaaggttaacggtgccgttcacaagggatgccccacaaattctaccatggccgcaccggacgcgtctggaatgtcaccaaacgtgctgttggcgtcgaagtcaacaagcaggttggcaacagattataaggaagaggttcatgtgcgggtagagcatgttagccttcaagtgcatgaggag

SEQ ID NO: 282504 - DNA, 352 bp, Glycine max
  unsure (1)..(352): unsure at all n locations
gtttgaaacaacaaagtattattgcacagttattgatgcgcctggacataggggatttcattaagaatatggattactggggacatcccaagctgactgtgctgttcttatcattgattcgaccactggtggttttgaagctggtatttccaaggatggacagactcgtgaacatgctctgctttcattcacccttggtgtgaaacagatgatttgctgctgtaacaaaaggatgctactacacccaagtattccaaggccagtatgatgaantgtgaaggaagtctcttcctacttgaagaaagtaggatacaaccctgacaagatcctttgtcctactctggtttgaggg

SEQ ID NO: 282505 - DNA, 350 bp, Glycine max
  unsure (1)..(350): unsure at all n locations
ctaaagccgagcagcgagagagagaaaccctagcaaaaatgccggctggtcacggtttgagatcccgcaccagagattcttctctcgtcccttcaggaagaagggtaccatcgccctcaccacatacctcagaacctaccacgtcggcgattatgtcgacgtcaaggttaacggcgccgtccacaagggaatgcctcacaagttctaccatggccgcancggtcgcgtctggaatgtcaccaaacgtgctgttggggtcgaatcaacaagcaggtcggcaacagaatcataaggaagaggttcacgtgcgtgtggagcatgttatgccatcnaggtgcatgangattccg

SEQ ID NO: 282506 - DNA, 341 bp, Glycine max
  unsure (1)..(341): unsure at all n locations
gagatatatagancaacaaaggaganaagatagaaatggagaagtttccagttgttgacatngnnagacnttaataatgaagagagatcagcaaccatgggagataatcaaagatgcctgtgagaactggggtttcttgagttggtgaaccatgggatatccatagagttgatggacaccgtggagaggatgacaagagagcactacaaaaagtgtatggagcaaaggttcaaatagtggtagcaagcaaaggtttggagtctgctcaatctgaaatcntgnttggatggnaagcctttcttttgcgccacctcctgctctacatctcagagtcctgatct

SEQ ID NO: 282507 - DNA, 348 bp, Glycine max
  unsure (1)..(348): unsure at all n locations
gtactccgtctacgtggtggatgcaaatctttgttaagactctgaccggaaagacaatcacccttgaggtggagagtcnggacaccattgacaatgtnaaggccaagattcaggacaaagagggtatcccaccagatcaacagaggctcatctttgctggaaagcagcttgaggatggccgtacccttgctgattacaacatccagaaggagtccactcttcacttggtactccgtctacgtggtggaatgcaaatctttgttaagactctgaccggaaagacaatcacccttgaggtggagagctctgacaccattgacaatgttaaggctaagattcaggacaang

SEQ ID NO: 282508 - DNA, 337 bp, Glycine max
  unsure (1)..(337): unsure at all n locations
gatttgtgaaagtaagagtgagatctgttcgtataccacagattggtgataaattcagtagtagacatggtcagaaggggacagttggtatgacttatacacaagaagacatgccctggactgtggaaggcattacccctgatattattgtcaatccacatgctattccttctcgaatgacaattggtcagcttattgagtgtatcatggggaaggtggcagccacatgggaaaagaaggagatgcaactcctttacagatgttactgtggacaatatcagtaaagctctacacaangtgggtacaaatgcgtggtttgagctagtacatgnccaac

SEQ ID NO: 282509 - DNA, 345 bp, Glycine max
gtggcttctaagcctgagaaacttgacacttcagtggttgataatggagataactggagtgtggggcagaggcagttgctttgtttagggagggttatgcttaagcaaagcaggctgttgtttatggatgaggcaacagcttctgttgattcccaaaccgatgctgttattcagaagatcatcagagaggactttgcagctcgtaccatcatcagcattgctcatagaataccaacagtaatggactgtgatagagttctagttgtagatgcagggcgggccaaagatttgattcaccagccaacttgctccaaaggccatctctctttgggggcatagttcaag

SEQ ID NO: 282510 - DNA, 345 bp, Glycine max
  unsure (1)..(345): unsure at all n locations
gtactccgtctacgtggtggaatgcaaatctttgttaagactctgaccggaaagacaatcacccttgaggtggagagctctgacaccattgacaatgttaaggccaagattcaggacaaagagggtatcccaccagatcaacagaggctcatctttgctggaaagcagcttgaggatggccgtacccttgctgattacaacatccagaaggagtcnactcttcacttggtactccgtctacgtggtggnatgcaaatctttgttaagactctgaccggnaagacnatcaccttgaggtggagagctctgacaccatgacaatgtnaaggtaagatcagggacaag

SEQ ID NO: 282511 - DNA, 349 bp, Glycine max
gccactccgcacctcgcagcctctgtgccctcaacaaccatggctgaaatcgaaactaccgttccagatcccacccaaatcgacgtcaaactcttcaatcgctggagcttcgaggatgttgaggttaatgatatgtctctggctgattacattggagtgtccccatcaaagcatgctacatatgttcctcacactgctggtaggtactcagtgaagaggttcaggaaagcgcagtgccccattgttgagaggctcaccaactctctgatgatgcacgggaggaacaatggaaagaagctcatggctgtcaggattatcaagcatgccaggagatcatccattgctcatg

SEQ ID NO: 282512 - DNA, 338 bp, Glycine max
cagagggctcttcccggtgataatgttggattcaatgttaagaatgttgctgttaaggatctcaagcgtggttatgttgcctcgaactcaaaggatgatcctgccaaggaggctgctaacttcactgcccaggttatcatcatgaaccatcctggtcagattggaaatggctatgcccctgttcttgactgccacattcccacattgctgtcaagttgctgaatccagaccagatgacaggcgactggcaaagagctgagaaggacccagttttgaagatgggagctggttgtagtgatcgaccaaccaggggttaaattctctgagtaccccatggt

SEQ ID NO: 282513 - DNA, 304 bp, Glycine max
  unsure (1)..(304): unsure at all n locations
ctggtattctaaggatggacagacccgtgagcatgctcttcttgctttcaccctagtgtgaagcagatgatctgttgctgtaacaagatggatgccactanccccaagtactctaaggctaggtatgatgaaatcgtgaaggnagtctcttctacttgaagaagttggttacaaccagacaagattcctttgttcccatctctggtttgaggtgacacatgatggagtcacaactgntggtaaaggcaattctgagtctgacaacatgaccaagctcgaaacttagtcatgagtgctnantgng

SEQ ID NO: 282514 - DNA, 364 bp, Glycine max
  unsure (1)..(364): unsure at all n locations
ctgaaaagtttaaggagttaggtcaagcatatgaagttttaagtgatcctgagnagaaagaactgtatgaccagtatggtgaagatgcccttaaagaagggatggggggaggangctcgtttcataatccatttgatatatttgaatcatttttggaggagcaagctttggtggtggtggtattcccgaggtagaagacagaagctggtgaagatgtngtgcattctttaaaggtttccttggaggacgtttataatggcacaacaaagaaactatctctttctagaaacctattatgcccanaatgtaaagggaaagggtcaaaaagtggnactgctggtagtgtttgaacacaaaacaacaa

SEQ ID NO: 282515 - DNA, 162 bp, Glycine max
  unsure (1)..(162): unsure at all n locations
gcctctcagagaagtctccttgaggncatggctgaatttccatcagccaaacctccaattggtgtcttttttgcagcagntgctccncgcctgcagcctagattttattcgatctcctcatctccaagaatggngccaaacagaattcatgtnacctgtgca

SEQ ID NO: 282516 - DNA, 175 bp, Glycine max
  unsure (1)..(175): unsure at all n locations
caaaccctggggaagtcatcaagccaggtcaatataaagcaataaatgatgagggaatgccacaacacaataggccattcatgaagggtcgcctttacatccagtttaatgttgatttcccagactcagggtttctttcccctgaccaatgccagtnactggaaaaggtgttacc

SEQ ID NO: 282517 - DNA, 345 bp, Glycine max
  unsure (1)..(345): unsure at all n locations
caggttagtttaacctactgatgacntgtcgcaatagtaattcaacctagtacgagaggnaccgttgattcgcacaattggtcatcgcgcttngttgaaaagncagtggcgcgaantaccgtgcgttngattatgactgaacgcctctaaatcagaatccgggtannanggacggtgcggccgccgtccntttgccgaccaacagtaagggggcctcggnccccccaaaggcacgtgccgtttggtancctngtaaggcggattaaccctaaganaggcnttaaancgnatttccatggaanggggggnaatcttttcaanggnttaaancggacgggggnttta

SEQ ID NO: 282518 - DNA, 236 bp, Glycine max
  unsure (1)..(236): unsure at all n locations
agtgtgtagttggtgaagtttttgagaagaatatggaacgaagtgccggaatggtaacggggtcgcatgaaaggaacgaacttgtnagagttagacacggttctnacagtgggtctaaacccttgaagaatttaaatggtcagatttgtcaaatatgtggtgacaccattggattaacggctactgtgacctctttnttgcttgtcatgagtgtggcttcccantttgtcattctt

SEQ ID NO: 282519 - DNA, 231 bp, Glycine max
  unsure (1)..(231): unsure at all n locations
caagtccaacctacccctttttcttctcccaccaacttcaccgtcttcttactcgatcatgtctcacttcaagggcaagtaccatgatgagcttattgccaatgctgcttacattggcactcctggaaagggtattcttgctgctgatgagtcaacagggacaattggcaagcgtttggccanatcagtgtagagaatgttgaatccaacaggcgtgctcttagggagctg

SEQ ID NO: 282520 - DNA, 238 bp, Glycine max
  unsure (1)..(238): unsure at all n locations
atgcgtgcagcacaacaacttacataggctttcaggcantcatgactgaagaagagtccaagaaatttgaaggtcttcccggagtcgtcttcgtgctaccagattcctatattgatccggtgaacaaacaatananaggagatcagtacattaatggaacaattatcccttgacctccaccagtacagtagggaggaatcagggaagacgagactggaataagagtcctggtcaatac

SEQ ID NO: 282521 - DNA, 239 bp, Glycine max
aatcagaagcatcttgtgcgcttcatcaagtccaaattaagaaaagaatctgatgaggttgttatctttagagatggaaaatatatgacccttaaggaggtttttgagagtttggatttgactggatatgatctgaatgttgatttgttggacgtccatgcagataagagcacattccatagatttgacaattcaaccttaagtataatccttgtggacagagcagactaagagaaata

SEQ ID NO: 282522 - DNA, 247 bp, Glycine max
  unsure (1)..(247): unsure at all n locations
cctaaacaactctttctcttcttccttncgctcgttgttctccctcgcgtagatcgacaatggcggagacagagacgtttgctttccaggctgagatcaaccagctcctcagtctcatcatcaacaccttctactccaacaaggagnttttccttcgtgaactcatcagcaacgcctccgatgctttggacaagatngatttgagagtttgacagataagagcaagctcgatgctcagccagagttg

SEQ ID NO: 282523 - DNA, 238 bp, Glycine max
  unsure (1)..(238): unsure at all n locations
agctttcttcaaaatctaaacaaggaaatcgtnagtttgtgaatgagatgggactgatatctggacttcaacatcccaatcttgttaagctttatggatgttgtgtggagggcaaccagctaatactgatatatgagtacatgggaaacaattgtctatctcgcattctttttggcagggatccaaacaaacaaaacttgactggccaacaaggaagaaaatttgtcttggtatagct

SEQ ID NO: 282524 - DNA, 239 bp, Glycine max
  unsure (1)..(239): unsure at all n locations
accaatcgtcccgaaacgtttctcagaggagtggacgaggcccagtcttccacttcggttcgggcccgcttcgagaagatgataagggaggcccaggacaccgtgtgcagtgccctcgaggccgctgatggtggggcccagttcaaggaggacgtttggtccaggcccggtggcggcggtggcnncagcaggtccttcaagacggtgccgtttgggagaaggctggggttaatgtctct

SEQ ID NO: 282525 - DNA, 235 bp, Glycine max
  unsure (1)..(235): unsure at all n locations
caggttagttttaccctactgatgacagtgtcgcaatagtaattcaacctagtacgagaggaaccgttgattcgcacaattggtcatcgcgcttggttgaaaagccagtggcgcgaantaccgtgcgttggattatgactgaacgcctctaagtcagaatccgggctagaagcgacgcgtgcgcccgcgtccgtttgccgaccagcnntagggggnctnggcccccaaaaggang

SEQ ID NO: 282526 - DNA, 236 bp, Glycine max
  unsure (1)..(236): unsure at all n locations
agaggatactgaggcttggggaatagaaccatatgagttagatgatgttggtgcaaagtgtaaaagtcttgtacgcaagggcattgtgcgtgtggctgatttgaagttttctctaccctaccgtgcaaagtcattttctctggttattgtgtcagatgcattggattacttatctccaagatacctgnataaaaccctgccagagttggtgagggtgtctgctgatggtgttgtta

SEQ ID NO: 282527 - DNA, 242 bp, Glycine max
  unsure (1)..(242): unsure at all n locations
cgatggctctagcacagaccaagctccaggngatgacagtnaagtccatcctatacccacaagctattttcaaggacccctttaggagaggcaacaatattcttgtgatttgtgatgtttacacccccgctggtgagccacttccaaccaacaagaggtatgatgctgccaaaattttcagccaccctgacgtgctgctgaggaaccatggtatggtattgagcaagaatataccttgttgc

SEQ ID NO: 282528 - DNA, 252 bp, Glycine max
  unsure (1)..(252): unsure at all n locations
gnaagacaatcacccttnaggtggagagctctgacaccattganaatgttaangctaagatncangacanaganggtatnccancagaccancanaggctcanctttgctnganancagctagacagatggccnaaccttngntgnttacnacatccnctaagaatctaccctccacttggttctccgcctncgnggtgggtnaaaatctttgtcaagactctcactggnaagaccatcacccttgaggtgg

SEQ ID NO: 282529 - DNA, 242 bp, Glycine max
  unsure (1)..(242): unsure at all n locations
gcaagatgggtaaggaaaaggttcacatcagtattgtggtcattggccatgtcgactctgggaaatccactaccactggtcacctgatttacaagcttggaggcattgacaagcgtgttattgagaggtttgagaaggaagctgctgagatgaacaagaggtctttcaagtatgcctgggtgctgnacnaacttaggctgagcgtgaaagaggaatcaccattgatattgctttntggaagt

SEQ ID NO: 282530 - DNA, 238 bp, Glycine max
  unsure (1)..(238): unsure at all n locations
atcgagccgggctattaagggtgagatatatagaaaaacaaangannaaagatagaaatggagaagtttccagttgttgacatggggaaccttaataatgaagagagatcagcaaccatggagataatcaaagatgcctgtnagaactggggtttctttgagttggtgaaccatgggatatccatagagtgatggacaccgtggagaggatgacaaaagagcactacaaaaagtgtat

SEQ ID NO: 282531 - DNA, 236 bp, Glycine max
  unsure (1)..(236): unsure at all n locations
cttgcggctagggttttagcgcacttccttctagatttaaggaancatgggtaaggaaaaggttcacatcagtattgtggtcattggccatgtcgactctgggaaatccactaccactggtcacctgatttacaagcttggaggcattgacaagcgtgttattgagaggtttgagaaggaagctgctggatgaacaagaggtctttcaagtatgcctgggtgctggacaaacttaa

SEQ ID NO: 282532 - DNA, 235 bp, Glycine max
cagatcttcgtcaagaccctcaccggcaagaccatcacccttgaggtggaaagctctgacaccatcgacaacgtcaaggccaagatccaggacaaggaaggaatccccccggaccagcaacgtctcattttcgccggaaagcaacttgaggacggccgtacccttgctgactacaacattcagaagggagtactcttcacctcgtcctccgtctccgtggtggcatgcagatctt

SEQ ID NO: 282533 - DNA, 234 bp, Glycine max
  unsure (1)..(234): unsure at all n locations
cacgtaatatgctagaaaagaagttggctgatgctgaagtctctgaggaagaacaacacaacttgcttcagcatttggagaaaaaggagagggaaatcatgcgccttcagagacataagatgggggctgatgactttgagcccctgactatgattgggaagggtgcatttggagaggttagaatctgccgggananggccactggccatgtttatgctatgaagaagcttaaga

SEQ ID NO: 282534 - DNA, 250 bp, Glycine max
  unsure (1)..(250): unsure at all n locations
aggagggtaaggtggaggatgttgacgaagagaaggagaaggaagaacaaaagnaaaagangattaaggangtgtcacatgaatngtccttggtgaacaagcagaancccatttggatganaaancctgaggagatcacaaaggaggagtattctgctttctacaagagtctcaccaatnactgggnagagctttggcgtcaagcacttctcanttganggacagttggagtttaaggctatcctctttg

SEQ ID NO: 282535 - DNA, 247 bp, Glycine max
  unsure (1)..(247): unsure at all n locations
aaatttgcaggagaagtggtttaccttccaaaggatgcatccatcccagttaccttgaaaaccagagaatatgaagttttcacaatagttcccgtgaaggaattgagcaatggtgtcgaatttgctcctattggtttaataaagatgttcaattcaggaggggctgtcnaagagtttaattggggatctaatgaaatacaaatgtagccatgaaagtccgtggttgtggccaatttggtgcttattc

SEQ ID NO: 282536 - DNA, 236 bp, Glycine max
tgacaagccttatggaattaatggtggcatggctttgagggaaggagttgatgcatctggcaggaaaggaaagggaaagggcgtttaccagtttgtagacaaatacggtgctaatgtcgatggttacagtcctatctacgacaccaaggactggtctccaaccggtgatgtctacgccacacggtacgactggcttggctatctgggctgtgactctacttggtcttcttgctggt

SEQ ID NO: 282537 - DNA, 232 bp, Glycine max
  unsure (1)..(232): unsure at all n locations
cctttttgggcacccagatttccaccattctgagtaacntcacacactatataacnnnaaatgagggggggcttatggcaactcgggcaatcaatcactcgccgtcttgcccagggtgataagaaggctgttgctcgtaggtattttgcctcagatgctgagctgaaaaagacagtcgtttatgacttccatgttgctaatggagggaagatggtgccatttgctggangga

SEQ ID NO: 282538 - DNA, 239 bp, Glycine max
  unsure (1)..(239): unsure at all n locations
gttctatgaggctttctctaagaacttaaagcttggtatccatgaggattcccagaacaagggaaagattgctgaattgctcaggtaccactccaccaagagtggtgatgagctgacaagcctcaaggattatgtgaccaggatgaaggaaggtcagagtgacatctactacatcaccggtgaaagcaaaaggctgttgagaactccccattcttggagaanttnaagaagaaagggta

SEQ ID NO: 282539 - DNA, 238 bp, Glycine max
gtaagcagcggctaccctaacctcgtcttcctctctactaatttcagctatggccgacgaagctgtggttgttccagatcccacccagatcgatgtcaagctctttaaccgctggagcttcgaggatattgaggttactgacatttcactggctgattacattggagttgcggcatccaagcacgccactatgttcctcacaccgccggaaggtactccgtgaagcggttcaggaagg

SEQ ID NO: 282540 - DNA, 238 bp, Glycine max
atcctaagtttattgagagaattttgcaagtgtgagaaacatggcatctcgtcaaaacaacaagcaagagcttgatgaaagagcaaggcaaggagagactgttgtcccgggtggaactggtggcaagagcctggaggctcagcaacaccttgctgaaggaaggagcaagggagggcaaacaaggaaggacagctgggtacagaagggtaccaggaaatgggacgcaaaggagggttga

SEQ ID NO: 282541 - DNA, 237 bp, Glycine max
  unsure (1)..(237): unsure at all n locations
acctactgcagctgccattgcatatggtcttgataagaaggccacgagtgttggtgggaagaatgtgttgatttttgaccttggtggtgggacttttgatgtgtctttactcaccattgaggagggtatctttgaggtgaaagccactgntggnanaccccatcttgggaggtggangatttngataaaggatggtgaaccactttgttcaagagttcaagagaaagaacaagaagg

SEQ ID NO: 282542 - DNA, 234 bp, Glycine max
  unsure (1)..(234): unsure at all n locations
gattcttcagttatganntatagccccacggattgccagagaccagaacttttaaacaagaacttgaagggtaatattcttctttgtggatattccttcaactttgttgttggctctgcatcaatcaagaaagtctcagaaacagcaaaggcccttggtgcagttggatttgttctttgtgttgaaacaattccccaggaacaaaatttgatccagtccctgttggtcttcctg

SEQ ID NO: 282543 - DNA, 261 bp, Glycine max
aacactagggtttacagagaagcgaagaggcgcagcgtaagcagtaactcgtggaattgctagcaatggcgaggatcaaggtttacgagctgaggcagaagacgaaggctgatctgttgaatcagctgaaggacctcaaggccgagcttgcctgcttcgtgttgctaaggtcaccggcggtgcacctaacaagctctctaagatcaaggtggtgaggttgaacattgcccaggttttgacggtgatttctcagaagcagaa

SEQ ID NO: 282544 - DNA, 262 bp, Glycine max
ggtgatggaagaaccgaacaagacagagaacgaagatgacagggacgaatcagaacaacgagtgtggagttggggtgctggaaccgagggacagttaggaacaaagattcttcaggatgagcacttccctcaactccttcaccaattctctctctcctccatctcttcccttgcctgtggcggtgctcatgtcatagccttaacctctgctggaaaggcactatcatggggtaggggcaattctggccaactgggccatggg

SEQ ID NO: 282545 - DNA, 261 bp, Glycine max
caaccatgtcgaggagaaaggttagagagccaaaggaggaaaacgtgactctgggcccagctgttagagatggtgaacatgtttttggagtcgctcgcatctttgcctccttcaatgacaccttcattcatgtcactgatctgtctgggagggaacacttgtccgcatcactggcgggatgaaggttaaagctgacagagatgaatcatctccatatgctgctatgcttgctgcgcaggatgttgctgctagatgcaagga

SEQ ID NO: 282546 - DNA, 262 bp, Glycine max
  unsure (1)..(262): unsure at all n locations
gcaggtgcttattagggatgggaataaggttacttttgatgaggctaacccttttgcgaatgagggtgaggaggttgcttctgtggcttataggtataggaggtggaagcttgatgatgatatgtatcttgttgcgaggtgtgaggtgcatagtgtncttgatgtgaacaagcagaggtcgttccttactttgaatgcgttgaacgagtttgatcctaagtattccggtgtggattggaggcagaantggnagactcagagg

SEQ ID NO: 282547 - DNA, 263 bp, Glycine max
cgaagaagagcgataatacgaggtactacgaaatcctcggcgtctcgaagaacgcttcgcaggatgatctgaagaaggcttacaagaaagccgccatcaagaatcaccctgacaagggcggtgatcccgagaagtttaaagagctggcacaagcattgaggttctgagtgaccctgagaagcgtgagatatatgatcagtatggtgaagatgcgcttaaggaaggaatgggtggtggcggtggccatgatccgtttgatatct

SEQ ID NO: 282548 - DNA, 270 bp, Glycine max
gcagactattcaacaaattatggacatgggtggtggcaattgggacagagacacagttagtcgtgctcttcgggcagcttataataacccagagcgtgctatagattatttgtattctggaatccctgaagcagccgaagttgctgtgccagttcctcaaacagctggtatgtcttctggagcagttcctgtaggacctaattcatctcccttaaatatgtttccacaggagacaatttctagtactggtgctggacttggatcgctgga

SEQ ID NO: 282549 - DNA, 260 bp, Glycine max
aaagaaaggaaataattgatctttgaaaatgcagggaggaaagaaagctggagagtccatcaaggaaacagctgcaaacattggtgcttctgccaaggctggcatggagaaaaccaaggccactgtccaggagaaggcagaaagaatgacggcacgtgatccgatgcaaaaggagttggcaacccagaagaaagaggcaaagatgagccaggcagagctggacaagcaggcggcgcgtcacattaacacggcggcgaaca

SEQ ID NO: 282550 - DNA, 258 bp, Glycine max
ggctccgctctttggtttgctcaaccgatctccgcagcaatggtgaacgttccgaagacaaagaagacctactgcaagagcaaggagtgcaggaagcacacgctccacaaggtcacccaatacaagaagggcaaggacagcatcgccgctcaggaaaacgccgttatgaccgcaaacagtccgttacggtggccagaccaagcccgttttccacaaaaaggcgaaaaccaccaagaaaattgtgttgaggctccagtg

SEQ ID NO: 282551 - DNA, 257 bp, Glycine max
gaccaaacagcatccgcggcaggacggtaaccctccaacaacaacacttccgctgcgaaaaatgtctctggtggcgaacgaggatttccagcacattctgcgtgtgctgaacaccaacgtggatgggaagcagaagataatgttcgcaatgacctccatcaagggtattggaaggagattcgccaacatcgcttgcaagaaggctgatgttgacatgaacaaaagggctggtgagttgactgctgctgagttggata

SEQ ID NO: 282552 - DNA, 262 bp, Glycine max
aacaacttctgctacttcctactccaaccgcacttctgctccgcaattatcatgggcaaggtcaagatcggaatcaacggatttggaagaattggccgtttggtagccagagtggctctgcagagagacgatgttgaactcgttgccgttaacgaccctttcatcaccaccgattacatgacatacatgtttaaatacgacagtgttcatggacactggaagcatcacgatgtcaccgttaaggacgagaagacccttctct

SEQ ID NO: 282553 - DNA, 260 bp, Glycine max
  unsure (1)..(260): unsure at all n locations
aganaggaaagaattgatcgttgaaaatncagggangaaaganancgggagagtccattaaggaaacagctacaaacattggtgcttctgccaaggctggcatggagcnagaccaaggccactntncaagnnanggcanaaagaatgacagcagncatccggtgcaaaaggagttggcaacccnnaanttagatgccaagatgaaccaggcggnnctngacaagcaggcggcgcntcagntaacacggnggccaaacagt

SEQ ID NO: 282554 - DNA, 258 bp, Glycine max
gcgtgatgaaggtgctctcaagtttcttaaagatatcaagtggagcaggatagaaaatcctaaaggattcaagcttgagttcttctttgataccaatccttacttttcaaataccatcttgacaaaaacatatcatatgattgatgaggacgacctatattggagaaagccattgggacggaaattgaatggtacccgggaaaatgtttgactcagaaggttttgaagaaaaagcctaagaagggttcaaagaatgct

SEQ ID NO: 282555 - DNA, 263 bp, Glycine max
cgctgttcctacaatcattccaaatgtgcccttccggtcgcaccctcctcccttcctccgtctccgatttccgaccggcattcgacgtcctcgatgccgaccgcgacggcaaaatcagccgcgacgacctccgcgccttctacgccggagtcggggcggaggagatgacgtgatcggggcaatgatgacagtggctgacaccaataaggacgggttcgtggagtacgaggagttcgagcgcgtggtctcggcggagagaaagc

SEQ ID NO: 282556 - DNA, 256 bp, Glycine max
ctcctagctggctcaagatctcttcgcaagatgtcgaagaaaatatctgcaagtttgcgaagaaaggtttgaccccgtctcagattggtgtcattctcagagattctcacggtattgctcaggtcaatagcgtcactggcagcaaaatccttcgcatcctcaaagctcacggacttgcgcctgaaattccagaggacctgtaccatttgattaagaaggcagtttcaattaggaagcatcttgagaggaacaggaa

SEQ ID NO: 282557 - DNA, 253 bp, Glycine max
cccacacagggtggctttgctgaaaccatgatcgttgagcaaaagtttgtggtgaagattccagagggtttggcgccagagcaagtggcaccattactgtgtgcgggtgtgacagtgtacagtccactggtacactttgggctgaaaagagtgggctaagaggtggaatattggggcttggaggagtgggacacatgggggtgaagatagcaaaggcactgggtcatcatgtgactgtgataagctcttctga

SEQ ID NO: 282558 - DNA, 254 bp, Glycine max
cccagtgcagtatcgttgagaaataaggggaaaaaatggtgtcgctgaaactgcagaagcggctggccgcaagcgtgctcaagtgtggcagaggaaaggtgtggcttgaccccaatgaagtcaacgaaatctccatggccaattctcggcaaaacatcaggaagttggttaaggatgggtttatcatcaggaagccaaccaagattcactcacgctcgcgtgctcgtaggatgaaggaggcaaagaagaagggc

SEQ ID NO: 282559 - DNA, 255 bp, Glycine max
gcaagagcttgatgaaagagcaaggcaaggagagactgttgtcccgggtggaactggtggcaagagcctggaggctcagcaacaccttgctgaaggaaggagcaagggagggcaaacaaggaaggaacagctgggtacagaagggtaccggaaatgggacgcaaaggagggttgagcactgtggacaaatcaggagaagaacgtgctcaagaggaaggcattggcatcgatgagtccaagttcaggactggtaat

SEQ ID NO: 282560 - DNA, 257 bp, Glycine max
aaagaaaggaaataattgatctttgaaaatgcagggaggaaagaaagctggagagtccatcaaggaaacagctgcaaacattggtgcttctgccaaggctggcatggagaaaaccaaggccactgtccaggagaaggcagaaagaatgacggcacgtgatccgatgcaaaaggagttggcaacccagaagaaagaggcaaagatgagccaggcagagctggacaagcaggcggcgcgtcacataacacggcggcgaa

SEQ ID NO: 282561 - DNA, 264 bp, Glycine max
gggaaacctgaataatgaagagagatcagcaaccatggagataatcaaagatgcctgtgagaactggggtttctttgagttggtgaaccatgggatatccatagagttgatgatggacaccgtggagaggatgacaaaagagcactacaaaaatgtatggagcaaaggttccaagaaatggtagcaagcaaaggcttggagtctgctcaatctgaaatcaatgatttggactgggaaagcactttctttttgcgccatcttcct

SEQ ID NO: 282562 - DNA, 252 bp, Glycine max
ggaagaacttggtcaagaagtgcattgagatgttctttgaaattgctgagaacaaggaagactataacaagttttatgaagccttctctaagaatctgaaacttggtattcatgaggattctcagaacaagacaaaacttgctgaattgctcaggtatcactccaccaagagtggtgatgagatgaccagcctcaaggactatgttaccaggatgaaggaagggcagaatgacatctactacattactggtg

SEQ ID NO: 282563 - DNA, 252 bp, Glycine max
cacaaacacacactgaactaaaaaacatcaaaagagacatggctgagcaaaccttcatcatgatcaagcctgatggcgtccaaagaggccttattggcgagatcattagcagatttgagaagaaaggtttctacttgaaaggtttgaaacttgttactgtggaccgtccttttgctgagaagcactatgctgatttgtctgccaagcctttctttagtggtttggtggattacattatctctggccctgttg

SEQ ID NO: 282564 - DNA, 253 bp, Glycine max
aacttaactcgtcgctttcttcatacttcttaccttctagtgataatgggaacgaatctcagcactcccaaaactgagaagtcttctgatgatggtgaaaatgagcatcttagatatggtttatcatctatgcaaggctggcgtgcacaatggaagatgcacatgctgcacatcttgatctggatgcatccacttccttttttggtgtttatgatggtcatggaggtaaagtggttgcaaagttttgtgccaa

SEQ ID NO: 282565 - DNA, 256 bp, Glycine max
aattggttttgaaggtttcgagaaaaggttggaaatatcctttttccagccgggactttttgctgaccctgaaggaaggggtctaagggctcttacaaaatcccagttgggtgagattctaacaccagctgcttgcaccattgtttcttcgctcaaaaacgataatgtcgactcctatgttctatctgagtccagcctctttgtttatgcctacaagatcatcatcaaaacctgtggtactactaagctattgctt

SEQ ID NO: 282566 - DNA, 259 bp, Glycine max
gttcaaagcgaaaagagattcgaatccaaggaagggaaaggaaagtaagagaagagaagaatggccgaagagggacaagtgattggtgtccacagcgtggaggagtgggaggaacatctcaagaagggacaagagtccaagaaattgattgtggtggattttactgcttcttggtgcggcccatgccgtttcattgccccaattcttgcggatatggctaaaaagttgccgaatgtcaccttcctcaaggtggatgtgg

SEQ ID NO: 282567 - DNA, 262 bp, Glycine max
ctcacaaacgcacactgaattcaaaaacatcgaaagagagaggcatggccgagcaaaccttcatcatgatcaagccagatggcgttcaaagaggccttattggcgagattattagcagatttgagaggaagggtttttacttgaaagggttaaactcgttactgtggaccgtccttttgctgagaagcactatgctgatttgtctgcaaagcctttctttagtggtttggtggattacattgtctctggccctgttgttgcc

SEQ ID NO: 282568 - DNA, 256 bp, Glycine max
acctattggtatcttctacaatatcctaaagtgtttttcttcttcttcatcaccatgtctttactttcagacctcatcaacctcaatctctcagaatccacagaaaagatcattgctgagtacatatgggttggtggatctggtatggacctcagaagcaaagccaggactcttcctgggccagtgagtgaccctgcaaaacttccgaagtggaactatgatgggtctagcacagatcaagctccaggggatgaca

SEQ ID NO: 282569 - DNA, 266 bp, Glycine max
ctgacaagccttatggaattaatggtggcatggctttgagggaaggagttgatgcatctggcaggaaaggaaagggaaagggcgtttaccagtttgtagacaaatacggtgctaatgtcgatggttacagtcctatctacgacaccaaggactggtctccaaccggtgatgtctacgctggcggtacgactggcttggctatctgggctgtgactctacttggtcttcttgctggtggtgcattcttgtctacaacacaagtgctt

SEQ ID NO: 282570 - DNA, 270 bp, Glycine max
gcctttttgggcacccagatttccaccattctgagtaacttcacacactatataacagaaaatgagggggggcttatggcaactcgggcaatcaatcactcgccgtcttgcccagggtgataagaaggctgttgctcgtaggtattttgcctcagatgctgagctgaaaaagacagtcgtttatgacttccatgttgctaatggagggaagatggtgccatttgctggatggagcatgccaattcaatataaggactcaattatggactc

SEQ ID NO: 282571 - DNA, 269 bp, Glycine max
gtatgctttgaagagccaatatgatacaagcatttatctgcagaacttattcttatatggatatggagctatattcaattttcttgggatacttgggactgttgttgtcaaagggcctagcagctttgatatcctacaaggtcattcaaaagccacaatgcttttgatagcaaacaatgctgcccaagggattttatcctctttcttcttcaaatatgcagatacaattttgaagaagtactcatcaacagtagcaacaatcttcaccg

SEQ ID NO: 282572 - DNA, 274 bp, Glycine max
  unsure (1)..(274): unsure at all n locations
gattgttgttgcagggaaaacacagagatccgggtcgacccgttgcagatccgatccaaataagaaaagatgaatattttcaggttagccggggacatgacccatttggccagcgtcctcgtccttcttctcaagatccacaccatcaaatcctgcgccggtgtctcattgaagactcaaganctctatgcactcgtttttgcttgtcgctacctagatatctttactaattatgtatctctctataataccactatgaagttgatattcttgg

SEQ ID NO: 282573 - DNA, 275 bp, Glycine max
tgcagaccgagctagctagctagcaagcaagcacagagatggaggcaaagcgaggccatgccctcatgtgcttggcacgtgtttcactcttcctctgcgctctaaccctatccgctgctcacggaagcaccacggttcaagacatcgcgagaaagttgaaactcggggacaacgagcttctgcgcacggagaagaagttcaaggttttcatggagaattacgggaggagctactccacagaggaggagtatttgcgccgtttggggattttcgcc

SEQ ID NO: 282574 - DNA, 275 bp, Glycine max
gaatttcaggagatcagaagccccgggatggtatcagacccttctaaggctaaggtggcaaaactggtggatggctaccttgctgagattgcacgtgatccaaatttacctcttgcaaaatttgttaatcttgctgaattagtatcaagctttacaagagcatctcatgatggcctttatcgtgccattgacatgtatttaaaggagcatcctggaatcagcaagagcgaaaggaaaaaaatatgtaggttgatgaactgcaggaacttatctgc

SEQ ID NO: 282575 - DNA, 280 bp, Glycine max
ggttgaaggcggcgtgagaagcatgttggacatcaacctattcagagaggagaagggccacaaccctgaattcatccgcgaatcccagcgccgtcgtttcgccagcgtcgaagtcgtcgacgaggtcatcaatctcgacaaagaatggcgaaagcgtcaattcgagttggagaatctccgcaaagaatttaacaagatcaacaaggaagtctccaaactcaagcgtgctggcgaggatgcaactaagttcatcagtgaatcagaggaaaccaagaaatcg

SEQ ID NO: 282576 - DNA, 282 bp, Glycine max
aaaagaatcttgcagcacaagcaaaggacgcaacgttagagaagggtcagcaaggctatgctgtgacaaaggacaccatttcaagtgcagcgaaaaccgcttcggagaaaactgcgccagtggcagagaaggccaaagactacactcttcaggctgcggagaaggccaagagtgcgggtggcacaacggcgagttacgtcggagagaaagcggtgcaggccaaggatgtcgccgtggagagtgggaagagtgcggctgggtatctgccaaggtggctctgat

SEQ ID NO: 282577 - DNA, 269 bp, Glycine max
  unsure (1)..(269): unsure at all n locations
ggagaaaccctagctagccacaatgcagatattcgtgaaanccctaacggggaagacgataaccctagaggtagagtcatcggacacaatcgacaatgtgaaggcgaagatccaggacaaggagggcatcccgccggaccagcagcgcctgatcttcgccggtaagcagctggaggacggccgcaccctcgccgactacaacatccagaaggagtccacgcttcacctcgtcctccgcctccgcggcggcgccaagaagcgcaagaaga

SEQ ID NO: 282578 - DNA, 266 bp, Glycine max
ctatttttcttcctcagtagtgtcatttacgcttctcttctctgcagcaactatgcctaaccctaaggtcttcttcgacatgaccatcggcggtcaatctgctggccgcatcgtgatggagctctacgccgacgtcactccccgcaccgccgagaacttccgcgcgctttgcaccggcgagaagggcgtagggcggagggcaagcccctccactacaagggctcgtccttccaccgcgtgatcccgagtttcatgtgtcagggtgg

SEQ ID NO: 282579 - DNA, 276 bp, Glycine max
ccaacgaggagtacagggccaagtacttgggaaccaagatcgatcccaaccggaggctcggcaagaccccgagcaaccgatacgcgccacgtgtcggcgacaaactacctgaatcggttgattggaggaaggaaggtgctgttcctccagtcaaagaccaaggaggctgtgggagctgttgggcattctcagcaatcggtgcagtggaaggaataaataagatagtgacaggtgaactgatttcgttatcagaacaagaattggtggattgtgatc

SEQ ID NO: 282580 - DNA, 282 bp, Glycine max
gtgaccggttgccggtgcacgtggattggagggtgaagggtgcagttgctccaatcaaagatcagggaagttgtggaagttgttgggcgttctcaacggtggccacagtggaagcaataaacaagatagtgacagggaagtttgtgtccttatctgaacaagaacttgtggactgtgacagagcctacaatgaaggatgcaatggtggccttatggactatgcattcgaattcatcattcaaaatggaggcattgacacagacaaagattacccataccgtg

SEQ ID NO: 282581 - DNA, 229 bp, Glycine max
gcttataacttttttctctttctctcaattcaattgccttctcccctgcgaatctcttctccacgtatcggagaacatggggaacaagatgaatgcgatcgcgttgtgcttgttagtgtcgaccctgttggtttctgcggtgtattgtgcaccgaatgctgggctccgtaggattgggctgaagaagattaaattggaccctaaaaacaggcttgctgctcgagttggg

SEQ ID NO: 282582 - DNA, 267 bp, Glycine max; identical to SEQ ID NO: 153873

SEQ ID NO: 282583 - DNA, 268 bp, Glycine max
gagagagaaggcaagatgtcgaagagaggacgcggtggttcggcggggaacaagttccggatgtcgctgggtctgccggtggcggcgacggtgaactgcgccgacaatacgggggcgaagaacctctacatcatatcggtgaaagggatcaaagggcgtttgaaccgtctcccctcggcttgcgttggcgacatggtgatggccaccgtgaagaaggggaaacccgatctgaggaagaaggttttgccagctgtcattgttcgccagc

SEQ ID NO: 282584 - DNA, 269 bp, Glycine max
  unsure (1)..(269): unsure at all n locations
attcattagctatccaatttctctttggattgaggagaccactgaaaaggagatttctgatgatgaggacgaggaagagaagaaggatgaggagggtaaagttgaagatgtggatgaagataaggagaaggaggagaagaaaaagaagaccattaaggaggtatctcatgagtggtcattggtgaacaagcagaagcctatttggatgaggaaacctgaagagatcacaaaagaagantatgctgctttctacaagagtcttaccaatg

SEQ ID NO: 282585 - DNA, 272 bp, Glycine max
caccgctgatactatcttcgacataaatggtgattttgtccgaaacggtggcacatactacatcttgccagttataagaggagacggaggtggaatagaattcgccgcaacaggaaacgaaacatgccctctcactgtagtgcaatctccccttgaggtctctaagggtctaccactaatcatttcatcaccattcgaaatccttagcatccaagaaggccttattttgaacattgggttcacttttgtgcccccctgtgccctaattcctt

SEQ ID NO: 282586 - DNA, 274 bp, Glycine max
gattcgctcgccttgcttcgccacacaacagcaactgcagcaatggctcccaaacgaggtggaaaggctccggctcttgccgctaagaagaagcctgagaaggtttcgaatccgttgttcgagaagcgtccaaagcagttcggaatcggaggggcgttgcctccgaagagagacttgactcggttcgtgaagtggccaaagaatgttcaaattcagaggaagaagaggattctgaagcagaggttgaaggttcctccagctttgaaccagttca

SEQ ID NO: 282587 - DNA, 275 bp, Glycine max
aagagacttcttagtggggacttggacttgagtgttaggaaggaggctcttgattggatttggaaggctcatgcatactttgactttggaccctgtagcttatgtctatctgttaactacttggatcggttcctatcagtatatgaattaccaagaggcaaaagttggagtatgcaactgttagctgtagcatgtttgtcaattgctgccaaaatggaggagattaaagtgcctccttgtgtagatttacagtttgcatttgaagctaaagacat

SEQ ID NO: 282588 - DNA, 226 bp, Glycine max
gagtgccgcagagctctctgctcatacatctggtgctgatgacgatatgacagaatacactaattctttgagaaatggaattctagaggcatactcagggatcttccaagggtttaaaggttccccaaagacccagcttctgatgccatatgctcctcatgtgctgcaattcttggatagtttgtataatgagaaggacatggatgatgttgtgactaagacagca

SEQ ID NO: 282589 - DNA, 264 bp, Glycine max
  unsure (1)..(264): unsure at all n locations
aaaagctctngtgtcacttataaacgaggttttggatcaggctaanattgaatttgcgtaagctagancttgaggctgtgctcttcgacatacgggcaattttngatgatgtattgtcantattttctgagaagtctcaaggaaaaggagtagagttggcagtttatgtgtcagatcatgttccaggactactaataggngatcctggaagatttcgacaaataattaccaatctcatgggtaactcaattangttcacggaca

SEQ ID NO: 282590 - DNA, 267 bp, Glycine max
cccacacagggtggctttgctgaaaccatgatcgttgagcaaaagtttgtggtgaagattccagagggtttggcgccagagcaagtggcaccattactgtgtgcgggtgtgacagtgtacagtccactggtacactttgggctgaaagagagtgggctaagaggtggaatattggggcttggaggagtgggacacatgggggtgaagatagcaaaggcactgggtcatcatgtgactgtgataagctcttctgacaagaagaaacaa

SEQ ID NO: 282591 - DNA, 267 bp, Glycine max
cggaagcattccttggaaagaaaattaatgatgccgtggtcactgtcccagcttacttcaatgatgctcagaggcaggccaccaaggatgctggtgtcattgctggtctcaatgttgctagaattatcaatgaacccactgctgctgccattgcctatggattggacaagaaaggtggcgagaagaacattctagtctttgatcttggtggtgggacctttgatgtcagtatcttgacaattgataatggtgtttttgaagttcttg

SEQ ID NO: 282592 - DNA, 268 bp, Glycine max
ggatttgcccttcaatgatcatcagaaagcatggcaacaattgcgaaggggacgatatgttgaattcaatttggtatatgataggggtacaacatttggactgaaaactggagggagaatagagagtatacttgtttctctcccactgactgctcggtgggaatacgatcataaaccggaagaaggaagcgaagaatggaaactcttggacgcatgcatcaaccccaaggaatggatctaattcatcagttgaccccccaatttgtca

SEQ ID NO: 282593 - DNA, 215 bp, Glycine max
agaattgtaaggataatgagaaagagacttgtcaggaaggcatttgatatgattcaagaccttgctgaaagtgaaaataaagaggactacaaaaaattctgggagaactttggtaggttcataaaattaggttgcattgaagacactggaaatcataagcgcattacaccattattgaggttttacacttccaaagtgaggaggaacttaaaagc

SEQ ID NO: 282594 - DNA, 262 bp, Glycine max
  unsure (1)..(262): unsure at all n locations
aaagaaaggaaataattgatctttgaaaatgcagggaggaaagaaagctggagagtccatcaaggaaacagctgcaaacattggtgcttctgccaaggctggcatggagaaaaccaaggccactgtccaggagaaggcagaaagaatgacggcacgtgatccgatgcaaaaggagttggcaacccagaaganagaggcaaagatgagccaggcagagctggacaagcaggcggcgcgtcanataacacggcggcgaanaggt

SEQ ID NO: 282595 - DNA, 267 bp, Glycine max
  unsure (1)..(267): unsure at all n locations
caaagaatcaaagaaaggggtggtggctgcttcgaaagcttaataatttgtttatttccagaacatcatanttttcgcagcagcaaactaacaaattactcatatcatataataagatggcccgttctctctcgcaagccaaacgtattggtgtccttgttgctcaatctatctccctaattcccgttcatcggcgaggttacgcagtggcatccgatgtatcggtaagagttggattgggtaatattgggcgaaggaatggaatcg

SEQ ID NO: 282596 - DNA, 268 bp, Glycine max
aaaagctctggtgtcacttataaacgaggttttggatcaggctaagattgaatttggtaagctagagcttgaggctgtgctcttcgacatacgggcaattttggatgatgtattgtcactattttctgagaagtctcaaggaaaaggagtagagttggcagtttatgtgtcagatcatgttccaggactactaataggtgatcctggaagatttcgacaaataattaccaatctcatgggtaactcaattaagttcacggacaaagga

SEQ ID NO: 282597 - DNA, 275 bp, Glycine max
gagagggagtcagagaaaccctaggtaagaagaaaagatgccggctggtcatggtttgagatcccgcaccagagattccttctctcgtcctttcaggaagaagggaaccatcgccctcaccacatacctgagaacctaccacgtcggcgactatgttgacgtcaaggttaacggtgccgttcacaagggaatgccccacaaattctaccatggccgcaccggacgcgtctggaatgtcaccaaacgtgctgttggcgtcgaagtcaacaagcagt

SEQ ID NO: 282598 - DNA, 260 bp, Glycine max
ggcccatttggagcagttgttgttctaaatgatgaagtagttgtaagctgtcataacatggttttacgaaacactgatcccactgcccatgctgaggttactgctataagagaggcttgtcaaaagctgaatcaaattgaacttgctgactgtgaaatctatgcttcttgcgagccttgtccaatgtgctttggtgcaattcatctttcaagaattaagagactggtttacggagctaaagcagaagctgcaatagcaat

SEQ ID NO: 282599 - DNA, 260 bp, Glycine max
  unsure (1)..(260): unsure at all n locations
caaagatgganatccctgtgatagattttagtaagctcaatggggacaagangggtgacacaatggccctattgcacgaagcttgtgaaaaatggggctgctttatggttgagaaccatgaaattgacacacaactgatggggaaggtgaagcagttgatcaatgcatactatgaggaaaacctgaaggaaagcttctaccagtctgagatagccaagaggttggagaaacagcagaacacctctgatatngnttgggag

SEQ ID NO: 282600 - DNA, 263 bp, Glycine max
gcattttcagaggaacaatggcgggtagggtttcgacgtgcttcttcttcgtgtttgctctttctctccttcttccttttcagatctccgctgaggaatcatcggagaaagagttcgtactcacattggatcactctaactttcacgacactgtcagcaagcacgatttcatcgtcgtcgagttctacgctccatggtgtggccactgtaagaagcttgctcccgagtatgagaaagctgcttctatcttgagtagtcatgat

SEQ ID NO: 282601 - DNA, 266 bp, Glycine max
  unsure (1)..(266): unsure at all n locations
ggaatcatcgctagcatgcagcagtgcaacgactttttcttccttggaaccaagcaaattcccatgggaagagttggggatgacttttggttccaagaccccaatggggacccaatgggagtgttctggttacaaggggtgcacatgattcactgtgcctacaacagtttgtggatggggcagatgattcagcccgattggganatgttccaatcggatcatgtgtgtgccaaatttcatgcgggttcgagggctatttgtggcgg

SEQ ID NO: 282602 - DNA, 268 bp, Glycine max
accaaatcaatgagcccaagaggccctcagacaagccactcaggcttccattgcaggatgtctacaaaattggtggtattggtaccgtgccagtgggacgtgttgagactggtgtcgtgaagcccggtatggtggtgacttttggtcccactgggctgacaactgaggttaagtctgttgagatgcaccatgaggctctcacagaggctcttccaggtgacaatgttggctttaatgtgaagaatgttgcagtcaaggatctcaagcg

SEQ ID NO: 282603 - DNA, 269 bp, Glycine max
cacacacatttcgtcggaatgggaagggtgattcgcgcacagcgtaagggtgcggggtcggtgttcaagtcccacacccaccaccgcaagggtccggcgaggttccgcagcctcgacttcggcgagcgcaacggctacctcaaaggggtcgtcaccgatatcatccacgaccctggtcgcggtgctcctctagccaaggtggcgttccgccaccccttccgctacaagaagcagatggagctcttcgtcgccgccgaggcctctacacc

SEQ ID NO: 282604 - DNA, 273 bp, Glycine max
ggcgccaatggcaaggtccagatcatccagcagatcaaccatgagggtgaggttaacagggctcgctacatgccccagaaccctttcatcattgccaccaagaccgttagtgctgaggtttatgtatttgattatagcaagcatccctctaagccccctcttgatggtttctgtaaccctgatttaaggcttaggggtcataacactgaaggctatggcttgtcctggagtaagttcaagcagggccacttgcttagcggttctgatgatgct

SEQ ID NO: 282605 - DNA, 274 bp, Glycine max
  unsure (1)..(274): unsure at all n locations
attttattcgttctccggtgagaaacagaaacacacagaagacagagtgagacgcttctcacgatggagggaggagtatcctacgcgcgcatgcctcgggtcaaaatccgcgagctgaaggacgactacgccaagttcganctccgcgacaccgacgcgagcatcgccaacgcgctgcggcgctgatgatcgcggaggtgccgacggtcgccatcgacctcgtggagatcgaggtcaatcctcggtgctcaatgacgagtttatcgctcacagg

SEQ ID NO: 282606 - DNA, 341 bp, Glycine max
atcaagccaacattcgcaggatgcgaatctacggtccaagcccagaagtcctcgaagcactaagaggttccaacattgagcttttgctagacattccaaatgacaacctcagaatcctagcatctagccaagacaatgcaaacaaatgggtgcaagacaacatcaaaaactatgccaacaatgtcagattcagatacgtttcagtgggaaatgaagtgaaacccgaacactcatttgcacaatttctagtgcctgcattggaaaacattcagagggccattctaatgctggcttggaaaccagtaaagttccatgccatgatctggtgcttggcagatcat

SEQ ID NO: 282607 - DNA, 345 bp, Glycine max
  unsure (1)..(345): unsure at all n locations
ggaaattgcaagaagggttgctgatgaagttcttaggattgatcctcaagactcagcttcatatgttctacttgccaacatctattcttcagctaacagatggcaaaatgtttctgaggtgaggagagccatgaaagacaagatggtgaagaaagaaccaggcataagttgggtagaagtaaagaatcaggttcatcagtttcatatgggtgatgaatgccacccaaaacacgtggagattaatcagtatctggaagaattaacttcagaaatcaagaggcaggctatgtacctgatactagctccgttttgcacgacaggacnacgaggaaaaagaacagatct

SEQ ID NO: 282608 - DNA, 344 bp, Glycine max
  unsure (1)..(344): unsure at all n locations
cagtcgcagaggaaaaccctagctngtagtctcagttcgtttgagagngngaanatggcagagggtctcgttctccgcggaaccatgcgtgcccacaccgacgtcgtgacggcgattgccactcccatcgacaactccgacatgatgcgtgacggcgtcgcgcgacaaatccatcattctntgncacctcancaaggagncccanacctacgnngtcccccgccgccgcctcaccggacattctcacttcgtccangacgtcgtcctctcatccgtaggtcattcgcnctctccggctcctgggacggcgagntccgcctctgggacgtcgcggntggcactct

SEQ ID NO: 282609 - DNA, 338 bp, Glycine max
cggacattcatatcttcttcgtcctctgaatcaagtttcgactttatttgagtagttttgctctttccttccaaaatgagccggccaatggaggaagatactgcaggtaagaatgaggaagaggagttcaacaccggaccactatctgtactcatgatgagtgttaaaaataatactcaggtactgataaattgtcggaacaacaaaaagcttctgggtcgtgtaagggcttttgacaggcactgcaacatggttcttgaaaatgtcaggagatgtggactgaggtgccaaagctggtaaaggaaagaaaatcccagccatcacaaggatagatcatc

SEQ ID NO: 282610 - DNA, 342 bp, Glycine max
  unsure (1)..(342): unsure at all n locations
gtatgcgatgnacccagtaccacctgtcacgcaaaactcaggcatcttacctggtcaaggccttactagagaagggtcacacagtgaggaccaccgtgagaaacccaggggatgtggagaaggttggttttctgactganctaagtggagccaaagagagactgaagattttgaaagcagatctattagtggaaggaagctttgatgaggcagtgagaggagttgatggtgtctnccatatggcgtcccctgtgcttattccttatgatgagaacgntcagcaaaatttgattgatccctgtataaaaggaatttgaatgtgcttaactcttgtgtaaaagc

SEQ ID NO: 282611 - DNA, 333 bp, Glycine max
  unsure (1)..(333): unsure at all n locations
cagggcaagggatgtgtttgaggcgttttataaganagatcttgcaaaaagactactgttaggaaagagtgcttctattgatgcagagaaatctatgatctccaagttgaagaccgagtgcggcagccagttcacaaacaaactagaagggatgtttaaggacattgaattatcaaagaaataaacgagtccttcaagcagtcatcccaggctaggacaaaactcccatcaggattgaaatgagtgttcagtcttgacaactgggtactggccgactatccaccnggatgttagnttcctcatgaatgaatgttaccaggatatttcaagagt

SEQ ID NO: 282612 - DNA, 334 bp, Glycine max
atatgcccctaactgcaaaggatcttgcatcaagagatgtagtttcaagagcaatgacgatggagattcgggaaggtcgtggtgtaggacccctgaaagatcacatctatctccacttgaatcacttacccccagatgtgctcaaagagagacttcctggcatctctgaaactgctgctatttttgctggtgtggatgttacaaaggaacccattcctgttttgccaactgtacattataacatgggcggtatcccacaaaccatatggagaggtggttaccataaaggtgacatccagatgcagtggttcctggatgatggctgcgggaacgg

SEQ ID NO: 282613 - DNA, 338 bp, Glycine max
gtgaatccatgggaacattgattctgtcgctgaagctatggattctgcgttgatggtcccagaggctgaaaagcagatgcggcatgagaagcattataggtatgttagtacacatgatgttgcgtattgggcacgtagcttcttgcaggatctggaaagggcatgtagagatcatctgaggaggagatgctggggaattggttttggtttaggcttccgagtgattgctttggatccaaactttagaaagctatctgtggaacatattgtttcagcttataagaggaccaagcaccgagcaatcttttggattatgatggcctatggtgtcctgcaca

SEQ ID NO: 282614 - DNA, 337 bp, Glycine max
  unsure (1)..(337): unsure at all n locations
anaaggaattaacattttcttggctggctttgttccaacagaaaatcttaggttccgtgatgactcactcaccttcaaggttgctgagactccacaggaaactgctgaggaagctcagacatatgctcgatacaaatacccaaccatgagcaaaactcaaggcaattttagacttcgtgtagctgaaggagaatttactgattctcagattattgtgatgctgggtgagaatgggacaggaaagacgacattattcgaatgctggctggtttattgaaacctgacaccatagaagtggatctgaggtggagatgcctgantttaagtttcatacaag

SEQ ID NO: 282615 - DNA, 343 bp, Glycine max
attcatctttctcagtcaaccatgaactctcgatcactctttgccttcctcttcgcaatttgcgcgcactccgtcgccgttggccgacacctcctccgcgtatccttccatccccggcacggaaaccggtgagtgctccctccgcggcgtgggcgtgggcgacggtgttctggttcctccacggcgagaagtatacgaggaggggcgaatcttcgacatcactcacagatatgtccccgagatgccggtgtgggactcgacggagggctcgggcaacacttcctgtggctcgataagagcatgaagaatggctcgctcgctaacagctctaacatgaagctcg

SEQ ID NO: 282616 - DNA, 333 bp, Glycine max
gaaggagaagcccaaaatgggaacaatggagagcttgaagttcttggtgtcttcaaagtacatcagagatcttgccactttagtggttgcttatggaatcagcatcaatcttgttgaggttacctggaagtctaagctcaaagctcagtttcctagtcccaacgagtactcttcttttatgggtgacttctcaactgcaactggaattgccacattcacaatgatgctgtcagccaatttatatttgacaagtatggatggggagttgctgccagatcaccctacagtcctgcttctgacaggagtggttctttctcttatatgttggggccg

SEQ ID NO: 282617 - DNA, 338 bp, Glycine max
  unsure (1)..(338): unsure at all n locations
ctcaattcaattgccttctcccctgcgaatctcttctccacgtatcggagaacatggggaacaagatgaatgcgatcgcgttgtgcttgttagtgtcgaccctgttggtttctgcggtgtattgtgcaccgaatgctgggctccgtaggattgggctgaagaagattaaattggaccctaaaaacaggcttgctgctcgagttgggtccaaggatgttgattctttccgggcttctattagaaagtttcatctccaaaacaactttggtggcntgaggaaacgatatgtcgcgttaaagaattacttggatgcacatactaggtgaatactattggac

SEQ ID NO: 282618 - DNA, 335 bp, Glycine max
  unsure (1)..(335): unsure at all n locations
agaaaccagtgactgacttttcgagaaagaaaaacaaaaatgagtttccgtcattccatcatgaacgctcttcccattctcctcttcttcctcttcgtttctgcattagtttctgcgaagaaaactggtgatgtgacggagctgcaaattggcgtgaagcataaaccagtatcatgtgaagttcaggcacacaaaggtgacagagtcaaagtacactataggggaaaactcactgatggaactgttttcgattctactttgaaagaaataatccaatgaattganttggtntggtcagtgaccaaggtgggacaggatatgggatgtgctggtga

SEQ ID NO: 282619 - DNA, 340 bp, Glycine max
  unsure (1)..(340): unsure at all n locations
gtcaaaggaagatattgagaagatggttcaagaggctgagaagtacaagtctgaggatgaagagcacaagaagaaggttgaggccaaaaacgcttggaaaactatgcatacaacatgaggaacaccgtgaaggatgacaagattggtgagaaacttgacccggctgacaagaagaagattgaggatgcattgagcaagcaatccagtggttagacagcaaccagcttgcagaagcagatgagtttgaggacaaaatgaaggattggaaagcatctgcatccatcntgccaagtgtaccaggtggtgctggtccagacgtgggtggtgctggtgcacagag

SEQ ID NO: 282620 - DNA, 330 bp, Glycine max
  unsure (1)..(330): unsure at all n locations
ggaaatttgcgttgtttttcgcggtacagctcacacacactgaacggtaagtatggcggacaaggctgttacaatccgaacccgaaagttcatgaccaacaggcttctttccaggaagcagtttgtcgttgatgttcttcatccagggagggcaaatgtttccaaggctgaacttaaggagaagctagctaggatgtatgatgtgaaagaccctaatactgtatttgtcttcaaattccgaacacattttggaggtggcaaaatccntggattggtttgattatgacacatggaaaagctaaaagtatgagccaatacagcttatcagga

SEQ ID NO: 282621 - DNA, 332 bp, Glycine max
  unsure (1)..(332): unsure at all n locations
gttaccccactctacctaattggttcccttctctcctttttcctatctacatacacaacatacacaangcaaagcatgggagtgactctggagtttatgacacagaaggacgttatgtgccagcaaatattgagaacatattcagtaagtatgctcgtacagtacctgacaagctcacacttggggagctctgggacttgacagagggaaaccgaaatgcttttgacatatttggctggcttgcagcaaaatttgaatggggggttctgtacatctggcaaggatgaggaaggttcctgtctaagaagctgttagaagagctttgatggact

SEQ ID NO: 282622 - DNA, 335 bp, Glycine max
agttatgaattctattttgcttcaatctgctttggaaaagctgggtgttcagacacgtgttcagaatacattcttgatggccagaggttgctgaaccatatagcaggcaacgagctattagacatcttgagaaaggaagggtcatatttggtggtgttggtgctggcactggaaatccacattttaccactgatacagctgcagctctcagagcttctgagcgtatgaccttgcacttccacttaagcatcgcatctttagttttgctgtttttatgtcagttctaatatgtgcctataaccactgtatatagcttgatgctgagtaggatgatt

SEQ ID NO: 282623 - DNA, 337 bp, Glycine max
  unsure (1)..(337): unsure at all n locations
agaatcanagaaaggggtggtggctgcttcgaaagcttaataatttgtntatntccagnacatcannagttttcgcagcagcaaactancaaattactcatatcatanaataagatggcccgttctctctcgcaagccanacgtattggngtccttgntgctcaatctatcnccctaattcccgntcatcggcgaggttacgcagggcatccgatgtatcggtaagagttggattgggtaatattgggcgaaggaatggaatcgtgggangtgtagaagagaagnctgatacgagantggntcaaagcctactcaatgattgggcccagacccagta

SEQ ID NO: 282624 - DNA, 327 bp, Glycine max
  unsure (1)..(327): unsure at all n locations
cttgacaatgtgggaatgtggaacttgaggtctgagttttgggcacgacaataccttgggcaacagttatatttgcgcgttatacaacatcaacctcaatcagagacgagttccctgttccaaagaatgcaattctttgtggtagggcaagtgggagacacacgcgacccctttgagttagcaaggggtccacgcttgaggaggcattctagttttagaatacgaaaagtagttctaattttatagttgagtgctttcgtttattatttatgctagctccaatgggatgatgagtagtaganttatccctaatgacccactcgagtc

SEQ ID NO: 282625 - DNA, 326 bp, Glycine max
agaagacgaagaacatcaagcacaatgggaacatctccctcgacgacgtggttgagatcgctagggtgatgagcccgcgctccatggcgaaggatcttagtgggaccatcaaggagattctcgggacttgtgtttcggttgggtgcaccgtggatgggaaggaccccaaggatctgcagcaggaaatttctgatggagatgttgaggttcctcttcattgacgttagtgaaatttcagtgtttttttttatttgtttcgatatgtgttttgtttcggcaatttggttttttttacaaggataaaggaattgagccatagaatagta

SEQ ID NO: 282626 - DNA, 331 bp, Glycine max
  unsure (1)..(331): unsure at all n locations
cacgggcggcaccggttatggaggcactggtggcactgattatggaacaactggtggcactggttatggaagtggaactgggtatggagtcaacactgggggtgcgcacactgaagcaggatataggaaggaacatcgtcagcatgaccaatctcatggtgatcagaacgagaagaaagggattatggacaagattaaggagaagcttcctggaggacacagtgacaagtagatgcatcgtgcatcatgcatgcatgcatatatataatattgttgtctttgaataatttctgcatatgtcttacgtacgtacangcttgtcatgtatgtg

SEQ ID NO: 282627 - DNA, 333 bp, Glycine max
  unsure (1)..(333): unsure at all n locations
gnngtttcaccgttacagtgaaacatgggagaaccaaaacgaatctatctgcgtatctttgcgctgctcctcttcatttccgcctcttcgtttcagcttctccgcgctttcgatgacgcgatcttttacgagtcgttcgacgaggatttcgaagaccgttggattgtgtctcagaaagatgagtacaatggtgtctggaaacatgccaagagtgagggacatgatgattatgggcttcttgtcagtgagaaagtaaggaaatatgctatagtaaaagaacttgatgaggccgtgggtctcaaggatgaaacagttgttcttcatttgaactcg

SEQ ID NO: 282628 - DNA, 329 bp, Glycine max
  unsure (1)..(329): unsure at all n locations
gagaatcacttatggtaatcatcaaccgaagattaaaagcaatcaaagcaggggagcctactaacaatgacttgttagggcatactcttggaatcaaattacaaggaatctgaaaaaagtagtggtggaggaatgagtttaagggaagtagtggaagaagtgaagctattttacttggcagggcaggaagcaaatgcagaattgctggtctggacattgttgttattaagcaggcatccagattggcaagaaaaggctagggaggagttttccagtgttcgggatgaaaagccagatatgaaaggatggccactgaantgtgtcgatga

SEQ ID NO: 282629 - DNA, 329 bp, Glycine max
agaggtccaccaaccttgactggtacaagggaccaactctccttgaggctcttgaccaaatcaatgagcccaagaggccctcagacaagccacttcaggcttccattgcaggatgtctacaaaattggtggtattggtaccgtgccagtgggacgtgttgagactggtgtcgtgaagcccggtatggtggtgacttttggtcccactgggctgacaactgaggttaagtctgttgagatgcaccatgaggctctcacagaggctcttccagtgacaatgtggtttaatgtgaagaatgttgcagtcaaggactcaacgtggtttgttca

SEQ ID NO: 282630 - DNA, 333 bp, Glycine max
  unsure (1)..(333): unsure at all n locations
gnaagatgcgttattatgagtcaactcttctttctgcatacaaggcatacttgcaaaggctagtagccttagaaaagaagcctttatttcagcatgtagcagttcgttgtatttgttctttgcttgatgcaaatccccatttcaactttcgtgaaagtttgttggatgctactgtcagaaacataagctctcctaatgacgctataaggaaactttgttgttccacaattaattcactctttgcaaatgagggtaaacagggggtgaagttactgtggaggctgttcgattgattgccgatcatgttaaagctcataattgccaaagcaccca

SEQ ID NO: 282631 - DNA, 327 bp, Glycine max
  unsure (1)..(327): unsure at all n locations
cttttaatgtgaganaatgaagtacttganactaatttacacaatattagaacttcaaaataactttgctcatctgctttgagcagtggttgctgttcctgatggcttgaaggcatgggaattactcaagggaagaccgcacaatgttgatctaattctgacagaagtggatttgccatccatatctggctatgcacttctcacattaattatggagcacgagatttgcaaaaacatccctgttataatgatgtcttcccaagattcaattagcacgtatacaaatgcagttgagagtgctgctgattacttgttaagcctatagaa

SEQ ID NO: 282632 - DNA, 332 bp, Glycine max
  unsure (1)..(332): unsure at all n locations
aaccattggttatggttctcctaacaaggctaactcctacagtgtgcatggaagtgcactgggtgccaaagaagttgangccacaaggcagaaccttggatggtcacatgagccattccacgtgcctgaggatgtcaaaaagcattggagtcgccacacccctgagggtgctgcacttgaagctgaatggaatgctaagtttgctgagtatgaaaagaatacaaggaggaagctgcagaattgaaatctattatcaatggtgaattccctgctggttgggagaaagcacttccgacatacactccagagagcccacgggtgccaccagaaac

SEQ ID NO: 282633 - DNA, 335 bp, Glycine max
  unsure (1)..(335): unsure at all n locations
ggaagaaccaccactaccttatccatttccactcctcaccaagcancaccatggcctcaaccaacgccctctcttcagtttcaattctangntctcccaaccgccagtctctgaccagaagagcgaaccacaacggaagagtaaattaccgtcaaccgaatagccgtttctccgtcaaagcctccgccaaagagattgcctttgaccagcattcccgctctgctatgcaggccggcattgacaagctcgccgacgccgtcgggctcactcttggggccagggggaggaatgttgtgttggatgagtttggaatctaagtggttacgaggtgnaca

SEQ ID NO: 282634 - DNA, 325 bp, Glycine max
  unsure (1)..(325): unsure at all n locations
cgcgtgcatagcagagtcagagacagagacgcagccatggggcggagacctgcgaggtgttataggcaaattaagaacaagccataccccaagtcacgtttctgccgtggtgttcctgatcccaagatcaggatttatgatgttggtatgaagaagaagggtgttgatgagtttcctttctgtgtccatctggttagttgggagaaggaaaatgtttcaagtgaggccctggaagctgctcgcattgcttgcaacaagtacatggccaaattgctggaaaggatgctttccnttgagagtcaggtgcaccatccagttcttagga

SEQ ID NO: 282635 - DNA, 326 bp, Glycine max
  unsure (1)..(326): unsure at all n locations
ggaggaaatggttcaagtggctctattgtgtactcaatatcttcccggtcataggcctaaaatgtcggaagtggtacgcatgcttgaaggtgatggactagcagaaagatgggaagcttctcaaagagttgacacaacaaagtgcaaaccacaagagtcctcttcatcagataggtattctgatctcactgatgactctttgttgttagtccaagccatggagctctcaggacccaggtgaattaattgtctagtggtacattttatattttgttttaaagtttttaaaagaaagcatatgaaatcaacagcatatgcngatagtt

SEQ ID NO: 282636 - DNA, 321 bp, Glycine max
  unsure (1)..(321): unsure at all n locations
gtgggctgataagttctcttaccagagttatgagggttccacgccttctctttacntatggaatgacatgaatgaaccttctgtcttcaatgggcctgaggtgacaatgcctagagatgttacacactatggaggtgtggaacatcgggagttgcacaatgcctatggatattacttccacatggcgaccgctantgggctactgaagcgtggtgaggggaatgacaggccatttgttttatcaagagcatatttgctggaagtcaaggtatggagcatttggactgggggataacntgctgatgggacccctaagagttc

SEQ ID NO: 282637 - DNA, 325 bp, Glycine max
  unsure (1)..(325): unsure at all n locations
cagcaaccaaaatgactcaagcccagattcaaccagttaaacttggaacccaaggctttgaggtttcaaaattgggattcggatgtatgggccttactggagcgtacaatgaccctctccaagaacaggatggcatatctgttatcaagtatgcgttcagtaagggaatcacattttttgatactgcggatgtttatggagccaatgctaatgaacttttggttggaaaggctttgaagcagctgcccagagaaaagattcagatagccacaaaatttggtatgcttcacgaggtttcctgatatgagatcnaggtcgcctgata

SEQ ID NO: 282638 - DNA, 325 bp, Glycine max
  unsure (1)..(325): unsure at all n locations
agggaatggtgccttgggaattagaatggctctccttggatcaaacataacaagcgaggttggactccgtttgctcctttggncctcttggttccaacgttgtaattagaacagcatgctgtactgtgggagttgctttgcctgtgtactctacgttcaaggcaatagaaagtaaagatcaagatgctcagcataagtgtcttctctactgggcagcctatggttcattcagtctcgctgaagtgttcacggacaagcttattcttggtgtcctactatatcactgaagtttgcattcttgttggcttcacttccactacatggt

SEQ ID NO: 282639 - DNA, 257 bp, Glycine max
  unsure (1)..(257): unsure at all n locations
aaagcaagagaagtagggtttttgtgcttggcaaaagaaaganaagagaagatggtgtcaggttcggggatctgcgcgaacgtgcgtggtggacgcccggcaccacatgctgggtcggctcgcctcgattgtggcaaaggagctgctgaacggacaaaaagtggtggtcgtgcgatgcgaagagatttgcatctccggtggtctggtgaggcagaaaatgaagtacttgaggttcctccgcaaacgcatgaacacca

SEQ ID NO: 282640 - DNA, 254 bp, Glycine max
gatttggtcgtatattagatgtttatgttccaagggatcctaagagaacaggtcatagaggttttggatttgttaacttttgctgaagatggtgtagcagatcgcgtctctcgaaggtctcatgagatttgtggacatcaggtggcaatagattcggctactcctgttgatgatgcagggcccagtgggaattttatgatgaatagtatggaatctttgggggatatggtggtcctgtgcgatcttatgggagg

SEQ ID NO: 282641 - DNA, 252 bp, Glycine max
  unsure (1)..(252): unsure at all n locations
gaaagcttgctgacaactgcactggtctcnaaggttttctggttttcatgctgtgggtgggggcactggctctggtcttggttcccttttgctggaacgtctttcagtggactatggcaagaagtccaagcttggtttcactgtctatccttcaccccaagtttcaacctctgttgttgagccttacaacagtgtcctctccactcattccttcttgagcacactgatgtggctgtcctgctcgacaacgaa

SEQ ID NO: 282642 - DNA, 256 bp, Glycine max
gaaaggacaagaggttccaagttttcagagacaacttggggttcatacaagagcacaacaaccagaacaacacttacaaacttgggttgaaccagtttgctgacatgacaaatgaggaataccgtgtcatgtattttggcaccaagagtgatgccaaacgcaggctcatgaaaaccaagagcaccggtcaccgctacgcgtacagtgccggtgaccggttgccggtgcacgtggattggagggtgaagggtgcatt

SEQ ID NO: 282643 - DNA, 259 bp, Glycine max
  unsure (1)..(259): unsure at all n locations
gnaaagatgcgttattatgagtcaactcttctttctgcatacaaggcatacttgcaaaggctagtagccttagaaaagaagcctttatttcagcatgtagcagttcgttgtatttgttctttgcttgatgcaaatccccatttcaactttcgtgaaagtttgttggatgctactgtcagaaacataagctctcctaatgacgctataaggaaacttgttgttccacaataattcactctttgcaaatgagggtaaacat

SEQ ID NO: 282644 - DNA, 261 bp, Glycine max
  unsure (1)..(261): unsure at all n locations
gacctaagtgaganacaaagaaaggaaataattgatctttgaaaatgcagggaggaaagaaagctggagagtccatcaaggaaacagctgcaaacattggtgcttctgccaaggctggcatggagaaaaccaaggccactgtccaggagaaggcagaaagaatgacggcacgtgatccgatgcaaaaggagttggcaacccagaagaaagaggcaaagatgagccaggcagagctggacaagcaggcggcgcgtcacataa

SEQ ID NO: 282645 - DNA, 252 bp, Glycine max
  unsure (1)..(252): unsure at all n locations
gnaagatgcgttattatgagtcaactcttctttctgcatacaaggcatacttgcaaaggctagtagccttagaaaagaagcctttatttcagcatgtagcagttcgttgtatttgttctttgcttgatgcaaatccccacttcaactttcgtgaaagtttgttggatgctactgtcagaaacataagctctcctaatgacgctataaggaaactttgttgttccacaattaattcactctttgcaaatgagg

SEQ ID NO: 282646 - DNA, 254 bp, Glycine max
  unsure (1)..(254): unsure at all n locations
gnaagctacctagagcttgcacctattggtatcttctacaatatcctctcatagtgcnnnnnnnnnnnnnnnnnnnnnntatcaagatgtctttgctttcggatctcatcaacctcaatctctcagaatccacagaaaagatcgttgctgagtacatatgggttggtggatctggtatggacctcagaagcaaagccaggactcttcctgggccagtgagtgaccctgcaaagcttccaaagtggaatacgatg

SEQ ID NO: 282647 - DNA, 268 bp, Glycine max
ggcaaccctagctttccgttgtttgcaaatctatggctggtgaatctgataaacccgaaaacaccctctcttgtgctaactgtggcaaacctgcgaatcttcagtgtccaaaatgtatggaattgaagcttcctcgagaaggtgctgccttctgctctcaggattgtttcaagtcttcatggagctcgcacacatcagtgcatctgaaggcaaaactatccccacctggcacacaaaattcagactcattgatgaaggttggttatat

SEQ ID NO: 282648 - DNA, 259 bp, Glycine max
gtcatagactatcatagtgaagatgtaaaaactgttctaagggaagagttccccaaaggtattgacatcatctatgagtctgttggcggtgacatgttaaacttgtgcttgaatgctttggctgttcatggacgactcattgttattggcatgatttctcagtatcaaggagagaagggttggacgccatcaaaataccctggactattggagaagccttagcaaagagccaaacagtgtctggctttttcctggtgca

SEQ ID NO: 282649 - DNA, 256 bp, Glycine max
  unsure (1)..(256): unsure at all n locations
ctaggttctaatcgcgatctagaactagtctggacacaagttagacagctgccattgaacagcttggtgttgatgttactggtaaagtagctcttgattctgggctgtcaactggaggatttactgactgcttacttcagtatggtgcatcacatgtttacggagttgacgtaggttatggacaggtagctgacaaaattcgaagagatgagcgtgtatcagtgatagaacggacaaatttaagatatcttgcnga

SEQ ID NO: 282650 - DNA, 187 bp, Glycine max
tagtgcctccttgccagaagttaaaatggcccaagaaactttcctattcacatctgaatcagtgaacgaggggcaccctgacaagctctgtgaccagatctccgatgctgtgctcgatgcatgcttggagcaggaccctgacagcaaggttgcctgtgaaacctgcaccaagaccaacatggtgatg

SEQ ID NO: 282651 - DNA, 251 bp, Glycine max
cacacacaactactacaagtacttccttacaatcaaaaccaacaacaactatggcaagttatcaaaagcactacgatgatcagggtcgcaaggttgacgagtatggcaacgttgagaagcaaaccgacgaatacggcaaccctgttcatgctgctagtgtcacctatgtagccaccagaactgctgctggtggttacagtgatgacattaataagcaacatgataccaccaatgcctacggcgtagacact

SEQ ID NO: 282652 - DNA, 248 bp, Glycine max
gcttttttgaaacaaccaaaagtgtttctcagctcgaagaaaactgggaagggaaagagacccggaaagggtgggaaccgcttttggaaatccattgggcttggatttaagactcccagggaagccatcgaaggaacctacattgacaagaagtgcccctcactggcaatgtttccatccgtggccgtatcttggctggaacatgtcacagtgctaagatgaacaggactattatgttaggaggaata

SEQ ID NO: 282653 - DNA, 251 bp, Glycine max
aattagggtttttgtgatctgcagctacgatgggtaagggaacggggagtttcggtaagaggaggaacaagacccacaccctctgtgtgaggtgtggccgccgcagcttccacctccagaagagtcgttgctctgcgtgcgcttaccccgctgcgcgcaccaggaaatataactggagcgtgaaggccattaggagaaagaccaccggaactggaaggatgaggtacttgcgtaacgtgcctcgcagattc

SEQ ID NO: 282654 - DNA, 250 bp, Glycine max
gtgacgccaaaccaccatgttgctgccattgtggctgctgcattttatgcaatttggaatctcttctcaggatttatcgtcgtaagacctaaaatgcccgtgtggtggagatggtactattgggcatgtcctgtggcttggaccttgtatggattgattgcatctcagtttggagatataactgaaagaatgccgggtgaagataacaagatggtgaaagaatcatagaagactatttggtttcaaacat

SEQ ID NO: 282655 - DNA, 253 bp, Glycine max
gtttcaatcgaaaaaaatcatgggcagaaaattcttcgtcggtggcaactggaaatgcaatgggaccactgaggaggtgaagaagattgttactactttaaatgaagctaaagtccctggagaagatgttgtagaagttgttgtgagccctccttttgtgttccttccttttgtaaaaagtttgctgcgccctgatttccatgtctcggcccaaaatgttgggttcgcaaaggtggtgcttatactggagagt

SEQ ID NO: 282656 - DNA, 255 bp, Glycine max
gcgggttcacagaccgaggaaatcccaatcctatggcagaggaagggaaacccgatgaacagctctttcagcttctctccaatcttctccaccaggtggaatcactgacgaatcaagaagaagttgagctgcgttctaaaattgaaactcttggattagaggttacaaaagttccttcaaagtcaacgcagcaccttaacgaggtgtttttcacttgatgcagagttctcttatccctgttgaaatgtgctagaa

SEQ ID NO: 282657 - DNA, 250 bp, Glycine max
tgtcaccattgctcgcgccatcgagcttccagatcctatggaaaatgccggtgcagctcttattagagaggttgctagtaagactaacgactctgccggtgatgggacgaccacggcttcggttcttgctcgcgagataattaagctggggcttcttagtgtgacttctggggctaatcctgtgtctcttaagagagggattgataaaactgtgcagggtttggtggaggagttggagaagaaggccagg

SEQ ID NO: 282658 - DNA, 247 bp, Glycine max
agaatcaaagaaaggggtggtggctgcttcgaaagcttaataatttgtttatttccagaacatcatagttttcgcagcagcaaactaacaaattactcatatcatataataagatggcccgttctctctcgcaagccaaacgtattggtgtccttgttgctcaatctatctccctaattcccgttcatcggcgaggttacgcagtggcatccgatgtatcggtaagagttggattgggtaatatggg

SEQ ID NO: 282659 - DNA, 253 bp, Glycine max
  unsure (1)..(253): unsure at all n locations
atcgagaaggagaagcgccgttcaatgccgcgggatcgagctcatcgnctccgagaacttcacctccttcgccgtcatcgaggccctcggcagcgctctcacgaacaaatactccgagggcatgccgggcaaccgctactacggcggcaatgaatacatcgaccagatcgaaaacctctgccgctcacgcgccctccaagccttccacctcgacgcccaatcctggggcgtcaacgtccagccctactccggc

SEQ ID NO: 282660 - DNA, 249 bp, Glycine max
  unsure (1)..(249): unsure at all n locations
anagaaaggaaataattgatctttgaaaatgcagggaggaaagaaagctggagagtccatcaaggaaacagctgcaaacattggtgcttctgccaaggctggcatggagaaaaccaaggccactgtccaggagaaggcagaaagaatgacggcacgtgatccgatgcaaaaggagttggcaacccagaagaaagaggcaaagatgagccaggcagagctggacaagcaggcggcgcgtcacattaacac

SEQ ID NO: 282661 - DNA, 263 bp, Glycine max
ttgatttggaagcttgtgtgtggctggaggagagtttgaagaagtttgaacgtattctggttgtgatttcacactctcaggactttcttaatggtgtctgcacaaatattatccatatgcaaagcaaaaaactgaagatctacactggtaattatgatcaatatgttcagacacgttctgagctagaagagaaccagatgaaacagtacaagtgggagcaggagcagattgcctcaatgaaggaatacattgcccggtttggc

SEQ ID NO: 282662 - DNA, 256 bp, Glycine max
aacacaaccagagcaagagttcttagcaacacaattaagcaaaagaggaaggagaaggcgggaaaatgggatgttcctctacctaaggtacgtccggtggctgaagatgaaatgttcaaagtggtccgtactggtaaaagaaagaccaagcaatggaagaggatggttacaaaagctacatttgttgggcctggttttaccagaaagcctccaaagtatgagcgattcattcgtcctacaggattgcgattcacta

SEQ ID NO: 282663 - DNA, 255 bp, Glycine max
  unsure (1)..(255): unsure at all n locations
ggcaaagcgaggccatgccctcatgtgcttggcacgtgtttcactcttcctctgcgctctaaccctatccgctgctcacggaagcaccacggttcaagacatcgcgaganagttgaaactcggggacaacgagcttctgcgcacggagaagaagttcaaggttttcatggagaattacgggaggagctactccacagaggaggagtatttgcgccgtttggggattttcgcccagaacatggtcagancggcgga

SEQ ID NO: 282664 - DNA, 246 bp, Glycine max
cgccgtcgcaccttccctgaggcttctcttgtctgtcgcgagtgaccatggtgagggttagtgtgctgaacgatgctctgaagagcatgtacaatgctgagaaaaggggaaagcgccaagtcatgattcggccatcctccaaagtcattatcaaattccttttggtgatgcagaagcacggatacattggagagtttgagtatgttgatgaccacagggctggtaaaatcgtggttgaatgaacgg

SEQ ID NO: 282665 - DNA, 246 bp, Glycine max
  unsure (1)..(246): unsure at all n locations
gggaaaactcgagccaagcagtattacgcaaatgacgtggatagaacgaagaacatgggtgtgttgantcatggagatggaagttttgctggacagggtgtggtctatgaaaccctgcatttaagtgctcttccaaattacactactggtgggacgattcacatcgtgtttaacaatcaggttgcatttacaactgatccgacttctggcaggtctcacaatattgcactgatgttgccaaggctt

SEQ ID NO: 282666 - DNA, 251 bp, Glycine max
ctgaaatgattggtcctgttgattttaacaagagtgttgagtattggcagcaagacaagtggaatggctgctttcctcttaagtggcacgttgttaaggatgttcctaacaatttgttgaggcacattaccctggataacaatgagaacaaacctgtcactaacagtagggatacacaagaggtaatgttggagcctggcctgaaattaatcaaaattttcaaggaatataccagcaagacatgcattctg

SEQ ID NO: 282667 - DNA, 251 bp, Glycine max
cacaactactacaagtacttccttacaatcaaaaccaacaacaactatggcaagttatcaaaagcactacgatgatcagggtcgcaaggttgacgagtatggcaacgttgagaagcaaaccgacgaatacggcaaccctgttcatgctgctagtgtcacctatgtagccaccagaactgctgctggtggttacagtgatgacattaataaggcaacatgataccaccaatggcctacggcgtagacactgg

SEQ ID NO: 282668 - DNA, 245 bp, Glycine max
ggtttttgctgctctccttcaaactccgtctttccgaatcctctctttgtgattgtgttctgttctgcttcctaccgcgatagtttctcttctgaagcatggccatggcggtttctgcaattggttttgaaggtttcgagaagaggctggaaatatcctttttccagccgggactttttgctgaccctgagggaatgggtttaagagctcttgcaaagtcccagttggatgagatactacaccgg

SEQ ID NO: 282669 - DNA, 250 bp, Glycine max
  unsure (1)..(250): unsure at all n locations
gttttcgcagcagcaaactaacaaattactcatatcatataataagatggcccgttctctctcgcaagcnaaacgtattggngtccttgtngctcaatctatctccctaattcccgttcatcggcgaggttacgcagtggcatccgatgtatcggtaagagttggattgggtaatattgggcgaaggaatggaatcgtgggaggtgtagaagagaagcctgatacaagagatggttcaaaagcctactca

SEQ ID NO: 282670 - DNA, 213 bp, Glycine max
ctcttgttttacagaaatagccttggctggctgcgataaggctccagtgctgttcgtcttcggcgattccaactcggacacgggtggactcgcctccggactcggtttccctataaatcctcccaatggccgcaatttctttcacagatccactggccgcttgtccgatggtcgcctcctcatcgacctactctgcctgagtttgaatgcaag

SEQ ID NO: 282671 - DNA, 256 bp, Glycine max
gtggctgtcagccttccaggtgggagaattctgatatttggtgggtctgttgcgggccttcattctgcttcccagctttacatactagatccaactgatgagaagcctacatggagaatcctaaatgtaccagggtgccctccaagatttgcttggggacatagtacatgtgttgttggagggacaagagctattgtgctgggtggtcaaactggggaggaatggatgctaagtgagctccatgaactttccttgg

SEQ ID NO: 282672 - DNA, 252 bp, Glycine max
gctttattgaaacctcatgagagaattatggcacttgatcttccccatggtgggcatctatcgcatggttatcagactgacaccaagaagatatcggctgtatctatattctttgaaacaatgccatacagattgaatgaaagcactggttatatcgattatgaccagttggagaaaagtgcagcactttttaggccaaaattaatagttgctggtgctagtgcttatgctcgcctttatgattatgcacgt

SEQ ID NO: 282673 - DNA, 142 bp, Glycine max
  unsure (1)..(142): unsure at all n locations
gctcgancccaaagaaagnaaataattgatctttgaaaatgcagggagnaaagaaagctggagagtccattcaaggaancagctgcaaacattggtgcttctgccaaggctggcatngagaaaaccaaggccactgtccagg

SEQ ID NO: 282674 - DNA, 248 bp, Glycine max
aaaacttagggttgggcctttttttgaggttttcagcgcttctttctcacaatggttcttcagaatgatattgatttgctgaatcctccagctgagttggagaagagaaagcacaaactcaagcgtcttgttcagtcaccaaactctttcttcatggatgttaagtgccagggatgcttcaacataacaactgtgtttagccactctcaaactgttgtggtgtgcggaaactgccagactgttttgtg

SEQ ID NO: 282675 - DNA, 246 bp, Glycine max
  unsure (1)..(246): unsure at all n locations
caagnatancaaaatttttaggnacccctnaatcaattctntactcttatggactttccaccatgttcagtgcaattcctgctttctctaaaaaaggagatataattgtggcggatgagggagtccactggggaatacagaatggcctttatctttctagaagcacagtggtgtattttaagcacaatgacatggatgctttaagaganactctagagaacattacttccaaatataagaagacca

SEQ ID NO: 282676 - DNA, 244 bp, Glycine max
gtacaagaaggaacagtgtcagaaagcgatagaaaatggcttcccttgtccccttttgtgctcgcaattgaccgtcgaatccaatcctgaaatcccccaataaatagagaagcgaagaaaccaaaccaaaccatcgagtgcgttgcgcccccaccgtaagtagagctatgtcgttgcgcaggcgaaccttgctcaaggtcattgttctcggcgacagggggttgggaagacctcgttgatgaat

SEQ ID NO: 282677 - DNA, 249 bp, Glycine max
  unsure (1)..(249): unsure at all n locations
cttaaccgagcttcgcaaagatnaatcgggaaaagttaatgaagatggccggttcggttagaactggaggaaagggtactgtgagaaganagaagaaggctntccacaagacaacaaccacagatgacaaaaggcttcagagcaccctgaagagaataggggtgaatgccatccctgctattgaagaggtcaatatctttaaggatgacgtagttatccagtttctaaatcccanagttcaagcatcca

SEQ ID NO: 282678 - DNA, 248 bp, Glycine max
  unsure (1)..(248): unsure at all n locations
caaacctctctaatttttnaagcttattatanccaatctcgatatgcagatnttcgtgaaaaccctaactggcaagncgattcaccttggaggtggagtcctctnacaccatcgacaacntnaaggccaaaatccaagacanggagggcattcctccggatcancagcgtttaatcttcgncgnaaaacagctcgaagacggcagaaccctcgccgactacaacatccaaaaggngtccacgctccat

SEQ ID NO: 282679 - DNA, 243 bp, Glycine max
ttgaacaatgacttgttccggaagaccatgggtccagtgaagaaggctatggaagatgctggattacagaagagtcagattgatgagattgttcttgttggtggaagcacaaggattccaaaggtacaacagcttttgaaggactactttgatggaaaggagccaaacaagggggtcaaccctgatgaagcagttgcctatggtgctgcagtgcaaggaagcattttgagtggagagggtggt

SEQ ID NO: 282680 - DNA, 244 bp, Glycine max
  unsure (1)..(244): unsure at all n locations
agagtgaatcataaaatngatatggagaaaagagaagaaatgactaggaggactgtttatgtgtctgacattgatcaactggttactgaagagcagttggcggcactctttcttaactgtggccaggttgttgattgccgtgtttgtggggatcctaattctattctccggtttgccttcattgagtttacagacgaagaaggtgcaagggctgctttgaacctgtctggaaccatgcttggat

SEQ ID NO: 282681 - DNA, 144 bp, Glycine max
acaaggctttggagacatatagggaggggttgaaatatgactctaacaaccaggagttgcttgaaggcatcagaacatgcatacaacaaattaacaaggctagccgtggagacttaagtcctgacgaattgaaggagcgacagg

SEQ ID NO: 282682 - DNA, 146 bp, Glycine max
catcactatctcggttgatgaagagtgctattggtgagggaatgactagaagggatcattctgatgtgtccaaccagctctatgcaaattatgctattggaaaggatgtccaggcaatgaaagcagtggttggagaagaagcactt

SEQ ID NO: 282683 - DNA, 247 bp, Glycine max
tatccatgttggtggaacaaggctatgacttgttgggcacccttaattggggagaccatatccctttcctgaaagactttgacctacagaaaatccggttcacctgctccaaattagtccctcaagtgaaccggttcgttggttcaatcatcgccgaccaccaggccgacacaacccaaaccaaccgcgatttcgttcatgttttgctctctctccaaggtcccgataaattgtctcactccgacat

SEQ ID NO: 282684 - DNA, 245 bp, Glycine max
  unsure (1)..(245): unsure at all n locations
aaaatgcatggattggtatagatggaaatactggcagtatcactgacatgaaagagcgcaanatttgggatgcctacaatgtgaaggcacaagcatttaagactgccattgaagccgcttgtatgcttctgaggattgatgatatagtgagtgggatcaagaagaagcaagcccctggagctgctccttcaaaacccaaggttgagaccgaggcagatgctgacagtgagcaaatccttcctgac

SEQ ID NO: 282685 - DNA, 244 bp, Glycine max
gtcagttgcaggaaaaatggtttcgctgaaactgcagaagcggctcgccgcgagcgtgctcaagtgtggcagaggaaaggtttggcttgaccccaatgaagtcaacgaaatctccatggccaattctcgccaaaacataaggaagctggttaaggatgggtttatcatcaggaagcccaccaagattcactctcgctcacgtgctcgtcgaatgaaggaagccaagaggaaaggacgtcactct

SEQ ID NO: 282686 - DNA, 245 bp, Glycine max
  unsure (1)..(245): unsure at all n locations
tcaantgcctactggntaggattattagctcatttacaagcttcttctgttccaaggaaggacatatcatgtatcaaggatctaacatttctatatgaagtngccactattgaggatatataccgtgcatatgaacagttgaaagtggntgagaattctttatattcatgcattggaattgctggtgctcaggctgcacaagaaatagcagctccgttagangaggaagtagcagatgatgttta

SEQ ID NO: 282687 - DNA, 244 bp, Glycine max
  unsure (1)..(244): unsure at all n locations
attagttcgnttttntantaagtgaggtgccaatatggtgaagatagctcttggtactttggatgactcttttagcgctgcctctcttaaggcttatttcgcagagttccacgcaactctgatttncgtgttcgctggtgttggatcagccatcgcttacaacgagcttacaaaagatgcagccttggatccaacggggctngtggcagtanctgtggcacatgcatttgcactgtttgtaggt

SEQ ID NO: 282688 - DNA, 134 bp, Glycine max
  unsure (1)..(134): unsure at all n locations
gaataactccttgcatttttcttccaaagttagttgtctaancggtttagnggatctttgtcccaaggcttgtttgtaattcttgtattaagagctcgttgctagatacactaataaaaacttaaccttatcct

SEQ ID NO: 282689 - DNA, 247 bp, Glycine max
  unsure (1)..(247): unsure at all n locations
aaaccctanctagccacaatgcagatattcgtgananccctaacggggaagangataaccctanaggtagagtcatcggacacaatcgacaatntgaaggcgaagatccaggacaaggagggcatcccgccggaccatcagcgcctgatcttcgccggtaagcagctggangacggccgcaccctcgccgactacaacatccagaaggagtccacgcttcacctcgtcctccgcctccgcggcggcg

SEQ ID NO: 282690 - DNA, 245 bp, Glycine max
  unsure (1)..(245): unsure at all n locations
caacaatgtcgaagcgaggtcgcggaggatcggcagggaacaagttccgcatgtnactgggtcttccggtggcggcgacggtgaactncgccgacaacaccggcgcgaagaatctctacatcatatcagtgaaggggatcaagggaaggctnaaccggttgccgtcagcttgcgtgggtgacatggttatggccaccgtcaagaagggaaagcctgatctccgtaaaaaggtgctccccgccgtc

SEQ ID NO: 282691 - DNA, 244 bp, Glycine max
atatatagaaaaacaaaggagaaaagatagaaatggagaagtttccagttgttgacatggggaaccttaataatgaagagagatcagcaaccatggagataatcaaagatgcctgtgagaactggggtttctttgagttggtgaaccatgggatatccatagagttgatggacaccgtggagaggatgacaaaagagcactacaaaaagtgtatggagcaaaggttcaaagaaatggtagcaag

SEQ ID NO: 282692 - DNA, 240 bp, Glycine max
cccggagagagataccggtcttgggcacctgacaggcaagatagatttgctcgccgatgggttgatgctttatctgacccacgggtcacccatgagatccgcagtgtctggatatcatactggtctcaggctgaccgttctctaggccaaaagatagcttctcatctcagcacgaggccaaatatttaatgttgttgccaactccagaatgattgttagagttgcagacgtgcaaagagt

SEQ ID NO: 282693 - DNA, 247 bp, Glycine max
  unsure (1)..(247): unsure at all n locations
agggtattgtggattccgaagatctaccactcaacatttcaagagaaatgttgcaacagaacaagatcttgaaggtcatcagaaagaacttggttaagaagtgccttgagctcttctntganattgcaaagnacaagnaggattacaacaagttctatgaggctttctccaagaacttgaagctaggtatccatgaggattcacagaacaaagggnnagattgctgaattgctcaggtatnactcna

SEQ ID NO: 282694 - DNA, 252 bp, Glycine max
  unsure (1)..(252): unsure at all n locations
gttntagcgcanttcttctagatttaaggaagatgggtaaggaaaaggttcacatcagtattgtggtcattggccatgtcgactctgggaaatccactaccactggtcacctgatttacaagcttggaggcnttgacnancnngttantnnanagntttgagaaggaagntgctgagatgaacaagaggtctttcaagtatgcctgggtgctggacaaacttaaggctgagcgtganagaggaatcaccatt

SEQ ID NO: 282695 - DNA, 253 bp, Glycine max
  unsure (1)..(253): unsure at all n locations
ccgaagttcatcaagggaagtcagtcttatctctttcaagatttagcagctgcataatgctactggcctatgcaagctaccttttctttcaacttagaagtcagcaaaatgtttatagtccagttgacgaggaaggagataatggtgaaaattctgtgnggggggangaacatgaattaactcaatgggaggcaattatctggcttgctatcttgacagcatgggtatctatattgtctggataccttgtaga

SEQ ID NO: 282696 - DNA, 258 bp, Glycine max
  unsure (1)..(258): unsure at all n locations
aaagaagaatacgtgtcataactttgtctctgcctgtcactagtatgctcagtaatctgttccgtgcagctgatttggatactcaattttgctgtttcntgaaagnaagntgctagtgagattccttcaaagccactcccacttgttcgggaacaagtgacaaacctttgcattaatgcactgttttcataccgtaaattttgtgctacagtgtcctcatctggacaacttattcttccggaggcactaaagcttttg

SEQ ID NO: 282697 - DNA, 258 bp, Glycine max
  unsure (1)..(258): unsure at all n locations
caagtactatgaagccggtgcacgttttgccaagtggcgtgctgtgctgaagattggtcccaacgggccatctganctggctatccatgagaatgcctatggcttggccagatacgctgtcatatgccaggagaatggcctggttcccattgttgagcctgagatccttgttgatggatctcatgacattcacaagtgtgctgccgtcaccgagcgtgtccttgcagcatgctacaaggctttgaatgatcaccacgt

SEQ ID NO: 282698 - DNA, 255 bp, Glycine max
  unsure (1)..(255): unsure at all n locations
acataacaatgtcgttgattccaagtttcttcggtaccgggtcgangaaccaacgtgcttcgaccccttctccctcgacgtgtgggacccattccatggcttccncggcaccaccgccctctccgctccgngctccgagacggcggccttcgccaacacgcncntcnactggnagnanacggcggtggcgcangtgttcanggcagacctgcnggggcttaagnaggaagaggtgaaggtggagatcgaggagga

SEQ ID NO: 282699 - DNA, 252 bp, Glycine max
  unsure (1)..(252): unsure at all n locations
ctgagttccgagttgacaaggtccttcaaccctttgatgaaaacaaattcaactttacccaagttgggcaagaagaggtcctcttccaatttgaagctagcgaggatggacaagtccagttctttccaaatgctccagttgatgttgacaattctcccagctttgttgccatcaatgtcagtcctattgagtatgggcatgttttgctgattccgcgcattttcgagtgnttgcctcaaaggattgaccgtg

SEQ ID NO: 282700 - DNA, 177 bp, Glycine max
  unsure (1)..(177): unsure at all n locations
ggttttctttctcgaactcgaacgaagatgcgtgagattcttcacatccagggagggcaatgcgggaaccagatcggagccaagttctgggaggtggtgtgcgcggagacgggatcgattcaacggggaggtaccaaggggacaacnagtgcnactcgagcgagtcaacgtctacta

SEQ ID NO: 282701 - DNA, 253 bp, Glycine max
  unsure (1)..(253): unsure at all n locations
gaaacaaagaaaggaaataattgatctttgaaaatgcagggaggaaagaaagctggagagtccatcaaggaaacagctgcaaacattggtgcttctgccaaggctggcatggagaaaaccaaggccactgtccaggaganggcnngaaagatgacggcacgtgatccgatgcaaaaggagttggcaacccagaagaaagaggnaantttgaccagggcagagctggacaagcaggcggcgcgtcacataacac

SEQ ID NO: 282702 - DNA, 255 bp, Glycine max
gcttaaccgagcttcgcaaagatgaatcgggaaaagttaatgaagatggccggttcggttagaactggaggaaagggtactgtgagaagaaagaagaaggctgtccacaagacaacaaccacagatgacaaaaggcttcagagcaccctgaagagaataggggtgaatgccatccctgctattgaagaggtcaatatctttaaggatgacgtagttatccagtttctaaatcccaaagttcaagcatccattgct

SEQ ID NO: 282703 - DNA, 256 bp, Glycine max
  unsure (1)..(256): unsure at all n locations
aataagaagtacagtgacaagangaaagcgatgngcagaactgaatccactgtacccatatttaatatggaagacatagaggngggtgttnaaggttatgatnatgaaangacactacttatgtctcaaaagagcttggagaagcgttttggtcagtctccagtttttattgctgccacttcatngancagggtggcattccaccttcaacaaancccngcaactcttcttaaggnagcgatccatgtnatcagct

SEQ ID NO: 282704 - DNA, 262 bp, Glycine max
  unsure (1)..(262): unsure at all n locations
aaaaatggctgatacaggtggaggagatgcagtgagaccagtggtaatatgtgataacaagtgtggctgcacacttccatgcactggtggttccacttgcaggtgcacaagtgctggcactgccacaggagggggtgatcacgtgacatgctcgtgcggagagcactgtggttgcaanccatgctcatgtcccaagattgcggctgcttgaatggttgcagatngttggcnacagattgtgcatgtgcctcctgccgcactt

SEQ ID NO: 282705 - DNA, 256 bp, Glycine max
  unsure (1)..(256): unsure at all n locations
ggcgagcttggcacagcgagcggcaccaacccatgagaggttccatcattcggcaaattttcagggtcgtcgcggaggctcactccgcggctactaagagcaacaaggagtggcaagagaagctccccatagttgtcctcagagccgaggaaatcatctactccaaagccaattccgaggcagagtacctcanccccgaaacgctcttggaccgactcaatgatgccatcaacaccatcatacgcagngacgaaac

SEQ ID NO: 282706 - DNA, 248 bp, Glycine max
  unsure (1)..(248): unsure at all n locations
gcgaagaggcgcacgtaagcagtaactcgtggaattgctagcaatggcgaggatcaaggtttacgagctgaggcagaagacgaaggctgatctgttgaatcagctgaaggacctcaaggccgagcttgccttgcttcgtgttgctaaggtcaccggcggtgcacctaacaagctctctaagatcaaggtggtgaggttgaacattgcccaggttttgacggtgatttctcagaagcaganngccgcgt

SEQ ID NO: 282707 - DNA, 252 bp, Glycine max
cagctttgaacgccgaagaaggttcatccaatccccgaagcccttcaccgcattgcaaccatgtcgaggagaaaggtcagagagccaaaggaagaaaacgtgactctgggcccagctgttagagatggtgaacatgtctttggcgtcgctcgcatctttgcctccttcaatgataccttcattcatgtcactgatttgtctgggagggaaacgcttgtccgcatcactggtggaatgaaggttaaggctgac

SEQ ID NO: 282708 - DNA, 255 bp, Glycine max
  unsure (1)..(255): unsure at all n locations
cgagcagccacacctcccgcagcagccatggttctcaaaactgaactatgccgattcantngtgccaagatctacccagganagggcatcagatttgtncgtggtgattctcaggttttcctgtttgcaaactcaaaatgtaagaggtatttccacaatcgcctgaagccttcaaagtcacctggactgcaatgtacagaaagcaacacaaaaaggacattgctcaagaagctgtgaggaagagagacgtgctgc

SEQ ID NO: 282709 - DNA, 245 bp, Glycine max
  unsure (1)..(245): unsure at all n locations
actctgaattatattaaccggccattttgacatacatcttgttttttgggttacaggtctgctgctgccttgaaggatttgaatatttgggtcatgaatgtggtttcagtaaattccgcggacacacttcctattatttatgagcgaggtctctttggcatgtatcatgattggtgtgaatcatttagtacctatccgaggtcctatgatctacttcatgnaataatctattttcaaatattaag

SEQ ID NO: 282710 - DNA, 245 bp, Glycine max
  unsure (1)..(245): unsure at all n locations
cgaaccagctccagaacattcgcaagggtctccgcggcgactctgttgtcctcatggggaagaacaccatgatgaagcgctctgtcaggatgcacgctgagaaaaccggaaacnatgcctatctcaaccttatccccctccttgtcggcaatgtgggattgattttcaccaagggtgacctgaaggaggtcagtgaggaggttgctaagtacaaggttggagctcctgctcgtgttggtttggtt

SEQ ID NO: 282711 - DNA, 237 bp, Glycine max
gttcgctttataacactcaacctaagatgcagaacgaggaaggacagatcaccgagctttacattcctaggaagtgctctgccacaaaccgattgattaccgctaaggaccatgcttcggttcaggttaacattgggcatgtggatgagaatggcgtctacaatggccatttctccacttttgctctctgcggcttcatacgtgctcagggtgatgctgacagtgccctagatcgct

SEQ ID NO: 282712 - DNA, 248 bp, Glycine max
cagaggtgatgttaacagcattactattggatctggaactaatatacaagacaattctcttgttcatgttgccaagtctaatttgagtggaaaagtcttgccaactatcattggagataatgtcactgtaggtcatagtgctgtgttacaaggatgtacagttgaggatgaggcatttattggcatgggtgcaaccttgcttgatggtgtatatgttgagaaacatgccatggttgctgctggagctc

SEQ ID NO: 282713 - DNA, 251 bp, Glycine max
  unsure (1)..(251): unsure at all n locations
atcgaataaaactagggtttccgatngtcgtcgaggagaatgccgaagaacaagggaaagggaggaaagaaccggaagcgcgggaagaacgaggcggacgacgagaagcgggagcttgtgttcaaggaggacggccaggagtacgcgcaggtgctccggatgctggggaacggccgctgcgaggcgatgtgcatcgacggcaccaagcgcctctgccacatccgcggcaagatgcacaagaaggtctggat

SEQ ID NO: 282714 - DNA, 202 bp, Glycine max
  unsure (1)..(202): unsure at all n locations
accatcacccttgaggtggagtcctccgacaccatcgataacgtgaaagctaagattcaagacaaggaagggatcccacctgaccagcagagacttatctttgcgggtaaacagnttgaggatggtcgaacccttgcngactacaacatccaaaaggaatccactctccacctcgtgcttcgcctcaggggtggantncaat

SEQ ID NO: 282715 - DNA, 247 bp, Glycine max
  unsure (1)..(247): unsure at all n locations
ctagagcttgcacctattggtatcttctacaatatcctaaagtgtttttcttcttcttcatcaccatgtctttactttcagacctcatcaacctcaatctctcagaatccacagaaaagntcatngntgagnacatatgggttggtggatctggtatggacctcagaagcaaagccaggactcttcctgggccagtgagtgaccctgcaaaacttccgaagtggaactatgatgggtctagcacaga

SEQ ID NO: 282716 - DNA, 248 bp, Glycine max
aaacgcacagcttcaatcaccgaccacaccacccatcaacgacatgcttcctctttcccttctcaagactgcccaaggccaccctatgttggtggaactgaaaaatggggagacatataacgggcatttggttaattgcgacacatggatgaacatccatctgcgagaagtcatttgtacatctaaagacggagatagattttggaggatgcctgaatgctacatacgaggcaatacaatcaagtacc

SEQ ID NO: 282717 - DNA, 250 bp, Glycine max
gtacttcaccttctttctctctaagcgcaaaacctcgtactgtttttggcggttaaggatgtcggggaaaggagcgaaggggttgatcacaggcaaaacctccgccgccaacaaagacaaggacaagaagaaacccatctcgcgttcttctcgtgccggccttcagttcccagttggtcgtatccaccggcttttgaagtcaaggacaaccgctaatggtagagttggggccacagctgctgtctactct

SEQ ID NO: 282718 - DNA, 251 bp, Glycine max
  unsure (1)..(251): unsure at all n locations
caagattggaggtattggaactgtgccagtgggacgtgttgagaccggtgtcttgaagcctggaatggtggtgacttttgcaccaactggactgacaactgaagtcaagtctgtggagatgcaccatgaatctcttacagaggcacatcctggtgacaatgtgggattcaatgttaagaatgttgctgttaaggatttgaagcgtgtatntgcccccaactccagggatgaccctncaaagaggctctaac

SEQ ID NO: 282719 - DNA, 261 bp, Glycine max
  unsure (1)..(261): unsure at all n locations
cgggattaggtaatgtggttacatcaagagctatggtgggaaacctcgtaagaataaacaatactaccgcccctcccataaaaatatggtgtatttcttcaataaaagttaacttatgtattaagatgtatgaagcaaatccttactcatgactttcttataggttgaaacncnaatgcngagttaaaacttgcntactatatctattgacccatgaccccattccccatttttcagtgtacttccattgcttctttaagg

SEQ ID NO: 282720 - DNA, 254 bp, Glycine max
gttcatcgcagactcaacactctctccagacacttccttcatcaaatggcttctcacgacggcatctccgctgcttcttcagattccgtcttcaatcacctcgttcgtgctcccgaagatcctatcctcggggtaactgttgcttataacaaagatccaagtccagttaagctcaactgggagttggtgcttaccgaactgaggaaggaaaacctcttgttttgaatgtagtgaagcgagttgagcagcaactc

SEQ ID NO: 282721 - DNA, 250 bp, Glycine max
ccaacctgcttttacggatctacattggggaatgtttgttcctgctatcaaaggacaaggaactgaggaacagcagaagaagtggttgcctttggctcataagatgcaaataattggttgttatgcccaaactgaacttggccatggatctaatgttcaagggcttgaaacaactgcaacctttgatcccagaacagacgagtttgtaattcatagccccacattgacttcaagcaaatggtggcctggt

SEQ ID NO: 282722 - DNA, 252 bp, Glycine max
aatcaatcaaattctttgagttgaacacaggggccaagattccttctcttgggttagggacttggcaagctgaacctggtgttgtagctgaagctctcaccacagccattcaggttggatacaggcatattgactgtgctagtgcgtataagaatcaagcagagattggttctgctcttaagaagctttttgatgatggtgtggtgcaagcgtgaggacttatggatcacttccaaactctggtgttcagat

SEQ ID NO: 282723 - DNA, 250 bp, Glycine max
atccaaaggaatttaaccctaatagatggaataaagagcacaaggctggagaattccttccctttggaggaggaagtagattgtgtcctgggaatgatcttgccaagatggaaatagcagtttttcttcaccatttccttctgaattaccgatttgaacagcataatcctaattgccctgtgagatacttgccacatacaaggccaatggacaattgcttgggaagggtcaggaaatgtccatctacaac

SEQ ID NO: 282724 - DNA, 217 bp, Glycine max
  unsure (1)..(217): unsure at all n locations
gagagagtnttngcgcttcatcaagatgggtatttctagggattccatgcacaagaggcgtgccactggtggcaagaaaaaggcttggagaaagaagagaaagtatgancttgggcgtcaggcagcaaacaccaagttatcaagcaacaagacaatcaggaggattcgtgttagaggtggcaatgttanatggagggcattgaggctggatactggc

SEQ ID NO: 282725 - DNA, 249 bp, Glycine max
cgttagtcgtccatcataacggcttcctgtggcacacgtgtggtgattgttctctcggatgcggtgcatgcagtgaacgtgggtggtctagtgcccccacattgttccttaaaatcggttgtctcggatgacgcttgccctggcgcttgctttgttcaacgcgatgctactactcttagttagctagcgctggcaatgctcgtggcaggtgcttggtcattaacggatgctacctggttgatcctgcca

SEQ ID NO: 282726 - DNA, 248 bp, Glycine max
ctcttgcgtatgctacacatacatttttcaacaaggaagggtttctatacgtgcacacccccattgttaccacaagtgattgcgagggtgcgggtgagatgtttcaggtgaccactttgctgagtgaggcggagagattggagaaggagttgttgcagaatccacctccgtcggaagcggatgtggaggcggctagggttgttgttcaggagaaaggggaggttgtgtctcagttgaaagctgccaag

SEQ ID NO: 282727 - DNA, 250 bp, Glycine max
gggaaaaatggtttcgctgaaactgcagaagcggctcgcagccagcgtcctcaagtgtggcagaggaaaggtttggcttgaccccaatgaagtcaacgaaatctccatggctaattctcgccaaaacataaggaagctggttaaggatgggtttattatcaggaagcccaccaagattcactctcgctcacgtgcccgccgaatgaaggaagccaagaggaaaggacgtcactctggatatggtaagcgt

SEQ ID NO: 282728 - DNA, 249 bp, Glycine max
  unsure (1)..(249): unsure at all n locations
ttggaatatggattgctctgcagttgtgagagttagaacactacacatcagttctcctattttggcngctaaaagtcctttcttctacaagcttttctcaaatggaatgagggagtcagagcagaggcatgtcaccctaagaattnatgcttctgaggaagctgctcttatggagcttctgaattttatgtatagtaataccttgagcattacttcaccacctggctttgttggatgtgttgatggctg

SEQ ID NO: 282729 - DNA, 251 bp, Glycine max
  unsure (1)..(251): unsure at all n locations
gnatcaaagaaaggggtggtggctgcttcgaaagcttaataatttgtttatttccagaacatcatagttttcgcagcagcaaactaacaaattactcatatcatataataagatggcccgttctctctcgcaagccaaacgtattngtggtccttgttgcncaattctatctccctaattcccgttcatcggcgaggttacgcagtggcatccgatgtatcggtaagagttggattgggtaatattgggcg

SEQ ID NO: 282730 - DNA, 247 bp, Glycine max
ttatggaccagaaatagatatatggagtgcaggagtaattctctacatcttattgtgtggtgttcccccattttgggctgaatctgagcaaggagttgcacaggccattcttcgaggacttatagattttaaaagggaaccatggcccagtatttctgaaagtgctaaaagccttgttaggcaaatgttagaaccagaccccaagcttcgattaactgccaaacaagtgcttgagcatccctggatt

SEQ ID NO: 282731 - DNA, 248 bp, Glycine max
caaacaattgggccttcgcccttatgtgaagaggtacatgatgtaccaacaaggttgctttgcaggtggcacggttcttcgtttggccaaggatttggctgagaacaacaagggtgcacgtgtgcttgttgtctgctctgagatcactgcagtcacattccgtgggccaagtgacactcaccttgatagtcttgtgggccaagcattgtttggagatggagctgctgcagtcattgttggttctgacc

SEQ ID NO: 282732 - DNA, 248 bp, Glycine max
cgaaaccttaagtttcggatcaggtctgagcaatctggttggtagaacctttggtcttagagagtcaagttttatgtctgaattagacgatcaaattcctactgccttcgatccttttgctgatgcaaatgctgatgactcgggtgctgggtcaaaggagtatgtgcatattcgcgtacagcagcgaaatggaaggaaaagcctgacaaccgttcagggattgaaaaaagaattcagctataacaaga

SEQ ID NO: 282733 - DNA, 249 bp, Glycine max
caaagaatcaaggaaaggggtggtggctgcttcgaaagcttaataatttgtttatttccagaacatgcatagttttcgcagcagcaaactaacaaattactcatatcatataataagatggcccgttctctctcgcaagccaaacgtattggtgtccttgttgctcaatctatctccctaattcccgttcatcggcgaggttacgcagtggcatccgatgtatcggtaagagttggattgggtaatatt

SEQ ID NO: 282734 - DNA, 248 bp, Glycine max
  unsure (1)..(248): unsure at all n locations
gtgaatccatggaacattgattctgtcgctgaagctatggattctgcgttgatggtcccagaggctgaaaagcagatgcggcatgagaagcattataggtatgttagtacacatgatgttgcgtattgggcacgtagcttcttgcaggatctggaaagggcatgtagagatcatctgaggaggagatgctggggaattggttttggtttaggcttccgagtgattgctttggnnccaaactttagaaa

SEQ ID NO: 282735 - DNA, 246 bp, Glycine max
ccagagataacaatttgttgggcaaatttgagctatctggcattcctcctgcacccaggggtgttcctcagattacagtgtgctttgacattgatgccaatggtatcttgaatgtctctgccgaagataaaaccactggccagaaaaataagatcactatcaccaatgacaagggtagattgtcaaaggaagatattgagaagatggttcaagaggctgagaagtacaagtctgaggatgaagagc

SEQ ID NO: 282736 - DNA, 247 bp, Glycine max
aagaatcaaagaaaggggtggtggctgcttcgaaagcttaataatttgtttatttccagaacatcatagttttcgcagcagcaaactaacaaattactcatatcatataataagatggcccgttctctctcgcaagccaaacgtattggtgtccttgttgctcaatctatctccctaattcccgttcatcggcgaggttacgcagtggcatccgatgtatcggtaagagttggattgggtaatattg

SEQ ID NO: 282737 - DNA, 244 bp, Glycine max
  unsure (1)..(244): unsure at all n locations
gaaactttgaagagggtccatatgtgtttcccaaagaatcttggggggttctaattccacctcacatagaggatgcctacagtcctttgccaggatggatggttgagtctctcaaggctgtgaagtatattgattctgatcactttgctgtgcctgaaggaaaaagagctattgagcttgtagcagggaaagagagtgcaattgcacaagtggtcatcacaataattggtaaggtttatnccct

SEQ ID NO: 282738 - DNA, 244 bp, Glycine max
caaaatctgtgggaagctagctcggtacttcgagctttcaaccctccccactttggttattattggaccagatgggaaaactcttcattctaatgttgctgaggcaattgaggatcatggggttgctgcatacccattcacccctgaaaagtttgctgagcttgatgaaatactgaaggccaaagaggcagctcaaacccttgagtcaattttggtgtctgacgatcaagattttgtcattggg

SEQ ID NO: 282739 - DNA, 247 bp, Glycine max
ctatccatgttggtggaacaaggctatgacttgttgggcacccttaattggggagaccatatccctttcctgaaagactttgacctacagaaaatccggttcacctgctccaaattagtccctcaagtgaaccggttcgttggttcaatcatcgccgaccaccaggccgacacaacccaaaccaaccgcgatttcgttcatgttttgctctctctccaaggtcccgataaattgtctcactccgaca

SEQ ID NO: 282740 - DNA, 244 bp, Glycine max
aaagaatcaaagaaaggggtggtggctgcttcgaaagcttaataatttgtttatttccagaacatacatagttttcgcagcagcaaactaacaaattactcatatcatataataagatggcccgttctctctcgcaagccaaacgtattggtgtccttgttgctcaatctatctccctaattcccgttcatcggcgaggttacgcagtggcatccgatgtatcggtaagagttggattgggtaa

SEQ ID NO: 282741 - DNA, 244 bp, Glycine max
cagctgggtacagaagggtaccaggaaatgggacgcaaaggagggttgagcactgtggacaaatcaggagaagaacgtgctcaagaggaaggcattggcatcgatgagtccaagttcaggactggtaataacaagaaccagaatcagaacgaagaccaggataagtgataatgtaacacccttcactagcatgtgtagtgtgttcttatgctagcttaaatgtgagtgtcaagtgttttaggaa

SEQ ID NO: 282742 - DNA, 247 bp, Glycine max
  unsure (1)..(247): unsure at all n locations
gtagagagagcgagagaacaagaacataagggaaccacagcggcggtaacagaagaacaagcagagaatgggtcgagtgngaacgaagacggtgaagaaatcctctcggcaggtgatagagcgtcactactcgcgcatgancctggacttccacacgaacaagaagcttctggaggaagtggcgataatcccgtcgaagaggctaaggaacaagatcgcggggttctcgacgcacctgatgaagcgc

SEQ ID NO: 282743 - DNA, 244 bp, Glycine max
acaagatcgtggtggagaaatccacagtccctgtcaaaactgctgaagccatagagaagattctggcccacaatagcaagggaatcaaattccagattctatcaaaccctgaattccttgcagagggaactgcaatcaaagatctctttaacccagaccgtgttcttattggaggcagggaaaccccagagggccaaaaagctattcaaacattgaaggatgtttatgctcaatgggtccccga

SEQ ID NO: 282744 - DNA, 243 bp, Glycine max
aatctagtaagaaaggatcagacaagaaaaaatctagcaagcatgttgacccaactgtgcccattttcaatttagaggatatagaagaaggagtagaaggtactggatttgatgatgagaaatcactacttatgtcacaaatgagtcttgagaaaaggtttggtcagtccgctgtctttgttgcctctacgcttatggagaatggtggtgttcctcaatctgctactccagaaactcttctta

SEQ ID NO: 282745 - DNA, 242 bp, Glycine max
gtcagttgcaggaaaaatggtttcgctgaaactgcagaagcggctcgccgcgagcgtgctcaagtgtggcagaggaaaggtttggcttgaccccaatgaagtcaacgaaatctccatggccaattctcgccaaaacataaggaagctggttaaggatgggtttatcatcaggaagcccaccaagattcactctcgctcacgtgctcgtcgaatgaaggaagccaagaggaaaggacgtcact

SEQ ID NO: 282746 - DNA, 242 bp, Glycine max
  unsure (1)..(242): unsure at all n locations
agctgctgtagtttcaaatgatcctttgtttttacaggaagtcattggcaaatcagtaaatggtactacttatgctggtttaagagcaaggacgaccggagctccacagaatcactggtttggacccgctggtgatgctagaggtgcaggaattggaacaccagaggctataaaactgtatggtcttgccacagagaaataatctatgattttgggcctgtgccnaagaattgggaagttcc

SEQ ID NO: 282747 - DNA, 242 bp, Glycine max
  unsure (1)..(242): unsure at all n locations
gtctagatggccttggtcagcgttgtgccaagtgctacgaagctggtgcacgttttgccaaatggcgtgcagtgctgaagattggtcccaacgagccatctgagctgtctatccatgagaacgcctatggcttggctagatacgctgtncatatgccaggagaatggcctggntcccattgttgagccgagatccttgttgatggacctcnggacatcacaagtgtgccgccgtcacnganc

SEQ ID NO: 282748 - DNA, 241 bp, Glycine max
atgatttttaccctcgtgatcctgcttcccataccatccatatttcttctgttgcatacaactcactattccttggagaattcatgcaacctgactgggacatgtttcatagtttacacccagcagcagattatcatgctgcagctcgtgcaattggtggatgtcctatttatgttagtgacaagccaggcaatcacaattttgatcttcttaagaagctggttctcccggatggttcggt

SEQ ID NO: 282749 - DNA, 242 bp, Glycine max
gccagaacatccaccacggaagtgatatctagtggaattaacggaacaagagatggagcacttcaattaatgcatgctgaacttcaagttctttcgcctttggttccggttcgtgaggtgaatttcctacggttttgcaagcagcacgcagaagggttgtgggctgtggtggatgtgtccatagatagcatcagagaaagttcaggagcacccacttttgtgaacggtaggaggcttccttc

SEQ ID NO: 282750 - DNA, 241 bp, Glycine max
  unsure (1)..(241): unsure at all n locations
gtttcgggtttgacgttgttcacaatcactttctgcgcttcactcactcccttcgtgcggttttctttctttgtacgaactcgtgcgaaaatgcgtgagattcttcacatacagggagggcaatgcggaaaccagatcggagcgaagttctgggaggtggtgtgcgcggagcacgggatcgattccacggggaggtaccagggggacaacgagttgcnancgngcgantcaacgtctatta

SEQ ID NO: 282751 - DNA, 240 bp, Glycine max
  unsure (1)..(240): unsure at all n locations
caaacctctctaatttttgaagcttattatacccaatctcgatatgcagatcttcgtgaaaaccctaactggcaagacgatcaccttggaggtggagtcctctgacaccatcgacaacgtgaaggccaaaatccaagacaaggagggcattcctccggatcaacagcgtttaatcttcgnggnacaactcgaagacggcagaaccctcgccgantanaacatcccaaaaggagtccncgc

SEQ ID NO: 282752 - DNA, 240 bp, Glycine max
gatctgcctcctttttatcaaatctatctcttcttcaagaatagttgaaaatggggctgtctttcaccaagttgttcagccgactgtttgccaagaaagagatgcgtatactgatggtgggtctcgatgctgcgggtaagaccaccattctgtacaagctcaagcttggagagattgtcaccaccattcccaccattgggtttaatgtggaaactgtggaatataagaacatcagcttca

SEQ ID NO: 282753 - DNA, 242 bp, Glycine max
gaagagacttagcagctcagattcttccagtgccctcatgacaatttgtccatcaacagaggaacatagtccgaggaacagccaacacatgtatggtagggagttccaattcgatgttggacggactcgacgaggaagggtgtgttgaagaaccggggtatcaatctgagaagaagcgtcgtctaagtgtggatcaagtgaaggctttggagaagaactttgaggttgaaaacaagcttgaa

SEQ ID NO: 282754 - DNA, 220 bp, Glycine max
  unsure (1)..(220): unsure at all n locations
atgggttgagagagaaggacaannggttccaagttttncnagacaacttggggttcanacaagagcacaacaaccagaacaacacttacaaacttgggttgaaccagtttgctgacatgaacaaatgaggaataccgtgtcatgtattttggcaccaagagtgatgccaaacgcaggctcatgaaaaccaagagcnccggtcaccgctacgcgtacagtg

SEQ ID NO: 282755 - DNA, 239 bp, Glycine max
  unsure (1)..(239): unsure at all n locations
gaagaacgaatcgaaaagaaagatcatggcgatggcaaacttggctcgacggaagggttacgccgtcgttttgtcgtcgaggtcgtcgctttgtctgacaaggtggagggggttcgcgtccggatctgacgaaaacgacgtcgtggtcatcggcgncggtcccggcggctacgtggcggccattaaagcgggcgcactgggtctgaaaaccattgcatcgaaaaaacgtggcactttcg

SEQ ID NO: 282756 - DNA, 243 bp, Glycine max
  unsure (1)..(243): unsure at all n locations
gttncaatcgcataataataaccatccaaagtttattgagagaaatttgcaagtttgaaaagaaacatggcatctcatcnacaaaacaagcaagagcttgntgaaagggcaaggcaaggagagactgttgtnccgggtggcactggtggcaagagccttgaggctcagcaacatcttgctgaaggnangagcaggggagggaaaacaaggnaggagcagctggggacagannggtaccatgna

SEQ ID NO: 282757 - DNA, 239 bp, Glycine max
gaaagcgtcatttttcaattggtattacttttctatctacctaggtgccattgtgtcatgcagcttaattgtgtggattcaagacaatgctggatggggtcttggatttggcattcctgctttgtttatgggattatctactataagcttctttataggcacacatctatacaggtttcagaaacctgggggaagttcttatacaagaatggcccaggttttgtttgcatctgtccgga

SEQ ID NO: 282758 - DNA, 238 bp, Glycine max
tgctgctctttcagatttgtatcccatttgcaattgagcattttaaattgagaacaactattaaatccctacttcgctattggtttactgctgttggttgggcacttggtttgactgatttcttactgcctagacccgatgagagtggtaatcaagaaaatggaaatggggagccagctaggcaggaaaggctacaagtagtacaagctggagtgcaagatcagggtatggtgccatt

SEQ ID NO: 282759 - DNA, 239 bp, Glycine max
aggatggcaaatactctcaagttgtgtctaatgctcttgatatgaagctcagggatgatcttgagagactcaagaaaatcagaaaccaccgtggtttgaggcattactggggccttcgtgtccgtggtcagcacaccaagactactggccgtaggggaaagactgttggtgtctctaagaagcgttaagctattatgtttggcttggagattagattttgttgagaaggaaagtttgat

SEQ ID NO: 282760 - DNA, 248 bp, Glycine max
atgacagtgtctttccacaagtttggggactttttccctggcacagggcacgtcaaagacattggggtgggctcaggaaagaattatgcagtaaatgtcccattaaatgatggaatggatgatgagagtttccgtagtctgtttcgatccatcattcaaaaagtcatggaggtttatcaacctgaggcagttgttctacaatgtggagctgattcattgtctggtgacagattgggttgcttcaactt

SEQ ID NO: 282761 - DNA, 244 bp, Glycine max
  unsure (1)..(244): unsure at all n locations
gcagttccctgacactgctgcctccattgtctccatccatgtggactctgatgtcatgtcattggatggaagacaaccacttgagactgaagctgagatcaaggaagatggtaaactccatgtcactgtgaggnaatccaatgcttcaagatcagacatcttctctagaaggtctcagggtctctcttccaccactccacgccctnccaaccttaccaatgctgagatatactctttgcaatcc

SEQ ID NO: 282762 - DNA, 242 bp, Glycine max
gggcagtagccgagattccgtgagttgcaaaaatgaagacgattctttccaccgagaccatgaacatcccggacggcgtgagcatcaaagttcatgccaaggtcatcgaagttgagggcccccgcggaaaattggtgcgagacttcaagcatttgaatctcgattttcagctcattactgacgaaaacggtaaaagaaagctgaaaatcgacgcgtggtttggttctcggaaaacatccgcc

SEQ ID NO: 282763 - DNA, 247 bp, Glycine max
  unsure (1)..(247): unsure at all n locations
gcaaaagcgaaaagaaaagaatatgcaggttgatgaactgcaggaagttgtcagcagaggcttgcatgcatgctgtgcagaacgancggcttcccatgcgcgttgttgtgcaggtcctcttctttgaacagctgagagctacaacatcatcaggaggcaacggaacaccggatcattccggctctatcagggcctctcttcccggtggatctcatgggagttcaaggtcggaagaggaatgggaagc

SEQ ID NO: 282764 - DNA, 248 bp, Glycine max
ctgcgaatatttttatcaagaatttggataaggctattgaccacaaggccttacatgatactttttcttcttttggactcattctttcttgcaaaatagcaactgatgcttctggcctgtctaagggctatggttttgttcaattcgacagtgaagagtctgcacagaatgctattgacaagttaaatggcatgttgatcaatgataagcaggtctatgtaggccattttctgcgaaagcaagataga

SEQ ID NO: 282765 - DNA, 250 bp, Glycine max
  unsure (1)..(250): unsure at all n locations
cgagcagccacacctcccgcagcagccatggttctcaaaactgaactatgcccgattcagtggtgccaagatctacccaggntagggcatcanatttgtncgtggtgattctcaggttttcctgtttgcnaactcaaaatgtaagaggtatttccacaatcgcctgaagccttcaaagctcacctggactgcaatgtacaganagcaacacaaaaaggacattgctcaagaagctgtgaggaagaggaga

SEQ ID NO: 282766 - DNA, 251 bp, Glycine max
  unsure (1)..(251): unsure at all n locations
gatgggtgagaagagcaacgttggcggcgacgcgattnacacgacactgcttcacgggaagtacgagctgggccggctgttaggccacggaaccttcgcgaaggtgtnccacgcgcgccacctgaagacgggaaagagcgtggcgatgaaggtggttggcaaagagaaggtgtgaacgtaggcatgatggagcagatcaagagagagatctcagccatgaacatggtgaagcacccaaacatcgtgcagct

SEQ ID NO: 282767 - DNA, 242 bp, Glycine max
cttgaatgtctctgccgaagacaaaactaccggccaaaagaacaagatcaccattaccaatgacaagggtaggttgtcaaaggaagagattgagaagatggttcaagaggctgagaagtacaaatcagaagatgaagagcacaagaagaaggtagaggccaagaatgcattggagaactactcatacaacatgaggaataccattaaagacgagaagattggaggaaaacttgacccagctg

SEQ ID NO: 282768 - DNA, 240 bp, Glycine max
  unsure (1)..(240): unsure at all n locations
aagaaaccctagcctctcaccctccctgcgacacgatgcagatcttcgtgaaanccctaacgggtaagacgatcacccttgaggtggagtcttctgacaccatcgacaacgtgaaggccaagatccaggacaaggaaggcatccctccggaccagcagcgcctcatcttcgccggaaagcagctggaggacggccgcaccctcgccgactacaacatccagaaggagtccaccctccacc

SEQ ID NO: 282769 - DNA, 245 bp, Glycine max
gcaaatcacccaacaagcacaatcgtctgtacatggaagcaagaccattggaggaaggtcttgccgaggccattgacgatggcaagattggaccgagggatgaccccaagattcgctccaagatcttgtcagaagagtttggttgggacaaggatctcgccaagaaaatctggtgctttggccctgagacccttggacccaacatggtggttgatatgtgtaagggagtccagtatttgaatgaa

SEQ ID NO: 282770 - DNA, 238 bp, Glycine max
aacttctgctacttcctactccaaccgcacttctgctccgcaattatcatgggcaaggtcaagatcggaatcaacggatttggaagaattggccgtttggtagccagagtggctctgcagagagacgatgttgaactcgttgccgttaacgaccctttcatcaccaccgattacatgacatacatgtttaaatacgacagtgttcatggacactggaagcatcacgatgtcaccgtta

SEQ ID NO: 282771 - DNA, 238 bp, Glycine max
caaacaattgggccttcgcccttatgtgaagaggtacatgatgtaccaacaaggttgctttgcaggtggcacggttcttcgtttggccaaggatttggctgagaacaacaagggtgcacgtgtgcttgttgtctgctctgagatcactgcagtcacattccgtgggccaagtgacactcaccttgatagtcttgtgggccaagcattgtttggagatggagctgctgcagtcattgtt

SEQ ID NO: 282772 - DNA, 242 bp, Glycine max
gaaagcatctaggttcattttcagtgaaataagccaaaagtttcccatcatgcccttctctgcaagggctttggaagagaaaagagctcgtttgggtttagtggaatgtgtgaatcatgagctcctgcaaccttatcctgttctgcatgaaaagcctggtgattatgttgcacatatcaaattcactgtcttgctaatgcccaatggatcagatcgtgttacgtctcactcactccaggagt

SEQ ID NO: 282773 - DNA, 246 bp, Glycine max
gactgcttcagctatgttccgtggtaagatgagcacaaaagaggtggatgaacagatgatcaatgtgcaaaacaagaactcttcatactttgtcgaatggatacctaataatgtgaagtccagcgtgtgtgatatcccacctaagggtcttaaaatggcatccactttcattggtaactcgacttcaatccaggagatgttcaggagagttagtgagcagttcacggctatgttcaggcgcaaggc

SEQ ID NO: 282774 - DNA, 137 bp, Glycine max
gcatgctgctgccaactgcaaggttcttgttgttgctaacccagcaaacaccaatgcattgatcttgaaggaatttgctccatctattcccgagaagaacatttcttgtttgactagattggatcacaacagggcat

SEQ ID NO: 282775 - DNA, 235 bp, Glycine max
agcatcgctattctcttcattccatggctttgcccaaccagcaaaccgtggattaccctagtttcaaactcgttatcgtcggcgatggtggcacaggaaagacaacctttgtgaaaaggcatctcaccggagaattcgagaagaaatatgagccaaccatcggtgtggaggttcacccattggattttttcacaaactgtggaaagattcgattttactgctgggatactgctgg

SEQ ID NO: 282776 - DNA, 235 bp, Glycine max
  unsure (1)..(235): unsure at all n locations
tcttatcatggtcatctgagtggtgtttattgcttggctcttcatcccacaattgacgttttactaaccggaggancgtgattctgtctgccgggtttgggatatacgaagtaaaatgcagattcatgctctttcaggacatgataacactgtctgctctgtgtttacgcggccgacggatccccaagttgttacgggttctcatgacactaccatcaagatgtgggaccttaga

SEQ ID NO: 282777 - DNA, 240 bp, Glycine max
  unsure (1)..(240): unsure at all n locations
aganatttatgcaagatcccatggaaatttatgtcgacgatgaggccaaattgactcttcatggtcttgtccagcactatatcaaattgcaagagacagaaaagaatcgtaagctgaatgatcttcttgatgctctggatttcaaccaagtagttatttttgtcaaaagtgtcagcagagctgccgagttgaacaagttgcttgtggagtgtaacttcccatctatctgcatacattctg

SEQ ID NO: 282778 - DNA, 240 bp, Glycine max
  unsure (1)..(240): unsure at all n locations
cgagtacagaaaaaggggttagggtttgttcttgtgatcgaagctaagcgaanaaaatgggtggatcagtgagggacgtgaagtcgaagggcgaggtcgacgaggtggtggcgagtggctctccggttatcctccacttctgggcgtcgtggtgcgaanttccaagcacatggaccaactcttctctcacctttccactgatttccccaacgcccgcttcttaagggtcgaggccgaagg

SEQ ID NO: 282779 - DNA, 242 bp, Glycine max
agtgcattgtatttggaacagttatgggaagtgttggggcattacatgcctttacttcacgagatgatgttgatttcttttctcatttggagatgcatatgaggcaggatcacccacctttgtgtggaagagaccacatggcatatagatctgcctattttcctgttaaggatgttattgatggggatctatgtgagcaatacccaacattgccaatggatttgcagagaaaaattgctgat

SEQ ID NO: 282780 - DNA, 124 bp, Glycine max
  unsure (1)..(124): unsure at all n locations
gagcaggataganaatcctaaagggttcaagcttgatttcttctttgataccaatccttacttttcaaataccgtcttgacaaaaacatatcatatgattgatgaggntgaacctatattggag

SEQ ID NO: 282781 - DNA, 236 bp, Glycine max
cataacttcaacaacttctttcttctcgatctcacgatggctcatttggccctgtctcagatggctgtaactgttcctgttggcaacgatttgtctctcagaagatctgcagttaaggcccctaacttgaacttttgggataaatcatgggcaccagtatttactttggacttgaagccaaacaacccaagtttaagaagtcgtcatgtggtatgcatgtccgtgcaacaagcaag

SEQ ID NO: 282782 - DNA, 234 bp, Glycine max
  unsure (1)..(234): unsure at all n locations
aagaatcaaagaaaggggtggtggctgcttcgaaagcttaataatttgtttatttccagaacatcatagttttcgcagcagcaaactaacaaattactcatatcatataataagatggcccgttctctctcgcaagccaaacgtattggtgtccttgttgctcaatctatntccctaattcccgttcatcggcgaggttacgcagtggcatccgatgtatcggtaagagttgga

SEQ ID NO: 282783 - DNA, 233 bp, Glycine max
  unsure (1)..(233): unsure at all n locations
cacacacaactacaagaaagaacttccttataaccaaaaccaacaacaactatggcaagttatcagaagcactacgatgatcagggtcgcaaggtcgacgagtatggcaatgttgagaggcaaactgacgaatatggcaacccggttcatgccactagtgtcacttatgtngccaccaaaagtgttggtggctacaatgatgacgctaataagcaacatgatattactggtgt

SEQ ID NO: 282784 - DNA, 234 bp, Glycine max
gcccgttcataaaatcctcctgcagcagcacccagtacccagccctctgcgtctcatccctctccgtctacgcctccagcatccaacaggaccctcaccaactggttcagacagcactctccctctccctgaaccgcacccaagccaccaaaaccttcgtggctaactgcaacaaattcagaggcctgaaacccagagagcacgctgcactcaaggactgcgccgaggaaatca

SEQ ID NO: 282785 - DNA, 235 bp, Glycine max
  unsure (1)..(235): unsure at all n locations
gcccgttcataaaatcctcctgcagcagcacccagtacccagccctctgcgtctcatccctctccgtctacgcctccatncatccaacaggaccctcaccaactggttcagacagcactctccctctccctgaaccgcacccaagccaccaaaaccttcgtggctaactgcaacaaattcagaggcctgaaacccagagagcacgctgcactcaaggactgcgccgaggaaatca

SEQ ID NO: 282786 - DNA, 230 bp, Glycine max
  unsure (1)..(230): unsure at all n locations
aaccctaattcacacccaaagagaaaagaaaaaaaaaacaacagtggtacgtgatgccaccgaagttcgatccctcgcaggtggtggacgtgttcgtccgagtcaccggcggcgaggtcggcgcggcganttctctcgccccgaagatcggtcccttgggactctccccaaagaagatcggagaggatattgcgaaggaaaccgcgaaggactggaagggcctccgcgtg

SEQ ID NO: 282787 - DNA, 235 bp, Glycine max
aatctccatacccagtagacaacttttcatagatggagagtggaaagtccctcttctcaacaatcggtttccgatcatcaaccccgctactgaagacatcatagggcatattccagccgctactaaggaagatgttgaccttgcggtggatgctgctaaaagagccttttcccataacaaaggcaaagattggtcttcagctcctggctctgttcgtgctcgctatcttcgagcc

SEQ ID NO: 282788 - DNA, 235 bp, Glycine max
  unsure (1)..(235): unsure at all n locations
caacaacacactactttccttcttccaataatgtcttcttcnttctctgttcgttttcttgctcctccatcatcatgcttccccagctctcggcccaagacatggctctgcgccgccaccaccccaacggtggctccggcaactgcctcctcggaggtggaggcttcaaggttggagcctagagtggaggagagagatgggttctgggttttgaaggaagagtacaggggaggca

SEQ ID NO: 282789 - DNA, 238 bp, Glycine max
  unsure (1)..(238): unsure at all n locations
ccgcaccagtttcaccgcacgaatatcttgttgnntggagcgatccganaaaaactctgtaaacatgttagctataccatgacctccttacatgtgatgancttctctctgactccttccgttaacaaggnattgnnnatggaatnctgtgggaagttgatgggaagtgggttgttaaangancagttgatgtagacattggtgcaaacccttctgctgagggtggaggagaanatga

SEQ ID NO: 282790 - DNA, 120 bp, Glycine max
  unsure (1)..(120): unsure at all n locations
ggccccttgacttgaccgaggagcttctgaaatggaccaacagcaccatctccatgatgatgctcggcgaggctgaggagatcagagacatcgctcgcgaggttcttaagatcttnggng

SEQ ID NO: 282791 - DNA, 119 bp, Glycine max
gtgaagatgcagtattgtgtttcctgtgctatccactctcatgttgtgagggttcgatcccgcactgataggagaaagcgtgagcctccacagcgattcatcaggcgcagggatgatgc

SEQ ID NO: 282792 - DNA, 261 bp, Glycine max
ctcatattattgtcgccacttcgaccttaatcaccctcgcgccctcgctcttcccttcctggtggcgacaatgtcgactcctgctaggaagaggctgatgagagacttcaagaggctgcaacaagacccgcctgcagggatcagcggtgccccccaggataacaacataatgctgtggaatgctgtcatatttggtcctgatgatactccatgggatggaggcacgttcaagttgactctccagtttactgaggatatcca

SEQ ID NO: 282793 - DNA, 260 bp, Glycine max
  unsure (1)..(260): unsure at all n locations
gttcatcgcagactcaacactctctccagacacttccttcatcaaatggcttctncacgacggcatctccgctgcttcttcagattccgtcttcaatcacctcgttcgtgctcccgaagatcctatcctcggggtaactgttgcttataacaaagatccaagtccagttaagctcaacttgggagttggtgcttaccgaactgaggaaggaaaacctcttgttttgaatgtagtgaggcgagttgagcagcaactcataa

SEQ ID NO: 282794 - DNA, 255 bp, Glycine max
catgcccgtgagagtattggagaacaccgcagcaccttcttctcaggtttcaggtgctaattcgggaaggagttcgtgccaatcttgtagtcttctaggcgttgggcaggccttttctggcacccagaatgtctcaagtgtacaaaaggatgaagcatggagagtaaatgtccgtatacaaggatgtgaccttgagcatgggtatttgtgtggcaccatggaagctcttaatgttcctatggcagacacacctgt

SEQ ID NO: 282795 - DNA, 258 bp, Glycine max
ggtgagtctaatcatggaactaaggcttcaagatcagatcaggaacgacgaaaggggattgcttggactgaggatgaacacaggttatttcttctgggcttggataagtatggaaaaggagactggcgaacatatcaaggaactttgtggtgacacgaactcctacacaagtagcaagccatgcccaaaaatacttcattcgtttgaactcaatgaacaaagatagaaggcgatccagcatacatgatatcaccagtg

SEQ ID NO: 282796 - DNA, 259 bp, Glycine max
atcatttctccatttccattttctctctcacttttcaagaatcgtaagctatgggaaagtcttacccaactgtgagtgctgattaccagaaggccgttgagaaggcgaagaagaagctcagaggcttcatcgctgagaagagatgcgctcctctaatgctccgtttggcatggcactctgctggaacctttgacaagggcacgaagaccggtggacccttcggaaccatcaagcaccctgccgaactggctcacagcgc

SEQ ID NO: 282797 - DNA, 258 bp, Glycine max
cggcttcttcttcgttgcgctttttcccaaaaccaattgcatcactctcgtccgttaccgccgctgccctagaccaccgcaagcgacgtcgcacaccgccttcatccgttagggcaaaaatgagtcgaggaagtggaggtggatacgatcgtcacatcactattttctcccctgaaggacgtctctttcaagtggagtatgctttcaaggctgtgaaggctgcaggaatcacctcgattggtgtccgaggaaaggatc

SEQ ID NO: 282798 - DNA, 255 bp, Glycine max
ggtttcctggtctaaagtctttgactttgaagggaaagcctcattttgctgacttcagtttggtgccttatgattggggtggctttgtgcatccatggattgaggcactggccaagaacaaggttggcttggaggagcttaggctcaagaggatggtggtctcggatgagagcctggagctactctctcggtctttcacacacttcaagtctttggttcttgttagctgtgaaggttctccactgatggccttgc

SEQ ID NO: 282799 - DNA, 255 bp, Glycine max
ggtcgcgtggtggctattgtgaaagagtttgaggagcagtgtaggaccccaattgggaagctgagacaggttgctgacgccatggacgttgagatgcacgcgggtcttgcttctgaaggtggcagcaagctcaagatgttgatcacttatgttgataatctcccttctggggatgagaaaggactcttttatgcattagaccttggtggcacaaacttccgaacccttcgcgtgcatttaggtgggaaggagaaa

SEQ ID NO: 282800 - DNA, 259 bp, Glycine max
  unsure (1)..(259): unsure at all n locations
ctctcttaagaccagggaggttggaagagagcttcatcaagcatgtcctttctgttagtcattccaataagtaaaacatgcttgatgaagctntcttaagaccagggaggttggaagtccaggttgagataagccttcctgatgaaaatggtcgattgcaaattcttcaaattcatactaacaaaatgaaagagaattcttttctagctgctgatgtgaaccttcaagagcttgctgctcgaacgaaaaactacagtgg

SEQ ID NO: 282801 - DNA, 257 bp, Glycine max
aaaaaacccttctttctttcaggttcattacttgatcagtgtcaaaagggtagttgcaaattgcaatggctaagcatgatgttgagggtggttccttctcagcaaaggactaccatgatcctcctccagcacctttgattgatgctgaggaactcacacagtggtccttctacagggctttgattgctgaattcattgccacattacttttcctttacatcacagtgctcactgtgattggttacaagagccagagt

SEQ ID NO: 282802 - DNA, 261 bp, Glycine max
  unsure (1)..(261): unsure at all n locations
gagaggtccaccaaccttgactggtacaagggaccaactctccttgagggctcttgaccaaatccaatgagcccaagaggccctcagacaagccactcaggcttccattgccaggatgtctacaaaattggtggtattggtaccgtgccatggggacgtgttgagactggtgtcgtggaagcccggtantggtgtgactttggtcccactgggctggacnactggagggtaagtctgttngaganngnacatggaggtctc

SEQ ID NO: 282803 - DNA, 257 bp, Glycine max
cagacataagtgaagttcgggtagagggattggagaccctgggattatcttgataacttgcagaacaaggagcgctttactgaacagggggatgctttaacgtttgaatcagaagttgacaagatatatcttagcactcccacaaagattgcaattattgatcatgaaaaaaagagaacatttgttgtgcgtaaagatggccttcctgatgctgtggtgtggaatccttgggataagaaagcaaaggccatggctga

SEQ ID NO: 282804 - DNA, 250 bp, Glycine max
  unsure (1)..(250): unsure at all n locations
gaggagctcaatatggatctcttccgcaagtgcatggaaccagttgagaagtgtttaagagatgctaagatggacaagaggactgtccatgatgttgtacttgttggtggtcccacnannctcccgagggtgnacaactccggcaagatttttaatgggaaggagctctgcagancatcatctgatgaggtgtggcatatggtgcngnagtcaagctgtattcttgagtggtgaggtaatgagaagntca

SEQ ID NO: 282805 - DNA, 256 bp, Glycine max
gctgcttcttccgccactcagcacttcgctccctctgtgcttcaccaaccatgggccgaaatcgaagctaccgttccagatccctctcaaatcgacgtcaaacttttcaaccgctggagcttcgacgacgttgaggttactgatatgtctctggctgattacattggagtgtccccgtcaaagcatgctacatatgttcctcacactgctggtaggtactcagtgaagaggttcaggaaggcgcatgccccattgt

SEQ ID NO: 282806 - DNA, 254 bp, Glycine max
ggactttttgctgaccctgaaggaaggggtctaagggctcttacaaaatcccagttgggtgagattctaacaccagctgcttgcaccattgtttcttcgctcaaaaacgataatgtcgactcctatgttctatctgagtccagcctctttgtttatgcctacaagatcatcatcaaaacctgtggtactactaagctattgcttgcaatcccacccatattgaagttcgctgaaatgctttcccttaatgttaa

SEQ ID NO: 282807 - DNA, 250 bp, Glycine max
  unsure (1)..(250): unsure at all n locations
cagatcttagtgtttggtcaaatccattagagttcaaaccagaaaggtttctaaccacccataaagacattgatgtcccctaacatcaatgtctttatgggtggttaggggacatcattttgagctattaccatttggtggtggtagaagagtgtgccctggaatatcctttagccttcaaatggttcatttgactcttgccagtctttgtcanantttttcattcttaaatccatcaaatgaacctatt

SEQ ID NO: 282808 - DNA, 253 bp, Glycine max
  unsure (1)..(253): unsure at all n locations
aaactccttncaccctcgctatcgtgacaccatgaacataaatggccttgctcggttatcactggtcaacgacggtggcgttatagaacaaacatttttgtggggaaggtattctgtggaaatgtctgctgtagtttacaaggattgggtttttacagatcaagcattgcctgctgatcttataaaaagaggaatggcaattgaggatccatcgtgccctcatggcattcgccttgtgatagaggactaccct

SEQ ID NO: 282809 - DNA, 254 bp, Glycine max
caaatgcggacattttggaagcaacttatccggcagtcgccaagagattacatggtgattggctctctgatcctgcaattgcaattgttacaggcttccttggaaaggcccagaaatcatgtgcagtgacaacactgggtagagggggcagtgatttgacagctacagcaattgggaaagcactagggttacctgagatccaggtatggaaggatgttgatggtgtcctaacctgtgatccaaatatataccca

SEQ ID NO: 282810 - DNA, 253 bp, Glycine max
aatctccatacccagtagacaacttttcatagatggagagtggaaagtccctcttctcaacaatcggtttccgatcatcaaccccgctactgaagacatcatagggcatattccagccgctactaaggaagatgttgaccttgcggtggatgctgctaaaagagccttttcccataacaaaggcaaagattggtcttcagctcctggctctgttcgtgctcgctatcttcgagccatcgcttcaaagataaca

SEQ ID NO: 282811 - DNA, 249 bp, Glycine max
gccaagtcgtaaaagggtttcaagggatggaaaacatgcagagcttctggcaattgggtgatgaactccgtgggcactcaaaagcatcggaggatcacaagtggttaatggttgcctcgaaactggccgaacagacaagattgaagggggagcgtgtgaacaaccttgatctttcaaagggacccattgaaacaaggtcaagggataaatttgggttccaggaagagaacaaatttgattctcttaact

SEQ ID NO: 282812 - DNA, 249 bp, Glycine max
gcttcagttcgtttttgttgatcctgtgaacttatggctgacggggtggttctgttggatacatgggccagcatgtttgggatgagggttaggattgcattagctgaaaagggtgttgagtatgaatacaaggaagaaaatctcaggaacaagagtcctttgcttttgcaaatgaacccaattcacaagaaaattccagttctgatccataatggcaaaccaatttgtgaatctgcaattatagtgcag

SEQ ID NO: 282813 - DNA, 253 bp, Glycine max
  unsure (1)..(253): unsure at all n locations
gaagaacgaatcgaaaagaaagatcatggcgatggcaaacttggctcgacggaagggttacgccgtcgttttgtcgtcgaggtcgtcgctttgtctgacaaggtggagggggttcgcgtccggatctgacgaaaacgacgtcgtggtcatcggcggcggtcccggcggctacgnggcggccattaaagcggcgcactgggtctgaaaaccacttgcatcgaaaaacgtggcactctcggcggtacctgcctca

SEQ ID NO: 282814 - DNA, 253 bp, Glycine max
  unsure (1)..(253): unsure at all n locations
agagatgacgacccgattcaagaagaaccgcaagaagcgcggccacgtgagcgccggtcatggccgtatcggaaagcaccgtaagcnccccggcggccggggaaacgccggtggcatgcatcaccacaggatcctgtncgacaagtaccatccgggcttcttcggtaaggtgggaatgaggtacttccataagcttcgcaataaattctactcccccatcgtcaacgtcgaaaagctatggtctctcataccc

SEQ ID NO: 282815 - DNA, 252 bp, Glycine max
cagactcaggttggtatcaaggtgctacaaggtgagagggagatggctgtagacaacaaatcgcttggagaatttgagcttgttggcattcctcctgccccaagaggcatgcctcagattgaagtcacatttgatatagatgccaatgggattgttactgtctctgccaaagacaagtccactgggaaagaacaacaaatcaccatccgttcatctggaggactctcagaagatgagattgataagatggtc

SEQ ID NO: 282816 - DNA, 248 bp, Glycine max
gcttgcggccggagtgttcacaacgaacatggacactgcctacactttgacgcgggcactgagagttggaacagtgtggataaactgctttgacacatttgatgctgcaattccctttggagggtacaagatgagtggtcaaggcagagaaaaaggagagtatagtctcaaaaactacttgcaagtgaaggctgttgttaatcccctgaaaaacccagcatggctttgagcaaacactagccttcttt

SEQ ID NO: 282817 - DNA, 247 bp, Glycine max
caatgctgccccataggatattgtggagcaacaagcagcaggcttgatgaaagaagcagagcggttcctaatcttaagcaatatcgatcgcctgtggaaagaacatctgcaggcactaaaatttgttcagcaagccgtggggttacggggatatgcgcagggggatcctcttattgagtataagcttgaaggctataaccttttcttggatatgatggcacaaataagaagaaatgtcatatattct

SEQ ID NO: 282818 - DNA, 246 bp, Glycine max
gttaccccactctacctaattggttcccttctctcctttttcctatctacatacacaacatacacaaagcaaagcatgggagtgactctggagtttatgacacagaaggacgttatgtgccagcaaatattgagaacatattcagtaagtatgctcgtacagtacctgacaagctcacacttggggagctctgggacttgacagagggaaaccgaaatgcttttgacatatttggctggcttgcag

SEQ ID NO: 282819 - DNA, 247 bp, Glycine max
  unsure (1)..(247): unsure at all n locations
ggtgttcacctcatccattggtgccgtctatatggaccccagtaggagcatcgatttggtggttgacgagtcctgttggagtgatttggaatattgcaagaacaccaagaattggtattgctatgggaanngctgtggctgaacaagcagcatgggacacagcaaaagagaatggggtggacttggttgtagtgaacccagttttggttcttggaccattactgcagcccacaatcaatgctagtac

SEQ ID NO: 282820 - DNA, 249 bp, Glycine max
  unsure (1)..(249): unsure at all n locations
ctagctcaaagactatcagcaagcggcacatccaaatgctccccttggatatgggttgtgtttcctgaaccttgcttttgatggatttaccaatgcaactcaggattctttaaaagcaaggtatccaaaaacaagtgcttgggatattatgctgggcatgaatttatggggaaccatatacaatatgatttacatgtttggatggccccgtgccagtggatttgaggcagttcgcttttgccncagcat

SEQ ID NO: 282821 - DNA, 247 bp, Glycine max
  unsure (1)..(247): unsure at all n locations
ctgggttacggtgcccaactgcacgctaacctagaccccacaaagggtgttggtcgattaagacagcaggacggtggtcatggaagtcgaaatccgctaaggagtgtgtaacaactcacctgccgaatcaactagccccgaaaatggatngcgctaaagcgcgcganctatacccggccgtnggggcaagaccaagccccgatgagtaggagggcgcggcggtcntgaaaaccngagggnnggtgga

SEQ ID NO: 282822 - DNA, 239 bp, Glycine max
  unsure (1)..(239): unsure at all n locations
cttggcagggttatcagggtgacaataaaagttttcttgtttgnaagaagaaaatggccacttccccggagttgatgtgctgctttgttcctgctccatttaagcagtttcttgaagctgttactaatatgagattggntgaggagcccaattatgccaagcttatatcactttttgaaagcttgattgaaccatgcactccgttgagacctattagaatagatggagctttaagtttg

SEQ ID NO: 282823 - DNA, 238 bp, Glycine max
  unsure (1)..(238): unsure at all n locations
gttcaagacatcgcgagcnagttgaaactcggggacaacgagcttctgcgcacggagaagaagttcaaggttttcatggagaattacgggaggagctactccacagaggaggagtatttgcgccgtttggggattttcgcccagaacatggtcagagcggcggagcatcaggcgctggaccccaccgccgtccacgggtcacgcattctcganctcaccgagganggagtttagaagc

SEQ ID NO: 282824 - DNA, 242 bp, Glycine max
  unsure (1)..(242): unsure at all n locations
gtgacacaagtagaggagttgaatcttgattcgcatgtttccagtttgggctactgtgatcgtttttgctgctgtttatgcacagatgtcaacactgtttgtggaacaaggaacgatgatgaacacaaatgttggttccttcaagattcctcctgcttccctctcaagttttgatgtgataagtgttattgtctgggtccctgtctatgnacagnnttagtgntcccattgcaagaaattng

SEQ ID NO: 282825 - DNA, 248 bp, Glycine max
  unsure (1)..(248): unsure at all n locations
ggcaaagcgaggccatgccctcatgtgcttggcacgngtttcactcttcctctgcgctctaancctatccgctgctcacggaagcaccacggttcaagacatcgcgagnnagttgaaactcggggacaacgagcttctgcgcacggagaanaagttcacggttncacgggnaanttaaggggnaggngctactccacagcnggaggagtntttgcgccgtttggggattttcgcccagaactggtcag

SEQ ID NO: 282826 - DNA, 243 bp, Glycine max
gtactccctaagttacttgaagaaaaggttataaggatttcaccttttgcaaatagattgtcgtttgatgctccttcagttgtccagcatcttagatgcttagcaaattatgaggctttacggttttcaagtcctatattaaccataggtgaatctttggttgaaagaatgagaaaacatagtgccattaatggtggtaaatatgtctccgtacatcttcgttttgaagaggatatgttgctt

SEQ ID NO: 282827 - DNA, 235 bp, Glycine max
ggcaaaattcaacaatgtttttgtgaagaatctatcagaatacaaccaccgatgatgagttgaagaacacttttggtgaatttggaactattactagtgctgtagtaatgagggatggggatgggaaatcaaagtgttttggatttgtgaattttgagaatgctgatgatgctgctagggctgttgaggctctcaatggcaaaaattttgatgacaaagaatggtatgttgaaaa

SEQ ID NO: 282828 - DNA, 250 bp, Glycine max
  unsure (1)..(250): unsure at all n locations
atatgcccctactgcaaaggatcttgcatcaagagatgtagtttcaagagcaatgacgatggagattcgggaaggtcgtggtgtaggacccctgaaagatcacatctatctccacttgaatcacttacccccagatgtgctcaaagagagacttcctggcatctctgaaactgctgctatttttgctggtgtggatgttacaaaggaacccantcctgttttgccaactgtacattataacatgggcggt

SEQ ID NO: 282829 - DNA, 245 bp, Glycine max
accccacccaagacggttcgacgagcagcagaagcgttcggagatctacacctacgaggccccctggcacatctacgccatgaactggagcgtccgccgcgacaagaagtatcgcctcgccatcgcctccctcttagagcagtaccctaaccgcgtggagattgtccagctcgacgactccaacggcgagatccgttccgacccctccctctccttcgagcacccttaccctcccaccaggccat

SEQ ID NO: 282830 - DNA, 243 bp, Glycine max
cacacacaactactacagtacttccttacaatcaaaaccaacaacaactatggcaagttatccaaaagcactacgatgatcagggtcgcaaggttgacgagtatggcaacgttgagaagcaaaccgacgaatacggcaaccctgttcatgctgctagtgtcacctatgtagccaccagaactgctgctggtggttacagtgatgacattaataagccaacatgataccaccaatggctacggc

SEQ ID NO: 282831 - DNA, 236 bp, Glycine max
  unsure (1)..(236): unsure at all n locations
gttgnaatctgtcancactaattgatnatatanatagtgactttgatattggtgtttnctggaaancantgaatgacgatggnataacaaaagagcggcttctgngctatnaccgtgccatccattctgaaccaaattnnnggagagatcananggaaggtcttctgcgagatctgggacactacatgnggactttaaaggcagtncattccggtgcagatcttgnaacngcctat

SEQ ID NO: 282832 - DNA, 237 bp, Glycine max
  unsure (1)..(237): unsure at all n locations
gtttgaatcgtgaanatgttcagaaaccagtatgacacggacgtgacgacatggagcccggcggggaggctgttccaggtggagtacgcgatggaggcggtgaagcagggctcggctgcgatagggctccgatccaagacccacgtggtcctcgcatgcgtcaacaaggctaactccgaactttcatcgcaccagaagaagatcttcaaggtcgacaaccacatcggcgtgnccatc

SEQ ID NO: 282833 - DNA, 236 bp, Glycine max
gaaacttggtattcatgaggattctcagaacaagacaaagctagctgaattgctcaggtatcactccactaagagtggtgatgagatgaccagcctcaaggactatgttaccaggatgaaggaaggacagaatgacatctactacattactggtgaaagcaagaaagctgtcgagaattcccccttccttgaaaagcttaagaagaagggatacgaggttctctacatggtgatgc

SEQ ID NO: 282834 - DNA, 246 bp, Glycine max
  unsure (1)..(246): unsure at all n locations
gaaaggatgaatattcaggatgggtgattacctctcagagaagtctccttgaggtcatggctgaatttccatcanccaaacctccaattggtgtcttttttgcagcagttgctcctcgcctgcagcctagattttattcaatctcctcatctccaagaatggtgccaaacagaattcatgttacctgtgcattagtacatgataaaatgcccactggaaggatcacaagggagtgtgttcacagga

SEQ ID NO: 282835 - DNA, 241 bp, Glycine max
  unsure (1)..(241): unsure at all n locations
gttgtggaggcttgccactcgcttggggtcatgnatagggacctcaagcctgagaactttctctttgatactgttgaggagggtgctaagctcaaaactactgattttgggctctccgtgttttataagccaggtgaaaccttttgtgacgttgttggaagcccgtactatgttgcaccagaggtcttgcgtaagcatttatggtcctgaagcagacgtgtggagtgctggtgtattttgt

SEQ ID NO: 282836 - DNA, 238 bp, Glycine max
  unsure (1)..(238): unsure at all n locations
agcttgttcaggaagaggagaggattagaggtagagtcagcatgaaggtgtatttgtccatacatggcagcagcatataaaggcttattgattccactcataatcattgcnccaaacattatttcagttccttcagattgctagcaattggtggatggcttgggctaatcctcaaacagaaggagacctgcccaaagtaactccctcagttcttcttcttgtttatatggccttggct

SEQ ID NO: 282837 - DNA, 234 bp, Glycine max
  unsure (1)..(234): unsure at all n locations
gagctgtcaccgcagttaagttacagggtagatgtggatcatgctgggctttcagcaccacaggatctatagaaggagccaattttcttgccaccggaaagctcgtcagtcttagtgaacaacagctccttgactgtgacancaagtgtgacataacagaaaagacttcatgtgacaatgggtgtaatggaggtcttatgncaaatgccaacaattangngctggggggggngg

SEQ ID NO: 282838 - DNA, 240 bp, Glycine max
  unsure (1)..(240): unsure at all n locations
actgccttggcatatccagtgcagtcaccaggcgtgctnggcncaccaaccagacattgtcatggacagcttggctgtacatggccttggcctagtgcanccaaagaaggntttcaatttctacaacnagctccangcttacttagnttcttgtggagtagatcnagtgaaggttgatgtgcagaacattattgaganccttggtgcgggacatggtggccgagtgtcacttatgcagnt

SEQ ID NO: 282839 - DNA, 234 bp, Glycine max
ttccccttatctttctctcttctctctccccgcccaaaccctaactccctaccctattccgctttctctcatccatcatgaaaggaggaaagtccaagaccgaatctaagagagccgatgccaaacttgctgtgaataagaagggcgccgccaccaagactaggaaacccgccggaaaggggaaggcagcgaaagatcctaacaagccaaagaggcctccaagtgcttcttcgt

SEQ ID NO: 282840 - DNA, 232 bp, Glycine max
caaggatggacagactcgtgaacatgctctgctttcattcacccttggtgtgaaacagatgatttgctgctgtaacaaaatggatgctactacacccaagtattccaaggccaggtatgatgaaattgtgaaggaagtctcttcctacttgaagaaagtaggatacaaccctgacaagattccttttgttcctatctctggttttgagggagacaacatgattgagggtcca

SEQ ID NO: 282841 - DNA, 236 bp, Glycine max
  unsure (1)..(236): unsure at all n locations
ctgcaatggcttcaagtcaggaggaggtgacccttttgggagctactggaagcccatttgtgtgcagggttcatattgccctcaagttgaagggagttcaatacaaatatgtcgaagaaaatttgaggaacaagagtgaactgcttctcaaatccaacccagttcacaagaaggttccagtgtttattcacaatgagaagcccataannagnnncctctgnatgttgggaaaaaca

SEQ ID NO: 282842 - DNA, 268 bp, Glycine max
gtacatgtacttcttcaattgccctcattcctgaatgcggtcgtggaacatccaggactatcaagcagcctaaaagtgttctctttccttatgacgaatttgtcaaattgtttaactgggacaaaccaggatttcctccttgtgactcttaaattgtggaaacagctgctttgcgaatgtggttctccaatgtctctcattcacaaggccacttattgcctttctattggagaagggtcaccacagagaatgctgccataatgattgg

SEQ ID NO: 282843 - DNA, 262 bp, Glycine max
  unsure (1)..(262): unsure at all n locations
gttggaaatgctgttccagtgtggtacaacatggttgaccaaggtcttattaaggaaccagtattttcattttggttcaaccgcaaaccggaggaagaggaagggggtgagattgtttttggtggtgttgatcctgctcntataagggaaagcacacttatgtgcctgtgaccagaaaaggatattggcagtttgatatgggagatgtacttattggcggtaaacccactggatattgtgctgatggctgttcagccattgc

SEQ ID NO: 282844 - DNA, 261 bp, Glycine max
cccttgtggaggcactacttccaaaatacacagggtctcatttttgttgttgacagcaatgacagggacagagttgttgaggccagagatgagttgcacaggatgttgaatgaggatgaactgagagatgcagtattgctgtatttgctaacaaacaagatcttcccaatgcaatgaatgctgctgaaattactgacaagctgggactccactctctcagacagcgccactggtacatccagagcacctgtgcaacctctg

SEQ ID NO: 282845 - DNA, 261 bp, Glycine max
agagagagggagtcagagaaaccctaggtaagaagaaaagatgccggctggtcatggtttgagatcccgcaccagagattccttctctcgtcctttcaggaagaagggaaccatcgccctcaccacatacctgagaacctaccacgtcggcgactatgttgacgtcaaggttaacggtgccgttcacaagggaatgccccacaaattctaccatggccgcaccggacgcgtctggaatgtcaccaaacgtgctgttggcgt

SEQ ID NO: 282846 - DNA, 259 bp, Glycine max
gggaaagattatgttcatcaactaaggcttataacagagttattaggttcacctgttgatgccagccttggatttctccaaagtgaaaatgcaaaaagatatgttcgccagcttccacaatataggaagcaaaatttccagctagattcccaaatatgtcttctgaggcattggatctactagaaaagatgcttatctttgatcccatcaaacgcattacagttgatgaagcactatgtcatccatatctttcatcact

SEQ ID NO: 282847 - DNA, 268 bp, Glycine max
  unsure (1)..(268): unsure at all n locations
agagagagggagtcagaganaccctaggtaagaagaaaagatgccggctggtcatggtttgagatcccgcaccagagattccttctctcgtcctttcaggaagaagggaaccatcgccctcaccacatacctgagaacctacacgtcggcgactatgttgacgtcaaggttaacggtgccgttcacaagggaatgccccacaaattctaccatggccgcaccggacgcgtctggaatgtcaccaaacgtgctgttggcgtcgaagtca

SEQ ID NO: 282848 - DNA, 264 bp, Glycine max
ctgaagaaaacctaagcttagaattagaaacaaagaaaagaagaaaggaaagaattgatcgttgaaaatgcagggaggaaagaaagcgggagagtccattaaggaaacagctacaaacattggtgcttctgccaaggctgcatggagaagaccaaggccactgtccaagagaaggcagaaagaatgacagcacgtgatccggtgcaaaaggagttggcaacccaaaagaaagaggcaaagatgaaccaggcggactggacaagc

SEQ ID NO: 282849 - DNA, 262 bp, Glycine max
  unsure (1)..(262): unsure at all n locations
ggagtgaagcagcagagggaggagcggcattaaaaatgcagatcttcgtgaaanccctaacggggaagaccataaccctcgaggtcgaaagcagcgacaccattgacaatgtcaaggctaagattcaagacaaggaaggatccctccggatcagcagcgtttgattttcgccggaaagcaacttgaagatggaaggaccttggccgattacaacatccagaaggaatcaacccttcaccttgtcctcaggcttcgtggtggt

SEQ ID NO: 282850 - DNA, 262 bp, Glycine max
gtcaaaggaagatattgagaagatggttcaagaggctgagaagtacaagtctgaggatgaagagcacaagaagaaggttgaggccaaaaacgctttggaaaactatgcatacaacatgaggaacaccgtgaaggatgacagattggtgagaaacttgacccggctgacaagaagaagattgaggatgcaattgagcaagcaatccagtggttagacagcaaccagcttgcagaagcagatgagtttgaggacaaaatgaagg

SEQ ID NO: 282851 - DNA, 259 bp, Glycine max
ccgtttcatagtttttaagattgaggagcagcagaagcaggtcattgtggagaagcttggtgagccagcccaaggctatgaagatttcactgccagccttcctgctgatgagtgccgttatgctgtttatgattttgatatctgactgaagggaatgtccctaaaagcagaatttttttcattgcatggtcccctgacacatcaagggtgaggagcaagatgatctatgcaagctccaaagacagattcaagagggagc

SEQ ID NO: 282852 - DNA, 261 bp, Glycine max
  unsure (1)..(261): unsure at all n locations
cttgagacctgatgttggtaagactaaagagagagccaagagtgtgcagtgtgctttaggatataccactctcaggagtgtgactcaagctacagaggtgtggtatgatccagacccgatgagtacaataattgaagagacgttgattttgtgaagtccantatgaaatgcctgannaagaagttgctcttgaaaaatttcaccttggttggcttcgcatagagctgaatcgtgaaatgatggtggataaggaagttgagt

SEQ ID NO: 282853 - DNA, 260 bp, Glycine max
aatttcaattgcagatattttcaagggattcctgaggcggcagttccagagaatgagcagaggagtggatgtgcatgctgatctggagatgctgaataatttttatgcactccccttaatgctgttgttgaaactctcaaattctttttggtcatttagtgtatactgtatgccttgattgtgcgtgtaaattgttattatgtaccttgaggtttccattttgataaattgtatcatttatttattgtagtcctgtttta

SEQ ID NO: 282854 - DNA, 258 bp, Glycine max
gacgaagttgtttctctctctaggcctagggtttccttctccactaccgttctttcatcggatcgctgccgtttccggcgtcattccgataattcggcggcatgaagctcacagtgaagactttgaaagggagccattcgaaatcagggttcaaccctccgacactgttatggctgtcaagaagaatattgaagatgtacaaggaaaagataattacccatgtggacagcaattgctgattcacaatgagtaaaacat

SEQ ID NO: 282855 - DNA, 259 bp, Glycine max
aagaatcaaagaaaggggtggtggctgcttcgaaagcttaataatttgtttatttccagaacatcatagttttcgcagcagcaaactaacaaattactcatatcatataataagatggcccgttctctctcgcaagcaaacgtattggtgtccttgttgctcaatctatctccctaattcccgttcatcggcgaggttacgcagtggcatccgatgtatcggtaagagttggattgggtaatattgggcgaaggaatgg

SEQ ID NO: 282856 - DNA, 136 bp, Glycine max
cataataaccgtcctaagtttattgagagaattttgcaagtgtgagaaacatggcatctcgtcaaaacaacaagcaagagcttgatgaaagagcaaggcaaggagagactgttgtcccgggtggaactggtggcaa

SEQ ID NO: 282857 - DNA, 263 bp, Glycine max
aaatctagtaagaaaggatcagacaagaaaaaatctagcaagcatgttgacccaactgtgcccattttcaatttagaggatatagaagaaggagtagaaggtactggatttgatgatgagaaatcactacttatgtcaaaatgagtcttgagaaaaggtttggtcagtccgctgtctttgttgcctctacgcttatggagaatggtggtgttcctcaatctgctactccagaaactcttcttaaggaggctattcatgttatc

SEQ ID NO: 282858 - DNA, 259 bp, Glycine max
ggggatcgatctcaaggccggaggtaaaagcaaaaaaaccaaaagaacagcacccaagtccaatgatatctatcttaagctcttggtcaagctttatcgcttccttgttcggagaactggcagcaaattcaatgccttatactcaagagattgttcatgagcaaggttaacaagcccccattgtctttgtcaaggttgattaagtataccaaggggaaggaagataagattgctgtggtggtgggcaatataaccgatg

SEQ ID NO: 282859 - DNA, 258 bp, Glycine max
gagaagagaagctaaagaaagaaaggagatgggagtggagaagcagttgttgaggtctggcaccggtccgaagccaattcccggtcagaacgtaaccgttcactgcactggtttcgcacaaaggatcctggccagacccattcactttcaaaatcggccaaggttctgttatcaaaggatgggatgaaggtgtgcttggcatgcaaattggtgaagttgctcgtctccggtgctctccggattatgcttatggtgctg

SEQ ID NO: 282860 - DNA, 256 bp, Glycine max
ctgactatgagcagaaggctttggaagcacttaagcctgaactcaaggccagcatagagaaggggattgcttttgctcagaagcaaactgttgctgcttaaatttccttgtcagcaggtggtttcttgggttatgatttatttgagcataaatactacttagaggacttaggttgcagatttgttgtagcatctttactgcttccagaacttaggattcagactttctatgtatcaattctacttccagttttgtt

SEQ ID NO: 282861 - DNA, 258 bp, Glycine max
ctagtatttaccctctgcagaatgtgtttgttcgtaaagtcaagatcctgaaagctcctaagtttgatcttgggaaactgatggaggttcatggagattactccgaggatgttggtgcaaaggtagacagacctgctgatgaaatagtggcagaggaacccactgaaattgttggagcttgatttagtgataatgcatattcaaattgttctaggttttctgtttcttatgttatcattgaaaatttaagttacaaac

SEQ ID NO: 282862 - DNA, 253 bp, Glycine max
aaagtgtggaattgagaaggagaacaactttaagcagcccggagagagataccgatcttgggcacctgacaggcaagatagatttaatcgccgatgggttgatgctttatctgacccacgggtcacccatgaaaccgcagtgtctggatatcttactggtctcaggctgaccgttctctaggccaaaagatagcatctcgtctgagcatgaggccaaatatttaatgttgttgccaaccccagaatgattgtt

SEQ ID NO: 282863 - DNA, 151 bp, Glycine max
agaaaggggtggtggctgcttcgaaagcttaataatttgtttatttccagaacatcatagttttcgcagcagcaaactaacaaattactcatatcatataataagatggcccgttctctctcgcaagccaaacgattggtgtccttgttgc

SEQ ID NO: 282864 - DNA, 170 bp, Glycine max
gttcaagacatcgcgagaaagttgaaactcggggacaacgagcttctgcgcacggagaagaagttcaaggttttcatggagaattacgggaggagctactccacagaggaggagtatttgcgccgtttggggatttcgcccagaacatggtcagagcggcggagcatcat

SEQ ID NO: 282865 - DNA, 116 bp, Glycine max
agcagctgacaatcaaactcaggtaggtatcaaggtgctacaaggtgagcgggaaatggctgcagacaacaaaatgcttggagagtttgaccttgttggtattcctcctgctccca

SEQ ID NO: 282866 - DNA, 259 bp, Glycine max
gaagtgagaagagaaaaatggcaatctccatacccagtagacaacttttcatagatggagagtggaaagtccctcttctcaacaatcggtttccgatcatcaaccccgctactgaagacatcatagggcatattcagccgctactaaggaagatgttgaccttgcggtggatgctgctaaaagagccttttcccataacaaaggcaaagattggtcttcagctcctggctctgttcgtgctcgctatcttcgagccatc

SEQ ID NO: 282867 - DNA, 253 bp, Glycine max
atccgtcttctagactcttctttttctctaagtctaaggggtgccctgagatcactttgagcaatggtgaaggctgtggcagttcttggcagcagcgagggtgtcactggaactattttcttcactcaggaggaaatggtccaaccaccgtaactggatctcttgctggtcttaagcctggtctccatggcttccatgtccatgccttgggggacactaccaatggttgcctgtcaactggagcgcatttcaa

SEQ ID NO: 282868 - DNA, 252 bp, Glycine max
agagtgaatcataaaatggatatggagaaaagagaagaaatgactaggaggactgtttatgtgtctgacattgatcaactggttactgaagagcagttggcggcactctttcttaactgtggccaggttgttattgccgtgtttgtggggatcctaattctattctccggtttgccttcattgagtttacagacgaagaaggtgcaagggctgctttgaacctgtctggaaccatgcttggatattacccgt

SEQ ID NO: 282869 - DNA, 254 bp, Glycine max
gggaagccaaacaactgctggtaagtcggcagaaactgttcaaatgaaggggcaaccgatcccacagaagagcaactgctgtggttaggttctagttctacgttctgttatagggagactctttcctgactctgtatgatatatggatgttaagtaaatgttaaaatatcacctatcatctatttaaatccttggattatattgttctgaatcttatgatgatttcccatgtttaaaatgaaagggatgcaatt

SEQ ID NO: 282870 - DNA, 254 bp, Glycine max
  unsure (1)..(254): unsure at all n locations
ctcttcttctcttgcggcnagggttttagcgcanttcttctagatttaaggaagatgggtaaggaaaaggttcacatcagtattgtggttattggccatgttgactctgggaagtccactaccactggccactgatctacaagcttggaggcattgacaagcgtgttattgagagatttgagaaggaagctgctgagatgaacaagaggtctttcaagtatgcctgggtgcttgataagcttaaggctgagcgt

SEQ ID NO: 282871 - DNA, 249 bp, Glycine max
  unsure (1)..(249): unsure at all n locations
aaagcaagagaagtagggtttttgtgcttggcaaaagaaagagaagagaagatggtgtcaggttcggggatctgcgcgaacgtncgtggtggacgcccggcaccacatgctgggtcggctcgcctcgatttggcaaaggagctgctgaacggacaaaaagtggtggtcgtgcgatgcgaagagatttgcatctccggtggtctggtgaggcagaaaatgaagtacttgaggttcctccgcaaacgcatg

SEQ ID NO: 282872 - DNA, 275 bp, Glycine max
cagggcaaggatgtgtttgaggcgttttataagaaagatcttgcaaaaagactactgttaggaaagagtgcttctattgatgcagagaaatctatgatctccaagttgaagaccgagtgcggcagccagttcacaaacaaactagaagggatgtttaaggacattgaattatcaaagaaataaacgagtccttcaagcagtcatcccaggctaggacaaaactcccatcagggattgaaatgagtgttcatgtcttgacaactgggtactggccg

SEQ ID NO: 282873 - DNA, 265 bp, Glycine max
  unsure (1)..(265): unsure at all n locations
gccagtaacacttaccagtatggctatccaanaatctctgttagacaggcctagaaaatctgtttccaaaactatctgcttaatcttttctatagctgctgtcatgatctcatcagcctttgttggttcttatctcatcaaatccacctccttcttcaaccaatcctctcctnaacatctctgtgatcatgcacttgatagggcaacatgtntaacccatgtctcagaagtggtacaaggtccgatcttgacccccacaaaagac

SEQ ID NO: 282874 - DNA, 274 bp, Glycine max
gtaaaccactctctcctactatcttttaaatccttttgtaccctcaactccataagccactagtacctcacaatgcccattgtagcaacctctcttctcttctttcttcttaatttatgcctcagaggcacttatgctgactatggaggtggttggcaaggtggtcatgccacattttatggtggaggtgatgcatctggcacaatgggaggggcttgtggatatggaaatttgtacagccaagggtatggcactaacactgcagcactcagca

SEQ ID NO: 282875 - DNA, 272 bp, Glycine max
gctccgtaccagtttcactgcataaatttgagagaaaactctgcaaacatgttggtttatcaggacctccttacaggtgatgagcttctctcggactccttccgttacaatgaaattgagaatggaatgctgtgggaagttgaggggaagtgggttgttaagggagcagttgatgttgacattggtgcaaacccttctgctgagggtggagaagatgagggatcgatgacgcagctgttaaggttgttgacattgttgatacattcagactt

SEQ ID NO: 282876 - DNA, 273 bp, Glycine max
atgaaatcaaggattctgtggttgctggattccagtgggcatcaaaagaaggtgctttggccgaagaaaacatgagagccatttgctttgaagtatgtgatgttgttctgcacgctgatgctatccacagaggaggtggtcaaatcatccctactgccaggagagtcttctatgcttcccagattactgccaaacccaggcttcttgagcctgtctacctggttgaaatccaggctcctgagcaagctcttggtggaatctacagtgttctta

SEQ ID NO: 282877 - DNA, 271 bp, Glycine max
gatcaacgtccttcagggtgagagagaatttgttagggacaataaatcacttggtagcttccgcttggacggtatccctcctgcacctcgtggtgttccccagattgaggtgaaatttgacattgatgccaatggcattctctccgtcgctgctattgacaaaggcacagggaagaagcaagatattaccattactggtgctagcaccttgccttcagatgaggtggagagaatggtaaacgaagctgagaaattttcaaaggaagacaaa

SEQ ID NO: 282878 - DNA, 267 bp, Glycine max
  unsure (1)..(267): unsure at all n locations
aaaaatggctgatacaggtggaggagatgcagtgagaccagtggtaatatgtgataacaagtgtggctgcacacttccatgcactggtggttccacttgcaggtgcacaagtgctggcactgccacaggagggggtgatcacgtgacatgctcgtgcggagagcactgtggttgcaatccatgctcatgtcccaagattgcggctgctggaagtggttgcagatgtggcacagttgtgcatgtgctnnggggngnttagnanacngc

SEQ ID NO: 282879 - DNA, 272 bp, Glycine max
  unsure (1)..(272): unsure at all n locations
gaaataacgagtttagctgnatgcnccaaagggtgtttttccctctctgtaanatcttataatggaaacatgggtacaggggagggaaaaacaccctttggtgcatgtttccattataagatattacagagagatagctgccgcaaaatgagacaatgcaagtatgcaactgattcttatgttccaatacgnaattatgctgatttatagacttatttgtatcacctatttcaagcaactctttggtacctaacattttacgtgaggtggtt

SEQ ID NO: 282880 - DNA, 271 bp, Glycine max
ggctgtggcaaaattagttgcaattggccataatgtggacacactaagggctttcaaggtggaaggaactacatacaatccagccgatggccaaatagagaactggccaactagtggattggatgctaatcttcaaatgatagcaaaaatagctgcggtctgtaatgatgctggagtcgcacagtcagagcataagtttgtcgctcatggaatgcctactgaagcagccttgaaggttttggtagagaagatgggccttcctgaaggatcc

SEQ ID NO: 282881 - DNA, 270 bp, Glycine max
  unsure (1)..(270): unsure at all n locations
cttaatttcaggacacttcgaagctaccaggaccaattgttgtngttcttccctttttgtgctttttgattcagagannnnnnnnnnnnnnnnnnnnnnnnnnnnnnnnnnnnngttcggngtctttaagttgaataacttgttgggacatatttgatttggcgcttttncttttggngcttgcctcatgggaaacagtgaggaagagaaatctgttaaaactggaagtccttcttcttcacctgcaacaactgagcagaccaaccaacc

SEQ ID NO: 282882 - DNA, 266 bp, Glycine max
cgctgatttcgtgctcgataatgaaggtaaccctcttgaaaatggtggcacatattatatcttgtcagacataacagcatttggtggaataagagcagccccaacgggaaatgaaagatgccctctcactgtggtgcaatctcgcaatgagctcgacaaagggattggaacaatcatctcgtccccatatcgaatccgttttatcgccgaagccatcctttgagccttaagttcgattcattgcagttataatgctgtgtgttgga

SEQ ID NO: 282883 - DNA, 264 bp, Glycine max
gactgaggaagtggagaggcaagtggctgtgactaggcctgtgagaatgcattggactggctgccccaacacttgtggccaggtgcaagttgctgacattggtttcatggggtgcatggctagggatgagaatggtaaggccactgaaggtgtggatattttcctgggagggagaattggaagtgattcacatctagctgaggtgtataagaagggtgtgccttgcaagaacttggtgcctatgtggtagacatactagtaaag

SEQ ID NO: 282884 - DNA, 267 bp, Glycine max
gaaaatggtgtggattactggctggtgaggaattcatggggcactggatggggtgaggatggctatttcaagatgcaacgcaatgtgagaacccccacgggcaagtgtggaattacaatggaggcctcctacccagtgaagaatggtttaatctctgctaattcagtttatgaaagcaatgaggtgtatgttagcagtgcttgatataacaaccatcatcgttatttatgatctttggaattgggaagaggaacaagtgctcaagtt

SEQ ID NO: 282885 - DNA, 270 bp, Glycine max
  unsure (1)..(270): unsure at all n locations
caagtgtgctgaggtgaccgagcgcgttcttgcagcatgctacaaggctctaaatgatcaccatgttctgcttgagggcactctgttgaagcccaacatggtcacccctggttcagagtctaagaaggtcaccccagaggtgattgctcaatacaantgttacagctttgcagcgaactgtncccgctgctgttccggccattgtcttcttgtctggtgggcagagcgaggaggaggcaaccctcaacctcaacgccatgaacaagtccc

SEQ ID NO: 282886 - DNA, 266 bp, Glycine max
cgttgaatgagtttgatcccaagtattcgggtgtggactggaggcagaagttggagactcagaggggtgctgtgttggccactgagcttaagaacaatgcaaataagttggctaagtggactgctcaggctcttttggcgagcgcggatacgatgaagttggggtatgtgtcgaggattcatccccgtgatcattcaatcatgtgattttggctgtggttggatataaacccaggactttgcggcacagattaattgaacacgacg

SEQ ID NO: 282887 - DNA, 268 bp, Glycine max
aaagaggaagggccgccactccggttatggtaaacgtaagggtacaagggaggcaaggcttcccaccaagatactctggatgagaaggatgcgtgtgctcagacggttgcttcgtaagtacagggaatcaaagaaaattgacaagcacatgtaccatgatatgtacatgaaggtgaaaggtaatgttttcaagaacaagagagtcttgatggagagcattcacaagtctaaggctgagaaggcaagagagaagactttgtctgatcat

SEQ ID NO: 282888 - DNA, 268 bp, Glycine max
ggatatggcttcaactctgcttcccctggcaaccttcttcttagttctctccgcttcttatctccagattgctggggcgaaagcacaaccgttgactagtctcaagcttaactctccgatccttcaggagtctattgctaaagagatcaatgaaaatcctgaggcaggatgggaggctgctataaatcctcatttctccaattatacagttgaacaatttaagcgccttcttggagtcaaaccaacgcctaagaaggaactgagaagt

SEQ ID NO: 282889 - DNA, 262 bp, Glycine max
cgtcgtcggagccaccgccgttcctcgcgtcgacaaaatccgactacctccaaggcggcttcagcggcagcgacgccacggcctccgacgaggacgacctctacagccgcctcaagaccctgcagcgccagcttgagttcatcgacatccaggaagagtacgtcaaggacgagcagaagaatctcaagcgcgagtcctccgcgcgcagaggaggtcaagcggatccagtcggtgccgctcgtcatcggccagttcatggaaa

SEQ ID NO: 282890 - DNA, 269 bp, Glycine max
ctcttgttttgttttatgtggcatgcaaggatctgcttcaaccattcaatccagtcccaaagtttattataataaaatctgttgtattcctaacttattggcagggtgtcttagttttccttgccgcaaagtcagaatttgttaaggatgcagatgaagctgctctacttcaagattttttcatttgcgttgagatgcttgttgctgctgttggccacttttatgcatttccatacaaagaatacgctggggctaacataggtggatcc

SEQ ID NO: 282891 - DNA, 269 bp, Glycine max
  unsure (1)..(269): unsure at all n locations
caggaggttccacacattngtccttngtgtggaacctcctgtatnccgatccaaggcacggatattatcaagtgtatccaaagatggtgagagacctccatganaaacagaaggttccacacgaaggaccaatgtgtgacctcttgtggtctgatccagatgatcgctgtggttggggaatatctccacgtggtgctggatatacatttggagcggatatagctgctcagttcaatcataccaatggtctatcctgatatctagagctc

SEQ ID NO: 282892 - DNA, 267 bp, Glycine max
gcactttgatcatgcaacttcttcgtgataaccttaccctctggacctctgacatgcaggatgatggtgcagatgaaattaaagaagccgcacccaaaggtgacggggaacaaaattaaacataccatacttctaattagtgattgaacttcccttgtgtaatgttttcaaagggagaaggtgttgaatgctaatctcggtgttactgagattttgggcattcatgttcttcgttatgaattgtggatgtactgggctattttagtt

SEQ ID NO: 282893 - DNA, 265 bp, Glycine max
  unsure (1)..(265): unsure at all n locations
gaagccacatagagacacaatacagagtgagttgttgctccttcgccacaactctctgccaacatgggtatctccagagattctatgcacaagaggcgtgccactggtggcaagaagaaggcctggaggaaaaagagaaagnatgagcttggtcgccagcctgctaacactaagctgtcaagcaacaagacagtcaggaggatccgtgttagaggtggaaatgtgaaatggagggcattgagntggatactggaattactcctgg

SEQ ID NO: 282894 - DNA, 263 bp, Glycine max
gttggattgaggggagttgaggatcggttgccttctgagttatcaggtgggatgaaaaagcgagttgctttagctcgatctattatttgtgacaccacagaggaatcaaaagagccagaggtgctcttgtatgacgaaccaactgctggacttgatcccattgcatctactgttgttgaagatctgattcgctctgtgcacataaaaggacgagatgcacgtggaaaacctgggaatattgcatcttatgtggttgttactca

SEQ ID NO: 282895 - DNA, 263 bp, Glycine max
cgtcaacaagctcaggcctttgaggacccaacagatccgcaagttccttagggttatggcccaaagcgcagaggcccagaagccccttgacgtcaccgaggagcttctcaaatggaccaacagcaccatctccatgatgatgctcggcgaggctgaggagatcagagacatcgctcgcgaggttcttaagatcttcggcgaatacagcctcactgacttcatctggcctttgaagtatctcaaggttggaaagtatgagaaga

SEQ ID NO: 282896 - DNA, 260 bp, Glycine max
  unsure (1)..(260): unsure at all n locations
cgcataataaccgtcctaagtttattgagagaattttgcaagtgtgagaaacatggcatctcgtcaaaacaacaagcaagagcttgatgaaagagcaaggcaaggagagactgttgtcccgggtggaactggtggcaagagcctggaggctcagcaacaccttgctgaaggaaggagcaagggagggcaaacaaggaaggaacagctgggtacagaagggtaccaggaaatgggacgcaaaggagggttgancntgtgga

SEQ ID NO: 282897 - DNA, 261 bp, Glycine max
tcaagatagttcggcttcaggatcaagtaagaaaagcacaaaagcaggtcgctgaggaaaacaagcgtaaagctgtaatgattacagcagagaaggctgaacttgctgtttcaaatgggaaaacattttgtatatctcttgttgatgttggtctggatgtagctgcagttcgtgaggctgttacaaaagtcatggaccagaagggcttatctgtgatggtttttagcacggacgaatctacgaacaaggctgtagtgtgtg

SEQ ID NO: 282898 - DNA, 262 bp, Glycine max
cctttgtgtaggtgctcaaccctagtaagccgcaatggtgaagtactcaagggagcctgacaatccaactaagtcttgcaaggctagaggcgccgaccttagggttcattttaagaacacaagggaaactgcctttgcaatcaggaagttgcccttggtcaaggctaaaaggtacttggaagatgttcttgcccacaagcaggcaattccattcagacgtttttgtcgaggtgttggaaggacagcccaggctaagaataga

SEQ ID NO: 282899 - DNA, 263 bp, Glycine max
  unsure (1)..(263): unsure at all n locations
gtccaatcacaaggaaattcaagaacacggaaacagaaacagtaagaatgttggaatgagtcttgaagatgtaatcgaggaatgcaagctattctactttgcagggcaggaaaccacgtcagttttgcttgtttggacaatggtgttattgagtaggtaccctgattggcaagcacgtgcaagggaggaagcctttcaagtctttggataccaaaaaccagattttgatgggttaagtcgcctaaagattgtcaccatgnttt

SEQ ID NO: 282900 - DNA, 260 bp, Glycine max
agagatgacgacccgattcaagaagaaccgcaagaagcgcggccacgtgagcgccggtcatggccgtatcggaaagcaccgtaagcaccccggcggccggggaaacgccggtggcatgcatcaccacaggatcctgttcgacaagtaccatccgggcttcttcggtaaggtgggaatgaggtacttccataagcttcgcaataaattctactcccccatcgtcaacgtcgaaaagctatggtctctcataccccaagacg

SEQ ID NO: 282901 - DNA, 258 bp, Glycine max
agtcacagtgtttatgaggaaggtatactgatgagatttgcaagattatccatgataatggaggccaagtatatatgggtggtgccaacttgaatgctctcagaattattaccccgttcttttccgtggagtcaatggaacagttgctcatgaattcatcattgacctgagaggctttaagaatactgctggaattgagcctgaagatgttgcaaagcgcctcatggactacggttttcatgcaccaacaatgtcatg

SEQ ID NO: 282902 - DNA, 262 bp, Glycine max
ctggagctgatagagaagtacagcgtatccttatggaacttttgaatcagatggatggttttgaccaaacggtaaatgttaaagttataatggcaactaacagagcagacaccttggaccctgctctgttgcgtcctggaaggcttgatcgtaaaattgagttccctttgcctgatagacgccaaaagaggctcgtatttcaggtttgcacagccaaaatgaacttgagtgatgaggtagacctagaggattatgtttctcg

SEQ ID NO: 282903 - DNA, 264 bp, Glycine max
gggacttctgatctacaaattacactatgcaaagaaatgatgcaatggactcgtgctgaaaagcgtacctttctgaggcagcgagttgaggcaaggcttgcagcacttctgatggaaagtaaagattattctgaagctttgactctcctcagcggcctggtcaaagaggttagaagactagatgacaagcttctacttgtagacatagacttgcttgaaagcaagctacacttctccttaagaaaccttccaaaggcaaaagct

SEQ ID NO: 282904 - DNA, 262 bp, Glycine max; identical to SEQ ID NO: 200583

SEQ ID NO: 282905 - DNA, 261 bp, Glycine max
  unsure (1)..(261): unsure at all n locations
ggggntngatcactaggaacacgaagtcancagttgatttntnccatgaacggtntnggattacattttctccagcantaagcagggaatttcgnccttataaaccngatccaggtccactactgcatatttgttctctttgggangttcaaccaaatgnagtaataatgnttggngatagccttaaagatgangtgcgctgtggaangcaagcaggagcctttacatgcntgcttnntcaaacaggngtatatgnttctc

SEQ ID NO: 282906 - DNA, 257 bp, Glycine max
gaagcgtgagagacttctcgtttatgatgagagctaagatagtttagttgtcaagtcataaatcagtatcatcactttaaatttcattagaagctgtcaaaatgtcacggaagggtttgatggagcaagacctgagtaagttggatgtaacaaagttgcatccactttctccagaagtcatatctcggcaggctactattaatatcggcactataggtcacgtggcccatggcaagtcaacagttgtgaaagcaata

SEQ ID NO: 282907 - DNA, 260 bp, Glycine max
gaattgctgataagaagaagaggattgccaaggcaaaatctgaggcagcagagtaccagaaactccttgcctccaggttgaaggagcagagagaccgccgcagtgagagtttggccaagaggagatccaagctttccagtgctgctaaggcagcagctgtataagctgctttcgatagagagatatggtgaagtttaatcatcatatgtagtttttgtttgctatattatgacggctgttgttatgataaactatggttt

SEQ ID NO: 282908 - DNA, 256 bp, Glycine max
  unsure (1)..(256): unsure at all n locations
cgcaccttcaacttaaccttttctactcataatcttaacaacttgctagaagaagataaaganagagaaaaagtgtgtgtgtgtgagagagagcaatggctggctcgtgggcacgccgttctctgattgtctggccatccnttcctcggatgttnatttgcatttccntgcaaaggaggaagccacaaaattggggacggtcatcgggattgatcttngatngnccatgnncctcctgccgnacttagtatcannc

SEQ ID NO: 282909 - DNA, 243 bp, Glycine max
atctttcgaagttcgtttgcgtgtgttgtgtggtcagtcaccgatggcagcaccacctgcgagggcacgtgccgattacgattacctcatcaagcttcttcttattggcgatagcggtgtgggaaagagttgtctgcttttgcgattttctgatggttccttcacaaccagttttatcaccaccattggcattgattttaagataagaaccattgaacttgatggcaaacgcattaagttaca

SEQ ID NO: 282910 - DNA, 270 bp, Glycine max
cagctatatggagtcagatcctgtgaaaattgctgtggaaggggttgaacgattcaagcaagaaaactgtgatcttataattgttgacactagtgggcggcacaagcaagaagctgctctttttgaagaaatgcgccaagtttcagaagcaacgaaaccagatcttgttatattcgttatggatagcagtatcggtcaggctgcttttgatcaggctcaagcatttaaacagagtgttgcagttggagctgtcattgtcactaaaatgga

SEQ ID NO: 282911 - DNA, 259 bp, Glycine max
gtgttagatctgtacccgcctagccattgatttggaaaagtccaagcttcaaagatgagtaagcttcagagtgatgctcttagagaagctatctcaggaatcatgactgattccaaggaaaagaacaggaaatttgtggagaccattgaactccaaattgggctgaaaaactatgatccccagaaggacaagcgttttagtggctctgttaagttgcctcacattcctcgccccaagatgaagatttgtatgcttggag

SEQ ID NO: 282912 - DNA, 257 bp, Glycine max
cttcttcgtctcaaatctcttcgttccttcgattcgttccatttcttccaaaatggccaaagacccagttcgcgttctcgtcactggagctgcagggcaaattgggtatgctcttgtccctatgattgctaggggagtgatgttgggtcctgaccagcccgtgatcctccacatgcttgacattcctccggcagcagagtcattgaatggggttaaaatggaattggtggatgctgcattccctcttcttaaaggtg

SEQ ID NO: 282913 - DNA, 251 bp, Glycine max
  unsure (1)..(251): unsure at all n locations
gccgagcagcgagagagaganaccctagcaaaaatgccggctggtcacggtttgagatcccgcaccagagattccttctctcgtcccttcaggaagaagggtaccatcgccctcaccacatacctcagaacctancacgtcggcgattatgtcgacgtcaaggttaanggcgccgtccacaagggaatgcctcncaagttctaccatggccgcaccggtcgcgtctggatgtcaccaaacgtgctgttggg

SEQ ID NO: 282914 - DNA, 268 bp, Glycine max
  unsure (1)..(268): unsure at all n locations
gaaataacgagtttagctgnatgcncccanagggtgtttttccctctctgtaancatcttataatggaaacatgggtacaggggagggaaaaacaccctttggtgcatgtttccattataagatattacagagagatagctgccgcaaaatgagacaatgcaagtatgcaactgattcttatgttccaatacgnaattatgctgatttatagacttatttgtatcacctatttcaagcaactctttggtacactaacatttttacgtg

SEQ ID NO: 282915 - DNA, 262 bp, Glycine max
atatggagcaaatgttgcccgatggcctgtacgcttgcatacaccacctgataggcttcaaagcataaaatttgatgctttcatatccagaaatgagctttttagggcagaatcaaaatattggcatgagataataggaggctatgtacgtgctttacgctggaagaagatgagattaagaaatgttatggacatgagagctggttttggaggatttgcagctgcactgattgatcagagtatggacagctgggttatgaat

SEQ ID NO: 282916 - DNA, 261 bp, Glycine max
gccgagcagcgagagagagaaaccctagcaaaaatgccggctggtcacggtttgagatcccgcaccagagattccttctcttcgtcccttcaggaagaagggtaccatcgccctcaccacatacctcagaacctaccacgtcggcgattatgtcgacgtcaaggttaacggcgccgtccacaagggaatgcctcacaagttctaccatggccgcaccggtcgcgtctggaatgtcaccaaacgtgctgttggggtcgaagt

SEQ ID NO: 282917 - DNA, 255 bp, Glycine max
  unsure (1)..(255): unsure at all n locations
tcttcttcttccatgtcgagggcgcgaantttgttctgtggcttcacggcctgggtgactctggtcccgccaacgaacccatcaaaaccttattcacttcttcccaattcagagacaccaaatggtccttcccttctgccccttccgcccctgtcacttgcaactatggttctgtaatgccttcatggtttgacattcttgagattcccgtggcagctgatctccaaatgacgagagtagtttacttaaagctgt

SEQ ID NO: 282918 - DNA, 253 bp, Glycine max
accagctccacgaggactgactgcccatgtttcgataacataaacaatcttgatctggtttgtcgggcacaccaactcgttcaagaaggtcttaagtatatgttccaggataaaggccttgtaactgtatggtccgcacctaattactgttaccgttgtggaaatgtagcttctattcttagtttcaatgaaaatatggaaagagaagttaaatttttcactgaaacagaggagaacaaccagatgagaggcc

SEQ ID NO: 282919 - DNA, 246 bp, Glycine max
aatgggtggggagcgcaacaaggttttcactttggccgaggtctctcagcacaacaatgccaaagactgttggcttgtcattcatggcaaggtttataatgtaacaaagtttttggaagatcaccctggtggggatgaggtcctgttgtcttccacagggaaagatgcaaccaatgattttgaggatattggtcacagcaccagtgccgtagccatggatggatgagttctatgttggagacatga

SEQ ID NO: 282920 - DNA, 260 bp, Glycine max
cacctgtggaactcattaggaagggagacaaggttggatcttctgaagctgcattgcttgccaagctaggcataaggcccttctcatatgggcttgtggttctctctgtttatgataatggttcagtgttcagccctgaggttcttgatcttactgaggatgacctcattgggaagtttgctgctggtgtctcaatggttacttcactttcattggctatttcatatccaacacttgctgcagcaccacacatgtttgtc

SEQ ID NO: 282921 - DNA, 249 bp, Glycine max
caaagggtgttggtcgattaagacagcaggacggtggtcatggaagtcgaaatccgctaaggagtgtgtaacaactcacctgccgaatcaactagccccgaaaatggatggcgctaaagcgcgcgacctatacccggccgtcggggcaaggaccaagccccgatgagtaggagggcgcggcggtcgctgcaaaacccagggcgcgagccgggccggagcggtcgtcggtgcagatcttggtggtagtag

SEQ ID NO: 282922 - DNA, 246 bp, Glycine max
atatggagcaaatgttgcccgatggcctgtacgcttgcatacaccacctgataggcttcaaagcataaaatttgatgctttcatatccagaaatgagctttttagggcagaatcaaaatattggcatgagataataggaggctatgtacgtgctttacgctggaagaagatgagattaagaaatgttatggacatgagagctggttttggaggattgcagctgcactgattgatcagagtatggac

SEQ ID NO: 282923 - DNA, 246 bp, Glycine max
gtttcttttcgtttcgtttcaatggggagcgaagaggagaacggcgaattctacctgcgatactacgtcgggcacaagggcaagttcggtcacgagttcttggagttcgagttccgccccgacgggaagctccgctacgccaacaactccaactacaaaaacgacaccatcatccgcaaggaggtttacctcacccccgccgttctccgcgagtgccgtcgcatcatcttccgagagcgagattat

SEQ ID NO: 282924 - DNA, 262 bp, Glycine max
caaattcattttaatcctaattctgcacttcttgatcattcgatttttctcctcaagatgcagatattcgtaaaaactttgaccggcaagaccatcacccttgaggtggaatcctccgacaccattgacaacgtaaaagctaagattcaagacaaggaagggatcccacctgaccagcagagacttatctttgcgggtaaacaacttgaggatggtcgcacccttgccgattacaacatccaaaaggaatcaaccctccatc

SEQ ID NO: 282925 - DNA, 258 bp, Glycine max
gagaggtccaccaaccttgactggtacaagggaccaactctccttgaggctcttgaccaaatcaatgagcccaagaggccctcagacaagccactcaggcttccattgcaggatgtctacaaaattggtggtattggtaccgtgccagtgggacgtgttgagactggtgtcgtgaagcccggtatggtggtgacttttggtcccactgggctgacaactgaggttaagtctgttgagatgcaccatgaggctctcaca

SEQ ID NO: 282926 - DNA, 257 bp, Glycine max
cttaaacaggtgtgaagcattttcgacatacccccggacatacgatttacttcatgcatggactgtcctctctgacatagaacagaaaggttgcagtccagaggatctattaattgagatggatcgcatgcttcgacctactggtttcgtgatcatccgagataaacagccagtgattgattttataaagaagtacctaagtgctttgcactgggaagcaattgattccagttctgactctgtccaagatggtgacg

SEQ ID NO: 282927 - DNA, 255 bp, Glycine max
ggcaaaggaggcagttgaaagggctagaagaggagatggaccaactctagtggaatgtgagacctatagatttagagggcattcattggctgatcccgatgagcttcgtgaccctgctgagaaggaacactatgctggtagggaccccatcaccgcattgaagcaataccttattgagaacaatttagccaatgagcaagaattgaaggccatagagaagaaaatcgacgagatcctcgaggacgctgttgagtt

SEQ ID NO: 282928 - DNA, 253 bp, Glycine max
cgcacgaatatcttgttgtttggagcgatccgagaaaaactctgtaaacatgttggtttaccaggacctccttacaggtgatgagcttctctctgactccttccgttacaaggaaattgagaatggaatgctgtgggaagttgaggggaagtgggttgttaaaggagcagttgatgtagacattggtgcaaacccttctgctgagggtggaggagaagatgagggagttgatgatgcagctgttaagttgttg

SEQ ID NO: 282929 - DNA, 250 bp, Glycine max
aagattggaggtattggaactgtgccagtgggacgtgttgagaccggtgtcttgaagcctggaatggtggtgacttttgcaccaactggactgacaactgaagtcaagtctgtggagatgcaccatgaatctcttacagaggcacatcctggtgacaatgtgggattcaatgttaagaatgttgctgttaaggatttgaagcgtggttatgttgcctcaaactcaaaggatgaccctggcaaagaggctg

SEQ ID NO: 282930 - DNA, 246 bp, Glycine max
  unsure (1)..(246): unsure at all n locations
aagaaaatcctcacccattttcttcgtagccaaacactctgaaattctcagttatgtcgtggcaagcgtatgtggatgatcacctactgtgtgaaatcgaaggtaaccacctcactcacgccgctatcatcggccaagacggaagcgtttgggctcagagcaccaacttccctcagttcaaacctgaggaaataactgccatcaataatgactttaatgagcctggatcacttgctnccaactgga

SEQ ID NO: 282931 - DNA, 246 bp, Glycine max
  unsure (1)..(246): unsure at all n locations
atgaaggtcatcgccgcctacttgctcgccgttttgggaggcaacgcagccccttccgccgatgacttgagggacatccttggctccgttggagctgacgcgaacgatgacaacatcagcaacttcttgtctgaagttaagggcaaagacattgtggagcttatcgcctccggtagggaaaagctggcctccgtgccttctggcggtggcgccgccgttgcncgntgctgccgctcccggcggtgg

SEQ ID NO: 282932 - DNA, 244 bp, Glycine max
gcactttgatcatgcaacttcttcgtgataaccttaccctctggacctctgacatgcaggatgatggtgcagatgaaattaaagaagccgcacccaaaggtgacggggaacaaaattaaacataccatacttctaattagtgattgaacttcccttgtgtaatgttttcaaagggagaaggtgttgaatgctaatctcggtgttactgagatttgggcattcatgttcttcgttatgaatgtgg

SEQ ID NO: 282933 - DNA, 247 bp, Glycine max
aaccattggttatggttctcctaacaaggctaactcctacagtgtgcatggaagtgcactgggtgccaaagaagttgatgccacaaggcagaaccttggatggtcacatgagccattccacgtgcctgaggatgtcaaaaagcattggagtcgccacacccctgagggtgctgcacttgaagctgaatggaatgctaagtttgctgagtatgaaaagaaatacaaggaggaagctgcagaattgaaa

SEQ ID NO: 282934 - DNA, 257 bp, Glycine max
  unsure (1)..(257): unsure at all n locations
catcaagtcattaaagccaatgatgacttgacaaaagaacactatcaattttttctttatcaattacttcgagcactgaagtacattcacaccgcanatgtctatcatcgagatctgaagccaaagaatatactggcaaatgcaaactgtaagcttaaaatctgtgattttgggttagctagagttgcctttagtgacacaccaacaactatattttggacggattatgttgctacaaggtggtatagagctccaga

SEQ ID NO: 282935 - DNA, 253 bp, Glycine max
gaagtgctgcagcatcatccatggctgctttaaaacagccaacaattagagttgttgctattattgctgaaggagtacccgagtcagacactaagcaattgattgcatatgcccgatcaaacaataaggttgttattggcccagccacagttggaggcattcaagcaggtgcttttaaaattggtgacacagctggaacaattgacaatataattcagtgcaagctctacaggcctggatctgttggatttgt

SEQ ID NO: 282936 - DNA, 253 bp, Glycine max
ataggtcaaaatgatcttacagctggattttctggtaacatgaccctactgcaagttaatgcttcaatacctgatataatcaaaagtttcacatcaaatataaagaacatatacaatatgggggccagatcgttttggatacacaacacaggacccattggttgcctccctttaattttggccaattttccatctgctgaaagggatagctatgattgtgcaaaggcatataatgaggtggctcagtctttta

SEQ ID NO: 282937 - DNA, 249 bp, Glycine max
cagctatatggagtcagatcctgtgaaaattgctgtggaaggggttgaacgattcaagcaagaaaactgtgatcttataattgttgacactagtgggcggcacaagcaagaagctgctctttttgaagaaatgcgccaagtttcagaagcaacgaaaccagatcttgttatattcgttatggatagcagtatcggtcaggctgcttttgatcaggctcaagcatttaaacagagtgttgcagttggagc

SEQ ID NO: 282938 - DNA, 244 bp, Glycine max
caagagcttattacaatcgaagaagacctcttctcatccctgggattgcattttaaaactttggatatggcttctgaagatttaggtgcacctgcctatcagaaattcgatgtggaggcttggatgcctggtttagaacggtttggtgagatctcaagcgcatcaaattgcacagactatcagagccgtcgtttgggaataaggtatcgtcctgcatcagaagcacaagccacaagtgcaaaaa

SEQ ID NO: 282939 - DNA, 246 bp, Glycine max
cacagccaagtcgtaaaagggtttcaagggatggaaaacatgcagagcttctggcaattgggtgatgaactccgtgggcactcaaaagcatcggaggatcacaagtggttaatggttgcctcgaaactggccgaacagacaagattgaagggggagcgtgtgaacaaccttgatctttcaaagggacccattgaaacaaggtcaagggataaatttgggttccaggaagagaacaatttgattctc

SEQ ID NO: 282940 - DNA, 251 bp, Glycine max
gcataataaccgtcctaagtttattgagagaattttgcaagtgtgagaaacatggcatctcgttcaaaacaacaagcaagagcttgatgaaagagcaaggcaaggagagactgttgtcccgggtggaactggtggcaagagcctggaggctcagcaacaccttgctgaaggaaggagcaagggagggcaaacaaggaaggaacagctgggtacagaagggtaccaggaaatgggacgcaaaggagggttga

SEQ ID NO: 282941 - DNA, 244 bp, Glycine max
cctaagggtgatgatctgaaagcaatgcaagcagatacctctcttcttgggttgtcatcccaagatgcattagagtcaccatatattgcatctatgggggtttatgtattcaagacagatgttttactcaatcttctgaaatggagatatcctacctcaaatgacttcggatctgaaatcatccctgcagcttcatattttttttggagactattgggaagacattggaacaataaaatccttt

SEQ ID NO: 282942 - DNA, 242 bp, Glycine max
cacgggcggcaccggttatggaggcactggtggcactgattatggaacaactggtggcactggttatggaagtggaactgggtatggagtcaacactgggggtgcgcacactgaagcaggatataggaaggaacatcgtcagcatgaccaatctcatggtgatcagaacgagaagaaagggattatggacaagattaaggagaagcttcctggaggacacagtggacaagtagatgcatcgt

SEQ ID NO: 282943 - DNA, 245 bp, Glycine max
aagcaagtgaagctatcaaatgctggtggaagacttattatagcttctgatggtatttgggatgctttatcttctgatatggctgccaagtcatgccggggtgtacctgcagagcttgctgcaaagctggtggttaaggaagctctaaggtcaagagggctgaaggatgatacaacttgccttgttgtagatattattccttcagatcatcctatgttaccagcaattccaagaaagaaacgtag

SEQ ID NO: 282944 - DNA, 247 bp, Glycine max
aagaagtgaagctgttgagcttttttgcgagtccatttggcaaaagggttgaatgggcattgaaactgaagggtgtggagtatgagtacatagaacaagatatcttcaacaagactagtctccttctccagttgaacccggttcacaagaaggttccggttcttgttcatgcccacaaacccatcgctgagtcattcgtcatcgttgaatacgttgatgaaacatggaagcagtatccactgttgcc

SEQ ID NO: 282945 - DNA, 252 bp, Glycine max
gaaataagggaaaaatggtgtcgctgaaactgcagaagcgcctctccgcaagcgtgctcaagtgcggcagaggaaaggtttggcttgaccccaatgaagtcaacgaaatctccatggccaattctcggcaaaacatcaggaagttggttaaggatgggtttatcatcaggaagccaaccaagattcactcccgctcacgtgctcgtaggatgaaggaggcaaagaggaagggccgccactccggttatggta

SEQ ID NO: 282946 - DNA, 243 bp, Glycine max
  unsure (1)..(243): unsure at all n locations
aggaactccaaaaagaccctgaactccaagcttggtggaaagaacttgtagaggtgggtcatggtgatttgaaagataagccatggtggcaaaagatgcaaactcgtgaagagttggttgangcttccgctatcctcatatggattgcttcagcccttcatgctgctgttaactttggacagtatccatatggaggtttaatcctaaacaggccaactattagcaggagattcatgcctgaaa

SEQ ID NO: 282947 - DNA, 243 bp, Glycine max
atcaatctcgtttgttctcactaactattacttcatcatgtcgtcgagcacagttggtcaagtcatgcaaatgcaaagctgcggtttcatgggaggcagggaagccacttgtgattgaagaagtagaggtggcaccaccacaagctggtgaagtgcgtttgaagatcctctacacctctctttgccacactgatgtttacttctgggaagccaagggccaaactccattgtttcctcgtatat

SEQ ID NO: 282948 - DNA, 246 bp, Glycine max
gtgagaaacaaagaaaggaaataattgatctttgaaaatgcagggaggaaagaaagctggagagtccatcaaggaaacagctgcaaacattggtgcttctgccaaggctggcatggagaaaaccaaggccactgtccaggagaaggcagaaagaatgacggcacgtgatccgatgcaaaaggagttggcaacccagaagaaagaggcaaagatgagccagggcagagctggacaagcaggcggcgc

SEQ ID NO: 282949 - DNA, 246 bp, Glycine max
  unsure (1)..(246): unsure at all n locations
atagnttatcctaagtctttgggaatagtgctgcaatggcttcaagtcangaggaggtgacccttttgggagctactggaagcccatttgtgtgcagggttcatattgccctcaagttgaagggagttcaatacaaatatgtcgaagaaaatttgaggaacaagagtgaactgcttctcaaatccaacccagttcacaaganggttccagtgtttattcacaatgagaagcccatagcagagtctc

SEQ ID NO: 282950 - DNA, 252 bp, Glycine max
gcataataaccgtcctaagtttattgagagaattttgcaagtgtgagaaacatggcatctcgtcaaaacaacaagcaagagcttgatgaaagagcaaggcaaggagagactgttgtcccgggtggaactggtggcaagagcctggaggctcagcaacaccttgctgaaggaaggagcaagggagggcaaacaaggaaggaacagctgggtacagaagggtaccaggaaatgggacgcaaaggagggttgagc

SEQ ID NO: 282951 - DNA, 250 bp, Glycine max
  unsure (1)..(250): unsure at all n locations
ttcctcctctctccgcatcgctgcgttttccgaatcgaaaggtacgtaagtaacaatggtggaggccaagggtaggaaagaggaggtcgtcactcgagagttcaccatcaacctccacaaacgcttgcatggctgcacattcaagaagaaggctcctaaagcaattaaggagataaggaagtttgctcagaaagcgatggggacgaatgatgtgagagtggatgtgaagctgnacaaggctgtgtggagc

SEQ ID NO: 282952 - DNA, 244 bp, Glycine max
  unsure (1)..(244): unsure at all n locations
atgattganaggtccaccaaccttgactggtacaagggaccaactctcnttgaggctcttgaccaaatcaatgagcccaagaggccctccgacaagcctctaaggcttccattgcaggatgtctacaagattggtggtattggtactgtgccagtgggacgtgtagngactggggttgtgaancctggtatggtggtgacttttggtcccactgggctgacaactgaggttaagtctgttgaga

SEQ ID NO: 282953 - DNA, 243 bp, Glycine max
ggaaaggaagagaagagaagagaaggagaaggagaagggtttggtagttggttacttagtttgtttgattaacgacggcgcactacacgatccccacaatccagagggtacaagggcgatgacgagtacgattacctcttcaagctggttctgatcggcgattctggtgtggggaagtccaacctgctttcgcgcttcaccaggaacgagttcaatttggagtccaagtccaccataggggtt

SEQ ID NO: 282954 - DNA, 240 bp, Glycine max
  unsure (1)..(240): unsure at all n locations
cacttactttgttgcttactctgatggttcgtgtacagacactaacagtgcacgagcacctgacagaatgctaggtgaagtcagaggnagtaactctaggtgtatggcttcatcactagtacgcacaggctttgtacgaggttctatgacccagggaaatggttgttatcagcacaggtgtatcaacaattctttagaggttgctgtggatggtatctggaaagtgtgtcctcaagctgg

SEQ ID NO: 282955 - DNA, 249 bp, Glycine max
aaagaggttgttgttgaaaaaactggaggccctgctgagagctatgatgatttcactgcatccttgcctgaaaatgattgccgatatgctatctttgactttgattttgtgacatctgagaactgccaaaagagcaaaatcttttttattgcatggtctccttcggtagcccgcattcgccctaagatgctatatgcaacatccaaggacaggttcagaagggagctgcagggcatccattatgagatt

SEQ ID NO: 282956 - DNA, 246 bp, Glycine max
gaggcaggtacatagagattttcgcaaacctctcattgtaatgtcccctaagaacctgcttcgtagcaaggcttgcagatcaaatttatctgagtttgatgatgtccaaggccacccaggctttgacaaacagggaaccagattcaagcgcctcataaaagaccaaaatgcccacaaagatgttgaggagggtattagacgtttagtactttgctctggaaaagtttactatgaacttgatgaaca

SEQ ID NO: 282957 - DNA, 246 bp, Glycine max
tcattcccaaggaaaggagatcactgatgctgatatcctgaaatgggtgaacagaaaagtgaagagcactggcagaacttctcacatagagagcttcaaggataagagcctgtcatgtggactctttttccttgagcttctgagtgctgttgagcctaggattgtcaattggaaccttgtcaccaagggtgaaagcaatgatgagaagaggttgaatgccacttatataatcagtgttgcacggaa

SEQ ID NO: 282958 - DNA, 237 bp, Glycine max
  unsure (1)..(237): unsure at all n locations
ggatgcattgcgtgtatgtgtcacaacantgntggactttatagtgcnaagcagactgntattgtgagagcttctgatgatttttaccctcgtgntcctgcttcccataccntccntatttcttctgttgnatacaactcactattccttggagaattcatgcaacctgnctggganntgtttcatagtttacacccagcagcagattatcatgctgcagctcgtgnaattggtgga

SEQ ID NO: 282959 - DNA, 238 bp, Glycine max
gggtgttgatccaagtgttcgaaggagaacgagctagaacaaaggacaacaatcttcttgggaagtttgagcttactgggatccctccagcaccaagaggagtgcctcagatcaatgtctgcttcgacatcgacgctaacgggattctgaatgtctccgcagaggacaagactgctggtgtgaagaacaagatcacgatcaccaacgacaagggtaggctgagcaaggaggagattga

SEQ ID NO: 282960 - DNA, 241 bp, Glycine max
acataacaatgtcgttgattccaagtttcttcggtaccgggcgaagaaccaacgtcttcgaccccttctccctcgacgtgtgggacccattccatggcttccccggcaccaccgccctctccgctccgcgctccgagacggcggccttcgccaacacgcgcatcgactggaaggagacggcggaggcgcacgtgttcaaggcagacctgccggggctgaagaaggaagaggtgaaggtgga

SEQ ID NO: 282961 - DNA, 237 bp, Glycine max
  unsure (1)..(237): unsure at all n locations
aaggcgatcgagaaaggcaacatggacggcgctcgaatctacgcggagaacgcgatccgtaagcgcacggagcagatgaactacctccgcctggcctcgcgcctcgacgccgtgatcgcccgcctcnacacgcaggcgaagatgacgacgatcagcaagtngatgggcaacatcgtganntcgctggagtcatcgctggccacggggaacctccagaagatgtcggagaccatggac

SEQ ID NO: 282962 - DNA, 236 bp, Glycine max
  unsure (1)..(236): unsure at all n locations
aaaaaaaaatggctgatacaggtggaggagatgcagtgagaccagtggtaatatgtgataacaagtgtggctgcacacttccatgcactggtggttccacttgcaggtgcacaagtgctggcactgccacaggagggggtgatcacgtgacatgctcgtgcgganagcactntggttncaatccatgctcatgtcccaagattgcggttcctgaaaagggttccagatgtgcncac

SEQ ID NO: 282963 - DNA, 253 bp, Glycine max
cattagtgttagccctaaacttcaccttcaaccatgaccacagtgccaccacacagtgtccaagtgcacacaacaacacaccgctacgaagccggcgtcgtcccgccggctcgttttgaggcgccgcgttacgaagccggcatcaaggcgccctcttccatttaccattccgagagaggtccgacgacctctcaggttctcgcagttgtcgccggccttccggtcggcggcatcctcctgctcctggcaagga

SEQ ID NO: 282964 - DNA, 244 bp, Glycine max
tcttaggcttcagcaggtcttggctgactttttacttatttccatcaatttcactccaaatggaggtcaggttgttgtagcaggctctctaaccaaagaacagttaggcaaatctgtccatcttgttaagttagagctcagcataacacatggtgggagtggggtaccagaagtgttactgaatcagatgttcggaaacaatgggctagaatccgaggagggtattagcctactgataagcaga

SEQ ID NO: 282965 - DNA, 245 bp, Glycine max
aaaaaagagaaacaaatggcagcactgggtggctttaccgacatcaccggagcacagaacagcatcgatatgcgaaaattctcgctgcgctttgctgttgatgaacacaacaaaaaagagaatgcagttctggagtttgtgagggtgattagtgcaaagaaacaagtggtttctggcaccttgtactatatcactttggaggcaaatgatggtgtgacgaaaaaggtttatgaaactaaggtgtt

SEQ ID NO: 282966 - DNA, 241 bp, Glycine max
acctgtggaactcattaggaagggagacaaggttggatcttctgaagctgcattgcttgccaagctaggcataaggcccttctcatatgggcttgtggttctctctgtttatgataatggttcagtgttcagccctgaggttcttgatcttactgaggatgacctcattgggaagtttgctgctggtgtctcaatggttacttcactttcattggctatttcatatccaacacttgctgca

SEQ ID NO: 282967 - DNA, 242 bp, Glycine max
taagaagtgagatagataagaagccagagactggggatgatgttgaggggaaatccaggtctgctaaggaagaccaacaagtgtcaattcgcacagcaactgcaaagtcagtttatcagtggattgtcaagcctcagaccattagtaagacaaatgagatgttcctccctggtcgaatgacatttatttataacatggagggtggataccatcatgatattccaacaaccttgcaccgtagt

SEQ ID NO: 282968 - DNA, 235 bp, Glycine max
gaatatttgaaggaagaaccatatacagctgaagaaattgaagcagttacaggggaaaagctgacttcatttttgaacaataatgcagcttatttacaagtgttaaaagttgcaaagcaatacaagttgcatcagagagctgctcatgtgtattcagaagccaagagggttcatgctttcaaggatgtcgtatcttcgaatctaagtgacgaggacatgctaaagaagcttggtg

SEQ ID NO: 282969 - DNA, 352 bp, Glycine max
  unsure (1)..(352): unsure at all n locations
ccctaagtcatggcaggaattgcacccgagggatcacagtttgatgctcgtcaatatgataccaagatgaatgagctgcttacgtccgatggtcaggatttcttcacatcctacgatgaggtttatgacagttttgatgctatgggcttgcaagagaatctcctgagaggcatttatgcatatggttttgagaagccatcagctattcagcaaaggggaatagttccattctgcaaggacttgacgttatacaacaggcccagtctggaactgggaaaacagcaactttctgctctggaattctgcagcaacttgactatagtgtgactgaatgccaagccntgggtttagc

SEQ ID NO: 282970 - DNA, 351 bp, Glycine max
  unsure (1)..(351): unsure at all n locations
catctgggttgcagggaaaaaganaaataaaatgggttccgataataccaacttggagttcttgaaggagatcggattgggctcctccaacattggttcttacattaatggccaatggaaagccactggttcttctgtcacttctgttaatccttctaacaatcagagcatagctcaagtgactgaagcgactttgcaagattatgaggagggattgcaagcttgcagtgaagcagccaagacatggatgactattccggcaccgaagagaggtgagattgtgagacagattggtgaagcattgagggccaagttggatcctttgggtagactggtgctccttgagatggg

SEQ ID NO: 282971 - DNA, 328 bp, Glycine max
  unsure (1)..(328): unsure at all n locations
catctgggttgcagggaaaaagaaaaataaaatgggttccgataataccaacttggagttcttgaaggagatcggtttgggctcctccaacattggttcttacattaatggccaatggaaagccactggttcttctgtcacttctgttaatccttctaacaatcagagcatagctcaagtgactgaagcgactttgcaagattatgaggagggattgcaagcttgcagtgaagcagccaagacatggatgatattccggcacgaagagaggtgagattgtgagcagttgtgaacatgaggcagtggacttggagntgtctctgaatgg

SEQ ID NO: 282972 - DNA, 353 bp, Glycine max
cattctcccatttcctctcagaaccctcgatcactcccacgcgctcctatatcctctccttcaccgtcgctctctccaacgatcacaacaacatcgtcatcccatggcaaacgccgcatctggtatggcagtccatgatgactgcaagttaaggtttttggagctgaagacaaagaggacacaccgtttcatagtttttaagattgaggagcagcagaagcaggtcattgtggagaagcttggtgagccagcccaaggctatgaagatttcactgccagccttcctgctgatgagtgccgttatgctgtttatgattttgagtatctgactgaagggaatgtcctaaaagcag

SEQ ID NO: 282973 - DNA, 353 bp, Glycine max
  unsure (1)..(353): unsure at all n locations
gagcttgagaagtttgctggtggactctacactactagtgttgaggcatttattccaaacactggtcgtggtatacaaggtgcaacttctcattgtttgggccaaaattttgctaaaatgtttnagataaactttgaaaatgaaaagggagagagagcaatggtctggcagaattcatgggcctatagtactcgaactatcngtgtcatggtgatggttcatggtgatgacaagggattggtactacctcctaaagtagcatcagtacaagtcattgtgattcctgtgccttacaaagatgccgatactcaaggaatctntgatgcctgttctgcnactgtgaatacattgaa

SEQ ID NO: 282974 - DNA, 359 bp, Glycine max
gttgttgatggaaagctttcacaaacttgttacctcatggctgttgattcttgctataagaatttctgtcacaagtttcagaaattccagggaaaacaattttctctttttgatgctgaatactttgtatttcactctccttataacaagcttgtacagaagagttttgctcggttgtttttcaatgacttcttgatgaattccagctctgcggatgaggttgccaaagaaaaactgggaccttttgcaactttatctggtgatgagagctaccaaagtcgggatcttgaaaaggcatcccagctacttgcaaagcctctatatgatcagaaggtacaaccaactactttgattccaaa

SEQ ID NO: 282975 - DNA, 352 bp, Glycine max
gtggttccaacatccaagaatgttaactcctctcagaaacctgctctcaagttcttgatctatggcagaacaggttggattgggggtttgctggggaagttgtgtgaaaagcaaggaattccctatgaatatggaaaaggacgcctggaggaccgatcatcacttgtggctgatattcagaatgtgaagccaacacacatttttaatgcagctggagtaactggcagacccaatgtcgattggtgtgaatctcataagacggaaaccattcgcaccaacgttgctgggactttaacattggctgatgtcagcagagagcatggactcttgatgataaattatgctactgggt

SEQ ID NO: 282976 - DNA, 348 bp, Glycine max
  unsure (1)..(348): unsure at all n locations
gaagaagtgaagctgttgagcttttttgcgagtccatttggcaaaagggttgaatgggcantgaaactgaagggtgtggagtatgagtacatagaacaagatatcttcaacaagactagtctccttctccagtngaacccggttcacaagaaggttccggttcttgttcatgcncanaaacccatcgctgagtcattcgtcatcgttgaatacgttgatgaaacatggaagcagtatccactgttgcctcgagacccttatcaaagagcncttgctcgattttgggntaatttcgctgagcaaaagcttttagatgcagcntggnttngtatgtatagcacggggatg

SEQ ID NO: 282977 - DNA, 352 bp, Glycine max
cagaactttgtttcccaatttccattgcctccgcttccacctcgcaaccatgatcatcccggagaagaaccgcaaggagatctgcaaatacctcttccaagagggagtttgcttcgcgaagaaggacttcaatttggccaagcaccctgagatcgacgtgccgaatctgcaggtgattaagctgatgcagagtttcaagtctcgcgagtacgtgagagaaacttttgcttggatgcactattactggttcctcaccaacgatggcatcgagtttctcagaacttaccttaaccttccttccgaaattgtccctgctactttgaagaagcaagccaagccacctggcaggcct

SEQ ID NO: 282978 - DNA, 355 bp, Glycine max
atcgagaaggagaagcgccgtcaatgccgcgggatcgagctcatcgcctccgagaacttcacctccttcgccgtcatcgaggccctcggcagcgctctcacgaacaaatactccgagggcatgccgggcaaccgctactacggcggcaatgaatacatcgaccagatcgaaaacctctgccgctcacgcgccctccaagccttccacctcgacgcccaatcctggggcgtcaacgtccagccctactccggctccccggccaacttcgccgcctacaccgccgtcctcaacccccacgaccgcatcatggggtagattcccctccggcggccactcaccacggtactacactccg

SEQ ID NO: 282979 - DNA, 363 bp, Glycine max
  unsure (1)..(363): unsure at all n locations
gtgagagagagtgttcttcgtttgctaccttctcccagaaatggttacgttcaggtttcaccagtaccaggtggtcgggagggctctcccaacggaagcagatcagcatccgaagatctaccgaatgaagctctgggccaccaacgaggttcgcgccaagtctaagttctggtattttttgaggaagctgaagaaggtgaagaagagcaatggtcaagttcttgctatcaacgagatttttgagaagaacccaaccaagattaagaactacgggatatggttgcggtatcagagtaagactggttaccacaacatgtacnaggagtaccgcgataccactctaaacgggtccagttgaggcaa

SEQ ID NO: 282980 - DNA, 364 bp, Glycine max
gggatttcttttatacagtttgcaaataccaattccataagaaatatctatgttctgggcctaaccttgttccttgcgatatcaataccacaatattttgtcatgaacactgcaccggatggtcatggtccagttagaacaggtggtggatggtttaatgacattttgaacaccatattctcttctgccccaactgtggctataattgttgggactcttgttgacaacacacttgaaggcaaacaaacagctgtggacagaggacttccatggtggggtcctttccagaataggaagggagatgttagaaatgatgagtttaccgtcttcctctccggataaatgagtacatgcccaccagatt

SEQ ID NO: 282981 - DNA, 347 bp, Glycine max
  unsure (1)..(347): unsure at all n locations
aaagaatcaaagaaaggggtggtggctgcttcgaaagcttaataatttgtttatttccagaacatcatagttttcgcagcagcaaactaacaaattactcatatcatataataagatggcccgttctctctcgcaagccaaacgtattggtgtccttgttgctcaatctatctccctaattcccgttcatcggcgaggttacgcagtggcatccgatgtatcggtaagagttggattgggtaatattgggcganggaatggaatcgtgggangtgtagaagagaagcctgatacnaganatggtcanaagcctactcaactgattgggcccagacccagtaacaggt

SEQ ID NO: 282982 - DNA, 350 bp, Glycine max
  unsure (1)..(350): unsure at all n locations
gagcttcataaganagagacatgtgaagctgtcactatcatcgaaactcctccattggttgttgttggagttgtgggatatgtgaagacacctcgtggccttcgcacactgaatactgtttgggctcagcatctaagtgaagaagtcaagagacgattttataagaactggtgtaaatctanaaagaaggcttttaccaaatattcaaaaaaatatgaaactgaggaaggaaagaaagatattgaatctcagcntgagaaattgaagaagtatgcaactgtcattcgtgttctggctcatactcagataaggaagttgaanggctaaaacagaaganagcacatttgatg

SEQ ID NO: 282983 - DNA, 349 bp, Glycine max
aaaaggatctcttgaacccaaaaagtatgaagggccacgcactgctgattcacttgctgagtttgtaaatacggaaggaggaacaaatgtgaagattgctacagctccttccaatgtagtggtgcttacatctgaaaattttaatgaggttgtcttagatgaaaccaaagatgtcttggttgagttttatgcaccctggtgtggacattgcaaaagtcttgctcctacttacgagaaagttgccacagcatttaaattggaggaagatgtagtaattgcaaatctggatgctgataaatataaggactggctgaaaagtatgatgtgagtggattcctaccttgaagtc

SEQ ID NO: 282984 - DNA, 336 bp, Glycine max
  unsure (1)..(336): unsure at all n locations
aaaagatggcatagatgaagccactgagaccagccttagaatctatggttgtgatctcatccaagaaagtggcattttgctcagattgccacaagcagtcatggctactgggcaggttctattccatcgtttctattgtaagaagtcatttgcacggttcaatgtcaagaaagctgctgcaagctgtgtatggttggcttcaaaactggaggaaaaccctagaanagccagacaagtaattattgttttcaccggatggaatgcangagggaggacttcccatggagcattagacttgtattncaagaaatatgttgattganatggagtgancag

SEQ ID NO: 282985 - DNA, 347 bp, Glycine max
  unsure (1)..(347): unsure at all n locations
gactacgccagtgcacactgctcagagaaccaagggaaaaactccaagacattgcatctgaagctggtcaatacagtgcagagaaagctagagaaatgaaggatgcagcagcagagaaggcnagtgacatagcaaaggctgcaaagcnaaaatcacaagaggtgaaagagaaattaggtggacaacaccgggatgccgagctttgagaattgagatgttgaatcactttgaaccttttaattatgccacaatagttgtctaaactgccaganataatgtngtgtgtatatattatatgcagtactgcnttgtgtganccaggggttggctgatatatatataccact

SEQ ID NO: 282986 - DNA, 203 bp, Glycine max
  unsure (1)..(203): unsure at all n locations
ggcttccattgctagcaattttactgataacggatgcattgcgtgtatgtgtcacaacactgatggactttatagtgctaagcagactgctattgtgagagcttctgatgatttttaccctcgtgatcctgcttcccataccatccatatttcttctgttgcatacaactcactattccttggagaattcatgcnacctgact

SEQ ID NO: 282987 - DNA, 359 bp, Glycine max
  unsure (1)..(359): unsure at all n locations
aacaaattgacaatggtgttgttattccaccatctgggtggaantgtgctaaatgtgacaagactgacaatctttggctaaacctgactgatggaatgattcttgtgggaggaaaatgtggggnggaactggtggaaacaaccatgctgttgagcattaccaagagacaggcttccctgttgctgtaaagcttggaactatcactgctgatcttgaagcagcagatgtttactcttatccagatgatganagtgtcttggatccacaattagcgcanatctggcatttttggcattgacttttcatcactacgaaagactgaaatgacnactgctgaaagaggacttgatcaaaatacg

SEQ ID NO: 282988 - DNA, 345 bp, Glycine max
  unsure (1)..(345): unsure at all n locations
ggggtttgccttgtgccgtttgtgttgttttcgggacgaagaagaagatggtgtcaggttctggaatctgcgcnaagcgggtggtggtggacgcncgccatcacatgctgggtcgtctagcctccatcgtggcgaaggagcttctgaacggccagaaagtggtggtcgttcgctgtgaagagatttgcatctcgggcgggctggtgaggcagaagatgaaatacttgaggttccttcgcnaacgcatgaacaccaaaccctcccatggncccatccacttccgtgccncctccaagatctnctggcgcacgtcgtggaatgataccacactagacaaagcgtggg

SEQ ID NO: 282989 - DNA, 346 bp, Glycine max
  unsure (1)..(346): unsure at all n locations
gagtgaagtgcagcaaggaagtcgccaccgccatacgcggcgccatcattctcgcaaagctctctgttattcctgtgagganangctattggggtaacaagatcggaaagccccacaccgttccctgcaaggttaccgganagtgtggctccgtcaccgtccgcatggtccccgcccctcgtgggtccggaatcgtcgncgctagggtccccaagaaggtcttgcagttcgctggaatcgatgacgtcttcacttcctccaggggttcnaccaaaaccctcgganatttcgtcaangttgttaacttctcttattcttataatcatcnatgtctgctcttgttaat

SEQ ID NO: 282990 - DNA, 353 bp, Glycine max
  unsure (1)..(353): unsure at all n locations
aaagaatcaaagaaaggggtggtggctgcttcgaaagcttaataatttgtttatttccagaacatcatagttttcgcagcagcaaactaacaaattactcatatcatataataagatggcccgttctctctcgcaagccaaacgtattggtgtccttgttgctcaatctatctccctaattcccgttcatcggcgaggttacgcagtggcatccgatgtatcggtaagagttggattgggtaatattgggcgaaggaatggaatcgtgggaggtgtagaagagaagcctgatacnagagatggttcaaaagcctactcaactgatgggccccagacccagtaacaggttactt

SEQ ID NO: 282991 - DNA, 352 bp, Glycine max
ccaatattgactaaatatttgaaaatacattggaaggaatttgggaagtcagatgatcttggaaatgaatttgttgaatggcctctttatgatggagctatttttcttgacaaacaccataaaagaaagttgaaggaagaatttggagtggagccttggtcatttgaacagaatttgggggaagctatttttgttcctgctggttgccctttccaagcaaggaatgttcagtccaatgttcagttaggccttgatttcttatctccggaaagcgtgggtgatgctgtaagatggcagaggaaattcgctgtgtacctaatgaacatgaagcaaacctcaagtttggaggtgg

SEQ ID NO: 282992 - DNA, 357 bp, Glycine max
tccaaccttgactgcttcctccggcgtacgacacctgttgtgccgtctcagtttcttcccaagcacgagattcgaaaccttaaccgtttgtggcacccgtgggagagagaagcggttgagtacttcactttgggtgatctatggaatcggttccacgaatggagtgcttatggagctggagttccaatcacgttgtccaatggggagacacttgttcagtactatgttccttacctctctgcaattcagattttcaccagcaacactttcagggaagaggctgagtcaggtgagtgtgagacacgagatcatacagcgattcctacagtgaagagagtgagagtgacaaactatgga

SEQ ID NO: 282993 - DNA, 365 bp, Glycine max
ggatctccccgttatagatctttctccctccctctccggcgagtgggacccacttctctgcgccgaggtcagccgcagcctcagggaaaccggcgcgctcctcgtcaaggaccctcgctgcaccgtcgaggacaacgatcgcttcatcgacatgatggagcgctacttctcaaaaccccgcgacttcaaacaccgccatgagagaccccacttgcattaccaggttggggttacaccagagaaagtagaagttccaagaagcttggttgatgaagaaatgcaggagaaactgaaagcgatgccaaaagaaaaccagccaaacactcctgttggacctgatctcaaatggagatacttttggagga

SEQ ID NO: 282994 - DNA, 339 bp, Glycine max
  unsure (1)..(339): unsure at all n locations
acgggtggaatgagatggtgtatgatgagaagaactggattgggttgaacactgggagttttctgttgagaaattgtcagtggtctttggatattcttgatgcttgggctccaatggggcctaaggggaagataagagatgaagctgggaaagtgctcactagggagcttaagaataggcctgtttttgaagctgatgatcaatctgcaatggtttatttgttggcaactgggaaggagaaatggggtgacnaggtttaccttgagaatcactactacttgcatggttantggggatttggtgatcgtatgaggagatgatgagaatacacccgggctt

SEQ ID NO: 282995 - DNA, 343 bp, Glycine max
  unsure (1)..(343): unsure at all n locations
atcccttggacatgctggggcaaaatccagattccatttttgggaaattttgcaggagcaaatacttggtggtagttcatccaaagatggaggcatcattcttcggaaatttagaccagcgaaattatgtgatgggtggagggcatccaaggacccctttttaccaggcttttcttaaactgaccaagtcaatttggcttttacacaggttggcttattctttcgagccaaatgtcaaggtattcaggttaaaggagggagtgagttctctgatgtttatatggaaagtgtggtccagaatttgataatggatgaccatgntgaaaacctaaagttggttgat

SEQ ID NO: 282996 - DNA, 345 bp, Glycine max
  unsure (1)..(345): unsure at all n locations
cacaattaaccatgaagtgagagatacagatatgtctgaagcagctgctgaagatcccgagttggctctagctctccaattgtcagtagaagacagctcaaaggactcggcaagccagtctgacgtgagtaaactgttggcagatcagtcctttgtatcttctatccttgcatcgcttcctggggttgacccaaatgacccatctgtcaaagatttgctggcttccatgcaaaatcagtctgagccacagcagaagaatgaagacaagccaccanatgaagaggagaaaaaataatcttaatagtctcattgtggttcatttgtagtatcctttggtaggcatat

SEQ ID NO: 282997 - DNA, 347 bp, Glycine max
  unsure (1)..(347): unsure at all n locations
gtttattttggaggtaatgattccatgggtcctcattcgtctggcttaggccctcatgtgcctcttcatgaatatattgaaaacatgagaaagattctgattcatattcagtggaatttttagtgagctggtaagaacaaatgaattgtgccaaagctactcagaagcttgtattaagctatgcnaggaactggatgtcaaagttgttgatctttttaatgcactgcagaagagagatgactggatgaatgcttgtttcactgatggtatccatttagcagctgagggaagcaaaattgtggntaaggagatattgagagtgcttaaggaagcagaatgggagccat

SEQ ID NO: 282998 - DNA, 349 bp, Glycine max
  unsure (1)..(349): unsure at all n locations
aggagttagggtataanaaagagaagaaagaaggtacaccagtggtattgcgtgttggtgtgaatcaagaaccgctctgctatggctgctctgcaatacttggaatcgctgcgtaattcgcaccctgagctctccgattggtacaattcgctggcggatctgtaccagaagaagctctggcaccagctcactctcaagctcgagcagtttgtggctctcgccgtcttccaggctggtgatgctttaatacaattatatcacaatttcatcacagactttgagacgaaaatcaaccttctcaagcttgcacattttgctgttatagtttctcggcagtattctgaaaaag

SEQ ID NO: 282999 - DNA, 358 bp, Glycine max
  unsure (1)..(358): unsure at all n locations
gtggcgaatccatgatttttgcaccgaggtactgaaaaaacaaggtggcactggggaattcaaagggccatggttcaccaaaatgcactatttgatcacttgtgactccctcaacgtgcaacacatgctctgcaagagctttgacaactacatcaagggacccgagtttcgcgagattttcgaacccttcggagatggggttgtcactgccgattcagagacatggaagtacttcagaaccgtcctccattccttgatcaaacaaagaaggttcgaaacgttcgtcgataaaaccgttcagaagaaggtgcacacnagccntcttccgatattggatcatgtacaacagcnaggggag

SEQ ID NO: 283000 - DNA, 359 bp, Glycine max
  unsure (1)..(359): unsure at all n locations
agctcacgtcgctccaatcgtcaagctcgaggaggttgctgtcaccaccggcgaggaggacgaagatgcaatcctggatctcaaatcgaagctttaccggttcgacaaggacgggaaccagtggtaggagcgtggcgccggcactgtgaagttcctgaagcataaggcttccggcaaggttaggcttctcatgaggcaatccaagacgctcaagatctgcgctaatcatctcattttgcctacgatgagtgtgcaagagcacgctgggaacgagaaatcctgcgtttggcatgctagggatttgctgatggtgaactcaaggacgagctcttctgcatccgtttncttctattgaaatt

SEQ ID NO: 283001 - DNA, 347 bp, Glycine max
  unsure (1)..(347): unsure at all n locations
tgcaattggttttgaaggtttcgagaagangctggaaatatcctttttccagcngggactttttgctgaccctgagggaatgggtttaagagctcttgcanagtcccagttggatgagatacttacaccggctgcttgcaccattgtttcatctctcagaaatgatcatgtcgactcctatgttctgtctgagtccagtctctttgtttatgcctacaagatcatcatcaaaacctgtggtactacaaagctactgcttgcaatcccacccatattgaaatttgctgaaatgctttcctcaatgtagatctgtgnaatacaccagggaagttcanctttnccggtgt

SEQ ID NO: 283002 - DNA, 346 bp, Glycine max
  unsure (1)..(346): unsure at all n locations
acctaagtgagaaacaaagaaaggaaataattgatctttgaaaatgcagggaggaaagaaagctggagagtccatcaaggaaacagctgcaaacattggtgcttctgccaaggctggcatggagaaaaccaaggccactgtccaggagaaggcagaaagaatgacggcacgtgatccgatgcaaaaggagttggcaacccanaagaaagaggcaaagatgagccaggcagagctggacaagcaggcggcgcgtcacataacacggcggcgaanaggctgccacggcagggcacatgggacaacccatgggacccatcagacgtcagctatgcccggtcatggaacc

SEQ ID NO: 283003 - DNA, 346 bp, Glycine max
  unsure (1)..(346): unsure at all n locations
attcccctttccttgaaaagcttaagaagaaggggttcgaggttctctacatggttgatgctattgacgagtatgctgttggtcagcttaaggaatttgagggaaagaagttggtctctgctactaaggaaggcctganacttgacgagagcgaagacgaaaagaaaaagaaggaagaattgaaggagaaatttgagggtctctgccatgtgatcaaggatgtgttgggtgacaaggtggagaaagttgtggtgtctgatcgtgttgtggatctccttgctgtctcgtgactggtgaatatgggtggacagccaacatggaaaggatatganacacaggcattgag

SEQ ID NO: 283004 - DNA, 346 bp, Glycine max
  unsure (1)..(346): unsure at all n locations
cagctgggtacagaanggtaccaggaaatgggacgcaaaggagggttgagcactgtggacaaatcaggagaagaacgtgctcaagaggaaggcattggcatcgatgagtccaagttcaggactggtaataacaagaaccagaatcagaacgaagaccaggataagtgataatgtaacacccttcactagcatgtgtagtgtgtncttatgctagcttaaatgtgagtgtccagtgttttaggaagtaggaaaagaataggnataaanaataatgtntangccatagtnatatangnnaagtgtcatgtcatgtgtgtcgtgaaataattactagctgttagggtgt

SEQ ID NO: 283005 - DNA, 327 bp, Glycine max
  unsure (1)..(327): unsure at all n locations
gggaagaggattgaagatgataacagttcaggataacannaaccatatcatggaagtgattgcagccaatgatcttgattgtgatgacctggattccatttgtgtctcagacacaatggttctcagtaactatatagaagagattattgtgtcagcaatttcgtatcatttgatgaanaacaaagacactgaatacagaaatgggaagctcgttatttcttccaatagttgtcccatgcattgaatatattccacnaggggaaatccagtagaagagatacatcaaaattggaagatcnagctgtaaaatctgagaagcaaatagag

SEQ ID NO: 283006 - DNA, 343 bp, Glycine max
  unsure (1)..(343): unsure at all n locations
tagaaaaatgtgaccttgccattgcaaagtggatgattgatgcttctgtgccatttaatgcaattaattcagcatattatcaacctatgattgatgctattagtagcatgggtccaagttataaaggtccaaattttcatagagttcgtggttgtttattaaataaatgggttgatgatgtgaggnagcttgtggatggttatcgaattgtttggaagcaaactggatgcactcttatggctgatgggtggaatgatggttgtaggagaacttcattaattntctagttattgtcctaaaggantggttcctaaggctgtgatgttcccatcctctaaactgc

SEQ ID NO: 283007 - DNA, 351 bp, Glycine max
  unsure (1)..(351): unsure at all n locations
ggttttgttgattggtgattctggtgttggcaagagtagtcttcttctcagctttatctccaactctaactccatcaatgacctctcccccactattggtgtggatttcaagataaagctttttacagttggtggtaaaagattgaagcttactatttgggatacagctggacaagagaggtttggaacagtaataagttcttattatagaggcgcacatggaatcattcttgtctatgatgtgacacgacgtgagacatttacaaacctcatcgatatatgggcaaaagaagttgagcgtattccactaatcatggtagcaccaaatcctgttggcaataaggtgnccag

SEQ ID NO: 283008 - DNA, 357 bp, Glycine max
  unsure (1)..(357): unsure at all n locations
ctgaaagccatagacaaggatatccagtctctacaggaggaactgacagctgtttctcagaagagggacaaggcttttgagagcatgcagcagtaagaaaacagcgcgaggaggggaacacctatttctaccaaagtcgtacagttctgaacaaagcacgggagctggctgcaaagaaagatattaatgctcttgatgaagtttcacagacagaggttgagaaatttatggcactctggaacaaggacaaagcatttaggaatgattatgaaaaaagaattttggcctcattggatatgcgacagttgagtcgggacggacggatgagganccggatgaaagccaatcctggaagat

SEQ ID NO: 283009 - DNA, 261 bp, Glycine max
  unsure (1)..(261): unsure at all n locations
gtgctanaaacaaggtgcacttcattttcaagcataagaatccaaagagtggggagtatgttgaacaccatctcaagtatcctccttctgtccnatcngaaaaactacttcaggaatncanngnanttctgangcccgataatgaattgcaaattttgattgatgtgangggaaggaaaagggnaatttcttgtcttctgaggactttgagcctcctcttatcccttcccagacaatcctgatctgatgataagaaactgg

SEQ ID NO: 283010 - DNA, 259 bp, Glycine max
  unsure (1)..(259): unsure at all n locations
aataaggggaaaaaatggtgtcgctgaaactgcagaagcggctggccgcaagcgtgctcaagtgtggcagaggaaaggtgtggcttgaccccaatgaagtcaacgaaatctccatggccaattctcggcaaaacatcaggaagttggttaaggatgggtttatcatcaggaagccaaccaagattcactcacgctcgcgtgctcgtaggatgaaggaggcaaagaagagggccggcatctggttatggtaagaganagg

SEQ ID NO: 283011 - DNA, 254 bp, Glycine max
cgatactatcgggattgacctggttgcgatgagtgtgaatgacattgttacttcgggggcgaactttgttttttcttgattactttgccactggccaccttgatgtgaacgttgctgaaaaggttataaaaggctttgttgatggttgcaagcaatctgattgtgttctgttaggaggagagactgcagagatgcctggtctctataaagaaggtgagtacgatcttagtggctgtgcagttggcatgtgaaga

SEQ ID NO: 283012 - DNA, 259 bp, Glycine max
attaagttcagtgggaaagacagatggtgaaaaatcagttcctgcacccaaagccgctgaagttcctcctgataatgagtttgagaagcgaataaggcccgaggtaatactagcaaatgagattgatgtcacattctctgatattggtgccttagatgagaccaaagaatcccttcaagaactagtaatgcttcctcttagaaggccagaccttttcactggaggccttctaaagccttgtagaggaatattgctgttt

SEQ ID NO: 283013 - DNA, 261 bp, Glycine max
accacgatcaccaccgcaaagcaatgggcgctatactttctgccttaactggcggtgccgcaacggcggcgacgtcttcgccggagagttctgcttctagggtccagtctttccactcttcggcgcgctggcagctccacttcaacgagctcaaagaaaccaataagctcgttgtgatagatttctcggcgtcgtggtgcggcccttgcaaattcatagagccagcgattcacgccatgtccgaaaagttcaccgacgttg

SEQ ID NO: 283014 - DNA, 259 bp, Glycine max
  unsure (1)..(259): unsure at all n locations
gttggatggtgccacgacctccagctaggagaactgggaaaagagtggncgttgttggaagtggaccatccggcctggcagcngctgatcaactgaataaaatgggccatactgtaactgtgtatgaaagagctgataggattngagggcttatgatgtatggcgttcccaacatgnngactgacaaagtggntanagttcancggcgggtcaaccttatggcagaagagggnattaactttgtggtgactnctaatat

SEQ ID NO: 283015 - DNA, 260 bp, Glycine max
ctgtactgcaatgatcgatgttatccattcagcagcttggaagcagtcaggaaacatatggaggcaaaaagtcactgtaaagtgcattatggtgatggtgttgatgacgaggaggtagaattagaagaattctatgattatagcagcagctatgtggatgatcaaggcaagcagcttgttgcatcttgtgatgcatctaacaatgtagaacttgttggtgggtccgagctcataatcagcaggaaatctggtgatagatc

SEQ ID NO: 283016 - DNA, 258 bp, Glycine max
agagaaacgggtgatgtcaagatctggcgatgagtgtgtggtagccctcacagatcagtggtacattacatatggagaatcagaatggaagaagctagctgacgagtgcctttctaacatgaacctgtattctgatgagacacgacatggatttgagcacactttaagctggttgaaccagtgggcttgctcacgatcatttggtcttgggactcgcataccgtgggatgaacagttcctagttgagtctttatcgga

SEQ ID NO: 283017 - DNA, 261 bp, Glycine max
  unsure (1)..(261): unsure at all n locations
cagggagaattaggtttttagggtttacaccgagcagccacacctcccgcagcagccatggttctcaaaactgaactatgccgattcagnggtgccaaaatntncccagnaaagggcatcanatttgtncgtggtgattctcaggttctccgttggnaactcaaaatgtangaggtatttccacagnngcctgaagccttcanngctcacctggactgcnatgtacagntngcaacacnagnaggtnattgctcaagtggt

SEQ ID NO: 283018 - DNA, 258 bp, Glycine max
agaaaatctcaaatttggtctcgttgaagtggtttatgaatgggcaaagggtactccgtttgctgacatttgtgagctcactgatgttcctgaaggtctgatagtaaggaccattgtcaggttggacgagacatgtcgggagttcaaaaatgctgcagctattatgggtaattctgctctctgcaaaaaaatggaaattgctctaatgcaataaagcgtgacattgtatttgcagctagcttgtatattactggcgta

SEQ ID NO: 283019 - DNA, 255 bp, Glycine max
gaacgagcgaccttcttcgtttctcgcaaagtttaagtcatcatgggtaaggaaaagactcacatcaacattgtcgtcattggacatgtcgactctgggaagtcaactaccactggtcatttgatctacaagcttggaggtattgacaagcgtgtgattgagaggttcgagaaggaggctgctgagatgaacaagaggtcattcaagtatgcctgggtgcttgacaagctcaaggctgagcgcgaaagaggatta

SEQ ID NO: 283020 - DNA, 256 bp, Glycine max
tggcttctgcagaagtagagttccgatgctttgttggtgggcttgcttgggccaccgaccacgatgctctcgagaaagccttctctcaatttggcgaaatcgtcgaatcgaaggtcatcaacgatcgtgaaactggaagatccagagggtttggatttgtgaccttcgccacagagcaggcgatgagagacgcaattgaaggaatgaacggccagaacctcgacggtcgtaatataaccgtgaagaggctcaatcc

SEQ ID NO: 283021 - DNA, 257 bp, Glycine max
gccccaatctctgcagcgccttcgatctagaaaacatgactaagagaacaaagaaggctggcattgttggaaaatacggtacccgttatggtgccagtctgcgaaagcagattaagaagatggaagttagtcagcacagcaaatttttctgtgaattttgtgggaagtatgctgtgaagaggaaagctgtaggaatatggggatgcaaggactgtggtaaagtgaaacaggcggtgcttatactttgatacgccatg

SEQ ID NO: 283022 - DNA, 258 bp, Glycine max
acgaccagtaatatatagggatttcaaaacttccaatatactattggatgcagaatacaatgctaagctctcagactttggacttgcaaaagatggtccagagggtgataaaactcatgtgtctactcgagtgatgggaacctatggttatgcagcaccagaatatgtcatgacgggacatcttacatcaagaagtgatgtgtatagtttcggagtggtactacttgagatgttgactggcagaagatctatgggaca

SEQ ID NO: 283023 - DNA, 256 bp, Glycine max
gtggttccaacatccaagaatgttaactcctctcagaaacctgctctcaagttcttgatctatggcagaacaggttggattgggggtttgctggggaagttgtgtgaaaagcaaggaattccctatgaatatggaaaaggacgcctggaggaccgatcatcacttgtggctgatattcagaatgtgaagccaacacacatttttaatgcagctggagtaactggcagacccaatgtcgattggtgtgaatctcata

SEQ ID NO: 283024 - DNA, 260 bp, Glycine max
aggacatacaaagggaacttaggactctatccaaagaagaacgtaaaaggcagcagcttgctgtaacagatgtacttaaaagtgcagatgtaatattaactactttgattggggctttctctaaaaaactagacagcacttcatttgatttggtgattattgatgaagctgctcaagcacttgagatagcatgctggatacctatactgaagggttcaagatgtatacttgcaggggaccatcttcaacttcctccaacc

SEQ ID NO: 283025 - DNA, 258 bp, Glycine max
cgctctgtttctgtctctgtgtttgcggctgaggattccgaacgagcgaccttcttcgtttctcgcaagtttaagtcatcatgggtaaggaaaagactcacatcaacattgtcgtcattggacatgtcgactctgggaagtcaactaccactggccatttgatctacaagcttggaggtattgacaagcgtgtgattgagaggttcgagaaggaggctgctgagatgaacaagaggtcatcatatgcctgggtgtttg

SEQ ID NO: 283026 - DNA, 267 bp, Glycine max
  unsure (1)..(267): unsure at all n locations
gcatttcgttactttcatttgttgtgcaatcttacaagttccaaacttctctattttgttattatttgttctcacttctcacacatacagattntccgccttttatattatcatggcttctaaggtggtttcggttttggttatagcgatgatgttgtttgccatgaactgtaactgcactagtgttgggccacatgccttcaaccaaagaggaaggtcacgattttcaggagtctaaagccaagaccacacaaatgcggaacaagg

SEQ ID NO: 283027 - DNA, 256 bp, Glycine max
  unsure (1)..(256): unsure at all n locations
ccgaaatacttcgagatggcccgtacaaagcaaactgctcgtaagtcaactggaggaaaagctcccaggaagcagcttgcaaccaaggctgcacgtaagtctgcaccaacaactggtggtgtgaagaagcctcatcgttatcgccctggaactgttgctcttcgtgagattaggaaataccagaagngcactgagctcctanncacgaagcttcctttccagaggttggttcgtgaantgcccaggattcaagatg

SEQ ID NO: 283028 - DNA, 254 bp, Glycine max
  unsure (1)..(254): unsure at all n locations
ccggtgacactgctcagaaaaccaaggactatgccggtgacactgcacagacatcaaaggactatgccggtgatgctgctcagaaatcaaagggctatgtcggtgatgctgcacaaaagaccaaagnatatgttggtgatgctgctcagaagaccatggattatgtccactgatgcagcacagaagaccaaagattatgctactcagangactaaggactatgcaagtgntgcaactgatgctgcnnaaaagat

SEQ ID NO: 283029 - DNA, 255 bp, Glycine max
gaagtcaccataactactgattatgacattaagggggatccggagatgatatccatgagttacaagaagctgcctgtccacttgaagcctggaaataccatactgtgctctgacgggacgattactctcactgtcttgtcttgtgaccctgatgctggtactgttagatgtcgttgtgaaaacactgcaacgttgggtgagagaaaaaatgttaaccttcctggtgttgtggtggatctacccacacttactgag

SEQ ID NO: 283030 - DNA, 256 bp, Glycine max
  unsure (1)..(256): unsure at all n locations
gaaagatggagaagcaacaacaacaagcaccatctaaggaaacaaaggcacagagtgatgaatcagttaaagaaagcagcactgaagggcttccaatggaggatagtccctatgtgaaatacaaggatttggaggattataagcgtcagggttatggtacacaaggtcatcaagaaccaaagacaggtcgtggagctggagccaactgaaggcaccaatctctctggtgcngcnntttcnctgatgccanagtcgc

SEQ ID NO: 283031 - DNA, 256 bp, Glycine max
  unsure (1)..(256): unsure at all n locations
attccaggggaaacgaaagtctggcagtatataaccctaacaaagaggatctttctgattgattgtccaggtgttgtctaccacaacaatgatactgaaacagatgttgtgttgaagggtgtggtgcgtgtaactaatttgaaagatgctgcagatcatataggtgaggttttgaaacgtgtgaagaaagagcatttggagngagcgtataaaataaaagatgggatgacgaaaatgacttcttactgcagctttg

SEQ ID NO: 283032 - DNA, 253 bp, Glycine max
  unsure (1)..(253): unsure at all n locations
aaagaatcaaagaaaggggtggtggctgcttcgaaagcttaataatttgtttatttccagaacatcatagttttcgcagcagcaaactaacaaattactcatatcatataataagatggcccgttctctctcgcaagccaaacgtattggtgtccttgttgctcaatctatctncctaattcccgttcatcggcgaggttacgcagtggcatccgatgtatcggtaagagttggattgggtaatattgggcga

SEQ ID NO: 283033 - DNA, 254 bp, Glycine max
caatggaacagttgttcaggacccagaactaggacaggttattcaacttcaaggtgatcagaggaagaatgtttctaccttcctggtccaggctggtatcgtgaagaaggagcatatcaagattcatggtttctgagcggttggagtctcaagtgtcaagtcttacgtgcctgcctatgtgttgggcatatataatctgagttgtgtatgtgattgtggtatatctgatgtgttcttatgttttaccatgtgat

SEQ ID NO: 283034 - DNA, 258 bp, Glycine max
  unsure (1)..(258): unsure at all n locations
gnattttcagaggaaaatggcgggtacggtttcgacttgtttcttcttcgtgtttcttctntctctcctncttcctttncaganctccgctnaggaatcctcggagnaggagttcgtactcacattggatcactctaactttcacgacactgtcagcaagcacgatttcatcgtcgtcgagttctacgccccatggtgtggtnactgtaagaagcttgctccggagtatgagaaagctgctnctatcttgagtagtca

SEQ ID NO: 283035 - DNA, 223 bp, Glycine max
  unsure (1)..(223): unsure at all n locations
tgaagccatcgatgctcagatctctccactccgccgccacccgcggcgcctctcatctcttccgccgtgggtacgcctccgagccggtgccggagcgcaaggtagccgttctcggcgccgccggcgggatcgggcagnctctctcccttctcatgaagctcaatcccctcgtttcgagcctctccctttacgatatcgccggaactcccggcgtcgccgcnga

SEQ ID NO: 283036 - DNA, 259 bp, Glycine max
  unsure (1)..(259): unsure at all n locations
actctccaaaccctagcggcactacacactagttctatcgctatctccccaagatgtcgagcgccgatcccgagcacagngaagangnggnggcacccgccgttggcgacgacgaggacaccggagctcacgtcgctccaatcgtcaagctcgaggaggttgctgtcaccaccggcgaggaggacgangatgcaatcctggatctcaaatcgaagctttaccggttcgacaaggacgggaaccagtggaangagcgtgg

SEQ ID NO: 283037 - DNA, 271 bp, Glycine max
  unsure (1)..(271): unsure at all n locations
ttnctctcgtntcaatcgaaaaaaatcatngggcaganaantcttcgtcggtggcaacnggaaatgcaatgggaccactgaggaggtgaagaagattgttactactttaaatgaagcnaaagtccctggagaagatgttgtagaagttgttgtgagccctccttntgtgttccttccttttgtaaaaagtttgctgcgccctgatttccatgtctcggcccaaaattnttgggttcgcaaaggtggtgcttatactggagaggttatgctg

SEQ ID NO: 283038 - DNA, 267 bp, Glycine max
  unsure (1)..(267): unsure at all n locations
ggtagactatcgtggctatgaagtgacagtggaaaactttttacgggnacttactggacgtcatgagacatctgttccaaggtccaaacgacttcttagtgatgagggaagtcatattcttctgtatatgacagggcatggaggtgatgagtttttgaagtttcaggattcagaagagcttcaaagtcacganttagctgatnctgtgaagcaaatgaaagagaagcgcaggtttaaggagcttctnataatggtggccacctgcca

SEQ ID NO: 283039 - DNA, 270 bp, Glycine max
  unsure (1)..(270): unsure at all n locations
gttagagttgtgtcaattggacaaaaagttgaggatctccttgctgaccccaagaatgaaaaatggttatctatttcatcagagttatgtggaggnacccatatttcgaacacacgagaggcaaaagcttttgcacttttatctgaggagggaattgcaaaaggaatacgcagaataacagctgtnacaactgatcgtgcgtangnngcaatgncagtggcagatgaatttnagcagcaagtcgatgatacggcnaagatagtnggaatt

SEQ ID NO: 283040 - DNA, 267 bp, Glycine max
  unsure (1)..(267): unsure at all n locations
agatatatagaaaaacaaaggaganaagatagaaatggagaagtttccagttgttgacatggggaaccttaataatgaagagagatcagcaaccatggagataatcaaagatgcctgtgagaactggggtttctttgagttggtgaaccatgggatatccatagagttgatggacaccgtggagaggntgacaaaagagcacnacaaaaagtgtatggngcaaaggttcaaagaaatggtagcaagcnanggttnggatctactcaa

SEQ ID NO: 283041 - DNA, 269 bp, Glycine max
  unsure (1)..(269): unsure at all n locations
gaagcatctcgtgctctcggtgagatgaatggtaaaatgattgcnggaaaacctctgtnacgttgcccttgcacagagaaaagaagacagaagagcaaggttacaggctcagtnttcacagatgaggcctgttgcaataacgcctncngttgcgccccgtatgcctctctaccctcctggngctcctggtcttggacaacaattttngtangggcaaggacccccagccatgatgcctccacaagctggatttggataccagcancnat

SEQ ID NO: 283042 - DNA, 269 bp, Glycine max
  unsure (1)..(269): unsure at all n locations
ggcaaatctttgttaagaccttgacgggaaagacaatcacccttgaggtcgagagctccgacaccattgacaacgttaaggctaagattcaggacaaagagggtatccctccagatcaacagaggctgatctttgctggaaagcagcttgaggatggccgtacccttgctgattacaacatccagaaggagtccactcttcatttggtactccgtctacgtggtggaatgcaaatctttgtnaagactctgaccggaaagacaatcacc

SEQ ID NO: 283043 - DNA, 270 bp, Glycine max
  unsure (1)..(270): unsure at all n locations
cgggcanttngcccnanccggcnccnnggacggcgagctccgcctnctgggagcttgctgctggcacctccgctcgccgctttgtgggncacaccaaggacgtgcnctccgtggccttttccattganaaccgtcagatcgtntctgcctctcgtgaccgcacgatcaagctgtggaacaccctgggagagtgnaagtacacaatnntagacggcgatgcgcantcnnattgggtaagctncgtccgtttcagccctagcacccttcagc

SEQ ID NO: 283044 - DNA, 267 bp, Glycine max
  unsure (1)..(267): unsure at all n locations
caggcgccgaaccgaggatgatatcaagcnggcaaacagtgttgatgttggatctcttcgcgatccccagctggatgctgatagagtcaaggacccagaatggctcattgtgattggggtttgcacccatttgggttgcattccatngccaaangctggtgacnttggggganggttttgccctngccatggatcacannaggntatttcaggcaaaattaggccgggnccagcaccaaacaatctgaagattccaannacacctnc

SEQ ID NO: 283045 - DNA, 268 bp, Glycine max
  unsure (1)..(268): unsure at all n locations
tgatnccgaccaaacccatggnggttganactttctctgagtaccccccacttggncgctttgctgtcagggatatgcgtcaaactgttgctgtgggagtcatcaagaacgtggagaagaaggatccnactggagccaaggtcaccaaggctgcccagaagaagaagtgaatcgtgcggtttggttcatcaggggatgtcgtttcttatggttacaataaatgttggtttcttncccttgtgtcttcgtttctaggtagcttgttttt

SEQ ID NO: 283046 - DNA, 265 bp, Glycine max
  unsure (1)..(265): unsure at all n locations
aaactcttatgccttagtggtgagcatggagaacatcactctcaactggnattttggcaacaacaggtcaatgctagtctcaaattgtctcttcagaatgggtggagcngcagttctactctccaacaagtcttcngancgcagaagagccaaataccaactgatccanacagtgcgtactcacaagggtgcagatgacagatcatatggttgtgtcttccaagangaagatgagaaganaacaattggtgtggcatctcaaaga

SEQ ID NO: 283047 - DNA, 268 bp, Glycine max
  unsure (1)..(268): unsure at all n locations
catttgggagttaggttctgcacgctctgcttccagcgagtgttctttcttcntttcaacaccttaatttgcacacgctgcttcttcancttgagaaatggcacaagaaacctttctattcacatcngaatctgtaaacgagggtcaccccgacaagctgtgcgaccagatctctgatgcagtgctcgatgcgtgccttgaacaggaccctgacagcaaggttgcctgtgagacatgcaccaagaccaacatggtcatggtcttggag

SEQ ID NO: 283048 - DNA, 272 bp, Glycine max
tgatttcttctcacgcttagggcatgaccaagctgaagttcaaaccagcttacaatccatacaccgaacctagcatggagatttttagttatcatgaaggctttaaaaaatgggtagaggtaggaaattctggcatgttcagacccgaaatgttgcagccgatgggacttcctgaagatgtccaagttattgcatggggcctttcccttgaaaggccaacgatgatactatacgggatagataacattagagatctctttggacacaaggtg

SEQ ID NO: 283049 - DNA, 265 bp, Glycine max
  unsure (1)..(265): unsure at all n locations
gtggctattcagatgcacagagagangaaattgctgacaggatatcggtcatnggacggtcatctcccaangacaaacnatngctagtacaagcattgaggaggaagggtcatgttgtggctgtaactggggatggaacaaatgangctcctgcacttcatgaggccgatataggtctagcaatgggtatccaaggtacagtagttgccaaagagagctccgatatcattattttggatgacaattttgcttcattgtgaagttg

SEQ ID NO: 283050 - DNA, 265 bp, Glycine max
  unsure (1)..(265): unsure at all n locations
gaagctctcctcctcctggtcgttggggccacacgctttcttgtgttaatggttctcatttggttgtatttggaggctgtggaaggcagggcttgctcaatgatgtgtttgtcctggacctggatgcaaagcctccaacttggcgtgaaatttctggattggcacctccgcttcccagatcatggcacagctcctgtactcttgatggtactaagttgatagtttctgggggntgtgcagactctggagttctcttgagtgacat

SEQ ID NO: 283051 - DNA, 268 bp, Glycine max
ggcggatgaggcgccactcgatgtttccatttgcctgcatgcctttggtattgtggggtgtggttcgtttagtggtgtcaagtcttgcgaacgtgagggtgcatgagtggtaatcgggatgtttttgttgcacggctccatgcttgcgcatgcaacgtgtgacatgcatccttttcattgtcaccttagccttcgtggcttaggtgctgacgattggttcctgtgttgcctacctaccaaacggtattcgtgtggctatcagacccat

SEQ ID NO: 283052 - DNA, 266 bp, Glycine max
  unsure (1)..(266): unsure at all n locations
tttgctcccagcactgagcttaaccgagcttcacaaagatgaatcgggaaaaattgatgaagatggccggttcggttagaactgggggaaagggcaccgtgagaagaaagaagaaggctgtccacaagacaacaaccacagatgacaaaaggcttcagagcaccctgaagagaataggggtgaatgccatcccggctatngaggaggtcaatatctttaaggatgacntatnatccagtttctaaatcccaaattcaagcanccat

SEQ ID NO: 283053 - DNA, 267 bp, Glycine max
  unsure (1)..(267): unsure at all n locations
gaagcaaatgtctatttgtggagattttggccgtgtttttgagattggtcctgtgtttagagcagaagattcctacactcacaggcatctgtgtgagtttacaggtcttgatgttgaaatggagantaagaagcattactttgaggttatggatanagtcganagattgtttgtcgcaatgtttgacagtntgaaccagaatgtaagaaggatctggaagctgtcgggnctcagtatccatttgaacctttgaagtatctgcggacg

SEQ ID NO: 283054 - DNA, 268 bp, Glycine max
  unsure (1)..(268): unsure at all n locations
gagaatacnaaatntcaaaaganatnacagaacaatgagcagatgtcaggnctgaagcatctagtacatggagcaaagcagcatcacaatgtgaaaaangtatatgtatggcatgcactagctggttattggggtggagtgaagccagcagcaaccggcatggaacattatgacacngccttggcatatccagtgcagtcaccaggcgtgctaggnaaccaaccagacattgtcatggacagcttngctgtacatggccttggcctag

SEQ ID NO: 283055 - DNA, 269 bp, Glycine max
  unsure (1)..(269): unsure at all n locations
ggctgcactcacggctgcaagaacagctgcaaatgcnattnatgtgcccccagctcaacaaggtgccatagatctgcagagtggaatacttcatgctgaagaaaaggattataaaactgcttatagtnatttctttgaagcttttgaatcattcaatgctcttgatgaccccaaggctgtttttagcctgaaatatatgttgcngtgtaagatcatggngaatcaagctgatgacgtaggaggnatnatttcttctaaagcaggcctgc

SEQ ID NO: 283056 - DNA, 266 bp, Glycine max
  unsure (1)..(266): unsure at all n locations
gtnatgtggggattctcgcnatcgacanctacnnccctcccaccngtattcagcaggaattgctggaggcncangatggtgccagtaaagggaaanatacnattggacttggncnagattgcanggcgtttngtacagaagtagaagangncancncgangagttngacagtagtnnctnccctncntgaaaagnatgcgantganccnaaacaaattggtcgtctggaagtaggcagtgagactgtgattgacaaaagcaantcc

SEQ ID NO: 283057 - DNA, 261 bp, Glycine max
  unsure (1)..(261): unsure at all n locations
ctaattacactttctanctcanntccaatctcattttcgttcggnncaaacactctcatggcatcagacaagaagattaggatcggcatcaacggatttggaaggattggccgtttggtggccagggttgctcttcagaggaatgacgttgaacttgttgctgtcaacgatcctttcatcaccactgattacatgacatacatgttcaagtacgacaccgttcatgggcagtggaagcattttgatgtgaagctgaagact

SEQ ID NO: 283058 - DNA, 263 bp, Glycine max
  unsure (1)..(263): unsure at all n locations
aatctctcaatcgttttctacataatacaaacctctctaatttntgaagcttattatacccaatctcgatatgcagatcttcgtgaaaaccctaacnggcaagacgatcaccttggaggtggagtcctctgacaccancgacaacgtgaaggccaaaatcnaagacnaggagggcnttcctccggatcancagcgtntaatcntcgccggnanacagctcnangacggcagaaccctcgncgacnacaacatccataaggagt

SEQ ID NO: 283059 - DNA, 264 bp, Glycine max
  unsure (1)..(264): unsure at all n locations
gattatcctaagtctttgggaatagtgctgcaatggcttcaagtcaggaggaggtgacccttttgggagctactggaagcccatttgtgtgcagggttcatattgccctcaagttgaagggagttcaatacaaatatgtcgaagaaaatttgaggaacaagagtgaactgcttctcaaatccaacccagttcacaagaaggttccagtgtttattcacaangagaagcccanagcagagncnctngtgntngtggaanncnnng

SEQ ID NO: 283060 - DNA, 266 bp, Glycine max
  unsure (1)..(266): unsure at all n locations
gttgaannnccaaaacccttggcgagtgaagccctagactcactagactacacacttcgcaatggcggttgttgctcaaacccctgacatcgccggcgagcggcagtccggccaagacgttcgcacccaaaacgttgtggcatgccaagccgttgccaacatcgtcaaaagctctttaggccccgttggcctcgacaagatgctcgtcgacgacattggcgacgtcaccatcaccaacgacggcgccacgattctcaagatgctgg

SEQ ID NO: 283061 - DNA, 264 bp, Glycine max
  unsure (1)..(264): unsure at all n locations
agtacacatggcaaatttactcacagaggcttctcactctcaaggntaganacangcttccagaagccatagacaccagtgagagtgagaagcctctggaagcnngtgtctaaccttgaccgccgtgagagccgccgctatctcgagatgtnctatgctctcaagtaccgcaaatnggccgagtcgngccccttgctgttgagtaaactgaggatgaagagncggntaaagaaatggaggaaccggctttttgtttctcattgg

SEQ ID NO: 283062 - DNA, 266 bp, Glycine max
  unsure (1)..(266): unsure at all n locations
ggggttgttgaaagctgntccagtgagggaagaaccccaaccccacatncgattgcacaggacatttgcaggtttggcgcgtgaatggtcaggagaagattcntcttcaagcnnctgntcagtcaaaattttatagtggagatngcnncancnttcagtatacanancctggagaggataaagaagattgtcttanaggancatggantggcaagaatagtgttgaggaagaacgagcnncagcnaattcattggcaagcaaaatg

SEQ ID NO: 283063 - DNA, 264 bp, Glycine max
  unsure (1)..(264): unsure at all n locations
gatccactggttctccatcattaactctttgatgattgtncnnttccngtctggaatggtggcaatgatcatgatgagaactcttnacagagacattgccaatnataatcagcnagaaacccaagangaggcccaagaagaaacagggtggaaacttgttcatggagatantttcaggccaccagtcaattcaaatttgctttgtgtttatgtcggtactggtgttcagatctttgcaatgacacttgtgacaatgatatttgc

SEQ ID NO: 283064 - DNA, 264 bp, Glycine max
  unsure (1)..(264): unsure at all n locations
gttggcaaagaaattgcaactgagatcaaaacaaanctagcaagcaacaaaaccntctatacngannccnatggacgtnanntcattgaacgtgttcgagactatagagangactggcacttggaagtaaancaaccngtngcngganattacnacccnatcaacctnggaatttacctgaaagananaagcaaagagttcncnatatnggtagatagagccgtggggggctccagcatcatagatggacaattggagcnaatg

SEQ ID NO: 283065 - DNA, 266 bp, Glycine max
  unsure (1)..(266): unsure at all n locations
gcatattcacatgagctgccacgatatggtcttgaagtaggacttacaaatnatgcagcagcttattgcactggtctcctnttggcccgaagantcctcaaaacacttgaaanggatgaggagtatgaaggaaatgttgaggctactggngaggattatncagtggaacctgccgagagcaggaggccattccgtgcactccttgatgttggtcttgttaggactacaacaggaaatcncgtctttggtgcccttaagggagctct

SEQ ID NO: 283066 - DNA, 264 bp, Glycine max
  unsure (1)..(264): unsure at all n locations
acctaaaccctactcattctccatacctcaacgaagaggttaaagagacggcaacactttgctgtccgccttgaccgagcagagcttcgtcttggccctcgattttgccctaaagtactctcagtcacaacagacacnnnnnnnnnnnnnnnnnnnnnnaatggcaccgaagcagaccaaggctgagaagaagatcgcttacgatgcgaactgtgcgacctaatggaggagtacggccagatcctcgttgtgaatccgataagt

SEQ ID NO: 283067 - DNA, 251 bp, Glycine max
  unsure (1)..(251): unsure at all n locations
ctgctgcaagacctcgctgaaaattagggtttcgattcggnggtagacgaagatgttcggaagggctccgaagaaaagcgacagcaccaggtactacgaaatcctcggcgtttccaagaacgcttcgccggatgacttaaagaaggcttacaagaaagccgccattaagnaccatcctgacaaaggcggggatcccgannngtttaanagagcttgctcaagcctatgaggttctgagtgaccctnagaaa

SEQ ID NO: 283068 - DNA, 247 bp, Glycine max
agagaaacgggtgatgtcaagatctggcgatgagtgtgtggtagccctcacagatcagtggtacattacatatggagaatcagaatggaagaagctagctgacgagtgcctttctaacatgaacctgtattctgatgagacacgacatggatttgagcacactttaagctggttgaaccagtgggcttgctcacgatcatttggtcttgggactcgcataccgtgggatgaacagttcctagttgag

SEQ ID NO: 283069 - DNA, 248 bp, Glycine max
attaagttcagtgggaaagacagatggtgaaaaatcagttcctgcacccaaagccgctgaagttcctcctgataatgagtttgagaagcgaataaggcccgaggtaatactagcaaatgagattgatgtcacattctctgatattggtgccttagatgagaccaaagaatcccttcaagaactagtaatgcttcctcttagaaggccagaccttttcactggaggccttctaaagccttgtagaggaa

SEQ ID NO: 283070 - DNA, 257 bp, Glycine max
  unsure (1)..(257): unsure at all n locations
aaacnattaataaagatgagtttgaagaacaacatggtggtgctaaaggtgtgtttgttgcttcttttccttgtgggggttacagcttgcacgcatggaactgagcttcttcaaaagtgatcagtcatcaagttatgatgatgatgagtattcaaaaccatgctgtgatctctgcatgtgcacacgctcaatgcctcctcaatgcagctgtgaagatattaggctgaattcatgccactcagattgtaagagctgta

SEQ ID NO: 283071 - DNA, 253 bp, Glycine max
  unsure (1)..(253): unsure at all n locations
aaaaatggtgtctataaatttgttccggacatttatttctcctccgcgagagaataaagttctagaagcatttgacgtggatgaggaagagccttccatggatcctgcctggccttacttgcaaattgtgtatgaactgcttctaaggttcgtcatgtcaaccgagactgatgcgaagttggcaaaaaggtatattgatcattcatttgttctgagactgttanacctttttgattcagaggatcccagggaa

SEQ ID NO: 283072 - DNA, 248 bp, Glycine max
  unsure (1)..(248): unsure at all n locations
cagcaatgggncatgaagatgaacccctcgatgaatttattgaagcacanagaacctgtctcaatgatcttatgtacnttcctacccgtaatgcatatggtctctctagtgtngctggaaacatggaaaagctaacagctttgcagaatgagtttgagaatgtganaagcaaattggatgatgataaggagaagacggtacggcttgagaagaaggtgatggttctcacacaaggctatgagatgaga

SEQ ID NO: 283073 - DNA, 246 bp, Glycine max
acagcttttgcctgtgtatacccagatagctaccaagtttgctgaactgcacgatacttccttaagaatggctgccaagggtgtcgttagagaagttctggactggtgtaactcccgtgctgtcttctatcagagactgcacaggagaattggtgagcagtcactgatcaacagtgtgagagatgctgctggtgaccaattgtcacatgcatctgcactgaacttgctcaaagaatggtatttaaa

SEQ ID NO: 283074 - DNA, 243 bp, Glycine max
cgttgttgcttcggtgttgaatcatggatcagaaagtcgatttcagtgctccgcattccatgggaaccactatcatcggcgttacttacaacggcggtgtcgttctcggagccgactctcgaaccagcactggagtgtatgttgccaaccgagcatcggacaaaatcacacagctcactgataatgtttacgtgtgtcgctctggatcggctgctgattctcagattgtctctgactatgtgc

SEQ ID NO: 283075 - DNA, 245 bp, Glycine max
gcagatcttcgtcaagactctcactggcaaaaccataaccctagaggtcgaaagctctgacaccattgacaacgtcaaggccaagatccaggacaaggagggaatccccccagaccagcaacgtctcatcttcgccggaaagcaacttgaggacgggcgcaccctcgccgactacaacatccagaaggaatcaacccttcacctcgtcctccgtctccgtggtggcatgcagatcttcgttaaga

SEQ ID NO: 283076 - DNA, 243 bp, Glycine max
acatactggaagatttgacaactctgagacttctctccaaacttgttcctgaatattcttactcccttgatgaagaggatatttgccaaaatgcatttgagttgatttttgcatttgatgaagtcatctctcttgggcatgcggaaaatgtgtctgttgcacaagttaagcaatactgtgaaatggagagtcatgaagagaaactgcacaagctggttatgcagagcaaaatcaatgatacta

SEQ ID NO: 283077 - DNA, 216 bp, Glycine max
  unsure (1)..(216): unsure at all n locations
gctcggttctccgatcgccgtcttcgccttgcccattcctgatcaatatgtctagaagatatgatagccgtacaacaatcttctcccccganggacgtctttaccangtggagtatgcaatngaggccattgggaatgctggaactgcaatagggatcttntcaaaagatggggtagttctggttgnngaaaagaaggtcacatccaagctgctgc

SEQ ID NO: 283078 - DNA, 247 bp, Glycine max
  unsure (1)..(247): unsure at all n locations
cngctcgngcgagcctgnngggaaagaaatcacttttaagcgagtactcttgaatanctgccangaggcttttgaaggtgcanatanactgagggaagnactgagacagatgactgcccctgaccaggagatggagcgacgggacaagganagacttttcaagattcgaacccttgganatatccgtttaattggtganctgttgaagcanaaantggctcccganaagattgttcatcacattgtt

SEQ ID NO: 283079 - DNA, 241 bp, Glycine max
  unsure (1)..(241): unsure at all n locations
agctctcctcctcctggtcgntggggccacacgctttcttgtgttaatggttctcatttggttgtatttggaggctgtggaaggcagggcttgctcaatgatgtgtttgtcctggacctggatgcaaagcctccaacttggcgtgaaatttctggattggcacctccgcttcccagatcatggcacagctcctgtactcttgatggnactaagttgatagtttctgggggatgtgcagact

SEQ ID NO: 283080 - DNA, 245 bp, Glycine max
  unsure (1)..(245): unsure at all n locations
gctgcactcacggctgcaagaacagctgcaaatgctatttatgtgcccccagctcaacaaggtgccatagatctgcagagtggaatacttcatgctgaagaaaaggattataaaaacgcttatagttatttctttgaagcttttgaatcattcaatgctcttgatgaccccaaggctgttttagcctganatatatgttgctgtgtaagatcatggtgnatcaagctgatgacgtaggaggaatt

SEQ ID NO: 283081 - DNA, 239 bp, Glycine max
tctggtgccagcagccgcggtaattccagctccaatagcgtatatttaagttgttgcagttaaaaagctcgtagttggaccttgggttgggtcgatcggtccgcctccggtgtgcaccggtcggctcgtcccttctgccggcgatgcgctcctgtccttaactggccgggtcgtgcctccggtgctgttactttgaagaaattagagtgctcaaagcaagcctacgctctgtatacatt

SEQ ID NO: 283082 - DNA, 239 bp, Glycine max
caccatcaagccccaaactgacagatgggtcttccctgagaccaacaccggtatcattgtcttggctgagggtcgattgatgaacttgggatgcgccactggacaccccagttttgtgatgtcctgctccttcaccaaccaggtcattgctcagcttgagttgtggaaggagaagagtaccggcaagtacgagaagaaggtttacgttttgcccaagcaccttgatgagaaggtggctg

SEQ ID NO: 283083 - DNA, 238 bp, Glycine max
gcgtgacgaaggaagaagttgaatcatccttgaaggccaaactgaacccttctcatcttgaagtggttgatacatctggagggtgcggtgcaagttttgtggtggagattgtatcagaacaatttgaaggcaaaaggctacttgagaggcatcgaatggtgaatgctgccttagaggaggaaatgaaacaaatccatgctctctctattaagaaagctgttaccccagaccagtggaa

SEQ ID NO: 283084 - DNA, 242 bp, Glycine max
  unsure (1)..(242): unsure at all n locations
ctgcaatggcttcaagtcaggaggaggtgacccttttgggagctactggaagcccatttgtgtgcagggttcatattgccctcaagttgaagggagttcaatacaaatatgtcgaagaaaatttgaggaacaagagtgaactgcttctcanatccaacccagttcacaagaaggttccagtgtttattcacaatgagaagcccatagcagagtctcttgtgattgttgaatacattgatgag

SEQ ID NO: 283085 - DNA, 245 bp, Glycine max
atagtgtggttcctgcattcaagtctgctgctgaagatcttttgaacaattctggtttaccagtcattgaattactggcaaaggctcttgcaaaggctgttggttatactgacgtaaagcaaagatcacttctaacttccatggagaactatgttacattacttcttgagactggcaaaccaatctacacccaatcttttgcctatggagtcttgaggagatttttgcctgaagagaaggttgag

SEQ ID NO: 283086 - DNA, 241 bp, Glycine max
  unsure (1)..(241): unsure at all n locations
ggcagtagccgagattccgtgagttgcaaaaatgaagacgattctttccaccgagaccatgaacatcccggacggcgtgagcatcaaagttcatgccaaggtcatcgaagttgagggnccccgcggaaaatnggtgcgagacttcaagcatttgnatctcgattttcagctcattactgacganaacggtnaaaganagctganaatcgacgtcgtggtttggttctcggaaaacatccgc

SEQ ID NO: 283087 - DNA, 236 bp, Glycine max; identical to SEQ ID NO: 135476

SEQ ID NO: 283088 - DNA, 238 bp, Glycine max
gttgcagaccgagctagctagctagcaagcaagcacagagatggaggcaaagcgaggccatgccctcatgtgcttggcacgtgtttcactcttcctctgcgctctaaccctatccgctgctcacggaagcaccacggttcaagacatcgcgagaaagttgaaactcggggacaacgagcttctgcgcacggagaagaagttcaaggttttcatggagaattacgggaggagctactcc

SEQ ID NO: 283089 - DNA, 247 bp, Glycine max
gtcatcatccgcagctgctgttattcgcaccgcaaacaaacagtgagccatggccgtcggaaagaacaagcgcatctccaaagggaaaaagggtggcaagaagaaggcagctgatccctttgccaagaaggattggtatgacattaaggccccttctctttttcaagtgaaaaatgttggcaaaaccctcgtctctcgtacgcagggtaccaagattgcttctgaaggacttaaacatagagtgttg

SEQ ID NO: 283090 - DNA, 192 bp, Glycine max
ttgttgtttgtgtgtttgttttttctctcacctgaaaatgtcttgctgcggtggtaactgtggttgcggaagcgcctgcaagtgcggcaacggctgcggaggctgcaagatgtacccagacttgagctacaccgagtcaaccaccaccgagaccttggtcatgggagtggcaccagttaaggctcaattcga

SEQ ID NO: 283091 - DNA, 232 bp, Glycine max
  unsure (1)..(232): unsure at all n locations
aaggatctcttgaacccaaaaagtatgaagggccacgcactgctgattcacttgctgagtttgtaaatacggaaggaggaacaaatgtgaagattgctacagctccttccaatgtagtggtgcttacatctgaaaattttaatgaggttgtcttagatganaccaaagatgtcttggttgagttttatgcaccctggtgtggacattgcaaaagtcttgctcctacttacga

SEQ ID NO: 283092 - DNA, 235 bp, Glycine max
aaaacaaaaagtttacgttacaaatcgcataataaccgtcctaagtttattgagagaattttgcaagtgtgagaaacatggcatctcgtcaaaacaacaagcaagagcttgatgaaagagcaaggcaaggagagactgttgtcccgggtggaactggtggcaagagcctggaggctcagcaacaccttgctgaaggaaggagcaagggagggcaaacaaggaaggaacagctggg

SEQ ID NO: 283093 - DNA, 238 bp, Glycine max
gctctacactggcgtcaatggcggcttcccgtcatcgaataatgccgctggcggtattgcgccgccgttggaggtggacgggctgccggagaattttgattggagagagaaaggagctgtcaccgaagttaagttacagggtagatgtggatcatgctgggctttcagcaccacaggatctatagaaggagccaattttcttgccaccggaaagctcgtcagtcttagtgaacaacag

SEQ ID NO: 283094 - DNA, 242 bp, Glycine max
  unsure (1)..(242): unsure at all n locations
caagattgtggatgcaattatatctcatggttgcttcttganggagtgcaacgttcaacattctattgttggagtacgctcacgtttggagtctggtgtggagcttcaggatacgatgatgatgggtgctgactattatcaaactgagtatgaaattgcatctctggtggcagaagggaaggttccaattggtgtcggggcaaatactaaaatcaggaattgcataatcgacaagaatgcca

SEQ ID NO: 283095 - DNA, 261 bp, Glycine max
cagcagttacagcactcaaaaacctagagcgaagagcgtgaaggcaccggccgccggccatgacattcaagcgcaggaacggaggtcgcaacaaacacggccgtggccatgtcaaattcatccgatgctccaactgcggcaaatgctgccccaaggacaaggccatcaagaggtttcttgtgaggaacattgttgaacaggctgcagtcagagatgtgcaggaagcctgtgtctatgaacaatacacgcttccgaaatata

SEQ ID NO: 283096 - DNA, 257 bp, Glycine max
gaaatctgaaagggagaatgaattgaaacaacgatttgagcagagcatgaaagaagctgctgataaatatcaaggcgcaaacttgtatgtaaaaaatttagatgatagcattggtgatgaaaaacttaaggagctgttctccccttttggtaccattacctcttgcaaggttatgagagacccaaatggcttaagtcgtggatcgggttttgttgcattctcgactcccgaggaggcatctagagcactcctggaga

SEQ ID NO: 283097 - DNA, 256 bp, Glycine max
gctgatgccaatgatgttgaaggagatggtgcctcattgccatattcagagtgctttcttgtcactgtaaagcctctggcaaaacatgttcctcctgtgttgcatgacaaagaaaggactgctcgagtcttttatggaaatgattccttttatgtgctgtttagacttcatcagacattgtatgagaggatccaatctgcaaaggttaactcatcatctgctgaaaagaagtggagggcttcaaatgatacaggct

SEQ ID NO: 283098 - DNA, 255 bp, Glycine max; identical to SEQ ID NO: 173261

SEQ ID NO: 283099 - DNA, 264 bp, Glycine max
  unsure (1)..(264): unsure at all n locations
gaatcacaattgatattgccttgtggaagtttgaaaccaccaagtactattgcacagtcattgatgcccctggacacagggatttcatcaagaacatgatcactgggacatcccaagctgactgtgctgttcttatcattgattccactactggtggttttgaagctggaatttcaaaggatggacagactcgtgaacatgctctgctttcattcacccttggtgtgaaacagatgatttgttnctgtaacaagatggntgcta

SEQ ID NO: 283100 - DNA, 260 bp, Glycine max
ggggacaacttcggaactgctagttctattgccagggaagtaggaattgaaaatgttattgctgaggccaaaccggatcaaaaagcagagaaagtgaaagacttgcaggcttctgggtacactgtggctatggtgggggatggcatcaatgattcacctgcacttgtggcagcggatgtgggaatggcaataggagctggtacagacattgctattgaggctgctgatattgtcctcatgaagagcaacttggaggatgt

SEQ ID NO: 283101 - DNA, 263 bp, Glycine max
  unsure (1)..(263): unsure at all n locations
gtgagatttgcgaatctgagaaatggcggattcttctcgggaggagaacgtttacatggcgaaattggcggagcaggccgagcgttacgaggagatggttgagttcatggagaaggttgcaaagactgtggaggttgaggagttgacggtggaggagaggaatctcctctctgtggcntnncaaganngtgattggttgcgaggagggcttcgtggaggatcatatcctccattgagcagaaggaggagagcaggggcaatga

SEQ ID NO: 283102 - DNA, 260 bp, Glycine max
cagttgcggagtcaatcgaaatcggcggagatggttgccatgaggtttcaccagtaccaggtggtgggaagggctcttcctaccgaatccgatgagcatcctaagatctaccgcatgaaactctgggccaccaacgaggtccgtgccaaatccaagttctggtattttttgagaaaattgaagaaggttaagaaaagcaatggacaagtgctagccatcaatgagatttttgagaagaatcctaccaagattaagaatta

SEQ ID NO: 283103 - DNA, 256 bp, Glycine max
caaatacaggcctaggaagccgaagtatttcaaccgtgttcacactggatatgagtggaacaaatataatcagactcactatgatcatgacaacccacctccaaagatagtccaagggtacaaatttaatattttctaccctgatcttgtagacaagacaaaagccccaacctacaccattgagaaggatggcagcaatggggagacttgcattataagattccatgcagggccaccatatgaagacatagctttc

SEQ ID NO: 283104 - DNA, 252 bp, Glycine max
aagaatcaaagaaaggggtggtggctgcttcgaaagcttaataatttgtttatttccagaacatcatagttttcgcagcagcaaactaacaaattactcatatcatataataagatggcccgttctctctcgcaagccaaacgtattggtgtccttgttgctcaatctatctccctaattcccgttcatcggcgaggttacgcagtggcatccgatgtatcggtaagagttggattgggtaatattgggcga

SEQ ID NO: 283105 - DNA, 253 bp, Glycine max
  unsure (1)..(253): unsure at all n locations
ctctctactactgctagctgtgacttgttttgagttcaatcaaatcgcattggtatctgaaatcaggaaagatggttagcgtagtgagatcaggcaggcacaaagggcagaaggcccagcaaccatccttgccattggaactgcaaacccaccaaaccgtgttgatcagagcacctatcctgattactacttcagaatcaccaacagtgaccacatgaccgagctcancagagaaatttcagcgcatgtgtga

SEQ ID NO: 283106 - DNA, 254 bp, Glycine max
  unsure (1)..(254): unsure at all n locations
ccagggtaggcatgcctttgcagacttctctctactcaatttacctcgngaattcaagggttcttttgacttcactgatgggcatgttaagcctgtgaagggaaggaaacttaactggatgaaggctgcaatattagaatcggaccgagtactcactgtaagtccatattatgcccaggaacttgtttccggagaggaaagaggtgtagaattggacaatataattcgttcatgtggcatcactggtatcgtga

SEQ ID NO: 283107 - DNA, 259 bp, Glycine max
  unsure (1)..(259): unsure at all n locations
agaagcgaagaggcgcagcgtnagcagtaactcgtggaattgctagcaatggcgaggatcaaggtttacgagctgaggcagaagacgaaggctgatctgttgaatcagctgaaggacctcaaggccgagcttgccttgcttcgtgttgctaaggtcaccggcggtgcacctaacaagctctctaagatcaaggtggtgaggttgaacattgcccaggttttgacggtgatttctcagaagcagaaggccgcgttgaggg

SEQ ID NO: 283108 - DNA, 257 bp, Glycine max
ctcaaaccctaacctaactcctctcgtcgtcacaaaaagtcttcttctccgatcgttacgatgttggaactccgtctcgtgcaaggttcccttctgaagaaggttctggaatcgatcaaggagctcgtaaacgacgcgaacttcgactgctcctccaccgggttctccctccaggccatggattccagccacgtcgccctcgttgcgctcctcctccggtccgagggctttgagcactaccgctgcgaccgcaatac

SEQ ID NO: 283109 - DNA, 258 bp, Glycine max
gggaaactcgagtacctgagttagagaataagattcatgacttgaactcaaaattagaagatcttcaaaagataaatgaggaacagaagacaaaaattcaaaaaagtgaacgcgctcttaaagttgctgaggaagaaatgttaaaggcaaagtttgaggctactgccatagaaaaagagctgagggaggctcatggtgcttggcttcccccttggcttgctgttcactatattcatagtaagtcttttgttgatagtc

SEQ ID NO: 283110 - DNA, 255 bp, Glycine max
gagagagcaagtgacaagagtggagtgagagatagtgactgcaaaaccgctccagccttgtttcttctcagatcttcttccatggaacagtacgagaaggtggagaagataggcgagggaacatacggcgtcgtttacaaggctcgcgaccgcgtcaccaatgagaccatcgctctcaagaagattcgcctcgagcgggaggacgaaggcgttcccagcaccgccattcgcgagatttctctcctcaaagagatg

SEQ ID NO: 283111 - DNA, 251 bp, Glycine max
aatcaaagaaaggggtggtggctgcttcgaaagcttaataatttgtttatttccagaacatcatagttttcgcagcagcaaactaacaaattactcatatcatataataagatggcccgttctctctcgcaagccaaacgtattggtgtccttgttgctcaatctatctccctaattcccgttcatcggttacgcagtggcatccgatgtatcggtaagagttggattgggtaatattgggcgaaggaatg

SEQ ID NO: 283112 - DNA, 249 bp, Glycine max
ggatgggttctaaaatggaaggaccgtctaccccagcaattcgacgtgacccatacgaggtattgtccgtgtcgaaagactcaaccgatcaagaaattaaaacggcttacagaaagcttgctcttaagtatcaccctgataagaatgctagcaatcctgaagcttcggagctatttaaagaggttgcatattcttatagtatcttgtctgacccagaaaagagaaggcagtatgacagtgctggatttg

SEQ ID NO: 283113 - DNA, 249 bp, Glycine max
gtttaagtaatcatgggtaaggaaaaggttcacatcaacattgtcgtcattggacatgtcgactctgggaagtcaactaccactggtcacttgatctacaagcttggaggtattgacaagcgtgtgattgagaggttcgagaaggaggctgccgagatgaacaagaggtcattcaagtatgcctgggtgctcgacaagctcaaagctgagcgtgaaagaggaattaccattgatattgctttgtggaag

SEQ ID NO: 283114 - DNA, 249 bp, Glycine max
cggccagtttgccctatccggctcctgggacggcgagctccgcctctgggaccttgctgctggcacctccgctcgccgctttgtgggccacaccaaggacgtgctctccgtggccttttccattgacaaccgtcagatcgtgtctgcctctcgtgaccgcacgatcaagctgtggaacaccctgggagagtgtaagtacacaatccaagacggcgatgcgcattctgattgggtaagctgcgtccgttt

SEQ ID NO: 283115 - DNA, 256 bp, Glycine max
gcggagtagccctgctccgcgtcgccaaggttaccggcggcgccccaaacaagctctccaaaattaaggtggtgaggctatgcgatagcgcaggttttgacggttatttcccagaagcagaaagcggcgctgagagaggcttacaagaagaagaagtatttgccccttgacctccgtcccaagaagacccgcgccattcgcagacgccttaccaaacaccaggtgtctttgaagacggaacgtgagaagaagaagg

SEQ ID NO: 283116 - DNA, 253 bp, Glycine max
ctttttgccaaagaagaagatcgatcggtttctattcggttctggtttttgttttcgtgctgttttgcttttcatttcaatttgatgaaccgtttgtggttttatgtgtagattatcaacgatcgtgagactggaagatccaggggatttggatttgttaccttcgcctccgaggattcaatgagggatgcgatcgaagggatgaacggtcagaaccttgatggacgcaacatcactgtgaacgaagctcagt

SEQ ID NO: 283117 - DNA, 257 bp, Glycine max
cagcattcactgaaagcactcagtagggtttgcggtttcagagtttgtgacgcacgcatccatggccaccaccaccaacgccgccgcagccccgccgcgccagcttctcccagaaggaagccgacatccagatgatgttagccgccgacgtccacctcggcaccaaaaactgcgacttccaaatggaacgttacatcttcaagcgccgcaacgacgggatttacattattaaccttgggaagacatgggagaagctt

SEQ ID NO: 283118 - DNA, 256 bp, Glycine max
gtgatatcaaattgtggccttttaaggtcattgctggtgctgctgacaagccaatgatcgtggttaactacaagggtgaagagaagcaatttgctgcagaagaaatctcttctatggtgctcatcaagatgcgtgagattgctgaggcttaccttggctccacggtgaagaatgctgttgtcactgtccctgcttacttcaatgattctcagcgtcaagctaccaaggatgctggagtcattgctggtcttaatgt

SEQ ID NO: 283119 - DNA, 253 bp, Glycine max
gagaaaccctagcaaaaatgccggctggtcacggtttgagatcccgcaccagagattccttctctcgtcccttcaggaagaagggtaccatcgccctcaccacatacctcagaacctaccacgtcggcgattatgtcgacgtcaaggttaacggcgccgtccacaagggaatgcctcacaagttctaccatggccgcaccggtcgcgtctggaatgtcaccaaacgtgctgttggggtcgaagtcaacaagca

SEQ ID NO: 283120 - DNA, 249 bp, Glycine max
attcacaaagctcccgcaaaagggtcgagaaaagggtgcatgagaggaaagggagggcctcagaactccgattgcaagttcagaggtgtgaggcagaggatttggggtaaatgggttgctgagattcgcgaacctatcaatggcaagcttgttggtgagaaagcaaataggctttggcttggtactttctccactgcacttgaggctgctcttgcttatgatgaagcggctaaggccttgtatggccct

SEQ ID NO: 283121 - DNA, 246 bp, Glycine max
cggtgttgaactcgttgccgttaacgatcctttcattaccaccgattacatgacatacatgtttaaatacgacagtgttcacgggcactggaagcatcacgatgtcaccgttaaggatgagaagacccttctcttcggtgacaagccagtcactgtttttggacacaggaaccctgaagagatcccatggaagtcgactggagctgacatcattgttgagtccaccggagttttcaccgataagga

SEQ ID NO: 283122 - DNA, 248 bp, Glycine max
gtgaaaactccacgtggtctccgaacattgaacactgtctgggctcagcatttgagtgaggaattgaaacgtaggttctacaagaactggtgcaagtccaagaagaaggccttcaccaagtactctaagcagtatgaaactgaggagggaaagaaaaacattgaggcgcactggagaaactgaagaagtatgctactgtggttcgtgttttggctcacactcagatcaggaaaatgaaagggttgaag

SEQ ID NO: 283123 - DNA, 250 bp, Glycine max
gttctcttggccgagtttacaaggctgatttcccaaatgggaaggtaatggctattaagaagatcgacaactcagctctgtcattacaggaggaagacaattttcttgaagctgtttctaatatgtcacgcttgcggcacccaagcattgtgacattggctggatattgtgcagagcatggccaacgacttctagtttatgagtatatagcaaatggaaatctgcatgacatgctccattttgctgaaga

SEQ ID NO: 283124 - DNA, 246 bp, Glycine max
tcgcttttgcattcattttgatgtaaatatctctctctctgttaatgaccttcttgcatgctgtggctttctgtgtggatctggttgtgatgggggatatcccttgtatgcgtggcaatacttagcccaccacggtgttgtcactgaagagtgcgacccatattttgatcaaattggctgttctcatcctggttgtgagccagcttaccggactcccaagtgtgttaaaaagtgtgtaagtgggat

SEQ ID NO: 283125 - DNA, 244 bp, Glycine max
  unsure (1)..(244): unsure at all n locations
atcaaagaaaggggtggtggctgcttcgaaagcttaataatttgtttatttccagaacatcatagttttcgcagcagcaaactaacaaattactcatatcatataataagatggcccgttctctctcgcaagccaaacgtattggtgtccttgttgctcaatcnatctccctaattcccgttcatcggttacgcagtggcatccgatgtatcggtaagagttggattgggtaatattgggcgaa

SEQ ID NO: 283126 - DNA, 199 bp, Glycine max
gaaatttctggatggtggcgggtttgtttttgggtatctaccattccagctggctatacttgccgcagctatggtcttctgcgcagagagtccgcattggttatacaagcaaggaagaactgctgaagcagaagctgagtttgagagacttctgggtgtatcagaagcaaaatttgcaatgtcggagttatccaaggta

SEQ ID NO: 283127 - DNA, 243 bp, Glycine max
ggaagaatcacggaggaagaaattaaagagattatctgccttagcgccactaccaacaaacttgcaaacatacagaagcaggcagaggaatatgcggctttgatcatggaagaactagaccctgaagacacaggatttatcatggtaaacgatctagagatgctcttgttgcatggaccaacccattctactagaggagatagcaagtacctgagtcaaatgctaagcttaaagcttaagcct

SEQ ID NO: 283128 - DNA, 285 bp, Glycine max
agtgtgtatacctttggccccacatttcgcgcagagaattctcacacttccaggcatttggccgagttttggatggttgaacctgagattgcttttgcagagttgaaggatgatatgaactgtgccgaggcatatgtgaaatttatgtgtcagtggctacttgacaactgccttgaggatatggagtttatggctgataagtttgataaaggttgcattgccgtttgaaattggttgcttccactccctttattcgagttacatatacagaagcagtggaaatac

SEQ ID NO: 283129 - DNA, 282 bp, Glycine max
ctttttgccaaagaagaagatcgatcggtttctattcggttctggtttttgttttcgtgctgttttgcttttcatttcaatttgatgaaccgtttgtggttttatgtgtagattatcaacgatcgtgagactggaagatccaggggatttggatttgttaccttcgcctccgaggattcaatgagggatgcgatcgaagggatgaacggtcagaaccttatggacgcaacatcactgtgaacgaagctcagtcccgcggaagccgcggtggaggcggtggcg

SEQ ID NO: 283130 - DNA, 281 bp, Glycine max
cccccaagtactctaaggctaggtatgatgaaatcgtgaaggaagtctcttcttacttgaagaaggttggttacaacccagacaagattccctttgttcccatctctggttttgagggtgacaacatgattgagaggtccaccaaccttgactggtacaagggaccaactctccttgaggctcttgaccaaatcaatgagcccaagaggccctccgacagcctctaaggcttccattgcaggatgtctacaagattggtggtattggtactgtgccagtgg

SEQ ID NO: 283131 - DNA, 279 bp, Glycine max
cgccgtgactagacactcatctcactcgcgccatcttagggtttctccttttgtttcgcaacatggttgccgctaagaaaactaagaagacccatgagagcatcaacaacaggctcgctcttgtcatgaagagtggcaaattcaccctcggttacaagaccgttctcaaatctcttaggaactccaaaggaaaattgattatcattgctaacaactcccccctttgagaaagtcagagattgaatactatgctatgttggcaaaggttggagttcatca

SEQ ID NO: 283132 - DNA, 277 bp, Glycine max
  unsure (1)..(277): unsure at all n locations
gtttgaaattgctttgagggactacaaggcacagttggaggaagacccaattgtacacaggcacctttcatccttgtacgatacccttatggagcagaatctctgcaggttgatcgagcctttctcaagggttgagattgcacatattgctgaacttattgaacttcccacggatcatgtggagcggaagttgtctcagatgattttggacaagaattgctggaacattggatcaaggtgctggatgccttgtcatatttgacgatcctnnnactga

SEQ ID NO: 283133 - DNA, 274 bp, Glycine max
  unsure (1)..(274): unsure at all n locations
atcccactatggaaccaaagtgggcaacttcantgctggatcgtgtgatcggcatggttgagagagataaaaatcacacatgtattatctcctggtctttagggaatgaatctggatttggaacaaatcattttgctttagctggttggattcggggaagagattcatctcgggtattgcattatgaaggaggtggatccaggactccgtgcatgatattgtgtgtcctatgtatatgcgtgtttgggacatggtgaaaatagccaatgatcca

SEQ ID NO: 283134 - DNA, 277 bp, Glycine max
gaattttagaaacagcaccccgcctacttgaagaattaattaagatggcagttataccacggaatgctcagggccatggatggctgaggcctgcaattggtgttgttgagctttctcaatgtatcgtccaggctgttcctcttagtgctagaaagtctactggtggatcacctgaaggaattgcaccatttctgcagttgccacatataagtgagctattattattaagaaggtggcccgcaagtgagaacatttcaggaacttcatgacatggact

SEQ ID NO: 283135 - DNA, 279 bp, Glycine max
ctcttggcgatgatcctcttcttcattgcttcctcttcctctcacctcgttcgcgcttccgatgacgccgacgacgcgatcttctacgagtcgttcgacgaggattttgatggacggtggattgtatccgacaaggaggattacaatggtgtctggaagcatgccaagagtgatgggcatgatgattatggacttcttgttagtgaacaagccaggaatatgctatagtcaaagaacttgccgagtctgtcagtcttaaggatggaacagttgttcttc

SEQ ID NO: 283136 - DNA, 282 bp, Glycine max
  unsure (1)..(282): unsure at all n locations
ctaaaagcaaaatctttgcaggttcttgaaaggtttaaagaggctgcccaatcttgcaaagttattctggatatagtggagtcttcattgcctgaaggcatgcctgataactttggtgctgaatgtaaattgcaggagaccctcaacaaggcagttgagctgcttccagaattatggaaacttgctgattgtccacgtgaagctattttgtcttaccgngagcactccttcatcattggaatcttgatgcagagactatagcaaagattcagaaagaattcg

SEQ ID NO: 283137 - DNA, 281 bp, Glycine max
aacagctgttgcagcaatactaattaatggagtaaagctactggtagccaacattggtgattctcgagcaatatcgtgcaaaaatggtcgagcaaaaccacttactgtggatcatgaaccagagaaggaaaaagatcttattgagagtagaggaggttttgtgtctaagaagccagggaatgttcccagagtggatggccaattagaaatgacacgagtttggagatggaaaactgaaggagcacattacggcagaaccagatgtgacgattcggaagatt

SEQ ID NO: 283138 - DNA, 279 bp, Glycine max
cagcattctgatattctagagtctctgtcgcccaatgtcaggaagcgtgtggaggttcttagagagatccagggtcaacatgatgaattagaggcaaaattttttgaggagagagcagctcttgaggccaaataccaaaaattgtatcaaccactttacacaaagcggtatgaaatagtaaatggtgctacggaagttgaagaaggggcagtgaaaaaacaacaccagatggtgaggaggatcaagagaaaggagtgcctgcattttggcttactgcca

SEQ ID NO: 283139 - DNA, 277 bp, Glycine max
  unsure (1)..(277): unsure at all n locations
agaagatgttcttactggattcaagatgcatgcccgaggttggaggtctatttactgcatgcccaagctcccagcgtttaaaggttctgctcctatcaatctttcagatcgtctgaaccaagtgcttcgatgggctttaggttcggtggaaattctttttagtcgacattgtcccatctggtatggttatagtggaaggctaaagtggctcgagngttcgcatatgtgaacaccacaatctatccagtcacttccattccccttctcatgtattgta

SEQ ID NO: 283140 - DNA, 276 bp, Glycine max
atcgcttccttgttcggagaactggcagcaaattcaatgccgttatactcaagagattgttcatgagcaaggttaacaagcccccattgtctttgtcaaggttgattaagtataccaaggggaaggaagataagattgctgtggtggtgggcaatataaccgatgatattcgtgtttatgaagttccagccttaaaggtcacagcactcaggttacagagactgctcgggcaagaattgagaaggcaggtggtgaatgcttgacgtttgatcagtt

SEQ ID NO: 283141 - DNA, 278 bp, Glycine max
  unsure (1)..(278): unsure at all n locations
atcgagatatctatttagatctcagaaaaacagtgtttcatttcaattcattcagtcttattattattagggtttggcgattcagagagaaagagaaatgggagaacgaaaaggaatcccaattgctctggggctcttggcgatgctcctcttcttcattgcttcttcctcttcctctcacctcgttcgtncttccgatgacgccgacgacgcganttctacgagtcattcgacgaggattttgacggacggtggattgtgtccgacaaggaggatta

SEQ ID NO: 283142 - DNA, 275 bp, Glycine max
ggagtttgacatatccgggactggcataatatatgaaactggtgaccatgtgggtgtttttgctgaaaacggcgatgaaactgttgaagaagctggaaagttgctgggtcaggatttagatttggtattttccattcacactaataatgaggatggtactcctctaggaagttctctgccacctccttttcctggcccttgcacactgcgcttgctttggcacattatgcagatctcttgaatcccccacgcaaggcttctttagtggctctggc

SEQ ID NO: 283143 - DNA, 274 bp, Glycine max
gccatcttcatcacttcttgcatgataacttgaacgctgaaattgttgctggaattattgagaacaagcaagatgctgtagattatcttacatggacattcatgtacaggcggctcacgcagaatcccaattattacaatttacaaggagttagtcacagacatctttctgatcacctctcagagatggtggaaaatactttgagtgatttaaagcgggcaagtgcattacgattgaggatgatatggagcttgctcctctcaatcttggaatg

SEQ ID NO: 283144 - DNA, 277 bp, Glycine max
aatggctgaagcacaactacgagaccagcatggcaaccctgtcccactcaccgatcaatacggtaatccggttatcttaactgacgagcgcggtaatcccgtccaactcactggtgtcgctaccaccgctaccggcacagcaggttctgggtttgggtcctatggtaccggtgcttacggtggtggtgcaagtgcaaccaccgttgcagatctttggcaacccaaccaaggagtggcagggaggctagagagcttcgtcgttcctccagttcaagct

SEQ ID NO: 283145 - DNA, 279 bp, Glycine max
tcttcttctcttgcggctagggttttagcgcagcttcttctagatttaaggaagatgggtaaggaaaaggttcacatcagtattgtggtcattggccatgtcgactctgggaaatccactaccactggtcacctgatttacaagcttggaggcattgacaagcgtgttattgagaggtttgagaaggaagctgctgagatgaacaagaggtctttcagtatgcctgggtgctggacaaacttaaggctgagcgtgaaagaggaatcaccattgatattg

SEQ ID NO: 283146 - DNA, 277 bp, Glycine max
attttgagtatatctacgagtatctgatgtatacaaatatcagctttgtagactgctttaaggatcccggtcctcacggcaatggcaggtattcagatcacatgctacctgaagttgaggtgaaggactttagaaagggtgcacagtggtttgctatgaagcggcaacatgcaattatagtcatggctgataacctttattattcaaaattccgtcttactgccagcctggtttggaggggaagaattgcattgctgatgagcattacttgccaacc

SEQ ID NO: 283147 - DNA, 273 bp, Glycine max
ggagttttgcttaaggagcagggattcaggggctttttccgtggctgggtgcctaccttgcttggttacagtgcccagggtgcttgcaaatttggcttctatgagttctttaagaagtactattctgatattgctggcccagagtatgcaagcaagtacaagaccttgatctaccttgctggttcagcatctgctgaggttattgctgatatgctctttgcccatttgaggctgtgaaggtccgtgtccaaactcagccaggttttgcaaggg

SEQ ID NO: 283148 - DNA, 274 bp, Glycine max
ggtgttgcgattctctttctccattgcaaaacctaacaagcgagagttcgatcacgtttgatggaagattcacacagcaacactgcagcggtgcaagccaccaacgatgacgcctccgccagcaaattgtcatgtgtgaaaaagggatacatgaaagatgattacattcatttgttcgtgagaagacctgttaggagatctccaataattaacgaggttactttgctcgctgggctgctattcggaaacttctatatcagtttcttgatgttga

SEQ ID NO: 283149 - DNA, 271 bp, Glycine max
gtggtccttacgaatgaaaattgccgtagagacagctagtgcattggcttatcttcatgcttctaaaatcattcaccgtgatatcaaaactaacaacattctccttgacaacagtttctatgttaaagttgcagattttggcctttcaagactattccccaatgacatgactcatgtctccacagcaccacaagggaccccgggttatgtgacccggaatatcaccaatgctaccagctaactagcaagagtgatgtgtatagctttggag

SEQ ID NO: 283150 - DNA, 275 bp, Glycine max
aaaaaagcaaaacagagagaacaactgttactcacacacgccatgggtatgtaaatgaatggtttttgagcaacagcagttaaaagagaaaagggattcagcgaagatgacatcggttggtgtggcaccaacttcgggtttgagagaagccagtgggcatggagcagcagctgcggatagattgccagaggagatgaacgatatgaaaattaggatgatagagaaatggaagccacagttgttgatggcaacggaacggagacaggacatatcat

SEQ ID NO: 283151 - DNA, 276 bp, Glycine max
aaaggttgcagtttgataagcagctttcaatggaaaatataaggaaacttattactgaagctgatgggtatcagcctcatcttatagctccagaacaaggatatcgtcgtctaattgaatcttctctaataactattaggggccctgctgaggcagctgttgatgcggttcactcgctgttaaaggacttggttcacaaagctatcagtgagatttggacttgaagcagtatcctggtctccgggttgaggttggggctgctgctgttgattcact

SEQ ID NO: 283152 - DNA, 279 bp, Glycine max
ctctctctcaccaaagccttcctagaacgaaaaaaaaaagaagagcaattttccctcaccaaagaagaagaagcaaacaatggccgatcaacttaccgatgaacagatctccgagttcaaggaagccttcagcttgttcgacaaggacggcgatggttgcatcacaaccaaggagcttggaactgttatgcgttcattggggcaaaacccaactgggcagagctccaggacatgatcaatgaagtggatgctgatgggaatggtaccattgacttccct

SEQ ID NO: 283153 - DNA, 273 bp, Glycine max
caggagtggaatccaaccactgacaaatatatagctgtcaaatatgatgtttcaacagtattggaagcaaaggctcttctgaaagaagccctccaagcagaagttggattgccagtcgacagaaatattcctctcattggtttcattggtaggcttgaagagcaaaaaggttctgatattcttgcagaagccattccccaatttatcaagagaatgttcagttggtagccctaggaacaggaaaaaaacaaatggaaaagcagcttgaggaac

SEQ ID NO: 283154 - DNA, 274 bp, Glycine max
  unsure (1)..(274): unsure at all n locations
caaacaccaacaacgctttagctctctctcttctctccataaccgccaccngcgatactggcactaacagatcgccgctgctacatctgaacccgatccagccaacagatctctccaattcaaatggagaatctaatctctttggtcaacaaaatccagagagcttgcaccgccttaggtgaccacggcgaaaacagtgcactccccacacttgggactctctccccgccatcgccgtcgtcggaggccagagctcaggaaagtcctccgtctt

SEQ ID NO: 283155 - DNA, 272 bp, Glycine max
gagaatggctcccaagggtttaacctttctggctgtgttaatatgcgtttcagcactgtcactgagtccttctgttgcgggggaagggcaaaataatggccttgttatgaacttctacaaggaatcatgccctcaggctgaagacatcatcacagaacaagtcaagcttctctacaagcgccacaagaacactgctttctcctggctcagaacatcttccatgactgtgctgttcagagttgtgatgcttcactgttgctggactccacaag

SEQ ID NO: 283156 - DNA, 269 bp, Glycine max
gcgccaagtcatgattaggccatcctccaaagtcattatcaaattccttttggtgatgcaaaagcacggatacatcggagagtttgagtatgttgatgaccacagggctggtaaaatcgtggttgaattgaacggtagactgaacaagtgtggggttattagtccccgttttgatgtgggcgtcaaagagattgaaggttggactgctagcttctcccctcaagacagtttgggtatattgtattgactacctctgctggcatcatgga

SEQ ID NO: 283157 - DNA, 273 bp, Glycine max
  unsure (1)..(273): unsure at all n locations
gggaaacccaacttaagcgaaaagcaatagaattcaaagagagagtttcttgttctgtattttttgatttgatcatttcaatcttcaatttttttttatatatccaccaatccgcaaagtgcaaatttctaatctttcacgtattgggttcttctcttttccctcttcgtctccgatcgatccaattctcttcccatggctacgatcggacnaacaatctcaatgccaaattggttcttctcggggacatgggtgctgggaaatccagcctcg

SEQ ID NO: 283158 - DNA, 275 bp, Glycine max
aggcaagatgtcgaagagaggacgcggtggttcggcggggaacaagttccggatgtcgctgggtctgccggtggcggcgacggtgaactgcgccgacaatacgggggcgaagaacctctacatcatatcggtgaaagggatcaaagggcgtttgaaccgtctcccctcggcttgcgttggcgacatggtgatggccaccgtgaagaaggggaacccgatctgaggaagaaggttttgccagctgtcattgttcgccagcgcaaccatggcgccga

SEQ ID NO: 283159 - DNA, 276 bp, Glycine max
ctcagtttttcttatacagccactctttcattctcattgccgtcacacagagagagaagagacaatgaagtttaacccaagggtttcctcaagccgtcgaaagagccgcaaggctcacttcaccgctccgtcgagcgtgcgtcgcgtcctgatgagcgcgcctctctcgaccgatctccggtcgaagtacaacgtgcggtccattccggttcgaaggacgacgaggtgcaggtggtgaggggaacctacaagggccgcgagggcaaagtggtccag

SEQ ID NO: 283160 - DNA, 270 bp, Glycine max
  unsure (1)..(270): unsure at all n locations
catcaagatgcgtgagattgctgaggcttacctaggctccacagtgaagaatgctnttgtcaccgtccctgcttacttcaatgattctcagcgtcaagctaccaaagacgctggtgtcattgctggtctaaatgtgatgcgaattatcaatgagcctactgcagctgccattgcatatggtcttgataagaaggccacgagtgttggtggaagaatgtgttgatttttgaccttggtggtgggacatttgatgtgtctttactcaccatt

SEQ ID NO: 283161 - DNA, 269 bp, Glycine max
  unsure (1)..(269): unsure at all n locations
acaagatagctgtaattgaaaacttgggtgctactgaggaccaatttgacacaatagacttatctgacaatgagattgttaaacttgaaaatgtaccatatcttaaccggttgggcacaatgctcattaacaacaacaggattactagaattaatcccaacatcggagagttcttgccaaatttacacactctagttctcacaaacanagaattgtaaacttggttgaaattgatcctttagcatctcttccaaagctgcacttcctta

SEQ ID NO: 283162 - DNA, 274 bp, Glycine max
gggagtttgacatatccgggactggcataatatatgaaactggtgaccatgtgggtgtttttgctgaaaacggcgatgaaactgttgaagaagctggaaagttgctgggtcaggatttagatttggtattttccattcacactaataatgaggatggtactcctctaggaagttctctgccacctccttttcctggcccttgcacactgcgtttgctttggcacattatgcagatctcttgaatcccccacgcaaggcttctttagtggctctg

SEQ ID NO: 283163 - DNA, 260 bp, Glycine max
attcagacacagatggctcgtacgaagcaaaccgctcgtaagtccacaggaggaaaggctcctaggaagcagcttgcaaccaaggctgcacgtaagtctgcaccaactactggtggtgtgaagaagccccaccgttatcgtcctggtaccgttgctcttcgtgagattaggaaataccagaagagtaccgagcttttgattcggaagctccccttccagaggctggttcgtgaaattgctcaggacttcaagactgatct

SEQ ID NO: 283164 - DNA, 254 bp, Glycine max
atttttttcgtgtgttataggaactacgcccgaactcattaattaggcagcatggcagaacgaagggttttcactctctcacaggttgcccaacataaatccaacaaagactgttggctggtgatcaatggcagagtgttggacgtgacaaagttcttggaggaacacccgggaggagaagaggtgattctagaggtagctgggaaggatgcgaccaaagagtttgacgttattggacacagcaaagcagcaca

SEQ ID NO: 283165 - DNA, 253 bp, Glycine max
caagactcttctcatgtgggacaagtaaggaaggggaatcctctattgttgagtggaatgaaagtgaaggagctgtgaaaaggacttatcaaggatttcggaaacgatctttgggtgttgtacaatttgatacaaccaaaaatcgatatttggctgcaggcgatgatttctccattaaattctgggatatggacaatattcagcttttgacaactgttgatgctgatgggggtctccctgcaagcccacgaat

SEQ ID NO: 283166 - DNA, 253 bp, Glycine max
atggcttctcacgacggcatctccgctgcttcttcagattccgtcttcaatcacctcgttcgtgctcccgaagatcctatcctcggggtaactgttgcttataacaaagatccaagtccagttaagctcaacttgggagttggtgcttaccgaactgaggaaggaaaacctcttgttttgaatgtagtgaggcgagttgagcagcaactcataaatgacgtgtcacgcaacaaggaatatattccgattgttg

SEQ ID NO: 283167 - DNA, 250 bp, Glycine max
agcagatgatctgttgctgtaacaagatggatgccactacccccaagtactctaaggctaggtatgatgaaatcgtgaaggaagtctcttcttacttgaagaaggttggttacaacccagacaagattccctttgttcccatctctggttttgagggtgacaacatgattgagaggtccaccaaccttgactggtacaagggccaactctccttgaggctcttgaccaaatcaatgagccaagaggcctc

SEQ ID NO: 283168 - DNA, 254 bp, Glycine max
gcagcacgaggagcagcctcaggaggagaaggatgtctcacaggaagttcgagcacccaaggcacggttcactgggatttcttcccaggaagcgtgctgctcgtcacaggggaaaagtgaaggcattccccaaggatgacccatccaaggcacccaagctcactgcattcttgggttacaaggccggtatgactcacattgttagagaggtcgagaagccaggatcaaagcttcacaagaaggaaacttgtgag

SEQ ID NO: 283169 - DNA, 252 bp, Glycine max
atgctagaatatctgtaatgggtggtgctcaggctgctggtgtgctggcccaaatagagaaaggcaacaagaaaaggcaaggaattcagtggagcaaggaagaagaggataagttcaaagggaaagtggtggaggcatatgagagagaagcaagtccttattactcaacagcaaggctttgggacgatggaataatgatccagcggatacaagaaaagtgattggtttgtgcatctctgcttccttgaaccg

SEQ ID NO: 283170 - DNA, 254 bp, Glycine max
  unsure (1)..(254): unsure at all n locations
gaccaatgtcattgattctgcttatcgcaacggtgctaagaaactattgtttttgggttcctcttgtatttaccccaaatatgcaccccaaccgattccggaagatgctttgcttactggaccgttagagccccaccaatgaatggtatgccattgccaagattgctggggatnaaaatgtgccaggcttacagaattcagcataagtggggtgcaatttctggaatgcccaccaacttatatggaccatacga

SEQ ID NO: 283171 - DNA, 251 bp, Glycine max
  unsure (1)..(251): unsure at all n locations
attcccctttccttgaaaagcttaagaagaaggggttcgaggttctctacatggttgatgctattgacgagtatgctgttggtcagcttaaggaatttgagggaaagaagttggtctctgctactaaggaaggcctgaaacttgacgagagcgaagacgaaaagaaaaagaaggaagaattgaaggagaaatttgagggtctctgccatgtgatcaagggttttttnggntncnaaggggnaaaanttgtg

SEQ ID NO: 283172 - DNA, 250 bp, Glycine max
  unsure (1)..(250): unsure at all n locations
cgcctagccattgatttggaaaagtccaagcttcaaagatgagtaagcttcagagtgatgctcttagagaagctatctcaggaatcatgactgattccaaggaaaagaacaggaaatttgtggagaccattgaactccaaattgggctgaaaaactatgatccccagaaggacaagcgttttagtggctctgttaagttgcctcacattcctcgccccagatngaagatttgtatgcttggagatgccca

SEQ ID NO: 283173 - DNA, 246 bp, Glycine max
ccagccttggacctggtgtgtatcttggtgcagttgagagagcaacatcatttattactgatgatctttggtacggaatttttgcaggaacaaacccagaaacatttgtgcgagctgatggggcattcatcccatttgcagaagatttcaatatgaacaatgtaatcacaactgtaaaaggtgtaggggagatcagtgatgtgaacatcatagatttgcagtctccaatcaacagtctcattggaa

SEQ ID NO: 283174 - DNA, 250 bp, Glycine max
ctgggaacaattgcgaggaaggcaaacaagaacggcgattccggtcacgattatttggaagatagggtgagttttagcgaagacaagcttatggactctgaaagcaaggctgtgatgatggcatgggagaatccgttgatggaggctcatgctaaggcggtttgttccggtggtggccacgtactcaatattgggtttggtatggggctcgtggattcggccattcagcgatatgcacctgcttcacaca

SEQ ID NO: 283175 - DNA, 249 bp, Glycine max
attatcctaagtctttgggaatagtgctgcaatggcttcaagtcaggaggaggtgacccttttgggagctactggaagcccatttgtgtgcagggttcatattgccctcaagttgaagggagttcaatacaaatatgtcgaagaaaatttgaggaacaagagtgaactgcttctcaaatccaacccagttcacaagaaggttccagtgtttattcacaatgagaagcccatagcagagtctcttgtgat

SEQ ID NO: 283176 - DNA, 249 bp, Glycine max
cgcataataaccgtcctaagtttattgagagaattttgcaagtgtgagaaacatggcatctcgtcaaaacaacaagcaagagcttgatgaaagagcaaggcaaggagagactgttgtcccgggtggaactggtggcaagagcctggaggctcagcaacaccttgctgaaggaaggagcaagggagggcaaacaaggaaggaacagctgggtacagaagggtaccaggaaatgggacgcaaaggagggtt

SEQ ID NO: 283177 - DNA, 248 bp, Glycine max
caaagaaggaacaagttttctcaacatactctgacaaccagcctggtgtgcttatccaggtctttgagggtgaaagagcaaggaccagagataacaatttgttgggcaaatttgagctatctggcattcctcctgcacccaggggtgttcctcagattacagtgtgctttgacattgatgccaatggtatcttgaatgtctctgccgaagataaaaccactggccagaaaaataagatcactatcacc

SEQ ID NO: 283178 - DNA, 246 bp, Glycine max
gatttgtgaaagtaagagtgagatctgttcgtataccacagattggtgataaattcagtagtagacatggtcagaaggggacagttggtatgacttatacacaagaagacatgccctggactgtggaaggcattacccctgatattattgtcaatccacatgctattccttctcgaatgacaattggtcagcttattgagtgtatcatggggaaggtggcagcccacatgggaaaagaaggagatg

SEQ ID NO: 283179 - DNA, 246 bp, Glycine max
caagaactgaagtacctggaattcgtgcaattcgcgaccatacaggctctgatgcgctgcgccatcctctactcatacgccaaggagcgcgcgggtcctctgaagcccggtgtcgacaccgtggaggaggccgtgaagaccgtcgtggctccggtctacgataggttccaccttgtccccggcgaggtcctcaaatacgcggatcggaaggttgccgagttagacagccacgttccctccaacgtg

SEQ ID NO: 283180 - DNA, 247 bp, Glycine max
aatttttgccaacagtgtcaactgtactgtctcctgaggttattgagagagaggctgaatcaggaggaaagctcggggaattggattcatatgagattgaaggtggcgaaacaaaagctgaaattcttcagaatctggctgagttccagttttcttgtgtgatgtacaatgccgtgttggagaatgcctgtagtgagcaaggagcaagaatgtctgcaatggacagctctagcaggaatgctgggga

SEQ ID NO: 283181 - DNA, 247 bp, Glycine max
gtttaaacggataaccactcgggtatctccgcatgtcacgtgactccagtgttagtatgacagaaattgtggggcggccgacaaaagcgaggctcttgctcctatgtatcctcaatgtggaactcagacctacgtagttctggataacttgtgagactaaaaatagtctcggtgttttcttcactaaaatgagaacatgctttagtaaagagacaaaacttccaactaatcagagcaacatatgctt

SEQ ID NO: 283182 - DNA, 246 bp, Glycine max
aacacttcttaatttgttacttcgtaactaccttcactacaacctatatgatcaggctgagaagttgaggtcgaaggctcctcgatttgaagcacattcaaaccagcagttttgtcgttatctcttctacctagggaaaattcggacaattcagctggagtataccgatgcaaaagagtctctcctgcaggccgcccggaaagctcctgttgctgcacggggttttcgaattcaatgtaacaagtg

SEQ ID NO: 283183 - DNA, 210 bp, Glycine max
  unsure (1)..(210): unsure at all n locations
ttgttgtttgtgtgtttgttttttctctcacctgaaaatgtcttgctgcggtggtaactgtggttgcggaagcgcctgcaagtgcggcaacggctgcggaggctgcangatgtagccagacttgagctacaccgagtcaaccaccaccgagaccttggtcatgggagtggcaccagtaaggggctcaattcgagagttctgaaatgggtg

SEQ ID NO: 283184 - DNA, 244 bp, Glycine max
  unsure (1)..(244): unsure at all n locations
gtctatcccgagaaggacaccggtagacatcattttggtcgtggttacgacggtgacactaacaagcaacatgatgctactggtgtttatcccggaatagacattggtagagatcatgggactaccggtgtttatggcctaaacaccgacagacatcatggaacttcnggggtgaatcccgggatagacacccataaccaacaacatgggactaccgttggttatgctggtgacactggaaggc

SEQ ID NO: 283185 - DNA, 243 bp, Glycine max
cacaccttcagcagcagcagccatggttctcaaaaccgaactatgccgattcagcggtgccaagatctacccagggaaaggcatcagatttgttcgtggtgattctcaggttttcctgtttgctaactcgaaatgtaagaggtatttccacaacaggttgaagccatcaaagctcacctggactgcaatgtacagaaagcaacacaagaaggacattgctcaagaagctgtgaagaaaagaag

SEQ ID NO: 283186 - DNA, 243 bp, Glycine max
gccgatatcacagtttcatgtgtacccatggatgacagtcgggcatcagactatggactgatgaaaattgataagacaggacggattatacagtttgcagaaaaacctaagggatcagatctaaaggcaatgcgtgttgacaccactcttttagggttattgccacaagaagcagaaaaacatccttatattgcatccatgggtgtctacgtgtttagaactgaaaccttgctgcaactatta

SEQ ID NO: 283187 - DNA, 246 bp, Glycine max
attgcagacagatcatgaagcccaaaggcaacataatgttgaattggtcaagatgcaagagcagtcttctttcagaaaggagcaggcaagacaggctactgaagaacagattcaatctcagcagcgtcagactgagagggagagagctgaaatagaaagagaaactattagagttaaggcaatggcagaggctgaaggccgagcccatgaagcaaaattgactgaggatcataacaggagaatgct

SEQ ID NO: 283188 - DNA, 244 bp, Glycine max
ctcgaagacggcagaactctcgccgattacaatatccagaaagaatcgacgctccacctcgtcctccgccttcgcggtggcatgcaaatcttcgtcaaaaccctaaccggtaaaacgattacgctagaggtcgagtcctctgacaccatcgataacgtgaaagctaagatccaggacaaggaaggcattccaccagaccagcagcgcttgatcttcgccggaaaacagctcgaagacggcagat

SEQ ID NO: 283189 - DNA, 242 bp, Glycine max
caaattaggaacctaattgaggctgctgagcaagagtatgagaaagaaaagctgaatgagagaattgctaaattgtctggtggtgtggctgtgatacaggttggcgcacaaactgagacagagctcaaggaaaagaaattgagagttgaagacgctcttaatgctacaaaggcagctgtagaggaaggtattgttgttggtggtggttgcactcttctgagacttgcatcaaaggtggatgc

SEQ ID NO: 283190 - DNA, 241 bp, Glycine max
gttcttgttcatggagaaccagagagaaatgatatggttgagtacttcggtgaacaattgtcaggctttgccttcaccgttaatgggtgggtgcaatcctatggttcccgttgcgtgaagccaccgatcatctatggtgatgtgagccgcccaaagccaatgaccgtcttctggtcatctctggctcagagctttaccaagcgcccaatgaagggaatgcttaccggtcctgttaccattc

SEQ ID NO: 283191 - DNA, 265 bp, Glycine max
gcagcacgaggagcagcctcaggaggagaaggatgtctcacaggaagttcgagcacccaaggcacggttcactgggatttcttcccaggaagcgtgctgctcgtcacaggggaaaagtgaaggcattccccaaggatgaccatccaaggcacccaagctcactgcattcttgggttacaaggccggtatgactcacattgttagagaggtcgagaagccaggatcaaagcttcacaagaaggaaattgtgagcctgttacaatta

SEQ ID NO: 283192 - DNA, 261 bp, Glycine max
  unsure (1)..(261): unsure at all n locations
gaacccttgncagattataacatccagaaggaatctaccctgcacttggttttgaggcttcgtggtggcatgcaaatctttgttaagactttgaccggaaaaacaataactttagaagttgaaagttctgataccatgataacgtgaaggcaaagatacaggacaaagaggggattccaccagaccagcagaggcttatctttgctgggaagcagctggaagatggtcgtactcttgctgattataatatccagaaggagt

SEQ ID NO: 283193 - DNA, 264 bp, Glycine max
gctcggcaacgtatccaagagcagctaagtgccgtaacagctgatatggtcatgctctccacagatgagccagagaagaaggaaacagcatcaagtaagaaaagtgatggttctgaaaatggtaacacgatgcactacagaaactggttggagaagtgaaagcaatcttgaacaaaggtgttgtggcgagtgaattgcagtcccaaatggaagcaattccatcaccagctcaagaaaagatcagtgctctgattgaggccttat

SEQ ID NO: 283194 - DNA, 266 bp, Glycine max
cgttctattcttcttccaaaatgggtatctctcgtgattccatgcacaagaggcgcgccaccggcggcaagaagaaagcttggaggaagaagagaaagtatgagcttgggaggcagccagcaaacacaaagctataaagaacaagacggttaggaggattagggttcgcggtgggaacgtgaagtggcgcgctttgaggcttgatactgggaactactcttgggggagtgaggctgcaacccgcaagacaaggattcttgatgtgg

SEQ ID NO: 283195 - DNA, 272 bp, Glycine max
gttgagaggaggcactgtggcagaagtcctaggagtgtaaaacagagacgcaaaatgaagacgatcttgtcgtctgagaccatgaatattcccgacggcgtgagcatcaaggttcacgctaaggttatcgaggttgagggccccgtggaaaactcgtgcgagacttccaccatctgaacttggacttccaacttattaccgacgatggcggtaaaaggaagctcaagattgattcttggtttggttctcgtaaaacctccgccgccatccgc

SEQ ID NO: 283196 - DNA, 260 bp, Glycine max
caagtctgttcaagttgcttctgaagtacaggcccgaggacaaagctgaaaagaaggagaggctcttgaaaagggctcaggcagaggctgaaggcaaaactgttgaagctaagaagcctattgttgtgaagtatggtctcaaccatgttacctacctcatcgagcagaacaaagcacagctcgttgtgattgctcacgatgtggaccccattgaattggttgtctggcttcctgctttgtgcaggaagatggaaattccg

SEQ ID NO: 283197 - DNA, 257 bp, Glycine max
ggtcattctcctgaccatcccggggctggacgctctccgaaagggtctggtcgctgtgacccggaacctgctgaagccgttcctctcggttgttcccttctgtctgttccttctcatggacatatattggaagacgagactcgtccaagttgtgaggcagattcctgcaccccgtcggagcaccttcgccaccagaaatccatcatgaagagccagcgcaacgccctcctcatcgccgccgctctcctcttctactg

SEQ ID NO: 283198 - DNA, 259 bp, Glycine max
ctaacgcgtgcagagcagagagagacgcagccatggggcgaagacccgcgaggtgttataggcaaattaagaacaaaccataccccaagtcacggttttgccgtggtgttcctgatcccaagatcaggatttacgatgttggtatgaagaagaagggtgttgatgagtttcctttctgtgtccatctggttagttgggagaaggaaaacgtttctagtgaggccctggaagctgctcgtattgcttgcaacaagtacat

SEQ ID NO: 283199 - DNA, 263 bp, Glycine max
  unsure (1)..(263): unsure at all n locations
ctcttcttctcttgcggctagggttttagcgcagcntcttctagatttaaggnagatgggtaangaaaaggttcacatcagtattgtggttattggccatgttgactctgggaantccactaccactggccacctgattacaagcttggaggcattgacaagcgtgttattgagagatttgagaaggaagctgctgagatgaacaagaggtctttcaagtatgcctgggtgcttgataagcttaaggctgagcgtgaaagagg

SEQ ID NO: 283200 - DNA, 272 bp, Glycine max
  unsure (1)..(272): unsure at all n locations
gtatttctaaggatggacagactcgtgagcatgctcttcttgctttcacccttggtgtgaagcagatgatctgctgctgtaacaagatggatgccactaccccgaagtactctaaggctaggtatgatgaaattgtgaaggaatctcttcctacttgaagaaggttggttacaacccagacaagattccatttgtgcccatctctggtttcgagggtgacaacatgatgagangtccaccaaccttgactggtacaagggaccaactctcct

SEQ ID NO: 283201 - DNA, 269 bp, Glycine max
  unsure (1)..(269): unsure at all n locations
atggatacaagaaagctggcaggaaggagtcataacagagaagaataaaaaagatgaaacaacatttactgttcactttcctgctagtggagaaacgttggttgttagagcttggcatctccgtccatcccttatctggangatggaaaatggattgaatcttacaaagtggggacaaatgacagttctacccatgagggngatacaccaaatgaaaaacgacctaaattgggtagtcatgtggtagatgtaaaagggnaagacaagat

SEQ ID NO: 283202 - DNA, 264 bp, Glycine max
gttcatcaggtgttgtagagagacacatctattgacactgtgaattactcaagagggctcgacaatcccacaaagtagaaaaagaggttatgttatggcgggcaaaggtgttagttcggtggctaaggcggtagcagatatcagtatccttggcgtgagaagttggggaaatataaggatgagcttgccaagggtgtgtggggatactgggagctgggggcatggaagccgctgagtatcagtgctcggcatcgtgctagaatt

SEQ ID NO: 283203 - DNA, 256 bp, Glycine max
  unsure (1)..(256): unsure at all n locations
ctcttcctcagtagtgcgattttcgattctcttctctgcaactatgcctaaccctaaggtcttcttcgacatgaccatcggcggtcaacctgccggccgcatcgtgatggagctctacgccgacgtgactccggcaccgccgagaacttccgcgcgctctgcaccggcgagaagggcgccgggcgganggcaagcccctccactacaaaggctcgtccttccaccgcgtgatcccgaacttcatgtgccagggcgg

SEQ ID NO: 283204 - DNA, 257 bp, Glycine max
  unsure (1)..(257): unsure at all n locations
ggaaaaagagcttcgaaggaaaccttgcaacaaaggcttagtttaaaaaaagctgatcttcctttagtgggaattattactcgattgactcatcagaaaggaatccatctcatcaaacatgccatatggcgcacctagaacntggtggacaggttgtactacttggttcagctccagatcctcgtatccaaaatgattttgngaatttggccaatgaattgcattccgctcatcatgatcgtgctagactttgcctt

SEQ ID NO: 283205 - DNA, 255 bp, Glycine max
gaaactaaagaagatggtaacgaaaaacaaaagggaaaagagaaaaggaggtttatttgtttttccacttcattcgagggtcacaggagcaccatattcctatgtttggatgtccatggcacaagaacatgggtggcgtgttttgcttgatgtgtgtgggctcaaacctaaggaaatgggcaccttgggtatgtcactttttaagcctgatttcatggtttgctcgttctacaaggtttttggagaaaacccttc

SEQ ID NO: 283206 - DNA, 260 bp, Glycine max
gtgaaactgatggggagaattctccaatcatctacactgtcttgcttcctctcctcgaaggtcaattccgagctgttcttcaaggcaatgacaagaacgagatagagatttgcctcgagagtggggataatgcattgagactgaccaaggccttcacatggtttacatgcatgctgggaccaatccctttgaagtcatcaatcaagctgtcaaggctgtggaaaaacacatgcaaacttttcttcatcgtgagaagaaaa

SEQ ID NO: 283207 - DNA, 260 bp, Glycine max
ccgacttggctccgagataacagttgttgagtttgcatcggagattgttccaaccatggatgcggaggtccggaagcagtttcagcgttctcttgagaagcaaggcatgaaattcaagctgaagactaaggtggtggagttgatacttctggggatggtgtgaagctaactcttgaaccagcagctggtggtgatcagactacacttgaagcagatgttgtcctggtatctgctggtaggaccccattcactgccgaact

SEQ ID NO: 283208 - DNA, 258 bp, Glycine max
aagaatcaaagaaaggggtggtggctgcttcgaaagcttaataatttgtttatttccagaacatcatagttttcgcagcagcaaactaacaaattactcatatcatataataagatggcccgttctctctcgaagccaaacgtattggtgtccttgttgctcaatctatctccctaattcccgttcatcggcgaggttacgcagtggcatccgatgtatcggtaagagttggattgggtaatattgggcgaaggaatg

SEQ ID NO: 283209 - DNA, 256 bp, Glycine max
  unsure (1)..(256): unsure at all n locations
aagaagtgaagctgttgagcttttttgcgagtccatttggcaaaagggctgaatgggcattnaaactgaagggtgtggagtatgagtacatagaacaagatatcttcaacaagactagtctccttctccagtgaacccggttcacaagaaggttccggttcttgttcatgcccacaaacccatcgctgagtcattcgtcatcgttgaatacgttgatgaaacatggaagcagtatccactgttgcctcgagaccct

SEQ ID NO: 283210 - DNA, 254 bp, Glycine max
aatacatggagtctctcaaaaacaattataccattgggatgcggttcaaaatgaggtttgaaggtgaagaggctcccgagcaaggtttactggtaccattgttggaattgaagatgctgataccaaaaggtgccaaagtccaaatggagaagtcttaaggtgagatgggatgaaacatcaaacataccacgtcctgagagagtttcacaatggaagatagagcctgctcttgctcctcttgctctgaatcctct

SEQ ID NO: 283211 - DNA, 256 bp, Glycine max
gtccaacctacccctttttcttctcccaccaacttcaccgtcttcttcctcgatcatgtctcacttcaagggcaagtaccatgatgagcttattgccaatgctgcttacattggcactcctggaaagggtattcttgctgctgatgagtcaacagggacaattggcaagcgtttggccagcatcagtgtagagaatgttgaatccaacaggcgtgctcttagggagctgcttttcaccgctcccggtgctcttaaa

SEQ ID NO: 283212 - DNA, 261 bp, Glycine max
  unsure (1)..(261): unsure at all n locations
gcgtcgtggtgatcgacggcagcaccgtgcgcgacttcgtgaacgacgaaaccgccttcancaagagcgtggacgagcagttctcggcgctggacctcaacaacgacggcgtcctctcgcgctcggagctccgcacggccttcgagtccatgcgcctcatcgagacgcacttcggcatcgacgtttccacgccgccggagcagctcgcgaantctacgactccatcttcgacaagttcgacggcgaccggngcggcgccgt

SEQ ID NO: 283213 - DNA, 215 bp, Glycine max
  unsure (1)..(215): unsure at all n locations
agatcttgtagcaatggcgagcgctcccactccacgcgaagagttcgtgtacatggcgaantggcggagcaggccgagcgctacgaggagatggtggagttcatggagaaggtctccgcctccgccgagagcgaggagctgaccgtggaggagcgtaacctcctctccgtcgcctacaagaacgtgatcggcgctcgccgcgcctcctggcgcat

SEQ ID NO: 283214 - DNA, 251 bp, Glycine max
ctaaacctatctttcttctctctctgtgtgtgcgcttcaacggcaaccagaagcagccatggccactgcaaggactgtgaaggatgtttcacctcatgagttcgttaaggcgtactcctctcacctcagcgatccggcaagatggagctgccagagtggactgatattgtgaaaactgcaagatttaaggagttggctccttatgatcctgactggtactatgtcagagctgcttccatggcaagaaagat

SEQ ID NO: 283215 - DNA, 253 bp, Glycine max
gcggaatctgctagaattttctaataatggcgaaagacgttgagcaggtcacagagcaaggtgaatactccgcgaaggactaccatgaccctcctccggcaccgttgatcgacccagatgagctcacaagtggtccttgtacagagccgccatagctgagttcatagcaacactcctttttctttacatcaccgtgttgaccattattggctacaagagacagagtgacaccaaaatccccggtaacaccgaa

SEQ ID NO: 283216 - DNA, 250 bp, Glycine max
tccactaccactggtcacctgatttacaagcttggaggcattgacaagcgtgttattgagaggtttgagaaggaagctgctgagatgaacaagaggtctttcaagtatgcctgggtgctggacaaactaaggctgagcgtgaaagaggaatcaccattgatattgctttgtggaagtttgaaacaacaaagtattattgcacagttattgatgcgcctggacatagggatttcattaagaatatgattac

SEQ ID NO: 283217 - DNA, 252 bp, Glycine max
actttcttcaccgttcgctctttctttctcccctacacaaaacatggctttgcccaatcagcaaaccgtcgattaccccagcttcaagcttgtcatcgtcggcgacggtggcacaggaaagacaaccttcgtgaagaggcatctcactggtgaattcgagaagaaatatgaaccgaccattggtgtggaggttcatccgttggattttttcacgaactgtggaaagattcgcttctattgttgggatactgc

SEQ ID NO: 283218 - DNA, 254 bp, Glycine max
acagctgcagctcagctgatcaagcctgtttcactagagcttggtgggaaaagcccaatcattgtttttgaggatgttgaccttgacaaggctgctgaatggaccatatttggttgcttctggacaaatggtcagatatgcagtgcaacttcccgccttattgtacatgaaagtatagcaacagaatttttgaataggattgtgaaatgggtcaaaaacatcaaaatttctgatcccttggaagaaggttgcag

SEQ ID NO: 283219 - DNA, 257 bp, Glycine max
gtttgttgaagtagatggtgaacgcgatggagtggcagaagcagcgttgttggcaaccaaacagaaacgcggaaatgatgtgcgtgaaagtgatgaccgacgaacagctcgagattctgcgcaaacagattcggtttacgcaacaatctgcgaacaactcatcgagatgcacaaaaacatctctgcacaccaagatctcgcaggtattaggctggggaatatgtattgtgatccattgttggggtctggtggtctca

SEQ ID NO: 283220 - DNA, 261 bp, Glycine max
  unsure (1)..(261): unsure at all n locations
aaagttcaaaggatgcactttgatgcccaacattggttatggctcagacaagaaaacccgccattatctaccaaatggtttcaagaaatttgtcgtgcacaatgtgaaagacctggaacttctcatgatgcatanaggacatactgtgctgagattgctcacaatgtatccacaaggaagaggaaagacatagttgagagagctgctcagcttgatgttgtcttgacgaacaagacggccagactacgtagccaggaggat

SEQ ID NO: 283221 - DNA, 255 bp, Glycine max
  unsure (1)..(255): unsure at all n locations
gnaccgcccgatactctttacgaggggggatttttcaatgctattatgagtttcccatccaattacccaaatagtccaccttcagttaagttcacttcagagatatggcatcccaatgtatatcccgatggccgggtttgcatatcaattcttcatcctcctggtgaggatccaaatggttacgagcttgcgagtgagcgctggacacctgttcatacggtagagagtatagtattgagtatcatatcgatgctt

SEQ ID NO: 283222 - DNA, 252 bp, Glycine max
  unsure (1)..(252): unsure at all n locations
aattgtttaaacctaattctcatttcttcatcgttcgattcttctcctcctaaagatgcagatcttcgtgaaaactttnaccggtaagaccatcacccttgaggtggagtcctccgacaccatcgatacgtgaaagctaagattcaagacaaggaagggatcccacctgaccagcagagacttatctttgcgggtaaacagcttgaggatggtcgaacccttgccgactacaacatccaaaaggnatccact

SEQ ID NO: 283223 - DNA, 249 bp, Glycine max
aaccttaacatcaccgatgacactagagtccgtgctgctgttcccaccatcaagtacttgactggttatggtgctaaagtgatcctttctagccatttgggacgtccaaaaggtgtaacacctaaaacagtttgaagcctcttgtgccaaggctgtctcaacttcttggaattgaggttacgatggccaatgactctattggggaggaagttgaaaagttggttacacaacttccagaaggtggtgttt

SEQ ID NO: 283224 - DNA, 251 bp, Glycine max
atagtgtgggagagagaagagcggaagagaaaatgacgaccaggttcaagaagaacaggaagaagagaggtcacgtcagcgccggacacggccgtatcggaaagcaccgcaagcatcccggaggtcgcggtaacgccggtggcatgcatcaccaccgtatcctcttcgacaagtaccatcctggtttcttcgggaaggtaggcatgcgctacttccacaaacttcgcaacaaattctacaatccgatcatc

SEQ ID NO: 283225 - DNA, 251 bp, Glycine max
  unsure (1)..(251): unsure at all n locations
gccgcttcacccaccgnagcaaccatgatcattcccgagaagaaccgtaaagagatctgcaaatacctcttccaagagggagtttgctttgcgaanaaggacttcaatctngcaaagcacccagagatgatgngccgaatctgcaggtgataaagctgatgcagagcttcanatccagagagtatgtgngggagacatttgcgtggatgcactattactggttcctcaccaacgatggaattgagntcctc

SEQ ID NO: 283226 - DNA, 251 bp, Glycine max
  unsure (1)..(251): unsure at all n locations
gccgatatcacagtttcatgngtacccatggatgacagtcgggcatcagactatggactgatgaaaattgataagacaggacggattatacagtttgcagaaaaacctaagggatcagatctaaaggaatgcgtgttgacaccactcttttagggttattgccacaagaagcagaaaaacatccttatattgcatccatgggtgtctacgtgtttagaactgaaaccttgctgcaactattaagatggaaa

SEQ ID NO: 283227 - DNA, 260 bp, Glycine max
ctaaggtaagtgagtaatcagtggttgagaatggtggagaaggcgaagggtagaaaggaggaggtggttacacgtgagtacaccattaacctccacaagcgcctccatggctgcacatttaagaagaaagctcctaaagctattaaggagataaggaaatttgcccaaaaggccatggggaccaatgatgtgagggtggatgtgaagttgaacaagtttgtctggagccagggaatcaggagtgttccaaggaggattag

SEQ ID NO: 283228 - DNA, 249 bp, Glycine max
  unsure (1)..(249): unsure at all n locations
gttcgaggacctaagcctctcgccanagcttttgaaggggctctatgtggagatgaagtttgagaagccgagcaagatccaggctatcagtttgccgatgatccttagcccgcccaatcgggacctgattgcgcaggcacacaatggctctggcaagacgacttgcttcgtgcttgggatgcttagccgtgtcgatccaaaggtgcaggctccacaggcgctctgcatctgccccacccgggagctggt

SEQ ID NO: 283229 - DNA, 269 bp, Glycine max
gggtttcaggaaaaaagaaaaaggaaaacaatgggttccgataatcaccagaacttggagttcttgaaggagatcggtttgggctcttccaacattggctcttacattaatggccagtggaaagccactggttcttctgtcacttctgttaatccttctaacaatcagagtatagctcaagtgaccgaagcaactttgcaagattttgaggaggggttgcgagcttgcagtgaagcagctaagacatggatgactataccggcaccgaa

SEQ ID NO: 283230 - DNA, 259 bp, Glycine max
aaaaagcaaaacagagagaacaactgttactcacacacgccatgggtatgtaaatgaatggtttttgagcaacagcagttaaaagagaaaagggattcagcgaagatgacatcggttggtgtggcaccaacttcgggtttgagagaagccagtgggcatggagcagcagctgcggatagattgccagaggagatgaacgatatgaaaattagggatgatagagaaatggaagccacagttgttgatggcaacggaacgg

SEQ ID NO: 283231 - DNA, 188 bp, Glycine max
gaatcacaattgatattgccttgtggaagtttgaaaccaccaagtactattgcacagtcattgatgcccctggacacagggatttcatcaagaacatgatcactgggacatcccaagctgactgtgctgttcttatcattgattccactactggtggttttgaagctggaatttcaaaggatggacag

SEQ ID NO: 283232 - DNA, 259 bp, Glycine max
gcgccaatggcaaggtccagatcatccagcagatcaaccatgagggtgaggttaacagggctcgctacatgccccagaaccctttcatcattgccaccaagaccgttagtgctgaggtttatgtatttgattatagcaagcatccctctaagccccctcttgatggtttctgtaaccctgatttaaggcttaggggtcataacactgaaggctatggcttgtcctggagtaagttcaagcagggccacttgcttagcgg

SEQ ID NO: 283233 - DNA, 260 bp, Glycine max
  unsure (1)..(260): unsure at all n locations
ggcaaagcgaggccatgccctcatgtgcttggcacgtgtttcactncttcctctgcgctctaaccctatccgctgctcacggaagcaccacggttcaagacatcgcgagaaagttgaaactcggggacaacgagcttctgcgcacggagaagaagttcaaggttttcatggagaattacgggaggagctactccacagaggaggagtatttgcgccgtttggggattttcgcccagaacatggtcagagcggcggagcat

SEQ ID NO: 283234 - DNA, 257 bp, Glycine max
attaagggtgagatatatagaaaaacaaaggagaaaagatagaaatggagaagtttccagttgttgacatggggaaccttaataatgaagagagatcagcaaccatggagataatcaaagatgcctgtgagaactggggtttctttgagttggtgaaccatgggatatccatagagttgatggacaccgtggagaggatgacaaaagagcactacaaaaagtgtatggagcaaaggttcaaagaaatggtagcaagc

SEQ ID NO: 283235 - DNA, 261 bp, Glycine max
atgggaagcaaagatacgcaattaacagcgtgtcttatgttgccccagacacccctcttaagctcgccgattacttcaaaatctccggtgttttccgccccggaagcatatctgacagacccactggtggcggcatttaccttgacacttctgtgttacaagctgactacagaacttttgttgagattgtcttccaaaacaacgagaaaatcgttcagagctaccatcttgatggctactctttctttgtcgttggtatgg

SEQ ID NO: 283236 - DNA, 262 bp, Glycine max
aaggattgtcttcctcaagttgggcaatggatatgatgaataagaaaatggttaatgggggaacagttaacaactggttctgcataaacttttcgaggaatgttcaagatagtgttgcccgcggtttttgctatgaacttgctcagatgtgttatatatctggaatggcatttacacctgagccagtagttcccccagtcagtgctcgccctgatcaagtggaaaagggtcttaaaactcggtatcacgatgccaagaataa

SEQ ID NO: 283237 - DNA, 260 bp, Glycine max
  unsure (1)..(260): unsure at all n locations
ggaaaatgcagctacgccgggtgcgtgagcgacctcaacaccatgtgccccgttggcctccaagtgcgctcacgcgacaacaagcgcgtggtggcctgcaagagcgcttgctccgctttcaactcccccaggtactgctgcacgggctcctatggaagcccacaggcctgcaagcccaccgtctattccaagatcttcaagaccgcatgccccaaggcctactcctatgcctatgatgncnngnncagcatcgctacttg

SEQ ID NO: 283238 - DNA, 259 bp, Glycine max
agaagagatctgcctcctttttccttcccaaatcaaatctatctcttcttcaagttgaaaatggggctgtcgttcaccaagttgttcagccggctgtttgccaagaaagagatgcgtatactaatggtgggtctcgatgctgcgggtaagaccaccattctgtacaagctcaagcttggagagattgtcaccaccattcccaccattgggtttaatgtggaaactgtggaatacaagaacatcagcttcactgtctggg

SEQ ID NO: 283239 - DNA, 258 bp, Glycine max
  unsure (1)..(258): unsure at all n locations
caaggagcgtatcatggctgcaatgcgtggatcttttgaagaaggttatcgcttgcttccacaatactgtgaacaggtgaaacgcactaatccaggcagtattgcatctgtttatggaaatccagctgatggttgtttccaacgtctcttcatctcctttcaagcatctatatatggcttttnaaanccntggcggccactanggggncttgacagancatatttaaagagcaagtatcttggaacattgcttcttgc

SEQ ID NO: 283240 - DNA, 257 bp, Glycine max
gttcttcatagttcagtgtgtcgtttaaaaatgtcgcagttgctggataaagccaagaacttcgtgtcggagaaggtaaatgatatggccaagccggagggagtgtcactgacgtggacttcaagcgcgtgagcaaagataatgtcgagtacttggccaaggtctctgttcgtaacccttattcaacttccatacccatttgtgagatcaactactctttcaaaagcgcatccagggagatagcatcagggaaaatt

SEQ ID NO: 283241 - DNA, 255 bp, Glycine max
ggttcatccaagtctaaatgactctactggtgttcaatccaagagcattagtaatgacacccttgcaaggctggctaagacagtcttgacgctgaaagaagataaaaaacagaggctgcacaagctccaagaattagcttctcagttaattgatctttggaatctaatggatactcatcccgaggaaaggagactatttgaccatgttacctgtaatatgtcagcttctgttgatgaagtcactgttcctggtgc

SEQ ID NO: 283242 - DNA, 256 bp, Glycine max
  unsure (1)..(256): unsure at all n locations
gcccgttataagtgatacatggatgaacatccatctccgagaagtcatttgtacctctaaagatggagatagattttggcgtatgcctgagtgctacattcgtggcaatancattaagtaccttcgggttcctgatgaggttattgacaaagtccaggaagaaacaaagagccgtactgatcgcaaaccccctggtgtgggacgtggaaggggaagaggtagggatgatggtcctggtggacgtcaacctaaagga

SEQ ID NO: 283243 - DNA, 257 bp, Glycine max
  unsure (1)..(257): unsure at all n locations
gcatttcgttactttcatttgttgtgcaatcttacaagttccaaacttctctattttgttattatttgttctcacttctcacacatacagannnnnnnccttttatattatcatggcttctaaggtggtttcggttttggtnatagcgatgatgttgtttgccatgaactgtaactgcactagtgttggccacatgccttcaaccaaagaggaaggtcacgattttcaggagtctaaagccaagaccacacaaactg

SEQ ID NO: 283244 - DNA, 257 bp, Glycine max
caaggatgctgagaaggcagcatttgaggaggccgagaagaagagggaagaggaggaatcaaaggatgacccagttgactctgatgctgatgaggaagaggaagatgctgatgaagctggcaatgactccgatgctgaatcaaagacggaagctggagaagacaccaaggaagagggtgtacatgatgaactctaggaagtttgcaaaacggataaagagtgagcggaagttatattccggaaagttatatcttttt

SEQ ID NO: 283245 - DNA, 266 bp, Glycine max
ctgagaggaagagagagggagattctttgtttgctaccttctctcggaaaaatggttacgttcaggtttcaccagtaccaggtggttgggagggctcttcccacggaagcagatcagcaccccaagatctaccgaatgaagctctgggccaccaacgaggttcgcgccaagtccaagttctggtattttctgaggaaactgaaaaaggtgaagaagagcaatggccaagtgcttgccatcaacgagatttttgagaagaacccaac

SEQ ID NO: 283246 - DNA, 255 bp, Glycine max
  unsure (1)..(255): unsure at all n locations
tatcacttggatgtgatactttgccggtgctcaagggacgatccccagttcaatgttatgctgatttcatgcgtgctttcagagacactttcaagcacctccttggtgataccattgtggaaatccaagttgggatgggaccagcaggtgagttgcgttacccttcgtacccggagcaaaatgggacatggaaattcccaggaattggtgctttccaatgctatgncanggtatatatatttatgtttttttttc

SEQ ID NO: 283247 - DNA, 252 bp, Glycine max
ccaaggtagatgcaaataatagcatcaagcagcaaagttatttgcctcctgattcactcatgacatggtatcttgctcttgagactggcaatttctggtttcctgctcaggtctataaccgtgagaatggccatgttggatttatgttgtcatgctatgatgctgagcttagctatgatcctcacactgacaccttccaggccagatatccaccacatggaagaagggcagttgcagtagagcatggcattc

SEQ ID NO: 283248 - DNA, 253 bp, Glycine max
ggcgctttgatgacgctcaaacacaaaaggagatgaaaatggttccattcaagattgttaaggctccaaatggagatgcgtgggtggaagccaatgggcagcagtattcccctagtcaaattggtgcctttgttctcaccaagatgaaggaaactgcagaagcttatctaggaaagtcaatttctaaggctgtaattactgtaccagcttacttcaatgatgctcagaggcaggcaacaaaagatgctggtag

SEQ ID NO: 283249 - DNA, 258 bp, Glycine max
gaaagtccttgaagttattgtagaaaaggggatgcagaatgggcagaagataacattccctggcgaactgatgaagcgccggacacaattactggggatatcgtctttgtccttcagcagaaggaacatcccaaattcaaaagaaaggctgaagatctttttgtagagcacactttgtcccttaccgaggccttgtgtggcttccaatttgtgctgactcacttggatagccgtcagcttcttattaaatcaaatccc

SEQ ID NO: 283250 - DNA, 264 bp, Glycine max
  unsure (1)..(264): unsure at all n locations
cgcagagccacacttcttcgccgtttcagctgaagagccatccgcaggtaagcaatggttaagcataataatgttatccccaatgggcacttccggaaacactggcaaaactatgtgaagacttggtttaatcaaccagcccgaaanaccagaaganggttggntcggnagaagaaggctgtcaagattttccccaggcctactgctggatctctcagggcctattgttcatggccagactctgaaatacaacatgaaagtcag

SEQ ID NO: 283251 - DNA, 253 bp, Glycine max
  unsure (1)..(253): unsure at all n locations
gggaattggaaaggaggattgatgtcataccttgaagaatttgagtcaagaagcaaggggtcaaccacaattgaggactttttttttgtaattttgtaattgacaatttgctttgctttcaaattttgtaacaaaaaggtctttcattggaagtaagttgggagcctccaataggtcaccctacttccatttgtgtgtaataattttaggcaattttcccttaggatantgagtgttttgttgggaaccttaa

SEQ ID NO: 283252 - DNA, 253 bp, Glycine max
  unsure (1)..(253): unsure at all n locations
aaactgcaaagattgttaggggaataattgactcggttgctaaaattccagggacatctgatctacaaattgcactctgcaaagaaatggtgctgtggactcgtgctgaaaagcgtaccnttctgagacagcgagttgaggcaaggcttgcagcacttctgatggaaagtaaggagtattcagaagctttgactcttctctctggcttggtcaaagaagttaggagattagatgacaagcttcttcttgttga

SEQ ID NO: 283253 - DNA, 252 bp, Glycine max
  unsure (1)..(252): unsure at all n locations
gcagctaagaaaacagcgcgaggaggggaacacctatttctaccaaagtcgtacagttctgaacaaagcacgggagctggctgcaaagaaagatattaatgctcttgatgaagtttcacagacagaggttgagaaatttatggcactctggaacaaggacaaagcatttaggantgattatganaaaagaattttggcctcattggatatgcgacagttgagtcgggacggacggatgaggaacccggatga

SEQ ID NO: 283254 - DNA, 259 bp, Glycine max
  unsure (1)..(259): unsure at all n locations
acccgattcaagaagaaccgcaagaagcgcggccacgtgagcgccggtcatggccgtatcggaaagcaccgtaagcnccccggcggccggggaaacgccggtggcatgcatcaccacaggatcctgttcgacaagtaccatccgggcttcttcggtaaggtgggaatgaggtacttccataagcttcgcaataaattctactcccccatcgtcaacgtcgaaaagctatggtctctcatancccaagacgcgaaggaaa

SEQ ID NO: 283255 - DNA, 253 bp, Glycine max
  unsure (1)..(253): unsure at all n locations
ctttcctatttccaactatgagaaggaactggaggagatgaagaacatgactaggcaagagtttgttgcttctcttcgtaggaagagcagtggtttctctagaggggcctctatatacagaggagtaacgagacaccaccagcatggccgatggcaggcgagaataggcagagttgccggnaacaaagacctctaccttggcactttcagcacccangnagaagctgctgaggcctatganattgctgctatc

SEQ ID NO: 283256 - DNA, 251 bp, Glycine max
aatttgaacagaaaggtttcactggcggcctaaactactatcgcgctatggacctaacctgggagctcacagcagcatggactggagtacagattaaggtaccagtcaagtttattgtgggagaccttgacattacatacaacactccaggtgttaaggagtatatacataatggtggctttaagagagacgtaccattcttgcaagaattggttgtgatggaaggagtagctcactttataaatcaggaa

SEQ ID NO: 283257 - DNA, 248 bp, Glycine max
  unsure (1)..(248): unsure at all n locations
gtggcatgaaggttttcaatgatgccatcgaagctttacgaatctcatataagaagatgaatcctttttgtgtaccttttgcnacaacaaatatgggttctgccatgcttgcnatggatctgggatggatgggccctaattattctatctctacagcttgtgctacaagtaacttttgtatattgaatgcagcaaaccatatcattagaggtgaagctgatgtgatgctttgtggaggctcagatgct

SEQ ID NO: 283258 - DNA, 255 bp, Glycine max
  unsure (1)..(255): unsure at all n locations
cctaagtgaganacaaagaaaggaaataattgatctttgaaaatgcagggaggaaagaaagctggagagtccatcaaggaaacagctgcaaacattggtgcttctgccaaggctggcatggagaaaaccaaggccactgtccaggagaaggcagaaagaatgacggcacgtgatccgatgcaaaaggagttggcaacccagaagaaagaggcaaagatgagccaggcagagctggacaagcaggcggcgcgtcac

SEQ ID NO: 283259 - DNA, 251 bp, Glycine max
  unsure (1)..(251): unsure at all n locations
agggatcatctatttcagatcaaaaagcaattaaagagaagaagaagaaagcaaaacgatcgagaaagaaacagcttgttcaggaagaggagaggattagaggtagagtcagcatgaaggtgtatctttcatacatggcagcagcatataaaggcttattgattccactcataatcattgcncaaacattatttcnntnccttcagattgcaagcnattggtggatggcttgggctaaccctcaaacagaa

SEQ ID NO: 283260 - DNA, 248 bp, Glycine max
aagccctctgcaattcaacaaagggggattgttcctttctgcaaggggcttgatgttattcagcaagcacaatctggaactggaaaaactgctaccttttgttctggagttttgcagcagcttgattacagcttagtagaatgccaggcactggttcttgctcccactcgtgaacttgcacaacaaattgaaaaggtcatgcgagcactaggggactatcttggtgtcaaggttcatgcttgtgttgg

SEQ ID NO: 283261 - DNA, 246 bp, Glycine max
  unsure (1)..(246): unsure at all n locations
tattcatattgttgatcatatngatttagatgtctggagtgtacctgaagtactgaggccgctgtatgaatcatcaaaaatcttggctcagaagttgacaattgctgccttgcaacatataagacagaagcactagaatcaagtggagaaattcagtatggtggtggacgccagcctgctgttttaagaacatttagccagagactttgcaggggctttaatgatgctgtgaatgggtttgttgat

SEQ ID NO: 283262 - DNA, 255 bp, Glycine max
gaatgtggggattctcgctatcgacatctacttccctcccacctgtattcagcaggaattgctggaggctcatgatggtgccagtaaagggaaatatactattggacttggtcaagattgcatggcgttttgtacagagtagaagatgtcatctcgatgagtttgacagtagtttcttcccttcttgaaaagtatgcgattgatcctaaacaaattggtcgtctggaagtaggcagtgagactgtgattgacaaa

SEQ ID NO: 283263 - DNA, 254 bp, Glycine max
agccacttgagagaaaatggcggtgcctctgctctcaaagaagatcgtgaagaagagggtaaagaagttcaagaggcctcagagtgacaggaaaatttccgtcaagactaactggcgcagaccaaagggtatcgattccgtgttaggagaaagttcaagggatgcactttgatgccaaacattggttatggttcagacaagaagacccgccactatctccctaatggtttcaagaaatttgttgttcacaatgt

SEQ ID NO: 283264 - DNA, 251 bp, Glycine max
atggaacgtggtggacttgcagagaaggtggtcagagacaaagttttggtatttcgttttactgatgttgggaaacttccccctccagttctccagtttgttgaggtgtcatttggttatactcctgataatctcactacaagaacattgactttggggttgatttagattctcgggttgcgctggttgggcccaatggtgctgggaagagtacactactgaagctaatgacaggtgacttgatgcctagt

SEQ ID NO: 283265 - DNA, 251 bp, Glycine max
caaagaatcaaagaaaggggtggtggctgcttcgaaagcttaataatttgtttatttccagaacatcatagttttcgcagcagcaaactaacaaattactcatatcatataataagatggcccgttctctctcgcagccaaacgtattggtgtccttgttgctcaatctatctccctaattcccgttcatcggcgaggttacgcagtggcatccgatgtatcggtaagagttggattgggtaatattgggc

SEQ ID NO: 283266 - DNA, 201 bp, Glycine max
  unsure (1)..(201): unsure at all n locations
cttccgaagggtttgggtgttctgaaatctgaccatggtttgtatnntgaccccactacgagaccctttgtggagacttttgcgaaggatcaaaatagattctttcaggtttttgctagggccatgcagaagttagtctcttgaatgtgcagactgggaggaagggagagatcaggcgcaggtgtgatcagattaattgat

SEQ ID NO: 283267 - DNA, 248 bp, Glycine max
gcgatatgtgacatggtggcgattgctaggtatttaaacgtgacgcttatagtgcctgaattggataaagcgtctttttgggctgaccccagtgagttccaagacatctttgatgtggatcattttattacatcttgagggatgaagtgcggatattgaaagagttgcctcctagactcaagacgagagtggacaatggtttactttacaccatgccaccgattagttggtctgacatatcatactat

SEQ ID NO: 283268 - DNA, 249 bp, Glycine max
ggctgccgcaacctcggcgaggccctccgccgcatccgcgagggcgccgccatgatccgcaccaagggcgaggccggcaccggcaacatcatcgaggccgttcgccacgtccgctccgtcatgagcgacattaggttctccgcaacatggacgacgacgaggtcttcaccttcgccaagaacatcgctgcgccttatgacctcgtcatgcagaccaagcagcttggccgcctccccgttgtccacttcg

SEQ ID NO: 283269 - DNA, 252 bp, Glycine max
  unsure (1)..(252): unsure at all n locations
gctcaagaggtcccaactcgatcacgccacagatcctgangccagatctcatcgcgccaggtgtcaacatcctagcggggtggtctaaagccgtggggcccaccgggttgcccgttgataacaggcgcgtggattcaacatcatctctggcacctccatgtcgtgccctcacgtgagcggcttagccgcgctgatcaaatcggctcaccctgattggagcccagccgcggtgagatcggctctgatgacaac

SEQ ID NO: 283270 - DNA, 249 bp, Glycine max
  unsure (1)..(249): unsure at all n locations
gtagaaggagcagagccgatgtggtagagcagttcctcccagaccacaatgaatccatttctgcagttcttgacaagtttggtgccatgggaattgacacccccggcgtagttgcattgcttggagcacacaggttggtcgancccattgtgtgaagttggtgcaccgtttgtacccagagattgatccagctctgaaccctgaccacgtccctcacattctgaagaagtgccctgatgccattccaga

SEQ ID NO: 283271 - DNA, 246 bp, Glycine max
  unsure (1)..(246): unsure at all n locations
cttgagtcttcactctcttagtggaagttcctcagnggagtggattcagggatctttagtttctcaaaggcagccattgacttggtacaaaacaacatttgacgcgccagctgggactgcaccattggcttagacatggacagcatgggcaaaggtcaagtgtggttaaatggacagaatcttggccgctactggcctgcttataaagcatccggtacctgtgattactgtgactatgctggnact

SEQ ID NO: 283272 - DNA, 249 bp, Glycine max
  unsure (1)..(249): unsure at all n locations
gagaatactaaatttcaaaagaaattacagaacaatgagcagatgtcaggtctgaagcatctagtacatggagcaaagcagcatcacaatgtgaaaaatgncatatgtatngcatgcactagctggttattgggtggagtgaagccagcagcaaccggccatggnacattatgacactgccttggcatatccagtgcagtcaccaggcgtgctaggaaaccaaccagacattgtcatggacagcttggt

SEQ ID NO: 283273 - DNA, 176 bp, Glycine max
tgtctttgcttcccaggtggtggtgcagacggagggaagagtgtgtgagtcacaaagccagggttccatggtttgtgtaatagagaccacaactgtgctttggtctgcaggaacgaaggttttcccggtggcaggtgcaaaggcttccgccgccgctgcttttgcaccaggatttg

SEQ ID NO: 283274 - DNA, 247 bp, Glycine max
cgctcagtcaggatgcacgctgagaaaaccggaaacaacgcctatctcaaccttatcccgctccttgttggcaatgtgggattgattttcaccaaaggtgacctgaaggaggtcagtgaggaggttgccagtacaaggttggagctcctgctcgtgttggtttggttgccccaattgatgttgttgttcctcctggcaacacagggctcgatccctcccagacctctttcttccaggtgctcaacat

SEQ ID NO: 283275 - DNA, 245 bp, Glycine max
ggcgttcctgcggctattaagcgcgccaacccccagtctgagcaaggcctggctgaatttgagacagaaatcgagatgctgtccaaattcagacacaggcatctcgtgtccttgattggtttctgtgaaagaagaatgaaatgatcttggtttatgagtacatgttaaatggaactcttagaagccacctatttgggagtgatcttcctcctctatcttggaagcagcgcctagaagtgtgcatc

SEQ ID NO: 283276 - DNA, 244 bp, Glycine max
  unsure (1)..(244): unsure at all n locations
tgataatggctcgctcgttttcacgcgggtctctgcttcctctcgccatcgtttccttagtatgtctatttgtgatttccattgcaaaggaggaagccaccaagttggggacggtcattgggattgatctggaacaacctattcatgtgttggtgtttacaagaacggccatgttganatcatagccnatgntcaaggtaaccgtatcaccccatcgtgggttgctttcaccgacagtgagaga

SEQ ID NO: 283277 - DNA, 244 bp, Glycine max
  unsure (1)..(244): unsure at all n locations
caaagaatcaaagaaaggggtggtggctgcttcgaaagcttaataatttgtttatttccagaacatcatagttttcgcagcagcaaactaacaaattactcatatcatataataagatggcccgttctcctcgcaagccaaacgtattggtgtccttgttgctcaatctatctccctaattcccgttcatcggcgaggttacgcagtggcatccgntgtatcggtaagagttggattgggtaat

SEQ ID NO: 283278 - DNA, 200 bp, Glycine max
ttgttgtttgtgtgtttgttttttctctcacctgaaaatgtcttgctgcggtggtaactgtggttgcggaagcgcctgcaagtgcgcaacggctgcggaggctgcaagatgtacccagacttgagctacaccgagtcaaccaccaccgagaccttggtcatgggagtggcaccagttaaggctcaattcgagagtgctga

SEQ ID NO: 283279 - DNA, 243 bp, Glycine max
gtttgaaattgctttgagggactacaaggcacagttggaggaagacccaattgtacacaggcacctttcatccttgtacgatacccttatggagcagaatctctgcaggttgatcgagcctttctcaaggttgagattgcacatattgctgaacttattgaacttcccacggatcatgtggagcggaagttgtctcagatgattttggacaagaagtttgctggaacattggatcaaggtgct

SEQ ID NO: 283280 - DNA, 243 bp, Glycine max
aaactctgcaaacatgttggtttatcaggacctccttacaggtgatgagcttctctcggactccttccgttacaatgaaattgagaatggaatgctgtgggaagttgaggggaagtgggttgttaaggagcagttgatgttgacattggtgcaaacccttctgctgagggtggagaagatgagggagtcgatgacgcagctgttaaggttgttgacattgttgatacattcagacttcaggag

SEQ ID NO: 283281 - DNA, 248 bp, Glycine max
aaaggggtggtggctgcttcgaaagcttaataatttgtttatttccagaacatcatagttttcgcagcagcaaactaacaaattactcatatcatataataagatggcccgttctctctcgcaagccaaagtattggtgtccttgttgctcaatctatctccctaattcccgttcatcggcgaggttacgcagtggcatccgatgtatcggtaagagttggattgggtaatattgggcgaaggaatgg

SEQ ID NO: 283282 - DNA, 249 bp, Glycine max
gattaactctttcttctcataactctgccgccgcaacagccccaaatccaatggcttcagagaagaaactttcgaacccaatgagggagataaaggtgcagaagctcgtcctcaatatctccgttggcgaagtggagatcgtctcaccagagccgctaaggttttggaacagcttagtggccaaacccctgtgttttccaaagcaaggtacacggttcgttcctttgggattagaagaaatgagaagat

SEQ ID NO: 283283 - DNA, 246 bp, Glycine max
gaagattggtcccaacgagccatctgagctgtctatccatgagaacgcctatggcttggctagatacgctgtcatatgccaggagaatggcctggttcccattgttgagcctgagatccttgttgatgacctcatgacattcacaagtgtgccgccgtcaccgagcgtgtccttgcagcatgctacaaggctttgaatgatcaccatgtccttcttgagggtaccctattgaagccaaacatggtc

SEQ ID NO: 283284 - DNA, 245 bp, Glycine max
gggatctattccttctggaaatgatcaatctaagttacaagataaagatatcaatgcaccagttgggattccttccatacctgccatacaaaagaaacctgctgttgcaattaggccatctacaagtggtcatcaagagaacagtcagatgatgaggacattgagggagagacatctatgaatgacaacacagaccctgctgatgtaaaacgagtaaggaggatgctatccaatagggagtcagc

SEQ ID NO: 283285 - DNA, 241 bp, Glycine max
acctaagtgagaaacaaagaaaggaaataattgatctttgaaaatgcagggaggaaagaaagctggagagtccatcaaggaaacagctgcaaacattggtgcttctgccaaggctggcatggagaaaccaaggccactgtccaggagaaggcagaaagaatgacggcacgtgatccgatgcaaaaggagttggcaacccagaagaaagaggcaaagatgagccaggcagagctggacaagc

SEQ ID NO: 283286 - DNA, 240 bp, Glycine max
gcttgttggaaattggagatgagtcagaggggtttaatatatagctttgttgccaaaggaactgttgttttagcagagcacacgcaatataccgggaatttcagtaccattgccgttcagtgcctcagaagctgccatcaaatagcagcaaatacacgtattcctgtgatggtcacaccttcaatttcctcctagacaatggatttgttttccttgttgttgctgatgaatcgattggca

SEQ ID NO: 283287 - DNA, 241 bp, Glycine max
  unsure (1)..(241): unsure at all n locations
tgcgtctcccaggtctgggtccgagcctacctcgacccgaaccgcaacgtcgtctacgaagccgactccgactccggcctcancaagggcctcgccgcgctcctcgtccagggtctctcgggtcgcccgttaacgaaatcattcgggtcacgcccgatttcgccacgctgttagggttgcagcagagcttgaccccttcgagaaacaacgggttcttgaacatgctgaaattgatgcagag

SEQ ID NO: 283288 - DNA, 244 bp, Glycine max
aggagtggaatccaaccactgacaaatatatagctgtcaaatatgatgtttcaacagtattggaagcaaaggctcttctgaaagaagccctccaagcagaagttggattgccagtcgacagaaatatcctctcattggtttcattggtaggcttgaagagcaaaaaggttctgatattcttgcagaagccattccccaatttatcaagcagaatgttcagttggtagccctaggaacaggaaaa

SEQ ID NO: 283289 - DNA, 240 bp, Glycine max
  unsure (1)..(240): unsure at all n locations
caaagaatcaaagaaaggggtggtggctgcttcgaaagcttaataatttgtttatttccagaacatcatagttttcgcagcagcaaactaacaaattactcatatcatataataagatggcccgtctctctcgcaagccaaacgtattggtgtccttgttgctcaatctatctncctaattcccgttcatcggcgaggttacgcagtggcatccgatgtatcggtaagagttggattggg

SEQ ID NO: 283290 - DNA, 239 bp, Glycine max
aaagaatcaaagaaaggggtggtggctgcttcgaaagcttaataatttgtttatttccagaacatcatagttttcgcagcagcaaactaacaaattactcatatcatataataagatggcccgtctctctcgcaagccaaacgtattggtgtccttgttgctcaatctatctccctaattcccgttcatcggcgaggttacgcagtggcatccgatgtatcggtaagagttggattggg

SEQ ID NO: 283291 - DNA, 244 bp, Glycine max
cacaaatggagcaaactttgcagtggtggggtcctctactctcccaaaatatgttcctttctccctcaatatacaggtcatgcagttccggcgtttcaaagctcgctcccttgaacttgttaccgcgtgcaagaaatttgatcaatgatgaaggcttccgtgatgcactctacttgattgatattggacaaaatgaccttgctgattcatttgccaaaaatctgtcatatgcgcaagtcatcaa

SEQ ID NO: 283292 - DNA, 267 bp, Glycine max
gagacaggctgctaagagcattgtggcaagtggacttgccagaaggtgcattgtgcaagtgtcttatgccattggtgtgcctgagcctttgtctgtgtttgttgacacctatggcactgggaagatccatgataaggagattctcaacattgtgaaggaaaactttgatttcaggcctggtatgatctccatcaaccttgatctcaagaggggtggaaataacaggtttttgaagactgctgcctatggacactttggaagagaaga

SEQ ID NO: 283293 - DNA, 276 bp, Glycine max
gtctcccctgcaatcaacggcaccccccacaaaaatgacaggagagacagtgaacccaaaagcttaccctttggccgatgcgcaactcgcaataacaatcttggatcttgtgcaacaagctgccaactacaagcaactaaaaaagggtgctaatgaagcgactaagacactgaacagaggcatttctgagttcgttgtgatggccgcagacactgagcctcttgagattcttctccatcttcctctccttgctgaggataagaatgttccctatgt

SEQ ID NO: 283294 - DNA, 273 bp, Glycine max
gcgttgttggagaacaatcagaggaaaaagattggagggtgaaccgaaaaaaacaattcagaaaatggagaacaacgcattcagagatcaaatcatggaggacaatgaacatgaagaaatgcctgattcctttgtttgctgcgtttgtctggatctattatacaagcccattgtgctatcttgtggtcacatgtgctgtttctggtgtgtctataattcaatgagttgtctgcgggagtctcaatgtccagtatgtaggaatcaatactatca

SEQ ID NO: 283295 - DNA, 274 bp, Glycine max
gtgctcttccttgagcatccagcagcaacaaacaagaggggtttgccttgtgccgtttgtgttgttttcgggacgaagaagaagatggtgtcaggttctggaatctgcgcaaagcgggtggtggtggacgcgcgccaccacatgctgggtcgtctagcctccatcgtggcgaaggagcttctgaacggccagaaagtggtggtcgttcgctgtgaagagatttgcatctcgggcgggctggtgaggcagaagatgaaatacttgaggttccttc

SEQ ID NO: 283296 - DNA, 267 bp, Glycine max
gatctcgattagccgaaaattgcaagaacggcttcaggctcttgcgatcaacaaacgcagcgttttgatctcagatttgagggggagagaatggcaacaacagtgagaagtctgaagataaagacaagtacgtgcaaacgtatagtgaaggagctgcattcttatgagaaggaagttgagagagaagctgccaaaacagctgatatgaaggaaaaaggagccgatccctatgatctcaagcaacaggaaaatgtcttggctgagtct

SEQ ID NO: 283297 - DNA, 271 bp, Glycine max
accagagagggtaactttgaccttgttggaaacaaccttcccgtcttctttgtacgtgacggcatgaaatttccagatatggttcatgctcttaaacccaatcccaagaaccacttccaagagaattggaggatccttgacttcttctctcactttccagaaagccttcacatgttcacctttttatttgatgatttgggtgttccacaagattacaggcatatggatggttttggagttaacacatatacgctgatcaacaaggctgggg

SEQ ID NO: 283298 - DNA, 270 bp, Glycine max
caaagaaaggggtggtggctgcttcgaaagcttaataatttgtttatttccagaacatcatagttttcgcagcagcaaactaacaaattactcatatcatataataagatggcccgttctctctcgcaagccaaacgtattggtgtccttgttgctcaatctatctccctaattcccgttcatcggcgaggttacgcagtggcatccgatgtatcggtaagagttggattgggtaatattgggcgaaggaatggaatcgtgggaggtgta

SEQ ID NO: 283299 - DNA, 271 bp, Glycine max
  unsure (1)..(271): unsure at all n locations
ctctgatgctgatgctcctaccatatttgacaagatcatcaataaggagattccttctactgtggtttatgaggatgacaaggtgcttgccttcagggacataactcctcaagctcctacacatattcttatcattcctaaattcaaagacgggttaagtggtctatccaaggctgaggagaggcactttgagattcttggccgccttctgtacactgccaagctggttgcgaanaaggaaggactcgacgacggcttcaggattgtaatt

SEQ ID NO: 283300 - DNA, 272 bp, Glycine max
gcgccaagtcatgattaggccatcctccaaagtcattatcaaattccttttggtgatgcaaaagcacggatacatcggagagtttgagtatgttgatgaccacagggctggtaaaatcgtggttgaattgaacggtagactgaacaagtgtggggttattagtccccgttttgatgtgggcgtcaaagagattgaaggttggactgctaggcttctcccctcaagacagtttgggtatattgtattgactacctctgctggcatcatggatc

SEQ ID NO: 283301 - DNA, 274 bp, Glycine max
  unsure (1)..(274): unsure at all n locations
ggcgagtgagtcgcaaaactgggtgttcatggtcactgcacagacaccaaccaacattgccgttatcaagtattgggggaaaagagacgaaaccctcatcttaccggttaacgacagtatcagtgtcactctcgatcccagccacctctgcaccaccaccactgctgccgtcagtcccgctttccaccaagatcgcatgtngctcaatggaaaggagatttctctttctgggggcaggttccagagctgtttaagggagatccgtgctcgtgct

SEQ ID NO: 283302 - DNA, 267 bp, Glycine max
gcgcaagaaaacaaaatccccaaaatatctctcgctctgaaaccgccatggatttgcagcagagcgagttcgatcgcctcctgttcttcgagcacgctcgtaaggccgcagaagccgaatacgagaagaaccctctcgacgctgataacttaacaagatggggtggagctttattagagttgtctcagtttcagagttttcctgaatcgaagaaaatgacccaagaggctgtttcaaagctagaggaggcgcttgcggtgaatccca

SEQ ID NO: 283303 - DNA, 276 bp, Glycine max
ctcgcaccggtcagggtaaaactctggcatttgtgttgcccatattagagtctttaataaatggtccaacaaaagcttcaagaaagactggcttcgggaggactccaagtgttcttgtgcttctacctactagggaattggcctgtcaggtgcatgctgattttgatgtttatggtggggcaatgggattgagttcatgttgtttatatggcggactccgtatcaaggtcaggaaattaagcttaggagaggtgttgatattgtcattggcacacc

SEQ ID NO: 283304 - DNA, 260 bp, Glycine max
  unsure (1)..(260): unsure at all n locations
gaatcaaagaaaggggtggtggctgcttcgaaagcttaataatttgtttatttccagaacatcatagttttcgcagcagcaaactaacaaattactcatatcatataataagatggcccgttctctctngaanncnanacgtntgggccnctggcagctaaatccctnntnncgttcccgttgagcggngnncttcngtggngtccgcngtntcggganaaganttggntngggaaattgggggcgaggaangtnatcgg

SEQ ID NO: 283305 - DNA, 262 bp, Glycine max
  unsure (1)..(262): unsure at all n locations
caatgtcgttgattccaagtttcttcggcaccgggcgaagaaccaacgtcttcgaccccttctccctcgacgtgtgggacccattccatggcttccccggcaccaccgccctctcagttcngngttccnanacggnggctttngcnaacacgcgcatcgactggaaggagacggcggaggcgcacgtgttcaaggcagacctgccggggctgaagaaggaagaggtgaaggtggagatcgaggaggagggaagggtgctgca

SEQ ID NO: 283306 - DNA, 266 bp, Glycine max
gtggccatgatccgtttgatatcttttcatctttctttggaggtggaagtagtcgaggtaggaggcagaggcgcggagaagatgtggttcaccctctcaaggtctctctggaggacctttatctcgggacttctaagaagctctccctctccagaaatgtcatatgctccaagtgcactggtaagggttctaagtctggtgcttcgatgaagtgtgctggttgtcaaggaactggtatgaaggtttctataagacatcttggcccg

SEQ ID NO: 283307 - DNA, 270 bp, Glycine max
atcgtctcaccagagcctccaaggtgttggaacaacttagtggccaaaccccagtgttttccaaagcaaggtacactgttcgttcctttgggattagaagaaatgagaagattgcatgctatgtcactgtcagaggtgacaaggcaatgcaacttttggagagtggtttgaaggtgaaggaatatgaacttctcagaaggaacttcagtgatactggttgcttcggctttggtattcaggagcatattgatttgggaatcaagtatgatc

SEQ ID NO: 283308 - DNA, 273 bp, Glycine max
aatacatggagtctctcaaaaacaattataccattgggatgcggttcaaaatgaggtttgaaggtgaagaggctcccgagcaaggtttactggtaccattgttggaattgaagatgctgataccaaaaggtggccaaagtccaaatggagaagtcttaaggtgagatgggatgaaacatcaaacataccacgtcctgagagagtttcacaatggaagatagagcctgctcttgctcctcttgctctgaatcctctaccaatgcccaggcctaa

SEQ ID NO: 283309 - DNA, 274 bp, Glycine max
cgggaaagacaatcacccttgaggtcgagagctccgacaccattgacaacgttaaggctaagattcaggacaaagagggtatccctccagatcaacagaggctgatctttgctggaaagcagcttgaggatggccgtacccttgctgattacaacatccagaaggagtccactcttcatttggtactccgtctacgtggtggaatgcaaatctttgttaagactctgaccggaaagacaatcacccttgaggtggagagctctgacaccattga

SEQ ID NO: 283310 - DNA, 129 bp, Glycine max
  unsure (1)..(129): unsure at all n locations
gcatcttaccggtgaatttgagaagaaatacgaanccgaccattggagtggaggttcacccattggatttcttcacaaactgtggaaagattcgcttctactgttgggatactgccggacaagagaagt

SEQ ID NO: 283311 - DNA, 264 bp, Glycine max
aatagatggcgtgaagcattagagaggcttcttgaaacaaataactttccagagtttactggtcgggtgtgcccagcaccttgtgaaggttcttgtgtccttggtattattgagaatcccgtatccattaaaagcattgaatgtgccatcatagacaaggcttttgaggagggttggatggtgccacgacctccagtcaagagaactgggaaaagagtagccatcgttggaagtggaccatctggcttggcagctgctgatcag

SEQ ID NO: 283312 - DNA, 275 bp, Glycine max
  unsure (1)..(275): unsure at all n locations
gccgcagcaagtgatcgaagcgaaaagagagaaattcatcgtcgcagtaatcatgggtaaggttcatggatcacttgcacgtgctggtaaggttagagggcaaaccccgaaggtggccnnnnnnnnnnnnnnnnnnnnnccacgtggccgcgcccacaagaggatgcagtacaatcgccgantcgtcaccgccgtggtgggattcggcaagaagaggggacccaactcgtctgagaagtgaggccgaggcttgaggaatatgttgctactctatt

SEQ ID NO: 283313 - DNA, 274 bp, Glycine max
  unsure (1)..(274): unsure at all n locations
aagaaaggaaataattgatctttgaaaatgcagggaggaaagaaagctggagagtccatcaaggaaacagctgcaaacattggtgcttctgccaaggctggcatggagaaaaccaaggccactgtccaggagaaggcagaaagaatgacggcacgtgatccgatgcaaaaggagttggcaacccagaagaaagaggcaaagatgagccaggcagagctggacaagcaggcggcgcgtcacataacacggcggcgaanaggctgccacggcaggg

SEQ ID NO: 283314 - DNA, 261 bp, Glycine max
  unsure (1)..(261): unsure at all n locations
ctctcggtgaagttgtgagtgcagatttcttgcgcggtttatcatgggggatagtcagtattcgttttctctcaccacatttagcccttctggaaagcttgttcagattgagcatgctttgacggctgtcgggtctggacaaacgtctttggnattanaacnnncaantggagttgtcnattgctaccgagaagaaattgccatctatattggttgatgaagcatcagtccagaaaattcagttattaacaccaaatatag

SEQ ID NO: 283315 - DNA, 261 bp, Glycine max
gactacgccagtgacactgctcagagaaccaaggaaaaactccaagacattgcatctgaagctggtcaatacagtgcagagaaagctagagaaatgaaggatgcagcagcagagaaggcaagtgacatagcaaaggctgcaaagcaaaaatcacaagaggtgaaagagaaattaggtggacaacaccgggatgccgagctttgagaattgagatgtttgaatcactttgaaccttttaattatgccacaatagttgtctaa

SEQ ID NO: 283316 - DNA, 263 bp, Glycine max
attcgcagcagccaaaccaaaccacaccgaaacctccaaaaccctagcacgccaccgtccatggcgacgacacgatccgcgccgctcctcaagcacctcctcacccgtctcaacccttctcgctccgtcacgtacatgccccgtcccggcgacggcacccctcgcggcgtgacgctgatcccgggcgacggaatcgggcctctagtaaccggcgcggtggagcaggtgatggaggcgatgcacgcgccgctgtacttcgagaa

SEQ ID NO: 283317 - DNA, 265 bp, Glycine max
gttcatcaggtgttgtagagagacacatctattgacactgtgaattactcaagagggctcgacaatcccacaaagtagaaaaagaggttatgttatggcgggcaaaggtgttagttcggtggctaaggcggtagcagaatatcagtatccttggcgtgagaagttggggaaatataaggatgagcttgccaagggtgtgtggggatactgggagctgggggcatggaagccgctgagtatcagtgctcggcatcgtgctagaatt

SEQ ID NO: 283318 - DNA, 264 bp, Glycine max
ctctaattacactttctatctcatttccaatctcattttcgttcggttcaaacactctcatggcatcagacaagaagattaggatcggcatcaacggatttggaaggattggccgtttggtggccagggttgctcttcagaggaatgacgttgaacttgttgctgtcaacgatcctttcatcaccactgattacatgacatacatgttcaagtacgacaccgttcatgggcagtggaagcattttgatgtgaagctgaaggact

SEQ ID NO: 283319 - DNA, 269 bp, Glycine max
cctcaccccactttcagtcgtgaccctgttcgtttttcattgtctccaagattgagtaataagatggggttggaggccgcagtggaggcagcggcggaattccttaacaaggcagtgaaaccagtgctggtaggtggtcctaaactgagggtggcaacagcatctgatgcctttgtcgaactggctgatgcgtgtggttatgcgcttgctgtgatgccgtcggctaaagggcaggttccagagcaccatccccattttatcggaactta

SEQ ID NO: 283320 - DNA, 260 bp, Glycine max
gatccctgtgatagattttagtaacctcaatggggacaagaggggtgacacaatggccctattgcacgaagcttgtgaaaaatggggctgctttatggttgagaaccatgaaattgacacacaactgatggagaagttgaagcagttaatcaatacatactatgaggaagacctaaaggaaagcttctaccagtctgagatagccaagaggttggagaaagagcagaacacctctgatatagattgggaaattaccttct

SEQ ID NO: 283321 - DNA, 262 bp, Glycine max
cacaaaacaaaaagtttacgttacaaatcgcataataaccgtcctaagtttattgagagaattttgcaagtgtgagaaacatggcatctcgtcaaaacaacaagcaagagcttgatgaaagagcaaggcaaggagagactgttgtcccgggtggaactggtggcaagagcctggaggctcagcaacaccttgctgaaggaaggagcaagggagggcaaacaaggaaggaacagctgggtacagaagggtaccaggaaatggg

SEQ ID NO: 283322 - DNA, 226 bp, Glycine max
ttgttgtttgtgtgtttgttttttctctcacctgaaaatgtcttgctgcggtggtaactgtggttgcggaagcgcctgcaagtgcggcaacggctgcggaggctgcaagatgtacccagacttgagctacaccgagtcaaccaccaccgagaccttggtcatgggagtggcaccagttaaggctcaattcgagagtgctgaaatgggtgttcccgctgagaacgat

SEQ ID NO: 283323 - DNA, 263 bp, Glycine max
  unsure (1)..(263): unsure at all n locations
cggagtagccctgctccgcgtcgccaaggttaccggcggcgccccaaacaagctctccaaaattaaggtggtgaggcnatcgatagcgcaggttttgacggttatttcccagaagcagaaagcggcgctgagagaggcttacaagaagaagaagtatttgccccttgacctccgtcccaagaagacccgcgccattcgcagacgccttaccaaacaccaggtgtctttgaagacggaacgtgagaagaagaaggagctgtact

SEQ ID NO: 283324 - DNA, 236 bp, Glycine max
  unsure (1)..(236): unsure at all n locations
ctcgaagctttcatcgttcaacatattctcaccatctcagtcatgggcctgctatcttgttttaggtctaccgtcctgagaaaatnttccanaggaagctctggcatgtcaagattcctgtatacgaacaattttcaacgaaacttgatttcgtctggtggcaatgaatcgtattatgggtattttaacaggagatcatacacttcactttatatgggaatggaactgtgggtgga

SEQ ID NO: 283325 - DNA, 237 bp, Glycine max
ctcgagcggccaggcttgctaaggagcacggcgatataaagttggcccagatctgaggcatgattgcctcagatgagaaacgccatgagactgcatacacgaagatagtggaaaagctatttgaggtcgatcctgacggtacagttatggcgtttgccgacatgatgaggaagaagattgccatgccagcacacctcatgtatgacggccgtgatgacaacctgtttgatagctact

SEQ ID NO: 283326 - DNA, 241 bp, Glycine max
atcaaatcaaagtcattcacctaaaccctatggccgacgaagccaaagccaaaggcaacgcagccttctcctccggcgactaccccgccgcaattcaccacttctccgacgccatcgccttggcccccaccaaccacgtcctctattccaatcgatccgccgcatacgcttctctccaaaactacaccgatgccttagccgatgctaagaagaccgttgaactcaagcccgactggtccaa

SEQ ID NO: 283327 - DNA, 242 bp, Glycine max
  unsure (1)..(242): unsure at all n locations
ggccatgcnctcatgtgcttggcacgtgttccacttcttcctctgcgctcnaaccctatccgctgctcacggaagcaccacggttcgagacatcgcgagaaagttgaaactcggggacaacgagcttctncgcacggagaagaagttcaaggntttcatggagnattacnggangagctacnccncagaggnggnntatttgcgccnnttggggattttcncccngaacattgtcagaacgg

SEQ ID NO: 283328 - DNA, 232 bp, Glycine max
agggacttgaagtaatacgtgtcctctgggagaaggatgaaactgggaggtttcaatttaaggaaattgagggctccgaagagattcttgaggctgacctagttttactggccatgggattccttggccctgagcctacaattgcagagaagttgggtattgagcgagacaacaggtcaaacttcaaggcagagtatggtcgtttctcaaccagtcttaaaggggtgtttgc

SEQ ID NO: 283329 - DNA, 235 bp, Glycine max
  unsure (1)..(235): unsure at all n locations
ctctgttctcccangttangactgggacataccgccaactattccatcctgagcagctcattagtggaaaggaggatgcagcaaacaactttgcccgtggccactataccattggaaaggagattgttgagctttgcttggaccgcatcagaaagcttgctgacaactgcacaggtctccaaggttttctggttttcaatgctgtgggtgggggaactggctctggacttggttc

SEQ ID NO: 283330 - DNA, 237 bp, Glycine max
  unsure (1)..(237): unsure at all n locations
aaccggatgaagaaactataaaanattaataaggaagggaaccatatcagccagttttgtgccagtgatgtgtggctcagctttcaaaaacaagggagtccaaccattgctcgatgcggtagtggattatctaccatcaccacttgacttgccagcaatgaagggcagtgaccctgaaaacccagaagaaacaatagagagggtagcaagtgatgatgaaccatttgctggactggc

SEQ ID NO: 283331 - DNA, 240 bp, Glycine max
acctaagtgagaaacaaagaaaggaaataattgatctttgaaaatgcagggaggaaagaaagctggagagtccatcaaggaaacagctgcaaacattggtgcttctgccaaggctggcatggagaaaaccaaggccactgtccaggagaaggcagaaagaatgacggcacgtgatccgatgcaaaaggagttggcaacccagaagaaagaggcaaagatgagccaggcagagctggacaa

SEQ ID NO: 283332 - DNA, 165 bp, Glycine max
tgtctttgcttcccaggtggtggtgcagacggagggaagagtgtgtgagtcacaaagccacgggttccatggtttgtgtaatagagaccacaactgtgctttggtctgcaggaacgaaggtttctccggtggcaggtgcaaaggcttccgccgccgctgcttttg

SEQ ID NO: 283333 - DNA, 237 bp, Glycine max
  unsure (1)..(237): unsure at all n locations
ggcaaagcgaggccatgccctcatgtgcttggcacgtgtttcactcttcctctgcgctctaaccctatccgctgctcacggaagcaccacggttcaagacatcgcgagaaagttgaaactcggggacaacgagcttctgcgcacggagaagaagttcaaggttttcatggagaattacgggangngntactccacagatgangagtatttgcgccgtttggggattttcncccanaa

SEQ ID NO: 283334 - DNA, 241 bp, Glycine max
ggccatgccctcatgtgcttggcacgtgtttcactcttcctctgcgctctaaccctatccgctgctcacggaagcaccacggttcgagacatcgcgagaaagttgaaactcggggacaacgagcttctgcgcacggagaagaagttcaaggttttcatggagaattacgggaggagctactccacagaggaggagtatttgcgccgtttggggattttcgcccagaacatggtcagagcgg

SEQ ID NO: 283335 - DNA, 241 bp, Glycine max
catgctgttcatcccattactgctgtgcaactggagtggtccctttggactcgtgaaattgagcaagatattgttccactttgcagggaacttggaattggaatagtaccatacagcccccttggccgtggattttttggtggcaaggctgtcgtagaaagtatacctgcaaacagttttctggcatttcaaccaaggttacgaggggagaactttgacaagaacaaaatcttatattcta

SEQ ID NO: 283336 - DNA, 236 bp, Glycine max
  unsure (1)..(236): unsure at all n locations
gggaggtacacctccacgattcctcatcatagatgatggttggcnacagattgaaantaaagcaaaggatgcnactgaatgtttggtacaaganggagcacagtttgctactaggttgactggtattanagagaatactaaatttcaaaagaaattacagaacaatgagcagatgtcaggtcngaagcntctagtacatggagcaaagcagcatcacaatgtganaaatgtatatg

SEQ ID NO: 283337 - DNA, 235 bp, Glycine max
  unsure (1)..(235): unsure at all n locations
ggttcatccaagtctaantgactctactggtgttcaatccaagagcattagtaatgacacccttgcaaggctggctaagacagtcttgacgctgaaagaagntaaaaaacagaggctgcacaagctccaagaattngcttctcagttaattgatctttggaatctnatggatactcatcccgaggaaaggagactatttgaccatgttacctgtantatgtcagcttctgttgat

SEQ ID NO: 283338 - DNA, 236 bp, Glycine max
  unsure (1)..(236): unsure at all n locations
caagaatataccttgttgcagaaagatgtaaatncngccacttgggtggccacttggtgggtttcctggaccacagggcccatactactgtggaactggtgctgataaagcatatggccgtgatattgtagatgcacattacaaagcttgtatttatgctggcatcaatattagtggcatcaatggagaggttatgcctggtcagtgggaatttcaagttggtccttctgttggta

SEQ ID NO: 283339 - DNA, 241 bp, Glycine max
gtaggttaacactcttcttcatcgtcgtcgcaatgggacgtgtgatccgtgcgcacgtaagggagcaggctcggtcttcaagtcccacacgcaccaccgcaagggccctgcacgcttccggagcctggacttcggggagcgcaacggctacctgaagggcgtggtcaccgacgtcatccatgaccctggccgcggcgcgccgctcgccaaggtcgccttccgccaccctttcagatacaag

SEQ ID NO: 283340 - DNA, 236 bp, Glycine max
  unsure (1)..(236): unsure at all n locations
gatccctgtgatagattttagtaacctcaatggggacaagaggggtgacacaatggccctattgcacgaagcttgtgaaaaatggggctgctttatggttgagaaccatgaaattgacacacaactgatggagaagttgaagcagttaatcantacatactatgaggaagacctaaaggaaagcttctaccagtctgagatagccaagaggttggagaaagagcagaacacctctg

SEQ ID NO: 283341 - DNA, 232 bp, Glycine max
ggagtccgcccttcagcttgtttacccattacaattgatgtgggcacaaacaatgagaagctgctgaatgatgaattatatattgggctaaagcaaagacgagcaactgggcaggaatatgctgaacttatgcacgaatttatgacagcagtcaagcaaacttatggggaaaaggtcctaattcagtttgaagactttgcaaaccacaatgcttttaatctgcttgagaaat

SEQ ID NO: 283342 - DNA, 233 bp, Glycine max
  unsure (1)..(233): unsure at all n locations
ggcgtgacgaaggaagaagttgaatcatccttgaaggccaaactgaacccttctcatctngaagtggttgatacatctggagggtgcggtgcaagttttgtggtggagattgtatcagaacaatttgaaggcaaaaggctacttgagaggcatcgaatggtgaatgctgccttagaggaggaaatgaaacaaatccatgctctctctattaagaaagctgttaccccagacca

SEQ ID NO: 283343 - DNA, 232 bp, Glycine max; identical to SEQ ID NO: 283341

SEQ ID NO: 283344 - DNA, 238 bp, Glycine max
  unsure (1)..(238): unsure at all n locations
gagagcaaaaccctagttcatccatcaccagtcgaggaagaagatggtgaagttccttaagcccaacaaggctgtcatcgtcctgcagggccgctacgccgggcgcaaggcggtgatcgtgaggnccttcgacgagggaaccagggagcgcccctacggccactgcctcgtcgccggaatcaagaagtaccccancaaggtcatcaagaaggactccgccaagaagacggccaagaaa

SEQ ID NO: 283345 - DNA, 238 bp, Glycine max
cagcacctggtctcttggcgtgaccttccagaagaaaagataaaactgtctagtggacaagttgttgatttgataccatggtgcttgccaaacacggctaagcggcacaatcaatggaagggactgtttggcaggttggattggcaaggaaatttcccaacttccgttacagaccctcagccaatggggaaggttggaatgtgcttccaccctgaccaagataggattcttactgttc

SEQ ID NO: 283346 - DNA, 236 bp, Glycine max
tctcggtgaagttgtgagtgcagatttcttgcgcggtttatcatgggggatagtcagtattcgttttctctcaccacatttagcccttctggaaagcttgttcagattgagcatgctttgacggctgtcgggtctggacaaacgtctttgggaattaaagctgcaaatggagttgtcattgctaccgagaagaaattgccatctatattggttgatgaagcatcagtccagaaaat

SEQ ID NO: 283347 - DNA, 239 bp, Glycine max
  unsure (1)..(239): unsure at all n locations
gagaggcttggntccaccttggtggcccacaggggcagagaattggtggggtgaacaaggccttctggcccatgaacatggcccacctccttataagaagccccatgacctcaaaaaggcttggaaagtgtctctcttggctgcngtcatcaaacacatgtctcctgatttgtataaacttagaaggtcggtgactcagtccaagactttgcaagataagatgacaaccagggacacgg

SEQ ID NO: 283348 - DNA, 232 bp, Glycine max
  unsure (1)..(232): unsure at all n locations
gagagagagggagtcagagaaaccctaggtaagaagaaaagatgccggctggtcatggtttgagatcccgnaccagagattccttctctcgtcctttcaggaagaagggaaccatcgnnctcaccacatanctgngaacctaccacgtcggcgactatgttgacgtcaaggttaanggtgccgttcacaagggaatgccccacaaattctaccatggccgcaccggacgcgt

SEQ ID NO: 283349 - DNA, 232 bp, Glycine max
tctctctttcttctgcatcttcaaccttggcaagggaagccacagctgttgagcaacatcaatgcctgcactgccgtcgttgacatcgttcgcaccaccctcgaccctcgcggcatggacaagctcatccacgatgacaagggagccgtcaccatctccaacgacgacgccaccatcatgaagctcctcgacatcgtccaccccgctgcaaaaatcctcgccgacatcgcca

SEQ ID NO: 283350 - DNA, 237 bp, Glycine max
aaagaatcaaagaaaggggtggtggctgcttcgaaagcctaataatttgtttatttccagaacatcatagttttcgcagcagcaaactaacaaattactcatatcatataataagatggcccgttctctctcgcaagccaaacgtattggtgtccttgttgctcaatctatctccctaattcccgttcatcggcgaggttacgcagtggcatccgatgtatcggtaagagttggatt

SEQ ID NO: 283351 - DNA, 262 bp, Glycine max
  unsure (1)..(262): unsure at all n locations
taccctttgatgaaggctacgcgcccttgtttggggacagcaacttggtcatccatagggatggcaaatcggtccatctttcactcgatgagagaacaggttcaggatttgtgtcgcatgatctttaccttcacgggtatttcagcgcttctatnaagttgccttctgattacactgcaggagttgttgtngccttctatatgtcaaatggtgacatgttccagaataaccatgatgaaatcgactttgagtttttggggaa

SEQ ID NO: 283352 - DNA, 254 bp, Glycine max
  unsure (1)..(254): unsure at all n locations
attctgtgacatacaataatgagaaggaggggatcattgagtgcttgaaaacnaatgtgggtggtgatttagatagtgaggtttcttctctccctgattggataccaaccaaagtgatggccaccacttggcttgctgatgcacttgagtatgaactgtgggtgggatgtgatggttcctctgcttatagcatctattattctgatcttccctggcctatcggcaaggttctcttttggaagaaagcttattgg

SEQ ID NO: 283353 - DNA, 265 bp, Glycine max
tcgtcatctacaactagtaacaaagatccaacaagcagatcaatctctctctctgtctcccaatcaaaacagacatgggtttgaaggaggattttgagcagtatgctgagaaagcaaagactttgccaccgactcaatcaaacgaagacttgcttatcctttatggattgtacaagcaggccaccgttggacctgtcaacaccagccgtccgggaatgttcaacatgagggacagagctaaatgggatgcatggaaggctgttga

SEQ ID NO: 283354 - DNA, 190 bp, Glycine max
gaagtcccattcattgcactgatagcagcgatggggatcgatcttaaggctgggggtaagagcaaaaagaccaaaagaacagcaccaaagtccaatgacatctacctcaaattacttgtcaagctttatcgattccttgttcgaaggacagacagcaatttcaatgctgtgatactcaagcgcttgttca

SEQ ID NO: 283355 - DNA, 192 bp, Glycine max
  unsure (1)..(192): unsure at all n locations
actgctggtggggtgatgacagtcttgatccccaggaacactactatcccaacaaaganagancaggttttctcaacctattctgacaaccagcctggtgtgttgatccaggtttatgaaggtgagagaacaaggactagagataacaanttgntgggcaaattngnactttctggnatnccncnagctccc

SEQ ID NO: 283356 - DNA, 264 bp, Glycine max
caagattgcaaaatgaagttcaacattgcaaatcccaccactgggtgccagaagaagctggaaatcgatgacgacctgaagcttcgagcattttgggacaagaggatctcccaggaggttcttggtgatgctctgggagtttaaaggatatgttttcaaaatcaccggtgggtgtgacaaacaaggattccctatgaagcagggagtgctgacccctggtcgtgttcgacttttgctccatagaggaactccttgtttccgtgg

SEQ ID NO: 283357 - DNA, 270 bp, Glycine max
tctagggttatcatttctccatttccattttctctctcacttttcaagaatcgtaagctatgggaaagtcttacccaactgtgagtgctgattaccagaggccgttgagaaggcgaagaagaagctcagaggcttcatcgctgagaagagatgcgctcctctaatgctccgtttggcatggcactctgctggaacctttgacaagggcacgaagaccggtggacccttcggaaccatcaagcaccctgccgaatggctcacagcgctaac

SEQ ID NO: 283358 - DNA, 265 bp, Glycine max
  unsure (1)..(265): unsure at all n locations
atgaagtttatgcaattgatatagtaacaagcactggggacggcaagcctaagctgttggatgagaagcagacaactatctataagagggctgttgacaagagttatcacttgaagatgaaagcgtctaggttcattttcagtgaaataagccaaaagtttcctatcatgccgttctctgctagggctttggaagagaaaagagctcgacttggtttggtggaatgcgtcaaccatgagctcttgcagccatatccngttttgca

SEQ ID NO: 283359 - DNA, 260 bp, Glycine max
  unsure (1)..(260): unsure at all n locations
atttcaaaggaattaccaaacactatgagaaaactcaagatcctgaatggaatcaagtgtttgcctttgcaagggaaaatcagcagtcaactttgcttgaagttgcggtcaaagacaagaatatattactagatgaagttattggcactgtgaagtttgatctccacgacgttcctacacgtgttccacnnatagtccatngntcctgagtggtataggntgncaagggtaaggacagaaaaaaggggagctgttccccc

SEQ ID NO: 283360 - DNA, 257 bp, Glycine max
  unsure (1)..(257): unsure at all n locations
gtgtgtgtaacaggtgctggaggattcgtagcgtcttggcttgttaagcttcttctttccaaaggctacattgtccatggaactgtgagagaccctgaacctgctactcagaaatatgaacacttgctcaaactccacggagcttctgaaaacctcactctcttcaaggcagatctcttgaactacgaatctcttcgctcagcaatttctggatgcactgcagttttccatcttgcttgcccggnaccctnaatnag

SEQ ID NO: 283361 - DNA, 257 bp, Glycine max
gtgaggagataatttcaggagctcagcgtgttcatgtgccagaatttttggaacaacgtgcagcagcttgtggcatcgatgtcaaaacaatatctacatacattgattctttcagatatggggcaccaccacatggtggctttggagtagggttggagcgtgtagtgatgctcttctgtggcctgaataacattcgcaaaacatcactctttcctcgtgacccacttaggattgcgccatgataaaatcatatccca

SEQ ID NO: 283362 - DNA, 258 bp, Glycine max
  unsure (1)..(258): unsure at all n locations
tcgcgagcggccgaacaggagttgtttaagaagcacatcgagggagcaactaaatacctgctctctaagattaaagatttccaattttttgttggtgagagcatgggtgatgatgcttgcttggtctttgcctactacaaggacggcgctgctgatccnacattcctgtactttgcatatgccttaaaggaggtcaagtgctaagtgactaatgtaccgagctatctactcatttatctagtttttttttacgttctg

SEQ ID NO: 283363 - DNA, 259 bp, Glycine max
  unsure (1)..(259): unsure at all n locations
aatcaaagaaaggggtggtggctgcttcgaaagcttaataatttgtttatttccagaacatcatagttttcgcagcagcaaactaacaaattactcatatcatataataagatggcccgttctctctcgcaagccaaacgtattggtgtccttgttgctcaatctntctccctaattcccgttcatcggcgaggttacgcatggcatccgatgtatcggtaagagttggattgggtaatattgggcgaaggaatggaat

SEQ ID NO: 283364 - DNA, 256 bp, Glycine max
actcactctgcactcaccactgccacacttcaatcgcactaatggctgtcaccttctcagatctacacaccgaagagggcatcaaatccctcgatcaattcctttctgggaaaacctatatttctggggatcagttgacaaaggatgatattaaagtgtatgcagctgttgttgaaaagccaggggacacttttcctaatgctgccaagtggtacgatgctgtctcttctcaacttgctccaagctttcctggcca

SEQ ID NO: 283365 - DNA, 256 bp, Glycine max
gaaaatctcaaatttggtctcgttgaagtggtttatgaatgggcaaagggtactccgtttgctgacatttgtgagctcactgatgttcctgaaggtctgatagtaaggaccattgtcaggttggacgagacatgtcgggagttcaaaaatgctgcagctattatgggtaattctgctctctgcaaaaaaatggaaattgcttctaatgcaataaagcgtgacattgtatttgcagctagcttgtatattactggcg

SEQ ID NO: 283366 - DNA, 257 bp, Glycine max
gtcaccgctccccgtaggaagaactcgtcgttcagctcgcggataaggctcaggtttgcacccagcggtcatggaaacgtccttatggagttggactcctggtagctggattagatgaatcaggagctcacctctattacaactgtcccagtggaaactattttgaatatcaggcttttgctattgggtctcgctctcaagctgcaaagacatatttggaacgcagtttgagaattttgtgggctcttcacgagaag

SEQ ID NO: 283367 - DNA, 172 bp, Glycine max
  unsure (1)..(172): unsure at all n locations
agggtgtcgtcaatgtggagcgccgcaaganataattaaaacgtgatctatgatacaacaatattagtatatatagacgcatgcagtttatatagtatatattngtcatgttgtatgtntttacattttggtttgcttgtttacattctcttcaaaaaanaaaaaaatgtgt

SEQ ID NO: 283368 - DNA, 242 bp, Glycine max
  unsure (1)..(242): unsure at all n locations
gagagagtattggcgcttcatcaagatgggtatttctagggattccatgcacaagaggcgtgccactggtggcaagaaaaaggcttggagaaagaagagaaagtatgagcttgggcgtcaggcagcaaacaccaagttatcnagcaacaagacaatcaggaggattcgtgttagaggtggcaatgttaaatggagggcattgaggctggatactggcattactcatggggtagtgaagcagt

SEQ ID NO: 283369 - DNA, 265 bp, Glycine max
ctactggtggctatgccggtgacactggtaggcaacatgggaacatcggtggcccttactatggaaccaacaccgcagacaccggtactggtcccagaagtggaaccacgggcggcaccggttatggaggcactggtggcactgattatggaacaactggtggcactggttatggaagtggaactgggtatggagtcaacactgggggtgcgcacactgaagcaggatataggaaggaacatcgtcagcatgaccaatctcatgg

SEQ ID NO: 283370 - DNA, 218 bp, Glycine max
gagaaagaaaagaatggcaaagttaataaaattctttgagttgaacacaggggccaagattccttctgttgggttaggcacttggcaagctgagcctggtgttgtagccaaagctgtcaccacagccattctggttggatacaggcatattgattgtgctcaagcgtataacaatcaagcagagattggttctgctcttaagaagctttttgatgatg

SEQ ID NO: 283371 - DNA, 256 bp, Glycine max
  unsure (1)..(256): unsure at all n locations
cttcagcaaccatgtcgaggagaaaggttagggagccaaaggaggnaaatgtcactcttggtccagccgttagagacggtgaacatgttttcggcgtggctcgcatctttgcctccttcaacgacaccttcatccatgtcactgatttgtctgggagggaaacccttgttcgcatcactggtgggatgaaagttaaagctgacagagatgaatcatctccanatgctgctatgcttgcagcacaggatgttgctgc

SEQ ID NO: 283372 - DNA, 225 bp, Glycine max
gctcggttctccgatcgccgtcttcgccttgcccattcctgatcaatatgtctagaagatatgatagccgtacaacaatcttctcccccgaaggacgtctttaccaagtggagtatgcaatggaggccattgggaatgctggaactgcaatagggatcttgtcaaaagatggggtagttctggttggtgaaaagaaggtcacatccaagctgctgcaaacctcaa

SEQ ID NO: 283373 - DNA, 265 bp, Glycine max
  unsure (1)..(265): unsure at all n locations
agcagctaagaaaacagcgcgaggangggaacacctatttctaccaaagtcgtacagttctgaacaaagcacgggagctggctgcaaagaaagatattaatgctcttgatgaagtttcacagacagaggttgagaaatttatggcactctggaacaaggacaaagcatttaggaatgattatgaaaaaagaattttggcctcattggatatgcgacagttgagtcgggacggacggatgaggaacccggatgaaaagccaatcct

SEQ ID NO: 283374 - DNA, 260 bp, Glycine max
attgaccagcttctggagaaaactggggtcaaggctaaggatattgggattttggtagtgaattgcagcttgttcaatcccacaccttctctctctgcaatgattgtgaaccactacaagctaagagggaatatccaaagttataatcttggtggcatgggttgcagtgctggactaatctctatagaccttgccaaacagctcctccaggttcatccaaactcttatgccttagtggtgagcatggagaacatcactct

SEQ ID NO: 283375 - DNA, 250 bp, Glycine max
ttcttcatagttcagtgtgtcgtttaaaaatgtcgcagttgctggataaagccaagaacttcgtgtcggagaaggtaaatgatatggccaagccggagggagtgtcactgacgtggacttcaagcgcgtgagcaaagataatgtcgagtacttggccaaggtctctgttcgtaacccttattcaacttccatacccatttgtgagatcaactactctttcaaaagcgcatccagggagatagcatcaggg

SEQ ID NO: 283376 - DNA, 248 bp, Glycine max
gggtgccctgagatcacattgaacaatggtgaaggctgtggccgttcttggcagcagtgagggtgtcactggaactattcacttcgttcaggagggaagtggtccaaccaccgtaactggatctcttgctggtcttaagcctggtctccatggtttccatgtccatgccttgggggacactaccaatggttgcctctcaatggatcacatttcaatcctaataacaaggagcatggtgcccctgagga

SEQ ID NO: 283377 - DNA, 256 bp, Glycine max
  unsure (1)..(256): unsure at all n locations
ctgcaatggcttcaagtcaggaggaggtgacccttttgggagctactggaagcccatttgtgtgcagggttcatattgccctcaagttgaagggagttcaatacaaatatgtcgaagaaaatttgaggaacaagagtgaactgcttctcaaatccaacccagttcacaagaaggttccagtgtttattcacaatgagaagcccatagcagagtctcttgtgattgttgatacattgatgagncatggaagaacaac

SEQ ID NO: 283378 - DNA, 273 bp, Glycine max
ataacatacgaaactggagaccatgtcggtgtctatgctgataactgcaacgaaactgttgaagaagctgggaagttgttgggtcagaatttagatctattgttttctcttcacactgataaggaggatggcacttccctaggcggttctctcctgcctcctttccctggcccttgcactctgcgtactgcattagcacgctatgctgatctcttgaaccccccacgaaaggctgctttagttgctttagctgctcatgcttctgaattagtg

SEQ ID NO: 283379 - DNA, 236 bp, Glycine max
ttgttgtttgtgtgtttgttttttctctcacctgaaaatgtcttgctgcggtggtaactgtggttgcggaagcgcctgcaagtgcggcaacggctgcggaggctgcaagatgtacccagacttgagctacaccgagtcaaccaccaccgagaccttggtcatgggagtggcaccagttaaggctcaattcgagagtgctgaaatgggtgttcccgctgagaacgatggctgcaaat

SEQ ID NO: 283380 - DNA, 260 bp, Glycine max
ttctcaggaaacctcatggaatcattgctgcttggtgttactatttgccaagagttagtgatgcatttgacactgtctttgaccaattctattccactaatgtaagcccttattgggacccagctcgtaaatgggttgatgacaattatagaagcattgattttccatttgagcccgtggatggagctgatcacacaggaccctttgagtttgtgacggaaacaatgatggatttggatgatttcttgacctacataaga

SEQ ID NO: 283381 - DNA, 261 bp, Glycine max
tgctgcgccgactcactggtactttgcttaatatggcggctgagaagtcaaacattgcaaaagatgtgactgaattaattggcaaaactccattggtatatctcaaccacatcgtggatggttgtgttgccaaagttgctgccaagcttgaaatgatggaaccttgctccagtgtcaaagacaggataggatatagcatgattgtagacgctgaggagaaaggactcatcacaccgggtgaaagtgtcctcattgaaccta

SEQ ID NO: 283382 - DNA, 266 bp, Glycine max
ggctcttgcaaaggctgttggttatactgaagtaaagcaaagatcacttctaacttccatggagaactatgttacattacttcttgagactggcaaaccaatctacacccaatcttttgcctatggagtcttgaggagatttttgcctgaagagaaggttgaggccgtgaaaggtctttcaatcactgctgatggaaatggcgttgtttttgatgtagcagctaaagatttagacatatatcttaacggtcaggaaaatgcctcga

SEQ ID NO: 283383 - DNA, 263 bp, Glycine max
taggtgctcaaccctagtaagccgcaatggtgaagtactcaagggagcctgacaatccaactaagtcttgcaaggctagaggcgccgaccttagggttcattttaagaacacaagggaaactgcctttgcaatcaggaagttgcccttggtcaaggctaaaaggtacttggaagatgttcttgcccacaagcaggcaattccattcagacgtttttgtcgaggtgttggaaggacagcccaggctaagaatagacactctaat

SEQ ID NO: 283384 - DNA, 261 bp, Glycine max
cgaagcccttcaccgcattgcaaccatgtcgaggagaaaggtcagagagccaaaggaagaaaacgtgactctgggcccagctgttagagatggtgaacatgtctttggcgtcgctcgcatctttgcctccttcaatgataccttcattcatgtcactgatttgtctgggagggaaacgcttgtccgcatcactggtggaatgaaggttaaggctgacagagatgaatcgtctccttatgctgctatgcttgcagctcagga

SEQ ID NO: 283385 - DNA, 262 bp, Glycine max
aaagaaaggggtggtggctgcttcgaaagcttaataatttgtttatttccagaacatcatagttttcgcagcagcaaactaacaaattactcatatcatataataagatggcccgttctctctcgcaagccaaacgtattggtgtccttgttgctcaatctatctccctaattcccgttcatcggcgaggttacgcagtggcatccgatgtatcggtaagagttggattgggtaatattgggcgaaggaatggaatcgtggg

SEQ ID NO: 283386 - DNA, 262 bp, Glycine max
gtcaccgctccccgtagggagaactcgtcgttcagctcgcggataaggctcaggtttgcacccagcggtcatggaaacgtccttatggagttggactcctggtagctggattagatgaatcaggagctcacctctattacaactgtcccagtggaaactattttgaatatcaggcttttgctattgggtctcgctctcaagctgcaaagacatatttggaacgcaggtttgagaattttgtgggctcttcacgagaagatct

SEQ ID NO: 283387 - DNA, 261 bp, Glycine max
agcagagcgaccttgaagagctatggctgtcggaaagaataagaggatttccaagggaaagaagggtggcaagaagaaagccgctgatccctttgccaagaaagactggtacgatatcaaggccccttccctcttccaggtcaagaatattggcaaaaccctcgtctctcgtacccagggaaccaagattgcatccgaaggactcaaacatcgggtttttgaggtctcattggctgatctccaaggggatgaagaccactc

SEQ ID NO: 283388 - DNA, 261 bp, Glycine max
  unsure (1)..(261): unsure at all n locations
aagaaagctacctagagcttgcacctattggtatcttctacaatatcctctcatagtgcnnnnnnnnnnnnnnnnnnnnnntatcaagatgtctttgctttcggatctcatcaacctcaatctctcagaatccacagaaaagatcgttgctgagtacatatgggttggtggatctggtatggacctcagaagcaaagccaggactcttcctgggccagtgagtgaccctgcaaagcttccaaagtggaactacgatggctc

SEQ ID NO: 283389 - DNA, 262 bp, Glycine max
cacactgagaggaagagggagtgagagagagtgttcttcgtttgctaccttctcccagaaatggttacgttcaggtttcaccagtaccaggtggtcgggagggctctcccaacggaagcagatcagcatccgaagatctaccgaatgaagctctgggccaccaacgaggttcgcgccaagtctaagttctggtattttttgaggaagctgaagaaggtgaagaagagcaatggtcaagttcttgctatcaacgagatttttg

SEQ ID NO: 283390 - DNA, 269 bp, Glycine max
  unsure (1)..(269): unsure at all n locations
aatgtatgaaatgttagtggggtatccgcccttttattcagatgaaccaatgttgacttgtagaaagatagtaaattggagaagttatttaaaatttccagaagaagttaaactttcggcagaagcaaaggatctaatannaaacncccangnnangtngaccanaggcttngaacccaaaggggnntgangaaataaaggctcacccatggtttaaaggtattgaatgggacaaattgtaccaaatgaaagctgcttttattcctgag

SEQ ID NO: 283391 - DNA, 264 bp, Glycine max
  unsure (1)..(264): unsure at all n locations
aaaatttgaagagtttgtttattgtgaaaaaaagaaaaatggangcagcaaagaaagccatagagacctttaagganaccgcagccaacattggcgcctctgccaagtctggcttggagaaaaccaaggccactatccaagagaagaatgagaagatgaatgcagaagatcaaactcaaatggatatggctaccaagaggaaagaagagaagatcaaccaggctgagatggagaagcagcaggcccgtaagtactacgccgctg

SEQ ID NO: 283392 - DNA, 260 bp, Glycine max
tcacataggctattaagggtgagatatatagaaaaacaaaggagaaaagatagaaatggagaagtttccagttgttgacatggggaaccttaataatgaagagagatcagcaaccatggagataatcaaagatgcctgtgagaactggggtttctttgagttggtgaaccatgggatatccatagagttgatggacaccgtggagaggatgacaaaagagcactacaaaaagtgtatggagcaaaggttcaaagaaatgg

SEQ ID NO: 283393 - DNA, 258 bp, Glycine max
agaactttttcgtaccatcatttctcagagcaattaaagaaaacacagaagcgaattttagaagtataatggctgaaccttgtaaaggagtttatacatttgaaatgcttcaaccgcaattttgtaaaaaactgatgtctgaggtggatcattttgaaagatgggtccatggtaccaaactcaaaatcatgcgtcctaatgcaatgaataaaaataaacatggtgttatccttgatgattttgcctttgaagccatgc

SEQ ID NO: 283394 - DNA, 257 bp, Glycine max
attcaggacaaagagggtatcccaccagaccaacaaaggcttatctttgcaggaaagcagctagaagatggcagaaccttggctgattacaatatccagaaggaatctaccctccacttggtgctccgtcttcgtggtgggatgcaaatctttgtcaagaccttgactggaaagacaattacccttgaggtggagagttctgacaccattgacaatgtcaaggctaagattcaagacaaagagggtatcccaccaga

SEQ ID NO: 283395 - DNA, 256 bp, Glycine max
  unsure (1)..(256): unsure at all n locations
aaganagctacctagagcttgcacctattggtatcttctacaatatcctctcatagtgcnnnnnnnnnnnnnnnnnnnnnntatcaagatgtctttgctttcggatctcatcaacctcaatctctcagaatccacagaaaagatcgttgcngagtacatatgggttggtggatctggnatggacctcagaagcaaagccaggactcttcctgggccagtgagtgaccctgcaaagcttccaaagtggaatacgatg

SEQ ID NO: 283396 - DNA, 258 bp, Glycine max
cgacgcagaaggttcatccaatctccgaatcctttaatcgcattgcaaccatgtcgaggagaaaggtcagagagccaaaggaggaaaacgtgactcttggcccagctgttagagatggcgaacatgtctttggcgtcgctcgcatatttgcctcctttaatgataccttcattcatgtcactgatctgtctgggagggaaacgcttgtccgcatcactggtggaatgaaggttaaggctgacagagatgaatcatctc

SEQ ID NO: 283397 - DNA, 262 bp, Glycine max
gcgctttgatgacgctcaaacacaaaaggagatgaaaatggttccattcaagattgttaaggctccaaatggagatgcgtgggtggaagccaatgggcagcagtattcccctagtcaaattggtgcctttgttctcaccaagatgaaggaaactgcagaagcttatctaggaaagtcaatttctaaggctgtaattactgtaccagcttacttcaatgatgctcagaggcaggcaacaaaagatgctggtagaattgcaggt

SEQ ID NO: 283398 - DNA, 255 bp, Glycine max
  unsure (1)..(255): unsure at all n locations
ctgcaacttatttctggcctggttctgagggttgatgcggttttggggtactttgatttgcctagtgatcagattcctgatttcatgacgctttattttgangaccctgatcatcagggtcataaggttggtgctgatgatcctctgatcactgaggctgntgctaggattgatagaatngtggggaggttgattaggggtttggaggaaagaggggttttcgaggatgttagtatnattatggttggagatcat

SEQ ID NO: 283399 - DNA, 255 bp, Glycine max
ttgatattgaacaaatttgatctgtttgaggagaaaatcgaacaagttcctttgaccaagtgtgaatggttctctgatttccatccaataatcagtcgcaatcgtcccaacggcaatagcaacagcattaataataatccctcccttggtcagctggcttcacattacatagcggttaagtttaaaaggctttattcatctcttacaggacgaaagttgtatgtgtcgccggtgaaggggttggagcctggtagt

SEQ ID NO: 283400 - DNA, 257 bp, Glycine max
  unsure (1)..(257): unsure at all n locations
atacattacagcagcaaaggaaggttgtggtaagtaaatagtaataacctaacccttgcgtttgcgagtgaggctgaagttgggtttggaaggcanaggctggtgttgtcccaatccaagagagaagtanagtaaagcaaaggaatggcgaacatagacatcgaagggatcttgaagcagcagcctnatgatgggcgcgttccgaagacganaatagtgtgtactttgggccccgcttctcgatccgtggaaatgac

SEQ ID NO: 283401 - DNA, 255 bp, Glycine max
agattatcctaagtctttgggaatagtgctgcaatggcttcaagtcaggaggaggtgacccttttgggagctactggaagcccatttgtgtgcagggttcatattgccctcaagttgaagggagttcaatacaaatatgtcgaagaaaatttgaggaacaagagtgaactgcttctcaaatccaacccagttcacaagaaggttccagtgtttattcacaatgagaagcccatagcagagtctcttgtgattgtt

SEQ ID NO: 283402 - DNA, 255 bp, Glycine max
aattttcaggttccatttattggacttgttatgggtgatagggggttgatttctcgtatactttctgcaaaatttggtggatatctcacttttggtacccttgagtcaggagttgtttcagctcctggtcaacctactcttaaggatctattgtatctatacaatttaagacaactggctcctgatacaaaagtatttgggattattggaaagcctgtcggtcacagtaaatcacccatattattcaatgaagtc

SEQ ID NO: 283403 - DNA, 257 bp, Glycine max
ctcgttagtcgtttgtaacgcctttgtttgcgttttttgcacagaagaattaacacgtatatagcaagcatggcagtcacactctacgaccttagctctgcctctgggttgaagaagcttgatgagtaccttctcccacgcagctacatcaccgggtaccaagctacaaaggatgatcttactgtttatgcagctttgccaactgctccatcagatgaatatggaaatgtttccaggtggtacaagcacattgatgc

SEQ ID NO: 283404 - DNA, 261 bp, Glycine max
ataacatacgaaactggagaccatgtcggtgtctatgctgataactgcaacgaaactgttgaagaagctgggaagttgttgggtcagaatttagatctattgttttctcttcacactgataaggaggatggcacttccctaggcggttctctcctgcctcctttccctggcccttgcactctgcgtactgcattagcacgctatgctgatctcttgaaccccccacgaaaggctgctttagttgctttagctgctcatgct

SEQ ID NO: 283405 - DNA, 260 bp, Glycine max
gttcacagtgcgaaggttgcaacccgagttggtggctcctgccatccccactccccatgaacttaaaccattatccgacatagatgatcaagaaggtcttcgtttccacattcctatgatacaagtttatcgtaaccaaccatcaatggcagagaaagacccagttcaagtgattcggaaagcactggcaaaaacacttgtgttctattacccttttgcgggtaggcttagggagaggcctgaccacaagttaatggtgg

SEQ ID NO: 283406 - DNA, 255 bp, Glycine max
atcacaaggcttgatatccgggttggcctcgtaataaaagctcaaaaacatcctgatgcagatgcactatatgttgaagagattgacgtcggtgaagaacagaccagaactgttgtcagtgggcttgtcaaatttataccactcgatgaaatgcagaaccgaaaggtctgtgttctttgcaacctaaagccagtaaccatgaggggcattaaatctcaagcaatggttcttgctgcttccgatggtgatcacacc

SEQ ID NO: 283407 - DNA, 254 bp, Glycine max
agaacaagaacataagggaaccacagcggcggtaacagaagaacaagcagagaatgggtcgagtgagaacgaagacggtgaagaaatcctctcggcaggtgatagagcgtcactactcgcgcatgaccctggacttccacacgaacaagaagcttctggaggaagtggcgataatcccgtcgaagaggctaaggaacaagatcgcggggttctcgacgcacctgatgaagcgcatccagaagggccctgtgcgc

SEQ ID NO: 283408 - DNA, 254 bp, Glycine max
cttcaactctgcttcccctggcaaccttcttcttagttctctccgcttcttatctccagattgctggggcgaaagcacaaccgttgactagtctcaagcttaactctccgatccttcaggagtctattgctaaagagatcaatgaaaatcctgaggcaggatgggaggctgctataaatcctcatttctccaattatacagttgaacaatttaagcgccttcttggagtcaaaccaacgcctaagaaggaactg

SEQ ID NO: 283409 - DNA, 253 bp, Glycine max
cagcctcaggaggagaaggatgtctcacaggaagttcgagcacccaaggcacggttcactgggatttcttcccaggaagcgtgctgctcgtcacaggggaaaagtgaaggcattccccaaggatgacccatccaaggcacccaagctcactgcattcttgggttacaaggccggtatgactcacattgttagagaggtcgagaagccaggatcaaagcttcacaagaaggaaacttgtgagcctgttacaatt

SEQ ID NO: 283410 - DNA, 262 bp, Glycine max
  unsure (1)..(262): unsure at all n locations
gcgctttgatgacgctcaaacacnaaaggagatnaaaatggttccattcaagattgttaaggctccaaatggagatgcgtgggtggaagccaatgggcagcagtattcccctagtcaaattggtgcctttgttctcaccaagatgaaggaaactgcagaagcttatctaggaaagtcaatttctaaggctgtaattactgtaccagcttacttcaatgatgctcagaggcaggcaacaaaagatgctggtagaattgcnggt

SEQ ID NO: 283411 - DNA, 257 bp, Glycine max
  unsure (1)..(257): unsure at all n locations
tcgttagtcgtttgtaangcctttntatgngttcgnnagcacagaagaattaacacgtatatagcaagnatggcagtcacactctacgaccttagctctgcctctgggttgaagaagcttgatgagtaccttctcccacgcagctacatcaccgggtaccaagctacaaaggatgatcttactgtttatgcagctttgccaactgctccatcagatgaatatggaaatgtttccaggtggtacaagcacattgatgc

SEQ ID NO: 283412 - DNA, 252 bp, Glycine max
ggttctcagagcaaaggagaattttctaggcttgactatcagaccaggccatttttaagaggtgcatcagcctttaggcgtcttgttgccaagctacctccaagagctcattctgtgtactacagggatgaaattggcaacatttccacttctagtttatggggtgactcaaaaaagacagaactggagattgaacctaggtaccctatgtttggtggctggaaaactgcctttaccattggatatggcttg

SEQ ID NO: 283413 - DNA, 248 bp, Glycine max
gaagagaggacgcggtggttcggcggggaacaagttccggatgtcgctgggtctgccggtggcggcgacggtgaactgcgccgacaatacgggggcgaagaacctctacatcatatcggtgaaagggatcaaagggcgtttgaaccgtctcccctcggcttgcgttggcgacatggtgatggccaccgtgaagaaggggaaacccgatctgaggaagaaggttttgccagctgtcattgttcgccagc

SEQ ID NO: 283414 - DNA, 250 bp, Glycine max
gctccaagtgcagtggcaagggttctaagtctggtgcttcgatgaagtgtgctggttgtcaaggaactggtatgaaggtttctataagacatcttggcccatccatgattcagcagatgcagcatgcctgcaatgaatgtaagggtactggagaaactatcaatgacagagatcgctgcccacagtgcaagggagagaaggttgtgcaggagaagaaagtccttgaagttattgtagaaaaggggatgcc

SEQ ID NO: 283415 - DNA, 251 bp, Glycine max
gtggcactttgatttcttacgaaggaagggttcagctcctggaaattgcacaagtccccgatgaacatgtcaatgagttcaagtcaatagagaagttcaaaattttcaacacaaataatttgtgggtgaacttaaacgcagttaaaaggcttgttgaagctgatgctcttaagatggaaattattcccaatccaaaggaagttgacggaataaaagttcttcagctggaaactgcagctggtgctgcaata

SEQ ID NO: 283416 - DNA, 250 bp, Glycine max
cttgctttagccatcactaacactcagtctctgaattggggctgagggtttcgagtaacgtttatttttcacgagtttaagatatcatgggtaaagagaaggttcacattaacattgtggtcattggccatgttgactctgggaagtcaaccaccactggccacttgatttacaagcttggaggtattgacaagcgtgttattgagaggtttgagaaagaagctgctgagatgaacaagaggtcattcaa

SEQ ID NO: 283417 - DNA, 235 bp, Glycine max
  unsure (1)..(235): unsure at all n locations
attttgagtggagagggtggtgaananaccaaagacatcctnctcctggatgtggctcccctcactctcggaattgaaactgttggtggagtcatgacaaagttgattcccagaaacactgttatcccaaccaagaaatctcaggtgttcaccacctatcaggaccagcagactacagtctccattcaggttttcgaaggcgagaggagtctcacaaaggattgccgccttcttg

SEQ ID NO: 283418 - DNA, 271 bp, Glycine max
  unsure (1)..(271): unsure at all n locations
aggatttcagtgatgagaaacctttagcatggagtcatttcactgctgagggtgatgttgagttcaaggcagtcctgtttgtaccacctaaggcacctcaagatttatatgagagctattataacgcaaacaaatcgaacctgaagttgtatgttagacgtgtgttcatttcagatgaatttaatgaactgttgcccaagtacctaaactttttgctgggncttgttgattctgacactttgccacttaatgtatcacgagaatgctcana

SEQ ID NO: 283419 - DNA, 266 bp, Glycine max
ggtgacactggtaggcaacatgggaacatcggtggcccttactatggaaccaacaccgcagacaccggtactggtcccagaagtggaaccacgggcggcaccggttatggaggcactggtggcactgattatggaacaactggtggcactggttatggaagtggaactgggtatggagtcaacactgggggtgcgcacactgaagcaggatataggaaggaacatcgtcagcatgaccaatctcatggtgatcagaacgagaagaa

SEQ ID NO: 283420 - DNA, 270 bp, Glycine max
  unsure (1)..(270): unsure at all n locations
tagggttttagcgcanttncttctagatttaaggaagatgggnaaggaaaaggttcacatcagtattgtggtcattggccatgtcgactctgggaaatccactaccactggtcacctgatttacaagcttggaggcattgacaagcgtgttattgagaggtttgagaaggaagctgctgagatgaacaagaggtctttcaagtatgcctgggtgctggacaaacttaaggctgagcgtgaaagaggaatcaccattgatattgctttgtg

SEQ ID NO: 283421 - DNA, 272 bp, Glycine max
  unsure (1)..(272): unsure at all n locations
aagaagatggaagttagtcagcacagtaaattcttctgcgagttctgtggaaagtatgctgttaagaggaaggctgtgggtatttggggctgcaaagattgtggaaaagtgaaggctggaggtgcttacacattgaacactgccagtgctgtcactgtccggngcaccattcggaggctgaganaccagactgaganttgaaagcagtttacacttttcatttgtttncaaatcataaattggctgctgtttatttngaaattagcatntnc

SEQ ID NO: 283422 - DNA, 260 bp, Glycine max
  unsure (1)..(260): unsure at all n locations
gaccgtcgtgagacaggttagttttaccctactgatgacagtgtcgcaatagtaattcaacctagtacgagaggaaccgttgattcgcacaattggtcatcgcgcttggttgaaaagccagtggcgcgaactaccgtgcgttggattatgactgaacgctctaagtcagaatccgggtagaagcgacgctgcgcccgccgtccgtttgccgaccagcantaggggcttggccccccaagggcnttncttgggnaccccnt

SEQ ID NO: 283423 - DNA, 271 bp, Glycine max
  unsure (1)..(271): unsure at all n locations
aagcagcagagggaggagcggcattaaaaatgcagatcttcgtgaaaaccctaacggggaagaccataaccctcgaggtcgaaagcagcgacaccattgacaatgtcaaggctaagattcaagacaaggaaggcatccctccggatcagcagcgtttgattttcgccggaaagcaacttgaagatggaaggaccttggccgatanacatccgnagggataaccctnccttgtctcagcttcgnggtggntcaaggntcctccgnttgtcga

SEQ ID NO: 283424 - DNA, 266 bp, Glycine max
gaattctccagagagaagaagaaacttaatcgatcatcacttcacttcactaatacatcatggcagacgagacccagaacaagtatgagagctctgaggttgaggtccaggatcgtggtgtttttgactttctcggtaagaaaaaggatgaagaagacaagcctcatcctcaggaggaggtcatcgccaccgagtttcaaaaagtcactgtctcagaccaaggagagaacaagcacagcctcttagaaaagcttcaccgtctgaca

SEQ ID NO: 283425 - DNA, 263 bp, Glycine max
  unsure (1)..(263): unsure at all n locations
aaacaaaaagtttacgttacaaatcgcataataaccgtcctaagtttattgagagaattttgcaagtgtgagaaacatggcatctcgtcaaaacaacaagcaagagcttgatgaaagagcaaggcaaggagagactgttgtcccgggtggaactggtggcaagagcctggaggctcagcaacaccttgctganggagggnncaaggggggcaaacaggganggaacactgggtacaganggtccngggaaatggncncaaggg

SEQ ID NO: 283426 - DNA, 264 bp, Glycine max
aaattgctttgctgtaagtttctgattcctttcttcagaattccaagttttcatttcgttagggacaaaagattgtgagatagagtatggctggaaaaggcgagggtcctgctatcggaatcgatttgggaacgacgtactcttgcgtcggcgtgtggcaacacgatcgtgttgaaatcatagccaacgatcagggtaatagaactaccccatcctacgtggctttcaccgatacagaacggttgatcggcgatgcggcgaaga

SEQ ID NO: 283427 - DNA, 262 bp, Glycine max
attccttcgtctgcaaccctagctttccgttgtttgcaaatctatggctggtgaatctgataaacccgaaaacaccctctcttgtgctaactgtggcaaacctgcgaatcttcagtgtccaaaatgtatggaattgaagcttcctcgagaaggtgctgccttctggattgtttcaagtcttcatggagctcgcacaaatcagtgcatctgaaggcaaaactatccccacctggcacacaaaattcagactcacttgatgaag

SEQ ID NO: 283428 - DNA, 268 bp, Glycine max
  unsure (1)..(268): unsure at all n locations
gaacagcgtctggctgggcttcttctggtaaccaagttctgcaaagctgaggatcagtcctcagtccgtagggtctacgatgcgcttggacctcactttctctatcgcctcctcagaaccgctatggcaagtggaggangaggcctcaacgataancgnaacgcctacttaagcttatccatcacgcttcttgccgcattttgtcgtgttcccgatattgcttcctcggaggacatgcttttccttatcccccttgtcttggaagtaa

SEQ ID NO: 283429 - DNA, 258 bp, Glycine max
  unsure (1)..(258): unsure at all n locations
aggaaaagatgctactgtgaataagatgggagagtataaagattatacggcggagaaggctaaagaggggaaagatacgacgttggggaagcttggggagctgaaggactctgcggctgatgcngcgaagagggcagtgggttacttgagcggcaagacagaggaanccaaagagaaantctcgaanacggcagnnncnacggntantagcnggnggngnnaaggngncnncaggaancgcttccggcactncgntgc

SEQ ID NO: 283430 - DNA, 264 bp, Glycine max
aaacctctcactcgccgtcgtagggtttctcctttcgtttagcaacaacaacaatggttgcagccaagaaaaccaagaagacccatgagagcatcaacaacaggctcgctcttgtcatgaagagtggaaaattcaccctcggttacaagacggttctcaaatcacttaggagctccaaagggaaattgattatcattgctaacaactgcccccctttgaggaaatcagagattgaatactatgctatgttggccaaggttggag

SEQ ID NO: 283431 - DNA, 265 bp, Glycine max
agaagacagctcgaagggacatcgcacatgttgtagcttgcggtggaaatggtgcaactactgtttctgcaacaatgctttttgcttcaatggttcatattcccgtttttgttactggggggattgggggagtgcacagacattcggaacagactatggacatatcttctgatctcactgagctaggcagaacaccagtaacagttgtatgtgctggtgtaaaatcaatattagatattcccaggacgcttgaatatctggaaac

SEQ ID NO: 283432 - DNA, 273 bp, Glycine max
  unsure (1)..(273): unsure at all n locations
agaagaaatgactaggaggactgtttatgtgtctgacattgatcaactggttactgaagagcagttgggcggcactctttcttaactgtngccaggttgttgattgccgtgtttgtggggatcctaattctattctccggtttgccttcattgagtttacagacgagaaggtgcaaggggctgctttgaacctgtctggaaccatgcttggatattacccgttgagagtgctaccttcaaaaactgctatgccctgttaatccaacatttngc

SEQ ID NO: 283433 - DNA, 244 bp, Glycine max
  unsure (1)..(244): unsure at all n locations
ctttgaggagagtgacatcaagtggccgtctagatgggatgcttacttaaaantggagggagctaaagtgcattggttctctatccttaattcgctcatggtgatcacttttcttgctggtattgttcttgtganctncctgaggacagtnagaaggganctgacccgttatgaggancccgataagnaggctcagcacagatgaatgaagagtatctggttggaanctgtatnggagatgntc

SEQ ID NO: 283434 - DNA, 256 bp, Glycine max
  unsure (1)..(256): unsure at all n locations
tgtggtnctngttgggcatttggtgctgtngaatcattgtcagatcgcntttgcattcattttgatgtaaatatctctctctctgttaatgaccttcttgcatgctgtggctttcngtgtggatctggttgtgatgggggatatcccttgtatgcgtggcaatacttagcccaccacggtgttgtcactgaagagtgcgacccatatgttgatcanattggctgttctcatcctggttgtnagccagcttaccgga

SEQ ID NO: 283435 - DNA, 257 bp, Glycine max
gatccttctttttctccttgaactcaaacatggcagatgaggtggttctgctagatttctggccaagtccatttgggatgagggtcaggattgcacttgctgaaaagggtatcaaatatgagtacaaagaagaggacttgaggaacaagagtcctcttctcctccaaatgaacccggttcacaagaagattccggttctcatccacaatggcaaacccatttgtgaatccctcattgctgttcagtacattgaggag

SEQ ID NO: 283436 - DNA, 258 bp, Glycine max
agatgcccaacacgttgaagaggctgagaagataggattggactacatggatgttgaggccttgaagaagcttaacaaaaacaagaaattggtgaaaaaactagccaaaaaatatcatgcctttttggcctctgaagcagtcatcaagcagattcctcgtctcttgggacctggtctcaacaaggcagggaagttccctacgcttgtgactcaccaagaatctctcgagtcaaaggttaatgagaccaaggccatggt

SEQ ID NO: 283437 - DNA, 263 bp, Glycine max
  unsure (1)..(263): unsure at all n locations
gcttgtagcaacacacagtaatgatccatatgttgatgactattgccaccaaggctgtcttgcgaaaaagtcatctggtgctaaattgaggcatcacttttctccagctcaaataaaggaactccctctacgaccctcttctaatgctgaaccacatgcttttcttcaggttgatgcactagggagagttccattctcnatcaattcgcaggcctcgtcctctactggaagttgatcctcccaattcctctcatgcaggtagc

SEQ ID NO: 283438 - DNA, 266 bp, Glycine max
  unsure (1)..(266): unsure at all n locations
tggttctgtatcatcaggaaggaagatatgggaaaattaacaagtgcataacttttcctgaaatgctggatatgattcctttcatgactgggacgggtgatattccgccactttacatgctttatgctgttgttgtgcacctggacacactaaatgcgtctttctctggacactatgtttcatatgtgaaagatctgcaaggcaattggttcagaatagatgatattgaggttcagccagtactagttaancaggtcatgtcagag

SEQ ID NO: 283439 - DNA, 262 bp, Glycine max
  unsure (1)..(262): unsure at all n locations
ctttgttcactcttcttctcttgcggctagggttttagcgcanttcttctagatttaaggaagatgggtaaggaaaaggttcacatcagtattgtggtcattggccatgtcgactctgggaaatccactaccactggtcacctgatttacaagcttggaggcnttgacaagcgtgttattgngaggtttgagaaggaagctgctgagatgaccaagtntcttttncatgcnngcggggtgctgnagnccttaagntancnnc

SEQ ID NO: 283440 - DNA, 264 bp, Glycine max
gattatgtgaccaggatgaaggaaggtcagagtgacatctactacatcacaggtgaaagcaagaaggctgttgagaactctccattcttagagaagttgaagaagaagggatacgaggttctttatatggttgatgccattgatgaatatgctgttggtcagctcaaggaatttgagggcaagaagcttgtctctgccaccaaggaagggctcaagcttgacgagagtgaagatgagaagaagaagcaagaagagttgaaggag

SEQ ID NO: 283441 - DNA, 263 bp, Glycine max
  unsure (1)..(263): unsure at all n locations
atggcttccttaagctccttagtgctgctccttgcagntctaattctatcccctcaagttcttgcaaactatgagaatcccccagtgtacaagcctcccactganaaaccaccagtttataagcccccagttgagaagcctccngtttacaancctccagttgagaanccnccagtttataagccnccagttganaggccaccagttnanaagccgccagttngganncccccgntntncnggcccccagnggnaagacctnc

SEQ ID NO: 283442 - DNA, 257 bp, Glycine max
catctgtcaaagaagaccctgccaagtggattccaatcctaaggaaaatatgttggtacttggttctagcgccctatgatccaatgcaatcaagctttctcaattccaccttggcggataagaatctatctgagattccaaacttcaagctactcttgaaacagctggttaccatggaggttatccaatggacaactctatgggatacatataagagtgattttgagaatgagaaggcctctgggaaatctttggga

SEQ ID NO: 283443 - DNA, 260 bp, Glycine max
attcaggtcaatgtggctcttatggggtttctagtcgagaaaatttaagtgaaagtagattgatggatctccttcatggttcagaatatgttcttacctatgaagacaaggacggagattggatgctagttggtgatgttccgtgggagatgttcactgagtcttgcaagaggctgaggataatgaagagttttgaagcaattgggctaggtaggtccaacgttcgttttaattaatctgttatactctgctttccttcg

SEQ ID NO: 283444 - DNA, 255 bp, Glycine max
atgtcatctttggccttgctctgggatacaagtctgtcattattcctatttttgccattgcaatcagcatttttgtgagttttacttttgctgcaatgtatggcattgctgtggctgcccttgggatgctgagcaccattgcgacagggttggctattgatgcctatgggccaatcagtgacaatgcaggaggtattgctgagatggcaggcatgagccatcgtattcgtgagagaactgatgcccttgatgctg

SEQ ID NO: 283445 - DNA, 259 bp, Glycine max
aaacctaattctcatttcttcatcgttcgattcttctcctcctaaagatgcagatcttcgtgaaaactttgaccggtaagaccatcacccttgaggtggagtcctccgacaccatcgataacgtgaaagctaagattcaagacaaggaagggatcccacctgaccagcagagacttatctttgcgggtaaacagcttgaggatggtcgaacccttgccgactacaacatccaaaaggaatccactctccacctcgtgct

SEQ ID NO: 283446 - DNA, 263 bp, Glycine max
cactccagaaaaaatggcggtgcctcttctctcgaagaagatcgtgaagaagaggctgaagaagttcaagaggcctcaaagtgacaggaagatttctgtgaagacaaactggcgcagaccaaagggtatcgattcccgtgttaggagaaagttcaagggatgcactttgatgccgaacattggttatgcttcagacaagaagacccgccactatctcccgaatggtttcaagaaatttgttgttcacaatgtgaaggatttgg

SEQ ID NO: 283447 - DNA, 263 bp, Glycine max
cttagatttgaaactttgttgcaggactgttattgggatcaagtgcaaagatggggttgtgttggctgtagcaggattagcagctgatggcagacaaattgttgccagggctaagtctgaagctactaactatgacagcgtatatggcgaaccaattcctgttaaggaacttgctgaccgtgtggctagttatgtgcacctctgtacgctatattggtggctcagaccttttggatgtggtgtcatactaggaggttatgaca

SEQ ID NO: 283448 - DNA, 158 bp, Glycine max
gagtgttatacaaaggttacatttctgagctgtttgtgccataccaagacccaacagatgatttttactataagactttctttgatgctggagagtttgggtttggtctctccacggtctcattggtgcccaaccgtgattgcccatcgaatgctcag

SEQ ID NO: 283449 - DNA, 273 bp, Glycine max
catcaacatcgttctaacttctgctgaagtggcagtggaggggttctgttcgagtaggtgcggaacacacgggtcctccgtgggggcgcgtgtgaacggtaagaggtataagttcgcctacatgtgggtgggtaactcagagacacagtgccctggtcaatgcgcgtggccgttccaccaacccatttacggtccccagaacccagcacctttggttgcacccaacaacgacgtgggtctcgacggcatggttatcaacgtggctagtcttct

SEQ ID NO: 283450 - DNA, 224 bp, Glycine max
  unsure (1)..(224): unsure at all n locations
ttgttgtttgtgtgtttgttttttctctcacctgaaaatgtcttgctgcggtggtaactgtggttgcgcaagcgcctgcaagtgcggcaacggctgcggaggctgcaagatgtacccagacttgagctacaccgagtcaaccaccaccgagaccttggtcatgggagtggcaccagttaaggctcaattcgagagtgctgaaatgggntccctntncaanaang

SEQ ID NO: 283451 - DNA, 272 bp, Glycine max
  unsure (1)..(272): unsure at all n locations
ctaagcttagaattagaaacaaagaaaagaagaaaggaaagaattgatcgttgaaaatgcagggaggaaagaaagcgggagagtccattaaggaaacagctacaaacattggngcttctgccaaggctggcatggagaagaccaaggccactgtccaagagaaggcagaaagaatgacagcacgtgatccggtgcaaaaggagttggcaacccaaaagaaagaggcaaagatgaaccaggcggagctggacaagcaggcggcgcgtcacata

SEQ ID NO: 283452 - DNA, 276 bp, Glycine max
  unsure (1)..(276): unsure at all n locations
cctgactgggacatgtttcatagtttacacccagcagcagattatcatgctgcagctcgtgcaattggtggatgtcctatttatgttagtgacaagccaggcaatcacaattttgatcttcttaagaagctggttctcccggatggttcggttctccgtgctcagtnacctggcaggcnaactcgtggttctctatttgtggntccagccagagataggactagcttgctcaaaatatggaacctgaaccaantgctctgggagttgtggtgnatt

SEQ ID NO: 283453 - DNA, 269 bp, Glycine max
  unsure (1)..(269): unsure at all n locations
tttgagttcataagcaaactcggtgttgacttttggtgtttccacgacagggatatagcccctgatggaaaaactcttgaggaatctaatgcaaacttggatgaagtggttgcccttgctcaagagctccagactaaggctaaaaaaagagtgttatggggaacagctcagttgttcatgcatcctcgttacatgcatggtgctgctactagctctgaattaaaggtctatgcatatgctgctgctcaagtgaagaaagccatagnggt

SEQ ID NO: 283454 - DNA, 270 bp, Glycine max
agagacccaaatggcataagtcgtggatcaggatttgttgcattctcaactcctgatgaggcatctagagcactcttggagatgaatggcaaaatggtggtaagcaaacctctgtatgtgactctagcccaacggaaagaagataggagagctagactgcaggctcagtttgctcaaatgcgacctgttggaatgccaccatctgtcggtcctcgtgtgccaatgtatcccccaggtggtccaggtattggtcaacaatattttatgccc

SEQ ID NO: 283455 - DNA, 268 bp, Glycine max
atttctactatttttcaatggcttctgcagatgttgagttccgttgctttgttggtgggcttgcttgggtcaccggcaacgatgccctcgagaaagccttttcaatctacggcgacatcgttgaatcgaaggttatcaacgaccgtgagactggaaggtccagaggattcggatttgtgaccttcgcctcagagcagtcaatgaaagatgcgatcgcaggaatgaacggccaggaccttgacggtcgtaacatcactgtcaacgaagc

SEQ ID NO: 283456 - DNA, 268 bp, Glycine max
cctaagtgagaaacaaagaaaggaaataattgatctttgaaaatgcagggaggaaagaaagctggagagtccatcaaggaaacagctgcaaacattggtgcttctgccaaggctggcatggagaaaaccaaggccactgtccaggagaaggcagaaagaatgacggcacgtgatccgatgcaaaaggagttggcaacccagaagaaagaggcaaagatgagccaggcagagctggacaagcaggcggcgcgtcacataacacggcggc

SEQ ID NO: 283457 - DNA, 273 bp, Glycine max
  unsure (1)..(273): unsure at all n locations
ctcttcgatcatcacctcnccacaatgccgccgaagttcgacccctcccagatagtcgacgtcttcgtccgcgttaccggcggcgaagtcggcgcggcgagttccctggccccgaagatcggtcccctcggtctctcccccaagaagatcggagaagacatcgccaaagaaaccgccaaggactggaagggcctccgcgtcaccgtnaagctcaccgttcagaatcgtcaggcgaaggtcacggtggtcccctccgccgccgccctcgttatc

SEQ ID NO: 283458 - DNA, 179 bp, Glycine max
agaatccagagccaactcagggtgaggaagcaaccctgcaagcagaaccaaaatttggaagtaccaggtctctaggcagagcatcaccgccgaagcagcagacagcttaaacaactctggcaagcccgaaaacgcttgaaaactgaaccctctccaagtgtgcttacacttttcactct

SEQ ID NO: 283459 - DNA, 212 bp, Glycine max
  unsure (1)..(212): unsure at all n locations
ccgttgtnttctcacttcgtcanaaccaaccaaacccctccccaattctcaagccaaccatgtcttccttcaagagcangtaccaagntgaactcattgccaatgctgctnacattggcaccccagggaagggtatccttgctgctgatgngtcaactggtacaattggcaagcgattggccagcattantgtcgagnntgttgaagcaaat

SEQ ID NO: 283460 - DNA, 268 bp, Glycine max
  unsure (1)..(268): unsure at all n locations
ctctgcatcgctgcgttttccgaatcgaaaggtgaggttagtaagtaacaatggtggagaaggccaagggtaggaaggaggaggttgtcactcgagagtacaccatcaacctccacaaacgcttgcatggctgcacatttaagaagaaggctcctaaagcaattaaggagataaggaagtttgctcagaaagcgatggggacgaatgatgtaagagtggatgtgaagctcaacaaggctgtgtggagccaggntnccggagngnccca

SEQ ID NO: 283461 - DNA, 269 bp, Glycine max
  unsure (1)..(269): unsure at all n locations
cgtttcggaagcagacacagatggctcgtacgaagcaaaccgctcgtaagtccacaggaggaaaggctcctaggaagcagcttgcaaccaaggctgcacgtaagtctgcaccaactactggtggtgtgaagaagccccaccgttatcgtcctggtaccgttgctcttcgtgagattaggaaataccagaagagtaccgagcttttgatccggaagctccccttccagaggctggttcgtgaaattgctcaggntnaananttgnntggg

SEQ ID NO: 283462 - DNA, 270 bp, Glycine max
caaagtttaagtcatcatgggtaaggaaaagactcacatcaacattgtcgtcattggacatgtcgactctgggaagtcaactaccactggtcatttgatctacaagcttggaggtattgacaagcgtgtgattgagaggttcgagaaggaggctgctgagatgaacaagaggtcattcaagtatgcctgggtgcttgacaagctcaaggctgagcgcgaaagaggaattaccattggtattgctttgtgggagtttgaaaccaccaagta

SEQ ID NO: 283463 - DNA, 269 bp, Glycine max
  unsure (1)..(269): unsure at all n locations
cggaaaggagcttngcaagagcattaacccagatgangctgtngcctatggtgcagcagtncaggctgccattctcagtggcganggtantgagaaantgcaggatcttctgttgttggatgttantcctctctcccttgggttggagaccgcgggaggagtcatgactgtgttgattcccagaaacacanccattcccaccaagaaggnncaggnattttcganctattccgacnancagcctggtgtgttgatcagtctatgaaggt

SEQ ID NO: 283464 - DNA, 174 bp, Glycine max
acttaggcctggagtctgttggtgtgaaaatagctaaagatggagctatagaggttgatgaatactctcaaacatcagttccttcaatttgggcagttggagatgttacaaacaggataaatctcaccccagttgctttgatggagggaggggcattagtaaaaacactgtttc

SEQ ID NO: 283465 - DNA, 272 bp, Glycine max
  unsure (1)..(272): unsure at all n locations
gtcctgagctactcacaatgtggtttggagaaagtgaggctaatgtgagggaaatttttgacaaggctcgcggttctgctccatgtgtcctattctttgatgaacttgactctattgcaactcagaggggtagtagtgtcggagatgctggtggtgctgctgacagggttttgaaccaactgcttacagaaatggatggaatgtcggcgaagaaaactgtgttcatcattggggccactaatcgaccagatattattgacccagctcnnctg

SEQ ID NO: 283466 - DNA, 266 bp, Glycine max
  unsure (1)..(266): unsure at all n locations
cctaagtgagaaacaaagaaaggaaataattgatctttgaaaatgcagggaggaaagaaagctggagagtccatcaaggaaacagctgcaaacattggtgcttctgcnaaggctggcatggagaaaaccaaggccactgtccaggagaaggcagaaagaatgacggcacgtgatccgatgcaaaaggagttggcaacccagaagaaagaggcaaagatgagccaggcagagctggacaagcaggcggcgcgtcacataacacggcg

SEQ ID NO: 283467 - DNA, 265 bp, Glycine max
gagggtatcccaccagaccaacagaggctcatttttgctggcaaacagcttgaagatggccgaaccttggctgattacaacatccaaaaagaatctaccctccacttggtgctccgtctgcgcggtggtatgcaaatctttgtgaagacccttactgggaagaccattactttggaggtagagagctcagacacaattgacaatgtgaaggcaaagatccaagacaaggagggtattcctccagaccagcaaaggttgatttttg

SEQ ID NO: 283468 - DNA, 271 bp, Glycine max
  unsure (1)..(271): unsure at all n locations
acaactacaagaaagaacttccttataaccaaaaccaacaacaactatggcaagttatcagaagcactacgatgatcagggtcgcaaggtcgacgagtatggcaatgttgagaggcaaactgacgaatatggcaacccggttcatgccactagtgtcacttatgtngccaccaaaagtgttggtggctacaatgatgacgctaataagcaacatgatattactggtgtctatcccgagaaagacaccggtagacatcattttggtcgtggt

SEQ ID NO: 283469 - DNA, 273 bp, Glycine max
  unsure (1)..(273): unsure at all n locations
tggccatgatccgtttgatatcttttcatctttctttggaggtggaagtagtcgaggtaggaggcagaggcgcggagaagatgtggttcaccctctcaaggtctctctggaggacctttatctcgggacntctaagaagctctccctctccagaaatgtcatatgctccaagtgcactggtaagggttctaagtctggtgcttcgatgangtgtgctggttgtcaaggaactggtatgaaggnttctataagacatcttggcccgtccatgat

SEQ ID NO: 283470 - DNA, 175 bp, Glycine max
gaggagacacaccttcagcagcagcagccatggttctcaaaaccgaactatgccgattcagcggtgccaagatctacccagggaaaggcatcagatttgttcgtggtgattctcaggttttcctgtttgctaactcgaaatgtaagaggtatttccacaacaggttgaagccatc

SEQ ID NO: 283471 - DNA, 267 bp, Glycine max
  unsure (1)..(267): unsure at all n locations
aganaagatagaaatggagaagtttccagttgttgacatggggaaccttaataatgaagagagatcagcaaccatggagataatcaaagatgcctgtgagaactggggtttctttgagttggtgaaccatgggatatccatagagttgatggacaccgtggagaggatgacaaaagagcactacaaaaagtgtatggagcaaaggttcaaagaaatggtagcaagcaaaggtttggagtctgctcaatctgaaatcaatgatttgga

SEQ ID NO: 283472 - DNA, 183 bp, Glycine max
  unsure (1)..(183): unsure at all n locations
gccgggctgggttttggggatcagtgaaaactcttgctcgaggttatgagattgtcatgggtttgctattgttcactcctgttgcttttctggcttggtttccatntgtttcagaatttcaaacccgtatgctgttcaaccaagcattcagcagaggtttgcaaatttctcgtattcttggtg

SEQ ID NO: 283473 - DNA, 141 bp, Glycine max
gactgaacctggtctcagtgttatcatcagtgctgtattgaccagtcgagcaatattccaaaggatgaagaattacacaatctatgcagtttccatcacaatccgtattgtgcttggtttcatgttactggccctcatatg

SEQ ID NO: 283474 - DNA, 209 bp, Glycine max
caaacctaacgcagcatcgctattctcttcattccatggctttgcccaaccagcaaaccgtggattaccctagtttcaaactcgttatcgtcggcgatggtggcacaggaaagacaacctttgtgaaaaggcatctcaccggagaattcgagaagaaatatgagccaaccatcggtgtggaggttcacccattggattttttcacaaag

SEQ ID NO: 283475 - DNA, 271 bp, Glycine max
  unsure (1)..(271): unsure at all n locations
gaataggcaagtgaaggcaaagcaggttactttccacaggaagaagaatttgcagnactatgagatatctgcnaagagcaacnacaatnntgaaaagccattnttgtacttggccaggaaacttgcaggcgatgcnaacntgcacnttgnagaatcncctgcattggctccaccagaagtncaaattgattagctgcacaacaacagcacgangctgaacttcttacaantgcnagncannccttnctgacgacgatgatgacaattngag

SEQ ID NO: 283476 - DNA, 269 bp, Glycine max
  unsure (1)..(269): unsure at all n locations
ggatgagaacttnaagcctctgtcagngccngttcgngttggacaagccgtagatgttgttngacaagcaggncgtccgaaaacaatcactggctntcagacccactccacccctgtncnccnggctgctggggacagggctgagctggcaacggnaaaanacattcccctancaccaatncttgaaggtttcgtaattttgaaggagaatccagattacagggaagagtgagaaccacggnagtgatgcntnttctttgtnccaagtg

SEQ ID NO: 283477 - DNA, 264 bp, Glycine max
  unsure (1)..(264): unsure at all n locations
atttgttagtttttgcgatcaaagtaaaatcaaagctatgcaggaggcgaanncggtggcgaaatcaacatgcaacgcagtggaagtatgcaactaaaggngaagaaggtgngggatttgatggtggacaagaagaggctagtggaggtgccgtacatggcgtcgctggcccacacaatgactacactggtagcgaacaaggttgtggcggtgccggtggctgcgccgccggggaaatggatcggagccggagttccatgatcg

SEQ ID NO: 283478 - DNA, 217 bp, Glycine max
  unsure (1)..(217): unsure at all n locations
aaggaggctgcnaacntcacagcccaagncancatcatgaaccacccnggtcagattggaaanggctatgcccctgtcctcgacngccacacnncncacantgctgtcaagtttgctgaacncatgaccaagattgacaggcgatccggcaaagagcttgagaaggagcccaagnttttgaagaacggtgatgctggttttgtnaagangattccaa

SEQ ID NO: 283479 - DNA, 264 bp, Glycine max
  unsure (1)..(264): unsure at all n locations
cgaacgagcgaccttctncgtntctcgcaaagnttaagtcatcatgggtnagganaagactncacatcaacattgtcgtcattggacatgtcgactctgggaagtcaactaccactggtcatttganctacaagcttggaggtattgacaagcgtgtgattgagaggttcgagaaggaggctgctgagatgaacangaggtcattcaagtatgcctgggtgcttgacaagctcaaggctgagcgcgaaagaggaattaccatga

SEQ ID NO: 283480 - DNA, 264 bp, Glycine max
  unsure (1)..(264): unsure at all n locations
gttgtttcantgcatcanngnccggangnnaaatatggaaagcgagtccacattcntccngnggatganacnatngaaggagnaacaggaaanctcttngatgccnacttaaaaccttatnnccnagaggcatatcgaccagngaggaagggtgacctcttccttgtgagaggggggatgagaagtgntgaatncaaggtnattgaaactgacccttctgagnactgtgntgtcgctccagacacagagatcnnctgtgaagga

SEQ ID NO: 283481 - DNA, 261 bp, Glycine max
  unsure (1)..(261): unsure at all n locations
gtcgactcntgcnaggaannggctganganagactncaagaggcngcaacaagacccgcctgcagggatcagcggtgccccccagganaacaacataatgctgtggaatgctgtnatatttggtccttatgatactccatgggatggaggcacgttcaagttgactctccagnttactgaggattatccaaataaaccaccaactgtgcgatttgtgtctcgcatgtttcanccaaatatttatgctgatggaagtatttg

SEQ ID NO: 283482 - DNA, 259 bp, Glycine max
  unsure (1)..(259): unsure at all n locations
accgtgttgacaacatggtnattnaagctatctncctncttganacacttgacaaggatgtgaattcgtnctccatgagagtcagagagtggtttcanggnactttccntagctggtgaaaatngtnaatgataattatctgtatgccaaagttgcaaaatttattgaggataaggnanagttggctgaagacaagattccagccttaactgacatagttgagatgaagatanagnaagggtnttgtggaantnccnac

SEQ ID NO: 283483 - DNA, 261 bp, Glycine max
  unsure (1)..(261): unsure at all n locations
gtaggtnaacactcttcttcatcgtcgncgcaatgggacgtgtgatccgtgcgcagcgnaanggagcaggctcggtctncaagtcccacacgnaccaccgcaagggccctgcacgctnccggagcctggacttcggggagcgcaacggctacctcaagggcgtggtcaccgacgtcatccatgaccctggccgcggcgcgccgtcgccaaggncgccttccgccacccnntcagatacaagaagcagaacgagctcttcat

SEQ ID NO: 283484 - DNA, 263 bp, Glycine max
  unsure (1)..(263): unsure at all n locations
ggagcccacgccctgagcttttgcntccncacctggtntggcangatgacaccctcgtggttattggctggggnacatctgtcaaaattgcttcaattaggacaaatcaccaaaaagnagccaangggtcatncnggcnagttccnttgtctggtatgacccaggtgganatcgtggcatcntttnaaaccagctatttcatctcaggacttgcgccctttggtgatgcttnggttgtnctagccagntattcctngagaaga

SEQ ID NO: 283485 - DNA, 261 bp, Glycine max
  unsure (1)..(261): unsure at all n locations
gntggttnagcttccatggaggcanccacagcttttnanancaannggggggaagcctcccaagggnattttactttatggacccccaggtnctggganganattaatancaagagcnntagctaacgaaactggngctttttncttntgtattaatggaccngagattatgtccaaacntgctggagagagtgaaagcaanctcaggaaancgtttgaagaagctganaagaatncaccgnccantanctttatgatgaa

SEQ ID NO: 283486 - DNA, 259 bp, Glycine max
  unsure (1)..(259): unsure at all n locations
cttagtcttctcnctccattctccaactccatntcttcgatctggagctctccgctttcaaagctgtcaaatttccgattcgggatggacaaatacganctcgtcaaggatataggatctgggaatttcggtgtggccaggctcatgcgtcacaaagacaccaaggagcttgntgccatgaaatacattgaacggggtcacaagattgatgagaatgttgcgagggaaatcatnaaccatagaagtcttcggcacccta

SEQ ID NO: 283487 - DNA, 260 bp, Glycine max
  unsure (1)..(260): unsure at all n locations
aaaaccnaagcttagaattaganacanagaaaagaanaaaggaaagaattgatcgttgaaaatgcagggagganagaaagcgggagagtccattaagganacagctacaaacatnggtgcttctgccaangcttgcatggagaagaccaangccactgnccaagagaaggcagaaagaatgacagcacgtgatccggtgcaaaaggagttggcaacccaaaagaaagaggcaaagntgaaccaggcggantggacaagcc

SEQ ID NO: 283488 - DNA, 170 bp, Glycine max
  unsure (1)..(170): unsure at all n locations
gnacacanctacnacaatnacntccttanaatcaaaannaacaacnactanggcaagttatnaaaagcactacgatgatcagggtcgcaaggtngacgagnatggcaacgtngagaagcaaaccgacgaatacggcaaccctgttcangctgctagtgncaccnnngnag

SEQ ID NO: 283489 - DNA, 260 bp, Glycine max
  unsure (1)..(260): unsure at all n locations
gggttttgnganctgcagctacgatgggtaagggaacggggagtttcggtaagaggaggaacaagacccacacccnactgtgtgaggtntggccgccgcagcnnccaccnccagaagagtcgtngctctgcgtgcgcnnaccccgcngcgcgcaccaggaaatanaactggagcgtgaaggccannaggagaaagaccaccggaactggaaggatgaggnacttgcgnaacgtgcctcgcagantcaagagcggttcaga

SEQ ID NO: 283490 - DNA, 167 bp, Glycine max
  unsure (1)..(167): unsure at all n locations
aatcaaagaaaggggtggtggctgcttcgaaagcttaataatttgtttatttccagaacatcatagttttcgcagcagcaaactaacaaattactcatatcatataataagatggcccgttctctctcgcaagccaaacgtattggtgtcctgttgctcaatcnatc

SEQ ID NO: 283491 - DNA, 264 bp, Glycine max
  unsure (1)..(264): unsure at all n locations
attcattcaagattcagcaagtgcgttttggaagcagagaccgaaatacttcgagatggcccgtacaaagcaaactgctcgtaagtcaactggaggaaaagctcccaggaagcagcttgcaaccaaggctgcacgtaagtctgcaccaacaactggtggtgtgaagaagcctcatcgttatcgccctggaactgttgctcttcgtgagattaggaaataccagaagagcactgagctcctaatcaggaagcttccanccccaga

SEQ ID NO: 283492 - DNA, 256 bp, Glycine max
aaacaattaataaagatgagtttgaagaacaacatggtggtgctaaaggtgtgtttgttgcttcttttccttgtgggggttacagctgcacgcatggaactgagcttcttcaaaagtgatcagtcatcaagttatgatgatgatgagtattcaaaaccatgctgtgatctctgcatgtgcacacgctcaatgcctcctcaatgcagctgtgaagatattaggctgaattcatgccactcagattgtaagagctgta

SEQ ID NO: 283493 - DNA, 133 bp, Glycine max
aaagaatcaaagaaaggggtggtggctgcttcgaaagcttaataatttggttatttccagaacatcatagttttcgcagcagcaaactaacaaattactcatatcatataataagatggcccgttctctctcg

SEQ ID NO: 283494 - DNA, 263 bp, Glycine max
  unsure (1)..(263): unsure at all n locations
aaagaatcaaagaaaggggtggtggctgcttcgaaagcttaataatttgtttatttccagaacatcatagttttcgcagcagcaaactaacaaattactcatatcatataataagatggcccgttctctctcgcaagccaaacgtattggtgtccttgttgctcaatctatcnccctaattcccgttcatcggcgaggttacgcagggcatccgatgtatcggtaagagttggattgggtaatattgggcgaaggaatggaat

SEQ ID NO: 283495 - DNA, 261 bp, Glycine max
  unsure (1)..(261): unsure at all n locations
atcctccccttggtcgttttgctgtgagggacatgcgtcaaactgtggctgtcggagtcatcaagagtgttgagaagaaagaccccaccggagccaaggtcaccaaggccgctgccaagaagaagtgattgcatttgggcaattttgctagcacatgtgatcatcatcgtggttactcctttatagtagttttatccttgcagagtcttaggtgttttgtttaagtaatatttttaagtttctgccgattncatgnanccg

SEQ ID NO: 283496 - DNA, 258 bp, Glycine max
taacaactcacctgccgaatcaactagccccgaaaatggatggcgctaaagcgcgcgacctatacccggccgtcggggcaaggaccaagccccgatgagtaggagggcgcggcggtcgctgcaaaacccagggcgcgagccggggcggagcggtccgtcggtgcagatcttggtggtagtagcaaatattcaaatgagaactttgaaggccgaagaggggaaaggttccatgtgaacggcacttgcacatgggttagt

SEQ ID NO: 283497 - DNA, 256 bp, Glycine max
attccaatatattccattctctctgtgtatttccctacctctcccttcaagatgcagatcttcgtcaagaccctcaccggcaagaccatcacccttgaggtggaaagctctgacaccatcgacaacgtcaaggccaagatccaggacaaggaaggaatccccccggaccagcaacgtctcattttcgccggaaagcaacttgaggacggccgtacccttgctgactacaacattcagaaggagagtactcttcacc

SEQ ID NO: 283498 - DNA, 253 bp, Glycine max
ttggttgagcttccattgaggcatccacagctttttaaatcaattggtgtgaagcctcccaagggaattttactttatggacccccaggttctgggaagacattaatagcaagagctgtagctaacgaaactggagcttttttcttttgtattaatggaccagagattatgtccaaacttgctggagagagtgaaagcaatctcaggaaagcgtttgaagaagctgaaaagaatgcaccgtccattatcttta

SEQ ID NO: 283499 - DNA, 260 bp, Glycine max
  unsure (1)..(260): unsure at all n locations
ttgcaggaaaaatggtttcgctgaaactgcagaagcggctcgcagccagcgtcctcaagtgtggcagaggaaaggtttggcttgaccccaatgaagtcaacgaaatctccatggctaattctcgccaaaacataaggaagctggttaaggatgggtttattatcaggaagcccaccaagattcactctcgctcacgtgcccgccgaatgaaggaagccaagaggaaaggacgtcanctggaatatggtaagggtaagggg

SEQ ID NO: 283500 - DNA, 258 bp, Glycine max
  unsure (1)..(258): unsure at all n locations
acaatagtggtcatcacacaattgaatcttgctatacctcgatatgagcaacatttgcgggctgttgttggtcttccacttggtgatccatcactgaaaactccagctgctatcatgtacaatatattgggtgaagaagaggggggtcttggttttcaattagctcatcaattgatcaaaagggcattgaccatccctggggcaactgttcattggtatgataagcnagagatgagaaagcaacgaaagatgggccat

SEQ ID NO: 283501 - DNA, 254 bp, Glycine max
  unsure (1)..(254): unsure at all n locations
angaaaggtattatgctgaaaaatttggtgcattggatctggagaagattggaaaaatcaagaaagatacagtcttaaaatatgtagaaggcctttgttgggtttgtcggtactactaccagggtgtctgctcatggcaatggtactacccataccattatgctccttttgcttctgatcttaaagatctagctgatctggagataactttttttttgggagaaccatttaaaccatttgatcagctaatgggg

SEQ ID NO: 283502 - DNA, 256 bp, Glycine max
cacccaccctccatacacactctctctgagtcggtcgagttgaatcggtgtgagtcagtgaccgagtcgaaccatgtcggacgaagaacaccatttcgaatccaaggccgatgctggagcctccaagacctatcctcaacaagccggaaccatccgcaaaaacggttacatcgtcatcaagggtcgtccctgcaaggttgttgaagtttctacttccaagactggtaagcacggtcatgccaagtgtcactttgtt

SEQ ID NO: 283503 - DNA, 256 bp, Glycine max
  unsure (1)..(256): unsure at all n locations
ctcatcctccgtaacctccgagctctgcaccgaagaacgaagccatggggaagacacatggaatgggatctgctcgcaagctcaagtnccaccgcaggaggcaaaggtgggctgacaagtcatacaagaaatcacatcttngaaatgaatggaagaaaccttttgctggttcatcccatgccaagggaattgtccttgaaaagataggtattgaggctaagcagcccaactctgccattcgtaagtgtgccagggt

SEQ ID NO: 283504 - DNA, 254 bp, Glycine max
ggcaccaacacaactttgaaaagaacttgttgaagtgtggttggtctcctgatggaagcaaggtaacagctggtagttctgatcgaatggtttacatctgggataccacttctcgccgcatcttgtataagcttcccggtcacaatggatctgttaatgagtgtgtttttcatcccaatgagcctattattggatcttgcagcagtgacaagcagatttatcttggggagatatgaagcacaacgtttaggaaa

SEQ ID NO: 283505 - DNA, 258 bp, Glycine max
  unsure (1)..(258): unsure at all n locations
anatatatgatcttggaaggaagatttggacatcaaaaggagaagaaaaagaagctgccaagaaggagttcatagaagcccttaaattgttggaggaacagctgggagacaagacttattttggaggagacaatctaggttttgtggatatagcgcttgttccattctacacttggttcaaagcctatgagacttttggcaccctcaacatagagagtgagtgccccaagtttattgcttgggcaagaggtgcttcag

SEQ ID NO: 283506 - DNA, 256 bp, Glycine max
cttcttgttcaaatcttaggagctgaggagaatcaatcgagagaaatatgtctggtatcgctcgtggacgccttgctgaggaacgaaagtcatggcgcaaaaaccatccacacggtttcgttgccaagcccgagactctacctgatggcaccgtaaatttgatggtctggcattgcactattcctggcaagaccgggactgattgggagggtggatatttcccactgacaatgcattcagtgaagattaccctagc

SEQ ID NO: 283507 - DNA, 254 bp, Glycine max
ttgatggacttgagatatgggatgctatcaagacatgggtccatgaatacgttttcttgtactacaaatcagatgacacacttagagaagatcctgaactccaagcctgctggaaagaactcgtagaggtgggtcatggagacaagaaaaatgagccatggtggcctaagatgcaaactcgtgaagagctagttgaagcttgcgctatcatcatatggactgcttcagcacttcatgcagctgttaattttgga

SEQ ID NO: 283508 - DNA, 251 bp, Glycine max
acgtgttgagaccggtgtcttgaagcctggaatggtggtgacttttgcaccaactggactgacaactgaagtcaagtctgtggagatgcaccatgaatctcttacagaggcacatcctggtgacaatgtgggattcaatgttaagaatgttgctgttaaggatttgaagcgtggttatgttgcctcaaactcaaaggatgaccctgcaaaggaggctgctaacttcacagcccaagtcatcatcatgaacc

SEQ ID NO: 283509 - DNA, 252 bp, Glycine max
tataaagtgtctattggaggaagaggccattaaggtgggaggagccaaccacagccatgccactcaagacctccatgattcaattgctgctggtaactatcctgagtggaaactgtttgttcagacaatagatcctgagcacgaagacaaatttgactttgaccctcttgatgttactaagacttggcctgaggacattatacccttgcagcctgttggtcgcttggtcctgaataagaacatagataattc

SEQ ID NO: 283510 - DNA, 251 bp, Glycine max
aagttgtgctgtgccgcctcttccgtaggcagcagcaatggcctcaaatcccaaaactttgacctttgaggaggtagctaagcacaacaacaaaaaggattgctggattattatcaatggaaaggtgtatgatatcacaccatttttggatgagcatccaggaggtgatgaagttttgctgacgtcaacagggaaggatgccaccattgattttgaagatgtgggccacagtgattctgctatagaaatga

SEQ ID NO: 283511 - DNA, 252 bp, Glycine max
gcatgttttgctgattccgcgcattttcgagtgtttgcctcaaaggattgaccgtgagagcttcctccttgcacttcacatggcagtggaagctgataatccatattttcgattgggttacaacagtttgggtgcttttgcaaccattaaccatcttcacttccaggcttattatttggctctgcccttcccaattgagaaggcccccactaagaaaattgcaagtttaaatggtggggtgaagatatctga

SEQ ID NO: 283512 - DNA, 249 bp, Glycine max
gcgagagagagaaaccctagcaaaaatgccggctggtcacggtttgagatcccgcaccagagattccttctctcgtcccttcaggaagaagggtaccatcgccctcaccacatacctcagaacctaccacgtcggcgattatgtcgacgtcaaggttaacggcgccgtccacaagggaatgcctcacaagttctaccatggccgcaccggtcgcgtctggaatgtcaccaaacgtgctgttggggtcga

SEQ ID NO: 283513 - DNA, 256 bp, Glycine max
gaggtatgcagatatttgtgaagactctgacagggaagaccattaccttgagaggtggaaagctctgatactattgacaatgtgaaagctaagattcaggacaaggaaggtatccctccagatcagcagaggctcatttttgctgggaagcaattggaagatggtcgtaccttggcagattacaatattcagaaggaatccactttggcatcttgtccttcgccttcgtggtggttgctaagggggaatcctttta

SEQ ID NO: 283514 - DNA, 256 bp, Glycine max; identical to SEQ ID NO: 162730

SEQ ID NO: 283515 - DNA, 254 bp, Glycine max
  unsure (1)..(254): unsure at all n locations
ggaaagtctggagagagatgttagtgaagaatctggctggaaacttgtgcatggtgatgtttttcggcctcctcgcaacttagttattctttcagctgttgttggcactggtgctcaacttgcgttgctggttcttcttgtcgtcttgttggctattgttgggatgttgtatgttgggcgangagccattgtcactactttcatgtgtgttatgctctcacatctttcattcctggttatgtggagtgggggga

SEQ ID NO: 283516 - DNA, 249 bp, Glycine max
gaatcctcgagatttctttcgattgaactcatttctctcttcttcgccacgcaatcttgtctctgtaagcggtgattttggttctggacaatgtctcgtgtttatgttgggaatttagaccctcgagtcagtgagagggacctcgaagatgaatttcgtatatatggtgttctaggagtgtctgggttgctcgaagaccaccgggatatgcatttattgagtttgatgataggagggatgcacttgatg

SEQ ID NO: 283517 - DNA, 250 bp, Glycine max
cagatcttcgtcaagaccctcaccggcaagaccatcacccttgaggtggaaagctctgacaccatcgacaacgtcaaggccaagatccaggacaaggaaggaatccccccggaccagcaacgtctcattttcgccggaaagcaacttgaggacggccgtacccttgctgactacaacattcagaaggagagtactcttcacctcgtcctccgtctccgtggtggcatgcagatcttcgttaagacactca

SEQ ID NO: 283518 - DNA, 249 bp, Glycine max
aggatttgaagatgatacaagttcaggataacaaaaaccatatcatggaagtgcttgcagccaatgatcttgattgtgatgacctggattccgtttgtgtctcagacacaatggttctcagtaactatatagaagagattattgtgtcagcaatttcgtatcatttgatgaaaaacaaagacactgaatacagaaatgggaagctcgttatttcttccaatagtttgtcccatgcattgaatatattcc

SEQ ID NO: 283519 - DNA, 249 bp, Glycine max
  unsure (1)..(249): unsure at all n locations
agattagagattttgttgaagaacaaatgtctgtaagaggtattgaattccataccgaggagtctcctcaagctatcacgaagtcagcggatggctcattctctttaaagaccaacaaaggtacagtggacggtttctcacatattatgtttgcnacaggacgcagacctaatactcagaacttaggcctggagtctgttggtgtgaaactagctaaagatggagctatagaggttgatgaatactctc

SEQ ID NO: 283520 - DNA, 256 bp, Glycine max
  unsure (1)..(256): unsure at all n locations
aaaatttgaagagtttgtttattgtgaaaaaaagaaaaatgcaggcagcaaagaaagccatagagacctttaaggaaaccgcagccaacattggcgcctctgccaagtctggcttggagaaaaccaaggccactatccaagagaagaatgagaagatgaatgcagaagatcaaactcaaatggatatggctaccaagaggaaagaagagaagatcaaccaggctgagatggagangcagcaggcccgtaagtacta

SEQ ID NO: 283521 - DNA, 250 bp, Glycine max
agaaaccctagcaaaaatgccggctggtcacggtttgagatcccgcaccagagattccttctctcgtcccttcaggaagaagggtaccatcgccctcaccacatacctcagaacctaccacgtcggcgattatgtcgacgtcaaggttaacggcgccgtccacaagggaatgcctcacaagttctaccatggccgcaccggtcgcgtctggaatgtcaccaaacgtgctgttggggtcgaagtcaacaag

SEQ ID NO: 283522 - DNA, 248 bp, Glycine max
  unsure (1)..(248): unsure at all n locations
aaactaaagaagatggtaacgaaaaacaaaagggaaaagagaaaaggaggtttatttgtttttccacttcattcgagggtcacaggagcaccatattcctatgtttggatgtccatggcacaagaacatgggtggcgtgttttgcttgatntgtgtgggctcaaacctaaggaantgggcaccttgggtatgtcactttttaagcctgatttcatggtttgctcgttctacaaggtttttggagaaaa

SEQ ID NO: 283523 - DNA, 249 bp, Glycine max
catgctctagtcacagacaccgacacagatctgtcttccgaagcaggaactaaatatggctgacttgttggaatggtcaaagcaagataagaaacgaatgcttcatgtcgtctaccgtgttggtgaccttgatcgcaccatcaaattttacacagaatgtttaggaatgaagcttttgaggcaaagagatatcccagaggagaaatatgctaatgcttttcttggatttggccctgaagaatcccattt

SEQ ID NO: 283524 - DNA, 245 bp, Glycine max
  unsure (1)..(245): unsure at all n locations
atcaggtgtttgggtttgtgaagtatagaatagaattttgattattcaggttcttcaaaggggctgaatagaatagccagtgattgggagacccttttgatctaaatgtgtgctccttacttgagatctattttgaatggtttattcatattagttgaatttcaatatgggggtttattatgctacttgggaattgattggattatagtcaaacatgttnttattgcaaatgagactcacctggc

SEQ ID NO: 283525 - DNA, 245 bp, Glycine max
ccgttctattcttcttccaaaatgggtatctctcgtgattccatgcacaagaggcgcgccaccggcggcaagaagaaagcttggaggaagaagagaaagtatgagcttgggaggcagccagcaaacacaaagctatcaagcaacaagacggttaggaggattagggttcgcggtgggaacgtgaagtggcgcgctttgaggcttgatactgggaactactcttgggggagtgaggctgcaacccg

SEQ ID NO: 283526 - DNA, 288 bp, Glycine max
  unsure (1)..(288): unsure at all n locations
attgcctccctctgctgccgtccctaatctgaaggctcccgccatctgcgatcggatttcatggctccaaagaaggacaaggctcccccaccttcatccaagcctgccaagtctggcggtggcnnnnnnnnnnnnnnnnnnnnnnnnnnnggtaagcaaaggaaaaggtgaataacatggtgctcttcgatcagggtacctatgacaagctcctctctgaggcacccaaatacaagctcattactccttccattctctctgaccgtttgaggattaatggatcattgc

SEQ ID NO: 283527 - DNA, 273 bp, Glycine max
agtttgagcttttccacttctgtccaatccaagaaatagctccaagtatatcatttgcagcaatagggctactggatatgttcaacactggaggagcagtggagcaggttgagattcataaccgagcagcaacgaaaacaatagctcttgtgtaaggggaagaggcagatttggagtttactcctcccagagaccactgaagtgtgtggtaggtggcgctgaaaccgacttcaactatgactcagagaccgggttgacaaccttctccattcc

SEQ ID NO: 283528 - DNA, 274 bp, Glycine max
attgagaggtttgagaaggaagctgctgagatgaacaagaggtctttcaagtatgcctgggtgctggacaaacttaaggctgagcgtgaaagaggaatcaccattgatattgctttgtggaagtttgaaacaacaaagtattattgcacagtattgatgcgcctggacatagggatttcattaagaatatgattactgggacatcccaagctgactgtgctgttcttatcattgattcgaccactggtggttttgaagctggtatttccaagga

SEQ ID NO: 283529 - DNA, 274 bp, Glycine max
ctaacaattgctgttgaactcgtagctaatccgtcaatcatttttatggatgaaccaacttcaggtcttgatgcaagagcagcagccattgtgatgaggactgtgagaaacactgttgacactggaagaacagttgtatgcacaattcacaacctagtattgatatctttgaagcctttgacgagttgttgttgatgaagagaggagggcaagtgatctactcaggaccattaggaaggaattcacacaagattatagaatattttgaggcaat

SEQ ID NO: 283530 - DNA, 274 bp, Glycine max
  unsure (1)..(274): unsure at all n locations
caaaaaatggcatcggataaggtggtggaaacggtcatagcagggaactacgtggaaatggaaactgaagggaagcccaaggacgtaaaaaccaagctatcaagcttgttgtggcatggaggttctgtttatgatgcttggtttagctgtnttctaaccaggtggcccaagtgctgcttacgttgccatactcattctcccaactgggaatgctttctggcatacttttccaaatcttctatggtttactcggaagttggacagcttacctcat

SEQ ID NO: 283531 - DNA, 277 bp, Glycine max
  unsure (1)..(277): unsure at all n locations
gccgcagcaagtgatcgaagcgaaaagagagaaattcatcgtcgcagtaatcatgggtaaggttcatggatcacttgcacgtgctggtaaggttagagggcaaaccccgaaggtggccnnnnnnnnnnnnnnnnnnnnnccacgtggccgcgccacaagaggntgcagtacaatcgccgattcgtcaccgccgtggtgggattcggcaagaagaggggacccaactcgtctgagaagtgaggccgaggcttgaggaatatgttgctactctatttga

SEQ ID NO: 283532 - DNA, 278 bp, Glycine max
catgctgttcatcccattactgctgtgcaactggagtggtccctttggactcgtgaaattgagcaagatattgttccactttgcagggaacttggaattggaatagtaccatacagcccccttggccgtggattttttggtggcaaggctgtgtagaaagtatacctgcaaacagttttctggcatttcaaccaaggttacgaggggagaactttgacaagaacaaaatcttatattctaggatagaaaaattggcagagaagtatggatgtacatct

SEQ ID NO: 283533 - DNA, 276 bp, Glycine max
  unsure (1)..(276): unsure at all n locations
ctttcaagcgcaggaatggaggtcgcaacaaacacggccgcggccacgtcaagttcattcgatgctccaactgcggcaaatgctgccctaaggacaaggctatcaagaggtttctggtgaggaacattgttgaacaggctgcagtcagagatgtcaggaggcttgtgtctacgaacaatacacgnttccgaagctgtatgtgaagatgcagtattgtgtttcctgtgctatccactctcatgttgtgaggntcgatccgcactgataggagaagcg

SEQ ID NO: 283534 - DNA, 280 bp, Glycine max
gcagactagtatccgatcctctgtcctctcgaagctttcatcgttcaacatattctcaccatctcagtcatgggcctgctatcttgttttaggtctaccgtcctgagaaaatgttccaaaggaagctctggcatgtcaagattcctgtatacgacaattttcaacgaaacttgatttcgtctggtggcaatgaatcgtattatgggtattttaacaggagatcatacacttcactttatatgggaactggaactgtgggtgggattacaagtgctagaat

SEQ ID NO: 283535 - DNA, 276 bp, Glycine max
gtggaaatgtcgggatcggaggacgagggaggagaagagtacctcttcaagatcgtcataatcggagactctgcggtgggcaaatccaaccttctctcccgctacgcccggaacgagttcaacatgcactccaaggccaccataggtgtcggttccagactcagtgcttggaaatcgactccaaggaagtcaaggctcagatttgggacaccgccggccaagagcgattccgcgccgtcacctccgcctactaccgcggcgctgtcggcgcctcat

SEQ ID NO: 283536 - DNA, 274 bp, Glycine max
  unsure (1)..(274): unsure at all n locations
tcacataggctattaagggtgagatatatagaaaaacaaaggagaaaagatagaaatggagaagtttccagttgttgacatggggaaccttaataatgaagagagatcagcaaccatggagataatcaaagatgcctgtgagaactgggtttctttgagttggtgaaccatgggatatccatagagttgatggacaccgtggagaggatgacaaaagagcactacaaaaagtgtatggagcaanntgttcaaagaaatggtagcaagcaaaggt

SEQ ID NO: 283537 - DNA, 269 bp, Glycine max
  unsure (1)..(269): unsure at all n locations
aacaaaaagtttacgttacaaatcgcataataaccgtcctaagtttattgagagaattttgcaagtgtgaganacatggcatctcgtcaaaacaacaagcaagagcttgatgaaagagcaaggcaaggagagactgttgtcccgggggaactggtggcaagagcctggaggctcagcaacaccttgctgaaggaaggagcaagggagggcaaacaaggaaggaacagctgggtacagaagggtaccaggaaatgggacgcaaaggaggg

SEQ ID NO: 283538 - DNA, 270 bp, Glycine max
tccacgattcctcatcatagatgatggttggcaacagattgaaaataaagcaaaggatgctactgaatgtttggtacaagaaggagcacagtttgctactaggttgactggtattaaagagaatactaaatttcaaaagaaattacagaacaatgagcagatgtcaggtctgaagcatctagtacatggagcaaagcagcatcacaatgtgaaaaatgtatatgtatggcatgcactagctggttattggggtggagtgaagccagcagc

SEQ ID NO: 283539 - DNA, 273 bp, Glycine max
  unsure (1)..(273): unsure at all n locations
ttgatgcaaaactatatgaactacttggtgatcggacagcagctgatgatgaaaagccttctagaaagaagaaggagaaacctgcaaaagtagaggataaggcagcacctgttgctactcctgaaaagtcacctgaagaagaccttaaccatttttaatattccctaatccagagganaatttcaaggtgcatactgaagtgccttttagtgatggtagtattttgagatgttgcaatacaagggatcttcttgacaaacacttaaaagcaac

SEQ ID NO: 283540 - DNA, 272 bp, Glycine max
ggtaaatgcagtttctggcagcatgcctggtcctcatgggtcaaatagatctgttcctcggccagtgaatgttgttggaatgcaaagaatgccccctcaagcaatggcagcttataatctctcatctcaggcagccatgggagacggatgaatcctggtggtatctcaaagcaacgaggtgttccacaggcccatcagccgcaacagttgagaaggaaggagcaaatggggatgccgggataccctgcacaacagaagtcaagacgaatata

SEQ ID NO: 283541 - DNA, 277 bp, Glycine max
gagagagcaagtgacaagagtggagtgagagatagtgactgcaaaaccgctccagccttgtttcttctcagatcttcttccatggaacagtacgagaaggtggagaagataggcgagggaacatacggcgtcgtttacaaggctcgcgacccgtcaccaatgagaccatcgctctcaagaagattcgcctcgagcgggaggacgaaggcgttcccagcaccgccattcgcgagatttctctcctcaaagagatgcagcataggaacattgttaggtt

SEQ ID NO: 283542 - DNA, 282 bp, Glycine max
  unsure (1)..(282): unsure at all n locations
caatgtcgttgattccaagtttcttcggcaccgggcgaagaaccaacgtcttcgaccccttctccctcgacgtgtgggacccattccatggcttccccggcaccaccgccctctccgctcagcgctccgagacggcggccttcgccaacacgcgcatcgactggnaggagacggcggaggcgcacgtgttcaaggcagacctgccggggctgaagaaggaagaggtgaaggtggagatcgaggaggagggaagggtgctgcagataagcggacagagaacaa

SEQ ID NO: 283543 - DNA, 274 bp, Glycine max
ccttcaggagcagtcatggttctcaaaaccgagctgtgccgattcagcggtgccaagatctacccagggaaaggcatcagatttgttcgtggtgattctcaggttttcctgtttgctaactcaaaatgtaagaggtatttccacaacagttgaagccgtcaaagctcacgtggactgcaatgtaccgaaagcagcataagaaggatattgctcaagaagctgtgaagaagagaagacgtgctaccaaaaaaccttactctaggtctattgttgg

SEQ ID NO: 283544 - DNA, 268 bp, Glycine max
gtgaaggtgctctgcctcaaagccatggaaatcctcgtcgaagagagcaacgttcaaagggtcgacgctcctgtcaccatatgtggtgatattcacggtcagttttatgacatgaaggagcttttcaaagtaggaggggattgcccaaaactaactatttattcctgggggattttgttgatagagggttttactcggttgaaacgtttctgcttctgctcgctcttaaggtgaggtatccagatcggataacacttattaggggaaa

SEQ ID NO: 283545 - DNA, 270 bp, Glycine max
aagaatcaaagaaaggggtggtggctgcttcgaaagcttaataatttgtttatttccagaacatcatagttttcgcagcagcaaactaacaaattactcatatcatataataagatggcccgttctctctcgcaagccaaacgtattggtgtccttgttgctcaatctatctccctaattcccgttcatcggcgaggttacgcagtggcatccgatgtatcggtaagagttggattgggtaatattgggcgaaggaatggaatcgtggga

SEQ ID NO: 283546 - DNA, 272 bp, Glycine max
cacttcccaaaaccccttcagaagcaaccatttagctcaattcagaccaaatgggccctccaattttcactcaaagcttcggtttcagagaccccacttggtcagagccatggtttctgattccaacacttccaggagacaaatagagttgtgtatgaccccgaaggaaggattaacaagttggctgatgaagtggacagggaaactcccctttcaaggcttactttgttctctccttgcaagataaatgttttcttgagaataaccaacaa

SEQ ID NO: 283547 - DNA, 270 bp, Glycine max
caacaaagtattattgcacagttattgatgcgcctggacatagggatttcattaagaatatgattactgggacatcccaagctgactgtgctgttcttatcattgattcgaccactggtggttttgaagctggtatttccaaggatgacagactcgtgaacatgctctgctttcattcacccttggtgtgaaacagatgatttgctgctgtaacaaaatggatgctactacacccaagtattccaaggccaggtatgatgaaattgtgaa

SEQ ID NO: 283548 - DNA, 271 bp, Glycine max
  unsure (1)..(271): unsure at all n locations
gcataataaccgtcctaagtttattgagagaattttgcaagtgtgaganacatggcatctcgtcaaaacaacaagcaagagcttgatgaaagagcaaggcaaggagagactgttgtcccgggtggaactggtggcaagagcctggaggcnagcaacaccttgctgaaggaaggagcaagggagggcaaacaaggaaggaacagctgggtacagaagggtaccaggaaattggacgcaaaagagggttgagcntgtggacaatcaggagaga

SEQ ID NO: 283549 - DNA, 267 bp, Glycine max
  unsure (1)..(267): unsure at all n locations
aatcagcatgggaaatgcaattagatttctcaaaagtcggatagccaagctacctttgacctngnctgaatcagaagcaanagcttctctcgagtcagatattgagtgttttataagtganaagattatacttgccaacaagggatagtgaagcatgctgtcaccaaaataagngatggtgatgtncttctaacttttgggtcttcatctgcngnnganatgatactattgcatgcacatgagtngggaagacagtttcgtgttgtt

SEQ ID NO: 283550 - DNA, 262 bp, Glycine max
  unsure (1)..(262): unsure at all n locations
gantcanagaaaggggtggtggctgcttcnaaancttaataatttgnntatttccagaacatcatagttttcgcagcagcaaactaacaaattactcatatcatataataagatggcccgttctctctcgcaagccanacgatnggtgtccttgttgctcaatctatctccctaattcncgntcatcggcgaggttacgcngtggcatccgntgnatcggtnagagttggattgggtaatattgggcgnngaatggaatcgt

SEQ ID NO: 283551 - DNA, 261 bp, Glycine max
gctctcctcctcctggtcgttggggccacacgctttcttgtgttaatggttctcatttggttgtatttggaggctgtggaaggcagggcttgctcaatgatgtgtttgtcctggacctggatgcaaagcctccaacttggcgtgaaatttctggattggcacctccgcttcccagatcatggcacagctcctgtactcttgatggtactaagttgatagtttctgggggatgtgcagactctggagttctcttgagtgaca

SEQ ID NO: 283552 - DNA, 267 bp, Glycine max
gccaccggcttctggtttatgaattcatgaaaaatgggtctcttgataattttctattcctgacagaactgcattcgggaaattttttgaactgggagtatcgatacaacattgccctgggcactgcaagaggcatcacatactacatgaggagtgccgtgactgcatagtccattgtgacataaaacctgaaaatattctcttggatgagaactatgttgccaaagtctcagattttggtcttgcaaagctcattaatcctaagga

SEQ ID NO: 283553 - DNA, 274 bp, Glycine max
  unsure (1)..(274): unsure at all n locations
aaccggatgaagaaactataaaaaattaataaggaagggaaccatatcagccagttttgtgccagtgatgtgtggctcagctttcaaaaacaagggagtccaaccattgctcgatgcggtagtggattatctaccatcaccacttgacttgccagcaatgaagggcagtgaccctgaaaacccagaaganacaatagagagggtagcaagtgatgatgaaccatttgctggactggcttttaagatcatgagtgatccatttgtaggctccctt

SEQ ID NO: 283554 - DNA, 264 bp, Glycine max
  unsure (1)..(264): unsure at all n locations
anaactctgcaaacatgttggtttatcaggacctccttacaggtgatgagcttctctcggactccttccgttacaatgaaattgagaatggaatgctgtgggaagttgaggggaagtgggttgttaagggagcagttgatgtgacattggtgcaaacccttctgctgagggtggagaagatgagggagtcgatgacgcagctgttaaggttgttgacattgttgatacattcagacttcaggagcaacccgcttttgataagaa

SEQ ID NO: 283555 - DNA, 266 bp, Glycine max
ctctgctcgtgcctctagggttatcatatctccatttccatttcctctctctcagtttccaagaatcttaagctatgggaaagtcttacccaaccgtgagcgctgattaccagaaggccgttgagaaggcgaagaagaagccagaggcttcatcgctgagaagagatgcgctcctctaatgctccgtttggcatggcactctgctggaacttacgacgtgagctcgaagaccggtggtcccttcggaaccataaagcacccctccg

SEQ ID NO: 283556 - DNA, 266 bp, Glycine max
accccacaaagggtgttggtcgattaagacagcaggacggtggtcatggaagtcgaaatccgctaaggagtgtgtaacaactcacctgccgaatcaactagccccgaaaatggatggcgctaaagcgcgcgacctatacccggccgtcggggcaaggaccaagccccgatgagtaggagggcgcggcggtcgctgcaaaacccagggcgcgagcccgggcggagggtcgtcggtgcagatcttggtggtagtagcaaatattcaaa

SEQ ID NO: 283557 - DNA, 261 bp, Glycine max
  unsure (1)..(261): unsure at all n locations
aagaatcaaagaaaggggtggtggctgcttcgaaagcttaataatttgtttatttccagaacatcatagttttcgcagcagcaaactaacaaattactcatatcatataataagatggcccgttctctctcgcaagccaacgtattggtgtccttgttgctcaatctatntccctaattcccgttcatcggcgaggttacgcagtggcatccgatgtatcggtaagagttggattgggtaatattgggcgaaggaatggaa

SEQ ID NO: 283558 - DNA, 250 bp, Glycine max
ggatggttcggttctccgtgctcagttacctggcaggccaactcgtgattctctatttgtggatccagccagagataggactagcttgctcaaaatatggaacctgaacaaatgctctggagttgttgggtatttaactgccaaggtgctggatggtgcaagatagagaagaaaacccgcatccatgatacatctcctggtacactcaccgcctctgtctgcgcctctgatgttgacctcatcacacaag

SEQ ID NO: 283559 - DNA, 259 bp, Glycine max
  unsure (1)..(259): unsure at all n locations
caatcagcatgggaaatgcaattagatttctcaaaagtcggatagccaagctacctttgaccttgtctgaatcagaagcaaaagcttctctcgagtcagatattgagtgttttataagtgaaaagattatacttgccacaaggtgatagtgaagcatgctgtcaccaaaataagagatggtgatgttcttctaacttttgggtcttcatctgctgttgaaatgatactantgcatgcacatgagttgggaagacagttt

SEQ ID NO: 283560 - DNA, 213 bp, Glycine max
  unsure (1)..(213): unsure at all n locations
ccaattcctgaatgtcctattcctggtgaaagctggaaggagataaganatgataatncagtnacttggttagcctattggagtgaccctatcaatcccaagttattcaaatatgtntttctggctgctagtagttcctnaaggggnanagcgacaaggaaaagtatgaganagctaggatgttaaagaattatatagggnatattaggtctg

SEQ ID NO: 283561 - DNA, 267 bp, Glycine max
aaagatacaggacaaagaggggattccaccagaccagcagaggcttatctttgctgggaagcagctggaagatggtcgtactcttgctgattataatatccagaaggagtccactctgcatttggtgttgaggcttcgtggagtatgcagatatttgtgaagactctgacagggaagaccattaccttggaggtggaaagctctgatactattgacaatgtgaaagctaagattcaggacaaggaaggtatccctccagatcagcag

SEQ ID NO: 283562 - DNA, 246 bp, Glycine max
  unsure (1)..(246): unsure at all n locations
agantcnaagaaaggggtggtggctgcttcgaaagcttaataatttgtttatttccagaacatcatagttttcgcagcagcaaactaacaaattactcatatcatataataagatggcccgttctctctcgcaagccaacgtattggtgtccttgttgctcaatctatctccctaattcccgttcatcggcgaggttacgcagtggcatccgatgtatcggtaagagtggaatgggaatatttggc

SEQ ID NO: 283563 - DNA, 248 bp, Glycine max
gcgggtagggtttcgacgtgcttcttcttcgtgtttgctctttctctccttcttccttttcagatctccgctgaggaatcatcggagaaagagttcgtactcacattggatcactctaactttcacgacactgtcagcagcacgatttcatcgtcgtcgagttctacgctccatggtgtggccactgtaagaagcttgctcccgagtatgagaaagctgcttctatcttgagtagtcatgatcctccg

SEQ ID NO: 283564 - DNA, 240 bp, Glycine max
aataaacacccttcaatggctaccactaccactaaagtttacattgtttactattctatgtacggacatgttgagaagctagctgaagagattaaaaaaggagctgcttctgttgaaggagtagaagcaaagctatgcaggtacctgaaacactgcctcaagaggtccttgggaaaatgggagcacctccaaagagtgatgtaccaattattacacccaatgagctacctgaggctgatg

SEQ ID NO: 283565 - DNA, 238 bp, Glycine max
ctcactggtgttcctgttgctagtactttgatgggtcttggtgcttatcccattgctgatgagaattctcttcagatgcttgggatgcacgggactgtttatgctaattatgctgtggacaaggctgatatttgcttgcgtttggggtgaggtttgatgaccgtgtcacggggaagctcgaggcttttgcgagccgggctaagatagttcacattgatattgattcggcagagattgg

SEQ ID NO: 283566 - DNA, 243 bp, Glycine max
caaaacaaaaagtttacgttacaaatcgcataataaccgtcctaagtttattgagagaattttgcaagtgtgagaaacatggcatctcgtcaaaacaacaagcaagagcttgatgaaagagcaaggcaaggagagacgttgtcccgggtggaactggtggcaagagcctggaggctcagcaacaccttgctgaaggaaggagcaagggagggcaaacaaggaaggaacagctgggtacagaag

SEQ ID NO: 283567 - DNA, 145 bp, Glycine max
  unsure (1)..(145): unsure at all n locations
aaaccaccaagtactattgcacagtcattgatgcccctggacacagggatttcatcaagaacatgatcactgggacatcccaagctgactgtgctgntcttatcattgattccactactggnggnnttnnagntggaattcanag

SEQ ID NO: 283568 - DNA, 243 bp, Glycine max
  unsure (1)..(243): unsure at all n locations
tagcaaagaggttgaaccagattctagctcaacatataatggctgtgctacctgggctgagagcacgtataagcacttcactagttgctgttgcgaaggagtatgcgagctatggggaaatcactgagtccaaggtggtcaggctgcacttctactgaatattctttcaaaatattgtgaagctttctcctccatggttgagggaaataatgaggagatttctacatctgnactatttggtgg

SEQ ID NO: 283569 - DNA, 238 bp, Glycine max
  unsure (1)..(238): unsure at all n locations
ctgaaccatggtgtgttacttgtgggatatggtgcagccttttcttgctacatatgagagggcatgagacaccaccaatgtatgtagcaagaaaaggntgaaccatggtgtgttacttgtgggatatggtgcaaaggcttctcaattcttaggcttggcaacaaaccatactggatcatcaagaattcntggggggagaaatggggagaagatggctattacaagctctgcagagggc

SEQ ID NO: 283570 - DNA, 247 bp, Glycine max
aaaccaccaagtactattgcacagtcattgatgcccctggacacagggatttcatcaagaacatgatcactgggacatcccaagctgactgtgctgttcttatcattgattccactactggtggttttgaagctggatttcaaaggatggacagactcgtgaacatgctctgctttcattcacccttggtgtgaaacagatgatttgttgctgtaacaagatggatgctactacaccaaagtactcc

SEQ ID NO: 283571 - DNA, 243 bp, Glycine max
  unsure (1)..(243): unsure at all n locations
aataaggggaaaaaatggtgtcgctgaaactgcagaagcggctggccgcaagcgtgctcaagtgtggcagaggaaangtgtggcttgaccccaatgaagtcaacgaaatctccatggccaattctcggcaaaactcangaagttggttaangatgggtttatcatcaggaagccaaccaagattcactcacgctcgcgtgctcgtaggatgaaggaggcaaagaagaagggccggcactctgg

SEQ ID NO: 283572 - DNA, 237 bp, Glycine max
  unsure (1)..(237): unsure at all n locations
tcaggcgntgctgcccntcagtccttcagcaatggtttacgtgaagtcacagaaatcaaaagcctacttccaagaggtatcaagtcaagttcaagagaagaagagagggaaaaaccgattaccgtgccaggttcggttgattaatcaggncaagaacaaatataacaccccganatatcgcttngtngnncgtttcagcaacaaagacattgttgcacaaataatatctgctagcat

SEQ ID NO: 283573 - DNA, 238 bp, Glycine max
ggcagactagtatccgatcctctgtcctctcgaagctttcatcgttcaacatattctcaccatctcagtcatgggcctgctatcttgttttaggtctaccgtcctgagaaaatgttccaaaggaagctctggatgtcaagattcctgtatacgaacaattttcaacgaaacttgatttcgtctggtggcaatgaatcgtattatgggtattttaacaggagatcatacacttcacttt

SEQ ID NO: 283574 - DNA, 232 bp, Glycine max
cagattttcgtgaagactcttacgggtaagactattaccctcgaggtggagagctctgacaccattgacaatgtgaaggccaagattcaggacaaggaaggcatcccaccggaccagcagaggctgattttgctggcaagcagctcgaggatggaaggaccctcgctgactacaacatccagaaggaatcaacccttcaccttgtcctccgtctccgtggggggttttaagc

SEQ ID NO: 283575 - DNA, 233 bp, Glycine max
ttttctgtgtcaccggaactcgtttctttcaaaacacttcaaacatctcgaacgctctctttccggcaactaggttaaagttcatcaatggcaggtcgcggcaaaaccctaggatctagcgccgccagaaggctacctcaaggagcagcaaagccggcctccaattccccgtcggccgtatcgcccgtttcctcaaggccggaaaatacgctgagcgtgtcggcgccggcgcc

SEQ ID NO: 283576 - DNA, 239 bp, Glycine max
  unsure (1)..(239): unsure at all n locations
cgagaggagtctcancaaaggattgccgccttcttgggaaatttgatctgtctggaattcctccagccccaaggggtacgcctcaaattgaagtgaccttcgaagttgatgccaacggcattctaaatgtgaaggcagaagacaagggcactggtaaatcagaaaagatcaccattacaaacgaaaagggacgtcttagccaggaagaaattgagagaatggttcgcgaanagaggagt

SEQ ID NO: 283577 - DNA, 232 bp, Glycine max
cagcacctggtctcttggcgtgaccttccagaagaaaagataaaactgtctagtggacaagttgttgatttgataccatggtgcttgccaaacacggctaagcggcacaatcaatggaagggactgttggcaggttggattggcaaggaaatttcccaacttccgttacagaccctcagccaatggggaaggttggaatgtgcttccaccctgaccaagataggattcttac

SEQ ID NO: 283578 - DNA, 229 bp, Glycine max
cgaagcccttcaccgcattgcaaccatgtcgaggagaaaggtcagagagccaaaggaagaaaacgtgactctgggcccagctgttagagatggtgaacatgtctttggcgtcgctcgcatctttgctccttcaatgataccttcattcatgtcactgatttgtctgggagggaaacgcttgtccgcatcactggtggaatgaaggttaaggctgacagagatgaatcgt

SEQ ID NO: 283579 - DNA, 229 bp, Glycine max
tgagatttgcgaatctgagaaatggcggattcttctcgggaggagaacgtttacatggcgaaattggcggagcaggccgagcgttacgaggagatggttgagttcatggagaaggttgcaaagatgtggaggttgaggagttgacggtggaggagaggaatctcctctctgtggcttacaagaacgtgattggtgcgaggagggcttcgtggaggatcatatcctccat

SEQ ID NO: 283580 - DNA, 233 bp, Glycine max
  unsure (1)..(233): unsure at all n locations
aatcaaagaaaggggtggtggctgcttcgaaagcttaataatngntttatttccagaacatcatagttttcgcagcagcaaactaacaaattactcatatcatataataagatggcccgttctctccgcaagccaaacgtattggtgtccttgttgctcaatcnatctccctaattcccgttcatcggcgaggttacgcagtggcatccgatgtatcggtaagagttggattg

SEQ ID NO: 283581 - DNA, 227 bp, Glycine max
acagcttttgcctgtgtatacccagatagctaccaagtttgctgaactgcacgatacttccttaagaatggctgccaagggtgtcgttagagaagttctggactggtgtaactcccgtgctgtcttctatcagagactgcacaggagaattggtgagcagtcactgatcaacagtgtgagagatgctgctggtgaccaattgtcacatgcatctgcactgaacttgc

SEQ ID NO: 283582 - DNA, 226 bp, Glycine max
tttgtggccacattcttgttcctctacatcactgtcttgactgtcatgggtgtcaacagggcacccaacaagtgctcctctgttggcattcaaggaattgcatgggctttcggtggcatgactttgccctcgtcgactgcactgctggaatatcaggtgggcacataaatccggcagtgacgttcggtttgtttctggctaggaagctgtccctgacaagagcgct

SEQ ID NO: 283583 - DNA, 266 bp, Glycine max
  unsure (1)..(266): unsure at all n locations
aagcttattgatgaggaacccccagctataatgcttctttttgaacccaaaggtcgcccggaggatgaaggcaatgatttttatatccagagtaagaaaaatatgtgttgggtgtggtgaaggaaaccactacttacggtatcaataatcccatcgtgttacagaacacatttccctgagcatctgaaaagccatcgttctcatgacattgtcctactttgtgtgggatttccatgaagttgcacatgctgctgngaaagtataag

SEQ ID NO: 283584 - DNA, 266 bp, Glycine max
atttttggtaagcagaactggcgatgcgggatgaaccggaagctgggttacggtgcccaactgcgcgctaacctagaccccacaaagggtgttggtcgattaagacagcaggacggtggtcatggaagtcgaaatccgctaaggagtgtgtaacaactcacctgccgaatcaactagccccgaaaatggatggcgctaaagcgcgcgacctatacccggccgtcggggcaaggaccaagccccgatgagtaggagggcgcggcggt

SEQ ID NO: 283585 - DNA, 269 bp, Glycine max
aggaaactcgagtacctgagttagagaataagattcatgacttgaactcaaaattagaagatcttcaaaagataaatgaggaacagaagacaaaaattcaaaaaagtgaacgcgctcttaaagttgctgaggaagaaatgttaaaggcaaagtttgaggctactgccatagaaaaagagctgagggaggctcatggtgcttggcttcccccttggcttgctgttcactatattcatagtaagtcttttgttgatagtcattggaacaaa

SEQ ID NO: 283586 - DNA, 266 bp, Glycine max
aatttccatggcttctgcggatgttgaataccgatgctttgttggtgggctcgcttgggccactgacaactacgatctggagaaagccttctctcagtacggtgacgtcgttgaatcgaagattatcaacgatcgtgagactggaagatccaggggatttggatttgttaccttcgcctccgaggattcaatgagggatgcgatcgaagggatgaaggtcagaaccttgatggacgcaacatcactgtgaacgaagctcagtcccg

SEQ ID NO: 283587 - DNA, 267 bp, Glycine max
ttcgattgatatttggtcagctggctgtgttcttgctgaacttcttttgggccagccattattccctggcgaaaatgcagtagaccagcttgtacatattataaaggtgcttggcacacccacccgagaggaagtacgctgtatgaatcccaattacaatgactttaggtttccacagataaaagcacacccatggcacaagatattccacaaaaagatgcctccagaagctattgatcttgcatcccggcttttgcaatactcccc

SEQ ID NO: 283588 - DNA, 269 bp, Glycine max
  unsure (1)..(269): unsure at all n locations
agcggtccaaacactcttctctgcagcttttgcctacaactcccttcaccatgggctgaacaaaccgagaaagcttttctgaagcaaccaaaagtgtttctcagcacaaagaagactgggaagggaaagagacctggaaaaggtgggaaccgcttttggaagtccattgggcttggatttaanactcccagggaagccatcgaaggaacctatattgacaagaagtgccccttcactggcaatgtttccatccgtggccgtatcttggc

SEQ ID NO: 283589 - DNA, 263 bp, Glycine max
agtagctcggggattgtgacaacggaaaagttgacccaaaggattgtgctggagctatactttgtgcagctgaaagagcaacccaggttgctttgcaggcaatacaatgtttaggtgggaatggttatgtgaatgagtatcctactggtcgtctcttgagagatgccaaactctacgagattggtgcaggaactagtgagatcagaagaatgttattggacgtgaactcttcaaggagcaataacatgccaccataccttata

SEQ ID NO: 283590 - DNA, 262 bp, Glycine max
ccaactcagaggcaactctgggaacctacaagggtaactcaaagcttgctgatggtgcctcagagagcctccatgttgaggactacaagtactgatcaatctaagtgcgggtaggaatcggtattttatgggtacaaccgaattttcttgttaatgagtattgtgcttcgactcttcccagaataataatcgtttggaattttgctttttgttttcctagtgttccttcatatcaattttagtaattcggtgtattggtcaa

SEQ ID NO: 283591 - DNA, 263 bp, Glycine max
  unsure (1)..(263): unsure at all n locations
aaacctctcactcgccgtcgtagggtttctcctttcgtntancaacaacaacaatggttgcagccaagaaaaccaagaagacccatgagagcatcaacaacaggctcgctcttgtcatgaagagtggaaaattcaccctcggttacaagacggttctcaaatcacttaggagctccaaagggaaattgattatcattgctaacaactgccccctttgaggaaatcagagattgaatactatgctatgttggccaaggttggag

SEQ ID NO: 283592 - DNA, 264 bp, Glycine max
  unsure (1)..(264): unsure at all n locations
ggagaattaggtttttagggtttacaccgagcagccacacctcccgcagcagccatggttctcaaaactgaactatgccgattcagtggtgccaagatctacccaggaaagggcatcagatttgttcgtngtgattctnaggttttcctgtttgcaaactcaaaatgtaagaggtatttccacaatcgcctgaagccttcaaagctcacctggactgcaatgtacagaaagcaacacaaaaaggacattgctcaagaagctgtg

SEQ ID NO: 283593 - DNA, 263 bp, Glycine max
gaaggcgtctgatgtggcaaaattcattaggtcactgtgtcttaaaggcagagtttcctaaagggaaaaaagagttggctgtctccctatttcagactgttgttctgatgttattcaatgatgctgagaaactaagctttcaagatatcaaggactctactggtatagaggacaaggaactgagaaggactctgcaatcacttgcatgtggaaaagttcgtgtcctacaaaagttgccaaagggtagagatgtggaggatgat

SEQ ID NO: 283594 - DNA, 263 bp, Glycine max
gcagtttatttctgcagtggggatcttagccctccagaatatcatcattatgggcttgcagctcctttgtatacccatttcacatcacctataagaagatatgcagatgtcattgtgcacaggctacttgctgcttctttagggatatccaagttaccacctgtatttcaagacagtctccagctcactagtattgcagacaatttaaattatcggcacaggaatgcccagtatgcagggcgggcatctgtagagctacatac

SEQ ID NO: 283595 - DNA, 263 bp, Glycine max
tcaaagaaaggggtggtggctgcttcgaaagcttaataatttgtttatttccagaacatcatagttttcgcagcagcaaactaacaaattactcatatcatataataagatggcccgttctctctcgcaagccaaacgtattggtgtccttgttgctcaatctatctccctaattcccgttcatcggcgaggttacgcagtggcatccgatgtatcggtaagagttggattgggtaatattgggcgaaggaatggaatcgtgg

SEQ ID NO: 283596 - DNA, 266 bp, Glycine max
aggcaagccccactcaaccaccacacctctcctcgttcacgctacccctttctgctcttcttctacctttcaagttttaaaagtataaagatggcagagacattcctatttacctcagagtcggtgaacgagggacaccctgacaagctctgcgaccaaatctccgatgctgtcctcgacgcttgcctcgagcaggacccagacagcaaagttggctgcgaaacatgcaccaaaaccaacttggtcatggtcttcggagaaatcac

SEQ ID NO: 283597 - DNA, 259 bp, Glycine max
tcaggtgaacttggaccctacatcgttgagtacggtgcagattacagaatgataagcatcttcaactctccattccaagttggtttctacaacaccaccccaaatgccttcactctagctttgcgtgtagggctccaacgctcggagcagctatttcgttgggtttgggaggccaatagggccaacccagttggagaaaatgccacttttcacttggcactgatgggaaccttgtgttggcagatgctgatggcagaat

SEQ ID NO: 283598 - DNA, 264 bp, Glycine max
  unsure (1)..(264): unsure at all n locations
gcacaatcaaggattatggttgtcctggtctttctatcactggaagtgctatagctgtggcagaagttgcaagagttgatgcaagttgttcaacttttattttggtccattcatccttggcaatgctcactattgcatatgtgggatcagaaagctcagaaagcaaaagtaatttgcccttctttggnacaattgcaaactgtagcatgttgggctttgaccgaacctgactatggaagtgatgctagtgctttgaagaccact

SEQ ID NO: 283599 - DNA, 261 bp, Glycine max
  unsure (1)..(261): unsure at all n locations
tgaagaatctcatttccagcttccattatcttctcatctcaatcaggggggaaaatgagcgggcggtcaagccgcacaatttatgttggcaatcttcctggcgacgttcgcttgagagaagtagaggatctattctacaagtatngtcctattgttgacattgatttgaagatacctccgagaccaccaggctatgcttttgtagagtttaggatgctcgtgatgctgaagatgcaattcaatatcgagatggttacaatt

SEQ ID NO: 283600 - DNA, 263 bp, Glycine max
  unsure (1)..(263): unsure at all n locations
aatgaactacccgtcaagcttttggttgggctgcttcagacacttctggcacccttgccccttttcatttctccagaaggggaaatggcgtcgatgacgtcactctcaagattctcttctgcggggtttgccactctgatctccacactctcaaaaacgactggggtttcaccacctaccctgtcgttcctgggcatgaaattgttngtgntgtgacagaagttggaaacaatgtgaaaaacttcaaagtgggtgataaagtt

SEQ ID NO: 283601 - DNA, 262 bp, Glycine max
  unsure (1)..(262): unsure at all n locations
aaaaggccatataatttttttttatttgaaataatgtccgggatcatccacaagattnaggagaccctccatgtgggagggcacaagaaagaggagcacaaaggagaacaccatggtgagcacaaaggtgaacacaaaggngaacaccatggtgagcacaaaggtgaacacaaaggagaacaacaccatggggagcacaaggagggncttgtggatnngatcanggacaagatccatggtgatggccatgacaagggtgaga

SEQ ID NO: 283602 - DNA, 262 bp, Glycine max
  unsure (1)..(262): unsure at all n locations
aagaatcaaagaaaggggtggtggctgcttcgaaagcttaataatttgtttatttccagaacatcatagttttcgcagcagcaaactaacaaattactcatatcatataataagatggcccgttctctctcgcaagccaaacgtattggtgtccttgttgctcaatctatntccctaattcccgttcatcggcgaggttacgcagtggcatccgatgtatcggtaagagttggattgggtaatattgggcgaaggaatggaa

SEQ ID NO: 283603 - DNA, 260 bp, Glycine max
tctctgcaaaagacaagtccactggtaaagaacaacaaatcactattcggtcttccggtggactctcggaagatgagattgaaaagatggtcaaagaagcagagttgcatgctcagaaagaccaagagagaaaggctctcattgacattagaaacagtgctgacaccaccatatatagcattgagaagagtttaggtgaatacagagacagattcccagtgaagtggccaaagaaattgaggatgcagtttcggatctga

SEQ ID NO: 283604 - DNA, 261 bp, Glycine max
ggggcagtagccgagattccgtgagttgcaaaaatgaagacgattctttccaccgagaccatgaacatcccggacggcgtgagcatcaaagttcatgccaaggtcatcgaagttgagggcccccgcggaaaattggtgcgagacttcaagcatttgaatctcgattttcagctcattactgacgaaaacggtaaaagaaagctgaaaatcgacgcgtggtttggttctcggaaaacatccgccgccattcgcaccgccttg

SEQ ID NO: 283605 - DNA, 258 bp, Glycine max
aacaaatgcaaaaagagagaatggatggcatagaatctaaatgcagaaataatatagtagaggagaatctaaaactgtggaaggaaatgattgcaggaacagagaggggattgcagtgttgtgtccgtggcaagttggatatgcaggacccaaacaaatcacttagagatcctgtatattatcgttgcaatccaatgccccatcatagaattggatccaagtataaagtgtatccaacttatgatttcgcttgtccat

SEQ ID NO: 283606 - DNA, 202 bp, Glycine max
tagtgcctccttgccagaagttaaaatggcccaagaaactttcctattcacatctgaatcagtgaacgaggggcaccctgacaagctctgtgaccagatctccgatgctgtgctcgatgcatgcttggagcaggaccctgacagcaaggttgcctgtgaaacctgcaccaagaccaacatggtgatggttttcggagagatc

SEQ ID NO: 283607 - DNA, 258 bp, Glycine max
ctctctctcagcgctttctgcaatcgaacctttcatctccaaagggatccacaggccgaaggagaaatggggctgacattcacaaagcttttcagtcggcttttcgcgaagaaggaaatgcgaattctgatggttggtcttgatgctgctggtaagaccactatcctgtacaagctcaagctcggagagatcgttaccacaattcctaccatcgggttcaatgttgagactgtggaatacaagaacattagcttcact

SEQ ID NO: 283608 - DNA, 258 bp, Glycine max
ggagccgtagcagcggaagctctagcttgggtagcgaatcacaatggcgagaggattaaagaagcatctgaagaggcttaatgccccaaagcattggatgcttgacaaactgggtggtgcatttgctcctaagccctcatctggaccacacaaatcgagggaatgcctgccactcatactcattttgcgaaaccggctgaagtatgctctaacataccgtgaagtcattgctattctgatgcagcgacatgtccttgt

SEQ ID NO: 283609 - DNA, 257 bp, Glycine max
gactctctcttcctacgataaccgtttcctctcgccggaaaaccgacattgatctctctctccggcgatccccgcccatccctccgccatgagttccggcgagctcctccacatacagccccaggagctgcagtttccctttgaattgaggaagcagatctcgtgctctttgcagttgtctaacaagactgacaactatgtggctttcaaggtcaagacaacaaatcctaagaaatattgtgttagacctaacactg

SEQ ID NO: 283610 - DNA, 219 bp, Glycine max
  unsure (1)..(219): unsure at all n locations
gctgttcttatcattgattcgaccactggtggttttgaagctggtatttccaaggatggacagactcgtgaacatgctctgctttcattcacccttggtgtgaaacagatgatttgctgctgtaacaaaatggatgctactacacccaagtattccaaggccaggtatgatgaaattgtgaaggaagtctcttcctacntgaagnaagtaggnnacnac

SEQ ID NO: 283611 - DNA, 257 bp, Glycine max
  unsure (1)..(257): unsure at all n locations
ccgcagcttgaaacagagcagagcgaccttgaagagctatggctgtcggaaagaataagaggatttccaagggaaagaagggtggcaagaagaaagccgctgatccctttgccaagaaagactggtacgatatcaaggccccttccctcttccaggtcaagaatattgggcaaaaacctcgtcttctcgtaacccagggaaccaganttgcnatccgaaggcttcaaacatcgggtttttgagncctcattggntna

SEQ ID NO: 283612 - DNA, 255 bp, Glycine max
  unsure (1)..(255): unsure at all n locations
tttgttgttcaatctaacaaacttctctatatcgtttactttttcnacacaccanacanacnngntttattnnnggacttacatataaatatcatggcttcgagggtggcttcggtttagnngatagcgatgatgttgttagccatgaactgtaactgnacaantgttggccacatgncttcaaccanagaggaaggtcacnatattcaggnggctaaagccaagacaacacaaactgcgaacaaggccatggaa

SEQ ID NO: 283613 - DNA, 255 bp, Glycine max
  unsure (1)..(255): unsure at all n locations
ctacaatatcctaaagtgtttttcttcttcttcatcaccatgtcttnactttcagacctcatcaacctcaatctctcagaatccacagaaaagatcattgctgagtacatatgggttggtggatctggtatggacctcagaagcaaagccaggactcttcctgggccagtgagtgaccctgcaaaacttccgaagtggaactatgtgggtctagcacagatcaagctccaggggatgacagtgangtcattctat

SEQ ID NO: 283614 - DNA, 252 bp, Glycine max
  unsure (1)..(252): unsure at all n locations
ttatcaaacaaaactctaaatctggagaaggcaatgataaaactgctgatggccctactgttggaccacgaggcatttattgtgggcatgaggatacagttgaagatgtgactttctgcccatctagtgcacaggagttctgtagtgttggagatgattcttgtctcatcttatgggatgcacgtgttggctctagccctgtngttaaggttgagaaagctcataatgctgatcttcactgtgtggactgga

SEQ ID NO: 283615 - DNA, 255 bp, Glycine max
gaccactttgcagaatatgctggctttgaatgtgactacgacttgtacccaaatatgaatgaacaatatcatttcctcaggcattacttgaaacctgaaagaccccaagaggtgtctgagaaagatcttgaaactttgtatgttgaggcaaatacattttcccttgcttctcacattttctgggcattgtggggtctaattcaggcaaagatgtctgcaattgaatttgattatcttggttactttttccttcga

SEQ ID NO: 283616 - DNA, 240 bp, Glycine max
  unsure (1)..(240): unsure at all n locations
agatttatgccatcactgaccgcacaaaactcgtggatgccattaagtgcttaaaggccgctatgttaaatgctgttcctattgttagagcctctgatgtcggtcaagatgatcacaagcagcatataaatggcagatgcaggaagcttattggtacattttctgcaactgatttgnggggatgccacgtagccacgctgaaatcatggttgggaataagtgcactagcattcactgnag

SEQ ID NO: 283617 - DNA, 239 bp, Glycine max
  unsure (1)..(239): unsure at all n locations
gaactgggatgaggatgcacccttggaaattgttgatgaagaagcagagaaacctgaaggatggtnagacaatgaacccgaggagattgatgatccagaggcaacaaaaccagaagattgggatgatgaggaggatggtgaatgggaagccccaaagattgagaacccaaaatgtgaagcagcccccggttgtggtgagtggaagaggccaatgaagaggaatccagcttataaaggng

SEQ ID NO: 283618 - DNA, 170 bp, Glycine max
gcaacctatcagcctccaaatccaatggcttcagagaagaaactgtcgaacccaatgagggagatgaaggtgcagaagctcgttctcaatatctctgttggagagagtggagatcgtctcaccagagccgccaaggtgttggaacagcttagtggccaaaccccagtgtt

SEQ ID NO: 283619 - DNA, 171 bp, Glycine max
gaaggcaatggctatcaggttgatggatttggactctccattcttcaacactctgcacagaatcatggatctgacggaggacgccgagaagaacttgaacgctccgactcggacatacgtgcgcgacgccaaggcgatggctgcgactcctgctgacgtgaaggagtaccc

SEQ ID NO: 283620 - DNA, 234 bp, Glycine max
agagagcaatggctggctcgtgggcacgccgttctctgattgttctagccatcatttccttcggatgtctatttgcgatttccattgctaaggaggaagccaccaagttagggacggtcatcggcattgatcttggaacaacctattcatgtgtcggtgtttacaagaatggccatgttgaaatcatagccaacgaccaaggtaaccgtatcaccccatcgtgggttgctttca

SEQ ID NO: 283621 - DNA, 241 bp, Glycine max
  unsure (1)..(241): unsure at all n locations
attcatttcaatggcaactcaaggtcaagtcattacctgcaaagctgcggtggcctgggaacccaacaagcccttaactgtccaagangttcaggtggctccgnctcaggccggcgaggtccgtgtccaaatcctcttcanngctctctganacaccgatgcttacacttggggcggcaangatcccgaaggtntcttccctggaatcntggcatgaagctgcanggattgtggatatgtt

SEQ ID NO: 283622 - DNA, 234 bp, Glycine max
taaaaagcctctgtttccgggcaaagaccatgtgcatcagatgcgcttattgacagagcttcttggcaccccaactgaggctgaccttgggttagtgaaaaatgaagatgcaagaagatatatcagacaacttcctcaatatcctcggccaacctttagctcaagtcttcccccatgttcatccggcagccattgatcttgttgataaaatgttgacagttgatcccaccaaaa

SEQ ID NO: 283623 - DNA, 232 bp, Glycine max
gacaaggctcgtcgcttgggcttcaaggctaagcagggctatgtgatttaccgtgttcgtgttaggaggggtggccgaaagagaccagttcccaaaggtattgtttatgggaagcccacaaaccagggagttacccaactgaaatttcagcgaacaagaggtcagttgccgaggagcgagctggacggaagctgggtggacttagggtcctcaattcttactgggtgaatgg

SEQ ID NO: 283624 - DNA, 234 bp, Glycine max
ggactgttttggagactaacttgcctaaagtgaaggaaggtaagaagtccaagttcagtttaggtgtgtccgatcctaagattggttcgcagatatctgaagtgactaagattccttgccaaagtaacgagtttgtgagtgaacttcttcgcggtgtgcggttccattttgatacgtttgtcggtgatcttaagtctggagatttagaaaaggcacaacttggtctggggcata

SEQ ID NO: 283625 - DNA, 233 bp, Glycine max
  unsure (1)..(233): unsure at all n locations
ctaattctcatttcttcatcgttcgattcttctcctcctaaagatgcagatcttngtgaaaactttgaccggtaagaccatcacccttgaggtggagtcctccgacaccatcgataacgtgaaagctaagattcaagacaaggangggatcccacctgaccagcagagacttatctttgcgggtaaacagttgaggttggtcgaacccttgncgantanaattcnnaaggntc

SEQ ID NO: 283626 - DNA, 232 bp, Glycine max
ggtggtggctgcttcgaaagcttaataatttgtttatttccagaacatcatagttttcgcagcagcaaactaacaaattactcatatcatataataagatggcccgttctctctcgcaagccaaacgtattggtgtccttgttgctcaatctatctccctaattcccgttcatcggcgaggttacgcagtggcatccgatgtatcggtaagagttggattgggtaatattgg

SEQ ID NO: 283627 - DNA, 234 bp, Glycine max
  unsure (1)..(234): unsure at all n locations
gttttcgcagcagcaaactaacaaattactcatatcatataataagatggcccgttctctctcgcaagcnaaacgtattggtgtccttgtngctcaatctatctccctaattcccgttcatcggcgaggttacgcagtggcatccgatgtatcggtaagagttggattgggtaatattgggcgaaggaatggaatcgtgggaggtgtagaagagaagcctgatacaagagatgg

SEQ ID NO: 283628 - DNA, 237 bp, Glycine max
  unsure (1)..(237): unsure at all n locations
gnnacaaccccctaaccattgatcttgttggagattctgatcagaagttggcagatggaatttcgttgtactctattgtgtctgattcgtacactaaagcaggaattcttgcacctctgataacagaacatgcgaatggaggaaagtgtaattgttttnactcaaacgaaaacgtgatgctgatcgattatcatatgtcatggcaaaaagccttagatgcgaggctttgcatggaga

SEQ ID NO: 283629 - DNA, 232 bp, Glycine max
  unsure (1)..(232): unsure at all n locations
gaaaggaggaaaaatgtctggcgtgaagagagcactgaggcagttcaccttcggaaccggcaagaccgccggtgcgcaactcggcggggcgcataacgtccttccaccgnggcggcggagcnaagcgcttgcaacgaaccgtcgatcacaaacggantaccgcntcttctctcggcgtcgttcgaaaggatcgngtacgaccctaaccgctcntccnaaatcgcnctcgttc

SEQ ID NO: 283630 - DNA, 228 bp, Glycine max
  unsure (1)..(228): unsure at all n locations
gggggtcagagcactatggatgttctctgtcagattggtttggatggaattcgtatgctggatccaaataccagccggacattgagaatttatcctcttgagaacataacaagatgtgatagaatcgattcatctacctttgcnttttggtcnaagagtcctgttgacattgagccaagacggatcagnttgcaatctaatngttacactnctaacacncttttggat

SEQ ID NO: 283631 - DNA, 232 bp, Glycine max
  unsure (1)..(232): unsure at all n locations
cagaatgggtgtttgactttatgccaatgcgcgggggctacttcattggaaatgttagtccggcccggatggattttcgatggtttgctttaggaaattgtgttgcaattctatcttctctggcaactccggagcaatcaatggctatcatggatcttattgaatcccgctgggatgaattagttggagaaatnccccnaaaantaccttacccnncannggggnccagggg

SEQ ID NO: 283632 - DNA, 237 bp, Glycine max
  unsure (1)..(237): unsure at all n locations
aagaatcaaagaaaggggtggtggctgcttcgaaagcttaataatttgtttatttccagaacatcatagttttcgcagcagcaaactaacaaattactcatatcatataataagatggcccgttctctctcgcaagccaaacgtattggtgtccttgttgctcaatctatctccctaattcccgttcatcggcgaggttacgcngtggcatccgatgtatcggtaagagtnggattg

SEQ ID NO: 283633 - DNA, 208 bp, Glycine max
  unsure (1)..(208): unsure at all n locations
gcantgctgcagacaaaaccctagtgagcagagcgtngaaagcaccggccaccggccatgacattcaagcgcaggaatggaggtcgcaacaaacacggccgtggccacgtcaaattcatccgatgctccaactgtggcaaatgctgccccaaggacaaggccatcaagaggtttcttgtgaggaacattgttgaacaggctgcatcna

SEQ ID NO: 283634 - DNA, 209 bp, Glycine max
  unsure (1)..(209): unsure at all n locations
ctctttgcctcgcaccttccaacttaaccttttctactcataatctnaacaacttgctagnngangatagagaaagananaaagtgtgtgtgtgtgagananagcaatggctggctcgtgggcacgccgtttctctgattgttctggctatcatttcctntcggatgtntatttgcaatttccattgncaaggaggaagccacaaaatt

SEQ ID NO: 283635 - DNA, 216 bp, Glycine max
  unsure (1)..(216): unsure at all n locations
aaaaagtttacgttacaaatcgcataataaccgtccnaagtttattgagagnnntttgcaagtgtgagaaacatggcatctcgtcaaaacaacaagcaagagcttgatgaaagagcaaggcaaggagagactgttgtcccgggtggaactggtggcaagancctggnngctcagcancaccttgctgaagganggagcaaggganggcaaacaagg

SEQ ID NO: 283636 - DNA, 227 bp, Glycine max
  unsure (1)..(227): unsure at all n locations
gccgaacaagccgaacgctatgaagaaatggtggaagcaatgaagaatgtggcgaactcnaacgtggaattgacggtcgaggagcggaaccttctgtcggtagggtacaagaacgtggtgggtgctcgtagggcttcgtggaggattctatcgtcgattgaacagaaagaagaagctaaagggaacgatgtgagtgtgaagaggataaaggagtataggcagaaggt

SEQ ID NO: 283637 - DNA, 228 bp, Glycine max
gccgcctgaagttgttgctgttcgggtgccacttctaaatttgtccaattttcaaatcaacgattggcccgatatgtcagcaaaaagctatgcaatcatggttctcatcctccctactgatagtgttagaaaatggcgagaccatgagttggaacttgttgatgtggttgcagatcaggtagcagttgccctttcacatgctgctattttggaggagtctatgcgagc

SEQ ID NO: 283638 - DNA, 267 bp, Glycine max
ccaaaaccaaggacaatgtgtttgtgcagttgctgtgttcgattcaataccgagtgattaaggaaaacgctgatgatgctttctatgagttgcaaaaccctcaggagcagatccaggcttatgtttttgatgtgactcgtgctattgttccgagaatgaacttggacgagctgtttgagcagaagggtgaggttgccaaagctgtcttggaggaacttgaaaaggtgatgggagaatatggatatagtatagagcacatactcatgg

SEQ ID NO: 283639 - DNA, 267 bp, Glycine max
agtttacgttacaaatcgcataataaccgtcctaagtttattgagagaattttgcaagtgtgagaaacatggcatctcgtcaaaacaacaagcaagagcttgatgaaagagcaaggcaaggagagactgttgtcccgggtggaactggtggcaagagcctggaggctcagcaacaccttgctgaaggaaggagcaagggagggcaaacaaggaaggaacagctgggtacagaagggtaccaggaaatgggacgcaaaggagggttga

SEQ ID NO: 283640 - DNA, 267 bp, Glycine max
gttttatccatgggagatggacttagtgatgtagtaattacaggtgagaatgggacaattgatgggcaaggagatgtgtggtggaacatgtggaggcagagaacacttcaatttacaagaccaaaccttgtagaatttgtgaattcgcaagatattattatttcaaatgtgattttcaagaattctcccttctggaatatacacccagtttattgtagcaatgttgtggttcgatatgtcacaattttggctcctcgtgactctcct

SEQ ID NO: 283641 - DNA, 266 bp, Glycine max
aaaagaacttgatatgggtagttactcggatgcaggttgtggtggatcgctatcctacatggggtgacgtagttcaagtagacacctgggcttctggatcagggaagaatgctatgcgccgtgattgggttttacgtgactgcaaaactggtgaaatcttgacaagagcttccagtgtttgggtcatgatgaataagctgacacggaggctgtctaaaattccagaagaagtcagacaggagataggatcttattttgtggattct

SEQ ID NO: 283642 - DNA, 267 bp, Glycine max
  unsure (1)..(267): unsure at all n locations
aagaaagctacctagagcttgcacctattggtatcttctacaatatcctctcatagtgcnnnnnnnnnnnnnnnnnnnnnntatcaagatgtctttgctttcggatctcatcaacctcaatctctcagaatccacagaaaagatcgttgctgagtacatatgggttggtggatctggtatggacctcagaagcaaagccaggactcttcctgggccagtgagtgaccctgcaaagcttccaaagtggaactacgatggctctagcac

SEQ ID NO: 283643 - DNA, 138 bp, Glycine max
gtaccaaaatattttggtacgtaagtcttttaaaaagtttgcatctcctctttggttttccttagttctgaaagttatctcctaagaagacaatcatatgtactgtacgtagtgtgaagatatagtattgtatgctgc

SEQ ID NO: 283644 - DNA, 265 bp, Glycine max
  unsure (1)..(265): unsure at all n locations
ctcaattgcatttgcagaagaaaagaaaatacctgagctattgaagacatttccaaatgcaacanagtatctcaagacaattgtaagcttcggaaaggttacccctgaacaaaagcaagaagttgaaaattctgggttggaaatatattcatgggatgaattcttacaagtgggtcaaaatcagagttttgatcttcctattaagaaaaggagtgacatctgtacaataatgtatactagtggaactactggtgaccccaaggga

SEQ ID NO: 283645 - DNA, 262 bp, Glycine max
caaaagccattgcattgtggtgaatgtttgagtgcagaaggtaaaaaagaaaatggtggtgaagattcgattggcaaggctcgggtgccggaaccacccattctatcgtgtggttgttacggatagcaaaacaacaagagatggcaagcaacttgaagttttaggtttctacaatcccgtcgcaggcaaggatgatgacaaaagaatgagcctcaaactggagagaatcaagtattggctttccgttggagctaagccttca

SEQ ID NO: 283646 - DNA, 262 bp, Glycine max
ggtcagtccggagctttatggtgacagcaggcccagattattcacttactggacgagtgactcatatcaagcaaccggatgctacaaccttctttgtgcgggttttgtgcaaacaaatggcaggatagccattggagctgccatttcccccatctcatcttatgaatccaaccaatatgacatcaccatcctaatttggaaggacccgaaagtagggaattggtggatgagttttggtgatggcacattggtagggtactgg

SEQ ID NO: 283647 - DNA, 261 bp, Glycine max
  unsure (1)..(261): unsure at all n locations
ctactactgctagctgtgacttgttttgagttcaatcaaatcgcattggtatctgaaatcaggaaagatggttagcgtantgagatcaggcaggcacaaagggcagaaggcccagcaaccatccttgccattggaactgcaaacccaccaaaccgtgttgatcagagcacctatcctgattactacttcagaatcaccaacagtgaccacatgaccgagctcaaagagaaatttcagcgcatgtgtgacaagtctatgatc

SEQ ID NO: 283648 - DNA, 260 bp, Glycine max
ggagaaaggcatcaactcttttaagtttttcatggcatacaaaggagctcttatgatcaatgatgagcttcttctggaaggatttaaaaagtgcaagtctcttggtgccttagctatggtccatgcagaaaatggagatgctgtgtacgaaggtcaggaaaaaatgatagaacttggaataactggtcctgagggacatgctctttcacggcctgcagtgttggaaggagaggcaactgcccgtgctattcgtttagctg

SEQ ID NO: 283649 - DNA, 262 bp, Glycine max
cgtccatcgagaaaggaagaaaagaaacaaggtgacatcatcatggcttgctcgttttctcgcgggtctctgcttcctctcgccatcatcgtttccttaggatgtctatttgcgatttccattgcaaaggaggaagccaccaagttggggacggtcattgggattgatcttggaacgacctattcatgtgttggtgtttacaagaacggccatgttgaaatcatagccaatgaccaaggtaaccgtatcaccccttcttggg

SEQ ID NO: 283650 - DNA, 263 bp, Glycine max
gttggatgatgcttcgagtaaaagtttcaagtttctaaggattaatttgcctgccggcggtcatccaacggcagttgcattttccgatgatgcatcctcccttgttgtggcgtcttatactctgtccggttgttcattatacatgtatggagaagagaaacctaaaacatctgaagacaaaccacaagcaaagcttcctctccccgaaattaagtgggagcatcacaaagttcatgataagaagtcaataattactatgtttg

SEQ ID NO: 283651 - DNA, 263 bp, Glycine max
cttcttcgtctcaaatctcttcgttcctcgattcgttccatttcttccaaaatggccaaagacccagttcgcgttctcgtcactggagctgcagggcaaattgggtatgctcttgtccctatgattgctaggggagtgatgttgggtcctgaccagcccgtgatcctccacatgcttgacattcctccggcagcagagtcattgaatggggttaaaatggaattggtggatgctgcattccctcttcttaaaggtgttgttgc

SEQ ID NO: 283652 - DNA, 256 bp, Glycine max
cagtatttgaagttaagagctcttcaaaggcaatcctatacacattacttctatgaagcaactgttggagctggtcttccaattgttagcactttacgtggcctccttgaaactggagacaaaatactgcaaatcgaaggcatctttagtgggactttgagttacatatttaataacttcaaagacggccgggcttttagtgaggtagtttctgaagcaaaggaagcaggttatactgagccagatccaagagatg

SEQ ID NO: 283653 - DNA, 258 bp, Glycine max
attactcgtgctagatttgaggagctcaatatggatctcttccgcaagtgcatggaaccagttgagaagtgtttaagagatgctaagatggacaagaggactgtccatgatgttgtacttgttggtggttccaccagaattcccaaggtgcaacaactcctgcaagatttctttaatgggaaggagctctgcaagagcatcaatcctgatgaggctgtggcatatggtgctgcagttcaagctgctatcttgagtggt

SEQ ID NO: 283654 - DNA, 256 bp, Glycine max
  unsure (1)..(256): unsure at all n locations
gttttcgcagcagcaaactaacaaattactcatatcatatnataagatggcccgttctctctcgcaanccaaacgtattggtgtccttgttgctcaatctatctccctaattcccgttcatcggcgaggttacgcagtggcatccgatgtatcggtaagagttggattgggtaatattgggcgaaggaatggaatcgtgggaggtgtagaagagaagcctgatacaagagatggttcaaaagcctactcaactgat

SEQ ID NO: 283655 - DNA, 254 bp, Glycine max
  unsure (1)..(254): unsure at all n locations
ttttcctgaatcggtgtgaacaatggcgacgtacgctgcgatgaaacccancaagccagggttggaggagtcccaggaacagatccataagataaggatcaccctttcttccaagcacgtcaaaaacctcgaganggtttgtgcggacttggttcgtggtgcaaaggncaagcgcctcagggttaagggaccngttaggntgcccactaaggttcttcacatcactaccaggaagtccccctgtggtgaaggta

SEQ ID NO: 283656 - DNA, 255 bp, Glycine max
  unsure (1)..(255): unsure at all n locations
cttctgctctacgtgaaacggttgttgaantgcccaatgtcagctgggaagatattggtggtcttgaaaatgttaagagggaactccaagagactgtgcaatatccantggaacaccctgaaaaatttgagaagtttggaatgtcaccttcgaagggagtcctcttttatggacctcctggttgtggtaaaacgcttttggcaaaagctattgccaatgaatgtcaagcaancttcantagtgtcaaaggtcctg

SEQ ID NO: 283657 - DNA, 236 bp, Glycine max
  unsure (1)..(236): unsure at all n locations
aaaatcatcaggagctgtgccatntggcacaatgtttgctctgatctctttantgtttgggatctcagttccacttgtttttgtgggtagctatgtcggattcaagaagcctgcgattnagaatcctgtgaaaacnaacaagatcccaaggcagattcctgagcaggcgtggtacatgaacccagttttctctgtcctgattggtggaatactcccatttggagctgttttcattg

SEQ ID NO: 283658 - DNA, 256 bp, Glycine max
  unsure (1)..(256): unsure at all n locations
gaaacgaagaaagaaagcgttgtgaagaatggcggaagagggacaagtgatcggtgtccacagcgtagaggagtggaaggaacatctcaagaagggagaagagtccaagaaattgattgtggtggattntactgcttcttggtgcggtccatgccgtttcattgccccaattcttgcagagtttgctaaaaagttgccgaatgtcaccttcctcaangtggatgtngatgaattggagactgtttccaaggagtgg

SEQ ID NO: 283659 - DNA, 252 bp, Glycine max
cttgatagtactactcaaggtatggcttttcaagtgttgttcatttgtttgatctcaaccatcgtgtttgcatccatactatggagaaaacaaaacaaaaacaagacccttcttccaccgagtccaatgcccctacccatcattggacacctccaccttctttctccaacacctcaccaagattttcacaagctctcactccgctatggacccataatacacctttttcttggttcagtcccctgtgtggtg

SEQ ID NO: 283660 - DNA, 251 bp, Glycine max
  unsure (1)..(251): unsure at all n locations
gttacaaatgctgggtgctgtggggtaggaaggaacaatggtcaaattacntgtcttccaatgcaaacaccatgccaaaacaggagagagtacttgttttgggatgcttttcatcctactgaagctggcaatgttgttgtggctcagagagcttacagtgctcaatctgcatcagatgcttaccctgttgatatccaacgcttagctcagatatgatctctgaacaatcaacatgttctagtgggtagtgg

SEQ ID NO: 283661 - DNA, 252 bp, Glycine max
agcttctacacagaaagtacagtggaaacttcattgtagatctattgggcaaatggaaggagtctgaatatggaggtggtcagtctgttcctgttggtggtattgcatactacatcactgcaccttccagcttagctgatatggcagccaatcctttccatgcattattctaccttgtgtttatgttgtcagcctgtgccttgttctctaaaacttggattgaagtctctggttcatctgctagagatgttg

SEQ ID NO: 283662 - DNA, 241 bp, Glycine max
agaagaaagagagtggcaaatcttctgttctgcttgacgttaagccttgggatgatgaaacagacatgaagaagctggaagaggctgttcgcagtgttgagatgcctggtctattgtggggagcatccaaactggttcctgttggttatgggatcaagaagttgcagatcatgttaactattgtcgatgaccttgtatctgtggacacccttgttgaggagactctcacagttgagcccat

SEQ ID NO: 283663 - DNA, 248 bp, Glycine max
  unsure (1)..(248): unsure at all n locations
gttcactcttcttctcttgcggctagggttttagcgcagttcttctagatttaaggaagatgggtanggaaaaggttcacatcagtattgtggtcattggccatgtcgactctgggaaatccactaccactggtcacctgatttacaagcttggaggcattgacaagcgtgttattgagaggtttgagaaggaagctgctgagatgaacaagaggtctttcaagtatgcctgggtgctggacaaactt

SEQ ID NO: 283664 - DNA, 251 bp, Glycine max
gagtttcaatgcttgttttgaagaaatttacagggttcagacagcttggaaggtaccggatgaccagcttcgggaggagctgcggatatctatatcagaaaaggtgattcctgcataccgctcgtttgtgggaagatttaggtgtcagttagagggaaggcatgttgggaagtacattaagtatacaccagaggatctagagacctatctattagatttatttgaaggatcccctgctgtattgcatcaca

SEQ ID NO: 283665 - DNA, 263 bp, Glycine max
gtttaaagcacgcaccaaacaactctatgaagaagccaaggccccacatgaaaagagcaagcttccagtgcctgaggagttctctaaggctctctacacatttgacattggtcaaaatgatctctctgttgggtttagaaagatgaattttgaccaaatacgtgaatccatgccagatattctcaaccagttagccaatgcagtcaaaaatatataccaacaaggagggagatacttctggatacacaacactagcccctttg

SEQ ID NO: 283666 - DNA, 263 bp, Glycine max
caacctactgccagcatcaaagacagaccagcatatgcaatgatcacagatgctgaggaaaagaatctgataactcctggaaagacaactctgattgagcccacgtcaggcaatatgggtatcagcatggcatttatggccgccatgaagggatacaagatggttttgaccatgccctcttacacaagcttggaaagaagggtgaccatgagagtgtttggagctgaattaatcctcactgatccagccaaaggaatgggagg

SEQ ID NO: 283667 - DNA, 263 bp, Glycine max
gcgccactcgatgtttccatttgcctgcatgcctttggtattgtggggtgtggttcgtttagtggtgtcaagtcttgcgaacgtgagggtgcatgagtggtaatcgggatgtttttgttgcacggctccatgcttgcgcatgcaacgtgtgacatgcatccttttcattgtcaccttagccttcgtggcttaggtgctgacgattggttcctgtgttgcctacctaccaaacggtattcgtgtggctagtcagacccattcca

SEQ ID NO: 283668 - DNA, 265 bp, Glycine max
cgcataataaccgtcctaagtttattgagagaattttgcaagtgtgagaaacatggcatctcgtcaaaacaacaagcaagagcttgatgaaagagcaaggcaaggagagactgttgtcccgggtggaactggtggcaagagcctggaggctcagcaacaccttgctgaaggaaggagcaagggagggcaaacaaggaaggaacagctgggtacagaagggtaccaggaaatgggacgcaaaggagggttgagcactgtggacaaa

SEQ ID NO: 283669 - DNA, 268 bp, Glycine max
  unsure (1)..(268): unsure at all n locations
ctgtactgcaatgatcgatgttatccattcagcagcttggaagcagtcagganacatatggagggcaaaaagtcactgtaaagtgcattatggtgatggtgttgatgacgaggaggtagaattagaagaattctatgattatagcagcagctatgtggatgatcaaggcaagcagcttgttgcatcttgtgatgcatctaacaatgtagaacttgttggtgggtccgagctcataatcagcaggaaatctggtgatagatcatcaacc

SEQ ID NO: 283670 - DNA, 261 bp, Glycine max
  unsure (1)..(261): unsure at all n locations
aattgccttctcccctgcgaatcncttctccacgtatcggagaacatggggnacaagatgaatgcgatcgcgttgtgcttgttagtgtcgaccctgttggtttctgcggtgtattgtgcaccgaatgctgggctccgtaggattgggctgaagaagattaaattggaccctaaaaacaggcttgctgctcgagttgggtccaaggatgttgattctttccgggcttctattagaaagtttcatctccaaaacaactttggt

SEQ ID NO: 283671 - DNA, 259 bp, Glycine max
  unsure (1)..(259): unsure at all n locations
tccatgttangctagtggcgatcggatccagctacagcctacnacctacagagtatncgccccgccttctccgcnatcaganacttctcttctgcagctaangngattactgtcagggatgctctcaactccgcactcgatgaggaaatgtcagctgancctaaagtcttcttgatgggtgaagangttggggaatatcagggtgcatacnagatatccaaggggctgctcgacaagtatggccccgaganggntctcg

SEQ ID NO: 283672 - DNA, 239 bp, Glycine max
  unsure (1)..(239): unsure at all n locations
ctcacncaaactcgggatcacagnnacnaacancagttcttgcactgaggtttcacgatgttgctggaacttgcacttggtntgtttgtgtnagcnttgtttctgcacttgcgtcccacaccaagtgcaaantcaaangcacttcgccacctcncanancctccaagcccaaagcctcgncttcccttcattggccaccttcacctcttaaaagataaacttctccactatgcactcnt

SEQ ID NO: 283673 - DNA, 264 bp, Glycine max
aagccacaacgcatcatattttatagggatggtgtgagtgagggacagttttatcaggttctactgtttgagcttgatgctattcgaaaggcatgtgcatccctggaacccaattatcagcctcctgtgacttttgtggtggttcaaaagcgtcaccacacaaggctctttgctagcaaccatcatgataagagttctgttgacaagagtggcaacatattgcctggcactgttgttgactccaaaatctgccatcccaccgaa

SEQ ID NO: 283674 - DNA, 266 bp, Glycine max
  unsure (1)..(266): unsure at all n locations
atgaaattaaaaatgctatcaaggaggaatcagagggcaagttgaagggaatnccttggttacactgaagatgatgtggtctccactgactttatcggcgatagcagatcaagtatttttgatgcaaaggctggaattgcattgaataagaactttgtgaagcttgtttcttggtacgacaacgagtggggatacagctcacgtgtcattgatcttcttgtattcgttgccaagaagtctctttaaggtgttacttcaaagtagct

SEQ ID NO: 283675 - DNA, 261 bp, Glycine max
ctaaaaatgccgagtcctctgctgcatctcaggtgaaggcggtttatgtgaagaacctgccaaagaatgtaactcaagagcagttgaagaagctttttgaacgccatggaaagatcacaaaggtggttcttccaccagcaaagtctggtcaggaaaagaacagaattggctttgtacattttgcagagaggtcaaatgctatgaaagcacttaaaaacactgaaagatatgaattagaaggtcaacttttagaatgctctc

SEQ ID NO: 283676 - DNA, 260 bp, Glycine max
  unsure (1)..(260): unsure at all n locations
agggaccgtttatttcatgagntagagaatcttgctgctaattcagatggactagcacacaaaactcaagatgttcgtggccaaaaattgaaagcattggaagcacagattttagacctcaagaagaaacaagaaagccatgtgcaactattaaagcaaaaggagaagagtgaagaagctgcaaaaagactgcagactnagatacaatatatcaagtctcagaaggttcagttgcagcataaaatgaagcaagaagcaga

SEQ ID NO: 283677 - DNA, 259 bp, Glycine max
  unsure (1)..(259): unsure at all n locations
ccaagcttgtgggatgtttggnattcctcaagccaggctatgactgcggaaatggttgcatgtatagcagtcgagtccctatcgatcctggagaagatgcatgcaagaggctatgtgcatggagatgtaaaaccagaaaactttttactaggtcaaccttctacaccacaagnnnagaaattatttcttgtagaccttggattagcaacaaagtggagagacacctccagtgggcagcatgttgaatatgatcaacgcc

SEQ ID NO: 283678 - DNA, 262 bp, Glycine max
ggcacagaagagggaaaacggcaccgccgccgtagaagaaaacaaccatggtgcacgtctccttttacaggaactatgggaagacattcaagaagccgcgtcgtccgtacgagaaggagcgtctcgacgcggagttgaagctggttggtgagtacgggcttcggtgcaagagagagctgtggagggtgcagtacgcgctcagccgcatccgcaacaacgcgcggaacctcctcaccctcgacgagaagaacccgcgccggat

SEQ ID NO: 283679 - DNA, 260 bp, Glycine max
gatatgcaaaccatcgtaagtcgaattcagtcagaacttgccacatcagtggctgcaacagctgcagagttgccttgcactgtgaagttaagagtgtggtcacatgacataaaaaatccctgtgccccacttaatgctgatagatgtcgtctaaccgtaccgcatgctgtcctctgcagtgaaatgggtgctcatttttcaccatgcggtagatttttagctgcctgtgttgcatgtatgcttccccatatagaagcaga

SEQ ID NO: 283680 - DNA, 261 bp, Glycine max
cattctctctgtgtatttccctacctctcccttcaagatgcagatcttcgtcaagaccctcaccggcaagaccatcacccttgaggtggaaagctctgacaccatcgacaacgtcaaggccaagatccaggacaaggaaggaatccccccggaccagcaacgtctcattttcgccggaaagcaacttgaggacggccgtacccttgctgactacaacattcagaaggagagtactcttcacctcgtcctccgtctccgtgg

SEQ ID NO: 283681 - DNA, 261 bp, Glycine max
aaatttgaacagaaaggtttcactggcggcctaaactactatcgcgctatggacctaacctgggagctcacagcagcatggactggagtacagattaaggtaccagtcaagtttattgtgggagaccttgacattacatacaacactccaggtgttaaggagtatatacataatggtggctttaagagagacgtaccattcttgcaagaattggttgtgatggaaggagtagctcactttataaatcaggaaaggccccaa

SEQ ID NO: 283682 - DNA, 260 bp, Glycine max
  unsure (1)..(260): unsure at all n locations
caagactttgaccggcaagaccatcaccctcgaggtcgagagcagcgacaccatcgacaacgtcaagggcnaagatccaggacaaggaaggtatccctcctgaccagcanaggttgattntngctngtaagcagctggaagatggtcgcactcttgctgnttataacatacaaaaggnatcaacacttcacttggtcttgaggctaaggggaggtaccatgattaaagtgaagactttaactgggaaagaaattgaaatt

SEQ ID NO: 283683 - DNA, 256 bp, Glycine max
  unsure (1)..(256): unsure at all n locations
gtttctgattcctttcttcagaattccaagttttcatatcgttagggacaaaagattgtgagatagngtatggntngaaaangcganggtcctgctatcggaatcgatttnggaacgacgtactcttgcgtcgncgtntggcaacacgatcgtgttganatcatagccaacgntcagggtaatagnactaccccatcctacgtggctttcaccgatacagaacggttgatcggcgatgcggcgaagaaccaggtcg

SEQ ID NO: 283684 - DNA, 256 bp, Glycine max
  unsure (1)..(256): unsure at all n locations
aggcttcaatttctaattagggttncgcttagagtaaccaataaccatgggagtcttcacctttgtcgtccgcaaatccggcagcgaatggagcgccaagcaacattccggcgacatcgaggcctccgccgattccaccttcgatctccaacggaagctcgtncaagccgctctcgccgttgattcctccggtggagttcagtcctctttctctcccgtgtctcctacctccgctgtgttccaggtgatagtgggt

SEQ ID NO: 283685 - DNA, 257 bp, Glycine max
  unsure (1)..(257): unsure at all n locations
gtgggaaccccagagcacttagaaggttgaggactgcttgtgagagggccaagagaacattgtcatccactgcccagaccaccattganattgattctctctatgagggaattgatgtctactccactgttactcgtgccagattcgaggaactgaacatggatctctttaggaagtgtatggagccggtggagaaatgtntgagggatgctaaaatggacnaaagaagtgttgatgatgttgtccttgttggtggt

SEQ ID NO: 283686 - DNA, 258 bp, Glycine max
  unsure (1)..(258): unsure at all n locations
cctttgtgtaggtgctcaaccctagtaagccgcaatggtgaagtactcaagggagcctnacaatccaactaagtcttgcaaggctagaggcgccgaccttagggttcattttaagaacacaagggaaactgcctttgcaatcaggaagttgcccttggtcaaggctaaaaggtacttggaagatgttcttgcccacaagcaggcaattccattcagacgtttttgtcgaggtgttggaaggacagcccaggctaagaa

SEQ ID NO: 283687 - DNA, 259 bp, Glycine max
  unsure (1)..(259): unsure at all n locations
ctctttctccgagaacaaaaaanaaaacgtgattcgctcttctcttngaataaaccacaaaaccagcaaacgagaagnggagtgagagaagatggggttgtcgttcacgaagctgttcagcaggttntttgcgaagaaggaaatgaggattctganggtaggncncgatgctgcnggtaagacaaccatcttgtacaagctcaagcttggagaaatcgtcaccaccatccccaccatnggatttaatgttgagactgtg

SEQ ID NO: 283688 - DNA, 261 bp, Glycine max
  unsure (1)..(261): unsure at all n locations
gagagcttgagaattggcataactatttggactttatagaaagggaaggggacntgaagcaagattgtcaagttgtatgagagatgtgtcattgcatgcgccaattatccggagtattggatacgctatgttttgtgtatggaagccagcggaagcatggatcttgcaaataatgttcttgctcgagcaacccaagtctttgttaagagacaaccagagatacatcttttttgtgctcggttcaaggagcagactggagat

SEQ ID NO: 283689 - DNA, 263 bp, Glycine max
  unsure (1)..(263): unsure at all n locations
ctgatgccaaattttttgtcatcaagtcttacagcgaggatgatatccanaagaggtattaagtataatgtgtgggctagtacacaaaatggcaacaagaagcttgatgctgcatatcaggaggcacagcagaaacctggcggcacccctgtttttctctttttctcagttaataccagtgggcaatttgtggggcttgctgagatgattggtcctgttgattttaacaagagtgttgagtattggcagcaagacaagtggat

SEQ ID NO: 283690 - DNA, 255 bp, Glycine max
  unsure (1)..(255): unsure at all n locations
aatttcaattgcagatattttcaagggatncctgaggcggcagttccagagaatgagcagaggagtggatgtgcatgcngatctggagatgctgaataatttttatgcactccccttaatgctgttgttgaaactcttcaaattcttnttggtcatttagtgtatactgtatgccttgattgtgcgtgtaaattgtnattatgtaccttgaggttnccattttganaaattgtatcatttatttattgtagtcct

SEQ ID NO: 283691 - DNA, 254 bp, Glycine max
  unsure (1)..(254): unsure at all n locations
ttacaaatcgcataataaccgtcctaagtttattgagagaattttgcaagtgtgagaaacatggcatctcgtcaaaacaacaagcaagagcttgatgaaagagcaaggcaaggagagactgttgtcccgggtggaactggtggcaagagcctggaggctcagcaacaccttgctgaaggaaggagcaagggagggcaaacaaggaaggaacagctgggtacagaagggtaccaggaaatgggacgcaaaggang

SEQ ID NO: 283692 - DNA, 257 bp, Glycine max
atcaaagaaaggggtggtggctgcttcgaaagcttaataatttgtttatttccagaacatcatagttttcgcagcagcaaactaacaaattactcatatcatataataagatggcccgttctctctcgcaagccaaacgtattggtgtccttgttgctcaatctatctccctaattcccgttcatcggcgaggttacgcagtggcatccgatgtatcggtaagagttggattgggtaatattgggcgaaggaatgga

SEQ ID NO: 283693 - DNA, 260 bp, Glycine max
  unsure (1)..(260): unsure at all n locations
gggccttcaagggcttcaaggcnaaagaccctttattttgtcncgctccactnatgtcggttcaggcanatatgccgcacattggactggtgacaatcagggcacatgggagaacttgaggtactcaatatccacaatgctcaattttggcatatttggggtgccaatggtgggttcagatatatgtggcttctatccacagcccactgaagagctatgcaatagatggattgaagtaggggctttctaccccttttcaa

SEQ ID NO: 283694 - DNA, 253 bp, Glycine max
  unsure (1)..(253): unsure at all n locations
gacattccagaggaagagacttttaccaatgttgaggagttcttggaaccccttgaactctgtnacagatcactctgtgcttgtggcgatcgtgcaattgccgatggaagccttctagatttcttgagacaagtctctactttcggantctccctagtgaggcttgacataaggcaagagtcagaccgccacacagacgtcttagacgccatcaccaaacatttagaaataggctcataccaggaatggtcgg

SEQ ID NO: 283695 - DNA, 254 bp, Glycine max
  unsure (1)..(254): unsure at all n locations
cgcgagttcttcaaccagccacttgaggtgaangaggagtatgccaactcccccaccacttatgagggctatggaagtcgcttgggagtgcagaaaggtgccaccttggactggagtgactacttctttctccattacaggcctccctcacttaggaaccaagctaagtggcttgcatttccacaatcctttaggaaagtgattgctgaatatggggaggaagtggttaagctaggaggaaggatactcaaaat

SEQ ID NO: 283696 - DNA, 256 bp, Glycine max
caccaacatcctgatctaactgttccattcctaaaggcagtagtagaaattgtgaaggcatcaaaacgtgaagcttgcctgttgcccactcaggcagagtcgtttgccagatatgtcaggtctatggtctctaattcagaagaaacaacacaagacctgtgggaggacattttattcaagttaaatgattctagaagatatagacgaacagttggttctattgctggttcatgtattactgctgcaatcccacttc

SEQ ID NO: 283697 - DNA, 255 bp, Glycine max
  unsure (1)..(255): unsure at all n locations
cgcatcgcaccttcaacttaacctattccacttgtaatcgtaaangctttgctagaagaagagacaaagtgtgtctgtgtgtgtgagagagagagcaatggctggctcgtgggcacgccgttctctgattgttctagccatcatttccttcggatgtctatttgcgatttccattgctaaggaggaagccaccaagttagggacggtcatcggcattgatcttggaacaacctattcatgtgtcggtgtttacaa

SEQ ID NO: 283698 - DNA, 211 bp, Glycine max
  unsure (1)..(211): unsure at all n locations
ttgttgtttgtgtgtttgtntttnctctcacctgaaaatgtcttgctgcggtggtaactgtggttgcggaagcgcctgcaagtgcggcaacggctgcggaggctgcaagatgtacccagacttgagctacaccgagtcaaccaccaccgagaccttggtcatgggagtggcaccagttaaggctcaattcgagagtgctgaaatgggtgtt

SEQ ID NO: 283699 - DNA, 257 bp, Glycine max
gaacagcgaaatcgacatcgctgtccattcgatgaaggatgttcctacttacttgcctgataaaacaattctgccatgtaaccttccgcgagaggatgtcagagatgcatttatatccttgactgcagcttccttagctgatcttccccctgcaagtgttattggtactgcttcgttaaggcgaaagtcacagatcctccacagatatccatctcttaatgtgcaggaaaatttccgtggcaatgtccaaacaaggt

SEQ ID NO: 283700 - DNA, 258 bp, Glycine max
  unsure (1)..(258): unsure at all n locations
ctctctctttctctttctctctcatccagatcttgcaaanaaaaaaangcacaatggcagcgagngntccnantccangcnaaganttcgtgtacatggcnaagtggcggagcaggccgagcgctacgaggaganggtgnagttcatgganaaggtctccgcntccgccgaaagcnaggagntgaccgtggaggagcgnaacctcctctccgtngcctanaagaangtaatcggngctcgccgcgcctcctggngnat

SEQ ID NO: 283701 - DNA, 274 bp, Glycine max
  unsure (1)..(274): unsure at all n locations
cctaagtgaganacaaagaaaggaaataattgatctttgaaaatgcagggaggaaagaaagctggagagtccatcaaggaaacagctgcaaacattggtgcttctgccaaggctggcatggagaaaaccaaggccactgtccaggagaaggcagaaagaatgacggcacgtgatccgatgcaaaaggagttggcaacccagaagaaagaggcaaagatgagccaggcagagctggacaagcaggcggcgcgtcacataacacggcggcgaanag

SEQ ID NO: 283702 - DNA, 273 bp, Glycine max
gttggtgaagaaggacgcccaagaagagcatttgaacaccacagtgggactggacgaggaaatgaattcaaacgggatggctctggacgtgggaactggggtacacagaatgatgacattgctgtggttactgaggaagtggtgtatgaaactgaaaagaattttgctgatgagaagcctgcaggcgaggaagatgcacctgaaggaaacaaggactgtcctgccaatgaaaatgaagaaaaggagcctgaggacaaggagatgacactggaa

SEQ ID NO: 283703 - DNA, 273 bp, Glycine max
  unsure (1)..(273): unsure at all n locations
ctttgttactctcacacatgtctcgctccgtgcctttggtttcaaccattttngtcttgcttctgcttctggtggccactgagatgatggggccaacaatggtggcagaagcaagaacttgtgagtctcagagccaccgtttcaaggggccatgtttgagtgacaccaactgtggctctgtttgccgaaccgaacgtttcactggaggacactgccgtggcttccgtcgcagatgcttctgcaccaaacattgtnaattttaaaaaattaatt

SEQ ID NO: 283704 - DNA, 278 bp, Glycine max
ctgcaagaagtcttctccttcaccatgccaccaaagcctttagactatgggtcaataaatgaaaacgtgaagaagagtcaatatgctgtcagaggtgaattataccttcgagcttctgagcttcagaaagagggcaaaaagattatatttactaatgttggcaacccacatgcattgggacagaaaccactgagcttccctcgtcaggttgttgctttgtgccaagctccattcctacttgatgatcctaatgttggactgctattccctgctgatgc

SEQ ID NO: 283705 - DNA, 275 bp, Glycine max
gcttcttctccttctgaactaagagatggggttgtctttcaccaagctttttagccggctctttgctaagaaagagatgcgtattctcatggtaggtcttgatgctgctggtaagactaccatcttgtacaagctcaagctgggagaaattgtcacaaccattcccacaattggattcaatgtggagactgtggaatataagaatattagctttactgtatgggatgtgggtggccaagataagatccgtcctttatggagacactacttccaaa

SEQ ID NO: 283706 - DNA, 272 bp, Glycine max
  unsure (1)..(272): unsure at all n locations
cttccctctctccttaacactgtttcatgcaaaaccatttctagggttttcggttttctcgccattcttcaattctcgcgctccggcatcgcttcgccatggcatttccgaccaagaagctcatcgacgaccccaatgntgttgtgactgaattcattgaaggtcttgtggagacatatcctggactacagtatttagatggctttcctcaggtgaaggttgtcctacgtgcagatgtttcagctgcaacatatgataaagttgcaatcata

SEQ ID NO: 283707 - DNA, 272 bp, Glycine max
gttgtctctgtgaaaattccagttggtaaagggtgtggatttgttcaatttgctgacagaaagaatgctgaggaagcaattcagggattgaatgggacagtaattgggaagcagacagtgcgtctttcttggggtcgcagtccaggaaataagcattggagatctgattccaatggaggccattatggtggtcatcagggttatggtggccatggatttgctgtgagacagaatcaggatatagccatgcaacctgctgctgcaattcaagg

SEQ ID NO: 283708 - DNA, 272 bp, Glycine max
  unsure (1)..(272): unsure at all n locations
gctggataatttaggactgattgaagagagtgatggtgcgcgtgtgatttatgttgagggtgtagacataccacttantgctgtgaaaagagatggtggctacaactattttacaactgatctagcatcactttggtatcgtctaaatgaagaaaaacttgaatggattgtatatgtnacagatattgggcagcaacagcactttgatatgctatttaaggcctataggcgtgcaggttggttaccaaaggatgagaatgcgtatccaaaat

SEQ ID NO: 283709 - DNA, 272 bp, Glycine max
gaaaggaatgccatgctccctactatttcttccaaggattggttagacattgattttggtatttctgagggtgttgattttattgctatttcatttgtcaagtctgctgaagttattactcatcttaaaagctatattgctgcacgatctcgtgatagtgatatttctgtcattgcaaagatagaaagtattgactcattgaagaacttagaagagatcgttctagcggcagacggagctatggtggcacgaggagacttgggagctcaaat

SEQ ID NO: 283710 - DNA, 273 bp, Glycine max
  unsure (1)..(273): unsure at all n locations
ggctgatacaggtggaggagatgcagtgagaccagtggtaatatgtgataacaagtgtggctgcacacttccatgcactggtggttccacttgcaggtgcacaagtgctggcactgccacaggagggggtgatcacgtgacatgctcgtgcggagagcactgtggttgcaatccatgctcatgtcccaagattgcggctgctggaagtggttgcagatgtggcacagattgtgcangtgcctcctgccgcacttagtatcacaccttaaggct

SEQ ID NO: 283711 - DNA, 270 bp, Glycine max
gttcaacaatgtttttgtgaagaatctgtcagaatcaaccactgatgatgaattgaagaatgtttttggtgaatttggaactattactagtgctgtcgtaatgagggatggagatgggaaatcaaagtgttttggatttgtgaattttgagaatgctgatgatgctgctagggctgttgaggctctcaatggcaaaaagtttgatgacaaagaatggtatgttggaaaagctcaaaagaaatctgaaagggagaatgaattgaaacaacg

SEQ ID NO: 283712 - DNA, 272 bp, Glycine max
  unsure (1)..(272): unsure at all n locations
ggcacggttcttcgtttggccaaggatttggctgagaacaacaagggtgcacgtgtgcttgttgtctgctctgagatcactgcagtcacattccgtgggccaagtgacactcaccttgatagtcttgtgggccaagcattgtttggagatggagctgcngcagtcattgttggttctgacccaattccacaagttgagaagcctttgtatgagcttgtttggactgcacaaacaattgctccagacagtgaaggtgctattgatggacacct

SEQ ID NO: 283713 - DNA, 277 bp, Glycine max
  unsure (1)..(277): unsure at all n locations
ctctttcgcttctgaatcntcaacaatggtgctcgaggcgacgatganctgtancgacaatnctgaatggatgcgtaacggtgattactctccntctcgatttcaagctcaagcagacgctgtgaatctcatttgcggtgctaaaacgcagtctaatccagaaaatacagtgggagttctcacaatggcagggncaaggcgttcgtgttttggtcacccctaccagtgatctgggcaagatcttagcctgcatgcatgggctagatataggtggtga

SEQ ID NO: 283714 - DNA, 277 bp, Glycine max
  unsure (1)..(277): unsure at all n locations
cntnnatgaggcnnaggttananagttcaaggatgcaatagngantnattnctggtttgaattnttcatggatgaccttccattgtgggggtatgttggcgagttacatcctgataagaacggtgataatggcaagcatgtactttacacacacaagaacataaatgttcaatacaataaagatcagatcattcatgttaatctaacttatgacaacccaaggcctctggaagtaggaaaatctttggacatgacatattctgtcaaatggtctcct

SEQ ID NO: 283715 - DNA, 272 bp, Glycine max
  unsure (1)..(272): unsure at all n locations
cagaggaacttccttgcaggttcgaaagacaatgtgataagccagatacctagtcaagtgcaggagcttgcgttccctgggtctgcaaaagatattgagaacctaataaagagccaaagtgagtcctactttgtggatgctcagcctcagcagaaagaggaggggaacaagggaagaaagggtcctttgtcttcaattttgagggcttttactgaataagtatgtagtacnaaaatgtatgcngtaatagctcatagtgagcgagganagta

SEQ ID NO: 283716 - DNA, 273 bp, Glycine max
ggagtaatcgagaaagagaagaagcatatatatcaaaatggctgcagagatggagagggagtcattgataactgaagctcctaatgcaccagttactgcacagagaagggtcagaaatgacttagaaaattctctaccaaaaccatacttgccaagagcattgaaagctcctgatacgggtcacccaaatggaacagcaggccacaggcaccacaacttatctgttcttcagcagcattgtgctttttttgatcaagatgacaatggaatcat

SEQ ID NO: 283717 - DNA, 271 bp, Glycine max
  unsure (1)..(271): unsure at all n locations
gatatagaaagagagagaagaagaaaagaagaacaaagatgcaatcctcaaaggagaagatgaaaaacatggcaagtgctgccanggaacaagtcgacatctataaagccaaaatagacgagaaggcagaganagcaacggcaagaacagaagaggagagggtgatagcccatgagcacgcaaaggcaaaggnagctggagcaaagatggngctgcatgangctaaagcaaggcatgcagcagagaagctaagcgccaaccaatcacatta

SEQ ID NO: 283718 - DNA, 271 bp, Glycine max
  unsure (1)..(271): unsure at all n locations
gaggatttgaagatganacaagtncaggataacaaaaaccatatcatggaagtgcttgcagccaatgatcttgattgtgatgacctggattccgtttgtgtctcagacacaatggttctcagtaactatatagaagagattattgtgtcagcaatttcgtatcatttgatgaaaaacaaagacactgaatacagaaatgggaagctcgttatttcttccaatagtttgtcccatgcattgaatatattccacaaggggaaatccagtagaa

SEQ ID NO: 283719 - DNA, 265 bp, Glycine max
  unsure (1)..(265): unsure at all n locations
ctgaggcagaatttaggtcctggagttgatggttgggccatctnctctgaaagcaatgatgagcatagttgtgggtatggggtttgcaatctgtttcctgtactggtgggtgaacaattatgttcctcttcctactcgtagcnnnnnnnnnnnnnnnnnncccaaaatgggaacaatggagancttgaagtncttggtgtcttcaaagtacatcagagatcttgccactttagtggttgcttatggaatcagcatcaancttgtt

SEQ ID NO: 283720 - DNA, 273 bp, Glycine max
ttactcgtgctagatttgaggagctcaatatggatctcttccgcaagtgcatggaaccagttgagaagtgtttaagagatgctaagatggacaagaggactgtccatgatgttgtacttgttggtggttccaccagaattcccaaggtgcaacaactcctgcaagatttctttaatgggaaggagctctgcaagagcatcaatcctgatgaggctgtggcatatggtgctgcagttcaagctgctatcttgagtggtgagggtaatgagaagg

SEQ ID NO: 283721 - DNA, 270 bp, Glycine max
  unsure (1)..(270): unsure at all n locations
agaattcgaagagaaatcaaatcgaatctcatttgatctgtgtgtngttgcggcggcggcaatggcggagcacttggcatcgatattcgggacggagaaggacagggtgaactgcccgttctacttcaagatcggcgcgtgcaggcacggcgaccggtgctcgcgtctccacacgaagccgagcataagccccactattctcctctccaacatgtaccagcgccctgacatgatcacccccggcgtcgacgcccacggccaccccatcga

SEQ ID NO: 283722 - DNA, 268 bp, Glycine max
  unsure (1)..(268): unsure at all n locations
ctagatttaaggaagatgggtaaggnaaaggttcacatcagtattgtggtcattggccatgtcgactctgggaaanccactaccactggtcacctganttacaagcttggaggcattgacaagcgtgttattgagaggtttgagaaggaagctgctgagatgaacaagaggtctttcaagtatgcctgggtgctggacaaacttaaggctgagcgtgaaagaggaatcaccattgatattgctttgtggaagtttgaaacaacaaagt

SEQ ID NO: 283723 - DNA, 267 bp, Glycine max
gttggtttggatcagttcataacaaagaatgctactttgactaatgaaaaggaagttgatgcccatcccattcgagctatgaagttttctgtctcacctgttgttcgtgttgctgttcaatgtaaggttgcatcagatcttcccaagcttgttgaaggtctaagcggttggccaagtcagatcctatggttgtttgtaccattgaggagtctggtgaacacattgttgctggtgcagagagcttcatcttgagatctgtttgaagga

SEQ ID NO: 283724 - DNA, 269 bp, Glycine max
atccactttcactggaatcacaatcctgaaacaaaaacatcttagcatttaacatactactagacaacatgaccaccacattggaaagaggtttctcggaagagcaagaagctctggtggtgaagtcatggaatgtcatgaagaagaattctggagagttgggtctcaagtttttcttgaaaatatttgagattgctccatcagctcagaaattgttctcattcttgagagattcaacggttcctttggagcaaaatcccaagctcaag

SEQ ID NO: 283725 - DNA, 250 bp, Glycine max
  unsure (1)..(250): unsure at all n locations
aaaatcatcaggagctgtgccatttggcacaatgtttgctctganctttttanngtttgggatctcagttccacttgtttttgtgggtagctatgtcggattcaagaagcctgcgattgagaatcctgtgaaaacgaacaagatcccaaggcagattcctgagcaggcgtggtacatgaacccagttttctctgtcctgattggtggaatactcccatttggagctgttttcattgagcttttcttcatt

SEQ ID NO: 283726 - DNA, 273 bp, Glycine max
gggaattctttccttaaccatagcatattgttggcaactttacacgttatggattttggttcagcttcacgaagcagttccaggtaaaagatacaacagatatgtggagctagcacaagcagcatttggggaaagattaggagtctggcttgctctcttcccaactgtttatttgtcagcaggaactgcaacagctttgattcttattggaggagagaccatgaaactgttcttccaaatagtttgtggtcccacgtgtacctcaaatccttt

SEQ ID NO: 283727 - DNA, 273 bp, Glycine max
cagaggaacttccttgcaggttcgaaagacaatgtgataagccagatacctagtcaagtgcaggagcttgcgttccctgggtctgcaaaagatattgagaacctaataaagagccaaagtgagtcctactttgtggatgctcagcctcagcagaaagaggaggggaacaagggaagaaagggtcctttgtcttcaattttgagggctttttactgaataagtatgtagtactaaaatgtatgctgtaatagctcatagtgagcgaggaaagta

SEQ ID NO: 283728 - DNA, 270 bp, Glycine max
  unsure (1)..(270): unsure at all n locations
tgtgaataagatgggagagtataaagattatacggcggagaaggctaaagaggggaaagatacgacgttggggaagcttggggagctgaaggactctgcggctgatgcggcgaagagggcagtgggttacttgagcggcaagacagaggaaaccaaagagaaagtctcggagacggcagaggcgacggctaataaggcggcggagatgaaggaggccaccagggagaaggctgccgggatgcggaggcggccaagaacaggnnnngggag

SEQ ID NO: 283729 - DNA, 265 bp, Glycine max
  unsure (1)..(265): unsure at all n locations
tttnctcgattganacgtgataagcaagcaatanctgttggatttgtnngatacccaaatgttgggnagtcancagtaatcaacacattgcgtactaagaangtctgcaaggttgctccaattccagggganacgaaagtctggcagtatataacccnaacaaagaggatctttctgattgattgtccaggtgttgtctaccacaacaatgatactgnaacagangttgtgttgaagggtgtggtgcgtgtantaatttgaaaga

SEQ ID NO: 283730 - DNA, 268 bp, Glycine max
ggagacacaccttcagcagcagcagccatggttctcaaaaccgaactatgccgattcagcggtgccaagatctacccagggaaaggcatcagatttgttcgtggtgattctcaggttttcctgtttgctaactcgaaatgtaagaggtatttccacaacaggttgaagccatcaaagctcacctggactgcaatgtacagaaagcaacacaagaaggacattgctcaagaagctgtgaagaaaagaagacgtgctgccaaaaagcctt

SEQ ID NO: 283731 - DNA, 266 bp, Glycine max
  unsure (1)..(266): unsure at all n locations
gaccggggttattattcagttgagactgtgtcactcctcgtggcactgaaagttcggtatcctcagcgaatnactantcttagaggaaaccatgaaagccgtcagattactcaagtanatggatttnatgatgaatgccttagaaagtatggtaatgctaatgtttggnagacctttacagacctttttgattttttnccatgactgcattggttgaatcagaaatattctgtttgcatggtggactgtcgccttcaattgagacc

SEQ ID NO: 283732 - DNA, 267 bp, Glycine max
  unsure (1)..(267): unsure at all n locations
gaaattgctttgctgtaagtttctgattcctttcttcagaattccaagtnttcatttcgttagggacaaaagattgtgagatagagtatggctggaaaaggcgagggtcctgctatcggaatcgatttgggaacgacgtactcttgcgtcggcgtgtggcaacacgatcgtgttgaaatcatagccaacgatcagggtaatagaactaccccatcctacgtggctttcaccgatacagaacggttgatcggcgatgcggcgaagaac

SEQ ID NO: 283733 - DNA, 268 bp, Glycine max
  unsure (1)..(268): unsure at all n locations
cagaaaactcagccaggaaaagaacatgtaatgaatccactcccacaagccacaaatcctgatcacaaggccgccaataaactccagggaaaggtggcgttggtgacaggaggtgactcaggaattggcagagcggtttgcctgtgtttcgcaaaagagggtgcaaccgtggcctttacatacgtaaagggccatgaggacagggataaagatgatactctgaagatgctgcntgaagctaagacaagtggtgcagacaatccattgg

SEQ ID NO: 283734 - DNA, 270 bp, Glycine max
  unsure (1)..(270): unsure at all n locations
gatgatttgttgctgtaacaagatggatgctactacaccaaagtactccaaggccaggtatgatgaaattgtgaaggaagtttcttcctatttgaagaaagtaggatacaaccctgacaagattccttntgttcctatatctggttttgagggagacaacatgattgagaggtccacaaaccttgactggtacaagggtcctactctgctagatgcacttgaccagatctctgagcccaagaggccttctgacaagcccctcaggcnacc

SEQ ID NO: 283735 - DNA, 272 bp, Glycine max
  unsure (1)..(272): unsure at all n locations
actaaatcgaagcaaacaatagtgagtgagatcgtgaagaaattagtttggaaatgggcagtggnaggttgtcagaagcttctggaactgagcaccaagatcgtcgctgttggcagaaactacgcngctcacgccaaggaattaggcaacgccgttcccaaggagccggtgttgtttctgaaaccgacgtcgtcttacttgaaaaacggcggaaccatccaaatcccacacaacgagggccgcctgcatcacgaggttgagctcgctntggt

SEQ ID NO: 283736 - DNA, 265 bp, Glycine max
  unsure (1)..(265): unsure at all n locations
cagctgtctgcngtnagatctgtacccgcctagccattgatttggaaaagtccaactncaaggatgagnaagcttcagagtgatgctctaagagaagctatctcaggaatcatggctgattccaaggaaaagaacaggaaatttgtggagaccattgaactccaaattgggttgaaaaattatgatccccagaaggacaagcgtttcagtggcnctgttaagttgcctcatattcctcgccccaagatgaagatttgtatgcttg

SEQ ID NO: 283737 - DNA, 264 bp, Glycine max
  unsure (1)..(264): unsure at all n locations
ctgcaagangtcttctccttcaccatgccaccaaagcctntagactatgggtcaataaatgaaaacgtgaagaagagtcaatatgctgtcagaggtgaattataccttcgagcttctgagcttcagaaagagggcaaaaagattanatttactaatgttggcaacccacatgcattgggacagaaaccactgagcttccctcgtcaggttgttgctttgtgccaagcnccatncctacttgatgatccnaatgtnggactgcta

SEQ ID NO: 283738 - DNA, 265 bp, Glycine max
  unsure (1)..(265): unsure at all n locations
cttctttccncaaccntcnttctncntatatancgaacatggctaagnatcattcaagtgggaaaagctcttccatgacngctatagccttcctgnttatccntctaancactnanacaggcacaacagatgcacaatccggggtatgttatggaagacttggcaacaacttaccaacccctcaagaagttgtggccctctacaancaagccaacattcgcaggatgcgaatctacggtccaancccagaagtcctcgaagcact

SEQ ID NO: 283739 - DNA, 261 bp, Glycine max
  unsure (1)..(261): unsure at all n locations
ggggctggcggtggcgacgccgctcttcatcttctncngcccgctgctggnncccgccgccttcgccataggaatggcggtgaccgcggtgcnggcggcgggggcgtgcgggctggcggngctcgtgttgttctcgtgggtggtgaactatctccggcagatgccacgggggacgacgatgatgacggtgctgccggagcaagcgaangncacgnngcggacatggcggatacgtggggcagaagacgaaggaggttgggt

SEQ ID NO: 283740 - DNA, 265 bp, Glycine max
  unsure (1)..(265): unsure at all n locations
ggaaggagattcaagacgaaactgatagagagactggacgaaccaaacaaatnnctactgttcccattcatacttagtanatactctcccaatgttgttaacttgacactcgttgatcttcctgggcttacgaaagtagctgttgagggtcaaccggatagtattgtgaaagacattgaggatatggttcgctcctacattgagaagccgaactgtataattttggccatttcaccagccaatcaagatcttgcaacatctgatg

SEQ ID NO: 283741 - DNA, 264 bp, Glycine max
ggttttagcgcactttcttctagatttaaggaagatgggtaaggaaaaggttcacatcagtattgtggtcattggccatgtcgactctgggaaatccactaccactggtcacctgatttacaagcttggaggcattgacaagcgtgttattgagaggtttgagaaggaagctgctgagatgaacaagaggtctttcaagtatgcctgggtgctggacaaacttaaggctgagcgtgaaagaggaatcaccattgatattgcttt

SEQ ID NO: 283742 - DNA, 267 bp, Glycine max
  unsure (1)..(267): unsure at all n locations
caattccattcattcgtncattcccaggttgtgatggcagcagcaccagcagctaccttcgcnattggaaccaccggttccctcggccaaagaggaagctcgcntcctcaatcaaagtcctttgggttgaaattcaactctctgaatcatttgaagagcttctgtggcctcaaggccatgtcatccgtgagatgtgagtcggaatcctccttcttcggtaacaaaaccggtgcngctctacgggcgtcttttgcatccaaagctcaa

SEQ ID NO: 283743 - DNA, 267 bp, Glycine max
  unsure (1)..(267): unsure at all n locations
ctgagacccttggacccaacatggtggttgatatgtgcaagggagnccagtatttgaatgaaatcaaggattctgtggttgctggattccagtgggcancaaaagaaggtgcttnggctgaagaaaacatgagagccatctgctttgaagtatgtgatgttgtgctgcacgctgatgcnatccacagaggaggtggtcaaatcattcctactgccaggagagtcttctatgcttcccagattactgccaaacccaggcttcttgagc

SEQ ID NO: 283744 - DNA, 127 bp, Glycine max
  unsure (1)..(127): unsure at all n locations
ctaagcttagaattagaaacaaagaaaagaagaaaggaaagaattgatcgttgaaaatgcagggaggaaagaaagcgggagagtccattaaggaaacagctacaaacattggtgcttctngccaagg

SEQ ID NO: 283745 - DNA, 264 bp, Glycine max
ctgagatgaacaagaggtctttcaagtatgcctgggtgctggacaaacttaaggctgagcgtgaaagaggaatcaccattgatattgctttgtggaagtttgaaacaacaaagtattattgcacagttattgatgcgcctggacatagggatttcattaagaatatgattactgggacatcccaagctgactgtgctgttcttatcattgattcgaccactggtggttttgaagctggtatttccaaggatggacagactcgtg

SEQ ID NO: 283746 - DNA, 269 bp, Glycine max
atccaatctccgaagcccttcaccgcattgcaaccatgtcgagaagaaaggttagagagccaaaggaagaaaacgtgactctgggcccagctgttagagatggcgaacatgtctttggcgtcgctcgcatctttgcctccttcaatgataccttcattcatgtcactgatctgtccgggagggaaacacttgtccgcatcacaggtggaatgaaggttaaggctgacagagatgaatcgtctccctatgctgctatgcttgctgcacag

SEQ ID NO: 283747 - DNA, 267 bp, Glycine max
  unsure (1)..(267): unsure at all n locations
cgcttctctcaccatccccatttcgcgttggtgcaaagcatccttcgtttcaatttctctctctcagcgctttctgcaatcgaacctttcatctccaaagggatccacaggccgaaggagaaatggggctgacattcacaaagcttttcagtcggcttttcgcgaagaaggaaatgcgaattctgatggttggtcttgatgctgctgtcnagaccactatcctgtacaagctcaagctcggagagatcgttaccacaattcctacca

SEQ ID NO: 283748 - DNA, 266 bp, Glycine max
gagatatggaagagtttggaacgttgtcaactaaaagatgcagtggcttctaagcctgagaaacttgacacttcagtggttgataatggagataactggagtgtggggcagaggcagttgctttgtttagggagggttatgcttaagcaaagcaggctgttgtttatggatgaggcaacagcttctgttgattcccaaaccgatgctgttattcagaagatcatcagagaggactttgcagctcgtaccatcatcagcattgctca

SEQ ID NO: 283749 - DNA, 263 bp, Glycine max
accatgatgatactgaaaagcagatgttgaggaaattaagtaaacaactaagtggtgaggattggacatggaacaatttgaatacactctgctgggcaattggttctatatcaggttccatgatggaagaacaggaaaacagattcttggttatggtcattcgcgatttattaaacctatgtgaaatcacaaagggaaaagataacaaagctgttattgcgagtatatcatgtatgttgttgggcagtatccacggtttttaa

SEQ ID NO: 283750 - DNA, 266 bp, Glycine max
aaagggtttccgatcaccgaacggatcaaggaggatgaagatagcggtggaagggtgcatgcacggggacctggacaatgtctacagaacccttcaacagttggagaaatctgaaaacacgaaaatcgaccttctcctctgctgcggcgatttccaagccgtgaggaacgagcatgacttgaagagcctgaacgtccctctcaaataccggctccatgaactccttctggaagtactattccggcgccgaggttgccccctacccc

SEQ ID NO: 283751 - DNA, 266 bp, Glycine max
caaagaatcaaagaaaggggtggtggctgcttcgaaagcttaataatttgtttatttccagaacatcatagttttcgcagcagcaaactaacaaattactcatatcatataataagatggcccgttctctctcgcaagccaaacgtattggtgtccttgttgctcaatctatctccctaattcccgttcatcggcgaggttacgcagtggcatccgatgtatcggtaagagttggattgggtaatattgggcgaaggaatggaatc

SEQ ID NO: 283752 - DNA, 265 bp, Glycine max
cgacctcgcatcgcaccttcaacttaacctattccacttgtaatcgtaaacgctttgctagaagaagagacaaagtgtgtctgtgtgtgtgagagagagagcaatggctggctcgtgggcacgccgttctctgattgttctagccatcatttccttcggatgtctatttgcgatttccattgctaaggaggaagccaccaagttagggacggtcatcggcattgatcttggaacaacctattcatgtgtcggtgtttacaagaat

SEQ ID NO: 283753 - DNA, 266 bp, Glycine max
gcatacctatggcgcctcctgatccaattctaggagtttctgaggcatttaaggtggacaatagtgatgtcaagctcaatcttggagttggggcatacagaacagaagaactacagccatatgtgcttaatgttgttaagaaggcagagaatcttatgctggagagaggggataacaaagagtatctcccaattgagggttcggctgcatttaataaggcaactgcagagttgttacttggagcagacaacccagcaatcaaacag

SEQ ID NO: 283754 - DNA, 261 bp, Glycine max
tgctggaattggccctggtgtctatgacatccactccccaagaataccaccaactgaagaaattgctgacagaatcaacaagatgctggcagtgctcgagaagaacatcttgtgggtgaaccctgactgtgggctcaagacccgtaagtacactgaggtgaagccagccctcacaaacatggttgccgcagcaaaactcatccgcaacgaacttgccaagtgaatggtataagaaagtagaatcttccaagtcatttggtt

SEQ ID NO: 283755 - DNA, 264 bp, Glycine max
acaatgcctcctttgactttgtggctggtgctgccttttctcgtgttgctagcggcggcaacaacgtctccaacacgcgccacgacggtcgcctcgtcgttccacggtcaacgagagtttgactatttcgctttcgcgttgcaatggcccggtacttactgcaaacgcacccgcagttgctgccccaccaacggttgctgcagaggctccaattttccaacagtgttcaccatacatggactctggcctgactataatgatgga

SEQ ID NO: 283756 - DNA, 262 bp, Glycine max
gtgtaaaagaggttgcatttcttttaaatcaagctgcaagtagcagatctgtgggaaaaactcagatgaatgaacaatcttctagaagtcattttgtattcactcttcgaatatatggtgtaaatgagagcactgaccaacaagtacaaggtattctaaatctcattgatcttgctgggagtgaacgtctttcaaggagtggatcaaccggggaccgattgaaagagactcaagcaataaataaaagtctgtcatcattaag

SEQ ID NO: 283757 - DNA, 263 bp, Glycine max
ggtgtgagagggccattcactccgtcacagtggatggagcttgaacaccaagccttgatctacaaatacatcacttcaaacgtgcctgtgccaacccatctcatacccattagaaaagcacttgattctttgggcttctgcaacttttcaactggactcctaaggcccaacgcattgggatggggaggtttccatctgggattctcgaacaacacagaccctgagccaggcaggtgtaggagaacagatggaaaaaaatggcg

SEQ ID NO: 283758 - DNA, 267 bp, Glycine max
cacataggctattaagggtgagatatatagaaaaacaaaggagaaaagatagaaatggagaagtttccagttgttgacatggggaaccttaataatgaagagagatcagcaaccatggagataatcaaagatgcctgtgagaactggggtttctttgagttggtgaaccatgggatatccatagagttgatggacaccgtggagaggatgacaaaagagcactacaaaaagtgtatggagcaaaggttcaaagaaatggtagcaagc

SEQ ID NO: 283759 - DNA, 269 bp, Glycine max
  unsure (1)..(269): unsure at all n locations
ggcatgttgagaaactagcagaagaaataaagaaaggggcttcctctgtggaaggtgttgaggccaaattatggcaggtacctgagacgctgcaggatgaggtgctcggtaagatgagtgcaccacccaagagcgatgtacnantcattaccccgantganctatccgaggctgatggntttgnattcggtttccnaacanggtttgnaatgatggctgctcagtttaaagcttttctagatgctactggaggcttatggagagcacaa

SEQ ID NO: 283760 - DNA, 263 bp, Glycine max
  unsure (1)..(263): unsure at all n locations
ctctttcgcttctgaatcttcaacaatggtgctcgaggcgacgatgatctgtatcgncaattcngaatggntgcgtaacggtgnttactctccttctcgatttcaagctcaagcagacgctgtgaatctcatttgcggtgctaaaacgcagtctaatccagaaaatacagtgggagttctcacaatggcagggaaaggcgtcgcgggntttggtcaccctaaccagtgatctgggcaagatcttagcctgcatgcatgggcta

SEQ ID NO: 283761 - DNA, 263 bp, Glycine max
cacgcttaacatgcttggccttgcgaagagaattggggctaggtttctgcttactagtactagtgaggtttacggtgatccgttggagcatcctcagaaagagacttactggggaaatgtgaatccaatcggtggagaggagctgttacgatgaagggaaaaggactgcggagacgttgcgccatggattatcatcggggtgctggtgttgaggttcgtattgctcgaattttcaacacatatggaccccgcatgtgtttgga

SEQ ID NO: 283762 - DNA, 261 bp, Glycine max
ggaggtacgtttaagttgacacttcagtttacagaggattatcctaataaaccacctactgtgcgctttgtttctcgaatgtttcatcctaacatttatgcggatggcagtatatgcttggacattttacaaaatcagtggagccctatatatgatgtagctgcaattcttacctcaatccagtcattgttgtgtgatccaaacccaaattcaccagcaaattctgaagctgctcggatgttcagcgaaaacaagcgcgaa

SEQ ID NO: 283763 - DNA, 269 bp, Glycine max
ctttcattttccctcactttctcgctcgccaaacgcccctctctctcctccaatggccgaccagctcaccgacgaccagatcgccgagttcaaggaggccttcagcctcttcgacaaggacggcgatggttgtattactactaaggaacttgggactgtgatgcggtcactagggcaaaacccaactgaggcagaactgcaggatatgattaatgaggttgatgctgatggcaatggaaccatcgacttcccagagttcctcaacctga

SEQ ID NO: 283764 - DNA, 258 bp, Glycine max
aaagcccttcatcagagataacttgacaaataaaatcaccatgtctatcatcccaaacttgttcggtggtagacgaagcaacgtcttcgacccattctctctggacgtatgggaccctttcgaggggtttcctttttccacaggtcacgtgccttcctctggtggggaaagcagtgccatagccaacactcgcgtggactggaaggagactccggcggctcacgtgttcaacgttgatcttcccgggttgaagaagga

SEQ ID NO: 283765 - DNA, 256 bp, Glycine max
ggagaaaggcatcaactcttttaagtttttcatggcatacaaaggagctcttatgatcaatgatgagcttcttctggaaggatttaaaaagtgcaagtctcttggtgccttagctatggtccatgcagaaaatggagatgctgtgtacgaaggtcaggaaaaaatgatagaacttggaataactggtcctgagggacatgctctttcacggcctgcagtgttggaaggagaggcaactgcccgtgctattcgttta

SEQ ID NO: 283766 - DNA, 256 bp, Glycine max
aatagattatcctaagtctttgggaatagtgctgcaatggcttcaagtcaggaggaggtgacccttttgggagctactggaagcccatttgtgtgcagggttcatattgccctcaagttgaagggagttcaatacaaatatgtcgaagaaaatttgaggaacaagagtgaactgcttctcaaatccaacccagttcacaagaaggttccagtgtttattcacaatgagaagcccatagcagagtctcttgtgattg

SEQ ID NO: 283767 - DNA, 228 bp, Glycine max
gaattcggtcgcaaagcgcgccgaggcagaggccatccacaccagagagggacagggttggatcagcaaagaaaaggctttcttttcctgctcctgacccttatggtgtgggagtgagttatggaaactatggacatagtttaaggagtccaagcttcaagagtgtgagtggatcacactttggagggttagagcaacaatcaaactactcctcttgctacactgaga

SEQ ID NO: 283768 - DNA, 258 bp, Glycine max
agtcccatagcagcgatgggaatcgatcttaaggctgggggtaagagcaaaaagaccaaaagaacagcaccaaaatccaatgacatctacctcaaattacttgtcaagctttatcggttccttgttcgaaggactggcagcaatttcaatgctgttatactcaagcgcttgttcatgagcaaggttaacaagcctccaatttctttgtcaaggttaattaagtatacaaaggggaaggaggataaaattgctgtaata

SEQ ID NO: 283769 - DNA, 176 bp, Glycine max
ctaagcttagaattagaaacaaagaaaagaagaaaggaaagaattgatcgttgaaaatgcagggaggaaagaaagcgggagagtccattaaggaaacagctacaaacattggtgcttctgccaaggctggcatggagaagaccaaggccactgtccaagagaaggcagaaagaatg

SEQ ID NO: 283770 - DNA, 249 bp, Glycine max
gtgctacaaacaacaatggctgctaatcaggaagatgtgaagcttttgggagctactggaagcccatttgtgtgcagggttcagattgccctcaagttgaagggagttcaatacaaatttttggaagaaaatttgaggaacaagagtgaactgcttctcaaatccaacccagttcacaagaaggttccagtgtttattcacaatgagaagcccatagcagagtctcttgtgattgttgaatacattgat

SEQ ID NO: 283771 - DNA, 177 bp, Glycine max
atggttaaagacacaaagcctttagcctatgctgccaataatggataccaacaaaagggttcttcttttgattttgatcctagcgctcctccaccgtttaagattgcagaaatcagagcttcaataccaaaacattgctgggtcaagaatccatggagatccctcagttatgttctc

SEQ ID NO: 283772 - DNA, 251 bp, Glycine max
gaaccgaagctggtctaagacaagctagagctgcaattagagaagcaagaaacgggaatcaaacacaagatatagactatgttccagttggaccaatgtataacaatgctaatgcatttcacaggagttacttggaaatggagaaacagttcaaagtattcgtctacgaagaaggggaacctccggttttccacaacggaccttgcaaaagcatatactccatggaggggaatttcatccatgctattgag

SEQ ID NO: 283773 - DNA, 243 bp, Glycine max
gtcttcataaacgcctttcttctccgtttccgtttcctcgttcgaattcgctttttgatctgcgaaaatgagagagtgcatctcgatccacattggtcaggctggtatccaggtcggaaatgcttgctgggagctctactgcctcgagcacggcatcgggcccgatgggcaaatgccaagtgacaagacagttggcggtggtgatgatgctttcaatactttcttcagcgagactggtgctgg

SEQ ID NO: 283774 - DNA, 246 bp, Glycine max
  unsure (1)..(246): unsure at all n locations
aaatgccgctcctgtaaaaaaggctgaagcagaaacattaagttcagtgggaaagacagatggtgaaaaatcagttcctgcacccaaagccgctgaagttcctcctgataatgagtttgagaagcgaataaggcccgaggtaatactagcaaatgagattgatgtcacattctctgatattggtgccttagatgagaccaaagaatccctcnaggacctagtaatgcttcctcttagaaggccaga

SEQ ID NO: 283775 - DNA, 251 bp, Glycine max
gtagcattcagtgaaacactagctagggtattgggagctctcgttgtttcggagttagggaccttacgcagccatggccactgctacgaatgccgccgccgccccaccacgccagctctcccagaaggaagctgacatccagatgatgttggccgccgacgtccacctcggcaccaagaactgcgacttccaaatggaacgttacatcttcaagcgccgcaacgacgggatttacattattaaccttggga

SEQ ID NO: 283776 - DNA, 249 bp, Glycine max
atcctaaagggtggtttggtctcccacatcaagcgcgagatctccatcctccgccgcgtgcgccaccccaacatcgtgcaactcttcgaagtcatggccacaaagaccaagatctacttcgtcatggaattcgtccgtggcggcgaactcttcaacaaggtcgcaaagggaaggttaaaagaagaagtcgccagaaagtacttccaacagttggtttccgcggtggagttttgccacgcgcgcggcgtg

SEQ ID NO: 283777 - DNA, 175 bp, Glycine max
  unsure (1)..(175): unsure at all n locations
caagaagacggttggctcgtcagaagaaagctgtgaagattttccccagacctacagctggacctcttagacccattgtacatggtcaaactttgaaatacaacatgaaagtgagagctggaaggggattttcccttgaagaactcanggcagcagggnttcccaaaaagcttnc

SEQ ID NO: 283778 - DNA, 170 bp, Glycine max
  unsure (1)..(170): unsure at all n locations
gaaaatcaccattgacccagaagatccagctgctgtttctcattatgcaaaggtcatgaaaacaattagagagaaggcaagcttattgtcggagtcccaagacatactatccaccattgaaattgagacacaggatattccagatgctcggncctatcttctganttnga

SEQ ID NO: 283779 - DNA, 247 bp, Glycine max
atggtttccaaaggggtgcaaaacgttcttgattttcttcagaatgattttcctgacatggatgttattggcatttctggaaattattgttcggacaagaaacctgctgcagtgaattggatcgagggacgtgggaaatcagttgtttgtgaagcaatcatcaaagaagaagtggtgcagaaggtattgaagaccaacgtgtctgccctggtggagcttaacatgctcaaaaaccttgctggtccgg

SEQ ID NO: 283780 - DNA, 200 bp, Glycine max
ggagtacccaattctgggtctcaacctgttgagattacttgtgcagaataggattgctgaattccatactgagttggaattgctttcatctgctgctcttgagaatccttgcattaagcatgctgtggagttggaacaatcttttatggaaggggcttacaatcgtgtcttgagtgcacgacagacagtgccacatgata

SEQ ID NO: 283781 - DNA, 243 bp, Glycine max
  unsure (1)..(243): unsure at all n locations
ggaagtttcttcctatttgaagaaagtaggatacaaccctgacaagattccttttgttcctatatctggttttgagggagacaacatgattgagaggtccacaaaccttgactggtacaagggtcctactctgctagatgcacttgaccagatctctgagcccaagaggccttctgacaagcccctcaggctacccttcaggatgtgtacaagattggnggaattggaactgtgcctgnggga

SEQ ID NO: 283782 - DNA, 168 bp, Glycine max
  unsure (1)..(168): unsure at all n locations
gttcaatctttacccaaagacctggaactatattcaagtggattgggccacgaggtagtgattgtggtatagtgaatgcaaacatacctacaaatggagctgagattggtggtgcctttggtggagaaaaggcgaccggtggtggccgtgaggggnanntnacncggg

SEQ ID NO: 283783 - DNA, 210 bp, Glycine max
gagagagtattggcgcttcatcaagatgggtatttctagggattccatgcacaagaggcgtgccactggtggcaagaaaaaggcttggagaaagaagagaaagtatgagcttgggcgtcaggcagcaaacaccaagttatcaagcaacaagacaatcaggaggattcgtgttagaggtggcatgttaaatggagggcattgaggctggat

SEQ ID NO: 283784 - DNA, 246 bp, Glycine max
gatcctcccgcaacgccaagtggacggtggagctcattccggagttcgacaacatcatcagactcaagagctgttacgggaaatacctgacggcgtccaaccagccgctgctcctcggcgtcacgggccgcaaggtggtgcagagcgtgcctcggcggctcgactcctccgtcgagtgggagcccgttcgcgacggcgcgcaggtcaagctcaagacccgttacgggaactttctcagagccaacg

SEQ ID NO: 283785 - DNA, 155 bp, Glycine max
ccaaagccgctgaagttcctcctgataatgagtttgagaagcgaataaggcccgaggtaatactagcaaatgagattgatgtcacattctctgatattggtgccttagatgagaccaaagaatcccttcaagaactagtaatgcttcctcttaga

SEQ ID NO: 283786 - DNA, 242 bp, Glycine max
gggaattgttcgcaagtggatctcaagattcgaagtctggccctacttggaaacttacactgaggatgttgcccacgagcttgccaaagagttgcaaggcaagccagatctgattgttggaaactacagtgatggaaacattgtcgcttctttgttggcacataaattaggtgtcactcagtgtaccattgctcacgcacttgagaagaccaaataccccgaatccgacatttactggaaaa

SEQ ID NO: 283787 - DNA, 261 bp, Glycine max
gcttctcctcttcttactccttacaagatgggcaaattcaatctgtcccatagagttgttttggcaccgctgaccagacagaggtcttacgacaacgtcccacaaccccatgccatcctctactactcccagagaactccaacggaggccttctcattactgaagccactggcgtctctgacacggctcaaggctatccgcaaacccctggcatatggactaaagaccatgttcaagcttggaaacccattgtcgatgccg

SEQ ID NO: 283788 - DNA, 258 bp, Glycine max
  unsure (1)..(258): unsure at all n locations
aaagaaaggaaataattgatctttgaaaatgcagggaggaaagaaagctggagagtccatcaaggaaacagctgcaaacattggtgcttctgccaaggctggcatggagaaaaccaaggccactgtccaggagaaggagaaagaatgacggcacgtgatccgatgcaaaaggagttggcaacccagaagaaagaggcaaagatgagccaggcagagctggacaagcaggcggcgcgtcanataacacggcggcgaana

SEQ ID NO: 283789 - DNA, 257 bp, Glycine max
ctagtagtctcagttcgtttgagagagaaaaaatggcagagggtctcgttctccgcggaaccgtgccgcgcccacaccgacgtcgtgacggcgattgccactcccatcgacaactccgacatgatcgtgacggcgtgcgcgacaaatccatcattctctggcacctcaccaaggaggacaagacctacggtgtcccccgccgccgcctcaccggacattctcacttcgtccaggacgtcgtcctctcatccgacggt

SEQ ID NO: 283790 - DNA, 255 bp, Glycine max
  unsure (1)..(255): unsure at all n locations
gtcaaccctgatgaagcagttgcctatggtgctgcagtgcaaggnagcattttgagtggagagggtggtgaggaaaccaaagatatccttctcttggatgtggctcccctcacccttggaattgaaactgttggggggtgatgacgaagttgattcccagaaatactgttatccctaccaagaaatcccaggtgtttaccacctaccaggatcagcagagtaccgtctccattcaggtttttgaaggggagagga

SEQ ID NO: 283791 - DNA, 258 bp, Glycine max
gcagcagccatggttctcaaaactgaactatgccgattcagtggtgccaagatctacccaggaaagggcatcagatttgttcgtggtgattctcaggttttcctgtttgcaaactcaaaatgtaagaggtatttcccaatcgcctgaagccttcaaagctcacctggactgcaatgtacagaaagcaacacaaaaaggacattgctcaagaagctgtgaggaagaggagacgtgctgccaaaaagccttactctaggt

SEQ ID NO: 283792 - DNA, 258 bp, Glycine max
caattttcaaccttaacctctaagaatgtcttacgcttatctcttcaaatacatcatcatcggtgacaccggagttggaaagtcttgtcttctacttcaattcacggacaagcgctttcagcccgtccatgacttgaccatcggtgttgaatttggtgccaggatgatcacaattgataacaagccaatcaagttgcaaatatgggatacggctggtcaagaatcattcagatctattacaaggtcttattacagagg

SEQ ID NO: 283793 - DNA, 257 bp, Glycine max
cgagctcacttaggttcttttggtgtaaccggaaatcttgcactgcagccaatgtatactttgtcaggtggtcagaaaagcagggttgcctttgcaaagataactttcaagaagccacacataatattgcttgataaccatccaatcatctggatttggatgctgttgaggcgcttattcaaggtcttgtgctgttccaaggaggcattctcatggtgagtcacgatgagcatctcatctctggaagcgtggaggaa

SEQ ID NO: 283794 - DNA, 263 bp, Glycine max
  unsure (1)..(263): unsure at all n locations
aaagattcgaaacgaagaaagaaagcgttgtgaagaatggcggaagagggacaagtgatcggtgtccacagcgtagaggagtggaaggaacatctcaagaagggagaagagtccaagaaattgattgtggtggattttctgcttcttggtgcggtccatgccgtttcattgccccaattcttgcagagtttgctaaaaagttgccgaatgtcaccttcctcaaggtggatgtggatnaattggagactgtttccaaggagtgg

SEQ ID NO: 283795 - DNA, 256 bp, Glycine max
gtcaaaccaacgcctaagaaggaactgagaagtacacctgctatatctcacccaaagtcattgaaattgccaaagaattttgatgcaaggacagcttggtctcagtgtagcactattggaagaattctagatcaggtcactgtggttcttgttgggcatttggtgctgttgaatcattgtcagatcgcttttgcattcattttgatgtaaatatctctctctctgttaatgaccttcttgcatgctgtggctttct

SEQ ID NO: 283796 - DNA, 256 bp, Glycine max
  unsure (1)..(256): unsure at all n locations
gtnangcangccgtcgcaggcanacantgccggaaactacgcgaaangttcncctctntacatgaacgccttggagtacttcaagacgcatctcaagtacgaaaagnaccctaagatcanggaagccatcacgcaangttcaccgagtanctgcnccgggncgnngagattcgggccgtgntcgacgacggcggccccggtccggcctccaacngggncgcggctgtngctgcaaggnccaanaccaagccaaagg

SEQ ID NO: 283797 - DNA, 255 bp, Glycine max
gttaactggatggaagcgagaggaggtgatggataaaatgcttttgggagagatttttggcacccagatggctgcttgtcgcctaaagaatcaagaagcttttgttaatttgggcgtcgtacttaataaagccagactggttcagaaacagagaaggttccttttggtttctttgctcggaatggcaagtatgtagaatgcctgctttctgtgagtaagaaattggacgtagagggcctagttactggggtcttc

SEQ ID NO: 283798 - DNA, 258 bp, Glycine max
aaataacatagtcctcctcctttgtttttccacatcacatcacatcgcagagagagagagatccatcgatcaattaatttccaatggccgatcagctcaccgacgaacagatctctgagttcaaggaagcctttagctcttcgacaaggacggcgatggttgtattaccaccaaggaacttgggactgtgatgcggtcgcttgggcagaacccaactgaggctgagctgcaggacatgataaatgaggttgatgctga

SEQ ID NO: 283799 - DNA, 267 bp, Glycine max
  unsure (1)..(267): unsure at all n locations
cgtggananngatgacaaaagngcnacnaccaagaagtgtatggagcaaangttcanaganatggtagcaagcanaggtttggagtctgntcnatctgaaatcaatgatttngattgntaaagcactttctnnttgcgccagctcctgcctctaacatctcagagatccctgatcttgatgaagattacanganggtaatgaaggattntgctgtggaactggaggaactggcagagctagtncttgacttgctgtgtgagaatctt

SEQ ID NO: 283800 - DNA, 251 bp, Glycine max
  unsure (1)..(251): unsure at all n locations
gaggatcggcagggaacaagttccgcatgtcactgggtctnccggtggcggcgacggtgaactgcgccgacaacaccggcgcgaagaatctctacatcatatcagtgaaggggatcaagggaaggctgaacggttgccgtcagcttgcgtgggtgacatggttatggccaccgtcaagaagggaaagcctgatctccgtaaaaaggtgctccccgccgtcatcgtccgtcagcgcaaccgtggcgccgaaa

SEQ ID NO: 283801 - DNA, 255 bp, Glycine max
caaaaagtttacgttacaaatcgcataataaccgtcctaagtttattgagagaattttgcaagtgtgagaaacatggcatctcgtcaaaacaacaagcaagagcttgatgaaagagcaaggcaaggagagactttgtcccgggtggaactggtggcaagagcctggaggctcagcaacaccttgctgaaggaaggagcaagggagggcaaacaaggaaggaacagctgggtacagaagggtaccaggaaatggga

SEQ ID NO: 283802 - DNA, 258 bp, Glycine max
  unsure (1)..(258): unsure at all n locations
gttggtggctacaatgatgacgctaataagcaacatgatattactggtgtctatcccgagaaagacaccggtagacatcattttggtcgtggttacgacggtgacactaacaagcaacatgatgctactggtgttatcccggaatagacattggtagagatcatgggactaccggtgttnatggcctaaacaccgacagacatcatggaacttctggggtgaatcccgggatagacacccataaccaacaacatggga

SEQ ID NO: 283803 - DNA, 259 bp, Glycine max
  unsure (1)..(259): unsure at all n locations
aaagcccttcatcagagataacttgacaaataaaatcaccatgtctatcatcccaaacttnttcggtggtagacgaagcaacgtcttcgacccattctctctggacgtatgggaccctttcgaggggtttccttttccacaggtcacgtgccttcctctggtggggaaagcagtgccatagccaacactcgcgtggactggaaggagactccggcggctcacgtgttcaacgttgatcttcccgggttgaagaaggagg

SEQ ID NO: 283804 - DNA, 256 bp, Glycine max
catgaatctcttacagaggcacatcctggtgacaatgtgggattcaatgttaagaatgttgctgttaaggatttgaagcgtggttatgttgcctcaaactcaaaggatgaccctgcaaaggaggctgctaattcacagcccaagtcatcatcatgaaccaccctggtcagattggaaatggctatgcccctgtcctcgactgccacacttctcacattgctgtcaagtttgctgaactcatgaccaagattgacag

SEQ ID NO: 283805 - DNA, 250 bp, Glycine max
tagtatttacaattgctgcatgttttatggttgagcttggatatgcaaagcctgatgctaaagaagttctgaagggtctttttgtgccaggactaaaagggagtggtgctactggtcttgcaatttctctcttggagctatggttatgccgcacaatctcttcttgcactcagcactggtgctctctaggaaaataccacgatcagttctgggaattagggaggcttgcaggttttacatgatagaaagt

SEQ ID NO: 283806 - DNA, 253 bp, Glycine max
caagaatgcgcgcctccgcgagttggtaaacctcgtggtggtggccggagacaggaggaaggagtccaaggacttggaagagaaggccgagatgaagaagatgtatggcctcatcgagacctacaagttgacggccaattcagatggatctcctctcagatgaaccgtgtgaggaacggagagctctaccgtgtcatctgtgacacaaggggtgcctttgtgcagcctgcagtttatgaggcctttgggttga

SEQ ID NO: 283807 - DNA, 259 bp, Glycine max
aatcaccattgatattgctctgtggaagtttgagaccacaaagtactactgcacagtcattgatgcccctggacatagggatttcatcaagaacatgattactggaacatcccaagctgactgtgctgttcttatattgattccaccactggtggttttgaagctggtatttccaaggatggacagactcgtgagcatgctctccttgcattcactcttggtgtgaggcagatgatttgctgctgcaacaagatggatg

SEQ ID NO: 283808 - DNA, 254 bp, Glycine max
caatgacttgttccggaagaccatgggtccagtgaagaaggctatggaagatgctggattacagaagagtcagattgatgagattgttcttgttggtggaagcacaaggattccaaaggtacaacagctttgaaggactactttgatggaaaggagccaaacaagggggtcaaccctgatgaagcagttgcctatggtgctgcagtgcaaggaagcattttgagtggagagggtggtgaagaaaccaaagatat

SEQ ID NO: 283809 - DNA, 252 bp, Glycine max
  unsure (1)..(252): unsure at all n locations
acctaacgcgtgcatagcagagtcagagacagagacgcagccatgnggcggagacctgcgaggtgttataggcaaattaagaacaagccataccccaagtcacgtttctgccgtggtgttcctgatcccagatcaggatttatgatgttggtatgaagaagaagggtgttgatgagtttcctttctgtgtccatctggttagttgggagaaggaaaatgtttcaagtgaggccctggaagctgctcgcattg

SEQ ID NO: 283810 - DNA, 253 bp, Glycine max
  unsure (1)..(253): unsure at all n locations
caattccattcattcgttcattcccaggttgtgatggcagcagcaccagcagctaccttcgctattggaaccaccggttccctcggccaaagaggaagctcgcttcctcaatcaaagtcctttgggttganttcaactctctgaatcatttgaagagcttctgtggcctcaaggccatgtcatccgtgagatgtgagtcggaatcctccttcttcggtaacaaaaccggtgctgctctacgggcgtnttttgc

SEQ ID NO: 283811 - DNA, 252 bp, Glycine max
  unsure (1)..(252): unsure at all n locations
atcnaaggannaccagttgncactgcaacccagatgntagagtcaatgatcaaatctcccangccaaccanggncgannctactgntgttgccaatgcagtnctggatggcacagactgtgtgatgcttatgggtgaaacgctgctngancctatccagaccttgctgttcaaacaatggntaaaatatgcattgaagcagagngcacccttgactatngtnntgtgttcannaggnttatggancactcac

SEQ ID NO: 283812 - DNA, 254 bp, Glycine max
  unsure (1)..(254): unsure at all n locations
ctcttctagaagctatctntgtttggtgttactaagtctccaacaagcaaagtacatggttgatttggaaatccaggtccccaccccattcgacccgtttgccgaggcgagagantcggatgcccccggagaaaggagtatgtgcatattcgaattcagcagaggaatgggaagaagagtctgaccacagtgcaagggctgaagaaggagttcagctacgagaagatcctcaaggacctcaagaaggagttctg

SEQ ID NO: 283813 - DNA, 260 bp, Glycine max
cacaatgccgaggtaatatatggagacacagattcagtcatggtacaatttggtgtttctgctgtagaagaagctatgaacttggggagagaagctgctgaatatattagtggaactttcacaaaacccatcaaactagaatttgagaaggtttactatccatatctcttgattagcaagaagagatatgctggattgttttggacaaaaccagacaactttgacaaaatggacactaaaggtattgaaacagttcgaag

SEQ ID NO: 283814 - DNA, 261 bp, Glycine max
ctataatactacgatagcgtagactcttcccagttctgttgtgtgagtctgtgagtctttcttagctgatatggcggttgatcgctcccttacgaggtgctgtagcctcgtactgtggtcgtggatgttgctgaggatgatgatggcgcagggtgcagccgcgagggccaaccggaaggagtgggactcggtcataaagttaccggctgaaccggtcgatgctgactcggatcatgaagtgggaaacgatgggcggttctt

SEQ ID NO: 283815 - DNA, 260 bp, Glycine max
ccaggacaaggaaggaatccccccggaccagcaacgtctcattttcgccggaaagcaacttgaggacggccgtacccttgctgactacaacattcagaaggagagtactcttcacctcgtcctccgtctccgtggtggcatgcagatcttcgttaagacactcaccggcaagaccataaccctagaggttgaaagctccgacaccatcgataacgtcaaggccaagatccaggacaaggagggtatcccccggaccagca

SEQ ID NO: 283816 - DNA, 262 bp, Glycine max
caataatcggtcatatacgcggaagcttgtgatatacgaggaagcatgtttgagggtatgatgcctaaggatttgaagatttatgccacaactgcatccaatgcacaagagaatagttggggaacttattgtcttggaatggatccttctccacctccagagtacatcatttgcctaggggatttgtacagtgttgcttggatggaagataagtactaaatatagtgttcttttgtaatcaacccataataccatgtataat

SEQ ID NO: 283817 - DNA, 263 bp, Glycine max
  unsure (1)..(263): unsure at all n locations
gaaaaaaaaaaaaagttgtncganatggcacgtacgaagcaaactgctcgnaagtccacaggaggaaaggcacctaggaagcagctcgcaaccaaggctgcacgtaagtntgcaccaactacnggtggtgtgaagaagcaacatcgttatcgtcctggnaccgttgctcttcgtgagnttaggaantaccagaagagtaccgagcttttgatcaggaagctccccttccanaggctggttcgtgaattgctcaggattcaaga

SEQ ID NO: 283818 - DNA, 244 bp, Glycine max
  unsure (1)..(244): unsure at all n locations
ggcaacaccattgttctcaaaacnnctgagcagacaccgntatctgctttatatgcagcaaaactatttcatgaggctggacttcctgctggtgttttaaatgtagtatctggctttggtccaactgctggtgctgctcttgctagccacatggaagttgacaagcttgcttttactggttccactgatactgggaaagttgtccttgaactggcagctaaaagcaatttaagcctgttacttt

SEQ ID NO: 283819 - DNA, 261 bp, Glycine max
actaaatcgaagcaaacaatagtgagtgagatcgtgaagaaattagtttggaaatggcagtggcaggttgtcagaagcttctggaactgagcaccaagatcgtcgctgttggcagaaactacgctgctcacgccaaggaattaggcaacgccgttcccaaggagccggtgttgtttctgaaaccgacgtcgtcttacttgaaaaacggcggaaccatccaaatcccacacaacgagggctctctgcatcacgaggttgagc

SEQ ID NO: 283820 - DNA, 262 bp, Glycine max
  unsure (1)..(262): unsure at all n locations
gncgcagccatggtgaagtactccagagaacccgacaatcccaccaagtcctgcaaggccagaggcgctgaccttagagtgcatttcaagaacactagggagactgcctttgccatcaggaagttgcccctggttaaagctaaaagatacctggaggatgttttggcccacaaacaggccatccctttccgacgcttctgtggtggtgttgggaggacagcccaggctaagagcagacactccaatggcaaggacgctggcc

SEQ ID NO: 283821 - DNA, 262 bp, Glycine max
ccttgtgccataccccaggattcattttatgctttcatcttatgctcctgtaatttcagccgagaaggctcaccatgagcagctatcagttggtgaaatcaccaacagtgcattcgagccatcatctatgatggccaagtgtgatccccgccatggcaaatacatggcgtgctgtctcatgtacagaggtgacgtagtgcctaaagatgttaatgcagctgttggaattatcaagaccaagcgcactattcaatttgttgac

SEQ ID NO: 283822 - DNA, 258 bp, Glycine max
gttgttcaatccatggaacaggctatcatggctgaagaagaaagacatgttcctggaagctttgaaaaggcaagacttcggtttgcgcacgctgaaactgtagttccattctcatgcctgcttggtttatttcttgaaggatctgagttaaaaaaaattcagaaggagcaacctttgcagcaccctccgaagcctccacagaaaagaaaatggcggggtagcactgtggccccttttgctggtacaacatgttgatct

SEQ ID NO: 283823 - DNA, 258 bp, Glycine max
cttaattctctctactactgctagctgtgacttgttttgagttcaatcaaatcgcattggtatctgaaatcaggaaagatggttagcgtagtgagatcaggcaggcacaaagggcagaaggcccagcaaccatccttgccattggaactgcaaacccaccaaaccgtgttgatcagagcacctatcctgattactacttcagaatcaccaacagtgaccacatgaccgagctcaaagagaaattcagcgcatgtgtga

SEQ ID NO: 283824 - DNA, 264 bp, Glycine max
gtggtgactgtgctctgctctcatctcattcatattcatttcaatggcaactcaaggtcaagtcattacctgcaaagctgcggtggcctgggaacccaacaagcccttaaccgtccaagacgttcaggttgctccgcctcaggccggcgaggtccgtgtccaaatcctcttcaccgctctctgccacaccgatgcttacacttggggcggcaaggatcccgaagtctcttcccctgtattctcggccacaagctgcagggattg

SEQ ID NO: 283825 - DNA, 258 bp, Glycine max
ctaattcccgttcatcggcgaggttacgcagtggcatccgatgtatcggtaagagttggattgggtaatattgggcgaaggaatggaatcgtgggaggtgtagaagagaagcctgatacaagagatggttcaaaagcctactcaactgattgggccccagacccagtaacaggttactataggcccattaaccacacccctgaaattgacccggtggagcttcggcataggttgctccgatcacctccactagagcct

SEQ ID NO: 283826 - DNA, 258 bp, Glycine max
gggcatctcaggctagccttctccttcaaaagcagctcaaagatctttgcaaaaaccccgtcgacggcttctctgccggtttggtcgatgaaaccaacatttttgaatggagtgtcaccataattgggccgcccgatactctctacgaggggggatttttcaatgctattatgagtttcccatccaattacccaaatagtccaccttcagtgaagttcacctcagagatatggcaccccaatgttatcctgatggccg

SEQ ID NO: 283827 - DNA, 256 bp, Glycine max
acaagcaccctgacttaaactccctacaagaactccccgagtcttacacttggacacaccatagccatgatgatcatactcctgcagcttccaacgagagtgtccccgttattgatctcaacgacccaaatgcttcaaagttgatacaccatgcatgcataacttggggagcgtaccaagtggtgaaccatgccatacccatgagcctcctccaagacattcaatgggttggggagacatcttctctctcccttga

SEQ ID NO: 283828 - DNA, 258 bp, Glycine max
  unsure (1)..(258): unsure at all n locations
ggcactacacactagttctatcgctatctccccaagatgtcgagcgccgatcccgggcacagagaagaggaggaggcacccgccgttggcgacgacgaggacaccggagctcacgtcgctccaatcgtcaagctcgaggaggttgctgtcaccaccggcgaggaggacgaagatgcaatcctggatctcaaatcgaagctttaccggttcgacaaggacgggaaccagtggaaggagcgtggcncggcactgtgaagt

SEQ ID NO: 283829 - DNA, 256 bp, Glycine max
aattctctcagtccaaggggctgcaaattttctggttcttttcgacagattttgagtcattgtttgaaatggcatcggtatctagtcagccacagttccgttacactcagccgccgtcaaaggtgcttcatttgaggaacttgccgtgggagtgcacagaggaggaactgattgagcttgggaagccgtttggcaaagttgttaacacaaaatgcaatgttggggcaaatagaaatcaagctttattgaatttgca

SEQ ID NO: 283830 - DNA, 261 bp, Glycine max
gggagtacccaattctgggtctcaacctgttgagattacttgtgcagaataggattgctgaattccatactgagttggaattgctttcatctgctgctcttgagaatccttgcattaagcatgctgtggagttggaacaatcttttatggaaggggcttacaatcgtgtcttgagtgcacgacagacagtgccacatgatacatacgtttattttatggatcttttggcaaagactgtcagagatgaaatagctggttgca

SEQ ID NO: 283831 - DNA, 258 bp, Glycine max
  unsure (1)..(258): unsure at all n locations
tttcttcctcttcctcagtagtgcgattttcgattctcttctctgncaactatgcctaaccctaaggtcttcttcgacatgaccatcggcggtcaacctgccggccgcatcgtgatggagctctacgccgacgtgactccgagcaccgccgagaacttccgcgcgctctgcaccggcgagaagggcgccgggcggagggcaagcccctccactacaaaggctcgtcttccaccgcgtgatcccgaattcatgtgccag

SEQ ID NO: 283832 - DNA, 259 bp, Glycine max
attcggagttccccaacaaagcgttaacgagcacgcgtttttccgacctgaatccaccactctctgaaccggttctccaagccctatcacactctggcttcgagttctgcacccctgtccaagctgccactattcctctgctctgcagcttcaaggacgtcgccgtcgacgccgccaccggttccggcaaaactctagcttttgtcgttcctctcgtcgagattctacgccgctctcttctcatcccaagcctcaccag

SEQ ID NO: 283833 - DNA, 254 bp, Glycine max
agaagaaagagtctaggtcaggcatggagataatgaatttgcttcagaaggaagggaggcaacgtggaacatggaatgggaagaaagctgacaatgatttttataaaaagattgtggatgcttatgagtcaaagaatcaagaactgatggcagagaatgctgatttaagagcattattgagatcaatgcaggtggatatgcgtgatttcttaaatgctcctaatggactaccaaagcaactctcactggcaatg

SEQ ID NO: 283834 - DNA, 257 bp, Glycine max
atttgggaattagggatttacattattaaccttgggaagacatgggagaagcttcagttagcagctagggttattgttgcaattgagaaccctcaggatatcattgttcaatccgcaaggccttatggtcaaagagcggttctgaagtttgctcagtacactggtgctcatgctattgctggaaggcacactcccggtaccttcaccaatcagcttcagacttcgttcagtgagcctcgtctccttatcctcactga

SEQ ID NO: 283835 - DNA, 252 bp, Glycine max
  unsure (1)..(252): unsure at all n locations
tacaaaaagtttacgttacaaatcgcataataaccgtcctaagtttattgagagaattttgcaagtgtgaganacatggcatctcgtcaaaacaacaagcaagagcttgatgaaagagcaaggcaaggagagactgttgtcccgggtggaactggtggcaagagcctggaggctcagcaacaccttgctgaaggaaggagcaagggagggcaaacaaggaaggaacagctgggtacaaagggtaccaggaaa

SEQ ID NO: 283836 - DNA, 254 bp, Glycine max
gtgaaaatacattacagcagcaaaggaaggttgtggtaagtaaatagtagtaacctaacccttgcgtttgcgagtgaggctgaggttgggtttggaaggcaaaggctggtgttgtcccaatccaagagagaagtaaagtaaagcaaaggaatggcgaacatagacatcgaagggatcttgaagcagcagcctgatgatgggcgcgttccgaagacgaaaatagtgtgtactttgggcccgcttctcgatccgtg

SEQ ID NO: 283837 - DNA, 255 bp, Glycine max
agagagggagattctttgtttgctaccttctctcggaaaaatggttacgttcaggtttcaccagtaccaggtggttgggagggctcttcccacggaagcagatcagcaccccaagatctaccgaatgaagctctgggccaccaacgaggttcgcgccaagtccaagttctggtattttctgaggaaactgaaaaaggtgaagaagagcaatggccaagtgcttgccatcaacgagattttgagaagaacccaacc

SEQ ID NO: 283838 - DNA, 258 bp, Glycine max
atagcacagagccacttcctctgatggaaggtgaaggaaaagcattcagagtccttggttttaatcaaaatcagagggctgcatttgtgcaaattttgatgaggtttggggttggtgattttgattggaaggagtttacttcccgcatgaaacagaagacttatgaagaaatcaaagactatggaacccttttcttgtctcatattgctgaagatataactgattccgctacattcacagatgtgttccaaaagaagg

SEQ ID NO: 283839 - DNA, 265 bp, Glycine max
aaagaatcaaagaaaggggtggtggctgcttcgaaagcttaataatttgtttatttccagaacatcatagttttcgcagcagcaaactaacaaattactcatatcatataataagatggcccgttctctctcgcaagccaaacgtattggtgtccttgttgctcaatctatctccctaattcccgttcatcggcgaggttacgcagtggcatccgatgtatcggtaagagttggattgggtaatattggggaaggaatggaatcg

SEQ ID NO: 283840 - DNA, 262 bp, Glycine max
  unsure (1)..(262): unsure at all n locations
aagagtgctgataacagtctgtatgttgttgaggggatgcaattcgaccgtggttatatttctccatacttcgttactgacagtgagaaaatggctgttgagtatgagaactgtaagttgctgttagttgacaaaaagataaccaatgcacgggatcttatcaacatactggaggatgctattagaagtggacaccctatattgattattgctgaggatattgaacaagaggctttagcaactcttgggtnaacaaacttag

SEQ ID NO: 283841 - DNA, 264 bp, Glycine max
  unsure (1)..(264): unsure at all n locations
gnaatatataaganatgtacagttgatattctcagaagattttggcactgaagggcgtggcgggtactttgaccattatggtatcataagagacattatgcagaatcatttacttcaaatactagcactctttgcaatggaaacccctgttagtttggatgccgaggatattagaaatgaaaaggtcaaggttcttcgttcaatgagacccctgcgacttgatgatatggttataggtcagtataagagccacacaagaggagg

SEQ ID NO: 283842 - DNA, 253 bp, Glycine max
gtacaattcaccaagcgtccctatgcacaaccttatggtgtatatacatggttaacggatattaaagacacctctaaagaaggatatagttttgaagagatatgcatcaagaaagaagcgtttgagggagaagagaagttttgtgcaaaatccttgggaacagtaattggttttgccatttcaaagctgggaaagaacattcaagtactttcaagttcctttgtcaataagccagagcatacctgtggaagga

SEQ ID NO: 283843 - DNA, 256 bp, Glycine max
  unsure (1)..(256): unsure at all n locations
cagcttgctcatcaagtccaagaaccaacctaccttttgcaatctcaattcaatggcgtcctctctcattgcgaaggcttcctctcctcttcnctcctctccaggtccctccttcgccccgccgcttccgcttcccaccgctctttcaacaccaacgccatgcgccagtatgacaaccgcgccgacgancacagcaccgacatcgatcgtcactccgaacgctctttccctagcatgcgcgccgcgacgatatctt

SEQ ID NO: 283844 - DNA, 268 bp, Glycine max
aaaacgagttttctgttttcgggtcggatctgagactcgctccattcggttcgggtcggagaacatgccccgggaagactttgggtttgagcaccgtaaccttctgggtggcttggcttttgcatgagtttgaatggctaccgtctgatgaagccaaggttgatctaacggaggtgctgaggctctcgtgtgaaatggctaacccactcattgttaaagttcgccctaggcatggattaagcacttaatgataatataattaagccta

SEQ ID NO: 283845 - DNA, 249 bp, Glycine max
aaaatttgctgcaactatttccaggtaaatgctagtgctcagttctgtggggtagctgaaatggttggacctgtcaattttgacaagagtgtggacttctggcagcaagataagtggagtgggcagtttcccttgaagtggcacataattaaagatgttccaaatagtcagtttcgtcacattattcttgaaaataatgataacaagcctgtgacaaacagtcgagatactcaggagtgaagttgggac

SEQ ID NO: 283846 - DNA, 248 bp, Glycine max
attcttcaagattcaggtactgcgtttcggaagcagacacagatggctcgtacgaagcaaaccgctcgtaagtccacaggaggaaaggctcctaggaagcagcttgcaaccaaggctgcacgtaagtctgcaccaactactggtggtgtgaagaagccccagcgttatcgtcctggtaccgttgctcttcgtgagattaggaaataccagaagagtaccgagcttttgatccggaagctccccttcca

SEQ ID NO: 283847 - DNA, 252 bp, Glycine max
ggggtgccctgagatcactttgagcaatggtgaaggctgtggcagttcttggcagcagcgagggtgtcactggaactattttcttcactcaggagggaaatggtccaaccaccgtaactggatctcttgctggtcttaagcctggtctccatggcttccatgtccatgccttgggggacactaccaatggttgcctgtcaactggagcgcatttcaatcctaataacaacgagcacgtgcccctgaggacga

SEQ ID NO: 283848 - DNA, 251 bp, Glycine max
  unsure (1)..(251): unsure at all n locations
atgtcgaagcgaggtcgcggaggatcggcgggaaacaagttccgcatgtcgctgggtctgcncggtggcggcgacggtgaactgcgccgacaacaccggcgcgaagaacctctacatcatatcagtgaaggggatcaagggtaggctgaaccggttgccgtcagcttgcgtcggagacatggttatgncnaccgtcaagaagggaaagcccgatctccgtaagaaggtgctgcccgcgtcatcgtccgcca

SEQ ID NO: 283849 - DNA, 258 bp, Glycine max
aggcaaagcgaggccatgccctcatgtgctggcacgtgtttcacttcttcctctgcgctctaaccctatccgctgctcacggaagcaccacggttcaagacatcgcgagaaagttgaaactcggggacaacgagcttctgcgcacggagaagaagttcaaggttttcatggagaattacgggaggagctactccacagaggaggagtatttgcgccgtttggggattttcgcccagaacatggtcagagcggcggaca

SEQ ID NO: 283850 - DNA, 226 bp, Glycine max
  unsure (1)..(226): unsure at all n locations
tgttgtttgtgtgtttgttttttctctcacctgaaaatgtcttgctgcggtggtaactgtggttgcggaagcgcctgcaagtgcggcaacggctgcggaggctgcaagatgtacccagacttgagctacaccgagtcaaccaccaccgagnccttggtcatgggngtggcaccagttaaggctcaattcgagagtgctgaaatgggtgttcccgctgagaacgatg

SEQ ID NO: 283851 - DNA, 256 bp, Glycine max
gcgtcttcataaacgcctttcttctccgttccgtttcctcgttcgaattcgctttttgatctgcgaaaatgagagagtgcatctcgatccacattggtcaggctggtatccaggtcggaaatgcttgctgggagctctactgcctcgagcacggcatcgggcccgatgggcaaatgccaagtgacaagacagttggcggtggtgatgatgctttcaatactttcttcagcgagactggtgctggaaagcacgtgcc

SEQ ID NO: 283852 - DNA, 260 bp, Glycine max
aacagagcacccttaaggcatggggcggaaaagaagagaatgtgaagaaggctcaggaagcccttttggtaagagccaaggctaactcagaggcaactctgggaacctacaagggtaactcacagcttgctgatggtgcctcagagagcctccatgtttcgaactacagctactgatcaatcgaagttggtgttgtttgaagagactagtgcgagtaggaatcggtattatgggtacaacaaccgaatttcttgttgata

SEQ ID NO: 283853 - DNA, 256 bp, Glycine max
gtgtactttcttgcgaaacagaagggcgaggggcaaacacaacttttttgtttttttgtagagcgagagagaaaaaaatgttggggatcttcagcagttccgtggtgtcgccgccggaggagctggtggctgccggcagcagaacgccgtcgccgaagacgacggcggggaagctgctgaaccggttcgtggagaacaaggcgtcggcggtgtcgctgcaggtgggagaacacgtgcagttggcttacacgcacca

SEQ ID NO: 283854 - DNA, 255 bp, Glycine max
gttcatttctacacatccctagctctgtcgttccgtcgttgacgatggcgtttcgggtgcgaaccctgacctccgctctctctttcttctctctctcttgtccatcgcttccgccaatgtcttcttcgaagagcgtttcgatgacgggtgggaaaatcgatgggttaaatcagattggaaaaaagatgagaacgtggctggggagtggaaccacacctctggtcaatggaatggagacgctaatgacaaaggtat

SEQ ID NO: 283855 - DNA, 258 bp, Glycine max
ctcgtctttggttctggtttatagatctctgtgaagtcgctttataacactcaacctaagatgcagaacgaggaaggacagatcaccgagctttacattcctaggaagtgctctgccacaaaccgattgattaccgctaaggaccatgcttcggttcaggttaacattgggcatgtggatgagaatggcgtctacaatggccatttctccacttttgctctctgcggcttcatacgtgctcagggtgatgctgacagt

SEQ ID NO: 283856 - DNA, 255 bp, Glycine max
ggaagtttcttcctatttgaagaaagtaggatacaaccctgacaagattccttttgttcctatatctggttttgagggagacaacatgattgagaggtccacaaaccttgactggtacaagggtcctactctgctagatgcacttgaccagatctctgagcccaagaggccttctgacaagcccctcaggctaccccttcaggatgtgtacaagattggaggaattggaactgtgcctgtgggacgggttgagac

SEQ ID NO: 283857 - DNA, 246 bp, Glycine max
aaggactctaagacccttctctttggtgagaagcccgtcaccgtttttggtcaggaaccctgaggaaattccatggggtgaggttggtgctgattatgttgttgagtcaactggtgtattcactgacaaggacaaggctgctgctcacttgaagggtggtgccaagaaggttgtcatctctgccccaagcaaagatgcacccatgtttgttgttggtgttaacgagaaggagtacaagccagagct

SEQ ID NO: 283858 - DNA, 256 bp, Glycine max
gctacccaatttctctttggattgagaaactactgagaaggagatctctgatgatgaggatgaggaagagaagaaggatgaggagggtaaggtggaggatgttgacgaagagaaggagaaggaagaaaaaaagaaaaagaagattaaggaagtgtcacatgaatggtccttggtgaacaagcagaagcccatttggatgagaaagcctgaggagatcacaaaggaggagtattctgctttctacaagagtctcacc

SEQ ID NO: 283859 - DNA, 253 bp, Glycine max
cagttaagatattgttgttgaacattcagcatttgggtatggtggttcagtgggaggataggttctacaagtccaatagagctcacacctatcttggagatccgtctagcgagagcgagatattcccaaacatgctcaagtttgctgatgcttgtgggataccggcagcgcgagtgacgaagaaggaagagcttagagcggcaattcagagaatgttggacacccctggcccctaccttcttgatgtcattgt

SEQ ID NO: 283860 - DNA, 255 bp, Glycine max
  unsure (1)..(255): unsure at all n locations
ccaaatcgtagatctacggttaaatnggtgtagtgtggtaagatgggaggaggatttagagtgcttcacttagttaggccatttctctcgtttcttcctgaagttcaaactgctgacaggaaagtgccatttagagagaaggtcatatacactgtgatctctcttttcattttcctggtttgtagtcagctccctctatatgggatacactcaacaacaggtgctgatccattctattggatgcgtgttattctc

SEQ ID NO: 283861 - DNA, 255 bp, Glycine max
ccaaaaccctagctcgcgttctgctttcgtcttttacatcaggatggagtctcaggtgaagcacgcacttgttgtcaaagttatgggtcgtactggatccagaggacaagtaacccaggttagagtgaaatttttggatgatcagaaccgtcacatcatgaggaatgtgaaaggacctgtgcgagaaggagacattctcaccctactcgagtctgaaagggaagcaagaagattgcgctagatggtttcttttgg

SEQ ID NO: 283862 - DNA, 253 bp, Glycine max
  unsure (1)..(253): unsure at all n locations
gnaggattttgctgtggaactggaggaactggcagagctagttcttgacttgctgtgtgagaatcttgggctagagaaagggtatctgaagaaggtgttctatggatcaaagggcccaaattttggtaccaaagttagcaactaccctccttgtccgaagccagagctgataaaggggctcagagctcacacagatgctggtggcatcattctactcttccaagatcacaaggtcagtggattacagctcctc

SEQ ID NO: 283863 - DNA, 252 bp, Glycine max
attgcaaactgtagcatgttgggcttgaccgaacctgactatggaagtgatgctagtgctttgaagaccactgccacaaaggtggagggaggttggatcctggagggtcaaaagcggtggataggaaacagtacatttgctgatgttttggttgtctttgctaggaatgcatcaactaatcagataaatggatttattattaaaaaggatgctcctggtttaacagtcacaaaaatagagaataaaattgga

SEQ ID NO: 283864 - DNA, 254 bp, Glycine max
gtgagttgtctatctttctcttcagtggagccttcctctactcaggtgggaaggaaggagttctcgtgatttggcggttagacacaaaaaagaattattgcttaccaagatttggatctccacttttgtattttgtagattctcctgatcgatcacttttctcaatatctcatgcagataatcaaatgcttatattgaagaagccttcaaagccaatggaaataatcagctgtatttctggtatcaagccccct

SEQ ID NO: 283865 - DNA, 254 bp, Glycine max
gtaaaggaggaaaagagataaccctgaagcaatggaagaggatgatgttgaagatgaaatagcagaaatcaaggctgctcattttgaggaatcaatgaaatatgctcgaaggagtgttagcgatgctgacattcgcaagtaccaggcattcgcccaaacattacagcagtctagaggatttggaagtgagttcaggtttgcagattccacctccgccggtggtacagctgctgcatctgacccatttcctctgc

SEQ ID NO: 283866 - DNA, 257 bp, Glycine max
  unsure (1)..(257): unsure at all n locations
attaaatcttctcttccacacgccagccacaannatggctttgagaaaatcaagtaaacttcctcagacagcactaatcaagcaaatcctcaagaggtgttcgagtttagggaggaaagatgatcaaggccttctggacgtgccaaagggtcactttgttgtatatgttggagaaaacagaagcagatatattgttcctatttccttcctaagtcgccctgagttccaaacacttctccaccaggctgaagaagagt

SEQ ID NO: 283867 - DNA, 252 bp, Glycine max
gagagtgatttcagtgagtgatcgtgttcgcttgttctcatcataatcgtcagcgtcaattgaagaagatgccgatcagaaacatcgccgtcggaaggcctgaagaggcgactcaccccgacacgttgaaggcggctttggctgagttcatctcaaccttcatcttcgtgttcgccggctcaggctccggcatcgcctacaacaagctcaccgacaacggcgctgccacccctgccggcctcatctccgcct

SEQ ID NO: 283868 - DNA, 251 bp, Glycine max
  unsure (1)..(251): unsure at all n locations
aagttcatctagaaaatggaaanttttagcaaagtctgatggggaggagttcacagtcagagagggtcattattgtcctgcattgtcaaaggctgttaaaaccatgaagaagggagagaaagtgcttttgacagttaagccacaatatggatttggtgagaaggggaagccagaacaaggggatgaaggtgcagttccaccaaatgcaacattgcagattactcttgaattagtttcatggaaaactgttt

SEQ ID NO: 283869 - DNA, 251 bp, Glycine max
atgtaaatggtcacgccattgtggtgctcaacatccagtcagggcaaatgtggctgtgagaaaggagcttcatactcctgcatctgatcgatcttgcactcatttggaatttgacatttcaggcactggagttacatatgaaactggggaccatgttggtgtttactgtgagaatttgtctgaaactgtggaagaggcaataaggttaataggtttgtcaccagatacctatttctcaatccatactgatg

SEQ ID NO: 283870 - DNA, 251 bp, Glycine max
ctcaaattctgtgattcgggtaatggccaccagtggaggcgatgaggggcagaacaaccctgccctcgacccggatttggatgctccggatgacccggatcacgagttcgctgagttcgggtcgggttgcttctggggtgctgagttggcctttcagcgagttgtgggtgtggtgaagactgaggttggttacactcagggtcacactccggatccgaattacaaactggtttgcaccggaaccactaacc

SEQ ID NO: 283871 - DNA, 253 bp, Glycine max
  unsure (1)..(253): unsure at all n locations
gtccctcgttccatttcccccttncctccgcccggcgagaaaatgagagaaatcctccacatccagggcggccaatgcggcaaccagatcggagccaagttctgggaagtaatctgcgacgagcacggcatcgaccacaccggaaagtacagcggcgactccgaactccaattggaacgcatcaatgtctactacaacgaggccagcggcggaaggtattccttcgcgccgtcctcatggatctggagcctgg

SEQ ID NO: 283872 - DNA, 253 bp, Glycine max
  unsure (1)..(253): unsure at all n locations
gccgttgctctgcttcaaccttgcggaagaagaagacgccgcagccatggtgaagtactccagagaacccgacaatcccaccaagtcctgcaaggccagaggcgctgaccttagagtgcatttcaagaacactagggagactgcctttgccatcaggaagttgcccctggttaaagctaaaagatacctggaggatgttttggcccacaaanaggccatccctttccgacgcttctgtggtggtgttgggagg

SEQ ID NO: 283873 - DNA, 209 bp, Glycine max
ttgttgtttgtgtgtttgttttttctctcacctgaaaatgtcttgctgcggtggtaactgtggttgcggaagcgcctgcaagtgcggcaacggctgcggaggctgcaagatgtacccagacttgagctacaccgagtcaaccaccaccgagaccttggtcatgggagtggcaccagttaaggctcaattcgagagtgctgaaatgggtg

SEQ ID NO: 283874 - DNA, 252 bp, Glycine max
  unsure (1)..(252): unsure at all n locations
gggtgacaacatgattgagaggtccaccaaccttgactggtacaagggaccaactctccttgaggctcttgaccaaatcaatgagcccaagaggccctccgacaagcctctaaggcttccattgcaggatgtctacaagattggtggtattggtaccataccaggnttcacanccccagtctctacacgtcccactggcacagtaccaataccaccaatcttgtagagactggggttgtgaagcctggtatg

SEQ ID NO: 283875 - DNA, 250 bp, Glycine max
agagagaggttttgatgcaacgtgtcactgagaaaggatctctatctacgaaggagcggaataaaacccttctctctgtgattaagagaatggcttcagatcggaaacttcacacttttgaggaggtggcaaagcacaaccagaccaaggattgctggctcatcatttctggcaaggtgtatgatgtcacccctttcatggaggatcatcccggaggtgatgaggttttgttatctgcaacagggaaaga

SEQ ID NO: 283876 - DNA, 252 bp, Glycine max
  unsure (1)..(252): unsure at all n locations
agcgatagtgataagagagataccaacaagaaaagaaaaaaagaagagttgagattccctttgaagaaaagatggcatcccataggcaaagctatgaagctggtcaaactaagggccgaactgaggaaaagacgaaccagacgatgggcaatattggagagaaggctcaagctgcaaatnagaagacccaggaaatggcccaagctgcaaaggagaagacccaacaaacagcccaagctgccaaggacaaga

SEQ ID NO: 283877 - DNA, 251 bp, Glycine max
gaggcgattgcgagtctgaaaggagaaccggttcgagccaatacgcgataaccaaatacatcgaagggaagcacaaggagttgcctgcaacctacaagaagcttgtcctcgttcatctcaagaaatctgttgctgctggcaagcttgttaaggtgaaaaactcctttaagctcgcaccgactaagcctgctccggttaaggccgctgctcccaaaaagccaaccaaagctgccactaagcccgcttccaag

SEQ ID NO: 283878 - DNA, 252 bp, Glycine max
catatctccatttccatttcctcctctcagtttccaagaatcttaagctatgggaaagtcttacccaaccgtgagcgctgattaccagaaggccgttgagaaggcgaagaagaagctcagaggcttcatcgctgagaagagatgcgctcctctaatgctccgtttggcatggcactctgctggaacttacgacgtgagctcgaagaccggtggtcccttcggaaccataaagcacccctccgaactcgctca

SEQ ID NO: 283879 - DNA, 255 bp, Glycine max
gaacctaagtgagaaacaaagaaggaaataattgatctttgaaaatgcagggaggaaagaaagctggagagtccatccaaggaaacagctgcaaacattggtgcttctgccaaggctggcatggagaaaaccaaggccactgtccaggagaaggcagaaagaatgacggcacgtgatccgatgcaaaaggagttggcaacccagaagaaagaggcaaagatgagccaggcagagctggacaagcaggcggcgcgt

SEQ ID NO: 283880 - DNA, 266 bp, Glycine max
  unsure (1)..(266): unsure at all n locations
acctaagtgagaaacaaagaaaggaaataattgatctttgaaaatgcagggaggaaagaaagctggagagtccatcaaggaaacagctgcaaacattggtgcttctgccaaggctggcatggagaaaaccaaggccactgtccaggagaaggcagaaagaatgacggcacgtgatccgatgcaaaaggagttggcaacccagaagaaagaggcaaagatgagccaggcagagctggacaagcaggcggcgcgtcanataacacggc

SEQ ID NO: 283881 - DNA, 233 bp, Glycine max; identical to SEQ ID NO: 136710

SEQ ID NO: 283882 - DNA, 268 bp, Glycine max
  unsure (1)..(268): unsure at all n locations
cattgttgaaaagaaaccctagcaagtggagcaatggcagacgttgaagtcgatgtgnnnnnnnnnnnnnnnnnnnggctgccgaagaagagaacgttcaagaagttcagttttcgaggcgtggatctcgatgcacttctcgacatgtccaccgatgaactcgtcaagatgttcagtgcccgcgctcgtagaaggttccagagaggcctcaccagaaagcccatggccttgatcaagaagctccgtaaagcgaaaagggaagctccac

SEQ ID NO: 283883 - DNA, 272 bp, Glycine max
gttggaaatgctgttccagtgtggtacaacatggttgaccaaggtcttattaaggaaccagtattttcattttggttcaaccgcaaaccggaggaagaggaagggggtgagattgtttttggtggtgttgatcctgctcactataagggaaagcacacttatgtgcctgtgaccagaaaaggatattggcagtttgatatgggagatgtacttattggcggtaaacccactggatattgtgctgatggctgttcagccattgcagactcagg

SEQ ID NO: 283884 - DNA, 271 bp, Glycine max
ctctgttgggcctgctcatgatgtgcctttcgacacttctgcccatgaggaacagttaagcagttctgcagatccatctgaacagaaaactccttcaggcaagacccttaagttgatatcaggatcatgctacttgcctcatcctgataaagaagaaactggtggagaagatgctcattttatatgttctgaggaacaagcaataggggtggcggatggtgttggtggatgggcagatcttggtgttaatgctggatattactctcgtgag

SEQ ID NO: 283885 - DNA, 274 bp, Glycine max
ggatatggaggttcagataatatggttactgatgaggtagagcttcagcaacatcagaaacttgagaagctttacatatcaacacgtgctggaaagcattatcaaagggatattgtccgcggtgtggaaggttatattgtaactggatccaagcaagttgaaataggaacaaagttatcagaagatagcaggaaatatggtgcagataatacatgtaccagtggtagtactttatcaagagctgcgctaaattatgcacgtgcccgtgcacaaa

SEQ ID NO: 283886 - DNA, 229 bp, Glycine max
cagtttgggaaaccctaactgctctcaccactctctttgctttttttcctctccgatcaacgacctctttcgtcgccctaagtcatggcaggacttgcacccgagggatcacagtttgatgctcgtcaatatgataccaagatgaatgagttgcttacatctgatggacaggattttttcacatcttatgatgaggtttatgacagttttgatgctatgggcttgcagg

SEQ ID NO: 283887 - DNA, 220 bp, Glycine max
  unsure (1)..(220): unsure at all n locations
ctcttcttctcttgcggcnngggttttagcgcacttcttctagatttaaggaagatgggtaaggaaaaggttcacatcagtattgtggtcattggccatgtcgactctgggaaatccactaccactggtcacctgatttacaagcttggaggcattgacaagcgtgttattgagaggtttgagaaggaagctgctgagatgaacaagaggtctttcaagt

SEQ ID NO: 283888 - DNA, 269 bp, Glycine max
  unsure (1)..(269): unsure at all n locations
gtttgttgttcaatctaacaaacttctctatatcgtttactttttcaacacaccttacacancnnctttatttgngcctttcatataaatatcatggcttcgagggtggtttcggttttggtgatagcgatgatgttgtttgccatgaactgtaactgcactagtgttggccacatgccttcaaccaaagaggaaggtcacgattttcaggnggctaaagccaagacaacacaaactgcgaacaaggccatggaaactggtaaagatgg

SEQ ID NO: 283889 - DNA, 269 bp, Glycine max
aacaaatgcaaaaagagagaatggatggcatagaatctaaatgcagaaataatatagtagaggagaatctaaaactgtggaaggaaatgattgcaggaacagagaggggattgcagtgttgtgtccgtggcaagttggatatgcaggacccaaacaaatcacttagagatcctgtatattatcgttgcaatccaatgccccatcatagaattggatccaagtataaagtgtatccaacttatgatttcgcttgtccatatgttgatgct

SEQ ID NO: 283890 - DNA, 263 bp, Glycine max
cttcttctccttctgaactaagagatggggttgtctttcaccaagctttttagccggctctttgctaagaaagagatgcgtattctcatggtaggtcttgatgctgctggtaagactaccatcttgtacaagctcaagctgggagaaattgtcacaaccattcccacaattggattcaatgtggagactgtggaatataagaatattagctttactgtatgggatgtgggtggccaagataagatccgtcctttatggagaca

SEQ ID NO: 283891 - DNA, 260 bp, Glycine max
ttatctcttctaccttgggaaaattcggacaattcagctggagtatacagatgcaaaagagtctctcctgcaggccgcccggaaagctcctgttgctgcaaggggttttcgaattcaatgtaacaagtgggctgtgatagtgcgtttactgttgggagaaatacctgagcggactgtcttcatgcagaaaggaatggagaaagctttaaggccttactttgagcttacaaatgctgtgcggattggagacttggaactgt

SEQ ID NO: 283892 - DNA, 263 bp, Glycine max
atcgtgagagggacggtagcagagattccgtgagttgcaaaaatgaaaacaattctttctgcagagaccatgaacatcccggacggcgtgagcgtcaaggttaatgccaaggtcatcgaagttgagggcccccgcggaaaattggtgcgagacttcaagcacttgaatctcgattttcagctcatcactgacgaaaacggtaaaaggaagctgaaggtggaggcctggttcggttctcggaaaacatccgccgccattcgcac

SEQ ID NO: 283893 - DNA, 266 bp, Glycine max
ggaagcttgtgaacattcttggagggcttgagctgcacactgggattttcagtgctgctgagcagaagaggattgttaattatgtcgcctcgttgcaggaaatggggagaaagggggaattgaaagagcaaacgttttcagctccccaaaagtggatgaggggtaagggacgccaaaccatccaatttgggtgctgttacaattatgcagtggatagagatggtaacccacctggtattcttgggaatggaatggttgatcctata

SEQ ID NO: 283894 - DNA, 264 bp, Glycine max
ttgtgggagccttatctcgcaatcttcatgatcttcaagaccgtcaagggagctacttatcaatttatgatcagcctacgcttccccttcaggatccagtcgttgattcaataaatgcagctgttgataggttaaccaactcgacaaacttccttaactttttggggcagcatgcactcattatgcatgaagagctgcctagcccttctgaggaacatgttgatgatcaacgataccattttatgtctcttctcctgaacctgg

SEQ ID NO: 283895 - DNA, 264 bp, Glycine max
gatctcaacggagcacctctcttcaggtcgccatctagactgcaatcatggctgatggaccacagcatccatcagttgttcagaagctagctggacagtcttacctggtgtccaggctaagccccaactttaactctgggaattattcctcgactggttcttacttcaatggaggactgcactcttctgggttggctgttgtgtcgcctggatctccagttactgtgcatgctccagcagagaaaggagtgagtggatttctag

SEQ ID NO: 283896 - DNA, 263 bp, Glycine max
agaaacaaagaaaggaaataattgatctttgaaaatgcagggaggaaagaaagctggagagtccatcaaggaaacagctgcaaacattggtgcttctgccaaggctggcatggagaaaaccaaggccactgtccaggagaaggcagaaagaatgacggcacgtgatccgatgcaaaaggagttggcaacccagaagaaagaggcaaagatgagccaggcagagctggacaagcaggcggcgcgtcacataacacggcggcgaa

SEQ ID NO: 283897 - DNA, 261 bp, Glycine max
aaacatggcatctcgtcaaaacaacaagcaagagcttgatgaaagagcaaggcaaggagagactgttgtcccgggtggaactggtggcaagagcctggaggctcagcaacaccttgctgaaggaaggagcaagggagggcaaacaaggaaggaacagctgggtacagaagggtaccaggaaatgggacgcaaaggagggttgagcactgtggacaaatcaggagaagaacgtgctcaagaggaaggcattggcatcgatga

SEQ ID NO: 283898 - DNA, 258 bp, Glycine max
aagaacttccttataaccaaaaccaacaacaactatggcaagttatcagaagcactacgatgatcagggtcgcaaggtcgacgagtatggcaatgttgagaggcaaactgacgaatatggcaacccggttcatgccactagtgtcacttatgtagccaccaaaagtgttggtggctacaatgatgacgctaataagcaacatgatattactggtgtctatcccgagaaagacaccggtagacatcattttggtcgtgg

SEQ ID NO: 283899 - DNA, 261 bp, Glycine max
tcgcgccggccagggagccttcggaaacatgtgtcgtggaggacgcatgtttgccccgaccaagatctggcgccgctggcacaggaaaatcaatgtgaaccagaagcgctacgccgttgtctccgccatcgctgcctccgccatcccctccctcgtcctcgcccgcggccaccgcatcgagtccgtcccggagctcccactcgtcgttagcgactccgccgagagcgtcgagaaaacaaaagaagcaatcaaagtcctcaa

SEQ ID NO: 283900 - DNA, 262 bp, Glycine max
ctgaaaccaagaacgtataccaaatatgttgcttggggttttcctgatcgtagcttgagatttattagctatgaacaagataaacttctttcaacacatggaaatttacatggaggtaatcaaattcagtgtgctagtgttagccatgatggtcacattctggttacaggggctgatgatgggctagttaatgtatggagagttagcaagtttgggccccgcgccttacgacgcttgaagttggagaagccactttgtggtc

SEQ ID NO: 283901 - DNA, 255 bp, Glycine max
aagatggagcttcctgagtggaccgatattgtaaaaacagcaaaatttaaggagttggctccatatgatcctgactggtactacattagggctgcctcaatggcaagaaagatctatttgagaggtggtcttggtgttggtgctttccagaggatctatggtggaagcaaaagaaatggaagccgtcccccacatttctgcaagagcagcggtgcaattgccagacacattctgcaacagttgcaaaacatgagc

SEQ ID NO: 283902 - DNA, 262 bp, Glycine max
aaattagggtttgtagtgtagcaggaacaagcagcaatggcgccgaaggtaacacgcaaggttagcagaaaccccgaattgataaggggaattggaaagtactcgaggtcgcagatgtaccacaagaggggcatttgggctatcaaggccaaaaatggtggcgttttacctcgccacgaccctaaacccaaacctgaaacacccgctgaaaaaccacccaaattttaccctgctgatgatatcaagaagccccttgtcaaca

SEQ ID NO: 283903 - DNA, 262 bp, Glycine max
cagtatcttgagcaaactcacttctgaagcaggaaatgaagagtgggatgatagcttactgaccaaagaggaagtagaggcaagattgcagaggaaggtggaagcaatcatcaaaagagaaagagcaatggcatttgcatattcacatcagctatggaaagccactccaaaatcaactcacaccccagtgacggatacacgatcaggtggattcccttggtggtggaactggttggaaagacaaacaccagcagcaactcca

SEQ ID NO: 283904 - DNA, 262 bp, Glycine max
gtgtggagctgtggggtgattttgtatataatgttggcggggattccccctttttacggagactctgctgctgagatctttgaggctgtggttagggctaacctcaggttcccttctagaatcttccggactgtgtcccccgccgccaaggatctcttgagaaaaatgatctctagggactcttctagaaggttctccgcagaacaagccttgagacacccttggatcttgagtgcgggtgacacggctgaactgacttgag

SEQ ID NO: 283905 - DNA, 265 bp, Glycine max
  unsure (1)..(265): unsure at all n locations
ctcttcttctcttgcggcnngggttttagcgcanttcttctagatttaaggaagatgggtaaggaaaaggttcacatcagtattgtggtcattggccatgtcgactctgggaaatccactaccactggtcacctgatttacaagcttggaggcattgacaagcgtgttattgagaggtttgagaaggaagctgctgagatgaacaagaggtctttcaagtatgcctgggtgctggacaaacttaaggctgagcgtgaaagaggaa

SEQ ID NO: 283906 - DNA, 262 bp, Glycine max
cttcctccaggacaaatcactcaaggaaagtttcagttcttcctcttgtgtttctcatcttctatgaggtttcaggggggccttttggggtggaggatactgtgcacgcagcgggtccttttttagccctccttggattcttgcttttccctttgatatggagtgttcctgaagctttgatcactgctgagatgggtaccatgttccctgaaaacagtggttatgtggttgggttcatctgctttgggtccttttgggggtt

SEQ ID NO: 283907 - DNA, 251 bp, Glycine max
  unsure (1)..(251): unsure at all n locations
tgtttcacaccatttgcagaatggtgacatgtatggatccagcgagtctgccatcaaacctcaacaactgactgatgatgtctgggattatantttctgtggtggaccatatcccaagtcaactgatatatcatcatcccttttagaaagaatgaagcgtgagtttgaatattggtatccatttgatcttcgagtctctggtaaggatctcatccagaatcatcttacctctgcattacaaccatactgcg

SEQ ID NO: 283908 - DNA, 255 bp, Glycine max
aagacattcgatcccaccttataaaactatgtggtgaagccgagggacacttagagagccactactcaaccatcctaggctcatacgacaaaccccttaaccaccttaatattttcccctattattctaactacctcaaacttggtcacctcgagttcactatccttagccaacactgcacccatgttcccaccaaagttgccttcgtgggctcggggccccttcctcttacctcaattgtgttggcatcgaacc

SEQ ID NO: 283909 - DNA, 255 bp, Glycine max
gaagaagtattttgcgtttatttattcagcattcggcggagatttcaaacccaacttggcttgttccaattccattcattcgttcattcccaggttgtgatggcagcagcaccagcagctaccttcgctattggaaccaccggttccctcggccaaagaggaagctcgcttcctcaatcaaagtcctttgggttgaaattcaactctctgaatcatttgaagagcttctgtggcctcaaggccatgtcatccgtg

SEQ ID NO: 283910 - DNA, 256 bp, Glycine max
agtgaccaagctgggccgcctggtgaaggagggaagaatccggagccttgaacagatctacctccactcgctcccgatcaaggagcaccagatcatcgacacgctcgtgggtcccaccctcaaggacgaggtgatgaagatcacgccggtccagaagcagacccgggccgggcagaggacccggttcaaggccttcgtcgtcgtcggagacaacaacggccacgtcgggctgggcgtgaagtgcagcaaggaagtg

SEQ ID NO: 283911 - DNA, 258 bp, Glycine max
ccgaagagtgtttaaaacaagcaatggatttgagtgggttattgctgctatattcttctttaggagatgctgaaggaatatcaaaacttgcaactcttgctaaagagcaagggaagaataatgttgcattcctttgcttattcatgttgggtaaacttgaggactgccttcaacttttggtagaaagcaatcggattccagaggctgctttaatggctcgatcctatctcccaagcaaggtctcagagatagtggcaa

SEQ ID NO: 283912 - DNA, 262 bp, Glycine max
  unsure (1)..(262): unsure at all n locations
gggcttccttaagctccttagtgctgctccttgcagctctaattctatcccctcaagttcttgcaaactatgagaatcccccagtgtacaagcctcccactgagaaaccaccagtttataagcccccagttgagaagcctcctgtttacaancctccagttganaagccnccantttataagcctccagtngagaagccaccagtgtacaagccnccagttgagaaacctccagtntacaagcccccagtngagaaaccncc

SEQ ID NO: 283913 - DNA, 262 bp, Glycine max
gtagccgtcgcactctgtgttttctgcgccgtctccgatctccgacaatggcgacccaaatgagcaagaagagaaagttcgtagctgatggagtgttcttcgctgaactgaacgaggttctgacaagagagttggccgaggacggttactccggcgtggaagttagggttacgccgatgcgcaccgaaatcataattagagccaccagaacccaagctgttctcggtgagaagggaaggagaataagggaacttacctctgt

SEQ ID NO: 283914 - DNA, 267 bp, Glycine max
gccccaggagctgcagtttccctttgaattgaggaagcagatctcgtgctctttgcagttgtctaacaagactgacaactatgtggctttcaaggtcaagacaacaaatcctaagaaatattgtgttagacctaacactggagttgtgatgcctaggtctacttgtgatgtcatagtgacaatgcaagcccaaaaggaggcacctcctgacatgcaatgcaaggataagtttctccttcaaagtgtagttgctagccctggggcaac

SEQ ID NO: 283915 - DNA, 267 bp, Glycine max
gccttgctccgctctctccgccgccgcgaccttccctcgtcttctctctccgcctttcgttcgttgacgagtggcacaaagacatcatatgtagggaacaagtgggcaagtttgtctcggccgttcagttcaaagcctgctggtaatgatgtcattggaattgatctgggtactaccaattcatgtgtttctgttatggagggaaagaatcccaaagttattgagaattctgaaggagctcgaacaacaccatcagtggttgccttc

SEQ ID NO: 283916 - DNA, 267 bp, Glycine max
atctgcgtgtgtttgcgaattgtgcaattttcaagatctgaatcagagaatagataataatggctacaccggaccacctgttcaacctccgcaacaacttgtatctcggggcgtaccaagccgccatcaacagcggcgacgtcaccaacctctcccaagaagactccctcgagcgcgacaccctcgtccaccgctgctacatcgccctcggccagcttcagttcgtcatctccgagatccatgacgacgctcccacacctctccaag

SEQ ID NO: 283917 - DNA, 268 bp, Glycine max
gcacaagattgcaaaatgaagttcaacattgcaaatcccaccactgggtgccagaagaagctggaaatcgatgacgacctgaagcttcgagcattttgggacaagaggatctcccaggaggttcttggtgatgctctgggtgaggagtttaaaggatatgttttcaaaatcaccggtgggtgtgacaaacaaggattccctatgaagcagggagtgctgacccctggtcgtgttcgacttttgctccatagaggaactccttgtttcc

SEQ ID NO: 283918 - DNA, 267 bp, Glycine max
gagatgatcaaggatcgtgtgcgtactgatacttatagggatgcaatcatgcagcatccagagtttcattgcaggcaaagttgtcgttgatgttggatgcggtacaggaatcctttctatattttgtgctcaggctggtgcaaaacgggtgtatgcaattgatgccagtgacattgccctgcaggcaaatgaagttgtgaaagcaaataacttgtctgatgttgttgttgtattgcatgggcgagttgaggatgttgaaattaatga

SEQ ID NO: 283919 - DNA, 267 bp, Glycine max
atttttttcgtgtgttataggaactacgcccgaactcattaattaggcagcatggcagaacgaagggttttcactctctcacaggttgcccaacataaatccaacaaagactgttggctggtgatcaatggcagagtgttggacgtgacaaagttcttggaggaacacccgggaggagaagaggtgattctagaggtagctgggaaggatgcgaccaaagagtttgacgttattggacacagcaaagcagcacaaaatatggtccta

SEQ ID NO: 283920 - DNA, 234 bp, Glycine max
ccacggttaataagacgatgcttttcgaaacccctggttccagtaccctaaccgaaacccctagcgctgctgctgctgttcacgtccccaattctaaaagccagggattcttcccgagggaattgaacttttcgaattcattgaaacctgaatccggtgaaattctgagctttggggagagcaagaagagctcttacaatggggctttctttcccggtgttgttgcggttgagg

SEQ ID NO: 283921 - DNA, 264 bp, Glycine max
  unsure (1)..(264): unsure at all n locations
gnaaggaggggtgagaaggatgggaagtcttatataattgatgtgaagaaagggaggatgaggattcggttgaaggtggcgctggcgttgggggttgtggtgatttgtattggggtaggtgtgggggttatgcattttgtggagaagcttggatggttggattcgttttatctttcggttatgtcagttaccacggttgggtatggagaccacgcgttcaagaccatgcacggtcggatctttgctgcgatttggttgcttgtg

SEQ ID NO: 283922 - DNA, 246 bp, Glycine max
  unsure (1)..(246): unsure at all n locations
ggccatgccctcatgtgcttggcacgtgtttcactcttcntctgcgctctaaccctatcanctgctcacggaagcaccacggttcaagacatcgcgagaaagttgaaactcggggacaacgagcttctgcgcacggagaagaagttcaaggttttcatggagaattacgggaggagctactccacagaggaggagtatttgcgccgtttggggattttcgcccagaacatggtcagagcggcggac

SEQ ID NO: 283923 - DNA, 265 bp, Glycine max
gttttgtgccaagtttcttcatcaacaggtgctcaaaagtgagacatacttaactggagatataggaacctcccttcagaaagcctttttaagaatggatgaaatgatgcgtggtcaaaagggatggagggaattatcaatattgggggataagataaacaagtttactgggatgatagaagggttgatttggtctccacgaagcagtgatggtaattgccaagttgatgattggggtcttgaggaggggcctcattctgatttt

SEQ ID NO: 283924 - DNA, 200 bp, Glycine max
  unsure (1)..(200): unsure at all n locations
aaaaagtttacgttacaaatcgcataataaccgtcctaagtttattgagagaattttgcaagtgtgagaaacatggcatctcgtcaaaacaacaagcaagagcttgatgaaagagcaaggaaagggagncntgtgtcccgggtggaactggtggcaagagcctggaggctcagcaacnncntnnnnnangganggncnaa

SEQ ID NO: 283925 - DNA, 255 bp, Glycine max
ggctgattacattggagtgtccccatcaaagcatgctacatatgttcctcacactgctggtaggtactcagtgaagaggttcaggaaagcgcagtgccccattgttgagaggctcaccaactctctgatgatgcacgggaggaacaatggaaagaagctcatggctgtcaggattatcaagcatgccatggagatcatccacttgctcactgacctgaacccaattcaggtcattgttgatgccgtcatcaatag

SEQ ID NO: 283926 - DNA, 263 bp, Glycine max
gagagtgatttcagtgagtgatcggtgttcgcttgttctcatcataatcgtcagcgtcaattgaagaagatgccgatcagaaacatcgccgtcggaaggcctgaagaggcgactcaccccgacacgttgaaggcggctttggctgagttcatctcaaccttcatcttcgtgttcgccggctcaggctccggcatcgcctacaacaagctcaccgacaacggcgctgccacccctgccggcctcatctccgcctccatcgccca

SEQ ID NO: 283927 - DNA, 262 bp, Glycine max
caaaaccctagctcgcgttctgctttcgtcttttacatcaggatggagtctcaggtgaagcacgcacttgttgtcaaagttatgggtcgtactggatccagaggacaagtaacccaggttagagtgaaatttttggatgatcagaaccgtcacatcatgaggaatgtgaaaggacctgtgcgagaaggagacattctcaccctactcgagtctgaaagggaagcaagaagattgcgctagatggtttcttttggcttgcctc

SEQ ID NO: 283928 - DNA, 264 bp, Glycine max
  unsure (1)..(264): unsure at all n locations
gggtgacaacatgattgagaggtccaccnancttgactggtacaanggaccagctctccttgaggctcttgaccanatcaatgagcccaagaggccctccgacaagcctctaaggcttccattgcaggatgtctacnanattggtggtattggtaccatancangnttcanaaccccagtctctacacgtcccactggcacagtnccaataccaccaatcttgtaganactggggttntgaagcctggnntggtggtnacttnt

SEQ ID NO: 283929 - DNA, 261 bp, Glycine max
tcgttgattcggatctagagtcttttttcactcttcagttctcgttgttgttcttcgctttcctgaaactagggttttcaatttcgattcattcgttaataattaaagatgtttgggagggcaccgaagaagagcgataatacgaggtactacgaaatcctcggcgtctcgaagaacgcttcgcaggatgatctgaagaaggcttacaagaaagccgccatcaagaatcaccctgacaagggcggtgatcccgagaagttt

SEQ ID NO: 283930 - DNA, 264 bp, Glycine max
aattcctaattgtttaaacctaattctcatttcttcatcgttcgattcttctcctcctaaagatgcagatcttcgtgaaaactttgaccggtaagaccatcacccttgaggtggagtcctccgacaccatcgataacgtgaaagctaagattcaagacaaggaagggatcccacctgaccagcagagacttatctttgcgggtaaacagcttgaggatggtcgaacccttgccgactacaacatccaaaaggaatccactctcc

SEQ ID NO: 283931 - DNA, 261 bp, Glycine max
cccaagagggtcctggtgtgtctgattgagaaggaaattgagtttgaaacagtgcatgttgatctcttcaagggagagaataaggaacctgagttccttaagctgcagccatttggatcccttcctgttattcaagacggtgattatactctctatgaatctcgtgcaataatcagatacttagctgagaagtataaagaccaagggactgacttattgggaaagacaatagaagaaaagggtctagtggaacaatggctt

SEQ ID NO: 283932 - DNA, 260 bp, Glycine max
gaagaggttctcatacagcaggtcaatgaagcataaactggagacttttgttaactttcccattcatgattttgatttaactaattacatagccaacaaaaacaactctcggcgtcaactgtacgaactgtatgcccttacaaatcattatggcagtatgggtagcggacattacactgcacatattaagcttttagatgagaacaggtggtacaattttgatgacagccacatatcactcataagtgaagatgaggtta

SEQ ID NO: 283933 - DNA, 262 bp, Glycine max
gactatggctaccgtcttgatcacttcgagcggaagcgcaagaaagaggcgcgtcaagttcacaaacgttcttcaattgcccagaaggctctgggtattaagggcaaaatgattgccaagaaaaattatgctgaaaaggcacagatgaagaagactttggctatgcatgaagaatcaacgtctaggcgcaagactgatgataatgttcaggatggagctgttcctgcttatctccttgatcgtgataacacaaccagagcaa

SEQ ID NO: 283934 - DNA, 260 bp, Glycine max
  unsure (1)..(260): unsure at all n locations
gatggagtgaaggttgatgtgcagaacattattgagacccttggtgcgggacatggtggcngagtgtcacttactcgcagctatcatcacgcgcttgaggcttccattgctagcaattttgctgataacggatgcattgcgtgtatgtgtcacaacactgatggactttatagtgctaagcagactgctattgtgagagcttctgatgatttttaccctcgtgatcctgcttcccataccatccatatttcttctgttgc

SEQ ID NO: 283935 - DNA, 259 bp, Glycine max
agttgcaggaaaaatggtttcgctgaaactgcagaagcggctcgccgcgagcgtgctcaagtgtggcagaggaaaggtttggcttgaccccaatgaagtcaacgaaatctccatggccaattctcgccaaaacataaggaagctggttaaggatgggtttatcatcaggaagcccaccaagattcactctcgctcacgtgctcgtcgaatgaaggaagccaagaggaaaggacgtcactctggatacggtaagcgtaag

SEQ ID NO: 283936 - DNA, 118 bp, Glycine max
aaacaaagaaaggaaataattgatctttgaaaatgcagggaggaaagaaagctggagagtccatcaaggaaacagctgcaaacattggtgcttctgccaaggctggcatggagaaaac

SEQ ID NO: 283937 - DNA, 207 bp, Glycine max
tttccgaaccttctagattcttcgatgcaaccacccccgccacttcatcgcgctccccaaagcgatccctccctctcgacgaggaatctcagacggaccaaacgacgtcttctgagcccaaacgcgccgtgaaccgctgctccggctgccggcggcgcgtgggactcacgggattccggtgccgctgcggggacttttctgcgcaga

SEQ ID NO: 283938 - DNA, 258 bp, Glycine max
  unsure (1)..(258): unsure at all n locations
gccaccagggagaaggctgccgggactgcggaggcggccaagaacaaggccgcagaggtaaaggacagagctgcagaaaccgcggaggcggccaagaacaagactgccgagactgctgaggcagcgaacagaaaaccgcacaggcaaaggacaacgccaaggaaaatgtgagtggtgcagatgaaggagcaaggaggaaaatggaggacctaaggcttcgaggtaaagggtatggaagtcatgantctgcaggggggc

SEQ ID NO: 283939 - DNA, 258 bp, Glycine max
agaaacattaagttcagtgggaaagacagatggtgaaaaatcagttcctgcacccaaagccgctgaagttcctcctgataatgagtttgagaagcgaataaggcccgaggtaatactagcaaatgagattgatgtcacattctctgatattggtgccttagatgagaccaaagaatcccttcaagaactagtaatgcttcctcttagaaggccagaccttttcactggaggccttctaaagccttgtagaggaatatt

SEQ ID NO: 283940 - DNA, 259 bp, Glycine max
gggcaatcatgtccattatcattcaagggaagcccctattggatggctcctgaggttataaaaaactctaatggttgcaacctagctgttgatatatggagccttggatgcacagttttggaaatggctacaactaaacctccttggagtcagtatgaaggggttgctgccatgttcaagattggtaatagcaaggaactcccaacaatcccagatcatctctcttgtgaaggaaaggattttgttaggaaatgcctac

SEQ ID NO: 283941 - DNA, 255 bp, Glycine max
  unsure (1)..(255): unsure at all n locations
caagatgctcttggcatcggtttgatgataacagtcctacagttggctcggttgcctaatattaaggttgcaactgtactcctatgttgtgcatttgtatacgacatctttngggtattcatatctcctgtgatattccagaagagtgttatgattacagttgctcgtggtgacaaggccggtggtgaagcaattcctatgcttttgagatttcctcgtctttctgatccttggggtggctatgatatgattgga

SEQ ID NO: 283942 - DNA, 256 bp, Glycine max
  unsure (1)..(256): unsure at all n locations
aacaaactatatttggtgatcttgagaagatttgtcctccacactgcattttagcatcaaacacatcaactattgaccttgatgttgttggtaaaacgaccagctctcaagatcgcattgcgggtgcccatttttttcagtcctgcccacattatgccacttttggagattatacgaactgataaaacttctgcacnagtgattgttgatctgataacagttggcaaaatcataaagaaggcacctgttgtggtgg

SEQ ID NO: 283943 - DNA, 256 bp, Glycine max
  unsure (1)..(256): unsure at all n locations
ggtggtggctgcttcgaaagcttaataatttgtttatttccagaacatcatagttttcgcagcagcaaactaacaaattactcatatcatataataagatggcccgttctctctcgcaagccaaacgtattggtgtccngttgctcaatctatctccctaattcccgttcatcggcgaggttacgcagtggcatccgatgtatcggtaagagttggattgggtaatattgggcgaaggaatggaatcgtgggaggt

SEQ ID NO: 283944 - DNA, 256 bp, Glycine max
gcgctagttattcatcctaggcattctggatcggataatgagagtgtgaagataacagttgccggttcaagtgtcagcgttggtgctgccagtgaaacgcgaaccgtgccaggcagtgaggctagtgatattcaaatggttgaagcaggaaatatggtcatttccatacaagttctgaagaatgtcactgacaatttcagtgagaagaatgttctgggacaaggaggttttggaacggtttatagaggtgaactcc

SEQ ID NO: 283945 - DNA, 256 bp, Glycine max
  unsure (1)..(256): unsure at all n locations
agcttgatgctgcatatcatgaggcacagcagaaacctggtggctgcnctgtttttctctttttctcagttaataccagtgggcaatttgtggggcttgctgaaatgattggtcctgttgattttaacaagagtgttgagtattggcagcaagacaagtggaatggctgctttcctcttaagtggcacgttgttaaggatgttcctaacaatttgttgaggtacattaccctggataacaatgagaacaaacctgt

SEQ ID NO: 283946 - DNA, 276 bp, Glycine max
  unsure (1)..(276): unsure at all n locations
gaaaantttcgcgccccagaaaccctagaggaaccctgattcaatcgattcgctgttgccttcgaatttcgttccttggaagattagggagcaatggcaattgcagccccagggcatctgaacgtgaatgantcacccatttggggatctagaagtgttgattgcttcgagaaattggagcaaattggcgagggcacatatggtcaggtttacntggctaaagagatcaaaactggtganattgttgctctgaagaaaatacgaatggacaatgag

SEQ ID NO: 283947 - DNA, 272 bp, Glycine max
  unsure (1)..(272): unsure at all n locations
cgacgantncggcaaccctgttcatgctgctngtgtcaccnatgtngccaccagaactgctgctggtggttncagtgatgacattnatangcaacatgntaccaccaatgcctacggcgtagacactggtagacngcnttctagtggtggctacgatggtgacactaangnncntcntggaactnctggtggctntnntgatgacnccnntagacatcntggaactaccggtgtctatggtatngacaccgataggcaacancgtgggacta

SEQ ID NO: 283948 - DNA, 270 bp, Glycine max
  unsure (1)..(270): unsure at all n locations
tcaaaccttgctctatnctacacagtacacacactagangantaatggcttccatcctccactactttttagcccnctctctttcttgctcttttcttttcttcttntccgactcagtcacccctacaaaaccaataaaccttgttgttctacccgttcaaaatgatggttccacagggctccattgggccaacctccaaaaangaacccctctnatgcaagtncnagtctggtggacctcaatggaaaatcattttgggtnacttgtgg

SEQ ID NO: 283949 - DNA, 272 bp, Glycine max
  unsure (1)..(272): unsure at all n locations
tgattngcacctcaactcctcacatggttctccagcaatccgtgtaccaggctttcactcaggtgtttgctcagcagctaccaaagcaagcacaggtgaaatctgtggcaccatttgggttatgcttcaactccaacaagatcaatgcatatcctagcgtggaccttgtgatggacaagcccaatggtcctgtttggagaatctctggtgaggacttgatggtgcaggcacaacctggggtcacgtgtttgggtgttatgaatggaggaatg

SEQ ID NO: 283950 - DNA, 269 bp, Glycine max
  unsure (1)..(269): unsure at all n locations
ttactctagactcttccttttntcttctctgtctaaggggtgccctgagatcacattgaacaatggtgaaggctgtggccgttcttggcagcagtgagggtgtcactggaactnttcacttcgttcaggagggaagtggtccaaccaccgtaactggatctcttgctggtctnanncctggtcctcatggttncgatgtccatgccttggggaacactaccaatggttgcctctcantggatcaantttnntctaatagcgggggncat

SEQ ID NO: 283951 - DNA, 272 bp, Glycine max
  unsure (1)..(272): unsure at all n locations
cacaactacaaganagancttccttataaccaaaaccaacaacaactatggcaagttatcagaagcactacgatgatcagggtcgcaaggtcgacgagtatggcaatgttgagaggcaaactgacgaatatggcaacccggttcatgccactagtgtcacttatgtngccaccaaaagtgttggtggctacaatgatgacgctaatnngcanttgattnnctggtgtctnccggaaaannnccnggtanaatntttgggggtgttgggggga

SEQ ID NO: 283952 - DNA, 268 bp, Glycine max
  unsure (1)..(268): unsure at all n locations
acacaactnctacaagtacttccttacantcaaaaccaacaacaactatggcaagttntcaaaagcactacgatgatcagggtcgcaaggttgacgagtatggcaacgttgagaagcaaaccgacgaatancggcaaccctgttcatgctgctagtgtcacctatgtagccaccagaactgctgctggtggttacngtgatgacattagtnagcaccatgntaccnccattgctacgggtagacactggtagacggnntttatnggng

SEQ ID NO: 283953 - DNA, 273 bp, Glycine max
  unsure (1)..(273): unsure at all n locations
ccagctgcngtcccctttcancgacccttcccaaacctcccacgagtggnccctccttcttctantccagttcctctacctcctcttcctcttcgccttctccctcctctccaccgcngccgccgtcttcnccgtcgcctccctctacacctccnaggccgtctccttctcctccaccctctccgccntcccccgcgtcttcnagcgcctcttcntcaccttcctntgggtcaccctcctcntgntcctctacnactccctnntcctcctctg

SEQ ID NO: 283954 - DNA, 278 bp, Glycine max
  unsure (1)..(278): unsure at all n locations
accttgctctatactacacagtacacacactagaagnntaatggcttccntcctccactactttttagccctctctctttcttgctcttttcttttcttcttatccgactcagtcacccctacaaaaccaataaaccttgttgttctacccgttcaaaatgatggttccacagggctccattgggccaacctccaaaanngaacccctctantgcaantnccagtcctggtggacctcaatggaaatcacttgtgggtnactgtgaggngaagtactc

SEQ ID NO: 283955 - DNA, 266 bp, Glycine max
  unsure (1)..(266): unsure at all n locations
gtttgctgantatggtacaataacttcatgcaaggttatgcgagaccccactggaatcggtagaggatcaggatttgttgcattttcaactcctgaggaagcatctcgtgctctcggtgagatgaatggtaaaatgattgctggaaaacctctgtncgttgcccttgcacagagaaaagaagacagangagcaaggttacaggctcagttttnanagatgaggcctgtngcaataacgccttctgttgcgccccgtatgcctctct

SEQ ID NO: 283956 - DNA, 268 bp, Glycine max
  unsure (1)..(268): unsure at all n locations
ggatttagtgctgaaattcaagancttgttcgcttgtgtcccaaaaaaaggcagactatgttgttttcagcaacaatgactgaggaggttgatgaacttattaaactttccctgtcaaagcccttgcgtctttctgctgatccatctacaaaacggccagcaaccttgactgaggaggttgttagaatacgaagaatgcgtgangtaantnaggaagcnnttcttcttgnaatgtgctcgaannnttttacttcnanngtcatcntct

SEQ ID NO: 283957 - DNA, 261 bp, Glycine max
  unsure (1)..(261): unsure at all n locations
ggntttngtgctgannttcnagancttgttcgcttgtgtnccaaaaanaggcagactatgttgttttcngcaacantgactgaggaggttgatgaacttnttannctttccctgtcaaagcccttgcgtctttctgctgatccntctncnanncggccngcaaccttgactgaggaggttgttngantacgaagaatgcgtgangtnantcaggaagcngttcttcttgcnatgtgctccannncttttncttccaangtc

SEQ ID NO: 283958 - DNA, 260 bp, Glycine max
  unsure (1)..(260): unsure at all n locations
tcanacctcttggggtggaggttcattttatagttgcagcttgtgagaatatgataagtggaacaggtatgaggcctggagatattgtnacagcttcaaatggaaagactatagaggttaacaacactgatgctgaaggtagacttaccctggcagatgctctggtatatgcttgtnaccaaggtgttgaaaagattattgacttggcaaccttgactggggcttgtgttgttgctcttggaccctcaattgctggtgtg

SEQ ID NO: 283959 - DNA, 263 bp, Glycine max
  unsure (1)..(263): unsure at all n locations
tcttctttttctctaagncctaaggggtgccctgagatcactttgagcaatggtgaaggctgtggcagttcttggcagcagcgagggtgtcactggaactattttcttcactcaggagggaaatggtccaaccaccgtaactggatctcttgctggtcttaagcctggtctccatggcttccatgtccatgccttgggggacactaccaatggttgcctgtcaactggagcgcatttcaatcctaataacaacgagcacggtg

SEQ ID NO: 283960 - DNA, 260 bp, Glycine max
  unsure (1)..(260): unsure at all n locations
ttcttcttgtgctggcatnncttcaacaacttnttctttgttctngatctcacgatggctcatttggccctgtnncagatggctgtaactgttcctgttggcagcgatttgtctctcagaagatctgcggttnaggcacctaactttnacttttgggataantcntgggcaccagtntttnctttgtncttganggcnaacnactcaagtttnagangtcgtcntgtggtattcntgtcagtgcaacaagcaagtgtacc

SEQ ID NO: 283961 - DNA, 263 bp, Glycine max
  unsure (1)..(263): unsure at all n locations
gttccacagggctccattggtgccaacctccaaaaaagaacccctctaatgcaagtaccagtcctggtggacctcaatggaaatcacttgtgggttaactgtgagcagcagtactcatccaaaacgtaccaagcacccttctgccactccacccaatgctctaganccaacacccaccaatgcctcagttgccccgcggcatcaaggccagggtgccacaaaaacacgtgtggcctcatgtccactaatcccatcacccaaca

SEQ ID NO: 283962 - DNA, 258 bp, Glycine max
ccgatttggaattgtggagggtcttatgaccactgttcatgccatcacagctactcagaagactgttgatggtccatcaaacaaggactggaggggtggaagagctgcttccttcaatataattcccagcagcactggagctgctaaggctgtaggaaaagttcttccagcactgaatggtaaattgactggcatgtccttccgagtccccactgtagatgtttcagttgttgacctcactgttaggctagagaagcc

SEQ ID NO: 283963 - DNA, 260 bp, Glycine max
  unsure (1)..(260): unsure at all n locations
gtngcagaccgagctagctagctagcaagcnagcacagagatggaggcaaagcgaggccatgccctcatgtgcttggcacgtgtttcactcttcctctgcgctctaaccctatccgctgctcacggaagcaccacggttcaagacatcgcgagaaagttgaaactcggggacaacgagcttctgcgcacggagaagaagttcanggtttcatggagaattacgggaggantactccacagaggaggagtatttgcgccgt

SEQ ID NO: 283964 - DNA, 265 bp, Glycine max
  unsure (1)..(265): unsure at all n locations
ctccggaagtagaacncaaaactgttacaggtcttctacgaatgattganagtgaaagaaanggtgaagcngtggatagaactcttctaaaccatcttttgaagatgtttactgctctgggaatttatgcagaangctttgagaagccattccttgaatgcacatctganttttatgctgctgaaggcgtganatacntgcagcantcngatgttccngattacttgaagctngtggagntaggnttncagaggaccatganagg

SEQ ID NO: 283965 - DNA, 266 bp, Glycine max
atcgaaatgctttgtctttggtgtgtaaaagttggtacaggatagagaggtgtacgaggcaaagggtgttcatagggaactgttactccatcactccggagaggttgatccagaggtttcctggtctaaagtctttgactttgaagggaaagcctcattttgctgacttcagtttggtgccttatgattggggtggctttgtgcatccatggattgaggcactggccaagaacaaggttggcttggaggagcttaggctcaagagg

SEQ ID NO: 283966 - DNA, 271 bp, Glycine max
aaaacctaagcttagaattagaaacaaagaaaagaagaaaggaaagaattgatcgttgaaaatgcagggaggaaagaaagcgggagagtccttaaggaaacagctacaaacattggtgcttctgccaaggctggcatggagaagaccaaggccactgtccaagagaaggcagaaagaatgacagcacgtgatccggtgcaaaaggagttggcaacccaaaagaaagaggcaaagatgaaccaggcggactggacaagcaggcggcgcgtca

SEQ ID NO: 283967 - DNA, 270 bp, Glycine max
  unsure (1)..(270): unsure at all n locations
cttantctagactnttcctttnctnttctctgtctaangggtnccctgagatcanattnnncaatggtgaaggctgtggccgntcttggcagcagtgagggtgtcactggaactattcacttcgttcanganggaagtggtccaaccaccgtaactggatctcttgctggtcttaagcctggtctccatggtttccatgtccatgccttganggganactaccaatggttgcctctcaactggatcacatttcaatcctaataacaaggg

SEQ ID NO: 283968 - DNA, 266 bp, Glycine max
agagatcccatgggggtcaactggagctgacatcattgttgagtccaccggagttttcaccgataaggacaaggccgccgcacatttgaagggtggtgcaaagaaggttattatttctgcccccagtaaggatgcccccatgtttgttgttggtgtcaacgagcacgagtacaagccagagcttgatattatttccaatgctagctgcacaaccaactgccttgccccacttgccaaggttatcaatgacaggtttggcattgttg

SEQ ID NO: 283969 - DNA, 272 bp, Glycine max
  unsure (1)..(272): unsure at all n locations
aattattaacacttccttagntcaatatgggngaagcccttcactctctctctttcttccctttggcttgctactcttgtcgagtgcatgctttgctattagctccagcaagctcancgagtgccaacnccaacaacctcaacgcgttggaacccgaccaccgcgttgagtccgaaggtggtttgattcaaacatggaactctcaacaccctgagctgaaatgcgccggtgtcactgtttccaaactcaccctcaatcgcaatggcctccat

SEQ ID NO: 283970 - DNA, 269 bp, Glycine max
gccaactttaagtttgtcaatttccgtgctgcttggttggttgcaattgcaagtgaacaattggctagtgtgtactagttttgaatcacaatggcagaggatgatggttacacgaaagatggaacagtcgattactgtggaaatccagctaataaaaaggaaactggaacctggaaagcctgcccctatatcttaggaaacgaatgttgtgagagattggcttattatgggatgagcacaaacctggtgctttatttcaagaaccggct

SEQ ID NO: 283971 - DNA, 270 bp, Glycine max
cacacacaactactacaagtacttccttacaatcaaaaccaacaacaactatggcaagttatcaaaagcactacgatgatcagggtcgcaaggttgacgagtatggcaacgttgagaagcaaaccgacgaatacggcaaccctgttcatgctgctagtgtcacctatgtagccaccagaactgctgctggtggttacagtgatgacattaataagcaacatgataccaccaatgcctacggcgtagacactggtagacagcattctagtg

SEQ ID NO: 283972 - DNA, 267 bp, Glycine max
  unsure (1)..(267): unsure at all n locations
cagaggttgatatttgctggtaaacaacttgaggatggaagaacccttgctgattacaatattcagaaggagtctaccttacacttggttcttcgtttaagaggtggcatgcagattttcgtcaagactttgacgggaaagaccatcaccttggaggtggagagttcagataccatagacaatgtgaaagccaagattcaagataaggagggtatccccccagaccagcaganggcttatctttgctggtaaacagcttgaagatgg

SEQ ID NO: 283973 - DNA, 271 bp, Glycine max
ctttgaacactcatcaccatggccaagcttgttctttccctttgtttccttcttttcagtggctgcttcgctctgagagagcaggcacagcaaaatgagtgccagatccaaaagctgaatgccctcaaaccggataaccgtatagagtcggaaggtgggttcattgagacctggaaccctaacaacaagccattccagtgtgccggtgttgccctctctcgctgcacccttaaccgcaatgcccttcgtagaccttcctacaccaacggtc

SEQ ID NO: 283974 - DNA, 121 bp, Glycine max
  unsure (1)..(121): unsure at all n locations
tgcagacctcagctagctagctagcaagcnagcacagagatggaggcaaagcgaggccatgccctcatgtgcttggcacgtgtttcantcttcctctgcgctctnaccctatccgctgcnc

SEQ ID NO: 283975 - DNA, 269 bp, Glycine max
  unsure (1)..(269): unsure at all n locations
gantnantgctgaaanacaanaacntgtccggcatgcntcccaaaaaaaggcagacnntgttgtctncagcancaatnactnaggangnngatgaacttanggggctntccctgtcaaagcccttgcgtctttctgctgatccatctacaaaacggccagcaaccttgactgaggaggttgntagaatacgaagaatggcgtgaagtaaatcaggaagcagttcttcttgcaatgtgctccaaaacttttacttccaaagtcatcatct

SEQ ID NO: 283976 - DNA, 264 bp, Glycine max
  unsure (1)..(264): unsure at all n locations
ggcaagtctggtgccagcagccgcggtaattccagctccaatagcgtannatttaagttgttgcagttaaaaagctcgtagttggaccttgggttgggtcgatcggtccgcctccggtgtncaccggtcggctcgtcccttctgccggcgatncgctcctgtccttaactggccgggtcgtccctccggtgctgttactttgaagaaattagagngtcaaagcaagcctacgctctgtatacancagcatgggatancaccaca

SEQ ID NO: 283977 - DNA, 266 bp, Glycine max
cttttaaatgaatcagacattactttagatgaagccaatgctctccattatgctgcagcctactgtgatcccaaggttgtttctgaggtacttggtttgggactcgctaatgtcaatcttcgaaattctagggggtacacagtgcttcacattgctgccatgcgtaaagagccttccattatagtatccctacttacgaaaggggcttgtgcatcagatttgacttttgatggtcagagtgctgttagtatttgtaggaggttgac

SEQ ID NO: 283978 - DNA, 268 bp, Glycine max
  unsure (1)..(268): unsure at all n locations
gtcaccnttccgttcatttcctcngtnttntcttcaaatcnnctgtntcgtgnaatccccgaaattnaaccatgcttctccgaaccgccgcctccgccgcttctgcttcgtccctctccctcttcagccctacctccgaacctctccgttcggttcccgctcgtggattggtggttcgcgccgcgaaagganccacgaaccaccgcgccctaaccggcgtgatctttgaaccgttcgaagaggtgaagaaggagctcgatctcgttcc

SEQ ID NO: 283979 - DNA, 262 bp, Glycine max
  unsure (1)..(262): unsure at all n locations
cacaaaacaaaaagtttacgttacaaatcgcataataaccgtcctaagtttattgagagaattttgcaagtgtgaganacatggcatctcgtcaaaacaacaagcaagagcttgatgaaagagcaaggcaaggngagactgttgtcccgggtggaatggtggcaagagcctggaggctcagcaacacctttgctgaggganggagcaagggggggccaaccanggagggaccagctgggtatagaaggntnccngaantggg

SEQ ID NO: 283980 - DNA, 261 bp, Glycine max
  unsure (1)..(261): unsure at all n locations
cttcgttaagaccctcaccggcaagactattaccctagaagtcganagctccgacaccatcgacaacgtcaaggctaagattcaggacaaggagggaatccccccagaccagcagaggctgatcttcgccgggaagcagctcgaggacggacgcacccttgctgactacaacatccagaaggagtcaactctccacttggtgttgcgtcttcgtggtggtatgcagattttcgtgaagactcttacgggtaagactattac

SEQ ID NO: 283981 - DNA, 176 bp, Glycine max
  unsure (1)..(176): unsure at all n locations
accttgctctatactacacagtacacacactagaagaataatggcttccatcctccactactttntagccctctctctttcttgctcttttcttttcttcttatccgactcagtcacccctacaaaaccaataaaccttgttgttctacccgttcaaaatgatggttccacannnc

SEQ ID NO: 283982 - DNA, 265 bp, Glycine max
  unsure (1)..(265): unsure at all n locations
cgacgtgananagattgtgaagtagaaatcggtgcaaganattctccactttatctaanaaaattcggtgagtttgtgaagacaaaaaatcactagctactcaaaaatggccacagtaggaaggaacgttgcagctcctttgctgtttcttaacttgatcatgtatttnattgttcttggctttgctagtnggtgcctcaacaggttcatcangggcnaattttaccncccttttttggggaangggcnncaccttttttttcnt

SEQ ID NO: 283983 - DNA, 264 bp, Glycine max
  unsure (1)..(264): unsure at all n locations
gccatagtgatactagtgattaatgaagncgatgcaaacattgaacttgttggcattaaagaacaacaacagaagcagaaacaggaagaggaacctttggaagtgcaaaggtacagagctgaattgtctgaagacgatgtatttgtaattccagcagcttatccatttgtcgtcaacgctacctcaaacctcaatttccttgcttttggtatcaatgctgagaacaaccagaggaacttccttgcaggcgagaaagacaatgtg

SEQ ID NO: 283984 - DNA, 261 bp, Glycine max
tggtaaaactgtcattagtcaggctctttctaagtattccaattctgatgccgttgtttatgtcggctgtggggaacgtggaaatgaaatggcagaggttctaatggactttccccaactttcaatgacattacctgatggtcgtgaagaatctgtcatgaagcgtacaacactagtggctaacacttcaaacatgccagtggctgctcgtgaagcttcaatttatacaggaatcacattagctgagtatttcagagatat

SEQ ID NO: 283985 - DNA, 203 bp, Glycine max
  unsure (1)..(203): unsure at all n locations
gtgttagccctaaacttcaccttcaaccatgaccacagtgccaccacacagtgtccaagtgcacacaacaacacaccnctacgangccggcgtcgtcccgccggctcgttttgaggcgccgcgttacgaagccggcatcaaggcgccctcttccatttaccattccgagagaggtccgacgacctctcaggttctcgcagttg

SEQ ID NO: 283986 - DNA, 247 bp, Glycine max
  unsure (1)..(247): unsure at all n locations
gtcgtcgcgtgtactttcttgcgaaacagaagggcgaaggggcaaacacaactnttttgtttttttgtagagcgagagagaaaaaaatgttggggatcttcagcagttccgtggtgtcgccgccggaggagctggtggctgccggcagcagaacgccgtcgccgaagacgacggcggggaagctgctgaaccggttcgtggagaacaaggcgtcggcggtgtcgtgcaggtgggagaacacgtgcnt

SEQ ID NO: 283987 - DNA, 253 bp, Glycine max
agaacttccttataaccaaaaccaacaacaactatgggcaagttatcagaagcactacgatgatcagggtcgcaaggtcgacgagtatggcaatgttgagaggcaaactgacgaatatggcaacccggttcatgccactagtgtcacttatgtagccaccaaaagtgttggtggctacaatgatgacgctaataagcaacatgatattactggtgtctatcccgagaaagacaccggtagacatcattttggt

SEQ ID NO: 283988 - DNA, 259 bp, Glycine max
aaagaaaggaaataattgatctttgaaaatgcagggaggaaagaaagctggagagtccatcaaggaaacagctgcaaacattggtgcttctgccaaggctggcatggagaaaaccaaggccactgtccaggagaaggcagaaagaatgacggcacgtgatccgatgcaaaaggagttggcaacccagaagaaagaggcaaagatgagccaggcagagctggacaagcaggcggcgcgtcacataacacggcggcgaaca

SEQ ID NO: 283989 - DNA, 258 bp, Glycine max
gcttgtttgacagtgttgctggcgtggagccgcaatcggaaactgtgtggaggcaggctgataaatatggagtcccgcgaatttgttttgtcaataaaatggaccgtcttggagcaaacttttatagaacaagagacatgatagtaacgaatttgggtgctaaaccacttgtaattcagttaccaattggttcagaagataactttaagggagttatagaccttgttaggaataaggctatagtttggtctggagaag

SEQ ID NO: 283990 - DNA, 252 bp, Glycine max
agaacttccttataaccaaaaccaacaacaactatggcaagttatcagaagcactacgatgatcagggtcgcaaggtcgacgagtatggcaatgttgagaggcaaactgacgaatatggcaacccggttcatgccactagtgtcacttatgtagccaccaaaagtgttggtggctacaatgatgacgctaataagcaacatgatattactggtgtctatcccgagaaagacaccggtagacatcattttggt

SEQ ID NO: 283991 - DNA, 267 bp, Glycine max
  unsure (1)..(267): unsure at all n locations
cctaagcttagaattagaaacaaagagaagaagaaaggaaagaattgatcgttgaaaatgcagggagganagaaagcgggagagtccattaaggaaacagctacaaacattggtgcttctgccaaggctggcatggagaagaccaaggccactgtccaagagaaggcagananaatgacagcacgtgatccggtgcaaaaggagttggcaacccaaaaganagaggcaaagatgaaccaggcggantggacaacaggcggcgcgtna

SEQ ID NO: 283992 - DNA, 159 bp, Glycine max
  unsure (1)..(159): unsure at all n locations
gttttgtagattcaacctcaatttgcagagttacgttctaatatatttacacaagactgataagagaaaatgtctctgattccaagtttcttcggtggccgaaggagcagtgttttcgaccctttctccctcgatgtgtgggaccccttcanggntttt

SEQ ID NO: 283993 - DNA, 271 bp, Glycine max
acctacctctttttcttctctctcaacaacttcaccttcttcctcctcgatcatgtctcacttcaagggcaagtaccatgatgagcttatcgccaatgctgcgtacattggcactcctggaaagggtattcttgctgctgatgagtcaacagggacaattggcaagcgtttggccagcatcagtgtagagaacattgaatccaacaggcgagctcttagggagctgcttttcactgctcctggtgttcttcaatattcagtggtgtcatcc

SEQ ID NO: 283994 - DNA, 157 bp, Glycine max
catcgttcgattcttctcctcctaaagatgcagatcttcgtgaaaactttgaccggtaagaccatcacccttgaggtggagtcctccgacaccatcgataacgtgaaagctaagattcaagacaaggaagggatcccacctgaccagcagagacttt

SEQ ID NO: 283995 - DNA, 268 bp, Glycine max
  unsure (1)..(268): unsure at all n locations
gnctcacttggatagccgtcagcttcttattaaatcaaatccnggggaagttgtgaagcctgattcatacaaggctataaatgatgagggaatgcccatgtatcagaggccattcatgaaggggaaactttacattcacttcactgtggagtttccagattctctaaaccctgatcaagttaaggccttggaggctgttctgccaccaaagccttcttcacaattgacagacatggagctggatgaatgtgagaaactacactccatg

SEQ ID NO: 283996 - DNA, 265 bp, Glycine max
  unsure (1)..(265): unsure at all n locations
ctgctgttcttgcgcgtgaacnagcctcaggtaagccaaaaccatggttaancataacaatgttatcccaanccggacacttccgtaagcactggcagaactatgtgaagacttggttcaatcagccagcacggaagacaaggagacgattggctcgtcagaagaaagctgtgaagatattccccagacctacggctgnacctctcaggcccattgtacatggtcaaactttgaaatacaacatgaaagtgaaggtggaaggggt

SEQ ID NO: 283997 - DNA, 264 bp, Glycine max
  unsure (1)..(264): unsure at all n locations
tttgaggncaaagccactgctggtgacacccatcttggaggtgcagattttgataacaggatggtgaaccactttgttcaagagttcaagaganagaacaagaaggacattagtggaaaccccagagcacttagaaggttgaggactgcttgtgagagggccaagagaacactttcatcgactggnncagnccacanttgaanttgattctctatangngggantgatttctatccactgttactcgtgncanttngaggagcc

SEQ ID NO: 283998 - DNA, 263 bp, Glycine max
ccgaaactagaagagagaagagaagtcctgggtacacgacttgcccgtttaattcgcttcccttacatgacctgtcgaaaacttaagaaggtcttaacctgcaatgactttgaccatgatgttgcatccaagcttgtactcgaagccctctttttcaaggctgaggctccacaccgccagcggatactagctgctgagtctgcttccttcaatcgactttttgtggagcgggcatacaagtatcgccctttaaggtggtggaa

SEQ ID NO: 283999 - DNA, 263 bp, Glycine max
  unsure (1)..(263): unsure at all n locations
ctccaatcacttcttcttgtgttgtcataacttcaacaacttctntcttctcgatctcacgatggctcatttggccctgtctcagatggctgtaactgttcctgttggcaacgatttgtctctcagaagatctgcagttaaggcccctaacttgaacttttgggataaatcatgggcaccagtatttactttggacttgaagccaaacaacccaagtttaagangtcgtcatgtggtatgcatgtccgtcaacaagcaagtgt

SEQ ID NO: 284000 - DNA, 154 bp, Glycine max
gaacgagggagctctttttctgccacaattcaaaggccatagtggtactagtgattaatgaaggagaagcaaacattgaacttgttggcattaaagaacaacaacagaggcagcaacaggaagagcaacctttggaagtgcggaaatatagagc

SEQ ID NO: 284001 - DNA, 254 bp, Glycine max
  unsure (1)..(254): unsure at all n locations
aatcaaagaaaggggtggtggctgcttcgaaagcttaataatttgtttattacccagaacatcatagttttcgcagcagcaaactaacaaattactcatatcatataataagatggcncgttctctctcgcaagccanacgtattggtgtccttgttgctcaatctatctccctaatnnccgttcatngggcgaggttacgcagtggcatccgatgtatcggtaagagttggattgggtatattgggcgaagga

SEQ ID NO: 284002 - DNA, 151 bp, Glycine max
  unsure (1)..(151): unsure at all n locations
aggcttctgaatatgctagtgatgcggctcagaggaccanagagtatgctggtgatgccaccaagagaagcaaagaggcttctgatcatgccaatgacatggctcggaagaccnnagactacgccagtgacactgctcagagaaccaangt

SEQ ID NO: 284003 - DNA, 258 bp, Glycine max
  unsure (1)..(258): unsure at all n locations
agaaatgaagagtactatcttctttgctctctttctagtttgtgccttcaccatctcatacctgccttcagccaccgctcagttcgtgctcgacactgatgatgatcctcttcaaaacggtggcacatactatatgttgccagttatgagaggaaagggcggtggaatanaagtagattcaactggaaaagaaatatgccctctcactgttgtgcaatcacccaatgagctcgataaggggattgactagtctttact

SEQ ID NO: 284004 - DNA, 131 bp, Glycine max
  unsure (1)..(131): unsure at all n locations
ccgagctancctagnnagcaagcaagcacagagatggaggcaaagcgaggccatgccctcatgtncctggcacgtgtttcactcttcctctgcgctctaaccctatccgctgctcatggaagcacnanggt

SEQ ID NO: 284005 - DNA, 257 bp, Glycine max
  unsure (1)..(257): unsure at all n locations
cttagaattagaaacaaagaaaagaagaaaggaaagaattgatcgttgaaaatgcagggaggaaagaaagcgggagantccattaaggaaacagctacaaacattggtgcttctgccaaggctggcatggagaagaccaaggccactgtccaagagaaggcagaaagaatgacagcacgtgatccggtgcaaaaggagttggcaacccaaaagaaagaggcaaagatgaaccaggcggantggacaagcaggcggcg

SEQ ID NO: 284006 - DNA, 254 bp, Glycine max
  unsure (1)..(254): unsure at all n locations
gggactactggtggctatgccggtgacactggtaggcaacatgggaacatcggtggcccttactatggaaccaacaccgcagacaccggtactggtcccagaagtggaaccacgggcggcaccggttatggaggcactggtggcactgattatggaacaactngtggcactggttatggaagtggaactgggtatggagtcaacactgggggtgcgcanattgaancaggntntaggaagaacatcgtcagcat

SEQ ID NO: 284007 - DNA, 254 bp, Glycine max
  unsure (1)..(254): unsure at all n locations
tagtatatggttatagtttatgtagaagaataaaaaatgtatgcatgtagtaatgtaagggtcttatatatgtggctgaaatataaaccataataaaggcagagatgttgtgccaatacatcatatgttgagagttgttgggacatgtaaagcctacgtggtggtggagcagggttgttcacttttggatttagaaattatttantaattnctttctaaaaaaanaaaaaaggggnncccccnatgttgnnccc

SEQ ID NO: 284008 - DNA, 258 bp, Glycine max
ggagagccttccgcgagtatttcatcggcgtgaaatcgattaaaatcgacgaaaagacagtgccgttaaacaccactttgttgtccataaacagcaaaggcgttggtggaaccaagattagttccgttaacccttacactgttttggaggattctatcttcaaagcggtgacggaggctttcgtgaaagcttcttctgctaggaacataacgagggtggcttctgtggcgccgtttgaggtgtgttcagtagggagaa

SEQ ID NO: 284009 - DNA, 252 bp, Glycine max
ggagatggattcttgttgacaaggtcctagacaagactggcatgaagggcactggtaagtggactgttcagcaagctgctgaattatcaattgctgctcccactattgaagcatcattggatgcaaggttcctgagtgggttgaaggaggaaagagttgaagctgcaaaggtctttaaatcaggtggtattggtgatatcgtgactgatcaacctgtagacaagaaaaaattggttgatatgttaggaaggc

SEQ ID NO: 284010 - DNA, 257 bp, Glycine max
gcaattgattgtggaaaccactagatgaagcactggcagacctggatgatgttattggttgttttaactactatgccgagcttgcagaaggattggacgcaaagcaaaatgctcctgtatcccttcctatggaaaccttcaagagttatgttctcaaggagcccatcggagttgttgcattaattactccatggaactatcctctattgatggctacatggaaagttgctcctgctctagctgtggttgtacagcaa

SEQ ID NO: 284011 - DNA, 260 bp, Glycine max
  unsure (1)..(260): unsure at all n locations
agcgttgccattctcatcctcctctgtntctctctctccaccattgccatggatccttnccaagctccggccatnncagcgccttcaattctcccttctggactacaaattctgntgctcctgtttggaacaacaactcctctttaaccgttggagctagaggtccaattctgcttgaggattatcatcttgtggagaagcttgcaaactttgacanggaacgtatcccagaacgtgttgtccatncaggggagctagtg

SEQ ID NO: 284012 - DNA, 114 bp, Glycine max
tcaaaaccaacaacaactatggcaagttatcaaaagcactacgatgatcagggtcgcaaggttgacgagtatggcaacgttgagaagcaaacccgacgaatacggcaaccctgt

SEQ ID NO: 284013 - DNA, 137 bp, Glycine max
  unsure (1)..(137): unsure at all n locations
ganaacctaagcttagaattagaaacaaagaaaagaaganaggaaaganttgatcgttgaaaatgcagggaggaaagaaagcgggagagtccattaaggaaacagctacaaacattggtgcttctgccaaggctggc

SEQ ID NO: 284014 - DNA, 266 bp, Glycine max
  unsure (1)..(266): unsure at all n locations
tggagctttccacaagcgcttgagtcnggaaaagatccttactgttagagagtttctcacacttctcaatctggatccagcaaagctgcgcagtatactgggcactggtatgtctgcaaagatgtgggaagtaactgtggagcatgctcgaacttgtgtacttgatacaacgaggcacgtgtacttcccttctaattctcaagaacctggtgtggtcttcaatgctgtgggacaagtgacaggactgctttctgaatgcgagtatg

SEQ ID NO: 284015 - DNA, 255 bp, Glycine max
  unsure (1)..(255): unsure at all n locations
ttttnataaaagctggcttcatttctaaatccaaaagtgaagaaacctgctccacaaccgcgtaggcttaagcccaataactctcaacatatgtattggcacaacatcaatgcctttattatgctttatattncagccatgtatatgagaagccttacattacaggcatacattttttattcctctatataatatactataaccatatgcnatatccnccaagtacatatgcagcaaatttattcaaagacaaca

SEQ ID NO: 284016 - DNA, 265 bp, Glycine max
  unsure (1)..(265): unsure at all n locations
ccttgctctatactacacagtacacacactagangantaatggcttccatcctccactactttttagccctactctactttcttgctcttttcttttcttcttatccgactcagtcacccctacaaaaccaataaaccttgttgttctacccgttcaaaatgatggttccacagggctccattggncccaacctccaaaaaagaacccctctaatgcaagtaccagtcctggtggacctcaatggacatcattgtgggttaatgt

SEQ ID NO: 284017 - DNA, 167 bp, Glycine max
  unsure (1)..(167): unsure at all n locations
accttcttgtggatccagagtttgcaanggaaataatcgatcgccaatctgcctggaggagagttgtttgccttgctatcaattctggtatcagcactccaggtatgtctgctagtctngcttatnttgacacttacagaagggaaaggtnnccagctaatttggtg

SEQ ID NO: 284018 - DNA, 264 bp, Glycine max
cttgccttaactgatgggtcccaaagcaagaagaacattaaactatcgggtaccttgggatacgtagcaccggagtatcttctagatggtaaattaagtgataaaagtgatgtctatgcttttggggttgtgctattggagctcctactaggaaggaagccagtagaaaaactggtaccagctcaatgccaatctattgtcacatgggccatgccacacctcacggacagatccaagcttccaagcattgtggatccagtgatt

SEQ ID NO: 284019 - DNA, 268 bp, Glycine max
  unsure (1)..(268): unsure at all n locations
gttaacattcagcccgatgacgtgtcggcaacgggggaagtaagggacatatcagccacaaagactcatgatatctacgattcctgccacggnnnnnnnnnnnnnnnnnnnnggttccaaggtcggagagtacgcgattacgcttctcagaaggccaaggaaacaaaagatgcaacgatggaaaaagctggagagtacacagattatncttcgcagaaagcgaaggaagcgaagaagacgaccatggagaagggtggagaatacaagg

SEQ ID NO: 284020 - DNA, 263 bp, Glycine max
  unsure (1)..(263): unsure at all n locations
canaggggctgctgaatatgctagtgatgcggctcagaggaccaaagagtatgctggtgatgctaccaagagaagcaaagaggcttctaatgatcatgccaatgacatggctcagaagaccaaagactacgccagtgacactgctcagagaaccaaggaaaaactccaagacattgcatctgaagctggtcaatacagtgcagagaaagctagagaaatgaaggatgcagcagcagagaaggcaagtgacatagcaaaggctg

SEQ ID NO: 284021 - DNA, 261 bp, Glycine max
cttgccttaactgatgggtcccaaagcaagaagaacattaaactatcgggtaccttgggatacgtagcaccggagtatcttctagatggtaaattaagtgataaaagtgatgtctatgcttttggggttgtgctattggagctcctactaggaaggaagccagtagaaaaactggtaccagctcaatgccaatctattgtcacatgggccatgccacacctcacggacagatccaagcttccaagcattgtggatccagtg

SEQ ID NO: 284022 - DNA, 263 bp, Glycine max
atttgggaaacaaatccaactcaaacattttgaagagtctgctgccagatagtggacctcctttggctccaacttgggttcttggacttgcaatcatctttgttcttcttcaactctttgccattggtctggtttattctcaagttgcttatgagataatggagaagaaatcagctgatgtgaggcaggggatgttttccaaaagaaatctcattcctcgcataattctccgaacaatttacatgatattctgtggggttttg

SEQ ID NO: 284023 - DNA, 262 bp, Glycine max
tcgttgtcaatttcgcctctttctttctcaactcccttagattctctccatcgggtcttcaaaaatgcggatgagctgcaatggatgtcgagttctcagaaaaggttgcagtgaaaattgcagcatcagaccctgtttacaatggatcaaaagcccagaatctcaagccaatgctactgtgtttcttgccaagttctacggccgtgctggtctaatgaacctggttaacgcaggccccgaacatcttcgtccagcgatcttt

SEQ ID NO: 284024 - DNA, 259 bp, Glycine max
  unsure (1)..(259): unsure at all n locations
gttcaatatcctagtataccttaataaataatttaagatactatgatgagagcacggttcccattactgttgctgggacttgttttcctggcttcagtttctgtctcattnggcattgcttactgggaaaaagagaaccccaaacacaacaagtgtctccagagttgcaatagcgagagagactcgtanaggaaccaagcatgccacgctcgtngcaacctccttaaggtggaganagangaatgtgaagaaggtgana

SEQ ID NO: 284025 - DNA, 144 bp, Glycine max
  unsure (1)..(144): unsure at all n locations
cggatgcantgcgtgtatgtgtnacaacactgatggactttatagtgctaagcagactgctattgtgagagcttctgatgattntnaccctcgtgatcntgcttcccataccatccatattnnnttcnngttgcatanaactca

SEQ ID NO: 284026 - DNA, 257 bp, Glycine max
  unsure (1)..(257): unsure at all n locations
cgggaggagctactccacagaggaggagtatttgcgccgtttggggattttcgcccagaacatggtcagagcggcggagatcaggcgctggacccnaccgccgtccacggcgtcacgcagttctccgatctcaccgaggacgagtttgagaagctctacactggcgtcaatggcggcttcccgtcatcgaataatgccgccggcggtattgcgccgccgttggaggtggacgggctgccggagaattttgattggag

SEQ ID NO: 284027 - DNA, 262 bp, Glycine max
  unsure (1)..(262): unsure at all n locations
tagcgatagtgataagagagataccaacaagaaaaganaaaaagaagagttgagtgttccctttgaagaaaagatggcatcccataggcaaagctatgaagctggtcaaactaagggccgaactgaggaaaagacgaaccagacgatgggcaatattggagagaaggctcaagctgcaaaggagaagacccaggaaatggcccaagctgcaaaggagaagacccaacaaacagcccaagctgccaaggacaagacttgcgac

SEQ ID NO: 284028 - DNA, 265 bp, Glycine max
cacacacaactactacaagtacttccttacaatcaaaaccaacaacaactatggcaagttatcaaaagcactacgatgatcagggtcgcaaggttgacgagtatggcaacgttgagaagcaaaccgacgaatacggcaaccctgttcatgctgctagtgtcacctatgtagccaccagaactgctgctggtggttacagtgatgacattaataagcaacatgataccaccaatgcctacggcgtagacactggtagacagcattc

SEQ ID NO: 284029 - DNA, 269 bp, Glycine max
tggttccacttgcaggtgcacaagtgctggcactgccacaggagggggtgatcacgtgacatggctcgtgcggagagcactgtggttgcaatccatgctcatgttcccaagattgcggctgctggaagtggttgcagatgtggcacagattgtgcatgtgcctcctgccgcacttagtatcacaccttaagggcttaaacttcacgttttattttatgtcttcaaatcttgaatacgttttctatatattagtcttgtttaaagttcaa

SEQ ID NO: 284030 - DNA, 258 bp, Glycine max
  unsure (1)..(258): unsure at all n locations
cgatagctgataagagagataccaacaagaaaaganaaaaagaagagttgagattccctttgaagaaaagatggcatcccataggcaaagctntgaagctggtcaaactaagggccgaactgaggaaaagacgaaccagacgatgggcaatattggagagaaggctcaagctgcaaaggagaagacccaggaaatggcccaagctgcaaaggagaagacccaacaaacagcccatgctgccaaggacaagacttgcga

SEQ ID NO: 284031 - DNA, 154 bp, Glycine max
  unsure (1)..(154): unsure at all n locations
gaaggttgnttcctcaggccaagagcttggnaaattagcctcacaaaagcaaagatcaaacaaacnaaggacgagannacgatgttgcttgaacttgcacnnggtttattggttttggctctgtttctgcacttgcgttccacncaacatacga

SEQ ID NO: 284032 - DNA, 255 bp, Glycine max
cttgaatcttcgttatccttctttttttctccttgaactcgaatattcactatggcagatgaggtggttctgctagatttctggccaagtccatttgggatgagggtcaggattgcacttgctgaaaagggtatcaaatatgagtccaaagaagaggacttgcagaacaagagccctttgctcctcaaaatgaacccggttcacaagaaaatcccggttctcatccacaatggcaaacccatttgtgaatctctc

SEQ ID NO: 284033 - DNA, 258 bp, Glycine max
cgctctgtttctgtctctgtgtttgcggctgaggattccgaacgagcgaccttcttcgtttctcgcaaagtttaagtcatcatgggtaaggaaaagactcacatcaacattgtcgtcattggacatgtcgactctgggaagtcaactaccactggtcatttgatctacaagcttggaggtattgacaagcgtgtgattgagaggttcgagaaggaggctgctgagatgaacaagaggtcattcaagtatgcctgggtg

SEQ ID NO: 284034 - DNA, 261 bp, Glycine max
  unsure (1)..(261): unsure at all n locations
gatatttcttggcatgtagaaaccacttattcttnctctctccaacccaacttcacaatctgagtgcacagctgaagnagcttatacatggagcaagggtaaagcaatctttgctagtggaagcccatttgatcctgttgaatatgaaggaaaactttttgttcctggacaggctaacaatgcttacatatttcctggttttggcttgggtttgatcatctctggtgcaattcgtgtgcgtgatgagatgctcttngcagc

SEQ ID NO: 284035 - DNA, 260 bp, Glycine max
  unsure (1)..(260): unsure at all n locations
ctggngtctatcccgaganagacaccggtagacatcattttngacgtggttacgacggtgacactaacaagcaacatgatgctactggtgtttatcccggaatagacattggtagagatcatgggactaccggtgtttatggcctaaacaccgacagacatcatggaacttctgggnngaatcccgggatagacacccataaccaacaacatgggactaccgttggttatgctggtgacactggaaggcagcatgggaat

SEQ ID NO: 284036 - DNA, 251 bp, Glycine max
  unsure (1)..(251): unsure at all n locations
cagggtttgggtttctcttcctcccttggagaaaaancaaganccaccgctgcgacgccgttcgtnccatttttgaggtgccgctgtcatgtttgggcgtggtggaccaaggaggagtgataactccaaatattntgntattctcgggntttccaaaaatgccagtgaagatgaaatcaagaaggcctataganaggcggctatgaagaaccatccagataagggaggagatcctgaaaagtttaaggagt

SEQ ID NO: 284037 - DNA, 252 bp, Glycine max
  unsure (1)..(252): unsure at all n locations
gattactntccctgtttccttgaaacagcctgggcatagggatggacccatccagtgtttcatcaagagagacaaatctaagctgacataccacctcttccttggccttagccctgccttgcttgttgaaaatggaaagtttcttctctctgcaaaacggacaagaagaacaacttgcacagagtatgttatatcaatggatgcagataacatatcgagatctagtagtacttatattggaaaactgaggtc

SEQ ID NO: 284038 - DNA, 251 bp, Glycine max
cgatagctgataagagagataccaacaagaaaagaaaaaaagaagagttgagattccctttgaagaaaagatggcatcccataggcaaagctatgaagctggtcaaactaagggccgaactgaggaaaagacgaaccagacgatgggcaatattggagagaaggctcaagctgcaaaggagaagacccaggaaatggcccaagctgcaaaggagaagacccaacaaacagcccaagctgccaaggacaaga

SEQ ID NO: 284039 - DNA, 214 bp, Glycine max
caaccattgccatggatccttacaagtccggccatccagcgccttcaattctcccttctggactacaaattctggtgctcctgtttggaacaacaactcctctttaaccgttggagctagaggtccaattctgcttgaggattatcatcttgtggagaagcttgcaaactttgacagggaacgtatcccagaacgtgttgtccatgccagggga

SEQ ID NO: 284040 - DNA, 288 bp, Glycine max
  unsure (1)..(288): unsure at all n locations
tggaaaattagcctcacaaaagcaaagatcaaacaaaccaaggacgagaacacgatgttgcttgaacttgcacttggtttattggttttggctctgtttctgcacttgcgtcccacacccactgcaaaanccaaaagcacttcgccatctcccaaacccaccaagcccaaagcctcgtcttcccttcataggacaccttcatctcttaaaagacaaacttctccactacgcactcatcgacctctccaaaaaacatggtccttattctctctctactttggctncatg

SEQ ID NO: 284041 - DNA, 281 bp, Glycine max
cacagaaatccaaggattatgcaactgacactgctcagaaatcaaaggactatgcaggtgatgctgctcagaaatcaaaggactacgcaggtgatgctgctcagaaaaccaaagactatgccagtgacactgcacagacatcaaaggactatgctggtgatgctgctcagaaatcaaagggctatgttggtgatgctgcacaaaagaccaaagaatatgttggtgatgcagcacagaagacaaaggttatgccactgacgcagcacagagacaagggtttt

SEQ ID NO: 284042 - DNA, 279 bp, Glycine max
  unsure (1)..(279): unsure at all n locations
tgtttcatgtgagggggattccccatcttgcattacttgatgaagctggnaatgttgtcactgaagatggagttgatgttatacgcgaatacggtgttgaaggatacccgtntacatcagcaaggatccaagagttgagagatcaagaagaggaagctaggaggaaccagtccgtgagatctctcttggtctctccatctcgggacttcgtaatatcatctgatggaaagaaaacacttgtctctgagcttgagggcaagacattggtctgtatttctg

SEQ ID NO: 284043 - DNA, 285 bp, Glycine max
  unsure (1)..(285): unsure at all n locations
caactactacaagtacttccttacaatcaaaaccaacaacaactatggcaagttnatcaaaagcactacgatgatcncggtcgcaaggttgacgagtatggcaacgttgagaagcaaaccgacgaatacggcaaccctgttcatgctgctagtgtcacctatgtagccaccagaactgctggctggtggttacagtgatgacattaataagcaacatgataccaccaatgcctacggcgtagacactggtagacagcattctagtggtggctacgatggtgacac

SEQ ID NO: 284044 - DNA, 284 bp, Glycine max
  unsure (1)..(284): unsure at all n locations
atcgagaatggggatcgaagccgggggagcggaggtgcggcgtcggcgcagaacgaagccatagaccggcgagagcgtctccggcgattggctctggagaccatagacctggcgaaggatccctatttcatgcgcaaccacctcggaagctacgaatgcaaactctgtctcactctccacaacaacgagggncnctacttggctcacactcagggaaagcgccaccaaaccaacttggccaaacgtgcagctcgcgaggccaaggactcccccgcgcagcccaa

SEQ ID NO: 284045 - DNA, 278 bp, Glycine max
  unsure (1)..(278): unsure at all n locations
tgacgatgtcgtttaggagtatcatccttgaaaggaagggatttgaggtgaagtttggatatagcatgagatccaggtcacagtcacacagtgatgctattgcccaggatagtttggtggtgcttgatggattgaagcagagttgttgggctaacatgccccctgagcttttgagggatgtgctcatgagaattgaggcctctgaggattcctggcctgcccggaaacatgtcgtcgcctgcgccggntntcccgcattggaganaatcatgagggaa

SEQ ID NO: 284046 - DNA, 182 bp, Glycine max
  unsure (1)..(182): unsure at all n locations
caaaccttggctctatactacacagtacacacacnagaagaatantggcttccatcctccactactttntagccctctctctttcttgcncttttctnttcttcttatccgantcagtcacccctacaaaaccaatanaccttgttgttctacccgttcaaaatgatggttccacagggcnc

SEQ ID NO: 284047 - DNA, 282 bp, Glycine max
  unsure (1)..(282): unsure at all n locations
attcaaatgagaactttgaaggccgaagaggggaaaggttccatgtgaacggcacttgcacatgggttagtcgatcctaagggacgggggaagcccgtctgatagcgctctgtgcgcgtactccgaaagggaatcgggttaaaattcccaaaacgacgccgtccaaaccctctccaagctcctcatgatgtccaactcacgcgccctccccctccactccctccacgcgcttcaagtgggatcncggtttacccgacaccttccacaaaaccctagtctcct

SEQ ID NO: 284048 - DNA, 278 bp, Glycine max
  unsure (1)..(278): unsure at all n locations
ctctacagaaggattctgaggttccttctaatgtgttgatgggtatcccagatggtacagctggttttcccctttcacctcttggagaagctnctctacgaatggatctgactgccctgcatgaggtgatggagaaaattgggtataaagatgacgagggtgcagcaactgagctttcattccaaatgtggacgaaccagatgcaggaaacattgaactcaaagaagaaaggggacgctgcttttcggcacaaggattttaaaactgcaattgatagc

SEQ ID NO: 284049 - DNA, 283 bp, Glycine max
  unsure (1)..(283): unsure at all n locations
angacggtgggtcatgggaagtcgaattccggtaagggagtgtgtaacaacttcacctggccgaattcaactagccccgaaaattngatggcgctaaagcncgcnaacctatacccggccgtcggggcaaggaccaagccccgatgagtaggagggcgcggcggtcgctgcaaaacccagggcgcgagccgggcggancggtcgtcggtgcagatcttggtggtagtagcaaatattcaaatgagaatttgaagncgaagaggggaaaggtccatgtgaacgg

SEQ ID NO: 284050 - DNA, 276 bp, Glycine max
  unsure (1)..(276): unsure at all n locations
gtggcatttaagtccagggaggaccaccgcaagcagattgagttggaggaggcgcgtaaagcagggcttgcgccggctgaactcgatgaagatggaaaggaaatcaatcctcacattccccagtatatgtcttctgcaccttggtatcttaatgctgagagacctagtttgaaacatcaaaggaaatggaaatccgacnccaattacaccanatcatggtatgatagaggtgctagaatctttcaggcagacaagtatcggaaaggtgcatgtgag

SEQ ID NO: 284051 - DNA, 272 bp, Glycine max
  unsure (1)..(272): unsure at all n locations
caattaccatggttgtntctcttctccattcagtctttgacttcttggctttcaagaatgatatccaattttggaataaaaataaatctatggaaggactctctgcaaagaccgttgttgtgagctttgcttgtcagcttattatcttcctntatctgcttgacaatgacncctcttggatgattcttgcaagctctggaattggttgtgttattgagttctggaaaattggaaaagccatgcgcatagagattgataggacaggaaggata

SEQ ID NO: 284052 - DNA, 246 bp, Glycine max
  unsure (1)..(246): unsure at all n locations
aagaagcagagggaatcctactttgttgatgctcagcctcagcagaaggaggaggggagtaagggaagaaagggtccttttccttcaatcttaggtgctctctactgaataactacgtaaatgtatgctgtaanagctcatcgtgagcgtggaatgtatctgcccatgtaactataaaaacttgagctcnacctatcttctatctactacgaataaataaatccagcatatgatgctgtgttttgt

SEQ ID NO: 284053 - DNA, 283 bp, Glycine max
  unsure (1)..(283): unsure at all n locations
ccaatcgtctgtacatgggaagcaaagancattggaaggaaaggtccttgncgagggccattgacgatgggcaannttggaccaagggatgaccccaagattcgctcccaagatcttgtcagaagagtttggttgggacaaggatctcgccaagaaaatctggtgctttggccctgagacccttggacccaacatggtggttgatatgtgtaagggagtccagtatttgaatgaaatcaaggattctgtggttgctggattccagtgggcatcaaaagaaggt

SEQ ID NO: 284054 - DNA, 275 bp, Glycine max
  unsure (1)..(275): unsure at all n locations
aaactaacaaattactcatatcattaatnagatggnccgttctctctcgcaagccaaacgtattggtgtncttgttgctcaatctatctccctaattcccgttcatcggcgaggttacgcagtgggcatccgatntatcggtaagagttggattgggtaatattgggcgaaggaatggaatcgtgggaggtgtagaagagaagcctgatacaagagatggttcaaaagcctactcaactgattgggccccagacccagtaacaggttactatagg

SEQ ID NO: 284055 - DNA, 276 bp, Glycine max
gagaagaagaaaagaagaacaaagatgcaatcctcaaaggagaagatgaaaaacatggcaagtgctgccaaggaacaagtcgacatctataaagccaaaatagacgagaaggcagagaaagcaacggcaagaacagaagaggagagggtgatagcccatgagcacgcaaaggcaaaggaagctggagcaaagatggagctgcatgaagctaaagcaaggcatgcagcagagaagctaagcgccaaccaatcacattatggtctccaccatggccac

SEQ ID NO: 284056 - DNA, 248 bp, Glycine max
  unsure (1)..(248): unsure at all n locations
ctttgcacaagccactcatgcgcgacaagactgtgctggtaaccggcggagnttnacatcggcacccacaccgttcttcagctcttgctcggaggttgcagaaccgtcgtcgtcgacaatngcngacaattcctccgaggtttctatccaccgagtcagggagcttgccggcgaatttgggaacaacctctcctttcacaaggtggacctacgggacagggatgcactagagcaaatttttgtttcca

SEQ ID NO: 284057 - DNA, 249 bp, Glycine max
  unsure (1)..(249): unsure at all n locations
caccatttgggttatgcttcaactccaacaagatcaatgcatatcctagcgtggaccttgtgatggacaagcccaatggtcctgtttggagaatctctggtgaggacttgatggtgncgggcacaacctggggtcacgtgtttgggtgttatgaatggaggaatgcaacctagagctgaaattaccttaggggcacgtcagttggnagagacctgggtgntgttcgatctngcaaggtcaanggttggg

SEQ ID NO: 284058 - DNA, 185 bp, Glycine max
  unsure (1)..(185): unsure at all n locations
gagnnatcatggcnttgcccaatcagcaaaccgtggattaccctagtttcaaactcgtcatcgtcggtgacggcggtacaggaaagacaacgttcgtgaaaaggcancttaccggtgaatcngagaaaaaatacgaaccgaccattggagtggaggttcacccattggatttcttcacaaactgc

SEQ ID NO: 284059 - DNA, 250 bp, Glycine max
  unsure (1)..(250): unsure at all n locations
gctaacttcaacacctttaattttctaaaagtaattcagcggctgaataccaagcggagaagatgagtcaggagcagccacggcgtcccaaaggccaaaaccccatcaaatacggcgacgtttttgtcgtctccggcgaccttgcacagaagcccgtcgcnccggaagatgctgccatgatgcaaagcgcggaaactcgagtgctcggacaaacccaacccggcggagcagcttccgtcatgcaatctgc

SEQ ID NO: 284060 - DNA, 252 bp, Glycine max; identical to SEQ ID NO: 135467

SEQ ID NO: 284061 - DNA, 240 bp, Glycine max
  unsure (1)..(240): unsure at all n locations
gatttgactctttgtgcgaggtgttatgttcgtggcaattatcgagttggnctgaactcttcggattttaggcgagtggagataagtgaggagacaaagacggattggaacgaaaaggagnccacgaatcttctggaagctattacgcattacagtgatgattggaagagggtttctcagcatgttcctggcagaactgagaaggagtgtgttgctcattttctgaagcttccttttgtg

SEQ ID NO: 284062 - DNA, 248 bp, Glycine max
  unsure (1)..(248): unsure at all n locations
aactaacaaattactcatatcanataataagatggcccgttcnctctcgcangccaaacgtattggtgtccttgttgctcaatctatctccctaattcccgttcatcggcgaggttacgcagtggcatccgatgtatnggtaagagttggattgggtaatattgggcgaaggaatggaatcgtgggaggtgtagaagagaagcctgatacaagagatggttcaaaagcctactcaactgattgggccc

SEQ ID NO: 284063 - DNA, 252 bp, Glycine max
  unsure (1)..(252): unsure at all n locations
acaacaatcaagacactcctgtngtngccgtttcnatnattgacaccaacagcttggngnaccagctcgaccagatgcctaggagatnctatctngctgggaaccaagagcaagagnttcnaacatatcagcagcagcagcanggaggttcccaaagccagaaaggagggcnnnnnnnnnnnnnnnnnnnnnnnagcaacatattgagtggcttcgcccctgaatncttgaaagaagcgttcggcgtgaaca

SEQ ID NO: 284064 - DNA, 248 bp, Glycine max
agaagaagaccaagacgaggatgaggagcaagacaaagagagccaagaaagtgaaggttctgagtctcaaagagaaccacgaagacataagaataagaacccttttcacttcaactctaaaaggttccaaactctcttcaaaaaccaatatggccacgttcgcgtcctccagaggttcaacaaacgctcccaacagcttcagaatctccgagactaccgcattttggagttcaactccaaacccaaca

SEQ ID NO: 284065 - DNA, 245 bp, Glycine max
  unsure (1)..(245): unsure at all n locations
gaaaaagtataacttagttggtgattntcgttggattgctgcccaaacaaatagggcacgtaatggggagctgtatcgctacatagcagacacacaaggtgctttcgttcagcctgctttctatgaagcttttggacttacagttgtggaggccatgaattgtggactccccacttntgctacttgccatggtggtccggctgagatcattgagcatggtatatcaggattccacattgatcctt

SEQ ID NO: 284066 - DNA, 247 bp, Glycine max
atctgtatttctgaattttgggaatagaaaaaccctaagcaaagcaaagcggtaaggatggggaacacggagaagctgatgaaccagatcatggaattgaaattcacttcgaaatcgctgcagcgtcaatcgcgtaagtgcgagaaggaggagaaatcggagaagctgaaggtgaagaaggcgatcgagaaaggcaacatggacggcgctcgaatctacgcggagaacgcgatccgtaagcgcacgg

SEQ ID NO: 284067 - DNA, 245 bp, Glycine max
  unsure (1)..(245): unsure at all n locations
gagcttgcacctattggtatcttctacantatnctctcannntgctctncntcttcttcatttncattatcaagatgtctttgctttcggatctcatcaacctcaatctctcagaatccacagaaaagatcgttgctgagtacatatgggttggtggatctggtatggacctcagaagcaaagccaggactcttcctgggccagtgagtgaccctgcaaagcttccaaagtggaactacgatggc

SEQ ID NO: 284068 - DNA, 249 bp, Glycine max
  unsure (1)..(249): unsure at all n locations
ctactttgagtcttcttgatccttctttttctccttgaactcaaacatggcagatgaggtggttctgctagatttctggccaagtccatttgggatgagggtcaggattgcacttgctgaaaagggtatcanatatgagtacaaagaagaggacttgaggaacaagagtcctcttctcctccaaatgaacccggttcacaagaagattccggttctcatccacaatggcaaacccatntgtgaatccct

SEQ ID NO: 284069 - DNA, 248 bp, Glycine max
  unsure (1)..(248): unsure at all n locations
attgatctttgaaaatgcagggaggaaagacggctggagagtccatcaaggaaacagctgcaaacattggtgcttctgccaaggctggcatggagaaaaccaaggccactgtccaggagaaggcagaaagaatgacggcacgtgatccgatgcaaaaggagttggcaacccagaagaaagaggcaaagatgagccaggcagagtggacaangcaggcggcgcgtcagcataaacacggcggcgaangg

SEQ ID NO: 284070 - DNA, 244 bp, Glycine max
  unsure (1)..(244): unsure at all n locations
tgtttttncttcaaatccattgtttcgtggaaatcccgaaatttaaccatgcttctccgaaccgccgcctccgccgcttctgcttcgtccctctccctcttcagccctacctccgaacctctccgttcggttcccgctcgtggattngtggttcgcgccgcgaaaggatccacgaaccaccgcgcnctaaccggcgtgatctttganccgttcgaagaggtgaagaaggagtcgatctcgttcc

SEQ ID NO: 284071 - DNA, 246 bp, Glycine max
  unsure (1)..(246): unsure at all n locations
ctggtgtctatcccgagaaagacaccggtagacatcattttnntcgtggttacgacggtgacactaacaagcaacatgatgctactggtgtttatcccggaatagacattggtagagatcatgggactaccggtgtttatggcctaaacaccgacagacatcatggaacttctgggntgaatcccgggatagacacccataaccaacaacatgggactaccgntggttatgctggtgacactggaa

SEQ ID NO: 284072 - DNA, 249 bp, Glycine max
  unsure (1)..(249): unsure at all n locations
agaagttnggcggtgatgtccgtatgactgatacccgtgcagatgaagctgagcgtggtattaccatcaagtctacaggtatctcactctactatgaaatgactgatgaagctctcaagagttttaagggagagcgcaatgggaatgagtatcttatcaatctcattgactcccctgggcacgttgacttctcatctgaggttactgctncactccgtattactgatggagctctagntgtggtcgatt

SEQ ID NO: 284073 - DNA, 250 bp, Glycine max
gaaaacctaagcttagaattagaaacaaagaaaagaagaaaggaaagaattgatcgttgaaaatgcagggaggaaagaaagcgggagagtccattaaggaaacagctacaaacattggtgcttctgccaaggctggcatggagaagaccaaggccactgtccaagagaaggcagaaagaatgacagcacgtgatccggtgcaaaaggagttggcaacccaaaagaaagaggcaaagatgaaccaggcggg

SEQ ID NO: 284074 - DNA, 262 bp, Glycine max
  unsure (1)..(262): unsure at all n locations
aaagcactacgatgatcagggtcgcaaggttgacgagtatggcaacgttgagaagcaaaccgacgaatacggcaaccctgttcatgctgctagtgtcacctatgtagccaccagaactgctgctggtggttacagtgntgacattaataagcaacatgataccaccaatgcctacggcgtagacactggtagacagcattctagtggtggctacgatggtgacactaataaacatcatggaactactggtggctataatgat

SEQ ID NO: 284075 - DNA, 247 bp, Glycine max
  unsure (1)..(247): unsure at all n locations
agttgcagnccgagctagcttngctagcaagcaagcacagagntggaggcaaagcgaggccatgccctcatgtgcttggcacgtgtttcactcttnctctgcgntctaaccctatccgctgctcacggaagcaccacggttnaanacntcgcgagaaatttgaaactcggggacaacgagcttctgcgcacggagaagaagttcaaggttttcatggagaattacgggaggagtactccacagagga

SEQ ID NO: 284076 - DNA, 251 bp, Glycine max
  unsure (1)..(251): unsure at all n locations
attacactttctatctcatttcgnaatctcattttcgtnacggttcaaacactctcatggcatcagacaagaagattaggatcggcatcaacggatttggaaggattggccgtttggtggccagggttgctcttcagaggaatgacgttgaacttgttgctgtcaacgatcctttcatcaccactgattacatgacatacatgttcaagtacgacaccgttcatgggcagtggaagcattttgatgtgaag

SEQ ID NO: 284077 - DNA, 261 bp, Glycine max
  unsure (1)..(261): unsure at all n locations
agaaaacctaagcttagaattagaaacaaagaaaagaagaaaggaaagaattgatcgttgaaaatgcagggaggaaagaaagcgggagagtccattaaggaaacagctacaaacattggtgcttctgccaaggctggcatggagaagaccaaggccactgtccaagagaaggcagaaagantgacagcacgtgatccggtgcaaaaggnnttggcaacccaaaaganagaggcaaagatgaaccaggcggantggacaagc

SEQ ID NO: 284078 - DNA, 249 bp, Glycine max
  unsure (1)..(249): unsure at all n locations
ganaggaaataattgatctttgaaaatgcagggaggaaagaaagctggagagtccatcaaggaaacagctngcaaacattggtgcttctgccaaggctggcatggagaaaaccaaggccactgtccaggagaaggcagaaagaatgacggcacgtgatccgatgcaaaaggagttggcaacccagaagaaagaggcaaagatgagccaggcagagctggacaagcaggcggcgcgtcanataacacggc

SEQ ID NO: 284079 - DNA, 252 bp, Glycine max
tcggcagaagcctttgtggaagggggggttcaagaagcttgtgatgatgcttgcagcatatgccttgaggatttttgcaaaagtgatcctgccactgtcactaattgcaagcatgagttccacctgcagtgcattcttgaatggtgtcagagaagctcccaatgtcctatgtgttggcaacctatcagcttgagggatactacaagtcaagaactgcttgaggcagtagagctggaaaggagcttgagggat

SEQ ID NO: 284080 - DNA, 251 bp, Glycine max
  unsure (1)..(251): unsure at all n locations
caagctcaaccaactcacccnagaccaaattgtnacagattcaggcccaaatccacattcagcagcaggcgnagcacgtggcccaaacccaaacccacctgggcccaaaacgcgtccccatgaagcacgctggcacggccgcgaaacccacgaagctctaccgcggggtgcggcaacggcattggggcaagtgggtcgctgaaatcagactcccaaagaaccgcacgcgcctctggctaggaacattcgac

SEQ ID NO: 284081 - DNA, 242 bp, Glycine max
  unsure (1)..(242): unsure at all n locations
cacacaactactacaantacntccttacaatcaaaaccacggaacaactatggcaagttatcaaaagcactacgatgatcagggtcgcaaggttgacgagtatggcaacgttgagaagcaaaccgacgaatacggcaaccctgttcatgctgctagtntcacctatgtagccaccagaactgctgctggtggttacagtgatgacattaataagcaacatgataccaccaatgcctacgggt

SEQ ID NO: 284082 - DNA, 242 bp, Glycine max
  unsure (1)..(242): unsure at all n locations
gaagcattgaaggttgtttcctcaggccaagatcttggatagtaattaacctcactcaaactcgggatcacaganaccaacaacagttcttgcactgaggtttcacgatgttgctggaacttgcacttggtttgtntgtgttagctttgtttctgcacttgcgtcccacaccaagtgcaaaanccaaaagcacttcgccacctcccanaccctccaagcccaaagcctcgtcttcccttcat

SEQ ID NO: 284083 - DNA, 254 bp, Glycine max
  unsure (1)..(254): unsure at all n locations
agaggagcaagaacttaagtacctggaatttgtgcaattcgcgaccatccaggccctgatgcgctgcgccatcctctactcctacgccaaggagcgcgcgggtcctctgaagcccggcgtcaacaccgtcgaggaggccgtgaagaccgtngtggctccggtctacgacaggttccacctcgtccccggcgaggtcctcaaatangccgatcgcaaggtcgccgaattggaccgccacgttccttccaacgtga

SEQ ID NO: 284084 - DNA, 237 bp, Glycine max
  unsure (1)..(237): unsure at all n locations
gcctctggtcgatggaacaatgtaggcaagggaagtcggcaaaatggatccgtaacctcnggaaaaggattggctctgagggctgggcacgggggtcccagtcccgaacccgtcggctgtcggtggactgctcgagctgcttccgcggcgagagctngtcgtcgcgtgccggtcgggggacggattgggaacnggcccttcggggcctcttccccgggcgtcgaacagtcaactcag

SEQ ID NO: 284085 - DNA, 238 bp, Glycine max
  unsure (1)..(238): unsure at all n locations
cttcgcagaaggcgaaggaaacgaaggacaagacaatggagaaggctggagagtacacagattatgcttcgcagaaggcgaaaganacaaaagatgcaacgaaggaaaaagctggagagtacacagattatgcttcgcagaaggcgaaggaaacgaaggacaagacaatggaaaaggctggagagtacactgattatncttcgcagaaggcgaaggaaacgaaggacaagacatggag

SEQ ID NO: 284086 - DNA, 242 bp, Glycine max
  unsure (1)..(242): unsure at all n locations
caactacaagaaagaacttccttataaccaaaaccaacaacaactatggcaagttatcagaagcactacgatgatcagggtcgcaaggtcgacgagtatggcaatgttgagaggcaaactgacgaatatggcaacccggttcatgccactagtgtcacttatgtngccaccaaaagtgttggtggctacaatgatgacgctaataagcaacatgatattactggtgtctatcccgagaaaga

SEQ ID NO: 284087 - DNA, 249 bp, Glycine max
  unsure (1)..(249): unsure at all n locations
atatactatgatgagagtgcngtttcctttgttggtgttgctgggaactgttttcctggcatcagtttgtgtctcattaaaggtgagagaggatgagaataaccctttctacttgagaagctctaacagcttccaaactctctttgaganccaaaacggtcgcattcgtctcctccagagattcaacaaacgctccncacnacttgngaacngncgagactaccggattgtccagtttcagtcaaaacc

SEQ ID NO: 284088 - DNA, 253 bp, Glycine max
  unsure (1)..(253): unsure at all n locations
tttgagaganaganagggaggagggagagtgttgacgctccatcaagatgggtatttctagggattccatgcacaagaggcgtnccactggtggcaagaagaaggcatggagaaagaagagaaagtatgagcttgggcgtcaggccgcaaacaccaagttatcaagcaacaaaactatccggaggattcgngttcgaggtggcaatgtnaantggagggcattgaggttggataccggcaattactctggggt

SEQ ID NO: 284089 - DNA, 241 bp, Glycine max
ggagaaggttctagaatggtcagggaactttttgttatggccagggaacatgctccatcaattatcttcatggacgaaattgacagtattggatctgctcggatggaatctggaagtggcaatggtgatagtgaggtacagcgtactatgctggaacttctcaatcagttggatggatttgaagcttcaaacaagatcaaggttttgatggccacaaatcggattgatatcctggatcaag

SEQ ID NO: 284090 - DNA, 240 bp, Glycine max
  unsure (1)..(240): unsure at all n locations
aaacataccgaatgagagcatcaaactcttcttcttcgatttccattgcgaangttnnnnnnnnnnnnnnnnnnnnnnnnnnnnncttcgctcttcgatcttcgtccggggactgctccgaataccaccaccaccactcgccgatggccacgatcggaggcttacacgactcccaaggctctcaaaacagcgtcgaaaccgaagccctcgctcgattcgccgtagacgaacacaacaaga

SEQ ID NO: 284091 - DNA, 238 bp, Glycine max
  unsure (1)..(238): unsure at all n locations
caactacaagaaagaanttccttataaccaaaaccaacaacaactatggcaagttatcagaagcactacgatgatcagggtcgcaaggtcgacgagtatggcaatgttgagaggcaaactgacgantatggcaacccggttcatgccactagtgtcacttatgtagccaccaaaagtgttggtggctacaatgatgacgctaataagcaacatgatattactggtgtctatcccgaga

SEQ ID NO: 284092 - DNA, 238 bp, Glycine max
  unsure (1)..(238): unsure at all n locations
ctagttctgccagggcccaacttatcccagatattattcgctgnctatagcagtggaggccggacaattgtatttaccgagacaaaagaatgtgcttctcagcttgcagggatcttgaatggagcaaaagctctccatggtgacatacagcaatcaacacgtgaggttactctgtctggctttaggtcagggaaattcatgacattagttgccacaaatgtggcagctcgaggtcttg

SEQ ID NO: 284093 - DNA, 238 bp, Glycine max
  unsure (1)..(238): unsure at all n locations
cccaaggccaagaaaacggcgtcgtccaagaagcccctctcccaccctcccttcgccgtgatgatagcagaggcgattgctagtntganaganaganccggttcgagccaatacgcgataaccaaatacatcgaagggaagcacaaggagttgcctgcaacctacaagaagcttgtcctcgttcatctcaaganatctgttgctgctggcaagcttgttaaggtgaaaaactccttta

SEQ ID NO: 284094 - DNA, 240 bp, Glycine max
  unsure (1)..(240): unsure at all n locations
ggtcaggattgcacttgctgaaaagggtatcgnatatgagtacaaagaagaggacttgaggaacaagagtcctcttctcttacaaatgaacccggttcacaagaagattccggttctcatccacaatggcaaacccatttccgaatccctcattgctgttcagtacattgaggaggtttggaatgacagaaatcccttgttgccttcagacccttaccagagagctcaggctagattctg

SEQ ID NO: 284095 - DNA, 241 bp, Glycine max
  unsure (1)..(241): unsure at all n locations
aacaaacttctttcactctttcgcttctgaatcttcaacaatggtgctcgaggcgacgatgatctgtatcgacaattctgaatggatgcgtaacggagattactctccttcncgatttcaagctcaagcagacgctgtcaatctcatatgcggtgctaaaacgcatctaatccggaaaatacagtgggagttctcacaatggctgggaaaggcgttcgtgttttggttacccctaccagtg

SEQ ID NO: 284096 - DNA, 259 bp, Glycine max
gcatttgctctatttgctgctgtttcttctagcatgcatgtatcaggtggccatgtcaacccagctgtgacatttggtgctctcattggaggcaggatttctgtgctccgtgccgtatactactggattgctcaaattctaggtgctatagtggctgccctcgtgctcagacttgtcactaataacatgagaccatcagggttccacgtggggcaaggtgttggagtaggacacatgcttatacttgagataatcatga

SEQ ID NO: 284097 - DNA, 261 bp, Glycine max
  unsure (1)..(261): unsure at all n locations
ataagtttcacggtggccatttctcgtgggtcactgagaatggtaaacaagaacgccaccttgttgcaactgtgggcaagtttagtgtgatatgggattttcagcaggtgaagaacagtgctcatgaatgttacaggnntcaagaagggctgaagagctgttactgttacaagataatattgaaggntgagtccattgtagaatcgcganttatgcacgacaaatttgctgttagtgactctccagangctccgttggtgg

SEQ ID NO: 284098 - DNA, 261 bp, Glycine max
  unsure (1)..(261): unsure at all n locations
aattacccgtgagtggtctggaatcaatacattcgcacctgctacccanactaagttgcttgaactcttgggaaaacttaaacaagagaatgtgaactccttaactatacttgtgatgggaaaangtggtgttggaaaatcttcaactgtgaactccatcattggggatagagtggtttcgattaatcctttccagtcggaagggccaagacccgtgattgtgtcgcgatnaagggctggttttacattgaacatcattga

SEQ ID NO: 284099 - DNA, 261 bp, Glycine max
  unsure (1)..(261): unsure at all n locations
aatcagttttttacttganttttcttcatccttctctgttctcctagaacttgattacttgaacattccctatgacagatgaggtggttcttctggatttctggccaagtccatttgggatgagggtcaggattgcacttgctgaaaagggtatcgaatatgagtacaaagaagaggacttgaggaacaagagtcctcttctcttacaaatgaacccggttcacaagaagattccggttctcatccacaatggcaaaccca

SEQ ID NO: 284100 - DNA, 260 bp, Glycine max
  unsure (1)..(260): unsure at all n locations
gatgatagcgcaagcttcaactagctcttcacgagtttgcatcttaggccaccatggctgagaaaggttctgctgagtatgaggagctgaggaagaatccccagaaggcttacttgaagactattacnccaaagtttcagacccttattgacctttctgttatagaaatcttgtcaaggcatgcatctgatgaggtgtaccttggggagagggacaatccaaattggacatctgatacaagagcattagaggcttttaaa

SEQ ID NO: 284101 - DNA, 260 bp, Glycine max
atctgctgtccgcacagcaaacaaggccaaagcaaaactcattgttgtactgacacgtggcgggtctacagctaagttggttgctaagtataggccagcggttccaatattatcggtggtggttccagtgttgagcacagactcatttgattggacatgcagtgatgagacgccagcaaggcacagcttgatatataggggcttgattccaatattgggggagggatccgccaaggctactgatgcagaatctacagagg

SEQ ID NO: 284102 - DNA, 253 bp, Glycine max
gcctgctggaaagaactcgtagaggtgggtcatggagacaagaaaaatgagccatggtggcctaagatgcaaactcgtgaagagctagttgaagcttgcgctatcatcatatggactgcttcagcacttcatgcagctgttaattttggacagtatccctatggaggtttaatcttaaaccgtccaactcttagtaggcgattcatgcctgagaaaggttctgctgagtatgaggagctgaggaagaatcccc

SEQ ID NO: 284103 - DNA, 261 bp, Glycine max
  unsure (1)..(261): unsure at all n locations
gagaaacaaagaaaggaaataattgatctttgaaaatgcagggaggaaagaaagctggagagtccatcaaggaaacagctgcaaacattggtgcttctgccaaggctggcatggagaaaaccaaggccactgtccaggagaaggcagaaagaatgacggcacgtgatccgatgcaaaaggagttggcaacccagaagaaagaggcaaagatgagccaggcagagtggacaagcaggcggcgcgtcanataacacggcggcg

SEQ ID NO: 284104 - DNA, 263 bp, Glycine max
caactactacaagtacttccttacaatcaaaaccaacaacaactatggcaagttatcaaaagcactacgatgatcagggtcgcaaggttgacgagtatggcaacgttgagaagcaaaccgacgaatacggcaaccctgttcatgctgctagtgtcacctatgtagccaccagaactgctgctggtggttacagtgatgacattaataagcaacatgataccaccatgcctacggcgtagacactggtagacagcattctagtg

SEQ ID NO: 284105 - DNA, 260 bp, Glycine max
gcacaacttggtctggggcatagttacagcagagcaaaggtgaagtttaatgttaaccgtgttgacaacatggttattcaagctatcttccttcttgatacacttgacaaggatgttaattcgttctccatgagagtcagagagtggtattcatggcactttcctgagctggtgaaaattgtaaatgataattatctgtatgccaaagttgcaaaatttattgaggataaggcaaagttggctgaagacaagattccagc

SEQ ID NO: 284106 - DNA, 258 bp, Glycine max
caattttgatcttcttaagaagctggttctcccggatggttcggttctccgtgctcagttacctggcaggccaactcgtgattctctatttgtggatccagccagagataggactagcttgctcaaaatatggaacctgaacaaatgctctggagttgttggtgtatttaactgccaaggtgctggatggtgcaagatagagaagaaaacccgcatccatgatacatctcctggtacatcaccgcctctgtctgcgcc

SEQ ID NO: 284107 - DNA, 259 bp, Glycine max; identical to SEQ ID NO: 135126

SEQ ID NO: 284108 - DNA, 261 bp, Glycine max
  unsure (1)..(261): unsure at all n locations
attatcttaccactttcaattccaaattcactcctcagaaattagaatggctagccaatcaaacactanatcagttcacgatttcacagttaaagatgccaggggaaatgatgttaatctcgccgattacaaaggaaaggtccttctccttgtcaatgttgcctcacaatgcggcttgactaattcaaactacacagagcttaatcaattgtntgaganatacaaaggganaggacttgaaattctggcattcccgtgcaa

SEQ ID NO: 284109 - DNA, 255 bp, Glycine max
  unsure (1)..(255): unsure at all n locations
catttctantctcattctccttctgttcaaacactctctctcatggcatcagataagaagattaggatcggcatcaacgggtttggaaggattggccgtttggtggccagggttgcccttcaaaggaatgatgttgaacttgttgctgtcaacgatcctttcatcaccactgattacatgacatacatgttcaagtacgacaccgttcatggccagtggaagcattttgatgtgaaggtgaaggactctaagacc

SEQ ID NO: 284110 - DNA, 258 bp, Glycine max
aaacagtaaagctaacttcaacacctttaattttctaaaagtaattcagcggctgaataccaagcggagaagatgagtcaggagcagccacggcgtcccaaaggccaaaaccccatcaaatacggcgacgtttttgtcgtctccggcgaccttgcacagaagcccgtcgcaccggaagatgctgccatgatgcaaagcgcggaaactcgagtgctcggacaaacccaacccggcggagcagcttccgtcatgcaatct

SEQ ID NO: 284111 - DNA, 255 bp, Glycine max
  unsure (1)..(255): unsure at all n locations
gcatttgctctatttgctgctgtttcttctagcatgcatgtntcaggtggccatgtcaacccagctgtgacatttggtgctctcattggaggcaggatttctgtgctccgtgccgtatactactggattgctcaaattctaggtgctatagtggctgccctcgtgctcagacttgtcactaataacatgagaccatcagggttccacgtggggcaaggtgttggagtaggacacatgcttatacttgagataatc

SEQ ID NO: 284112 - DNA, 256 bp, Glycine max
  unsure (1)..(256): unsure at all n locations
gaacgcattgccagaggaagtgattcagcacacttttaacctaaagagccagcaggccaggcaggtgaagaacaacaaccctttcagcttcctggttccacctcaggagtctcagaggagagctgtggcttagagagccctttttgcatgtgctaccacacttttgtccttttgggctctagctagtgctggtagcagtaaataagaatgantaaaagaaacaaaggcttagatgccctttgttaagtgtagaatg

SEQ ID NO: 284113 - DNA, 258 bp, Glycine max
  unsure (1)..(258): unsure at all n locations
cctaagcttagaattagaaacaaagaaaagaagaaaggaaagaattgatcgttgaaaatgcagggaggaaagaaagcgggagagtccattaaggaaacagctacaaacattggtgcttctgccaaggctggcatggagaagaccaaggccactgtccaagagaaggcagaaagaatgacagcacgtgatccggtgcaaaaggagttggcaacccaaaagaaagaggcaaagatgaaccaggcggantggacaagcagg

SEQ ID NO: 284114 - DNA, 260 bp, Glycine max
  unsure (1)..(260): unsure at all n locations
gagtgcggtttcctttgttggtgttgctgggaactgttttcctggcatcagtttgtgtctcattaaaggtgagagaggatgagaataaccctttctacttgagangctctaacagcttccaaactctctttgaganccaaaacggtcgcattcgtctcctccaganattcancaaacgctccccacaacttgaganttcttngagactaccggattgtccagtttcagtcanaacccaacacaatccttctcccccacca

SEQ ID NO: 284115 - DNA, 258 bp, Glycine max
  unsure (1)..(258): unsure at all n locations
tgacaggcnaagctaagatttggaacaatgtgtttgagaaagctgagaaggtagcaggcatcgaaagaggaagcataagggcaactgttctgatagaaacacttcctgcagtgnttcaaatgaatganattttgtntganctgaaggaccattcngtgggtttgaactgtgggcgttgggatngcattttcagttatgttaagaccttccaagctcatccagatcgctcttaccagatagggtcctagttggcatgac

SEQ ID NO: 284116 - DNA, 260 bp, Glycine max
  unsure (1)..(260): unsure at all n locations
gcctgagaaggagcttcagcgggctaagtcggaaattcttcgacgcaaattgaaaatnnagggatctatttcaaaatttggattcattgtgtgccgaaggaaagtttccagaatctttgtttgattctgcaggagagattgacagtgaggatatattttgtgcaaaatgccagtccaaagagttgagcactaataatgatataattctttgtgatggtgtttgtgaccgtggatttcaccagctctgtttggatcctccg

SEQ ID NO: 284117 - DNA, 254 bp, Glycine max
ccgcgttctccgcgtcttctgctgcttctgcttcgtctacctctccgaactgcaccgttttgaagaggaagcgacccgctaggttggacatacccgtttcctccctcacctttgcggttccgcccacgccctccgtggcggcgcgtgacgtggttgaggctgaggaagatgggtttggggtgtcctgcaagagagggaggagggagtatatggaggatcgttacacagctggggataatcttcgcggagaacac

SEQ ID NO: 284118 - DNA, 254 bp, Glycine max; identical to SEQ ID NO: 140245

SEQ ID NO: 284119 - DNA, 259 bp, Glycine max
  unsure (1)..(259): unsure at all n locations
cttcttctnttgcggctagggttttagcgcactnnttctagatttaaggaanatgggtaaggaaaaggttccacatcagtattgtggttattggccatgttgactctgggaagtccactaccactggccacntgatctacaagcttggaggcattgacaagcgtgttattgagagatttgagaaggaagctgctgagatgaacaagaggtctttcaagtatgcctgggtgcttgataagcttaaggctgagcgtgaaag

SEQ ID NO: 284120 - DNA, 254 bp, Glycine max
catcatccaactccaaagccttggtgtaatgttgaatcgcggtgctgtctatttggaaatgggaaagtatgaggaatgcataaaagattgtgacaaggctgttgaaagaggaagagaactaagatcagattttaagatgatagcaagagctttgacaaggaaaggaaatgccttggtgaaaatggcgaagtgctcgaaggattacgagtctgccattgagacttatcagaaagcactcactgagcaccgcaacc

SEQ ID NO: 284121 - DNA, 254 bp, Glycine max
  unsure (1)..(254): unsure at all n locations
acctctcaagtccaacctacccctttttcttctcccaccancttcnccgtcttcttcctcgatcatgtctcacttcaagggcaagtaccatgatnagcttattgccaatgctgcntncattggcactcctggaaagggtattcttgctgctgatgagtcaacagggncaattggcaagcgtttggccagcatcngtgtaganaatgttgaatccnacaggcgtgctcttagggagctgcttttcaccgctcccg

SEQ ID NO: 284122 - DNA, 250 bp, Glycine max
gcagagtttggaattgtgaagggaaccatgacaaccacgcattcctacactggagaccagaggcttttggatgcttcacaccgtgacttgagaagagccagggctgcagcacttaacattgtcccaaccagcacaggagctgccaaggccgtgtctctagtgttgccacagctgaagggcaagctcaatggaatagcgctccgtgtgcctacacccaatgtttcagttgttgaccttgttgtgaatgttg

SEQ ID NO: 284123 - DNA, 253 bp, Glycine max
  unsure (1)..(253): unsure at all n locations
caggaatgcttcctgagatacaggatactgggcttatggatcttcaacagcaacctatttgatgagtgatgtgaatggtccagtttgggctaaggccatggccaatattgcagcctttcttcaatcagtcattgcattgcatatatttgcaagtccantgtatgagtatttggataccaaatatgggatcaaagggagtgccctggctttcaagaacttgtcatttcgagtcttggtaagaggtggctacctg

SEQ ID NO: 284124 - DNA, 253 bp, Glycine max
gaaatggctgaagcacaactacgagaccagcatggcaaccctgtcccacttcaccgatcaatacggtaatccggttatcttaactgacgagcgcggtaatcccgtccaactcactggtgtcgctaccaccgctaccggcacagcaggttctgggtttgggtcctatggtaccggtgcttacggtggtggtgcaagtgcaaccaccgttgcagatcttttggcaacccaaccaaggagtggcagggaggctaga

SEQ ID NO: 284125 - DNA, 253 bp, Glycine max
  unsure (1)..(253): unsure at all n locations
aactaaagtgttactaaggtgagagagagagaagaaaaaaaaaatggtgaacttcatgttgatgattactgcagagcttgagaacctcacgaatctgcaaccccaagatggctgcgacgaccccaacttctcctacctcttcangttgaaatgcgggagatgcggagaactgagccagaaagaaacctgcgtcgtcttaaacgacaccgttcctctccccgttggcaagagcaccactcatctcattcaaang

SEQ ID NO: 284126 - DNA, 254 bp, Glycine max
  unsure (1)..(254): unsure at all n locations
ataagtttcacggtggccatttctcgtgggtcactgagaatggtaaacaagaacgccaccttgttgcaactgtgggcaagtttagtgtgatatgggattttcagcaggtgaagaacagtgctcatgaatgttacaggaatcaagaagggctgaagagctgttactgttacaagataatattgaaggntgagtccattgtagaatcgcgatttatgcacgacaaatttgctgttagtgactctccagaagctccg

SEQ ID NO: 284127 - DNA, 253 bp, Glycine max
ggaatcatgccctcaggctgaagacatcatcacagaacaagtcaagcttctctacaagcgccacaagaacactgctttctcctggctcaggaacatcttccatgactgtgctgttcagagttgtgatgcttcactgttgctggactccacaagaaggagcttgtctgagaaggaaacagatagaagctttgggttgagaaatttcaggtacattgagaccatcaaagaagctttggaaagagatgccctggag

SEQ ID NO: 284128 - DNA, 250 bp, Glycine max
  unsure (1)..(250): unsure at all n locations
cacaactactacaagtacttccttacaatcaaaaccancaacaactatggcaagttatcaaaagcactacgatgatcagggtcgcaaggttgacgagtatggcaacgttgagaagcaaaccgacgaatacggcaaccctgttcatgctgctagtgtcacctatgtagccaccagaactgctgctggtggttacagtgatgacattaataagcaacatgataccaccaatgcctacggcgtagacactggt

SEQ ID NO: 284129 - DNA, 250 bp, Glycine max
  unsure (1)..(250): unsure at all n locations
cttcctcacgcatttcctcgtttttttcttcccttttctctttctncggcgacgatctcagattccggccactcctctcgccggcgagcccttactcttccctcctccgtcgagccctctccgattcgaatcgttcccagcctcgcaccaccatgaatcccgaatacgattatttgttcaagcttttgctgattngagattctggtgtaggcaagtcatgtcttctcctgaggtttgctgatgattcata

SEQ ID NO: 284130 - DNA, 250 bp, Glycine max
gaggtatgatatgcattggacagaagcactttcagaaggcattggacctcctgcataatgttgtaactgctcccatgtctaccataaatgctatagctgttgaagcttacaaaaagtatatattggtttctctcattcgtcatggacagttctcaaccagtcttcctaagtattcttcttcgactgctcaaaggaacctgaagaacttttgtcagccttacgtcgaattggctaatagttatggcactgg

SEQ ID NO: 284131 - DNA, 250 bp, Glycine max; identical to SEQ ID NO: 134647

SEQ ID NO: 284132 - DNA, 250 bp, Glycine max
  unsure (1)..(250): unsure at all n locations
gtaaaatttatcacaatgatttggatgataacactgtaaaattatcacaatgatttggatgataacactgtaccagaaatacagaggactaaccttgcaaatgtagttttgactttaaaaagtcttggtattcatgacttattgaactttgattttatggatcatccacctgctgaggccttattgaaagctttggagcttctatttgcattaagtgcgttaaataagcttggtgaatnaataaggtggg

SEQ ID NO: 284133 - DNA, 278 bp, Glycine max
  unsure (1)..(278): unsure at all n locations
aagaacctaagtnagaaacaaagaaaggnaataattgatctttgaaaatgcagggaggaaagaaagctgganagtccatacaaggaaacagctgcaaacattggtgcttctgccaaggctggcatggagaaaaccaaggccactgtccaggagaaggcagaaagaatgacggcacgtgatccgatgcaaaaggagttggcaacccagaagaaagaggcaaagatgagccaggcagagctggacaagcaggcggcgcgtcanataacacggcggcgaag

SEQ ID NO: 284134 - DNA, 271 bp, Glycine max
gtttgagaaggaagctgctgagatgaacaagaggtctttcaagtatgcctgggtgctggacaaacttaaggctgagcgtgaaagaggaatcaccattgatattgctttgtggaagtttgaaacaacaaagtattattgcacagttattgatgcgcctggacatagggatttcattaagaatatgattactgggacatcccaagctgactgtgctgttcttatcattgattcgaccactggtggttttgaagctggtatttccaaggatgga

SEQ ID NO: 284135 - DNA, 190 bp, Glycine max
  unsure (1)..(190): unsure at all n locations
cacacacaactactacaagtacttccttacaatcaaaaccancaacaactatggcaagttatcaaaagcactacgatgatcagggtcgcaaggttgacgagtatggcaacgttgagaagcaaaccgacgaatacggcaaccctgttcatgctgctagtgtcacctatgtagccaccagaactgctgcngg

SEQ ID NO: 284136 - DNA, 269 bp, Glycine max
  unsure (1)..(269): unsure at all n locations
gacgtgaganagattgtgaagtagaaatcggtgcaagaaattctccactttatctaaaaaaattcggtgagtttgtgaagacaaaaaatcactagctactcaaaaatggccacagtaggaaggaacgttgcagctcctttgctgtttcttaacttgatcatgtattttattgttcttggctttgctagttggtgcctcaacaggttcatcaatggccaaacttaccaccctagttttggtggaaatggtgcaaccatgtttttcttaac

SEQ ID NO: 284137 - DNA, 270 bp, Glycine max
atcatgaacagcttcatcaacgacatcttcgagaagcttgctcaggaatcttccagacttgcccgctacaacaagaagcccaccatcacttcaagggagatccagaccgcggtcaggcttgtgctgcccggtgaactggccaagcacgccgtttctgagggtaccaaggccgtcaccaagttcaccagctcttgaacaaaatatcttaactttgtttacctcgctcttgttttgcttcatgtgtatctgttagatctagcgaccctatgt

SEQ ID NO: 284138 - DNA, 273 bp, Glycine max
  unsure (1)..(273): unsure at all n locations
gacgccgttcacggcagcgcagtggcacganctggagcaccaggccctcatcttcaagtacctgcaaggcgggtctctcggttccccctgacctccttctccccattcgcaagagcctccaattgatatcgtctcacccatcgatggggtattatgggaagaagatagaccctgaaccgggtcggtgcaggagaaccgatgggaaaaagtggaggtgttcgagggatgcacaccctgactccaagtactgcgaccgccatatgatacgacgtc

SEQ ID NO: 284139 - DNA, 273 bp, Glycine max
  unsure (1)..(273): unsure at all n locations
ggcnagccccactcaaccaccacacctctcctcgttcangctacccctttctgctcttcttctacctttcaagttttaaaagtataaagatggcagagacattcctatttacctcagagtcggtgaacgagggacaccctgacaagctctgcgaccaaatctccgatgctgtcctcgacgcttgcctcgagcaggacccagagagcaaggttgcntgcgaaacangcaccnaaaancaanttggtnatggtccttcggngattcacgaccang

SEQ ID NO: 284140 - DNA, 192 bp, Glycine max
  unsure (1)..(192): unsure at all n locations
aaaattagcctcacaaaancaaagatcaaacaaaccaaggacgagaacacgatgttncttgaacttgcacttggttaattggtnntggcnctgtntctgcacnngcntcccacacccacngcaanaaanagaagcactncgccatctcccaaacccancaagcccaaagccncgtcntcccnncataggana

SEQ ID NO: 284141 - DNA, 271 bp, Glycine max
  unsure (1)..(271): unsure at all n locations
ctggtcacccaggaacctggtttgctcagtttgagtataaganacaacattgcttatgggcgaganaccaccatggancaaattgaagaggctgcnaaaatagctcatgcacataccttnatcagctcantagataaaggttatgacacacaggtnggcagggctggtctagctttgacagaagagcagaanatanaactttctattgcaagagctgtgcttttaaatccatccattcttttgcttgatganggtactggtggacttgatt

SEQ ID NO: 284142 - DNA, 264 bp, Glycine max
gcacaacttggtctggggcatagttacagcagagcaaaggtgaagtttaatgttaaccgtgttgacaacatggttattcaagctatcttccttcttgatacacttgacaaggatgttaattcgttctccatgagagtcagagagtggtattcatggcactttcctgagctggtgaaaattgtaaatgataattatctgtatgccaaagttgcaaaatttattgaggataaggcaaagttggctgaagacaagattccagcctta

SEQ ID NO: 284143 - DNA, 265 bp, Glycine max
  unsure (1)..(265): unsure at all n locations
aacaaacntttntgtgggncaggtattctgtggaaatatctgctgtagtttacaaggattggntttttacagatcaagcattgcctgctgatcttataaaaagaggaatggcaattgaggatccatcgtgccctcatggcattcgccttgtgatagaggactacccntatgctgttgatggacttgagatatgggatgctatcaagacatgggtccatgaatacgtttncttgtactacaaatcagatgacacacttagagaagt

SEQ ID NO: 284144 - DNA, 262 bp, Glycine max
  unsure (1)..(262): unsure at all n locations
ccaaagaggttgccatcgagacttcatcatttagcaagtatgctgggttcactggagtccgattgggttggactgtggttccaaagcagttgctgttttctgatggatttcctgttgccaaggacttcaaccgtattgtatgcacttgtttcaatggtgcatcaaatatttcccaggcaggtggtctggcttgcctttcaccagacggtcttaaggctatgcgagatgttattggattctacaaaganaataccgacattat

SEQ ID NO: 284145 - DNA, 264 bp, Glycine max
  unsure (1)..(264): unsure at all n locations
cttgctcatcaagtccaagaaccaacctaccttttgcaatctcaattcaatggcgtcctctctcattgcgaaggcttgcctctcctcttccctcctctccaggnccctccttcgccccgccgcttccgcttcccancgctctttcaacaccaacgccatgcnccagtatgacaaccgcgcngncgaccacagcaccgacatngntcgtcactccggaggctntttccctagcactgcgngcnggacgatatttctcaggtagtt

SEQ ID NO: 284146 - DNA, 265 bp, Glycine max
  unsure (1)..(265): unsure at all n locations
ctggagagtgctccacagccacttttggagagccatgagctgtgtgccatgacattggagtacaggagggagtgtggcaggaacagtgtgctggattccctctctgatctctctggtgctgatgtaggaaacttggcagatggtggattttttgagtgcnagcacttgcttcgacttgatgatggtgctgagattgtgaggggtaggactcaatggaggcccaaacctttaagcagcaactttggtcatgttttgagtcaggttc

SEQ ID NO: 284147 - DNA, 273 bp, Glycine max
agaaatcaaagcgaaggaagaagaagaatttgttcgaggtggctcagttcttacctaactggggaatcggctaccacatggccaagactcactggaatgaggtttcttacgaaatcactaaaataaatctctacaaggatggaagacatggaaaagcatgggggattgcttttaaaaatggcttgccattagcagatgctcccaaaaagattagtggagttcacaagcgctgttggaggtacataccaaatgtagtaaaagcattagaaagcc

SEQ ID NO: 284148 - DNA, 268 bp, Glycine max
cgatgctgtgggacagccaatgcccattcaagctttggctacagcccttcgcaaatgctccaccagaacagcagaggactatgctcggtgaagctttatacccacttgtggatcagctggaacatgattctgctgcaaaggttacaggcatgcttctggagatggaccagcctgaagttttacatctgattgagtcaccagatgctctgaaggcaaaagttgctgaagccatggatgtgttgagaaatgttgctcaacagcaaaccaa

SEQ ID NO: 284149 - DNA, 261 bp, Glycine max
  unsure (1)..(261): unsure at all n locations
ggagaagggaaggtgagtagtaatggtcatggatgttgcaaatccagggccaggctatgcttccccactggaagccatttcctggtcccagagagtctctcatttatgtaacctctgtctacacagggaccggaatagagaagccagactatttggcgacagtggatgtggatccaaactctccaacttattccaaagtcatccataggcttcctgtncctgatttaggtgacgaattgcatcacacaggctggaattcat

SEQ ID NO: 284150 - DNA, 264 bp, Glycine max
ggctacgatggtgacactaataaacatcatggaactactggtggctataatgatgacaccaatagacatcatggaactaccggtgtctatggtatagacaccgataggcaacaacatgggactactggtggctatgccggtgacactggtaggcaacatgggaacatcggtggcccttactatggaaccaacaccgcagacaccggtactggtcccagaagtggaaccacgggcggcaccggttatggaggcatggtggcattg

SEQ ID NO: 284151 - DNA, 261 bp, Glycine max
gctctgatgggagttgctatgttggggagtttaagtttggggtcaagcatggacttggatgttaccatttcagaaacggagataggtatgctggagagtactttggagataaaatacatggctttggtgtctaccactttgccaatggccactattacgaaggttcatggcacgaaggtcgtaggcaaggttatggcatgtatatgtttcgaaatggtgatggaagatgtggtgaatgggatgctggcaacctcaaactct

SEQ ID NO: 284152 - DNA, 259 bp, Glycine max
  unsure (1)..(259): unsure at all n locations
aaaatgagtgccagatccaaaagctgaatgccctcaaaccggataaccgtatagagtcggaaggtgggttcattgagacctggaaccctaacaacaagccattccagtgtgccggtgtcgccctctctcgctgcacccttaaccgcaatgcccttcgtagaccttcctacaccaacggtcccnaggaaatctacatacaacaaggtaatggtatttttggcatgatattcccgggttgtcctagcattatcaagagccg

SEQ ID NO: 284153 - DNA, 256 bp, Glycine max
  unsure (1)..(256): unsure at all n locations
gttttagcgcagttcttctagatttaagnaagatgggtaaggaaaaggttcacatcngtattgtggtcattggccatgtcgactctgggaaatccactaccactggtcacntgatttacaagcttggaggcattgacaagcgtgttattgagaggtttgagaaggaagctgctgagatgaacaagaggtctttcaagtatgcctgggtgctggacaaacttaaggctgagcgtgaaagaggaatcaccattgatat

SEQ ID NO: 284154 - DNA, 257 bp, Glycine max
caactactacaagtacttccttacaatcaaaaccaacaacaactatggcaagttatcaaaagcactacgatgatcagggtcgcaaggttgacgagtatggcaacgttgagaagcaaaccgacgaatacggcaaccctgttcatgctgctagtgtcacctatgtagccaccagaactgctgctggtggttacagtgatgacattaataagcaacatgataccaccaatgcctacggcgtagacactggtagacagcat

SEQ ID NO: 284155 - DNA, 249 bp, Glycine max
  unsure (1)..(249): unsure at all n locations
catgtcggacgaagagcaccatttcgagtccaaggcagacgccggtgcctccaaaacctaccctcagcaagccggtaccattcgcaagaacggctacatcgtcatcaaaggacgcccctgcaaggttgtggaagtttcgacttccaaaactggnaagcacggtcacgccaagtgccactttgttggaattgatattttcactgccaagaaacttgaggatattgtgccctcttctcacaactgtgatgt

SEQ ID NO: 284156 - DNA, 258 bp, Glycine max
aaaggttttgtctgtgacattggatgattggtcagaggatgaaatagatgcaatgatggaagttgggggaaatgcttctgctaattcaatttatgaagcttatattcctgaaggatatacgaaacctggaccagatgctggtcatgagcagcgttcaaaattcatacggtcaaaatatgaattacaagaatttctgaaaccgagtttgcgcattgtgtctggaaaaagcagtctacaatcaagttctgcaaaaagtag

SEQ ID NO: 284157 - DNA, 261 bp, Glycine max
  unsure (1)..(261): unsure at all n locations
cttggatctgatctgctgaaacacgccacactcttcttaccatnggcctcctcgatcacttgtgggatgacaccgtcgccggtcctcgcccggagaacggccttggcaagctccgaaagcaccacaccttcgctttccgatctgcctccggcaaggaatcagacagcggaagcgtggaaatcgtacggtgaagatttgccggaggatgcggtaagantgacgcgaagtatcatgatcgtgaaaccacctggtggtaaccag

SEQ ID NO: 284158 - DNA, 262 bp, Glycine max
ggatgctgctagtttctgtctgaaagctattctccaccgtagccgcaagcttcgccgtttgaaacagtgcctcaaccatggcagaacaaacagagaaggcttttctgaagcaaccaaaagtgtttctatgctctaagaaaggtgggaagggaaagaggcctgggaaaggtgggaatcgcttttggaagtcaattgggcttggattcaagactcccagagatgccattgaaggaacatatattgacaagaagtgccccttcat

SEQ ID NO: 284159 - DNA, 276 bp, Glycine max
  unsure (1)..(276): unsure at all n locations
cacaacacggcagtnaagttattagaatctgtgttgtgttgtgttgtgttgaggatgccgaanaacaagggaaagggaggtaagaacaggaatngggtaaagancgaggcggacgacgagaagcgtgngctggtgttcaaggaggacgggcaggagtacgcgcaggtnctccggatgctggggaacgggcggtgcgnggcgatgtgcatcgacgggacgaataggctctgccacatccgcgggangatgcacaagaaggtgtgatcgcnnccggag

SEQ ID NO: 284160 - DNA, 187 bp, Glycine max
  unsure (1)..(187): unsure at all n locations
tgggtatcttctacaatatcctanagtgttttnnttctncttcatcancatgtctttacnttcagacctcatcaacctcaatctctcagaatccacagaaaagatcattgctgagtacatatgggttggtggatctgggtatgganctcagaagncaaagcnaggactcttcctgggcgagtgagtg

SEQ ID NO: 284161 - DNA, 276 bp, Glycine max
  unsure (1)..(276): unsure at all n locations
ccttgctctatactacacagtacacacactagaagaataatggcttccatcctccactactttttagccctctctcttncttgcttgnntttncttcttatccgactcagtcacccctacaaaaccaataaaccttgttgttctacccgttcaaaatgatggttccacagggctccattggnccaacctccaaaanagaacccctcnaatgcaagtacgagtcctgggggganctnagtggaaatnanntgtgggtgaactgtgagcagcagtant

SEQ ID NO: 284162 - DNA, 275 bp, Glycine max
  unsure (1)..(275): unsure at all n locations
gcaatactagcgatactgataagagagataccaacaagaaaagaaaaaaagaagagttgagattccctttgaagaaaagatggcatcccataggcaaagctatgaagctggtcaaactaagggccgaactgaggaaaagacgaaccagacgatgggcaatattggagagaaggctcaagctgcaaaggagaagacccaggaaatggcccaagctgcaaaggagaagacccaacaaacagcccaagctgccaaggacaagncttgcgacacttccc

SEQ ID NO: 284163 - DNA, 273 bp, Glycine max
  unsure (1)..(273): unsure at all n locations
ccggnaagcgcccacggttgggatatcgtcttctacattttcagcttcctcaagggcatttcgctcttcactctaattgtcttgattggcactggctggtccttcctcaaacccttccttcaggataaggaaaagaaggttctcatcattgtcatcccccttcaagtcattgccaacattgctcaggtcgttattgacgagagtgggccctttggccatgactgggttacctggaagcagatctncctccttgtngatgtcgtctgttgttgc

SEQ ID NO: 284164 - DNA, 270 bp, Glycine max
  unsure (1)..(270): unsure at all n locations
acaccttacacacttctttattnngggcctttcatataaatatcatggcttcgagggtggtttcggntttggtgatagcgatgatgttgtttgccatgaactgtaactgcactagtgttggccacatgccttcaaccaaagaggaaggtcacgattttcaggnggctaaagccaagacaacacaaactgcgaacaaggccatggaaactggtaaagatgggaaagaagccgcagagtcatggacagaatggnctaaagagaaactcactg

SEQ ID NO: 284165 - DNA, 181 bp, Glycine max
  unsure (1)..(181): unsure at all n locations
cnagtatncgatcctctgtcntctcgaagcnttcntngttcaacatattctcaccatctcagtcatgggcctgctatcttgttttaggtctaccgtcctgagaaaatgttccanaggaagctctggcatgtcaagattnnggtatnggnananntgtnagggagaantggatngcgtcngg

SEQ ID NO: 284166 - DNA, 276 bp, Glycine max
catcgccgcaagaaccgttctttggaaagtctgcaagctaatgtgcagaggctgaaaacatacaaggccaaattggttgtgttcccaagacgggcacagaaggttaaggctggtgattctactcccgaggagcttgcaaatgcaacgcaagtccagggttctttcttgcctattgtgagggagaagccaactgttgaacttgtaaaggttacagatgacatgaaggcttttaaagcttattacaagcttcgacttgaacgcacaaacaaacgccat

SEQ ID NO: 284167 - DNA, 273 bp, Glycine max
  unsure (1)..(273): unsure at all n locations
atnggtgaggccaatggcgtgctgagtgggcttggtgaggctgccaaagggacttttgctgagtttgagaattgtattaggaatgagacttccaagaagccggtcataaccggggatgttcatcctttgcctcgttatgttatgaattatctcaagttgcttgttgattatggtgaccctatggattcgcttctggagcttagtgaggaggatctctaatcggtttaaaantgaccttggtggtgtgggttngnagttagaggccatgtcgcc

SEQ ID NO: 284168 - DNA, 156 bp, Glycine max
tacgtacgtaagtacagtgtcttgtcatgtatgtggaggatatagtatatggttatagtttatgtagaagaataaaaaatgtatgcatgtagtaatgtaagggtcttatatatgtggctgaaatataaaccataataaaggcagagatgttgtgcc

SEQ ID NO: 284169 - DNA, 188 bp, Glycine max
  unsure (1)..(188): unsure at all n locations
gttggtttctacaacaccaccccaaatgccttcattctagctttgcgtgtagggctccaacgctcggagcagctatttcgttgggtttgggaggccaatagggccaacccagttggagaaaatgccactttttcacttggcactgatgggaaccttgtgttggnagatgcggangncnnaanttgcat

SEQ ID NO: 284170 - DNA, 186 bp, Glycine max
  unsure (1)..(186): unsure at all n locations
gaaagaacttccttntaaccnnaaccaacaacaactatggctcagttatcagaagcactacgatgatcagggtcgcaaggtcgacgagtatggcaangttgagaggcanactgacgaatatggcaacccggttcatgccactagtgtcacttatgtngccaccanaagtgttggtggctacaatga

SEQ ID NO: 284171 - DNA, 267 bp, Glycine max
  unsure (1)..(267): unsure at all n locations
gcacatacganactactctacaaacacaacaaaactctccaattctgaagattttcttatctcttgtctttgaaactagaagctccgtgattgatcaatggcgacaaaaganggcaaagccataggcatagacctcggcacgacctacagctgcgtgggcgtgtggcaaaacgaccgcgttgagatcatccccaacgaccaaggcaaccgaaccaccccctcctatgtcgccttcaccgacaccgagaggctcatcggagacgccgc

SEQ ID NO: 284172 - DNA, 266 bp, Glycine max
  unsure (1)..(266): unsure at all n locations
ggcgagtgcaagtngtgcggtatcatttagaaacagcttcggtgtgagtaaaccctcggatctngggttcttgagctctcgtctgaacggcctcagantctgcttccccaaattgccacccacacccctcactgcttctcccttccccacacccctccctatcgttgccaagagagtgtgtcccttcactggaaagaaatcaaacagggccaacaaagtatcattttcaaaccacaagacanagaaactgnngtttgtganccttc

SEQ ID NO: 284173 - DNA, 267 bp, Glycine max
  unsure (1)..(267): unsure at all n locations
cgcacacagttacgctcttcaaatcaatctcttctcaganatgggtgtggctcaaaacattcccgatgcggaggagggaaccttggagattggaatggaatacagaactgtgtctggagttgctgggccattggtcattcttgataaagttaagggacctaagtttcaagagattgttaatattcgcttgggagatggaactactcggcgtggacaagngctagaggttgatggtgaaaaggctgtggttcaggtctttaagggtac

SEQ ID NO: 284174 - DNA, 267 bp, Glycine max
  unsure (1)..(267): unsure at all n locations
ggttcctagctcgcactctctctacgcacgcctcaacatcccttctctgctccattcattatgtctccgtcgttggatcttccccccaagggtggcttcagttttgatctatgccgaagaaacgcaatgcttcanaacaagggcctcaaagccccaacctttctcaaaactggcaccactattgtcggtttagttttccaggatggtgtcattcttggggctgatactagggcaactgaaggacctatagtggctgataaaaactgt

SEQ ID NO: 284175 - DNA, 264 bp, Glycine max
cagtatccgtaaaagtggacaaggaaatatatttattaagaatttggatagggcaattgaccacaaggcattgcatgataccttttctacatttggaaatatcctttcgtgcaaggtagctacggattcatctgggcaatcaaaaggctatggctttgttcaatttgataatgaggaatctgcccaaaaagctatagagaagctgaatggtatgctgttgaatgataaacaagtgtacgtgggacccttccttcgcaagcaaga

SEQ ID NO: 284176 - DNA, 263 bp, Glycine max
  unsure (1)..(263): unsure at all n locations
gttggtttctacaacaccaccccaaatgccttcattctagctttgcgtgtagggctccaacgctcggagcagctatttcgttgggtttgggaggccaatagggccaacccagttggagaaaatgccactttttcacttggcactgatgggaaccttgtgttggcagatgctgatggcagaattgcatggcanactaacactgccaacaagggtgttgtggccttcaggcttctttcaaatggtaacatggtccttcttgatgc

SEQ ID NO: 284177 - DNA, 265 bp, Glycine max
caactactacaagtacttccttacaatcaaaaccaacaacaactatggcaagttatcaaaagcactacgatgatcagggtcgcaaggttgacgagtatggcaacgttgagaagcaaaccgacgaatacggcaaccctgttcatgctgctagtgtcacctatgtagccaccagaactgctgctggtggttacagtgatgacatgaataagcaacatgataccaccaatgcctacggcgtagacactggtagacagcattctagtgg

SEQ ID NO: 284178 - DNA, 266 bp, Glycine max
  unsure (1)..(266): unsure at all n locations
ggttcctcaatatttcatcataggntgtgcagaagtcttctatttcattggtcagttggagttcttctatgagcaagcccctgatgctatgcgaanttttgttctgctctctcacttaccactgttgcgcttggacagtacttgagctctctgcttgtgacaattgtgacaaagatcagcactaggaatggaagtccagggtggatacctgataatctaaactttggtcacatagattatttcttctggctattggcattgctaag

SEQ ID NO: 284179 - DNA, 263 bp, Glycine max
gagaaaatctgggaagaggcgcattcgggtgtacatggatggctgttttgatctgatgcattatggccatgccaatgcactcaggcaagcaaaggctctaggagatgaattggttgtgggtctagtgagtgatgaggaaatcgtggcaaataaaggaccacctgttttgtccatggaggagaggctggcccttgtcagtggattgaagtgggtggatgagacggaactgatgcatatgctgcagcaaagaaagctggtcgtac

SEQ ID NO: 284180 - DNA, 266 bp, Glycine max
  unsure (1)..(266): unsure at all n locations
gccgactcggagtgcttgangtggctggacgancagccacgtggaagtgttttgtttgtttccttcggaagcgctgggacactctcgagtgcacagatcaacgagctggctctcgggttggaaaaaagtgagcaacggtttctgtgggtggtgaagagcccaaacgaagaaatagccaacgcgacgtacttcagcggccgagagccaagcggatcccttgcagttcttaccggaagggttcgtggagaggaacaaaaggaagaggt

SEQ ID NO: 284181 - DNA, 263 bp, Glycine max
  unsure (1)..(263): unsure at all n locations
gaacaaacatttttgtggggaaggtattctgtggaaatatctgctgtantttacaaggattggntttntacagatcaagcattgcctgctgatcttataaaaagaggaatggcaattgaggatccatcgtgccctcatggcattcgccttgtgatagaggactacccttatgctgtngatggacttgagatatgggatgctatcaatacatgggtccatgaatacgtttncttgtactacnagtcagangacacacttagaga

SEQ ID NO: 284182 - DNA, 263 bp, Glycine max
gtggcgctggcgtggtgaagggtttcgaggggaaaacaaaatacggtacgttgaatggtggtgccaactttgttgcccctggttacaccaagggtgatggtcttggtgctgagattgttggcactttcgtccttgtttacaccgttttctccgccaccgatgccaaacgtaacgccagagactctcacgtccccattttggcacctttgcctattgggttcgcggtgttcttggttcacttggcaaccatccctatcaccggg

SEQ ID NO: 284183 - DNA, 262 bp, Glycine max
  unsure (1)..(262): unsure at all n locations
ggcagaggtgaagcttcatggattttggtatagtccctacactttgagggtggtatggaccttaaagttanaggatataccatatcaaaacatagaagaagaccgctacaataagagtcttcaacttcttgaatacaacccagtatacaagaaaactccagtgcttgtccataatggaaaacccttatgtgagtccatgcttattgttgaatacnttgatgagattgggtcanataattcattacttccngctgnnccctng

SEQ ID NO: 284184 - DNA, 260 bp, Glycine max
  unsure (1)..(260): unsure at all n locations
aaaggaaagaattgatcgttgaaaatgcagggaggaaagaaagcgggagagtccattaaggaaacagctacaaacattggtgcttctgccaaggctggcatggagaagaccaaggccactgtccaagagaaggcagaaagaatgacagcacgtgatccggtgcaaaaggagttggcaacccaaaaganagaggcaaagatgaaccaggcggagctggacaagcaggcggcgcgtcacataanacggcggccaaacatcng

SEQ ID NO: 284185 - DNA, 243 bp, Glycine max
  unsure (1)..(243): unsure at all n locations
tgcagctttgactttggtggaaactaaagactagtcaaaatggtgaagttcacagctgaagagctgcgtcgcattatggactataancataatatccgtaatatgtctgtcattgctcatgttgatcacggaaaatcaaccctgactgattctctngtggctgctgctggtantattgctcaagaagttgcaggtgatgtcctatggacggnnacccgttcagatgagtctgagcgtggtatt

SEQ ID NO: 284186 - DNA, 276 bp, Glycine max
  unsure (1)..(276): unsure at all n locations
tgaggaagttccagcacagtggtggatggatcaaggcactgctcnaggaagcggagaatgagaggatgcacctgatgaccatggtggagcttgtgaagcccagctggcacgagaggctgttgattttcaccgcgcagggtgttttcttcaacgccttcttcgtgttctacctcctctcgccaaaggggccacatagatttgttggttacttggaggaagaagctgtgatttcatacactcagcatttgaatgccatgagagtggnaaagttgaaaa

SEQ ID NO: 284187 - DNA, 269 bp, Glycine max
  unsure (1)..(269): unsure at all n locations
ttaaaatatattcaattttgcntttctctgcctaaaaggattgaaagatgggtcaagcattcggttgctaccaagtcgatcagtcaaatgtggctatcaaggagcattttggaaaatttgatgatgtcctagagcctggatgtcactgcctgccttggtgtcttgggtaccagattgctggtagtctgtcgctgcgagtgcagcaacttgatgttcgatgtgagacgaaaaccaaggacaatgtctttgtcaatgtggtgcatctgtgc

SEQ ID NO: 284188 - DNA, 269 bp, Glycine max
  unsure (1)..(269): unsure at all n locations
gatcatacatagtagtgttgnngggttncaaagatgcttgggggtcttctccataggggtcataagatnaaagggacagtggtgttgatgcgcaagaatgtgttggacgtgaatagcntaaccagcgttngggganttattggtcaaggtctcgacttagttngctcaacactcgatactcttactgccttcttgggccganccgngnctctccagcttattagtgctaccaaagctgatgccaacggaaaagggaaattggaanggct

SEQ ID NO: 284189 - DNA, 273 bp, Glycine max
  unsure (1)..(273): unsure at all n locations
aacaaaccaaggacgagaacacgatgttgcttgaacttgcacttggtttattggttttggctgctgtttctgcacttgcntcccacacccactgcaaacacaaaagcacttcgccatctcccaaacccaccaagcccaaagcctcgtcttcccttcataggacaccttcatctcttaaaagacaaacttctccactacgcactcatngacctctaccaaaaaacatggtcccttattctctctctactttggctccatgccancgttgttgcc

SEQ ID NO: 284190 - DNA, 269 bp, Glycine max
gttcttgcaatccacgccacacaagggtcgacccaacaacttgggcccattggtcacagtcccacaattcctcttttcttgtgcaccttccttccttgttcaaaagggtcttcctagaaacactcaaggtgtggctgggttaggccatgcaccaatttctcttccaaaccaatcgcttcccactttggcctacaacgccaattcaccattgcctttctcgctaaccctattcaaagggtgtataatatcggggatgcactaacaacatg

SEQ ID NO: 284191 - DNA, 269 bp, Glycine max
  unsure (1)..(269): unsure at all n locations
gaattgagaaggagaacaacttcaagcagcccggagagagatgcctgtcaggtgcccaagaccggtaagatagatttgctcgccgatgggttgatgctttatctgacccacgggtcacccatgagatccgcagtgtctggatatcatactggtctcaggctgaccgttctctaggccaaaagatagcttctgcatctcagcacgaggccaatnatttaatgttgttgccaactccagaatgattgttagagttgcagaggcaaagagta

SEQ ID NO: 284192 - DNA, 276 bp, Glycine max
  unsure (1)..(276): unsure at all n locations
gagggacaatccaaattggacatctgatacaagagcattagaggcttttaaaaggtttggaaataaactggcacaaattgagaataaactctcagagagaaacaacgatgagaaactgagaaaccgttgtggaccagttcaaatgccttatactctgcttttgccttctagtaaggaaggattaactttcagaggaattcccaacagtatctctatctgaagaggtttgnggttccttaagttttgtggctttgaataaaagannaagagaaggat

SEQ ID NO: 284193 - DNA, 274 bp, Glycine max
gctaacttcaacacctttaattttctaaaagtaattcagcggctgaataccaagcggagaagatgagtcaggagcagccacggcgtcccaaaggccaaaaccccatcaaatacggcgacgtttttgtcgtctccggcgaccttgcacagaagcccgtcgcaccggaagatgctgccatgatgcaaagcgcggaaactcgagtgctcggacaaacccaacccggcggagcagcttccgtcatgcatctgccgccaccaggaatgacagctggctt

SEQ ID NO: 284194 - DNA, 270 bp, Glycine max
  unsure (1)..(270): unsure at all n locations
tgcagagtttggaattgtgaagggaaccatgacaaccacgcattcctacactggnnncnagaggcttttggatgcttcacaccgtgacttgagaagagccagggctgcagcacttaacattgtcccaaccagcacaggagctgccaaggccgtgtctctagtgttgccacagcncaagggctagctcaatggaatagcgctccgtgtgcctacacccaatgtttcagttgttgaccttgttgtgaatgttgagaagaagggttatgctga

SEQ ID NO: 284195 - DNA, 268 bp, Glycine max
  unsure (1)..(268): unsure at all n locations
tcaaactagtagtattattnttccattccgttctacatataatcattcanctnngtgttttcacattcgaggatgaaatcaactcccctgcacctcctgctactctttacaaggccctagttacagatgccgacaacgtcatcccaaaggctcttgattccttcaagagtgttgaaaacgttgagggaaatggtggcccaggaaccatcaagaagatcactttccttgaggatggagaaaccaagtttgtgctgcacaaatagaaagc

SEQ ID NO: 284196 - DNA, 268 bp, Glycine max
  unsure (1)..(268): unsure at all n locations
agaaaacctaagcttagaattagaaacaaagaaaagaagaaaggaaagaattgatncgttgaaaatgcagggaggaaagaaagcgggagagtccattaaggaaacagctacaaacattggtgcttctgccaaggctggcatggagaagaccaaggccactgtccaagagaaggcagaaagaatgacagcacgtgatccggtgcaaaaggagttggcaacccaaaagaaagaggcaaagtgaaccaggcggantggcnaagcaggcggc

SEQ ID NO: 284197 - DNA, 276 bp, Glycine max
  unsure (1)..(276): unsure at all n locations
ggngtcagctcctgtcaagcctgaaacacaaaaggcacctgccacctattgaagctccagccttatctttagatgagctgaaggagaagacagacaactttggttcaaaggcattaataggtgaaggatcgtatggaagggtgtattatgcaaccttaaacaatggaaaagcagtggctgtgaaaaagcttgatgtttcatctgaacctgaatgcaaataatgagttttngcacccaggtttccatggtctcaagattgaagatggcattttgttg

SEQ ID NO: 284198 - DNA, 276 bp, Glycine max
  unsure (1)..(276): unsure at all n locations
ttcagttccaaacaaaacttatccacctctcatatactgattcagttctatacataaccatcgctcatntactatcaaaccaaaaattctcaaaatctcttcacctctgtgatgaccatggaatacagaaccttagaactcaacatcatatccgcaaaggacatcaagaacgttaacctcttctccaagatggacgtatacgccgtcgttacgctctccggcgaccctctccaccctcagggcgccaccacccacgtccacaaagngccggcagca

SEQ ID NO: 284199 - DNA, 266 bp, Glycine max
  unsure (1)..(266): unsure at all n locations
tacaagcancggccatccagcgcttcaattctcccttctggactacaaattcncncngctcctatttggaacaacaactcctctttaaccgntggagctagaggtccaattctgctgnaggattatcatcttgtggagaagcttgcaaattttgatagggaacgtatcccagaacgtgttgtaccatgccaggggcgctagtgcaaagggtttctttgaggtcacccatgacatttctcacctgacatgtgcagattccttcgagc

SEQ ID NO: 284200 - DNA, 269 bp, Glycine max
  unsure (1)..(269): unsure at all n locations
tgatctttgaaaatgcagggagganagaaagctggagagtccatcaaggaaacagctgcaaacattggtgcttctgccaaggctggcatggagaaaaccaaggccactgtgccaggagaaggcagaaagaatgacggcacgtgatccgatgcaaaaggagttggcaacccagaagaaagaggcaaagatgagccaggcagagctggacaagcaggcggcgcgttcagcataacacggcggcgaanaggctgccacggcaggcacatggg

SEQ ID NO: 284201 - DNA, 267 bp, Glycine max
  unsure (1)..(267): unsure at all n locations
actacttttaacgttattttacttattccgtgaatcggaagcncgggcactgcncctctttttggacccaaggtcggcttcggccggtcgatccgggcggaagacattgtcaggtggggagtttggctggggcggcacatctgttaaaagataacgcaggtgtcctaagatgagctcaacgagaacagaaatctcgtgtggaacaaaagggtaaaagctcgtttgattctgatttccagtacgaatacgaatgtgcaagcgtggcct

SEQ ID NO: 284202 - DNA, 265 bp, Glycine max
gacattaataagcaacatgataccaccaatgcctacggcgtagacactggtagacagcattctagtggtggctacgatggtgacattaataaacatcatggaactactggtggctataatgatgacaccaatagacatcatggaactaccggtgtctatggtatagacaccgataggcaacaacatgggactactggtggctatgccggtgacactggtaggcaacatgggaacatcggtggcccttatatggaccaacatcgca

SEQ ID NO: 284203 - DNA, 263 bp, Glycine max
  unsure (1)..(263): unsure at all n locations
agttgcagaccgagctagctagctagcaagcaancacagagatggangcaaagcgaggccatgccctgcatgtgcttggcacgtgtttcactncttcctcnncgctctaacnctatccgctgctcacggaagcaccacggttcaagacatcgcgagnaagttgaaactcggggacaacgagcttctgcgcacggagaagaagttcaaggttttcatggagaattacgggaggagctactccacagaggaggatatttgcgccg

SEQ ID NO: 284204 - DNA, 269 bp, Glycine max
  unsure (1)..(269): unsure at all n locations
attgaattctccagagagaagaagaaacttaatcgatcatcacttcacttcactaatacatccatggcagacgagacccagaacaagtatgagagctctgaggttgaggtccaggatcgtggtgtttttgactttctcggtaagaaaaaggatgaagaagacaagcctcatgcctcaggaggaggtcatcgccaccgagtttcaaaaagtcatgtnctncagaccaaggaganaacaagcacagcctacttagaaaagttcaccgatct

SEQ ID NO: 284205 - DNA, 262 bp, Glycine max
tgcttctcagcttgcagggatcttgaatggagcaaaagctctccatggtgacatacagcaatcaacacgtgaggttactctgtctggctttaggtctgggaaattcatgacattagttgccacaaatgtggcagctcgaggtcttgatatcaatgatgttcagttaattatccagtgtgaacccccacgagatgtagaagcctatatccatcgttctggacgcacaggaagagcaggtaatactggggttgtgtcatgcttt

SEQ ID NO: 284206 - DNA, 260 bp, Glycine max
  unsure (1)..(260): unsure at all n locations
cacacacaactacaanaaagaacttccttataaccaaaancaacaacaactatggcaagttatgcagaagcactacgatgatcagggtcgcaaggtcgacgagtatggcaatgttgagaggcaaactgacgaatatggcaacccggttcatgccactagtgtcacttatgtngccaccaaaagtgttggtggctacaatgatgacgctaataagcaacatgatattactggtgtctatcccgagaaagacccggtagaca

SEQ ID NO: 284207 - DNA, 255 bp, Glycine max
  unsure (1)..(255): unsure at all n locations
ggatcntgatatcagtgaaaaagttgctcttggtatggcttctaccaagccgggtactgaggttatgtatgatgagaggctgtttaaccaggataagggaattgcgtctgggtttgccactgatgatcagtacaatgtgtatgancatgggttgtttactgcgcagcccacactttccacattgtatnggccgaagaagaatattgatgatgagacttatggaggtgcggatgagcagttggagagattatgaag

SEQ ID NO: 284208 - DNA, 259 bp, Glycine max
  unsure (1)..(259): unsure at all n locations
gttncagacngagctagctagctagcaagcaagcacagagatggaggcanagcgnggccatgcnctcatntgcttggcacgtgtttcactcttcctctgcgctctaaccctatccgctgctcacggaagcnccacggttcaagacatcgcgagnaagttgaaactcggggacaacgagcttctgcgcacggngaagaagttcaaggttttcatggaganttacgggaggagctactccacagaggagnatnttgcgccg

SEQ ID NO: 284209 - DNA, 259 bp, Glycine max
gtcattcattcaaggttttctaccgggtattgcattgaagctttttctcatctttttgccaacaatattgatgatcatgtcaaaatttgaaggcttcggatctatttcatctctggagagaagagcagcatctagatactatcttttcaattttgtgaatatatttcttgggaacatacttaccgggacagcatttgaacagctggactctttcattcaccaagcagccaatgaatatcccataacaatggcactgcaa

SEQ ID NO: 284210 - DNA, 283 bp, Glycine max
  unsure (1)..(283): unsure at all n locations
agagattcaagtatttggacaaacccagatgaatttacacctgaaagattcntggaaagtgacattgattttaaaggccatgattttgagctaataccctttggagctggaagaaggatttgtcctgggttgcnattagcatctagaactctgcatgttgtgttggcatctcttctatacatctatgattggaagctcacncgatggacaaaagccagaagacatggatgtatctgagaaatatggaattaccttgcataaggcacaacctctactagttatt

SEQ ID NO: 284211 - DNA, 277 bp, Glycine max
gatcacattgaacaatggtgaaggctgtggccgttcttggcagcagtgagggtgtcactggaactattcacttcgttcaggagggaagtggtccaaccaccgtaactggatctcttgctggtcttaagcctggtctccatggtttccatgtccatgccttgggggacactaccaatggttgcctctcaactggatcacatttcaatcctaataacaaggagcaggtgcccctgaggatgagaatcgtcagctggtgatcttgggaatgttaatgtcg

SEQ ID NO: 284212 - DNA, 280 bp, Glycine max
  unsure (1)..(280): unsure at all n locations
aaaaaaaactttcgaaagattttatccaattgaaattttaaaaatgactgggataaacttaagaattcaattattgaaattgaataagtaaacaatttaattggattggtcgaatggtattaaaaaaatggagtactaactcccatttcttatttattattgaattaaccgatcaacttgctttgttatcgaacatttctttttcgatttcaaaaattttccggaaaaaattgaatctattnttatatgcgantcaatcctactacttctggtcctgagg

SEQ ID NO: 284213 - DNA, 270 bp, Glycine max
ctgtttttagatggagacctggtcgagatgcaagatataagaaaactgagatctgtcagacatgtagtaaattgaaaaatgtctgtcaagtgtgccttctggatcttgaatatggactaccggttcaagttcgagacacagctctcagtattgattccaatgatgccattccaaagagtgatgttaatagggagtattttgctgaagagcatgaccgcaggctagagctggtatagatatgaatcctcttatggtaaagtacgcccaaat

SEQ ID NO: 284214 - DNA, 278 bp, Glycine max
gatattttccacgatttggccttcaccccattaaccatcaccctgcagggagagtacaacgtgagagtcaactcaataagaatcaaccagcacagtgtgttcccactgaacaagatatcatccaccatcgtagggtcgacctctggaggaaccatgattagcacctcaactcctcacatggttctccagcaatccgtgtaccaggctttcactcaggtgtttgctcagcagctaccaaagcaagcacaggtgaatctgtggcaccatttgggttatgc

SEQ ID NO: 284215 - DNA, 278 bp, Glycine max
  unsure (1)..(278): unsure at all n locations
ggttgatagcatgcttgggcaacggaccagagttggggaacatgaagccatgaggaaaataaagaatgaatttatgacccattgggatggacttttgacaaagcaaggggagcggatccttgttcttgctgcaaccaataggcctttcgacttggatgaagctattattaggcgatttgaaagaaggattatggtaggactaccatctgtggacggnagggaaaagattttgaggactcttttggcaaaagaaaaggtggacaacgaacttgagttta

SEQ ID NO: 284216 - DNA, 283 bp, Glycine max
gggaatgggcctcgcaaggaggaaaaacgcggagaaaagggaagtgaagaggaagatgaggatgaggatgaggaacaagatgaacgtcaattcccattcccacgcccacctcatcagaaggaagagcgaaagcaagaggaagatgaggatgaggagcagcagcgagagagcgaagaaagtgaagattctgagttacgaagacataagaataagaacccttttctcttcggctctaacaggttcgaaactctcttcaaaaaccaatatggtcgcattcgcgtcc

SEQ ID NO: 284217 - DNA, 277 bp, Glycine max
agtgcatcagatggcatgagcagatttaaaacaagtaggatcaatcttgttgacctagctgggtcagaacggcaaaaatcaacaggtgccgcaggagagcgattgaaggaagctggcaatattaatagatcactctcacagcttgggaatctgattaatattcttgcggaagtctctcaaacaggaaagcagcggcatataccgtatagagattctaggttgacatttttgttgcaggagtctcttggaggaaatgcaaaattagcaatgatttgtg

SEQ ID NO: 284218 - DNA, 275 bp, Glycine max
  unsure (1)..(275): unsure at all n locations
anaaaaagaaaaatgcaggcagcaaagaaagccatagagacctttaaggaaaccgcagccaacattggcgcctctgccaagtctggcttggagaaaaccaaggccactatccaagagaagaatgagaagatgaatgcagaagatcaaactcaaatggatatggctaccaagaggaaagaagagaagatcaaccaggctgagatggagangcagcaggcccgtaagtactacgccgctgcaaaacaatacgccatggctgagcactggcaaagggc

SEQ ID NO: 284219 - DNA, 272 bp, Glycine max
  unsure (1)..(272): unsure at all n locations
gttgttcaatctaacaaacttctctatatcgtttactttttcnacacaacntangnncgnnnttattngnngncttcatataaatatcatggcttcgagggtggnttcggtattggngatagcgatgatgttgtttgcnatgaactgtaatggcactagtgttggccacatgccttcaaccaaagaggaaggtcacgattttcaggnggctaaagccaagacaacacaaactgcgaacaaggccatggaaactggtaaagatgggaaagaag

SEQ ID NO: 284220 - DNA, 277 bp, Glycine max
  unsure (1)..(277): unsure at all n locations
cttgcaacgattaacaatggcttcaaccgacaagtcaccggacccaacgccggcgaagggtccggatccaacttccggggaagccgatgagtgttggtcagcacgtgatcgacaagagtgcaatgatggtgcagtcgctggaccccattaagcagatgagtcagcacgtgtgctccttcgctatctacagccatgacatgtctcgccagatagagacacatcactactgnnncagactccaccagaacttcatacaatgtgctgtctatgattccga

SEQ ID NO: 284221 - DNA, 275 bp, Glycine max
gaaaggttctgatattcttgtggaagctatcccaatgttcattgaccagaatgttcagattatgattcttggaactggcaaaaaggtcatggagaagcaaatagagcaactagaggaaatttatcctgacaaggttagaggggtagcaaaattcaacggtcccttggctcacaagattattgctggagctgactttatagtgatcccaagtagatttgaaccctgtggtctagttcagttgcatgccatgccatatggaacggtgcccattgttt

SEQ ID NO: 284222 - DNA, 269 bp, Glycine max
acagatgccatgaaaaggactatatctggtatgctgggcttgcttccatctgatcagtttcacgttgtcattgaggccttgtgggaacccctttccaagttactaatttcttcaatgatgactgggtatacgctgcacaatgttgaatatagactttgtcttgagaaaaaccttgatatgtttgaaggagatatagagaagccaaaggcagaaagtacgaaagtggacttacaagggttgatgcatgacagtgtaaatgtaattgactt

SEQ ID NO: 284223 - DNA, 271 bp, Glycine max
  unsure (1)..(271): unsure at all n locations
gtgnnaagctcatgttatctacagctgagaattcaacttaaatggatttgaatgttcatatgtgtagtgcacaatcgcgcatgcacttgagaagacaaaatatccagattcagatttatattggaagaaatttgaggataaataccacttttcatgccaatttactgcngacctaatagccatgaattctgctgattttatcatcaccagtacataccaggagattgcnggaacgtaagtaccgttttcatgatatatatggttacttcag

SEQ ID NO: 284224 - DNA, 270 bp, Glycine max
  unsure (1)..(270): unsure at all n locations
ganaagcatgttagttgtgtctgaattcattggctgttccccatctttaagtggggcaatcagagtgaacccttggaatattgatgctgtagcagatgcaatggactctgcgctggaaatggctgattcggagaaagagcttagacatgaaaagcattatagatatgttagtactcatgatgttgggtactgggctcgaagcttcttgcaagatttggaaaggacttgtagtgatcagtgcgacgaaggtggtgggggattggtttggat

SEQ ID NO: 284225 - DNA, 271 bp, Glycine max
atgaaactgacatgaagaagctcgaagaagcagtgagatctgttcagatggaagggttgctttggggtgcatccaaacttgtacctgttgggtacggtatcaagaaactgcaaattatgcttactattgtggatgacctagtttctgttgatactcttattgaggaacatctcacagttgagcccatcaatgaatatgtccagagttgtgacattgtggccttcaataaaatataaactacaattgtgggacttggagatcaggcaacggg

SEQ ID NO: 284226 - DNA, 273 bp, Glycine max
  unsure (1)..(273): unsure at all n locations
ctangacttggcctgaggacattatacccttgcagcctgttggacgcttggtcctgaataaggacatagataatttctttgctgagaatgnncaacttgcattttgccctgccattgtggttcctggtgtatactactcagatgataagatgcttcaaaccaggatattctcttatgctgattcacaaaggcacagacttggaccaaactatctgcaacttcctgctaatgctcccaagtgtgctcaccacannaatcatcatgaaggtttca

SEQ ID NO: 284227 - DNA, 276 bp, Glycine max
  unsure (1)..(276): unsure at all n locations
cttgctctatactacacagtacagacacnagaagaatggtggcttccatcctccantactttntaggccnncntctctttcntgcnntnttctgttcttcttatccgactcagtcacncctacaaaaccaatagacnttgttgttctacccgttcaaaatganggttcnacagggcncnantgngncnannntccaaaaaagaaccnctctaatgcaagtaccagtcctggtggacctcaatggaaatnacttgtgggttaactgtgagcagcata

SEQ ID NO: 284228 - DNA, 276 bp, Glycine max
agaaataagggaaaaatggtgtcgctgaaactgcagaagcgcctctccgcaagcgtgctcaagtgcggcagaggaaaggtttggcttgaccccaatgaagtcaacgaaatctccatggccaattctcggcaaaacatcaggaagttggttaaggatgggtttatcatcaggaagccaaccaagattcactcccgcttcacgtgctcgtaggatgaaggaggcaaagaggaagggccgccactccggttatggtaaacgtaagggtacaagggaggc

SEQ ID NO: 284229 - DNA, 267 bp, Glycine max
  unsure (1)..(267): unsure at all n locations
ctcaagccttatatgnaatgacaacnngttacaatcttggtactctgagtcaatgcnatgtaggccatgntgatctcangcatgaaanttggtggccaacattnnacaatagtgaggatcntgtgtccattcnttccacatnganntggaatgcatctgcacaacatgctgcactcaactttggccagtaccctatggtggctatgnnnctaatcgaccancactgntgannaggttaataccagnagagggtgatccagnttatgc

SEQ ID NO: 284230 - DNA, 270 bp, Glycine max
ttgaaacagaaaatttgaagagtttgtttattgtgaaaaaaagaaaaatgcaggcagcaaagaaagccatagagacctttaaggaaaccgcagccaacattggcgcctctgccaagtctggcttggagaaaaccaaggccactatccaagagaagaatgagaagatgaatgcagaagatcaaactcaaatggatatggctaccaagaggaaagaagagaagatcaaccaggctgagatggagaagcagcaggcccgtaagtactacgccg

SEQ ID NO: 284231 - DNA, 267 bp, Glycine max
ccgggtggaactggtggcaagagcctggaggctcagcaacaccttgctgaaggaaggagcaagggagggcaaacaaggaaggaacagctgggtacagaagggtaccaggaaatgggacgcaaaggagggttgagcactgtggacaaatcaggagaagaacgtgctcaagaggaaggcattggcatcgatgagtccaagttcaggactggtaataacaagaaccagaatcagaacgaagaccaggataagtgataatgtaacaccctt

SEQ ID NO: 284232 - DNA, 270 bp, Glycine max
  unsure (1)..(270): unsure at all n locations
gatattttccacgatttggccttcaccccattaaccatcaccctgcagggagantacaacgtgagagtcaactcaataagaatcaaccagcacagtgtgttcccactgaacaagatatcatccacnatcgtagggtcgacctctggaggaaccatgattagcacctcaactcctcacatggttctccagcaatccgtgtaccaggctttcactcaggtgtttgctcagcagctaccaancgcaagcacaggtgaaatctgtggcaccatt

SEQ ID NO: 284233 - DNA, 266 bp, Glycine max
  unsure (1)..(266): unsure at all n locations
tattttccacgatttggccttcacnccattaaccatcaccctgcagggagagtanaacgtgagantcaantcaataagaatcaaccagcacagtgtgttcccactgaacaagatatcatccaccatcgtagggtcgacctctggaggaaccatgattagcacctcaactcctcacatggttctccagcaatccgtgtaccaggntttcactcaggtgtttgctcagcagctaccaaagcaagcacaggtgaaatctgtggcaccat

SEQ ID NO: 284234 - DNA, 264 bp, Glycine max
  unsure (1)..(264): unsure at all n locations
ctatgatgagagtgcggtttccnttgttggtgttgctgggaactgttttcctggcatcagnttgtgtctcattaaaggtgagagaggatgagaataancctttctacttgagangctctaacagcttccaaactctctttgagaaccaaaacggtcgcattcgtctcctccagagattcaacaaacgctcngcacaanttnagaaccttcgagactaccggattgtccatntcagncanaacccancacaatccttctngncca

SEQ ID NO: 284235 - DNA, 268 bp, Glycine max
acagatgccatgaaaaggactatatctggtatgctgggcttgcttccatctgatcagtttcacgttgtcattgaggccttgtgggaacccctttccaagttactaatttcttcaatgatgactgggtatacgctgcacaatgttgaatatagactttgtcttgagaaaaaccttgatatgtttgaaggagatatagagaagccaaaggcagaaagtacgaaagtggacttacaagggttgatgcatgacagtgtaaatgtattgactt

SEQ ID NO: 284236 - DNA, 265 bp, Glycine max
cacacaactactacaagtacttccttacaatcaaaaccaacaacaactatggcaagttatcaaaagcactacgatgatcagggtcgcaaggttgacgagtatggcaacgttgagaagcaaaccgacgaatacggcaaccctgttcatgctgctagtgtcacctatgtagccaccagaactgctgctggtggttacagtgatgacttaataagcaacatgataccaccaatgcctacgggtagacactggtagacagcttctagtg

SEQ ID NO: 284237 - DNA, 268 bp, Glycine max
  unsure (1)..(268): unsure at all n locations
cagancnactataagcacttncgtacaatcagnngnaacnnncactatggcaagtnatcanaagcactacgatgatcagggtcgcaangttgacgagtatggnaacgttgctgangnanaccgangantacggcaaccctgttcatgctgctagtgtcacctatgtagncaccagaantgctgctggtggttacngngatgacattaatnagcaacatgataccannnntgccnccggcgnagacactggtagacagcattctagtgg

SEQ ID NO: 284238 - DNA, 267 bp, Glycine max
tgaaagttctatttggctgctagcaaaggcttatgtagttgtgaatgactcgtgctatcatcaacttgtcagccattggttaaacactcatgcagttgttgagccattcatcatagcaacaaacaggcatctcagtgttgttcaccctatttataaactccttcaccctcactatcgtgacaccatgaacataaatggccttgctcggttatcactggtcaacgacggtggcgttatagaacaaacatttttgtggggaaggtattc

SEQ ID NO: 284239 - DNA, 269 bp, Glycine max
  unsure (1)..(269): unsure at all n locations
ggctctgtgttttcccatcagtacacatctttgcaccaagaagcatttgttagttttttgcgatcaaagtaaaatcaaagctatgcaggaggcgaactcggtggcgaaatcaacatgcaacgcagtggaagtatgcaactaaaggagaagaaggtgagggatttgatggtggacaagaagaggctagtggaggtgccgtacatggcgtcgctggcccacacancgcactacactggtagcgaacaaggttgtggcggtgccggtggctg

SEQ ID NO: 284240 - DNA, 265 bp, Glycine max
gttccagtccactcacccttgtgccgaattccatgcagcctctagggccatctctggtggaccagtttacgttagtgattgtgttggaaagcacaacttcaagttgctcaagagcctcgctttgcctgatgggacgattttgcgttgtcaacactatgcactccccacacgagactgtttgtttgaagaccccttgcatgatgggaagacaatgctcaaaatttggaatctcaacaaatatacaggtgttttgggtctatttaat

SEQ ID NO: 284241 - DNA, 264 bp, Glycine max
  unsure (1)..(264): unsure at all n locations
attcaatctgtcccatagagttgttttggcaccgctgaccagacagaggtcttacgacaacgtcccacaaccccatgccatcctctactactcccagagancttccaacggaggccttctcattactgaagccactggcgtctctgacacggctcaaggctatccgcaaacccctggcatatggnctaangaccatgttcaagcttggaaacccattgtcgatgccgtccacgccaaagggtttccaagcttgaacatggtctt

SEQ ID NO: 284242 - DNA, 263 bp, Glycine max
  unsure (1)..(263): unsure at all n locations
cgacgtgaganagattgtgaagtagaaatcggtgcaagaaattcntccactttatctaaaaaaattcggtgagtttgtgaagacaaaaaatcactagctactcaaaaatggccacagtaggaaggaacgttgcagctcctttgctgtttcttaacttgatcatgtattttattgttcttggctttgctagttggtgcctcaacaggttcatcaatggccaaacttaccaccctagtnttggtggaaatggtgcaaccatgttt

SEQ ID NO: 284243 - DNA, 262 bp, Glycine max
gttgcatcagccaaggatgttgttgactgtggatgagaacttgaagcctctgtcagtgcctgttcgtgttggacaagccgtagatgttgttggacaagcaggtcgtccgaaaacaatcactggctttcagacccactccacccctgttctcctggctgctggggacagggctgagctggcaacggaaaaatacattcccctatcaccaattcttgaaggtttcgtaattttgaaggagaatccagattacagggaagagtga

SEQ ID NO: 284244 - DNA, 261 bp, Glycine max
cacaatcatataatgtaccctttgagttccatgctatacgagctgctcccactgaggttgaactcaaagatcttgcacttcaacctggtgaagctattgctgtgaactttgccatgatgttgcaccatgttccagatgaatgtgtggatagtcgaaaccatcgtgaccggttggtgagattggcaaagtgcttgtctcctaagattgtgacacttgttgagcaagaatcacataccaacaacctcccatcttcccccgttt

SEQ ID NO: 284245 - DNA, 269 bp, Glycine max
gtctctcgaagcctctttctctctcttctagaagctatctgtgtttggtgttactaagtctccaacaagcaaagtacatggttgatttggaaatccaggtccccaccccattcgacccgtttgccgaggcgagagaatcggatgcccccggagcaaaggagtatgtgcatattcgaattcatcagaggaatgggaagaagagtctgaccacagtgcaagggctgaagaaggagttcagctacgagaagatcctcaaggacctcaagaag

SEQ ID NO: 284246 - DNA, 268 bp, Glycine max
gaatgttgctgttaaggatttgaagcgtggttatgttgcctcaaactcaaaggatgaccctgcaaaggaggctgctaacttcacagcccaagtcatcatcatgaaccaccctggtcagattggaaatggctatgcccctgtcctcgactgccacacttctcacattgctgtcaagtttgctgaactcatgaccaagattgacaggcgatccggcaaagagcttgagaaggagcccaagtttttgaagaacggtgatgctggttttgtt

SEQ ID NO: 284247 - DNA, 265 bp, Glycine max
  unsure (1)..(265): unsure at all n locations
agaaaaatgcaggcagcaaagaaagccatagagacctttaaggaaaccgcagccaacattggcgcctctgccaagtctggcttggagaaaaccaaggccactatccaagagaagaatgagaagatgaatgcagaagatcaantcaaatggatatggctaccaagaggaaagaagagaagatcaaccaggctgagatggagangcagcaggcccgtaagtactacgccgctgtaanacaatacgccatggctgagcacatggcaaa

SEQ ID NO: 284248 - DNA, 269 bp, Glycine max
  unsure (1)..(269): unsure at all n locations
gccttctttctttttttcaatttccaaatcacgaaactcancgaagatggagaaagcgatcaacagacagaagattttgcttcatcatctcaacccttcatcatccacccaccccaacgaatccatcctccctccatgcttcagcattgtggcgggggatagcgctgcttatcaaaggacatcgacattcggggacgatgttgtgatcgtggctgcttatcggactgctcatgcaaagctaaacgaggtggtttcaaagacactctnnc

SEQ ID NO: 284249 - DNA, 264 bp, Glycine max
cgttgccattctcatcctcttctttctctctctaccattgccatggatccctacaagcaccggccatccagcgccttcaattctcccttctggactacaaattctggtgctcctatttggaacaacaactcctctttaaccgtggagctagaggtccaattctgctggaggattatcatcttgtggagaagcttgcaaattttgatagggaacgtatcccagaacgtgttgtccatgccaggggcgctagtgcaaagggtttct

SEQ ID NO: 284250 - DNA, 266 bp, Glycine max
  unsure (1)..(266): unsure at all n locations
tgacagttgatcccaccnaaagaattacagttgaagaagcactagcccatccataccttganaaactgcatgatgtagctgatgaaccaatctgcatggagccattctcatttgattttgagcaacagcaattggatgaaggcaantaaaagagatgatctacagggaagcattagcactgaatcctgcagtatgcttaaagcagaagactcaaggacttgaagcaagcatataaggannaataataattcgtttttnattttttt

SEQ ID NO: 284251 - DNA, 265 bp, Glycine max
gctgcgtccaatctggttgctggaagcaacttggagggaacaattcagcaaattcttgatatgggtggagggagctgggacagggatactgttgtccgtgctcttcgagctgcctacaacaaccctgagagagctgttgaaatttgtatacaggtatccctgagcaagctgaagctccacttgtagcccgggcgcctgtaagtgctcaacctacaaatcctcctgctgatgctccacaaacagcacaacctgctgcagttacctc

SEQ ID NO: 284252 - DNA, 262 bp, Glycine max
gagttgtacgaggaatcctattggttgttttcaacgccactgcgggtgcatcttcctgtttctttttgtctaagttaattgggaggcctttggtttcttggttgtggcctgaaaagctaaggttcttccaagctgagattggaacgtagggataggctgctgaattacatgctttttctgaggataaccccgacattgccgaatctgttcatcaatttggcgtctcccatcgttgatgttcccttccatatattcttttcgg

SEQ ID NO: 284253 - DNA, 262 bp, Glycine max
  unsure (1)..(262): unsure at all n locations
gctgcgtccaatctggttgctggaagcaacttggagggaacaattnagcaaattcttgatatgggtggagggagctgggacagggatactgttgtccgtgctcttcgagctgcctacaacaaccctgagagagctgttgatatttgtatacaggtatccctgagcaagctgaagctccacttgtagcccgggcgcctgtaagtgctcaacctacaaatcctcctgctgatgctccacaaacagcacaacctgctgcagttac

SEQ ID NO: 284254 - DNA, 261 bp, Glycine max
  unsure (1)..(261): unsure at all n locations
attgttttgctacatgcatgcgcacataacnacactggtgtggatccaacccttgagcaatgggagcagattaggcagctaataagatcaaaagctttgttacctttctttgacagtgcttatcagggttttgctagtggaagtctagatgcagatgcccaacctgttcgtttgtttgttgctgatggaggcgaattgctggtagcacaaagctatgcaaagaatctgggtctttatggggaacgtgttggcgccttaagc

SEQ ID NO: 284255 - DNA, 262 bp, Glycine max
  unsure (1)..(262): unsure at all n locations
taaaattcttccaccaagttatgggttncccttgtgttgcttcttttctccctcttaggtctctcttctagttccagcatatcaactcatcgttccatattggaccttgacctaaccaagtttaccacacagaaacagggtcttcactgttccaactatggaagagtgagcatggacgtgtctaccataaccacgaagaagaggcaaagagacttgagattttcaagaataacttgaactatatcagggacatgaatgcaaa

SEQ ID NO: 284256 - DNA, 262 bp, Glycine max
  unsure (1)..(262): unsure at all n locations
gctgcgtccaatctggttgctggaagcaacttggagggaacnattcagcaaattcttgatatgggtggagggagctgggacagggatactgttgtccgtgctcttcgagctgcctacaacaaccctgagagagctgttgaatatttgtatacaggtatccctgagcaagctgaagctccacttgtagcccgggcgcctgtaagtgctcaacctacaaatcctcctgntgatgctccacaaacagnacaacctgctgcagtta

SEQ ID NO: 284257 - DNA, 260 bp, Glycine max
  unsure (1)..(260): unsure at all n locations
ctangacttggcctgaggacattatacccntgtancctgttgntcgcntngtcctgnatcacgaacataggataatttctttgctgagnntgnacnacttgcnttttgccctgcnattntggttcctggtgtatactactcaggtganaagatgcttcnaaccagganntctcttatgctgantcacnaangcnnagacttggaccaaactatctgcaacttcctgctaaagctcccaagtgtgctcaccacaacaatca

SEQ ID NO: 284258 - DNA, 260 bp, Glycine max
aaaccaacaacaactatggcaagttatcaaaagcactacgatgatcagggtcgcaaggttgacgagtatggcaacgttgagaagcaaaccgacgaatacggcaaccctgttcatgctgctagtgtcacctatgtagccaccagaactgctgctggtggttacagtgatgacattaataagcaacatgataccaccaatgcctacggcgtagacactggtagacagcattctagtggtggctacgatggtgacactaataa

SEQ ID NO: 284259 - DNA, 258 bp, Glycine max
  unsure (1)..(258): unsure at all n locations
gnagcatctagtacatggaacattatgacactgccttggcatatccagtgcagtcaccaggcgtgctaggaaaccaaccagacattgtcatggacagcttggctgtacatggccttggcctagtgcacccaaagaagttttcaatttctacaacgagctccatgcttacttagcttcttgtggagtagatggagtgaaggttgatgtgcagaacattattgagacccttggtgcgggacatggtggccgagtgtcatt

SEQ ID NO: 284260 - DNA, 261 bp, Glycine max
ctaagacttggcctgaggacattatacccttgcagcctgttggtcgcttggtcctgaataagaacatagataatttctttgctgagaatgaacaacttgcattttgccctgccattgtggttcctggtgtatactactcagatgataagatgcttcaaaccaggatattctcttatgctgattcacaaaggcacagacttggaccaaactatctgcaacttcctgctaatgctcccaagtgtgctcaccacaacaatcatc

SEQ ID NO: 284261 - DNA, 262 bp, Glycine max
  unsure (1)..(262): unsure at all n locations
ttgaaacagaaaatttgaagagtttgtttattgtgaaaaaaagaaaaatgcaggcagcaaagaaagccatagagacctttaaggaaaccgcagccaacattggcgcctctgccaagtctggcttggaganaaccaaggccactatccaagagnngantgagaagatgaatgcagaagntcaaactcaaatggatatggctaccaagaggaaagaagagaagatcaaccaggctgagatggagaagcagcaggcccgtaagtt

SEQ ID NO: 284262 - DNA, 258 bp, Glycine max
  unsure (1)..(258): unsure at all n locations
ctaagacttggcctgaggacattatacccttgcagcctgttggtcgcttggtcctgaataagcnccatagataatttctttgctgagaatgaacaacttgcattttgccctgccattgtggttcctggtgtatactactcagatgataagatgcttcaaaccaggatattctcttatgctgattcacaaaggcacagacttggaccaaactatctgcaacttcctgctaatgctcccaagtgtgctcaccacaacaat

SEQ ID NO: 284263 - DNA, 257 bp, Glycine max
caaatcaggagtttacaaacacatcacaggttatgaactaggtggtcatgcagtaaagctaattggatggggaacaactgaagatggggaggattattggcttcttgcaaatcagtggaacagagaatggggagagatggttacttcaagatccgaagagggacaaacgaatgtgggattgaagaggatgtaactgctggtttgccttccaccaaaaacctcgttcagagaggtgactgatatggatgctgacgctg

SEQ ID NO: 284264 - DNA, 258 bp, Glycine max
acttgttccttttgaaggttagaagtgctacaatacaaacaatggcagctactcaggaagatgtgaagcttttgggtattgtgggaagcccatttgtgtgcagggtccagattgcccttaagttgaagggagttgcatacaaatttttggaagaaaatttgggcaacaagagtgatttgcttctcaaatacaaccctgttcacaagaaggttccagtgtttgttcacaatgagaagcccatagcagagtctcttgtga

SEQ ID NO: 284265 - DNA, 255 bp, Glycine max
  unsure (1)..(255): unsure at all n locations
gcggggctacccgctgagtttaagcatatcaataagcganggaaacgaaggacaagacaatggaganggctggagagtacacagattatgcttcgcagaaggcgaaagangccaaggacaagacaatggagaaggaggggaatatanagactatgctgcagagaaggctaaagaaggnnaagatgctactgtgaatangatgggagagtataaagattatacggcggagaaggctaaagaggggaangatacgnc

SEQ ID NO: 284266 - DNA, 254 bp, Glycine max
  unsure (1)..(254): unsure at all n locations
cacggcnaccgtattgagctagccaaagcttattacaaagcgctcactgcttcggtgaagaagcatttcaaaggcaatggggtcatnnnatnacatggagcattgtaatgattctttntccttggtaccgaagccatagcccttgggcgcgtaggagatgatttttggtgcactgatccctctggagatccaaatggcacgtattngctccaagggtgtcacatggtgcactgngcctacaacagcttgnggat

SEQ ID NO: 284267 - DNA, 253 bp, Glycine max
  unsure (1)..(253): unsure at all n locations
aaaatggctgcagagatggagagggagtcattgataactgaagctcctaatgcaccagttactgcacagagaagggtcagaaatgacttagaaaattctctaccanaaccatacttgccaagagcattgaaagtnntgatacgggtcacccaaatggaacagcaggccacaggcaccacaacttatctgttcttcagcagcattgtgctttttttgatcaagatgacaatggaatcattacccttgggaaatt

SEQ ID NO: 284268 - DNA, 134 bp, Glycine max
  unsure (1)..(134): unsure at all n locations
tgatagaatagaagtaactttttctctcttctctgcagtggtggtaatttattttccaatggcttcagcancncggacgncgaattcctccgttccgccgccgcnaatccacacctcacgaacaangctgagcc

SEQ ID NO: 284269 - DNA, 252 bp, Glycine max
  unsure (1)..(252): unsure at all n locations
gtgcggtttcctttgttggtgttgctgggaactgttttcctgggcatcagtttgtgtctcattaaaggtgagagaggatgagaataaccctttctacttgagaagctctaacagcttccaaactctctttggaaccaaaacggtcgcattcgtctcctccagagattcaacaaacgtccccacaacttgagaacnttcgagactaccggattgtccagtttcagtcaaaacccaacacaatccttctccccc

SEQ ID NO: 284270 - DNA, 253 bp, Glycine max
agaagacgttcttgcaatccacgccacacaagggtcgacccaacaacttggcccattggtcacagtcccacaattcctcttttcttgtgcaccttccttccttgttcaaaagggtcttcctagaaacactcaggtgtggctgggttaggccatgcaccaatttctcttccaaaccaactcgcttcccactttggcctacaacgccaattcaccacttgcctttctcgctaccctacttcaaagggtgctataa

SEQ ID NO: 284271 - DNA, 253 bp, Glycine max
caaccctcaagctggtagcatcacaaccgccaccagccttgacttcccagccctctggcttctcaaacttcagtgcccagtatggatcactccgcaagaatgctatgttcgtgccacactacaccctgaacggaacagcataatatacgcattgaatgggcgggcattggtacaagtggtgaattgcaatggtgagagagtgtttgatggagagctgcaagagggaggggtgctgatcgttccacaaaatttg

SEQ ID NO: 284272 - DNA, 289 bp, Glycine max
  unsure (1)..(289): unsure at all n locations
ctctaaccctatccgctgctcacggaagcaccacggttcaagacatcgcgaganagttgaaactcggggacaacgagcttctgcgcacggagaagaagttcaaggttttcatggagaattacgggaggagctactccacagaggaggagtatttgcgccgtttggggattttcgcccagacnttggtcagagcggcggagcatcaggcgctggaccccaccgccgtccacggcgtcacgcagttctccgatctcaccgaggacgagtttgagaagctctacactggcgt

SEQ ID NO: 284273 - DNA, 282 bp, Glycine max
  unsure (1)..(282): unsure at all n locations
caactacaagaaagaacttccttataaccaaaaccaacaacaactatggcaagttatcagaagcactacgatgatcagggtcgcaaggtcgacgagtatggcaatgttgagaggcaaactgacgaatatggcaacccggttcatgccactagtgtcacttatgtngccaccanaagtgttggtggctacaatgatgacgctaataagcaacatgatattactggtgtctatcccgagaaagacaccggtagacatcatttggtcgtggtacganggtgncca

SEQ ID NO: 284274 - DNA, 281 bp, Glycine max
  unsure (1)..(281): unsure at all n locations
agcagcgtaanttcgccttatagattgggggcttgcagagttctatcatcctggganagaatataatgttcgcgtggcatcaagatatttcaaaggtcctgagcttcttgttgatcttcaagactatgattactctctagatttatggagtcttggttgtatgtttgctgggatgatattccgtaaggagccattcttttatggacatgataactatgatcaactggtcaaaatagctaaggtacttgggacagagnccatgggcnaagttccattatgta

SEQ ID NO: 284275 - DNA, 275 bp, Glycine max
gaattttcttcatccttctctgttctcctagaacttgattacttgaacattccctatgacagatgaggtggttcttctggatttctggccaagtccatttgggatgagggtcaggattgcacttgctgaaaagggtatcgaatatgagtacaaagaagaggacttgaggaacaagagtcctcttctcttacaaatgaacccggttcacaagaagattccggttctcatccacaatggcaaacccatttccgaatccctcattgctgttcagtaca

SEQ ID NO: 284276 - DNA, 279 bp, Glycine max
  unsure (1)..(279): unsure at all n locations
aattaacctcactcaaactcgggatcacagaaaccaacaacagttcttgcactgaggtttcacgatgttgctggaacttgcacttggtttgtttgtgttagctttgtttctgcacttgcgtcccacaccaagtgcaaannncaaaagcacttcgccacctcccanaccctccaagcccaaagcctcgtcttcccttcattggccaccttcacctcttaaggngnngncacttctccactatgcactcatngatctctccaaaaagcatggccccttatt

SEQ ID NO: 284277 - DNA, 273 bp, Glycine max
  unsure (1)..(273): unsure at all n locations
gtgacacctgcaggaacatcggctttgtctcaaacgatgtgggactggatgccgacaactgcaaggtacctcgtcaacattgagcagcagagccctgatattgctcagggtgtacacggccacctcaccaaaaaacctgaagaaattggtgctggtgaccagggtcacatgtttggctatgccactgatgaaacccctgaattgatgccattgagccatgttcttgcaacaaaactcggtgctcgnctcaccgaggttcgnaagaacggtacc

SEQ ID NO: 284278 - DNA, 271 bp, Glycine max
gaggaggagtatttgcgccgtttggggattttcgcccagaacatggtcagagcggcggagcatcaggcgctggaccccaccgccgtccacggcgtcacgcagttctccgatctcaccgaggacgagtttgagaagctctacactggcgtcaatggcggcttcccgtcatcgaataatgccgccggcggtattgcgccgccgttggaggtggacgggctgccggagaattttgattggagagagaaaggagctgtcaccgaattaagttaca

SEQ ID NO: 284279 - DNA, 278 bp, Glycine max
  unsure (1)..(278): unsure at all n locations
tgacagttgatcccaccaaaagaattacagttgaagaagcactagcccatccataccttgaaaaactgcatgatgtagctgatgaaccaatctgcatggagccattctcatttgattttgagcaacagcaattggatgaagagcaaataaaagagntgntctacagggaagcattagcactgaatcctgagtatgcttaaagcagaagactcaaggacttgaagcaagcatataaggaaaataatattcgtttttanttttttatcacttaagttccc

SEQ ID NO: 284280 - DNA, 269 bp, Glycine max
  unsure (1)..(269): unsure at all n locations
cacacaactactacaagtacttccttacaatcaaaaccancaacaactatggcaagttatcaaaagcactacgatgatcagggtcgcaaggttgacgagtatggcaacgttgagaagcaaaccgacgaatacggcaaccctgttcatgctgctagtgtcacctatgtagccaccagaactgctgctggtggttacagtgatgacattaataagcaacatgataccaccaatgcctacggcgtagacactggtagacagcattctagtgg

SEQ ID NO: 284281 - DNA, 272 bp, Glycine max
  unsure (1)..(272): unsure at all n locations
ggaataaacatgcacgtggcatccattgggtcaggcccagttgtactgttcctccacggcttcccggagctttggtacacgtggcgccaccagcttctgtccctctccgccgtgggctaccgggccatcgncnccgacntccgcggctacggcgacacngacgccccgcccgacgcttcctcgtactccgccctccacatcgtcgccgacctcgtcgggcttctcgacgctttgggaatcgagcgagtttttctggtgggncatnatnntga

SEQ ID NO: 284282 - DNA, 244 bp, Glycine max
ctaaaatatcagcagcagcagcaaggaggttcccaaagccagaaaggaaagccacaagaagaagaaaacgaaggaagcaacatattgagtggcttcgcccctgaattcttgaaagaagcgttcggcgtgaacatgcagatagtgagaaacctacaaggtgagaacgaagaggaggatagtggagccattgtgacagtgaaaggaggtctaagagtcacagctccagccatgaggaagccacagc

SEQ ID NO: 284283 - DNA, 274 bp, Glycine max
ccgggagttcttgggatgccaaacatgccatacctttatgctatggactttattgaagtcttgaagaagaaacatgcatctggaggttacaagaagatggtcatatacgtggaagcttgtgaaagtgggagcatgtttgagggtataatgcctaaggatctgcagatttatgtcacaactgcatccaatgcacaagagaatagttggggaacttattgtcctggaatggatccttctccacctccagagtacatcacttgcctaggggatttgt

SEQ ID NO: 284284 - DNA, 271 bp, Glycine max
  unsure (1)..(271): unsure at all n locations
gcctttcatataaatatcatggcttcgagggtggtttcggttttggtgntagcgatgatgttgtttgccatgaactgtaactgcactagtgttggccacatgccttcaaccaaagaggaaggtcacgattttcaggnggctaaagccnagacaacacaaactgcgaacaaggccatggaaactggtaaagatgggaaagaagccgcagagtcatggacagaatgggctanagagaaactcactgaaggtcttggcttcaaacatgatcaag

SEQ ID NO: 284285 - DNA, 273 bp, Glycine max
  unsure (1)..(273): unsure at all n locations
ancnnngtaacttcgccttatanattgggggcttgcagagtnctatcatcctgggngagnatataatgttacgcgtggcatnaagatatttcaaaggtcctgagcttctngttgatcttcaagactatgattactctctagatttatggagtcttggntgtangtttgctgggatgatattccgtaaggagccattcttttatgganatnananctatgatcantggtcaaaatagctaaggtacttgggacaganccatggncaaggttcat

SEQ ID NO: 284286 - DNA, 274 bp, Glycine max
  unsure (1)..(274): unsure at all n locations
ttgaacacangggtgggaattcagtacgtggcggcgtggctcaccggaagcggttcggtgcctctatacaacctcatggaggatgctgccactgctgagatcagcagggtgcagaattggcagtggctcaagtatggagtggagctcaatggggatggtcttggagtgaaagtgnacaaagaactttttggtagggttgttgaagaagagatggctacgattganaaggaagtggggacagagaagttcaagaagggaatgtcacaaggaggct

SEQ ID NO: 284287 - DNA, 271 bp, Glycine max
ctaagacttggcctgaggacattatacccttgcagcctgttggtcgcttggtcctgaataagaacatagataatttctttgctgagaatgaacaacttgcattttgccctgccattgtggttcctggtgtatactactcagatgataagatgcttcaaaccaggatattctcttatgctgattcacaaaggcacagacttggaccaaactatctgcaacttcctgctaatgctcccaagtgtgctcaccacaacaatcatcatgaaggttt

SEQ ID NO: 284288 - DNA, 269 bp, Glycine max
  unsure (1)..(269): unsure at all n locations
ctaagacttggcctgaggacattatacccttgcagcctgttggtcgcttggtcctgaataagaacatagataatttctttgctgagaatgaacaacttgcattttgccctgccattgtggttcctggtgtatactactcagatgataagatgcttcanaccaggatattctcttatgctgattcacaaaggcacagacttggaccaaactatctgcaacttcctgctaatgctcccaagtgtgctcaccacaacaatcatcatgaaggt

SEQ ID NO: 284289 - DNA, 268 bp, Glycine max
  unsure (1)..(268): unsure at all n locations
gccagagagtgatacaatacagagtgcgttgttgctccttcgccacaactccctgccaacatgggtatctccagagattctatgcacaagaggcgtgccactggtggcaagaagaaggcatggaggaagaagagaaagtatgagcttggtcgccagcctgctaacactaagctgtcaagcaacaagacagtcaggaggatccgggttagaggtggaaatgtgaagtggagggcactgagattggatactggaantactcctggggaag

SEQ ID NO: 284290 - DNA, 266 bp, Glycine max
  unsure (1)..(266): unsure at all n locations
gtcgctactaagagttgctgcntcttcagccactccgcacctcgcngantcngtgatcctcaacaancatggntgaaatcgaaactaccgttccagatcccancnaattcgangtcanactcttcaatcgctggancttcgaggatgttgaggttaatgatatgtctctggctgattacattggagtgtcnccatcaaagcatgctacatatgttcctcacactgctggtaggtatcagtgaagaggttcaggaaagcgcagtgcc

SEQ ID NO: 284291 - DNA, 267 bp, Glycine max
  unsure (1)..(267): unsure at all n locations
caaatcaggagtttacaaacacatcacaggttatgaactaggtggtcatgcagtaaagctaattggatggggaacaactgaagatggggaggattattggcttcttgcaaatcagtggaacagagaatggggagatgatggttacttcaagatnccgaagagggacaaacgaatgtgggattgaagaggatgtaactgctggtttgccttccaccaaaaacctcgtcagagaggtgactgatatggatgctgacgctgctgtttcat

SEQ ID NO: 284292 - DNA, 270 bp, Glycine max
  unsure (1)..(270): unsure at all n locations
ggataagaaaagntgagaagatatatanatatatacgaganagtgagtaatcgagaaagagaagaagcatatatatcanaatggctgcagagatggagagggagtcattgataactgangctcctaatgcaccanttactgcacagagaagggtcagaaatgacttaganaattctctaccaaaaccatacttgccaagagcattgaaagctcctgatacgggtcacccaaatggaacagcaggccacaggnacnacaacttatcngntc

SEQ ID NO: 284293 - DNA, 273 bp, Glycine max
  unsure (1)..(273): unsure at all n locations
agcagttgctgatagaaaagttgaaatcactggccctgtggatagaaagatggtacatcaatgntctcaactctggagctnnagtctttatggctgattttgaagatgcactgtcaccaggctgggaaaatcttatgagaggccaagtgaacttaaaggatgctgtggctgggaccataagcttgcatgncaaagcaagacacagggtntncaagctcnanngatcanncagcgnagctttatgtgggaccnagaggttggcacctaacgnag

SEQ ID NO: 284294 - DNA, 265 bp, Glycine max
cagttattcatctgcttactaaaatttcttccattcttagctttgttcaatcaaagttttttaagatggcccagagaaatgttactgctaattcttcttttgaaaggactagcttgccttccctagatcaaaagttggccatggccaagcgctgctctcatgagggtgtgatggcaggagcaaaagcagctgttgttgctactattgctactgccataccaactctggctagtgtaaggatgcttccttgggcaagagccaatct

SEQ ID NO: 284295 - DNA, 263 bp, Glycine max
  unsure (1)..(263): unsure at all n locations
agcatatatatcaaaatggctgcagagatggagagggagtcattgataactgaagctcctaatgcaccagttactgcacagagaagggtcagaaatgacttagaaaattctctaccaaaaccatactngccaagagcattgaaagctcctgatacgggtcacccaaatggaacagcaggccacaggcaccacaacttatctgttcttcagcagcattgtgctttttttgatcaagatgacaatggaatcatttacccttggga

SEQ ID NO: 284296 - DNA, 262 bp, Glycine max
  unsure (1)..(262): unsure at all n locations
cacggccaccgtattgagctagccaaagcttattacaaagcgctcactggnttcggtgaagaagcatttcaaaggcaatggggtcattgnnancatggagcattgtaatgacttctttctccttggtaccgaagccatagcccttgggcncgtaggagatgattattggtgcactgntccctctggagatccaaatggcacgtatnggctccaagggtgtcacatggtgcactgngcctacaacagcttgtggatggggnat

SEQ ID NO: 284297 - DNA, 267 bp, Glycine max
gtatgaccaaatagcagaattgctgaatggcattgctgagaggtttgactgggatacagtaatggaaggtgataaaattattggactcaaacaggggaagcagagcatatcattggagcctggtggtcagtttgaacttagtggagctcctcttgaaaccttgcatcagacttgtgctgaagttaattcccacctttatcaggttaaagctgttgctgaggaaatgggaattggatttttggggattggtttccagccaaagtgggg

SEQ ID NO: 284298 - DNA, 265 bp, Glycine max
  unsure (1)..(265): unsure at all n locations
agaaaacctaagcttagaattagaaacaaagaaaagaagaaaggaaagaattgatcgttgaaaatgcagggaggaaagaaagcgggagngtccattaaggaaacagctacaaacattggtgcttctgccaaggctggcatggagaagaccaaggccactgtccaagagaaggcagaaagaatgacagcacgtgatccggtgcaaaaggagttggcaacccaaaagaaagaggcaaagatgaaccaggcggactggacaagcaggc

SEQ ID NO: 284299 - DNA, 266 bp, Glycine max
aaaatgagtgccagatccaaaagctgaatgccctcaaaccggataaccgtatagagtcggaaggtgggttcattgagacctggaaccctaacaacaagccattccagtgtgccggtgttgccctctctcgctgcacccttaaccgcaatgcccttcgtagaccttcctacaccaacggtccccaggaaatctacatacaacaaggtaatggtatttttggcatgatattcccgggttgtcctagcacttatcaagagccgcaagaa

SEQ ID NO: 284300 - DNA, 181 bp, Glycine max
agagattcaagtatttggacaaacccagatgaatttacacctgaaagattcctggaaagtgacattgattttaaaggccatgattttgagctaataccctttggagctggaagaaggatttgtcctgggttgccattagcatctagaactctgcatgttgtgttggcatctcttctataca

SEQ ID NO: 284301 - DNA, 277 bp, Glycine max
  unsure (1)..(277): unsure at all n locations
gatcacattgaacaatggtgaaggctgtggccgttcttgggcagcagtgagggtgtcactggaactattcacttcgttcaggagggaagtggtccaaccaccgtaactggatctcttgctggtcttaagcctggtctccatggtttccatgtccatgccttgggggacactaccaatggttgcctctcaactggatcacatttcaancctaataacaaggagcatggtgcccctgaggatgagaatcgtcatgctggtgatcttgggaatgttaatg

SEQ ID NO: 284302 - DNA, 268 bp, Glycine max
  unsure (1)..(268): unsure at all n locations
cgtctgtatggccaacgacaccttcggaaggagaattcctttctcgtacttggaanatatccaaatgaggtttatgaagaactacagtagagttgccaattatgcaccagcttatgcaatgaatgatgaattttcangggttttgcatcagcagatggaatttttttctagtaatacgagtgccgataccctcaatcgtgtgaggggngaagttggtgagatacgcactatcatggtggacaatattgagaaaatattggagagaggt

SEQ ID NO: 284303 - DNA, 270 bp, Glycine max
cttccgcaaatggcttctcacgacagcatctccgcttctccaaactccgcttctgattccgtcttcaatcacctcgttcgtgctcccgaagatcctatcctcggggtaactgtcgcttataacaaagatccaagtccagttaagctcaacttgggagttggtgcttaccgaactgaggaaggaaaacctcttgttttgaatgtagtgaggcgagttgaacagcaactcataaatgacgtgtcacgcaacaaggaatatattccgatcgtt

SEQ ID NO: 284304 - DNA, 271 bp, Glycine max
  unsure (1)..(271): unsure at all n locations
cgaaacaacggcgatcaggttaaaattgacagcttgaagggtaagaaacttggtttgtatttttcggcatcctggtgtggtncntgttcaaacatttacgccaactttggtggatgtgtacaatgaggttgcaaaaaaaggtgacttccagatcgttttcattacggctgatgaagatgatgaatccttaacggttacttttccaagatgccatgggcttgcaatcccatttctgattcagacacacgcagccgccttgatgaattgtttc

SEQ ID NO: 284305 - DNA, 275 bp, Glycine max
ggcatgtctcagctgctttagttcttggtggggttgatatcactggacctcatttgcatactatttatcctcatgggtcaactgacaccctcccatttgctacaatgggatcaggttcacttgctgcaatgtctgtatttgagtctaagtacaaggaaagtttgagtgtaagtaagcatacaaggcttacagccttagaggagtgcatttgatacattgttgttaaatgggaggtgccatggcgtgacggttttttgccagctgccctaccatag

SEQ ID NO: 284306 - DNA, 202 bp, Glycine max
cggcaacggatatctcggctcttgcatcgatgaagaacgtagcgaaatgcgatacttggtgtgaattgcagaatcccgtgaaccatcgagttctttgaacgcaagttgcgcccgaagccattaggccgagggcacgcctgcctgggtgttcacacatcgtttccccaacgcaaacatgttaacaatgttgctgcgcggggtg

SEQ ID NO: 284307 - DNA, 270 bp, Glycine max
agtgcatcagatggcatgagcagatttaaaacaagtaggatcaatcttgttgacctagctgggtcagaacggcaaaaatcaacaggtgccgcaggagagcgattgaaggaagctggcaatattaatagatcactctcacagcttgggaatctgattaatattcttgcggaagtctctcaaacaggaaagcagcggcatataccgtatagagattctaggttgacatttttgttgcaggagtctcttggaggaaatgcaaaattagcaatg

SEQ ID NO: 284308 - DNA, 266 bp, Glycine max
gaaaagaagaaaggaaagaattgatcgttgaaaatgcagggaggaaagaaagcgggagagtccattaaggaaacagctacaaacattggtgcttctgccaaggctggcatggagaagaccaaggccactgtccaagagaaggcagaaagaatgacagcacgtgatccggtgcaaaaggagttggcaacccaaaagaaagaggcaaagatgaaccaggcggactggacaagcaggcggcgcgtcacataacacggcggccaaacagt

SEQ ID NO: 284309 - DNA, 266 bp, Glycine max
ggaaagaaagaatgctttgcctcgtgtctatttgtttgctatgatttgatccgggcagacattgctcttgaattggcctggatgaacaatatgattgactttgccttcccatatctcctgcagtttatccgtgagtacaccggcaaagttgatgaactggtgaaggataaaattgaagcgcagaaccaagtgaaggctaaagaacaagaagagaaggaagtattgctcaacagaatatgtatgctcagttgttgcctcttgctttg

SEQ ID NO: 284310 - DNA, 256 bp, Glycine max
  unsure (1)..(256): unsure at all n locations
attctgtggttgctggattccagtgggcatcaaaagaaggtgctttggctnnagaaaacatgagagccatctgctttgaagtatgtgatgttgtgctgcacgctgatgctatccacagaggaggtggtcaaatcattcctactgccaggagagtcttctatgcttcccagattactgccaaacccaggcttcttgagcctgtctacctggttgaaatacaggctcctgaacaagctcttggtggaatctacagtgt

SEQ ID NO: 284311 - DNA, 271 bp, Glycine max
  unsure (1)..(271): unsure at all n locations
caactactacaagtacttccttacaatcaaaaccancnaacaactatggcaagttatcaaaagcactacgatgatcagggtcgcaaggttgacgagtatggcaacgttgagaagcaaaccgacgaatacggcaaccctgttcatgctgctagtgtcacctatgtagccaccagaactgctgctggtggttacagtgatgacattaataagcaacatgataccaccaatggcctacggcgtagacactggtagacagcattctagtggtggc

SEQ ID NO: 284312 - DNA, 256 bp, Glycine max
  unsure (1)..(256): unsure at all n locations
cgatgcggatgaggcgccactcgatgtttccatttgcctgcatgcctttggtattgtggggtgtggttcgttnagtggtgtcaagtcttgcgaacgtgagggtgcatgagtggtaatcgggatgtttttgttgcacggctccatgcttgcgcatgcaacgtgtgncatgcatccttttcattgtcaccttagccttcgtggctaggtgctgacgatggttccngtgttgcctacctaccaaacggtattcgtgtgg

SEQ ID NO: 284313 - DNA, 258 bp, Glycine max
gtctctcgaagcctctttctctctcttctagaagctatctgtgtttggtgttactaagtctccaacaagcaaagtacatggttgatttggaaatccaggtccccaccccattcgacccgtttgccgaggcgagagaatcggatgcccccggagcaaaggagtatgtgcatattcgaattcagcagaggaatgggaagaagagtctgaccacagtgcaagggctgaagaaggagttcagctacgagaagatcctcaagg

SEQ ID NO: 284314 - DNA, 259 bp, Glycine max
  unsure (1)..(259): unsure at all n locations
ctangacttggcctgaggacattatacccttgcagcctgttggtcgcttggtcctgaataagaacatagataatttctttgctgagaatgaacaacttgcattttgccctgccattgtggttcctggtgtatactactcagatgataagatgcttcaaaccaggatattctcttatgctgattcacaaaggcacagacttggaccaaactatctgcaacttcctgctaatgctcccaagtgtgctcaccacaacaatca

SEQ ID NO: 284315 - DNA, 258 bp, Glycine max
  unsure (1)..(258): unsure at all n locations
gcaaaattgcaatattttataactgatgtaccctaaatgcagataaggtttttgcatgatcctgctaaagatacaggttttgtcggcagtgcattgacaagtaacatgatacgattttttaagacccaagatgaatcatggagccatgaggttgccatatcagngaaaccattgaaagtgcaaaactggattcttcctgaaatgcctgggcttataactgattttctgatttccttgatgancggtttctgnatttng

SEQ ID NO: 284316 - DNA, 259 bp, Glycine max
  unsure (1)..(259): unsure at all n locations
cttgctcatcaagtccaagaaccaacctaccttttgcaatctcaattcaatggcgtcctctctcattgcgaangcttgcctctcctcttcnctcctctccaggtccctccttcgccccgccgcttccgcttcccaccgctctttcaacaccaacgccatgcgccagtatgacaaccgcgccgacgaccacagcaccgacatcgatcgtcactccgaacgctctttccctagcactgcgcgccgcgacgatatcttctca

SEQ ID NO: 284317 - DNA, 194 bp, Glycine max
  unsure (1)..(194): unsure at all n locations
cacacaactactacaagtacttccttacaattcaaaaccaacaacaactatggcaagttatcaaaagcactacgatgatcagggtcgcaaggttgacgagtatggcaacgttgagaagcaaaccgacgaatacggcaaccctgttcatgctgctagtgtcactatgtagccaccagaactgctgctggtggtna

SEQ ID NO: 284318 - DNA, 178 bp, Glycine max
ctcttccctctgccgccgcaccctgcaaattcaatggcttcagagaagaaactatcgaacccaatgagggaaataaaggtgcagaaactcgtcctcaatatctccgttggtgagagtggagatcgtctcaccagagccgccaaggtgttggaacagcttagtggccaaaccccagtgt

SEQ ID NO: 284319 - DNA, 112 bp, Glycine max
  unsure (1)..(112): unsure at all n locations
cgttacgaagccggcatcaaggcgccctcttccatttaccattccgaganaggtccgacgacctctcaggttctcgcagttgtngccggccttccggttcggcggcatcctc

SEQ ID NO: 284320 - DNA, 256 bp, Glycine max
gaaaagtagtgtattaagactacaaattttcaatttttcaatggcgtcgaggcaacaaaaagaggatcgagctgaggcagctgcgaaagttgctgcgaaagaactcgaacaactcaaccgagaaaaagaccgtgatttcagtgttggtgttgcagaccaacaccaacaagaagaacatcagttagatcaacaaaagcgtggtgtaatcggatccatgttcaaggcggtgcaagacacctacgagaacgccaaggaa

SEQ ID NO: 284321 - DNA, 111 bp, Glycine max
gtgttagccctaaacttcaccttcaaccatgaccacagtgccaccacacagtgtccaagtgcacacaacaacacaccgctacgaagccggcgtcgtcccgccggctcgttt

SEQ ID NO: 284322 - DNA, 257 bp, Glycine max
aaggtaaaaaagaaaatggtggtgaagattcgattggcaaggctcgggtgccggaaccacccattctatcgtgtggttgttacggatagcaaaacaacaagagatggcaagcaacttgaagttttaggtttctacaatcccgtcgcaggcaaggatgatgacaaaagaatgagcctcaaactggagagaatcaagtattggctttccgttggagctaagccttcagagccgttgagcatcttctatttagagcaggt

SEQ ID NO: 284323 - DNA, 260 bp, Glycine max
cacgctctaattacactttctatctcatttccaatctcattttcgttcggttcaaacactctcatgggcatcagacaagaagattaggatcggcatcaacggatttggaaggattggccgtttggtggccagggttgctcttcagaggaatgacgttgaacttgttgctgtcaacgatcctttcatcaccactgattacatgacatacatgttcaagtacgacaccgttcatgggcagtggaagcattttgatgtgaagc

SEQ ID NO: 284324 - DNA, 198 bp, Glycine max
  unsure (1)..(198): unsure at all n locations
taaatatttttcattctaggtgatgtatcatgtatgtaccaaaatattttggtacgtaagtcttttaaaaagtttgcatctcctctttggttttcctagttctgaaagttatctcctaagaagacaatcatatgtactgtacgtagtgtgaagatatagtattgtatgctggcngaatatgattgcctaatagggtgg

SEQ ID NO: 284325 - DNA, 264 bp, Glycine max
  unsure (1)..(264): unsure at all n locations
ggggtggaacttgtagagtctgcttccagctaccaaatgctgactcagatggatgtgcttaggttcttgcatgatcgtgctggtgaagctgatcgtgaactgcagagcattctctctcgttctgttcaagatttgggggccgacactgaacagatttatgccatcactgaccgcacaaaactcgtggatgccattaagtgcttaaaggccgctatgtnaaatgctgttcctattgttagagcctctgatgtcggtcaagatgat

SEQ ID NO: 284326 - DNA, 265 bp, Glycine max
  unsure (1)..(265): unsure at all n locations
tacaagtacttccttacaatcaaaaccaacaacaactatggcaagttatcaaaagcactacgatgatcagggtcgcaaggttgacgagtatggcaacgttgagaagcaaaccgacgaatacggcaaccctgttcatgctgctagtgtcacctatgtagccaccagaactgctgctggtggttacagtgatgacattaataagcaacatgataccaccaatgcctacggcgtagacactggtagacagcattctagtggtggctnc

SEQ ID NO: 284327 - DNA, 263 bp, Glycine max
agagattcaagtatttggacaaacccagatgaatttacacctgaaagattcctggaaagtgacattgattttaaaggccatgattttgagctaataccctttggagctggaagaaggatttgtcctgggttgccattagcatctagaactctgcatgttgtgttggcatctcttctatacaactatgattggaagctcacggatggacaaaagccagaagacatggatgtatctgagaaatatggaattaccttgcataaggc

SEQ ID NO: 284328 - DNA, 258 bp, Glycine max
  unsure (1)..(258): unsure at all n locations
agattatcctaagtctttgggaatagtgctgcaatggcttcaagtcaggaggaggtgacccttttgggagctactggaagcccatttgtgtgcagggttcatattgccctcaagttgaagggagttcaatacaaatatgtcgaagaaaatttgaggaacaagagtgaactgcttctcaaatccaacccagttcacaagaaggttccagtgtttattcacaatgagaagcccatagcagcnnnnctgtgattgttgaat

SEQ ID NO: 284329 - DNA, 261 bp, Glycine max
  unsure (1)..(261): unsure at all n locations
cttnccatttttacccttcatcctcgagananaaatggcgaacgcagcatctggtatggccgtccatgatgagtgcaagctaaagtttctggagctcaaggcgaagaggacncaccggtatatcgtttttaagattgaggagaaatcgaagcaagttattgtggagaagcngggtgaccctgcaaatggctatgatganttcgctgccagtcttcctgntgatgagtgtcgatatgctgtttatnattgcnatttcnccac

SEQ ID NO: 284330 - DNA, 261 bp, Glycine max
  unsure (1)..(261): unsure at all n locations
ggaaaaagttttgggatcatctgatcccgattcaggtaaaggaaagagcaagatgaagaagcacataactcatggctttcacttggtaaagggaagatcaggtcatgccatggaagactatcttgttgctcaatttaagcaagttgacaacaaagagttgggtttatttgcaatatttgatggccactctggtcacagtgtacctgattacttgaagtctcatttgtttgatantatcnngaaagagcctaacttctggac

SEQ ID NO: 284331 - DNA, 259 bp, Glycine max
  unsure (1)..(259): unsure at all n locations
ggataacaccacaggattctgatcctattgtgttggccttcgggatcggagtaatgattaacagggacagtcgggggcattcgtatttcatagtcagaggtgaaattcttggatttatgaaagacgaacaactgcgaaagcatttgccaaggatgtnttcattaatcaagaacgaaagttgggggctcgangacgatcagataccgtcctagtctcaaccataaacgatgcggaccagggatcanggatgtgctttang

SEQ ID NO: 284332 - DNA, 259 bp, Glycine max
  unsure (1)..(259): unsure at all n locations
aagaaatgaagagtactatcttctttgctctctttctagtttgtgccttcaccatctcatacctgccttcagccaccgctcagttcgtgctcgacactgatgatgatcctcttcaaaacggtggcacatactatatgtngccagttatgagaggaaagggcggtggaatagaagtagattcaactggaaaagaaatatgccctctcactgttgtgcaatcacccaatgagctcgatatgcggattggactagtctttac

SEQ ID NO: 284333 - DNA, 259 bp, Glycine max
ctcttgggagaagaggtcgagtttcacagcagcaatggtgtacgtcaaggctcagaaatcaaaagcctacttcaagagatatcaagtcaagttcaagagaagaagaggagggaaaaaccgattaccgtgccaggattcggttgattaatcaggacaagaacaaatataacactccgaaataccgatttgttgttcgctttagcaacaaggacattgttgcacaaataatatctgctagcattgctggcgatattgttct

SEQ ID NO: 284334 - DNA, 260 bp, Glycine max
  unsure (1)..(260): unsure at all n locations
gtttgaagatggcacaagttgaactgcgagatgagcatgggaacccagttgaactcacagatgcatatgggaatccggtttggttaacggacgagaaaggcaaaccggtgcacctcaccggtgtggcaaccactgcacacaaatgtttgcaagagaatgacacaccacaagagcttcctcactccaagagctcaagctctagctcttctgaggatgaagagcatggagggaggagcaanaagggactgaaggataaaata

SEQ ID NO: 284335 - DNA, 259 bp, Glycine max
  unsure (1)..(259): unsure at all n locations
ggaaaagaaggggttcctcgacaagattaaggagaagctncccagggcacncagaagacagaggnggccacagctactactcctcctgccaccaccacctgttgcatcattggagcatggtgaaggtgctcatcatgaaggagaggccaaggagaagaaaggtatattagaaaagataaaagagaagcttcctggttatcactccaagacngaggaggaaaaggaaaaggaaaaggngagtggtgctcttgatatttaa

SEQ ID NO: 284336 - DNA, 188 bp, Glycine max
gttccttaagttttgtggctttgaataaaagatagaagagaaggaatctgaatttcttcatccaacctgcacatggtaatctagtgtgtttgagtgctttcatgtttggcttaataaaataaaagcagttgttttgtaaaatgttcagaatcaataaaagcatttactgctttgctttgtgcgcaaaa

SEQ ID NO: 284337 - DNA, 221 bp, Glycine max
  unsure (1)..(221): unsure at all n locations
tggctgatacaagtggaggagatgcagtgagaccggtggtaatatgtgataacaagtgtggctgcacagttccatgcactggtggttccacttgcaggtgcacaagtgtcggcatgacaactggaggcggtgatcacgtgacatgctcgtgcggagagtactgtgggtgcaatccatgctcatgtcccaagactgcggttctgnaaactggttgcagatgt

SEQ ID NO: 284338 - DNA, 123 bp, Glycine max
  unsure (1)..(123): unsure at all n locations
tggcttccatcctccactactttntagcccnctctctttcttgctcttttcttttctncttatccgactcagtcacccctacaaaaccaananaccttgntgttctacccgnncaaaatgatg

SEQ ID NO: 284339 - DNA, 258 bp, Glycine max
  unsure (1)..(258): unsure at all n locations
gggcttagtacttcaactctaagccttacttcaatgaagctgggtatgataagcaggttggaacagctgaaggagagaaaaatttcattgtcatacaatgagaatacctttttacttaactggcaagactatgatgtatcntatgaggaaaccacccaagggntttgggagtgccctcaaagaacattttaggaggcggggtcataaaatccctaaggcttgtgatgcttatatganaggttctgatggcccnccgac

SEQ ID NO: 284340 - DNA, 258 bp, Glycine max
cggatatctcggctcttgcatcgatgaagaacgtagcgaaatgcgatacttggtgtgaattgcagaatcccgtgaaccatcgagtctttgaacgcaagttgcgcccgaagccattaggccgagggcacgcctgcctgggtgcgcacactgaagcaggatataggaaggaacatcgtcagcatgaccaatctcatggtgatcagaacgagaagaaagggattatggacaagattaaggagaagcttcctggaggacaca

SEQ ID NO: 284341 - DNA, 258 bp, Glycine max
cagaagaaatctgaaagggagaatgaattgaaacaacgatttgagcagagcatgaaagaagctgctgataaatatcaaggcgcaaacttgtatgtaaaaaatttagatgatagcattggtgatgaaaaacttaaggagctgttctccccttttggtaccattacctcttgcaaggttatgagagacccaaatggcttaagtcgtggatcgggttttgttgcattctcgactcccgaggaggcatctagagcactcctg

SEQ ID NO: 284342 - DNA, 258 bp, Glycine max
gtgagaaacaaagaaaggaaataattgatctttgaaaatgcagggaggaaagaaagctggagagtccatcaaggaaacagctgcaaacattggtgcttctgccaaggctggcatggagaaaaccaaggccactgtccaggagaaggcagaaagaatgacggcacgtgatccgatgcaaaaggagttggcaacccagaagaaagaggcaaagatgagccaggcagagctggacaagcaggcggcgcgtcacataacacg

SEQ ID NO: 284343 - DNA, 285 bp, Glycine max
  unsure (1)..(285): unsure at all n locations
ggctctatactacanagtacanacactagaagaataatggcttccatcctccactactttttagccctctctctttcttgctcttttcttttcttcttatccgactcagtcacccctacaaaaccaataaaccttgttgttctanccgttcaaaatgatggttccacagggctccattggncccaacctccaaaaaagaacccctctaatgcaagtaccagtcctggtggacctcaaggaaatcacttgtgggttaatgtgagcagcatatcatcnaaaagtacc

SEQ ID NO: 284344 - DNA, 282 bp, Glycine max
  unsure (1)..(282): unsure at all n locations
gncctgagatcactttgagcaatggtgaaggctgtggcagttcttggcagcagcgagggtgtcactggaactattttcttcactcaggagggaaatggtccaaccaccgtaactggatctcttgctggtcttaagcctggtctccatggcttccatgtccatgccttgggggacactaccaatggttgcctgtcaactggagcgcatttcaancctaataacaacgagcacggtgcccctgaggacganatcgtcangctggtgatctgggatgtnangtcg

SEQ ID NO: 284345 - DNA, 282 bp, Glycine max
  unsure (1)..(282): unsure at all n locations
gnctaggttttttgaagctgctgttgcatacaanaagaagattggattcaatgggacatttctaatcgaaccaaagccacaagancctacaaaacaccagtatgattgggatgctgcaacctcagctaatttcttgcgaaaatatggacttacagggganttcaaactcannatagagtgcaaccatgccaccctctctggccacagttgtcatcatgagctcgaaactgcaaggctcatggattgctgggtaatattgatgcaaacatggtgatcctcagt

SEQ ID NO: 284346 - DNA, 283 bp, Glycine max
  unsure (1)..(283): unsure at all n locations
attggaacttatacaatcaattctgtggatgatccaagaaccttgaacaaaattctctacattagaccaccagctaataccttgtcgtttaatgagcttgttactctctgggagggaaagattggtaaaactcttgaaagaatctatgttccagaagaacaactcctgaagcaaattgaagagtccgcaccacccgtgaatgtgatcctgtcattaaccactcttcttatgtaagggggatcatactaacttngaattgagtcttcttttggagnggaagctc

SEQ ID NO: 284347 - DNA, 278 bp, Glycine max
  unsure (1)..(278): unsure at all n locations
caatcggccagcaccaacagcatcggcggcgacagtcactctccgacaacaacacttccgcggcgaaaaatgtctctggtggcgaacgaggatttccagcacattctgcgtgtgctgaacaccaacgtggatgggaagcagaagataatgttcgctatgacctccatcaagggtattggaaggagattcgccaacatcgcttgcaagaaggccgatgttgactgaacaaaagggctggtnattgatgctnnannttggatatgtganacgtggtggcg

SEQ ID NO: 284348 - DNA, 283 bp, Glycine max
  unsure (1)..(283): unsure at all n locations
gtactggagaaactatcaatgacagagatcgctgcccacagtgcaagggagagaaggttgtgcaggagaagaaagtccttgaagttattgtagaaaaggggatgcagaatgggcagaagataacattccctggcgaactgatgaagcgccggacacaattactggggatatcgtctttgtccttcagcagaaggaacatcccaattcaaaaganggctgaaagatctttttgtngngcacnnnttgtcccttacgggggcttgtgtggctncaatttgtgctc

SEQ ID NO: 284349 - DNA, 284 bp, Glycine max
  unsure (1)..(284): unsure at all n locations
cnaaacaaaaagtttacgttacaaatcgcataataaccgtcctaagtttattgagagaattttgcaagtgtgaganacatggcatctcgtcaaaacaacaagcaagagcttgatgaaagagcaaggcaaggagagactgttgtcccgggtggaactggtggcaagagcctggaggctcagcaacaccttgctgaaggaaggagcaagggagggcaaacaaggaaggaacagctgggtacagaagggtaccaggaatgggacgcaaaggagggttgagcactgtg

SEQ ID NO: 284350 - DNA, 280 bp, Glycine max
  unsure (1)..(280): unsure at all n locations
gcagtcgcanaggnnaaccctagcnagnagtctcagttcgtttgagagngcaanaaatggcagagggtctcgttctccgcggaaccatgcgcgcccacaccgangtcgtgacggngattgccactcgcatcgacaactccgacatgatcgtgacggcgtcgcgcgacaaatccatcannctcnggcacctcaccaaggaggacaagncctacggtgtcccccgncgncgcctnaccggacattctcgttcgtccaggacgtcgnctctcatcaganggta

SEQ ID NO: 284351 - DNA, 278 bp, Glycine max
  unsure (1)..(278): unsure at all n locations
gttcagtgtgtcgtttanaaatgncgcagttgctggataaagccangaacttcgtgtcggagaaggtaaatgatatggccaagccggntnnnttgtcactgacgtggacttcaagcgcgtgagcaaagataatgtcgagtacttggccaaggtctctgttcgtaaccctnattcaacttccatacccattngngagatcaactactctttcaaaagcgcatccaggganatngcatcagggananttccagacccagatcgttganggcaaaggacac

SEQ ID NO: 284352 - DNA, 276 bp, Glycine max
  unsure (1)..(276): unsure at all n locations
cncacacaactactacaagnacttccttacaatcaaaaccancaacaactatggcaagttatcaaaagcactacgatgatcagggtcnaaggttgacgagtatggcaacgttgagaagcaaaccgacgaatacggcaacccgttcatgctgctagtgtcacctatgtagccaccagaactgctgctggtggttacagtgatgacttaataagcaacatgataccaccaatgcctacggntagacactggtagacagcttctagtggtggctacgtt

SEQ ID NO: 284353 - DNA, 281 bp, Glycine max
  unsure (1)..(281): unsure at all n locations
gtaatcgggttaaaattcctganccgggacgtggcggctgacggcaacgttagggagtccggagacgtcggcgggggccccggaaagagttatcttttctgtttaacagcctgcccaccctggaaacggctcagccggaggtagggtccagcggctggaagagcaccgcacgtcgcgtggtgtccggtgcgcccccggcggcccttgaaaatccggaggaccgagtgctcccacgcccggtcgtatcataaccgcatcaggtctccaaggtgaacagcttg

SEQ ID NO: 284354 - DNA, 274 bp, Glycine max
  unsure (1)..(274): unsure at all n locations
ggaaanaantgatctntnaaaatgcagggaggaangnnagctggagagtccatcaaggaaacagctgcanacattggnncttctgccaaggctggcatggagaaaaccaaggccactgtccaggagaaggcagaaagaatgacggcactgatccgatgcaaaaggagttggcaacccagaagaaagaggcaaagatgagccaggcagagctggacaagcaggcggcgcgtcacnnnaacacggcggcgaacaggctgccaggcaggcacnggga

SEQ ID NO: 284355 - DNA, 140 bp, Glycine max
  unsure (1)..(140): unsure at all n locations
tnanantgcggntnccttngntggtgttgctgggaactgttttcctggcatcagtttgtgtctcattaaaggtgagagaggatgagaataaccctttctacttgagaagctctaacagcttccaaactctctttgngaac

SEQ ID NO: 284356 - DNA, 281 bp, Glycine max
  unsure (1)..(281): unsure at all n locations
ggaccactgcnttagctactcttgnnataggaaggttgctggtggtggcaaatgcaggagattgccgagctgtgctgtgccgttcgtggaaaagcaattgaaatgtcaagagatcataaaccaggttgcaacaaagaaaagaagcgtatcgaggcatctggggggtatgtctacgatggatatctcaanggacaattaatgttgctcgtgcacttggtgnctggcacatggaaggntgaagagcaaagacggtgnaccactganctgcagaaccaganttt

SEQ ID NO: 284357 - DNA, 274 bp, Glycine max
  unsure (1)..(274): unsure at all n locations
anagtgcggnttccttngttggtgttgctgggaactgttttcctggncatcagtttgtgtctcattaaaggtgagagaggatgagaataaccctttctacttgagaagctctaacagcttccaaactctctttgagaaccaaaacggtcgcattcgtctcctccagagattcaacaaacgctcccnacancttgagaagnttcgagactaccggattgtccagtttcagtcanaacccancacaatcctnctcccccaccatgctgacgccgat

SEQ ID NO: 284358 - DNA, 197 bp, Glycine max
  unsure (1)..(197): unsure at all n locations
anataacaganaagacttcatgtgacaatgggtgtaatggaggtcttatgacaaatgcctacaattatttgctcgagtctggtgggttggaggaggagtcttcatatccctacactggggagagaggtgaatgcaagtttgatccagagaaaatagcagttaagatcacaaatttcaccaatatccctgctgatgag

SEQ ID NO: 284359 - DNA, 275 bp, Glycine max
  unsure (1)..(275): unsure at all n locations
gnaggctcaagctgcaaaggagaagacccaggaaatggcccaagctgcaaaggagaagacccaacaaacagcccaagctgccaaggacaagacttgcgacacttcccaagcggcaaaggagaagacccaacagaatacaggagctgctcaacaaaagacctcagagatgggccagtccacgaaggaatcggcccagtncagggaaggacaacacccaagggttcctgcagcagncangngagaaggtgaagggcgcaccaaggtgtacagaggct

SEQ ID NO: 284360 - DNA, 190 bp, Glycine max
gttccttaagttttgtggctttgaataaaagatagaagagaaggaatctgaatttcttcatccaacctgcacatggtaatctagtgtgtttgagtgctttcatgtttggctttaataaaataaaagcagttgttttgtaaaatgttcagaatcaataaaagcattactgctttgctttgtgcgcaaaaaa

SEQ ID NO: 284361 - DNA, 273 bp, Glycine max
  unsure (1)..(273): unsure at all n locations
gatccattggcacttcgcctattacaaaggcttttagcatttgatccaaaggatcgaccaactgctcaagaggcactggctgatcccttctttaagggtttgtccaaagttgagagagaaccttcnngtcagccaatttcaaaattagaatttgagtttgagaggagacgagtgacaaaagatgatgttagggaactaatatatcgggaaatactggaatatcanccccattgcttaaagattacatgaatggaactgaggcaccacttcctt

SEQ ID NO: 284362 - DNA, 191 bp, Glycine max
  unsure (1)..(191): unsure at all n locations
gggtactggagaaaccatcaacgacaganatcgctgcccacagtgcaagggagaaaaggttgtgcaggagaaaaaagtccttgaagttattgtggaaaagggaatgcagaacgggcagaagattacattccctggcgaactgatgaagcgccagacacaattactggggatattgtcttngnccttnagna

SEQ ID NO: 284363 - DNA, 269 bp, Glycine max
  unsure (1)..(269): unsure at all n locations
ttccaatcaagcgcgagggnggatatgaaagactaaggattggttatgtgagtagtgactttggtaatcatcccttgtctcatctcatgggatctgtttttggtatgcacaacaggaagaatgtggaggtgttctgctatgccttgagtgctaatgatggtactgaatggaggcaacgtattcagtctgaagcagagcactttgtggatgtatctgccatgtcatcagatgcaatagcaaaaatgattaatgaggataagatacatatc

SEQ ID NO: 284364 - DNA, 267 bp, Glycine max
ggctaaggaggaagatggtgctttcggaggaggaaatgggtcgtctgtaccgaataaggaagacggtgatgcaaatgcttcgggacaggggttttctggtgggtgacttcgagatcaacatgtcgaagcatgagttcaagtccaagtacggcgagcacatgaagcgcgaggacctggtcatcaacaagtccaagaaggacaactccggcgaccagatctacgtcttcttccccgacgagcccaggtcggcgtcaagaccatgaagac

SEQ ID NO: 284365 - DNA, 272 bp, Glycine max
gcaaaggacacaacaatggtggatgtgccagttaaggttccatacagcatattgatgagcttggcaaaggacattggtgctgactgggacatagactatcaattggatcttggtctggttattgatgttcctgtcattggcatcttcaccattcctctctctcagaaaggagagatcaagctaccaaccctctctaccatgttcgcctaatcgcatccacaaagcttaggataaaataatgcattgcacactccatgatcgatgtgctgttt

SEQ ID NO: 284366 - DNA, 268 bp, Glycine max
accaagccccactcaaccaccacaccactctctctgctcttcttctacctttcaagtttttaaagtattaagatggcagagacattcctatttacctcagagtcagtgaacgagggacaccctgacaagctctgcgaccaaatctccgatgctgtcctcgacgcttgccttgaacaggacccagacagcaaggttgcctgcgaaacatgcaccaagaccaacttggtcatggtcttcggagagataccaccaaggccaagttgactac

SEQ ID NO: 284367 - DNA, 271 bp, Glycine max
  unsure (1)..(271): unsure at all n locations
gggcttttggacacttgaagtcatctgactttcttacttatggactaaaatccgtatctcaaaatgttcttccattattgcaatctgcttttgatttgaatttcacaccccgtgagtttgatagctttgatgaagttcatggactctattcaggcggaattaagctgccaacagatataatcagcaagattagtccactacccgtgcttaaggaaatcttccgaactgatggtgaacaggcccttantttcctcctcctaaagtaattcaa

SEQ ID NO: 284368 - DNA, 269 bp, Glycine max
  unsure (1)..(269): unsure at all n locations
aaaggccatataatttttttttatttgaaataatgtccgggatcatccacaagattgaggagaccctccatgtgggagggcacaagaaagaggagcacaaaggagaacaccatggtnagcacaaaggtgaacacaaaggagaacaccatggtgagcacaaaggtgaacacaaaggagaacaacaccatggggagcacaaggagggacttgtggataagatcaaggacaagatccatggtgatggcatgacaagggtgagaaaaagaaga

SEQ ID NO: 284369 - DNA, 261 bp, Glycine max
  unsure (1)..(261): unsure at all n locations
cttggcaaccttgactggggcttgtgttgttgctcttggaccctcaattgctggtgtgtttacatcctgtgatgacctagcaaaggaagtttttgaagcttctgatgtgagtggggagaaactatggcggctgccattagaggaaagttactgggaaacaatgaaatcaggagttgctganatgttgaacactggtggtcgacaaggtggtgctattgttgctgctctcttcctgaaaagtttgttgatgaaaaggttcaa

SEQ ID NO: 284370 - DNA, 262 bp, Glycine max
ctccattggtccttaaacactcatcagtcatcaccatggccaagctagttttttccctttgttttctgcttttcagtggctgctgcttcgctttcagttccagagagcagcctcagcaaaacgagtgccagatccaaaaactcaatgccctcaaaccggataaccgtatagagtcagaaggagggctcattgagacatggaaccctaacaacaagccattccagtgtgccggtgttgcctctctcgctgcaccctcaaccgc

SEQ ID NO: 284371 - DNA, 261 bp, Glycine max
gctaggttttttgaagctgctgttgcatacaaaaagaagattggattcaatgggacatttctaatcgaaccaaagccacaagaacctacaaaacaccagtatgattgggatgctgcaacctcagctaatttcttgcgaaaatatggacttacaggggaattcaaactcaacatagagtgcaaccatgccaccctctctggccacagttgtcatcatgagctcgaaactgcaaggatcatggattgctgggtaatattgatg

SEQ ID NO: 284372 - DNA, 264 bp, Glycine max
ggagacactgaacaccacaacacaaaccgcacaagagaaaagcgcacaggcaaagaatcttgcagcacaagcaaaggacgcaacgttagagaagggtcagcaaggctatgctgtgacaaaggacaccatttcaagtgcagcgaaaaccgcttcggagaaaactgcgccagtggcagagaaggccaaagactacactcttcaggctgcggagaaggccaagagtgcgggtggcacaacggcagttacgtcggagagaaagcggtg

SEQ ID NO: 284373 - DNA, 261 bp, Glycine max
cacaactactacaagtacttccttacaatcaaaaccaacaacaactatggcaagttattcaaaagcactacgatgatcagggtcgcaaggttgacgagtatggcaacgttgagaagcaaaccgacgaatacggcaaccctgttcatgctgctagtgtcacctatgtagccaccagaactgctgctggtggttacagtgatgacattaataagcaacatgataccaccaatgcctacgggtagacactggtagacagcttct

SEQ ID NO: 284374 - DNA, 268 bp, Glycine max
  unsure (1)..(268): unsure at all n locations
tntntcttcacctctgtgatgaccatggaatacagaaccttagaactcaacattcatatccgcaaaggacatcaagaacgttaacctcttctccaagatggacgtatacgccgtcgttacgctctccggcgaccctctccaccctcagggcgccaccacccacgtccacaaagacgccggcagcaaccccacgtggaactaccccgtgaaattctccgtcaacgaatcgctggccaaggagaangtttgtctcttgagatcaagctcg

SEQ ID NO: 284375 - DNA, 268 bp, Glycine max
  unsure (1)..(268): unsure at all n locations
gagcttgcacctattggtatcttctacaatatcctctcatngtgctcttnttcttcttcattttcattatcaagatgtctttgctttcggatctcatcaacctcaatctctcagaatccacagaaaagatcgttncntgagtacatatgggttggtggatctggtatggacctcagaagcaaagccaggactcttcctgggccagtgagtgaccctgcaaagcttccaaagtggaatacgatggtctagcacagaccaagctccaggg

SEQ ID NO: 284376 - DNA, 267 bp, Glycine max
  unsure (1)..(267): unsure at all n locations
caatcggccagcaccaacagcatcggcggcgacagtcactctccgacaacaacacttccgcggcgaaaaatgtctctggtggcgaacgaggatttccagcacattctgcgtgtgctgaacaccaacgtggatgggaagcagaagataatgttcgctatgacctccatcaagggtattggaaggagattcgccaacatcgcttgcaagaaggccgatgttgacatgaacaaaagggctggtgagtgagtgctgnngattggatagtgt

SEQ ID NO: 284377 - DNA, 266 bp, Glycine max
  unsure (1)..(266): unsure at all n locations
ttcaaaccttgctctatactacacagtacanacactagaagaataatggcttccatcctccactactttttagccctnctctctttcttgctcttttcttttcttcttatccgactcagtcacccctacaaaaccaataaaccttgttgttctacccgttcaaaatgatggttccacagggctccattgatcgaacctccaaaaaagaacccctctaatgcaagtaccagtcctggtggacctaatggaaatcacttgtgggttaa

SEQ ID NO: 284378 - DNA, 262 bp, Glycine max
tgcagtcgcagaggaaaaccctagctagtagtctcagttcgtttgagagagaaaaaatggcagagggtctcgttctccgcggaaccatgcgcgcccacaccgacgtcgtgacggcgattgccactcccatcgacaactccgacatgatcgtgacggcgtcgcgcgacaaatccatcattctctggcacctcaccaaggaggacaagacctacggtgtcccccgccgccgcctcaccggaattctcattcgtccaggacgtcg

SEQ ID NO: 284379 - DNA, 258 bp, Glycine max
  unsure (1)..(258): unsure at all n locations
cnatcggccancaccaacancatcngcggcgacagtcactctccgacaacaacacttccgcggcgaaaaatgtctctggtggcgaacncggatttccagcacattctgcgtgtgctgaacaccaacgtggatgggnagcagaagataatgttngctatgacctcnatcaagggtattgganggagattcgccaacatcgcttgcaagaaggccgatgttgacatgancaaaagggtggtgagttgatnctgccnagtt

SEQ ID NO: 284380 - DNA, 256 bp, Glycine max
  unsure (1)..(256): unsure at all n locations
gttaacggtgccgttcacaagngnatgccccacaaattctaccatggccgcaccggacgcgtctggaatgtcaccanacgtgctgttggcgtcgaagtcaacaagcaggttggcaacagaattataaggaanaggattcatgtgcgggnagagcatgttatgccttcaaggtgcactgaggagttccgcctcaggaanattaagagtgatcagctaaaggccgaagccaangtcagggtgacaagatcagcaccaa

SEQ ID NO: 284381 - DNA, 254 bp, Glycine max
  unsure (1)..(254): unsure at all n locations
tgnaaagggaccatgnaggcanattcaggtgccagcgnccgaatttcgagaatcgccggccacctccgcccccagagagaggatgatgtttgtttgaagcgtagnnttgccgtncaaaaggtggggtctccggattcaaggtggccatattgggtgccgcatgangcatanggcaacctctggcgatgttgatgaanatgaatccatcgtttcattctccactctacgatgtgttaacacccctggcgtcattc

SEQ ID NO: 284382 - DNA, 253 bp, Glycine max
  unsure (1)..(253): unsure at all n locations
cacaactacaagaaagaacttccttataaccaaaaccaacaacaactatggacaagttatcagaagcactacgatgatcagggtcgcaaggtcgacgagtatggcaatgttgagaggcaaactgacgaatatggcaacccggttcatgccactagtgtcacttatgtngccaccaaaagtgttggtggctacaatgatgacgctaataagcaacatgatattactggtgctatcccgagaaagacaccggtag

SEQ ID NO: 284383 - DNA, 260 bp, Glycine max
  unsure (1)..(260): unsure at all n locations
caaaaacgnggtgtaatcgggtccatgtntaaggcggtgcaagacacctacgagaacgccnaggaagctgtcgttggcaagaaagaagctactaataacgcgtacagtaatacagaggttattcacgatgttanccattcagcccgatgacgtgtcggcaacgggggaagtaagggacatatcagccacaaagactcatgatatctacgatnctgccacggacaannacaannacaaaccggtnccaaggtcggagagta

SEQ ID NO: 284384 - DNA, 255 bp, Glycine max
  unsure (1)..(255): unsure at all n locations
anaacctaagcttagaattagaaacaaagaaaagaagaaaggaaagaattgatcgttgaaaatgcagggaggaaagaaagcgggagagtccattaaggaaacagctacaaacattggtgcttctgccaaggctggcatggagaagaccaaggccactgtccaagagaaggcagaaagaatgacagcacgtgatccggtgcaaaaggagttggcaacccaaaagaaagaggcaagatgaaccaggcggactggaca

SEQ ID NO: 284385 - DNA, 258 bp, Glycine max
  unsure (1)..(258): unsure at all n locations
ctaaaaacaggcttgctgctcgagttgggtccaaggatgttgattctttccgggcttctattagaaagtttcatctccaanacaactttggtggcactgaggaaaccgatattgtcgcgttaaagaattacttggatgcacagtactacggtgaaatagctattggaacttctcctcaaaagttcgctgtcattttcgacactggcagctctantttgtgggttccatcatctaaatgcaccttctcggttgcatgct

SEQ ID NO: 284386 - DNA, 249 bp, Glycine max
  unsure (1)..(249): unsure at all n locations
ggagcaccccatattgcaagggccatggagggggaaaacgctgtacataccagggtggtggagtatgcactaaaagtgtgcatggaggtaccaacttctgtgtggcacatgggggtggaaagaggtgtgctgtaccaggctgcacaaagagtgctagaggaaggactgatcattgtgtccgccatgggggnggcaagagatgtaagttcgaaggctgtggaaagaggcacaaggcagcactgacttttg

SEQ ID NO: 284387 - DNA, 251 bp, Glycine max
gctcaccttggagggtattaagcaattttatgtcaatgttgagagggaggattggaagctggacacactctgcgatctttacgagacattagctatcactcagagtgtcatttttgttaataccagaaggaaagttgattggttgactgacaagatgagaagccgtgaccacacagtctcagcaacccacggagacatggaccagaataccagggacattattatgcgtgaattccgttctgggtcttccc

SEQ ID NO: 284388 - DNA, 247 bp, Glycine max
  unsure (1)..(247): unsure at all n locations
ggaatatcagattattgagaagaatatcctgcgcacccagacactcttgtgtgatctggtgatgcgagatgcacccctgggaattgtgtcagagagccccaatataatggatcttgtgaaatgtgatggagctgccctcatatataagaacaaggtatggngattaggagtaacaccaagtgaatcccagataagagagatagctttttggttgtctgagtaccnatggattccacagnacnancgg

SEQ ID NO: 284389 - DNA, 283 bp, Glycine max
  unsure (1)..(283): unsure at all n locations
attnaacacaagggtgggaattcantacgtgggcggcgtggctcaccggaancggttcggtgcctctatacaacctcatggaggatnctgccactgctgagatcagcagggtgcacaattggcantggctcaagtatggagtggagctcaatggggatngtcttgnagtgaaagtnnacaaanaactttttggtacggttttnnagaanagatccnaaggttgaaaaagaagtggggacagataagttcaagaagggaattacaaggangcttgcagtctcnc

SEQ ID NO: 284390 - DNA, 288 bp, Glycine max
  unsure (1)..(288): unsure at all n locations
gcgacgccgtttgggtcctcttccacctcgccttcttctnccaatgccttccctccgcctgggcccactcggcgatcctcctcccgggtcaactcgcccgtgactcaccgcagagctgccccgcccctgaccccaacctctactacaagccagtcatcggaatcgtcagccatcccggcgacggcgcctccggccgcctcagcaacgccaccggcgcctcctacatcgccgcctcctatgtcaaattcgttgaggccgccggcgcccgtgtcgttcccctcatctata

SEQ ID NO: 284391 - DNA, 281 bp, Glycine max
acacacaactactacaagtacttccttacaatcaaaaccaacaacaactatggcaagttatcaaaagcactacgatgatcagggtcgcaaggttgacgagtatggcaacgttgagaagcaaaccgacgaatacggcaaccctgttcatgctgctagtgtcacctatgtagccaccagaactgctgctggtggttacagtgatgacattaataagcaacatgataccaccaatgcctacggcgtagacactggtagacagcattctagtggtggctacgatg

SEQ ID NO: 284392 - DNA, 280 bp, Glycine max
  unsure (1)..(280): unsure at all n locations
gctaggttttttgaagctgctgttgcatacaaaaagaagattggattcaatgggacatttctaatcgaaccaaagccacaagaacctacaaaacaccagtatgattgggatgctgcaacctcagctaatttcttgcgaaaatnnggacttacaggggaattcaaactcaacatagagtgcaaccatgccaccctctctggccacagttgtcatcatgagctcgaaactgcaaggatcaatggattgctgggtaatattgatgcaaacatggtgatctcaa

SEQ ID NO: 284393 - DNA, 284 bp, Glycine max
  unsure (1)..(284): unsure at all n locations
cgagctagctagctagcaagcaagcacagagatggaggcaaagcgaggncatgccctcatgtgcttggcacgtgtttcactcttcctctgcgctctaaccctatccgctgctcacggaagcaccacggttcaagacatcgcgaganagttgaaactcggggacaacgagcttctgcgcacggagaagaagttcaaggttttcatggagaattacgggaggagctactccacagaggaggagtatttgcgccgtttggggattttcgcccagaacatggtcagag

SEQ ID NO: 284394 - DNA, 222 bp, Glycine max
gaaagaagaggggaagagtgtcattggtaaaagtttgaccagcattggtgagaagctgggtgatgcaaaacagagagaggagctgttagacaacgtcactggcaacatcaccgagggaggaggcgaggtgttgggagcagtaggtgaaaccgttgctgagattggacagaacatgatgaagccagcggagatagttcaggaacgcgctcacgttcgacaagc

SEQ ID NO: 284395 - DNA, 281 bp, Glycine max
  unsure (1)..(281): unsure at all n locations
gctaggngntntgaagctgcngtngcatacaaaaancagattggactcaatgggacatttctaatcgaacnanagccacaagaantnacaaaacaccagtatgattgggatgctgcaacctcagctaattnctngngaaaatatggactnacaggggaattcaaactcaacatanagtgcaaccatgccaccctctctggccacagttgtcatcatgagctcgaaactgcaaggatcnnnaggatttngggtaatattgatgcaaacactggtgatcctca

SEQ ID NO: 284396 - DNA, 279 bp, Glycine max
  unsure (1)..(279): unsure at all n locations
cacaagagtcgcatctcaagcttttgtcnttctctacttttcttcttctttntgtgtatcgtatcgtattggagagaagagatggcgacgagggtggtggcggaacagaagccgaagacgaagattgtgtgcacgctggnncccgcatcgcgctctgtcccaatgatcgagaagcttctgcgggcgggcatgaacgtggctcgcttcaacttctcccatgggtcccacgagtaccaccangaaaccctcgacaacctccgcgncgccatgagaacacng

SEQ ID NO: 284397 - DNA, 280 bp, Glycine max
  unsure (1)..(280): unsure at all n locations
gcagtcgcagaggaaaaccctagctagtagtctcagttcgtttgagagagaaaaaatggcagagggtctcgttctccgcggaaccatgcgcgcccacaccgacgtcgtgacggcgattgccactcccatcgacaactccgacatgatcgtgacggcncgcgcgacaaatccatcattctctggcacctcaccaaggaggacaagacctacggtgtgccccgccgccgcctcaccggacattctcacttcgtccaggacgtcgtcctctcatccgacggtc

SEQ ID NO: 284398 - DNA, 277 bp, Glycine max
  unsure (1)..(277): unsure at all n locations
ccgacaaaacagtgagggcatgggatgtggaaacaggaaaacaaatcaaaaagatggtagaacatctctcttatgttaattcatgttgtccttctcgaaggggaccacctcttgttgttagtggctctgatgatggaactgctaaattatgggatatgcgtcaaaggggttccatccaaacattcccagataaataccagattaccgctnctggcttctcagatgcatcagataagatcttcactggtggtattgacaatgatgtcaagatttggga

SEQ ID NO: 284399 - DNA, 278 bp, Glycine max
  unsure (1)..(278): unsure at all n locations
ccaaggaaaaactccaagacattgcatctgaggctggtcaatacanncacagagaaggccagagaaatgaaggatgcagcagcagagaaggntagtgacattgcaaaggctgcaaagcaaaaatcacaagagctgaaagacaaattaggtggacaacaccgggatgctgagctttgagaattgagacggtttttaatcactttgtaccttttaattatgccacaatagttgtccantctgccagaaataatattgtgtgcgtatatatataagggagt

SEQ ID NO: 284400 - DNA, 277 bp, Glycine max
  unsure (1)..(277): unsure at all n locations
caatatctacacaaaagtgttccncttgagtgaaaagtggtgtgttaagaactaaacaatttttcaatggcgtccaagaaacaagaggagcgagctgaggcagctgcgaaagttgctgccaaagaactcgaacaagtcaacagagaaagaagagaccgtgatttcggtgttgttgctgnnnnnnnnnnnnnnnnttcatcaggaagatcaacaaaaacgtggtgtaatcgggtccatgtttaaggcggtgcaagacacctacgagaacgccaaggaa

SEQ ID NO: 284401 - DNA, 271 bp, Glycine max
  unsure (1)..(271): unsure at all n locations
aacatttcgtccaaaaaagagtgctccatctggaagtaagggtgntcaacttcaaaaacacatcgatgccacgttgggtagtgggaacttgagggaggctgttaaactgcctcccggtgaagatattaatgaatggctagctgtaaacaccgtggacttctttaatcaagtgaatatcctgtttggtactcttacagaattctgcacgccaagtaactgccctcaatgactgcaggaccaaagtatgagtatcgatgggctgatggtgtta

SEQ ID NO: 284402 - DNA, 267 bp, Glycine max
  unsure (1)..(267): unsure at all n locations
ggaaaagaaggggttcctcgacaagattaaggagaagctaccagggcacaagaagacagaggaggccacagctactantctcctccaccaccacctgttgcatcattggagcatggtgaaggtgctcatcatgaaggagaggccaaggagaagaaaggtatattagaaaagatanaagagaagcttctggttatcattccaagacagaggaggaaaaggaaaaggaaaaggagatggtgcttcatgncnttnagatgagacaggntt

SEQ ID NO: 284403 - DNA, 273 bp, Glycine max
ggcaatgaatgctgctgagattaccgacaagttgggtctacactctctcagacagcgccactggtacattcagagcacctgtgcaacctctggggagggcctttacgaaggtctggactggctttccaacaacattgccaataaggcttaatgcctttgggagtcttgcggattggtaattctggatgcaggggtgaacattatctagcttttatttcttggtcctcttccaagacaatcgaatttgtgctcatgtaatgcggtttaggacat

SEQ ID NO: 284404 - DNA, 265 bp, Glycine max
  unsure (1)..(265): unsure at all n locations
tccattgtntttgaacactcatcaccatggccaagcttgttctttcccattgtttcttcttttcagtggctgcttcgtctgagagngcaggcacagcaaaatgagtgccagatccaanagctgaatgccctcaaaccggataaccgtatagagtcggaaggtgggttcattgagactggaaccctaacnacaagccatncagtgtgccggtgttgccctctctcgntgcaaccttaaccgcaatgccttcgtagacttcctacac

SEQ ID NO: 284405 - DNA, 266 bp, Glycine max
  unsure (1)..(266): unsure at all n locations
tgagaagatgaaggccactagagatgtgcttagtgaatatgggaacatgtcaagtgcttgtgttcttttcatcttggatgagatgaggaggaaatctgctgaaaatggacataaaaccacaggtgaaggacttgaatggggtgtgttgttcggttttggacctggacttaccattgaaactgttgttttgcatagtgtggccatctgagatgcctcatatattattcatatgngtaccacttttcaaactgctggggtttgtaaca

SEQ ID NO: 284406 - DNA, 272 bp, Glycine max
  unsure (1)..(272): unsure at all n locations
anaaaaaggggttagggtttgttcttgtgatcgaagctaagcgaacaaaatgggtggatcagtgagggacgtgaagtcgaagggcgaggtcgacgaggtggtggcgagtngctctccggttatcctccacttctgggcgtcgtggtgcgaactttccaagcacatggaccaactcttctctcacctttccactgatttccccaangnaccgcttcttaagggtcgaggccgaanagcaacccgagatttctgaggcttactccgtctccgct

SEQ ID NO: 284407 - DNA, 252 bp, Glycine max
  unsure (1)..(252): unsure at all n locations
aatccttgtgcaccgtaagggttgtgaagcaggcagagaananccatggtgcacgnttccttctacngaaactatgggaaaaccttcaagaagcctcgtcgtccgtacgagaaggagcgtttggacgccgagttgaagctggtcggtgagtacggacttcgctgcaagagggagttgtggagggttcagtacgctctcagccgcatccgtaacaacgccaganatcttttgacnctcgacgagaagaacccg

SEQ ID NO: 284408 - DNA, 267 bp, Glycine max
  unsure (1)..(267): unsure at all n locations
tgaaaagattgcaagccagtgatttttnaaccttacctgangctcatgcgtgcactgcagggttgaagtccttgaactacttcagnaactgctgatggaattgaggaatgccgcaaactatgtggtggccatggttacctttgcagcagtggtctccctgagttatttgcagtctacattcctacctgcacatatgaaggagagaacactgtgctgcttttacaggtggncccccngaaaatcagactattctcattgggctccaga

SEQ ID NO: 284409 - DNA, 270 bp, Glycine max
  unsure (1)..(270): unsure at all n locations
tangtcggagaganagagngagngananagaaaaatggctgatacaatagnagagtgcngtgagaccggtngtaatatgtgataacaagtgtggctgacacagttccatgcactggtggttccacttgcaaggtgcannagtgtcngcatgacaactgnaggcggtgatcacgtgaacatgctcgtgcggagagtactgtgggtgacaatccatnctcatgtccccaagactgcggcttctgnaatggntgcagatctggcnagnttccc

SEQ ID NO: 284410 - DNA, 266 bp, Glycine max
  unsure (1)..(266): unsure at all n locations
cgaaaaaacaagtacattgactgccggggcatgtcattcagggacttcatggcaggtaaactccctgtcattcctggtcaggtgccaacgcttggtgactggggaaatcatctaacaactatatttcctgaggtcaggctaaagaggtacatggaaatgaggggtgctgatgatggccctttggaaatgttatgcgctctgccggctttttgggtangttactgtatgangaggttcgctacaaaatgtctanatatgatgcngat

SEQ ID NO: 284411 - DNA, 270 bp, Glycine max
  unsure (1)..(270): unsure at all n locations
aaaggaaataattgatctttgaaaatgcagggaggaaagaaagctggagagtccatcaaggaaacagctgcaaacattggtgcttctgccaaggctggcatggagaaaaccaaggccactgtccaggagaaggcagaaagaatgacggcacgtgatccgatgcaaaaggagttggcaacccagaagaaagaggcaaagatgagccaggcagagctggacaagcaggcggcgcgtcagcataacacggcggcgaanaggctgccacggcag

SEQ ID NO: 284412 - DNA, 266 bp, Glycine max
  unsure (1)..(266): unsure at all n locations
tctctaataacatttctaatctcattctccttctgttcaaacactctctctcatggcatcagataagaagattaggancggcatcaacgggtttggaaggattggccgtttggtggccagggttgcccttcaaaggaatgatgttgaacttgttgctgtcaacgatcctttcatcaccactgattacatgactacatgttcaagtacgacaccgttcatggccagtggaagcatttgatgtgaaggtgaaggactctaagaccctt

SEQ ID NO: 284413 - DNA, 268 bp, Glycine max
  unsure (1)..(268): unsure at all n locations
ttcaaaccttgctctatactacacagtacanacactagaagaataatggcttccatcctccactactttttagccctctctctttcttgctcttttcttttcttcttatccgactcagtcacccctacaaaaccaataaaccttgttgttctacccgttcaaaatgatggttccacagggctccattngnacnaacctccaaaaaagaacccctctaatgcaagtaccagtcctggtggacctcaatggaaatcattgtgggttaatg

SEQ ID NO: 284414 - DNA, 270 bp, Glycine max
  unsure (1)..(270): unsure at all n locations
ctcaagttcacacccttgtctctatggatgatccaattgaagttccaccaaccancgncangngaacgtggtggcgatgccatacccagggcgaggccacgttaaccccatgatgagcctctgcaagctgctcctatccaaaaactccgacatcctcgttaaccttcgtggtcaccgaggaatggctcggcctcatcggctccgaccccaaacccgacaacatccgattcgccacaatcccaaagttattccctccgaacacggtcgagc

SEQ ID NO: 284415 - DNA, 265 bp, Glycine max
gtctataggttgaatgaagctgttatgcattttggggagagcatcaaagaaataatccaatgaggagtttggtgatgggatcatgtcagcaatagatttctactgctcggttgataaaattaaaggagtagatgggaaggatcgtgtggtattgacatttgatgggaaatatttgccacattcagaacagaaatctgagcacatggtttcaagaacaaggccactgggaaaacagtgagtatcttcatggaggaccaactacgca

SEQ ID NO: 284416 - DNA, 267 bp, Glycine max
tagatggagtgaaggttgatgtgcagaacattattgagacccttggtgcgggacatggtggccgagtgtcacttacttcgcagctatcatcacgcgcttgaggcttccattgctagcaattttactgataacggatgcattgcgtgtatgtgtcacaacactgatggactttatagtgctaagcagactgctattgtgagagcttctgatgatttttaccctcgtgatcctgcttcccataccatccatatttctctgttgcataca

SEQ ID NO: 284417 - DNA, 281 bp, Glycine max
  unsure (1)..(281): unsure at all n locations
caaaacaaaaagtttacgttacaaatcgcataataaccgtcctaagtttattgagagaattttgcaagtgtgaganacatggcatctcgtcaaaacaacaagcaagagcttgatgaaagagcaaggcaaggaganactgttgtcccgggtggaactggtggcaagagcctggaggctcagcaacaccttgctgaaggacggagccanggatggcaacaangaagaacagctgggtacagagggtacnacgaaatgggacgcnaagnagggttgagcatgtg

SEQ ID NO: 284418 - DNA, 251 bp, Glycine max
  unsure (1)..(251): unsure at all n locations
atcacacacaactacaagaaagaacttccttataaccaaaaccaacaacaactatggcaagttatcagaagcactacgatgatcagggtcgcaaggtcgacgagtatggcaatgttgagaggcaaactgacgaatatggcaacccggttcatgccactagtgtcacttatgtagccaccaaaagtgttggtggctacaatgatgacgctaataagcaactgatattactggtgtctancccagaaagnccc

SEQ ID NO: 284419 - DNA, 284 bp, Glycine max
  unsure (1)..(284): unsure at all n locations
gcgtcacagtcacagaaactacattccatggaagacgcataataaccgaggctgttggtggccaggtagtggaacagtatgtggagccaaatccagttgaggctgnacgaaccagtgcaattaaggagagtgctataacaataggagaggcattggaggccacggcacagacggtgggtcacaagccggtggaccagagtgatgcctcagcgattcaggcggcggaggttagagcaacgggaagtaacgttataacgccgggaggacttgcggctatggctcaa

SEQ ID NO: 284420 - DNA, 283 bp, Glycine max
caacatgataccaccaatgcctacggcgtagacactggtagacagcattctagtggtggctacgatggtgacactaataaacatcatggaactactggtggctataatgatgacaccaatagacatcatggaactaccggtgtctatggtatagacaccgataggcaacaacatgggactactggtggctatgccggtgacactggtaggcaacatgggaacatcggtggcccttactatggaaccaacaccgcagacaccggtactggtcccagaagtggaa

SEQ ID NO: 284421 - DNA, 284 bp, Glycine max
aaagaaaaaagagaaacaaatggcagcactgggtggctttaccgacatcaccggagcacagaacagcatcgatatccgaaaatctcgctcgctttgctgttgatgaacacaacaaaaaagagaatgcagttctggagtttgtgagggtgattagtgcaaagaaacaagtggtttctggcaccttgtactatatcactttggaggcaaatgatggtgtgacgaaaaaggtttatgaaactaaggtgttggagaaaccatggttgaacatcaaggaggttcaggaa

SEQ ID NO: 284422 - DNA, 283 bp, Glycine max
tgggactaccggtgtttatggcctaaacaccgacagacatcatggaacttctggggtgaatcccgggatagacacccataaccaacaacatgggactaccgttggttatgctggtgacactggaaggcagcatgggaatacaggtggcctttactatggaaccgacaccgcggacacaggaaccggtcctagaagtggaaacaccggtggcaccggttatggaggcactggtggtactgattatggaacagctggtggcactggttatggaagtggaatggct

SEQ ID NO: 284423 - DNA, 286 bp, Glycine max
actacaagtacttccttacaatcaaaaccaacaacaactatggcaagttatcaaaagcactacgatgatcagggtcgcaaggttgacgagtatggcaacgttgagaagcaaaccgacgaatacggcaaccctgttcatgctgctagtgtcacctatgtagccaccagaactgctgctggtggttacagtgatgacattaataagcaacatgataccaccaatgcctacggcgtagacactggtagacagcattctagtggtggctacgatggtgacactaataaac

SEQ ID NO: 284424 - DNA, 284 bp, Glycine max
gagaaattgtgcacaaaggtactggaccttgagagtactaatgtgaaggctctctatagaagggcccaggcatatatccagttggctgatttagacttggccgaatttgatattaagaaagcgcttgagattgaccctaacaacagggatgtcaagcttgagtacaagactttgaaggaaaagatgaaggagtacaacaaaaaagaggcaaaattttatggaaatatgttcaacaaactgcacaagctagattctcttgaccgtaataaaccagcgtcgaaggg

SEQ ID NO: 284425 - DNA, 284 bp, Glycine max
caatttgcaaaccaaacacaacacaaggagaagaaccagatctctctttctcaaatcaccaagaatagttgaaaatggggctgtctttcacgaagctgttcagccggctctttgcgaagaaggagatgcgtattcttatggtgggtctcgacgccgccggtaagaccaccattctctacaaactcaagctaggagagatcgtcacaaccattcccaccattgggtttaatgttgaaactgtggaatacaagaacatcagcttcactgtctggggatgttggtgg

SEQ ID NO: 284426 - DNA, 282 bp, Glycine max
  unsure (1)..(282): unsure at all n locations
cattctcccatttcctctcagaaccctcgatcactcccacgcgctcctatatcctctccttcaccgtcgctctctccaacgatcacaacaacatcgtcatcccatggcaaacgccgcatctggtatggcagtccatgatgactgcaagttaaggtttttggagctgaagacaaagaggacacaccgtttcatagtttttaagattgaggagcagcagaagcaggtcattgtnganaagcttggtgagccagcccanggctatgaagatttcactgccagcct

SEQ ID NO: 284427 - DNA, 250 bp, Glycine max
  unsure (1)..(250): unsure at all n locations
tggctgatacaagtggaggagatgcagtgagaccggtggtaatatgtgataacaagtgtggctgcacagttccatgcactggtggttccacttgcaggtgcacaagtgtcggcatgacaactggaggcggtgatcacgtgacatgcttntgcggagagtactgtgggtgnaatccatgctcatgtcccaagactgcggcttctggaactggttgcagatgtggcacagattgctcatgtgcctcttgccg

SEQ ID NO: 284428 - DNA, 280 bp, Glycine max
  unsure (1)..(280): unsure at all n locations
tagaaaaggaaaataaagaaattagcgtgaaaaatgttgggtgtgttcagcagctccatagtgtcgccgccggaggagctcgttgccgccggcagccgtacaccgtcgccgaagatgacggcggcggcgctgcggaagtggttcgaggagaagaacccctccgcagtgtcggtggaggtcggagagcatgtccagctcgcttatacccaccagaacgagtcgccgtttcagcccagatcctttgctgnnaaggatgaggtattctgcttgtttgagggag

SEQ ID NO: 284429 - DNA, 283 bp, Glycine max
  unsure (1)..(283): unsure at all n locations
ggaatgacccttgtggattaggcctagcagcatttgctgtcagattccatctgtaggttctagcttgcttcatggaaagctccgttatgctgttaanagtgtctcatatgttaaccctganacccctctcaagcttgctgattacttcaacattcccggagtcttcagtgtgaatttactccaaaactctccctcaaacggtccaggatacataggcacctcagtgttgcaaacttctctccatgatttnattgaggttattttccagaacaacgaaaacacc

SEQ ID NO: 284430 - DNA, 286 bp, Glycine max
gaggagagctgagaaggagagacagaaggaaggtgaattagctgatgaggaacagaagaaagtgaagaaagaggttaagaagaaaggctcttcatcttctaaggatggcactgctaaatcaacctcttctaagaaaaaagcaagtggctctgatgaagaccacacttcacctacttcacagtcaaattgacgagaaagaggaggctccagatgaagatgatgacgacgacgtgcaatggctgacagatacatcacttgatgctgcccgtcaacgtatcccagaacg

SEQ ID NO: 284431 - DNA, 278 bp, Glycine max
  unsure (1)..(278): unsure at all n locations
tcgcganaaagtnganactcgggganaacgagcntctgcncacggagnagaagttcaaggntttcatggngnattacgggnggagctantccacagangnngagtatntgcgccgtttngggatttncgcccagaacatggtcagagcggcggagcatcaggngctggaccccaccgccgtccacggcgtcacgcattctccgatctcaccgaggacgagtttgagaagctctacactggcgtcaatggcggcttcccgtcatcgaataatgccgccg

SEQ ID NO: 284432 - DNA, 277 bp, Glycine max
gcattgcctgctgatcttataaaaagaggaatggcaattgaggatccatcgtgccctcatggcattcgccttgtgatagaggactacccttatgctgttgatggacttgagatatgggatgctatcaagacatgggtccatgaatacgttttcttgtactacaaatcagatgacacacttagagaagatcctgaactccaagcctgctggaaagaactcgtagaggtgggtcatggagacaagaaaaatgagccatggtggcctaagatgcaaactc

SEQ ID NO: 284433 - DNA, 242 bp, Glycine max
  unsure (1)..(242): unsure at all n locations
cgtcaccgagcgtgtccttgcagcatgctacaaggctttgaatgatcaccatgtccttcttgagggtaccctattgaagccaaacatggtcacccctggatcccaatctgcnaaggtttcccctcaggtggttgccgagcacactgtcagagcccttcagagaaccgtgcctgctgcagttcctgctgtcgntttcttgtctggtggccagagtgaggaggaggcatccgtcaacctcaacg

SEQ ID NO: 284434 - DNA, 274 bp, Glycine max
gtttcgaatgcaaagacgtttcttgagaagaggtacacagatgatatggagcttgatgatgcagtccacacattcaatattgactttgaaggaagggtttgagggacagatctcaggaaaaaacattgaaattggcataatcggtgctgataaaaaattcagggtattgacaccggccgaaattgatgactatttggctgaagtagaataatgtgctatgaagaagtcgtctattcctgaagttgtttcacagttgggtttaattggtagagtg

SEQ ID NO: 284435 - DNA, 223 bp, Glycine max
  unsure (1)..(223): unsure at all n locations
atcgntcgcatggttaggtctggttatgagagagagtgtcttcaggtttatagtagcgtccgtcgtgacgctttggatgagtgtttgattattctcggtgttgagangttgagtattgaagaggttcannaggtngagtggaggagtttngatgagaanatgnngnattcngnttcaggctgtnaangnngtngttggagtgttctcagtggtgagaagaggc

SEQ ID NO: 284436 - DNA, 273 bp, Glycine max
agaaacttaatcgatcatcacttcacttcactaatacatcatggcagacgagacccagaacaagtatgagagctctgaggttgaggtccaggatcgtggtgtttttgactttctcggtaagaaaaaggatgaagaagacaagcctcatcctcaggaggaggtcatcgccaccgagtttcaaaaagtcactgtctcagaccaaggagagaacaagcacagcctcttagaaaagcttcaccgatctgacagcagctctagtcttcaagtgaggag

SEQ ID NO: 284437 - DNA, 261 bp, Glycine max
atcggacgaagatgccttcttcgctgattacgctgaggctcaccaaaagctttctgagcttgggtttgctgaagcctaagcaacgttttggggattgttggagaggcacggtgcccataatatttctctcataaattctatggtcatggtttctaatgcgccactgtgggttcctcaaatttttagatagcttttgaatgtattttgctggacgtggtgatgatgattggagttgggttgtttttatttgtggtcgatcct

SEQ ID NO: 284438 - DNA, 262 bp, Glycine max
  unsure (1)..(262): unsure at all n locations
ggcgattgctactggcatgcaatttattcagaattttcctgagcgaacatataaatcaatgcttattccccttctccactaagataagagagctggcgaaacaactcgcaaagggttttatttgtatgatgataaacgcaaggctagtcctgatcctgaattgaaaaactatatccagaaggctaggagctttactggtttctccgttgatcctaagnntccacaagttacaagaaaaggacatcatgaaatgatattcttt

SEQ ID NO: 284439 - DNA, 265 bp, Glycine max
aataaaccttgttgttctacccgttcaaaatgatggttccacagggctccattggtcccaacctccaaaaaagaacccctctaatgcaagtaccagtcctggtggacctcaatggaaatcacttgtgggttaactgtgagcagcagtactcatccaaaacgtaccaagcacccttctgccactccacccaatgctctagagccaacacccaccaatgcctcagttgccccgcggcatcaaggccagggtgccacaaaaacacgtg

SEQ ID NO: 284440 - DNA, 263 bp, Glycine max
  unsure (1)..(263): unsure at all n locations
aganattgtgcacaanggtactggaccttgagagtactaatgtgaaggctctctatagaanggcccaggcatatatccagttggctgatttagacttggccgaattngatattaagaaagcgcttgagattgaccctaacaacagggatgtcaagcttgagtacaagactttgaaggaaaagatganggngtacnacaaaanagaggcacanttctntggaaatatgttcnnnaaactgcacaagctagattctcttgacagt

SEQ ID NO: 284441 - DNA, 267 bp, Glycine max
cagtcatgttgagaggacaaaaattttgcaagcattcaaaactagcaaagatataaatactatatttctttccaaggtgggtgacaactcaattgatattcctgaagcaaacgtaataattcagatctcttcacatgctggttcaaggcgacaagaagcccagcgtctgggtcgtattcttagggccaagggaaagcttgaggataggatggcagggggcaaggaggagtataatgcatttttttattcccttgtttcaattgatac

SEQ ID NO: 284442 - DNA, 234 bp, Glycine max
  unsure (1)..(234): unsure at all n locations
tggctgatacaagtggaggngatgcagtgagaccggtggtaatatgtgatncacaagtgtggctgcacagttccatgcactggtggttccacttgcaggtcncacaagtgtcggcatgacaantggaggcggtgatcacgtgacatgctcgtgcncagagtactgtgggtgcaatccatgctcatgtcccaagtggcggctctggaactggttncagttngggnnaanttnccc

SEQ ID NO: 284443 - DNA, 231 bp, Glycine max
tggctgatacaagtggaggagatgcagtgagaccggtggtaatatgtgataacaagtgtggctgcacagttccatgcactggtggttccacttgcaggtgcacaagtgtcggcatgacaactggaggcggtgatcacgtgacatgctcgtgcggagagtactgtgggtgcaatccatgctcatgtcccaagactgcggcttctggaactggttgcagatgtggcacagatt

SEQ ID NO: 284444 - DNA, 261 bp, Glycine max
atcggacgaagatgccttcttcgctgattacgctgaggcttcaccaaaagctttctgagcttgggtttgctgaagcctaagcaacgttttggggattgttggagaggcacggtgcccataatatttctctcataaattctatggtcatggtttctaatgcgccactgtgggttcctcaaatttttagatagcttttgaatgtattttgctggacgtggtgatgatgattggagttgggttgtttttatttgtggtcgatcc

SEQ ID NO: 284445 - DNA, 185 bp, Glycine max
gttccttaagttttgtggctttgaataaaagatagaagagaaggaatctgaatttcttcatccaacctgcacatggtaatctagtgtgtttgagtgctttcatgtttggctttaataaaataaaagcagttgttttgtaaaatgttcagaatcaataaaagcatttactgctttgctttgtgcgc

SEQ ID NO: 284446 - DNA, 263 bp, Glycine max
cagtgatgacattaataagcaacatgataccaccaatgcctacggcgtagacactggtagacagcattctagtggtggctacgatggtgacactaataaacatcatggaactactggtggctataatgatgacaccaatagacatcatggaactaccggtgtctatggtatagacaccgataggcaacaacatgggactactggtggctatgccggtgacactggtaggcaacatgggaacatcggtggcccttactatggaa

SEQ ID NO: 284447 - DNA, 263 bp, Glycine max
  unsure (1)..(263): unsure at all n locations
cctggcttctatttcttgtaggagtgctattttcagctttcttctcatctgcatctttctttctgtttacaatatcaaagtgtgtgaggcacaagccaagcctcccacagcgaaggggctatcatataacttctacgacaaaagctgtcctaagcttaaatctatcgttagatcagagctcaaaaaggtcttcaacaaggacattgctcaagctgctggntgttcgtttcactccagactgtttttaggtggnngggggnttt

SEQ ID NO: 284448 - DNA, 259 bp, Glycine max
cgatacgtagactcttcccagttctgttgtgtgagtctgtgagtctttcttagctgatatggcggttgatcgctcccttacgaggtgctgtagcctcgtactgtggtcgtggatgttgctgaggatgatgatggcgcagggtgcagccgcgagggccaaccggaaggagtgggactcggtcataaagttaccggctgaaccggtcgatgctgactcggatcatgaagtgggaacacgatgggcggttctgtggctggtt

SEQ ID NO: 284449 - DNA, 260 bp, Glycine max
  unsure (1)..(260): unsure at all n locations
acanacaactactacaantacttccttacaatcnaaaccaacaacaactatggcaagttatgcnaaagcactacgatgatcagggtcgcaaggttgacgagtatggcaacgttgagaagcaaaccgacgaatacggcaancctgttcatgctgctagtgtcacctatgtagccaccagaactgctgctggtggttacagtgatgacattaataagcaacatgataccaccaatgcctacggcgtagacactggtagacac

SEQ ID NO: 284450 - DNA, 261 bp, Glycine max
  unsure (1)..(261): unsure at all n locations
acctaagtgagaaacaaagaaaggaaataattgatctttgaaaatgcagggaggaaagaaagctggagagtccatcnaggaaacagctgcaaacattggtgcttctgccaaggctggcatggagaaaaccaaggccactgtccaggagaaggcagaaagaatgacggcacgtgatccgatgcaaaaggagttggcaacccagaagaaagaggcaaagaggcgccaggcagagctggacaagcaggcggcgcgtcacatnaa

SEQ ID NO: 284451 - DNA, 263 bp, Glycine max
  unsure (1)..(263): unsure at all n locations
tcanacacaactactacaantacttccttacaatcaagaccanccaanaactatggcaagttatcnnaagcactacgatgntcagggtcgcaaggttnacgagtatggcaacgttgagangcaaaccgacgaatacggcaaccctgttgcatgctgctagtgtcacctatgtagccaccagaactgctgctggnggttacagtgatganattaatangnnacatgataccaccaatgcctacggcgtagtacactngtagaca

SEQ ID NO: 284452 - DNA, 261 bp, Glycine max
caagaatgcaagaccattgttgcagagtatggacaaacaatattggatttgcttttggctgaaacacaaccgaagaagatctgttcccgaattggattgtgcgcatttgatgggactcatggtgttgatgtggggatcaagagcgttgtagatgagaatgaaagaaaatcattgggtggtcatcatggtgctgcttgtcctgcatgtgagatggcggttgtttggatgcagaaccagctgagccgaaatcagacacaagat

SEQ ID NO: 284453 - DNA, 260 bp, Glycine max
cccttatgcggccttactgaaaaaattagatcttctttatgcaatgctggatacagaggaccattgtacgttaatccaaaggtgccccaacttggaagtccttgagtcaaggaatgtgattggagacagaggattagaagtgcttgctcgctgttgtaggaggctaaaaggattaggattgaacgaggtgatgatgatcaaggaatggaggatgaagaaggtgttgtttcccagagaggactaattgctttgtcacatgg

SEQ ID NO: 284454 - DNA, 265 bp, Glycine max
  unsure (1)..(265): unsure at all n locations
gaaatccaaaaccctaccgacaccacactcaatcgaaatnccttcattctcttctcatcgatggggcagaagtctctgatctacgcgnaccgtgtcgcggggaacagtgattctcgcggagtacaccgaattcagcggaaacttcaactccatcgccttccagtgccttcagaagctccctgccaccaacaacaagttcacctacaattgngacgcacacaccttcaattacctcgtcgacaatggctacacatattgtgttgtt

SEQ ID NO: 284455 - DNA, 261 bp, Glycine max
  unsure (1)..(261): unsure at all n locations
aggaagtattcttaaaatgggccactggcatcatattttccactgtctatggtcaaatgagcaccttatttgtgttgcaaggacaaaccatggacactcgtgttggcaactccactttcaaaatcccaccagcttcactgtccatctttgacaccctcagtgtcatattttgggtcccagtgtatgacaggatcattgtgccaattgctacatantnaccactgggaacaaaaatggcctaactcagctccagagaatggg

SEQ ID NO: 284456 - DNA, 260 bp, Glycine max
  unsure (1)..(260): unsure at all n locations
attgaattctccagagagaagaagaaacttaatcgatcatcacttcacttcactaatacatcatggcagacgagacccagaacaagtatgagagctctgaggttgaggtccaggatcgtggtgtttttgactttctcggtaagaaaaaggatgaagaagacaagcctcatcctcaggagnaggtcatcgccaccgagtttcaaaaagtcactgtctcagaccaaggagagaacaagcacagcctcttagaaaagcttcac

SEQ ID NO: 284457 - DNA, 260 bp, Glycine max
attgaattctccagagagaagaagaaacttaatcgatcatcacttcacttcactaatacatcatggcagacgagacccagaacaagtatgagagctctgaggttgaggtccaggatcgtggtgtttttgactttctcggtaagaaaaaggatgaagaagacaagcctcatcctcaggaggaggtcatcgccaccgagtttcaaaaagtcactgtctcagaccaaggagagaacaagcacagcctcttagaaaagcttcac

SEQ ID NO: 284458 - DNA, 259 bp, Glycine max
  unsure (1)..(259): unsure at all n locations
gcaaacacctgagtgaaagcctggtgaaatctgtggcaccatttgggttatgcttcaactccaacaagatcaatgcatatcctagcgtggaccttgtgatggacaagcccaatggtcctgtttggagaatctctggtgaggacttgatggtgcaggcacaacctggggtcacgtgtttgggtcgttatgaatggaggaatgcaacctagagctganattaccttaggggcacgtcagttggaagagaacctggtggtgt

SEQ ID NO: 284459 - DNA, 261 bp, Glycine max
ccaaaacagtaaagctaacttcaacacctttaattttctaaaagtaattcagcggctgaataccaagcggagaagatgagtcaggagcagccacggcgtcccaaaggccaaaaccccatcaaatacggcgacgtttttgtcgtctccggcgaccttgcacagaagcccgtcgcaccggaagatgctgccatgatgcaaagcgcggaaactcgagtgctcggacaaacccaacccggcggagcagcttccgtcatgcaatct

SEQ ID NO: 284460 - DNA, 260 bp, Glycine max
aaatgttctatctgcattctccaattcagatgtggaattcatcataggactagggaacgagtatctgcagagcatgagagacccttctaaggctcagagctgggttcaacagcatgttcagccttacatttcacaaaccagaatcacttgcatcactgtaggaaatgaggtattcaactacaatgatacacagctcacagcaaatcttctcccagcaatgcaaagtgtgtataatgcccttgttaatctaggactagcac

SEQ ID NO: 284461 - DNA, 263 bp, Glycine max
  unsure (1)..(263): unsure at all n locations
ggatctgaaggtgcaggtggaggagaataagatcctgcagataagcggggagagggtgaaggagaancaggaccagaacgacaagtggcaccgcgtcgagaggcagtgcggaagcttcctccgccgcttccggctgccggaggatgccaaccccaaccagatcagctgcacgctcgaaaacggggtgctgaacgtcaccgtgcccaaggtggagaagaagccggagaacaagaacgtgaggcagattgatgtggtttgatgat

SEQ ID NO: 284462 - DNA, 261 bp, Glycine max
  unsure (1)..(261): unsure at all n locations
tgcgcttaaggaaggaatgggtggtggcggtggccatgatccgtttgatatcttttcatctttctttggaggtggaagtagtcgaggtaggaggcagaggcgcggagaagatgtggttcaccctctcaaggtctctctggaggacctttatctcgggacttctaagaagctctccctctccagaaatgtcatatgctccaagtgcactggtaaggggtctaagtcntgggcttcgatgaatgtgctgggtgtcaaggactg

SEQ ID NO: 284463 - DNA, 257 bp, Glycine max
  unsure (1)..(257): unsure at all n locations
canaacaaaaagtttacgttacaaatcgcataataaccgtcctaagtttattgagagaattttgcaagtgtgagaaacatggcatctcgtcaaaacaacaagcaagagcttgatgaaagagcaaggcaaggagagantgttgtcccgggtggaactggtggcaagagcctggaggctcagcaacaccttgctgaaggaaggagcaagggagggcaaacaaggaaggaacagctgggtacagaagggtaccangaatg

SEQ ID NO: 284464 - DNA, 255 bp, Glycine max
  unsure (1)..(255): unsure at all n locations
tgggactaccggtgtttatggcctaaacaccgacagacatcatgncaacttctggggtgaatcccgggatagacacccataaccaacaacatgggactaccgttggttatgntggtgncactggaaggcagcatgggaatacaggtggcctttactatggaaccgacaccgcggacacaggaaccggtcctagaagtggnaacaccggtggcaccggttatggaggnatggtggtactgatatggaacanctggt

SEQ ID NO: 284465 - DNA, 257 bp, Glycine max
  unsure (1)..(257): unsure at all n locations
accatggcgtggaatcatcgtcaatattntaatcctactgcagaaagcctctactagctttcagcttttcctgtgtgggttggctgctggaacatgtgccaagctcgtctgtcatccacttgatgtggtcaaaaaaagatttcagattgaaggtcttcaaagacatccaagatatggagctcgggttgaacatcgtgcctacaaaaatatgttagatgccgtgaaaagaatattacagatggagggttgggctggtc

SEQ ID NO: 284466 - DNA, 257 bp, Glycine max
  unsure (1)..(257): unsure at all n locations
cggagagnaagagagngananagaganaaatggctgatacaagtggaggagatgcagtgagaccggtggtaatatgtgataacaagtgtggctgcacagttccatgcactggtggttccacttgcaggtgcacaagttcggcatgacaactggaggcggtgatcacgtgacatgctcgngcggagagtactgtgggtgcaatccatgctcatgtcccaagactgcggcttctggaactggttgcagatgtggcacag

SEQ ID NO: 284467 - DNA, 140 bp, Glycine max
atggaactaccggtgtctatggtatagacaccgataggcaacaacatgggactactggtggctatgccggtgacactggtaggcaacatgggaacatcggtggcccttactatggaaccaacaccgcagacaccggtact

SEQ ID NO: 284468 - DNA, 230 bp, Glycine max
  unsure (1)..(230): unsure at all n locations
tggctgatacaagtggaggagatgcagtgagaccngtggtaatatgtgataanaagtgtggctgcacagttccatggcactggtggttccacttgcaggtgcacaagtgtcggcatgacaactggaggcggtgatcacgtgacatgctcgtgcggagagtactgtgggtgcaatccatgctcatgtcccaagactgcggcttctggaactggttgcagatgtggcaagat

SEQ ID NO: 284469 - DNA, 229 bp, Glycine max
  unsure (1)..(229): unsure at all n locations
tggctgatacaagtggaggagatgcagtgagaccggtggtaatatgtgataacaagtgtggctgcacagttccatgcactggtggttccacttgcaggtgcacaagtgtcggcatgacaactggaggcggtgatcacgtgacatgctcntgcggagagtactgtgggtgcaatccatgctcatgtcccaagactgcggcttctggaactggttgcagatgtggcacaga

SEQ ID NO: 284470 - DNA, 253 bp, Glycine max
atcggacgaagatgccttcttcgctgattacgctgaggctcaccaaaagctttctgagcttgggtttgctgaagcctaagcaacgttttggggattgttggagaggcacggtgcccataatatttctctcataattctatggtcatggtttctaatgcgccactgtgggttcctcaaatttttagatagcttttgaatgtattttgctggacgtggtgatgatgattggagttgggttgtttttatttgtggt

SEQ ID NO: 284471 - DNA, 255 bp, Glycine max
  unsure (1)..(255): unsure at all n locations
aagaaaggaaataattgatctttgaaaatgcagggaggatagaaagctgnagagtccatcaaggaaacagctgcaaacattggtgcttctgccaaggctggcatggagaaaaccaaggccactgtccaggagaaggcagaaagaatgacggcacgtgatccgatgcaaaaggagttggcaacccagaagaaagaggcaaagatgagccaggcagagctggnncaagcaggcggcgcgtcanataacacggcggcg

SEQ ID NO: 284472 - DNA, 254 bp, Glycine max
  unsure (1)..(254): unsure at all n locations
aattgatctttgaaaatgcagggaggaaagaaagctggagagtccatcaaggaaacagctgcaaacattggtgcttctgccaaggctggcatggagaaaaccaaggccactgtccaggagaaggcagaaagaatgacggcacgtgatccgatgcaaaaggagttggcaacccagaagaaagaggcaaagatgagccaggcagagctggacaagcaggcggcgcgtcacataacacggcggcgaanaggctgcca

SEQ ID NO: 284473 - DNA, 254 bp, Glycine max
  unsure (1)..(254): unsure at all n locations
ttccctttgaagaaaagatggcatcccataggcaaagctatgaagctggtcaaactaagggccnaactgaggaaaagacgaaccagacgatgggcaatattggagagaaggctcaagctgcaaaggagaagacccaggaaatggcccaagctgcaaaggagaagacccaacaaacagcccaagctgccaaggacaagacttgcgacacttcccaagcggcaaaggagaagacccaacagaatacaggagtgctc

SEQ ID NO: 284474 - DNA, 256 bp, Glycine max
  unsure (1)..(256): unsure at all n locations
ctcttcctcaccgattgctagaatggaatttcgatgctcagtcatctcttttaccattctcttctctccttgctcttgcaggagagagccatgtccatgcatcgctacctgaggaagattattgggaagctgttnggccaaacactcccattcccactgcactgcgagagcttctaaagcctctcccttcatntgttgaaatcgatgaactccctaagcaaattgatgatacacagtacccaaaaacattcttcta

SEQ ID NO: 284475 - DNA, 260 bp, Glycine max
cgcgtgtactttcttgcgaaacagaagggcgaaggggcaaacacaacttttttgtttttttgtagagcgagagagaaaaaaatgttggggatcttcagcagttccgtggtgtcgccgccggaggagctggtggctgccggcagcagaacgccgtcgccgaagacgacggcggggaagctgctgaaccggttcgtggagaacaaggcgtcggcggtgtcgctgcaggtgggagaacacgtgcagttggcttacacgcacca

SEQ ID NO: 284476 - DNA, 256 bp, Glycine max
  unsure (1)..(256): unsure at all n locations
aagtcggtgtncccaacatggtcgtgttnttaaacaagcaagaccaagtcgacgangaagagcttctccaactagtngagctcgaagtccgcgaccttctgagctcctacgaattcnccggtgacgatacnccattgtctcgngctccgcgctcttagccctagaagcactcatggcnaaccctncaatcaaacgcggcgacaacgngtgggtcnacaagattttccaactcatggacgaggtcganaactanatt

SEQ ID NO: 284477 - DNA, 252 bp, Glycine max
  unsure (1)..(252): unsure at all n locations
cnactatggcaagttatcnaanggcactacgatnatnagggtcncaaggttgacgngtatggcaacgttganaagcaaaccgacgaatacggcaaccctgttcatgctgcnagtntcacctatgtagccagcagaactgctgctggtggttacagngatgacattaatangcaacatgataccaccaatgcctacggcgtagacactggtagacagcattctagtggtggctacgatggngacactaataaa

SEQ ID NO: 284478 - DNA, 251 bp, Glycine max
  unsure (1)..(251): unsure at all n locations
caactactacaagtacttccttacaatcaaaacccacnaacaacccnngcnagttatcanaagcactacgatgatcagggtcgcaaggttgacgagtatggcaacgttgagaagcaaaccgacgaatacggcaaccctgttcatgctgctagtntcacctatgtagncaccagaactgctgctggtggttacagtgatgacattaataagcaacatgataccaccaatgcctacggcgtagacactggtag

SEQ ID NO: 284479 - DNA, 254 bp, Glycine max
  unsure (1)..(254): unsure at all n locations
aagccagatttcaagatgaagttcaacattgcgaatcccaccactggtngtcagaagaagctggagatcgatgatgacctgaagctacgagcattttgggacaagaggatctcacaagaggttgttggtgatgctctgggtgaggaattcaaaggctatgtcttcaaaattactggaggttgcgacaagcaaggatttccaatgaagcaaggagtgttgacccctggtcgtgttcgcctcttgctgcatagagg

SEQ ID NO: 284480 - DNA, 249 bp, Glycine max
ctacaagtacttccttacaatcaaaaccaacaacaactatggcaagttatcaaaagcactacgatgatcagggtcgcaaggttgacgagtatggcaacgttgagaagcaaaccgacgaatacggcaaacctgttcatgctgctagtgtcacctatgtagccaccagaactgctgctggtggttacagtgatgacattaataagcaacatgataccaccaatgcctacggcgtagacactggtagacagc

SEQ ID NO: 284481 - DNA, 248 bp, Glycine max
agtaaagctaacttcaacacctttaattttctaaaagtaattcagcggctgaataccaagcggagaagatgagtcaggagcagccacggcgtcccaaaggccaaaaccccatcaaatacggcgacgtctttgtcgtctccggcgaccttgcacagaagcccgtcgcaccggaagatgctgccatgatgcaaagcgcggaaactcgagtgctcggacaaacccaacccggcggagcagcttccgtcatg

SEQ ID NO: 284482 - DNA, 246 bp, Glycine max
  unsure (1)..(246): unsure at all n locations
aaatgttctatctgcattctccaattcagangtggaattcatcataggactagggaacgagtatctgcagagcatgagagacccttctaaggctcagagctgggttcaacagcatgttcagccttacatttcacaaaccagaatcacttgcatcactgtaggaaatgaggtattcaactacaatgatacacagctcacagcaaatcttctcccagcaatgcaaagtgtgtataatgcccttgttaa

SEQ ID NO: 284483 - DNA, 249 bp, Glycine max
  unsure (1)..(249): unsure at all n locations
attcaaaccttgctctatactacacagtacatacactagaagaataanggcttccatcctccactactttttagccctctctctttcttnctcttttcttttcatcttatccgactcagtcacccctacaaaaccaataaaccttgttgttctacccgttcaaaatgatggttccacagggctccatncttcccaacctccaaaaaagaacccctctaatgcaagtaccagtcctggtggacctcaatg

SEQ ID NO: 284484 - DNA, 246 bp, Glycine max
caatcctgaaacaaaaacatcttagcatttaacatactactagacaacatgaccaccacattggaaagaggtttctcggaagagcaagaagctctggtggtgaagtcatggaatgtcatgaagaagaattctggagagttgggtctcaagtttttcttgaaaatatttgagattgctccatcagctcagaaattgttctcattcttgagagattcaacggttcctttggagcaaaatcccaagctc

SEQ ID NO: 284485 - DNA, 246 bp, Glycine max
  unsure (1)..(246): unsure at all n locations
tggcatccaagaaggactctactgaggagggtgaggctgctgctgaagaaactaagaaaagtaaccatgtccagagaaaacttgagaaacgccagaaagatcggaaacttgactcccacattgaagagcaatttggtggtggccgattgttggcctgtatttcttctcgtcctggacaatgtggcagggctgatgggtacattctggaaggtaagganctggagtttacatgaagaaactccagag

SEQ ID NO: 284486 - DNA, 248 bp, Glycine max
  unsure (1)..(248): unsure at all n locations
ctcgagcccagttgcagaccgagctagctanctagcaagcaagcacagagatggaggcaaagcgaggccatgccctccatgtgcttngcacgtgtttcactcttcctctgcgctctaaccctatccgtgctcacggaagcaccacggttcaagacatcgcgagaaagttgaaactcggggacaacgagcttctgcgcacggagaagaagttcaaggttttcatggagaattacgggaggagctactcc

SEQ ID NO: 284487 - DNA, 266 bp, Glycine max
  unsure (1)..(266): unsure at all n locations
aatgtttgtatctggtncttgtgatgcaactgctcgattgtgggatactcgcgtggcaagtcgagcagtgcggacatttcatgggcatgagggagatgttaatgcagtcaaattctttcctgatggaaatagatttggaactggttcagatgatggaacctgcagattatttgacattaggactgggcaccaacttcaagtttattatcagcagcacagtgacaatgagatcccacctgtgacttccattgcattctccgcttcag

SEQ ID NO: 284488 - DNA, 264 bp, Glycine max
  unsure (1)..(264): unsure at all n locations
aaaaaatctgggaagaggcgcattcgggtgtacatggatggctgttttgatctgatgcattatggccatnccaatgcactcaggcaagcaaaggctctaggagatnaattggttgtgggtctagtgagtgatgacgaaatctagcaaataaaggnccacctgttttgtccatggaggagaggctgccccttgtcagtggattnaagtgggtggatgagncggaatgatgcatatgctgcagcaaagaaagctggtcgttacaag

SEQ ID NO: 284489 - DNA, 269 bp, Glycine max
  unsure (1)..(269): unsure at all n locations
aaaattcttccaccangttatgggtntcccttgtggtgcttcttttctncctcttaggtctcttctnctagttccagtcatatcanctcatcgttccatattggaccntgncctaaccaagtntaccacacaganacaggtgncttcactgtgncaacnatggaagagtgagcatggacgtgtctaccataaccacgnagaagaggcanagagacntgagattttcaggaatgacttganctatatcaggganatgnagcaacaganaa

SEQ ID NO: 284490 - DNA, 273 bp, Glycine max
  unsure (1)..(273): unsure at all n locations
caatgtgcaaaccananacaacannagnagangaaccagatctctctttctgnaaatgcaccaaggtagttgaaaatggggctgtcttntcacgaagnctgttcanccggctactttgcgaagaaggagatgcgtattcntatngtgggtctcgacgccgccggtaanaccatcantctctacaanctcangctaggagngatcgtcacaaccatncccaccattgggtttantgttgaaactgtggaatacaagaacatcagcttcnctgtt

SEQ ID NO: 284491 - DNA, 129 bp, Glycine max
  unsure (1)..(129): unsure at all n locations
tcggannaagatgccntcttcgctgattacgctgaggctcaccaanagcttnctgagcttaggntncctgaanncgaagcaacgtnntngggattgttggagaggnacngtgcccataatatttctctc

SEQ ID NO: 284492 - DNA, 239 bp, Glycine max
  unsure (1)..(239): unsure at all n locations
tgatgtcaaaatgantctgaactccaacannggtggaaagaagctgtagngaaaggccatngtgatttgaaagacaagccatggtggcctaagttgcagacacttgaagaccttgttgaagtttgcctcattatcatatggattncttcagctctccaggcggcngtaattttaggncagnnncctnnnggagtttgnanatgaacnncccaantgttcnngaaggttnctncnngaaa

SEQ ID NO: 284493 - DNA, 268 bp, Glycine max
  unsure (1)..(268): unsure at all n locations
atcggacgaagatgccttcttcgctgattacgctgaggctcaccaaaagctttctgagcttgggtttgctgaagcctaagcaacgttttggggattgttngagaggcacggtgcccataatatttctctcataaattctatggtcatngtttctaatgcgccactgtgggttcctcaaatttttanatancttttgaatgtattttgctggacgtggtgatgatgattggagttgggttgttttaattggggngancctttnatnaaa

SEQ ID NO: 284494 - DNA, 266 bp, Glycine max
  unsure (1)..(266): unsure at all n locations
agaaaacctaagcttagaattagaaacaaagaaaagaagaaaggaaagaattgatcgttgaaaatgcagggaggaaagaaagcgggagagtccattaaggaaacagctacaaacattggtgcttctgccaaggctggcatggagaagaccaaggccactgtccaagagaaggcagaaagaatgacagcacgtgatccggtgcaaaangagttggcaacccaaaaganagaggcaaagatgaaccaggcggactggacaagcaggcg

SEQ ID NO: 284495 - DNA, 269 bp, Glycine max
  unsure (1)..(269): unsure at all n locations
ggcagaggtgaagcttcatggattttggtatagtccctacactttgagggtggtatggaccttaaagttaaaggatataccatatcaaaacatagaagaagaccgctacaataagagtcttcaacttcctngaatncaacccagtatacaagaaaactccagtgcttgtccataatggaaaacccttatgtgagtccatgcttattgttgaatacattgatgagatttggncacataattcattacttcctgctgatccctacgagaga

SEQ ID NO: 284496 - DNA, 187 bp, Glycine max
  unsure (1)..(187): unsure at all n locations
gactacaagtacttccttacaatcaaaaccancaacaactatggcaagttatcaaaagcactacgatgatcagggtcgcaaggttgacgagtatggcaacgttgagaagcaaaccgacgaatacggcaaccctgttcatgctgctagtgtcacctatgtagccaccaganctgngctggtggtnaca

SEQ ID NO: 284497 - DNA, 218 bp, Glycine max
  unsure (1)..(218): unsure at all n locations
acctaantgaganacnnaganagganataattgatctttgnaantgcatggagganngananctggagagtccatcaaggnnacagctgcaaacattggtgctnctgccaangctggcatggagaanaccaaggcnactgtccaggagaaggcagaaagantgacggcacgtgatccggtgcaaanggagttggcaacccagaaganagacncnangt

SEQ ID NO: 284498 - DNA, 263 bp, Glycine max
  unsure (1)..(263): unsure at all n locations
cgcattgaatgggcgggcatnggtacaagtggtgaattgcaatggtgagagagtgtttgatngagngctgcaagagggaggggtgctgatcgttccacaaaactttgcggtnngctgcanaatcccagagcnataactttgagtatgtgtcattgcaagaccaatgatagaccctcgatcggaaaccttgcaggggcaaactcattgttgaacgcatgccagangaagtgattcagcacactttaacctaaagagccagcang

SEQ ID NO: 284499 - DNA, 242 bp, Glycine max
  unsure (1)..(242): unsure at all n locations
tgagcaacgtcggtgcggacctggatccgcagaagcttctcgcgtttttttcacggttcggggagattgaggaagggccgttggggcttgacaaggccaccggaaaacctaaggggttctgtttgtttgtttacaggaatccggagagtgcgaggagagcgttggaagagcctcataaggatttcgaagggcacattttgcattgccagaaggcgattgatgggcccaangccgggaaattt

SEQ ID NO: 284500 - DNA, 261 bp, Glycine max
gcttcgcaggatgatctgaagaaggcttacaagaaagccgccattaagaatcaccccgacaagggcggtgatcccgagaagtttaaagagctggcgcaagcttatgaggttctgagtgaccctgagaagcgtgagatatatgatcagtatggtgaagatgcgctaaggaaggaatgggtggtggcggtggccatgatccatttgatatcttttcatctttctttggcggtgggagtccctttggatcaggtggaagtagtc

SEQ ID NO: 284501 - DNA, 264 bp, Glycine max
  unsure (1)..(264): unsure at all n locations
ctctggttnattcggatctagagtcttcagtttctcctcgttgtncttcgctttcctgttttcaatttcgnttctttccgttaatttaataagatgtttgggagggcaccgaagaagagcgataatacgaggtactacgaaatcctcggcgtctccaagaacgcttcgcaggatgatctgaagaaggcttacaagaaagccgccattaagaatcaccccgacaagggcggtgatcccgagaagtntaaagagngggcaanttat

SEQ ID NO: 284502 - DNA, 264 bp, Glycine max
  unsure (1)..(264): unsure at all n locations
gcgactgcgcttcagcacaatgngtgcctacaagtatgtttcggagctatggcgcaagaagcagtctgatgttatgagattcttgcagcgggtgaggtgctgggagtatcgccagcaaccttctattgtccgtttgacaaggtctactcgcccagataaggctcgtcgcttgggtttcaaggctaagcagggttacgtgatttaccgtgttcgcgtacgaaggggtggccgtaagagaccagttccaaagggtatgtatatggt

SEQ ID NO: 284503 - DNA, 267 bp, Glycine max
  unsure (1)..(267): unsure at all n locations
caactactacaagtacttccttacaatcaaaaccancaacaactatggcaagttatcaaaagcactacgatgatcagggtcgcaaggttgacgagtatggcaacgttgagaagcaaaccgacgaatacggcaaccctgttcatgctgctagtgtcacctatgtagccaccagaactgctgctggtggttacagtgatgacattaataagcaacatgataccaccaatgcctacggcgtagacactggtagacagcattctagtggtg

SEQ ID NO: 284504 - DNA, 209 bp, Glycine max
  unsure (1)..(209): unsure at all n locations
aaccttgctctatactacacagtacacacactagaagaataatggcttccancctccactactttttagccctctctctttcttgctcttttcttttcttcttatccgactcagtcacccctacaaaaccaataaaccttgttgttctacccgttcaaaatgatggttccacagggctccatagnaccnaactcnaaaaangaacccct

SEQ ID NO: 284505 - DNA, 263 bp, Glycine max
  unsure (1)..(263): unsure at all n locations
ggagaatgtgaagaaggctcaggaagcccttttggtaagagccaaggccaactcagaggcaactctgggaacctacaagggtaactcaaagcttgctgatggtgcctcagagagcctccatgttgaggactacaagtactgatcaatctaagtgcgggtaggaatcggtattttatgggtacaaccgaattttcttgttaatgagtattgtgcttcgactcttcccagaataataatcgtttggaatttncctttggnttccc

SEQ ID NO: 284506 - DNA, 259 bp, Glycine max
  unsure (1)..(259): unsure at all n locations
caaaacaaaaagtttacgttacaaatcgcataataaccgtcctaagtttatngagagaattttgcaagtgtgaganacatggcatctcgtcaaaacaacaagcaagagcttgatgaaagagcaaggcaaggagagactgttgtcccgggtggaactggtggcaanagcntggaggctcagcaacaccttgctgaaggaaggagcaagggagggcaaacaaggncggaacagctgggtacagaagggtaccaggaaatgg

SEQ ID NO: 284507 - DNA, 203 bp, Glycine max
  unsure (1)..(203): unsure at all n locations
tggctgatacaagtggaggagatgcagtgagaccggtggtaatatgtgataacaagtgtggctgcacagttccatggcactggtggttccacttggcaggtgcacaagtgtcggcatgacaactggaggcggtgatcacgtgacatgctcgtgcggagagtactgtgggtgcaatccatgctcatgnnccaagantgnttttg

SEQ ID NO: 284508 - DNA, 269 bp, Glycine max
  unsure (1)..(269): unsure at all n locations
atcnatgcgcatggntaggtctggttatgagagagagtgtcttcaggtttatagtagcgtccgncgtgacgctttggatgagtgtttgattattctcggtgttgagaggtttagtattgaagaggttcagaangttgagtggaggagtttngattanaagatgaagaattgggttcaggctgttaaggttgtgttggagtgcttctcagtggtgagaagangctgtgtgatggcttgttggggatttggatgatctgnanganatttgc

SEQ ID NO: 284509 - DNA, 258 bp, Glycine max
aaaaaactagccaaaaaatatcatgcctttttggcctctgaagcagtcatcaagcagattcctcgtctcttgggacctggtctcaacaaggcagggaagttccctacgcttgtgactcaccaagaatctctcgagtcaaaggttaatgagaccaaggccatggtgaagttccagcttaagaaggtgctttgcatgggagtagccgtggggaatgttagcatggaggaaaagcaaatcttccaaaatgtacaactgagt

SEQ ID NO: 284510 - DNA, 259 bp, Glycine max
  unsure (1)..(259): unsure at all n locations
cgggttaaaattcctganccgggacgtggcggctgacggcaacgttagggagtccggagacgtcggcgggggccccggaaagagttatcttttctgtttaacagcctgcccaccctggaaacggctcagccggaggtagggtccagcggctggaagagcaccgcacgtcgcgtggtgtccggtgcgcccccggcggcccttgaaaatccggaggaccgagtgcctcccacgcccggtcgtactcataaccgcatcaggt

SEQ ID NO: 284511 - DNA, 259 bp, Glycine max
catggaggccatggaggctgaactggatctcgtcgtctgcatcacagagggcattccccagcacgacatggttagggttaaagcagcacttaacaggcagtccaagactcgtttgataggaccaaactgccctggcattatcaagccgggggaatgcaaaattggaatcatgccaggttatattcataagcctggtcgcataggaatcgtctctcgttctggtaccttgacatatgaagcggttttccaaacgactgct

SEQ ID NO: 284512 - DNA, 256 bp, Glycine max
gacaccgataggcaacaacatgggactactggtggctatgccggtgacactggtaggcaacatgggaacatcggtggcccttactatggaaccaacaccgcagacaccggtactggtcccagaagtggaaccacgggcggcaccggttatggaggcactggtggcactgattatggaacaactggtggcactggttatggaagtggaatgggtatggagtcaacactgggggtgcgcacactgaagcaggatatag

SEQ ID NO: 284513 - DNA, 259 bp, Glycine max
  unsure (1)..(259): unsure at all n locations
ggcaagacatggtggtggtanaggtaccanagctanggaaagaggntgcagtaaaggccatanaggagtggggccanaccaaagtcaaagattacncacttgntcttctgcaccactagcggtgtggacatgccncgtgctgattaccaactcaccanacaattnggccttcgnccttatgtgaagaggtacatgatgtaccaacaaggttgtttgcaggtggcacggntcttcgtttggccaangatttggctgagaa

SEQ ID NO: 284514 - DNA, 235 bp, Glycine max
  unsure (1)..(235): unsure at all n locations
ctcgaccagttgatttatatcccnctcccagatgaggattcccgtcatcagatatttaangcctgcttgaggaaatcccccgtgtcgaaagatgttgatcttagagcacttgcaaagtacactcagggtttcagtggtgctgatatcacggagatttgccagcgtgcgtgcaagtatgccattagagagaacattgagaaggacattgagaganaaaggaggaaaagagataacc

SEQ ID NO: 284515 - DNA, 257 bp, Glycine max
aaaggatccaaagacaagaaggccatgaggagagctgagaaggagagacagaaggaaggtgaattagctgatgaggaacagaagaaagtgaagaaagaggttaagaagaaaggctcttcatcttctaaggatggcactgctaaatcaacctcttctaagaaaaaagcaagtggctctgatgaagaccacacttcacctactcacagtcaaattgacgagaaagaggaggctccagatgaagatgatgacgacgacgt

SEQ ID NO: 284516 - DNA, 254 bp, Glycine max
  unsure (1)..(254): unsure at all n locations
aagaaaggaaataattgatctttgaaaatgcagggagganagaaagctggagagtccatcaaggaaacagctgcaaaacttggtgcttctgccaaggctggcatggagaaaaccaaggccactgtccaggagaaggcagaaagaatgacggcacgtgatccgatgcaaaaggagttggcaacccagaagaaagaggcaaagatgagccaggcagagctggacaagcaggcggcgcgtcacataacacgggcggc

SEQ ID NO: 284517 - DNA, 255 bp, Glycine max
  unsure (1)..(255): unsure at all n locations
gaagatgctagacatccagctaagtacaggatgttagttggaatggttgatgtcatattttctgacgttgctcagcctgatcaggctaggattttngggctgaatgcttcatattatctaaaaacagggggtcattttgttaattcaatcaaggctaactggcatagactccacagtccctgctgaggcagtgtttgaaagcgaagtgaacaagttaaaggctgatcaattcaaaccattcgagcaagtcaccct

SEQ ID NO: 284518 - DNA, 252 bp, Glycine max
  unsure (1)..(252): unsure at all n locations
ctcaggatngctggagcccgcgggcgagttctatcgggtaaagccaatgattagaggcatcnngggcgcaacgcnctcgacctattctcaaactttaaataggtaggacggtgcggctgctctgttganccgcgccatggaatcgagagctccannnnggccatttttggtaancaganctggcgatgcgggatgaaccggaagctgggttacggtgcccaactgcgcgctaacctagaccccacaaagggt

SEQ ID NO: 284519 - DNA, 253 bp, Glycine max
tgaaggagccgtagcagcagcggaagctctagcttgggcagcgaatcacaatggcgagaggattgaagaagcatttgaagaggcttaatgccccaaagcattggatgcttgacaaactgggtggtgcatttgctcctaagccctcatctggaccacacaaatccagggaatgcctgccactcatactcattttgcgaaaccggctgaagtatgctctgacataccgtgaagtcattgctattctgatgcagcg

SEQ ID NO: 284520 - DNA, 252 bp, Glycine max
cgaaatttcttagacaaaaaacaaggatcagaaccgttgaatcaagttgaggaagatggcactagtctctggaggaagatcaacactgaaccctaacgcccctctttacattcctgccgcgtttcgccaagaggaggatttctctccggaatggtggcagctggtgacgacgctgacatggtaccatgactactggctaagccagcagcacgatgagggagccttctacggcgaggacgacgggtttgatgg

SEQ ID NO: 284521 - DNA, 251 bp, Glycine max
cattaatgaaagcattgcagattgctgaaaaggctagggatgctattcttagcgggaaatttgatcaggtacgcgtcaaccttccaaatggtgacatggtggggcatacaggtgacattgaagcaacagttgtggcatgcaaggcagctgatgctgctgtgaagatgattcttgatgcaatagagcaagtgggtggaatttatgttgtcacagctgaccacgggaatgctgaggatatggtcaagagggat

SEQ ID NO: 284522 - DNA, 254 bp, Glycine max
  unsure (1)..(254): unsure at all n locations
ccgatttggaattgtggagggtcttatgaccactgttcatgccatncacagctactcagaagactgttgatggtccatcaaacaaggactggaggggtggaagagctgcttccttcaatataattcccagcagcactggagctgctaaggctgtaggaaaagttcttccagcactgaatggtaaattgactggcatgtccttccgagtccccactgtagatgtttcagttgttgacctcactgttaggctagag

SEQ ID NO: 284523 - DNA, 231 bp, Glycine max
  unsure (1)..(231): unsure at all n locations
ggcaacattaccgttcacaagttnngtgggtaggttggacacacagtgcgatttctgccacaggtgcaaagttggcatttaagtccaatgaagagatagcttttcaagtaaggactgttcctcttgatgaagtgattccgaaatcagagcgtgtgcttctgcttaaaatagatgttcagggctgggaatatcacgttcttaaaggagcatcaaagttgctctcaaggaaag

SEQ ID NO: 284524 - DNA, 251 bp, Glycine max
  unsure (1)..(251): unsure at all n locations
gttgttctgatgttattcaatgatgctgagaaactaagctttcaagatatcaaggactctactggtatagaggacaaggaactgagaaggactctgcaatcacttgcatgtggaaaagttcgtgtcctacaaaagttgccaaagggtagagatntggaggatgatgactcatttgtttttaatgaagggtttacagctcctctttatcgtataaaggtgaatgcattcagttgaaggagacagtagaggag

SEQ ID NO: 284525 - DNA, 250 bp, Glycine max
  unsure (1)..(250): unsure at all n locations
ccgtaagcgataagcaatagaattcagagagagagncaaagagagtctcttgctctgtatctttgatttgatcantccaatcttcaatttttctatatatccatcaatccgctgagtgcaaagttctaatctttcgcctattgggttctactcctttctctcttcgtttccgatcgatccaattttcttcccatggctacgatcggacacaacaatctcaatgccaaattggttcttctcggggacatgg

SEQ ID NO: 284526 - DNA, 252 bp, Glycine max
cattttcattatcttaccactttcaattccaaattcactctgcagaaattagaatggctagccaatcaaacactaaatcagttcacgatttcacagttaaagatgccaggggaaatgatgttaatctcgccgattacaaaggaaaggtccttctccttgtcaatgttgcctcacaatgcggcttgactaattcaaactacacagagcttaatcaattgtatgagaaatacaaagggaaaggacttgaaattc

SEQ ID NO: 284527 - DNA, 251 bp, Glycine max
  unsure (1)..(251): unsure at all n locations
cattttcattatcttaccactttcaattccanattcactctcagaaattagaatggctagccaatccaaacactaaatcagttcacgatttcacagttaaagatgccaggggaaatgatgttaatctcgccgattacaaaggaaaggtccttctccttgtcaatgttgcctcacaatgcggcttgactaattcaaactacacagagcttaatcaattgtatgagaaatacaaagggaaaggacttgaaatt

SEQ ID NO: 284528 - DNA, 248 bp, Glycine max
gtctataacggcacaacaaagaaactatctctttctagaaacgtattctgctcaaaatgtaaagggaaaggttcaaaaagtggaacagctggtaggtgttttggatgccaaggcactggtatgaaaattacaagaaggcagattggactaggcatgattcaacaaatgcaacatgtctgtcctgactgcagaggatctggtgaggtcattaacgagagagataaatgtcctcagtgcaaaggaaacaa

SEQ ID NO: 284529 - DNA, 250 bp, Glycine max
  unsure (1)..(250): unsure at all n locations
ctcaaaaccctgccgtcagtcaccgtcttctctgccgccatgaagctcgtcaggtttctgatgaanctgaacaacgaaaccgtatcaatcgagctcaagaacggcacagttgttcacggcaccattacaggtgttgatatcagtatgaatacacatttgaaaacagttaaactaactctgaaagggaaaaacccagttactttggatcatctcagtgtgagaggcaacaacattcgatattatatccttc

SEQ ID NO: 284530 - DNA, 246 bp, Glycine max
  unsure (1)..(246): unsure at all n locations
gcggggcactgcccctctttttggacccaaggncggcttcggccggtcgatccgggcggaagacattgtcaggtggggagtttggctggggcggcacatctgttaaaagataacgcaggtgtcctaagatgagctcaacgagaacagaaatctcgtgtggaacaaaagggtaaaagctcgtttgattctgatttccagtacgaatacgaaccgtgaaagcgtggcctatcgatcctttagtccttc

SEQ ID NO: 284531 - DNA, 239 bp, Glycine max
  unsure (1)..(239): unsure at all n locations
ctcggatggtaggccagatgaggaagttgcatctgagtgctggaaaantcatatggctcgaaatgattcattgattgttgatgtatgccagggtcaatacaagttcaacattggtttgtccagtatgtggcaaaatttcaattcactttcgatccattcatttctgaagcatggtagctgtagagatctttgccaagcattaggcactgcatgctgcttgaagagtgatgaaatgcttt

SEQ ID NO: 284532 - DNA, 246 bp, Glycine max
  unsure (1)..(246): unsure at all n locations
gatgaaccaaccaatcaccttgatttggaagcttgtgtgtggctcgaagagaatctgaagaagtttgaacgtattctggttgtggtttcacactcacaggatttccttaatggtgtctgcacaaatatcatccacatgcaaaacaagangctgaaactcttcactggtaattatgatcaatatgttcagacacgtgctgaactggaagagaaccagatgaagcagtacaaatgggagcaggagcaa

SEQ ID NO: 284533 - DNA, 244 bp, Glycine max
  unsure (1)..(244): unsure at all n locations
gtntgaccnaatagcagaattgctnaatggcattgctgagagatttgactggggtanagtaatggaaggtgacaaaattattggactcaaacaggggcanccagagcntatcattggagcntggnggtcagtttgaacttagtggagctcctcttgaaaccttgcatcagactgtgntgnagttcatttgcaccnntatcagcnnaaagctgttnccgaggaaatgggaattggatttttgggg

SEQ ID NO: 284534 - DNA, 247 bp, Glycine max
  unsure (1)..(247): unsure at all n locations
cacacaagtagcaggtgctgaatggcttggagatacaattgtttatgcttacagatcaggtgaggtgattcggctaccaaaaggggtttcaattccagtgacactaaaagttctggagtttgagcttttccacttctgtccaatccnnagaaatagctccaagtatatcatttgcagcaatagggctactggatatgttcaacactggaggagcagtggagcaggttgagattcataaccgagcagc

SEQ ID NO: 284535 - DNA, 245 bp, Glycine max
aatagattatcctaagtctttgggaatagtgctgcaatggcttcaagtcaggaggaggtgacccttttgggagctactggaagcccatttgtgtgcagggttcatattgccctcaagttgaagggagttcaatacaaatatgtcgaagaaaatttgaggaacaagagtgaactgcttctcaaatccaacccagttcacaagaaggttccagtgtttattcacaatgagaagcccatagcagagtc

SEQ ID NO: 284536 - DNA, 246 bp, Glycine max
  unsure (1)..(246): unsure at all n locations
gttgcagaccgagctagctagctagcaagcaagcacagagatggaggcaaagcgaggccatgccctcatgtgcttggcacgtgtttcactcttcctctgcgctctaaccctatccgctgctcacggaagcaccacggttcaagacatcgcgagaaagttgaaactcggggacaacgagcttcngcgcacggagaagaagttcaaggttttcatggagaattacgggaggagctactccacagagga

SEQ ID NO: 284537 - DNA, 246 bp, Glycine max
  unsure (1)..(246): unsure at all n locations
gggaagccaaagcgaaaccctaaccctaacggagagatggcggagcacttggcatcgatattcgggacggagaaggacagggtgaactgtccgttctacttcaagatcggcgcgtgcaggcacggcgaccggtgctcccggcttcacacgaagcccacaantagcccaacgttggttctatcgaacatgtaccagaggcncgacatgaacatgaacatcatcaccaaccccgatcagccccagccc

SEQ ID NO: 284538 - DNA, 271 bp, Glycine max
  unsure (1)..(271): unsure at all n locations
cacacaactactacaagtacttccttacaatcaaaaccanccaacaactatggcaagttatcaaaagcactacgatgatcagggtcgcaaggttgacgagtatggcaacgttgagaagcaaaccgacgaatacggcaaccctgttcatgctgctagtgtcacctatgtagccaccagaactgctgctggtggttacagtgatgacattaataagcaacatgataccaccaatgcctacggcgtagacactggtagcagcattctagtggtg

SEQ ID NO: 284539 - DNA, 269 bp, Glycine max
  unsure (1)..(269): unsure at all n locations
gaccgagctagctagctagcaagcaagcacaganatggaggcaaagcgaggccatgccctcatgtgcttggcacgtgtttcactcttcctctgcgctctaaccctatccgctgctcacggaagcaccacggttcaagacatcgcgagaaagttgaaactcggggacaacgagcttctgcgcacggagaagaagttcaaggttttcatggagaattacgggangagctactccacagaggaggagtatttgcgcctttggggattttcgc

SEQ ID NO: 284540 - DNA, 269 bp, Glycine max
cacaactacaagaaagaacttccttataaccaaaaccaacaacaactatggcaagttatcagaagcactacgatgatgcagggtcgcaaggtcgacgagtatggcaatgttgagaggcaaactgacgaatatggcaacccggttcatgccactagtgtcacttatgtagccaccaaaagtgttggtggctacaatgatgacgctaataagcaacatgatattactggtgtctatcccgagaaagacaccggtagacatctttttggtcg

SEQ ID NO: 284541 - DNA, 265 bp, Glycine max
  unsure (1)..(265): unsure at all n locations
gaccgagctagctagctagcaagcaagcacagagatggaggcaaagcgaggacatgccctcatgtgcttggcacgtgtttcactcttcctctgcgctctaaccctatccgctgctcacggaagcaccacggttcaanacatcgcgagaaagttgaaactcggggacaacgagcttctgcgcacggagaagaagttcaaggttttcatggagaattacgggaggagctactccacagaggaggagtatttggccgtttggggattt

SEQ ID NO: 284542 - DNA, 261 bp, Glycine max
  unsure (1)..(261): unsure at all n locations
caagggcacagtcgagcttgctggaactaatggagaaaccaccactcagggtctagatggccttggtcagcgttgtgccaagtactacgaagctggtgcacgttttgccaaatggcgtgcagtgctgaagattggtcccaacgagccatctgagctgtctatccatgagaacgcctatggcttggctagatacgctgtcatatgccaggagaatggcctggttcccattgttgagctgagatccttgtaaatggaccnnat

SEQ ID NO: 284543 - DNA, 266 bp, Glycine max
  unsure (1)..(266): unsure at all n locations
gccagatccaaaaactcaatgccctcaaaccggataaccgtattngagttcagaaggagggctcattgagacatggaaccctaacaacaagccattccagtgtgccggtgttgccctctctcgctgcaccctcaaccgcaacgcccttcgtagaccttcctacaccaacggtccaaagaaatctacatccaacaaggtaagggtatttttggcatgatatacccgggttgtcctagcacatttgaagagcccaacaacctcaacaa

SEQ ID NO: 284544 - DNA, 262 bp, Glycine max
  unsure (1)..(262): unsure at all n locations
ctctgaaagagtttgtgaggctctttgaggaaataacaggaaatgagtttgaaccttgggaaagagagaagaagttccaaaagaaacctttgaagttttaccccattgacatggatgatggaattgaagttagacatggggcactaggtcttcggcagctggggatagcagcaacacactgcaaacttgagccttggttgcaaattttatgaaggtctgtgcagccaggagatatataagtatgcattgatggagangggtt

SEQ ID NO: 284545 - DNA, 261 bp, Glycine max
aaagaacttccttataaccaaaaccaacaacaactatggcaagttatcagaagcactacgatgatcagggtcgcaaggtcgacgagtatggcaatgttgagaggcaaactgacgaatatggcaacccggttcatgccactagtgtcacttatgtagccaccaaaagtgttggtggctacaatgatgacgctaataagcaacatgatattactggtgtctatcccgagaaagacaccggtagacatcatttggtcgtggtta

SEQ ID NO: 284546 - DNA, 259 bp, Glycine max
  unsure (1)..(259): unsure at all n locations
ggggaatggncgaagatgctggtggagtgcaaggaattgctggggcaggtcaagtaattannagaaatgctgaaaatgttgctgcaaggtgggagatgcaagcagcacgacttgaggcacatgtcgagcagatgttcgatggtctggatgatgctgatggagcagaagatgttccctttgatgaacttgttggcatgcagggtccagtttttcattggttgaaaatgcatttactgtgctggcaacaatatgatttcct

SEQ ID NO: 284547 - DNA, 256 bp, Glycine max
caagggcacagtcgagcttgctggaactaatggagaaaccaccactcagggtctagatggccttggtcagcgttgtgccaagtactacgaagctggtgcacgttttgccaaatggcgtgcagtgcgcaagattggtcccaacgagccatctgagctgtctatccatgagaacgcctatggcttggctagatacgctgtcatatgccaggagaatggcctggttcccattgttgagctgagatcctgttgatggacc

SEQ ID NO: 284548 - DNA, 260 bp, Glycine max
ggagacgcatcttccagatacacacgtcaaggatgacattagctgatgatgtcaacttggaagaatttgttatgactaaagacgaattctccggagctgatataaaggcaatatgtactgaagctggtttacttgctctacgagaacgtcgaatgaaggtgactcatgccgactttaagaaggccaaggataaagtgatgtttaagaagaaagaaggggtgcctgaagggctgtatatgtgaaaaacatccctattatct

SEQ ID NO: 284549 - DNA, 262 bp, Glycine max
  unsure (1)..(262): unsure at all n locations
aatcttacaagttccaaacttctctattttnttattatttgttctcacttcnanacaanatacnanatcnnctnttatattatcatggcttctaaggtggtttcggtttnggncatagcgatgatgttgttngccatgaactgtaactgcactagtgttgggccacatgccttcaaccaaagaggaaggtcacgattntcaggagtctaaagccaagaccanacaaatgcgaacaaggccaggaaacggtaaagagggacaa

SEQ ID NO: 284550 - DNA, 262 bp, Glycine max
gagatctgcctcctttttccttcccaaatcaaatctatctcttcttcaagttgaaaatggggctgtcgttcaccaagttgttcagccggctgtttgccaagaaagagatgcgtatactaatggtgggtctcgatgctgcgggtaagaccaccattctgtacaagctcaagcttggagagattgtcaccaccattcccaccattgggtttaatgtggaaactgtggaatacaagaacatcagcttcactgtctgggatgttgg

SEQ ID NO: 284551 - DNA, 260 bp, Glycine max
  unsure (1)..(260): unsure at all n locations
anaccattcgtattgtcgcagagaangaaaaccctagctcaccgtttcaagatgcaaatcttcgttaagaccctcactggtaagaccatcactctcgaagtcgagagttcagataccatagacaatgtaaaggccaaaattcaagacaaggaanggatgnccaccagatcagcancggctcatttttgctggcaagcagcttgangatggacgtacccttgctgattanaacatccaataggagtccatctcccattggt

SEQ ID NO: 284552 - DNA, 260 bp, Glycine max
  unsure (1)..(260): unsure at all n locations
gaaagaagaaacttaatcgatcatcacttcacttcactaatacatcatggcagacgagacccagaacaagtatgagagctctgaggttgaggtccaggatcgtggtgtttttgactttctcggtaagaaaaaggatgaagaagacaagcctcatcctcaggaggaggtcatcgccaccgagtttcaaaaagtcactgtctcagaccaaggagagaanaagcacagcctcttagaaaagcttcaccgatctgacagcagct

SEQ ID NO: 284553 - DNA, 258 bp, Glycine max
ccttcatcagagataacttgacaaataaaatcaccatgtctatcatcccaaacttgttcggtggtagacgaagcaacgtcttcgacccattctctctggacgtatgggaccctttcgaggggtttcctttttccacaggtcacgtgccttcctctggtggggaaagcagtgccatagccaacactcgcgtggactggaaggagactccggcggctcacgtgttcaacgttgatcttcccgggttgaagaaggaggaag

SEQ ID NO: 284554 - DNA, 258 bp, Glycine max
  unsure (1)..(258): unsure at all n locations
cacacaactactacaagtacttccttacaatcaaaaccnggcaacaactanggcaagttatcaaaagcactacgatgatcagggtcgcaaggttgacgagtatggcaacgttgagaagcaaaccgacgaatacggcaaccctgttcatgctgctagtgtcacctatgtagccaccagaactgctgctggtggttacagtgatgacttaataagcaacatgataccaccaatgcctacggcgtagaactggtagacagc

SEQ ID NO: 284555 - DNA, 265 bp, Glycine max
  unsure (1)..(265): unsure at all n locations
acacaactactacaagtacttccttacaatcaaaaccaggtaacaactatgggcnagttatccaaaagcactacgatgatcagggtcgcaaggttgagcgagtatggcaacgttgagaagcaaaccgaggaatacggcaaccctgttcatgctgctagtgtcacctatgtagnccaccagaactgctgctggtggttacagtgatgacattaataagcaacatgataccaccaatgcctacggcgtagacntggtagacagcatt

SEQ ID NO: 284556 - DNA, 258 bp, Glycine max
tggcgtcaatggcggcttcccgtcatcgaataatgccgccggcggtattgcgccgccgttggaggtggacgggctgccggagaattttgattggagagagaaaggagctgttcaccgaagttaagttacagggtagatgtggatcatgctgggctttcagcaccacaggatctatagaaggagccaattttcttgccaccggaaagctcgtcagtcttagtgaacaacagctcttgactgtgacacaatgtgacataa

SEQ ID NO: 284557 - DNA, 256 bp, Glycine max
ctgctgaactctcaaagcttgcagccaatgctttcctggcccagaggatctcctcggtgaatgccatgtcggcactttgtgaggcaactggtgctgatgtctcccaggtgtcacattcaatcggcacagactcaagaattggaccaaagttcctgaatgccagtgttggttttggaggatcatgcttccagaaggacatattgaacttggtctatatctgtgagtgcaaggccttcctgaggtggccattactgga

SEQ ID NO: 284558 - DNA, 255 bp, Glycine max
  unsure (1)..(255): unsure at all n locations
aatccacttggcatcaaggtgagtgataagatggttcccgatgaacttgttaagctgatagatattctgaaccctaaaaacaagcctggaagaattacagttattgttagaatgggagctgagaatatgcgagtgaagcttccacatcttatcagggcagttcgcagagcaggtcaaattgtcacttgggttagtgaccccatgcatgggaacaccattaaagctccatctggacttaaaaccgctcttttgang

SEQ ID NO: 284559 - DNA, 254 bp, Glycine max
  unsure (1)..(254): unsure at all n locations
cttagggttatggcccaaagcgcagaggcccagaagccccttgacgtcaacgaggagcttctcaaatggaccaacagcaccatctccatgatgatgctcggcgaggctgaggagatcagagacatcgctcgcgaggttcttaagatcttcggcgaatacagcctcactgacttcatctggcctttgaagtatctcaaggttggaaagtatgagaagaggttgatgacatcttgaacaattcacccntggtngaa

SEQ ID NO: 284560 - DNA, 256 bp, Glycine max
  unsure (1)..(256): unsure at all n locations
ctgacgaggatgttaggatgatatcagctgaagcaccagtcatttttgcaagggcatgtgaaatgttcatattagagttaaccctgcgctcttggaatcacactgaagagaacaaaaggcgaacacttcagaaaaatgatattgctgctgctatcacaaggactgncatctttgatttcttggttgacattgtgcctcgtgaggacttgaaagatgaagtgcttgcatcatcccaagaggacaatgcctgttgcag

SEQ ID NO: 284561 - DNA, 258 bp, Glycine max
  unsure (1)..(258): unsure at all n locations
ggcagcttatccatttgtcgtcaacgctacctcanacctcaattnccttgcttttggtatcaatgctgagaacaaccagaggaacttccttgcaggcgagaaagacaatgtggtaaggcagatagaaagacaagtgcaggagcttgcgttccctgggtctgcacaagatgttgagaggctattaaagaagcagagggaatcctactttgttgatgctcagcctcagcagaaggaggaggggagtaagggaagaaaggg

SEQ ID NO: 284562 - DNA, 257 bp, Glycine max
  unsure (1)..(257): unsure at all n locations
ctcgcaagcaaaaagaaagaatcccaggngaggagaaagatggaggggaaggagcaggatgtgtcgttgggagcgaacaagttccccgagagacagccgattgggacggcggcgcagagccaagacgacggcaaggactaccaggagccggccgccggcgccgctggttgacccgacggagtttacgtcatggtcgttttacagagcagggatagcagatttgtggccattttctgtttctctacatcaccgtctta

SEQ ID NO: 284563 - DNA, 252 bp, Glycine max
actggatatgaggaaagatgttcaagacattttcaagatgactccccatgataagcaagttatgatgttctcagcaacactcagcaaggaaattcgcccagtctgcaagaaatttatgcaagatcctatggaaatttatgttgatgatgaggccaagttgacccttcacgggcttgtgcagcactacatcaaattgaaagaggaagaaaaaaaccggaattgatgatcttcttgatgcactggactttaatc

SEQ ID NO: 284564 - DNA, 254 bp, Glycine max
  unsure (1)..(254): unsure at all n locations
atatactatgatgagagtgcggtttcctttgttggtgttgctgggaactgttttcctggcatcagtttgtgtctcattaaaggtgagagaggatgagaataaccctttctacttgagaagctctaacagcttccaaactctctttgagaaccaaaacggtcgcattcgtctcctccagagattcaacaaacgctccncacaacntgngacntaacgagactaccggattgtccagtttcagtcaaaacccaaca

SEQ ID NO: 284565 - DNA, 254 bp, Glycine max
  unsure (1)..(254): unsure at all n locations
cgaaatttcttagacaaaaaacaaggatcagaaccgttgaatcaagttgaggaagatggcactagtctctggaggaagatcancactgaaccctaacgcccctctttacattcctggccgcgtttcgccaagtggaggatttctctccggaatggtggcagctggtgacgacgctgacatggtaccatgactactggctaagccagcagcacgatgagggagccttctacggcgaggacgagggtttgatggca

SEQ ID NO: 284566 - DNA, 254 bp, Glycine max
  unsure (1)..(254): unsure at all n locations
ggggtgnntcccgggatagacacccatnaccaacnacatgggacnaccgttcgttntgntgnnganatctggaangcngcatgggnatncaggtgggccttactatggaaccgacaccgcggacacaggaaccggtcctagaagtggaaacaccggtggcaccggttatggaggcactggtggtactgattatggaacagctggtggcactggttatggaagtggaatggctatggaatcaacactgggggtgc

SEQ ID NO: 284567 - DNA, 253 bp, Glycine max
  unsure (1)..(253): unsure at all n locations
tacctctataaatgtgaccagttaaagtctattcgccaagacctaactgttcaacgaatacgcaatcaattaacagtcaaggtgtatgaaacacatgcccgattggcactggaatttggggacctgtttgagtataatcagtgccaatctcagttgcaaactctttatgccgaagnattgaggggtctgatatggaatttgccgcttacaacttgctttgtgtcataatgcattcaaatataacagagatctt

SEQ ID NO: 284568 - DNA, 255 bp, Glycine max
cgaaatttcttagacaaaaaacaaggatcagaaccgttgaatcaagttgaggaagatggcactagtctctggaggaagatcaacactgaaccctaacgcccctctttacattcctgccgcgtttcgccaagtggaggatttctctccggaatggtggcagctggtgacgacgctgacatggtaccatgactactggctaagccagcagcacgatgagggagccttctacggcgaggacgacggtttgaaggcaat

SEQ ID NO: 284569 - DNA, 252 bp, Glycine max
gaaggagccgtagcagcagcggaagctctagcttgggcagcgaatcacaatggcgagaggattgaagaagcatttgaagaggcttaatgccccaaagcattggatgcttgacaaactgggtggtgcatttgctcctaagccctcatctggaccacacaaatccagggaatgcctgccactcatactcattttgcgaaaccggctgaagtatgctctgacataccgtgaagtcattgctttctgatgcagcga

SEQ ID NO: 284570 - DNA, 250 bp, Glycine max
tgcaaagctgcggtttcatgggaggcagggaagccacttgtgattgaagaagtagaggttgcgccaccacaagctggtgaagtgcgtttgaagatcctctacacctctctttgccacactgatgtttacttctgggaagctaagggccaaactccattgtttcctcgtatatttggtcatgaagctggagggattgtggagagcgtaggtgagggtgtgactcatctgaaaccaggggaccatgccctct

SEQ ID NO: 284571 - DNA, 251 bp, Glycine max
gcactttgcgttttctgcgtcatctccgattccccgacaatggccacccaaatgagcaagaagagaaagttcgtagctgatggagtgttcttcgctgaactgaacgaggttctgacaagggagttagccgaggacggatactccggcgtggaagttagggttacgccgatgcgcaccgaaatcatcatcagagccaccagaacccaagccgttctcggtgagaagggaaggagaatcagggaacttacctc

SEQ ID NO: 284572 - DNA, 257 bp, Glycine max
  unsure (1)..(257): unsure at all n locations
cacaactacaagaaagaacttccttataaccaaaaccaacaacaactatggcnagttatcagaagcactacncngatcagggtcgcaaggtcgacgagtatggcaatgttgagaggcaaactgacgaatatggcaacccggttcatgccactagtgtcacttatgtngccaccaaaagtgttggtggctacaatgatgacgctaataagcaacatgatattactggtgtctanccgagaagncacgggtagacatct

SEQ ID NO: 284573 - DNA, 260 bp, Glycine max
  unsure (1)..(260): unsure at all n locations
gtccctcgactgaggaaggaaagagagaatggactgtnaaaacccgatcctcgatttgaagaggcaaagaagtttattaggagtggggtgtttggaagctatgactataatccattgcttgagtccttggaaggaaatctggttatggccgtggtgattactttctagttggtcatgactttccaagctacatggatactcaggcaaaagttgatgaagcataccgtgataggaaaagatggctaaaaatgtccatccta

SEQ ID NO: 284574 - DNA, 259 bp, Glycine max
  unsure (1)..(259): unsure at all n locations
gaaaacctaagcttagaattagaaacaaagaaaagaagaaaggaaagaattgatccgttgaaaatgcagggaggaaagaaagcgggagagtccattaaggaaacagctacaaacattntgcttctgccaaggctggcatggagaagaccaaggccactgtccaagagaaggcagaaagaatgannccacgtgatccggtgcaaaaggattggcaccccaaagaaagaggcaaattgacccagggggactggacaagcng

SEQ ID NO: 284575 - DNA, 266 bp, Glycine max
  unsure (1)..(266): unsure at all n locations
gaaaacctaagcttagaattagaaacaaagaaaagaagaaaggaaagaattgatcgttgaaaatgcagggaggaaagaaagcgggagagtccattaaggaaacagctacaaacattggtgcttctgccanggctggcatggagaagaccaaggccactgtccaagagaaggcagaaagaatgacagcacgtgatccggtgcaaaaggagttggcaacccaaaagaaagaggcaaagatgaaccaggcggactggacaagcaggcgg

SEQ ID NO: 284576 - DNA, 252 bp, Glycine max
  unsure (1)..(252): unsure at all n locations
gtgaaaagngaccatggaggcaaattcaggtgccagcgaccgaatttcgagaatcgccggccacctccgcccccagagagaggatgatgtttgtttgaagcgtagntttgccgtgcaaaaggtggggtctcggattcaaggtggccatattgggtgccgcaggaggcatagggcaacctctggcgatgttgatgaagatgaatccactcgtttcacttctcgacttctacgatgntcananacccctggcgt

SEQ ID NO: 284577 - DNA, 254 bp, Glycine max
  unsure (1)..(254): unsure at all n locations
catatatacgagagagtgagtaatcgagaaagagaagaagcatatatatcaaaatggctgcagagatggagagggagtcattgataactgaagctcctaatgcaccagttactgcacagagaagggtcagaatgacttagaaaattctctaccaaaacnatacttgccaagagcattganagctcctgatacgggtcacccaaatggaacagcaggccacaggcaccacaacttatctgttcttcagcagcatg

SEQ ID NO: 284578 - DNA, 250 bp, Glycine max
  unsure (1)..(250): unsure at all n locations
catggaggccatggaggctgaactggatctcgtcgtctgcatcacagagggcattccccagcacgacatggttagggttaaagcagcacttaacaggcagtccaagactcgtttgataggaccaaactgccctggcattatcaagccgggggaatgcaaaattggantcatgccaggttatattcataagcctggtcgcataggaatcgtctctcgttctggtaccttgacatatgaagcgggtttccca

SEQ ID NO: 284579 - DNA, 252 bp, Glycine max
  unsure (1)..(252): unsure at all n locations
aaagaacttccttataaccaaaaccaacaacaactatggcnagttatcagaagcactacgatgancanggtcgcaaggtcgacgagtatggcaatgttgagaggcaaactgacgaatatggcaacccggttcatgccactagtgtcacttatgtngccaccaaaagtgttggtggctacaatgatgacgctaataagcaacatgatattactggtgtctatcccgagaaagacaccggtagacatcntttgg

SEQ ID NO: 284580 - DNA, 259 bp, Glycine max
  unsure (1)..(259): unsure at all n locations
gaagaaannagtgcaatggacatcggaacctatggctatcctacaccagcagtgaanaagattgagtcttactatgatgttccagagggagtggatanncnggggaagatatgatgcagagtttgcaaaaatcctcacaaaaganganannaaaattcgtngctgacttgcaacgtgagttcaggaaccatatcaagtatgcattagagtgcagaagagaagcaaagaagaagtacaatgaagggctcttccagagttt

SEQ ID NO: 284581 - DNA, 129 bp, Glycine max
  unsure (1)..(129): unsure at all n locations
aaaaaacattgcccttgttctttcaaagttaccaaacacatgtacacaacacaacagcnctnnntggcntctgaacaattggctcgcaganagaacaccaccaccgannaggnnattcacgttgagaaa

SEQ ID NO: 284582 - DNA, 249 bp, Glycine max
  unsure (1)..(249): unsure at all n locations
ctttgttcactcttcttctcttgcggctagggttttagcgcanttcttctagatttaaggaagatgggtaaggaaaaggttcacatcagtattgtggtcattggccatgtcgactctgggaaatccataccactggtcacctgatttacaagcttggaggcattgacaagcgtgttattgagaggtttgagaaggaagctgctgagatgaacaagaggtctttcaagtatgcctgggtgctggacaaac

SEQ ID NO: 284583 - DNA, 249 bp, Glycine max
  unsure (1)..(249): unsure at all n locations
acggtcgcaattggcctggccgtggccgggttcctgacgtcgggagtctttgggctcacggcgctgtcgtccttctcctggatcatgaactacatccgggagacccagccggcgtcggagaatctggccnctgcggcgaacacncatctggcggangcggcggagtacgtggggcagaagaccaaagaagtagggcagaaaaccaaggaagttgggcaggatattcagagcaaggcacaagatacaagg

SEQ ID NO: 284584 - DNA, 256 bp, Glycine max
  unsure (1)..(256): unsure at all n locations
ccgagctancctagctagcaagcaagcacagagatggaggcaanncgaggccatgccctcatgtgcatggcacgtgtttcactacttcctctgcgctctaaccctatcctctgctcacggaagcaccacggttcaanccntcgcgagaaanctgaaactcggggacaacgagcttcttngcacggagaagaanttcaaggttttcatggagaattacgggaggagtactccacagaggaggatatttgccccgttt

SEQ ID NO: 284585 - DNA, 245 bp, Glycine max
  unsure (1)..(245): unsure at all n locations
gaatgagtacggtgggagaagggaaggtgagtagtaatggtcatggntgtngcaaatcagggccaggctannggatcnccactggaagccatttctggtcccagagagtctctcatttatgtaacctctgtctacacagggaccggaatagagaagccagactatttggcgacagtggatgtggatccaaactctccaacttattccaaagtcatccataggcttcctgttccttatttaggtga

SEQ ID NO: 284586 - DNA, 248 bp, Glycine max
  unsure (1)..(248): unsure at all n locations
gtgaagcattagagaggcttcttgaaacaaataactttccagagtttactggtcgggtgtgtccagcaccttgtgaaggttcttgtgtccncggtattattgagaatcccgtatccattaaaagcattgaatgtgccatcatagacaaggcttttgaggagggttggatggtgccacgacctccagtncaagagaactgggaaaagagtagccatngttggagtggaccatctggcttggnagcngct

SEQ ID NO: 284587 - DNA, 252 bp, Glycine max
  unsure (1)..(252): unsure at all n locations
ggccgaactgaggaaaagacgaaccagacgatgggcaatattggagagaangntcaagctgcaaancagaagacccaggaaatggcccaagctgcaaaggagaagacccaacaaacagcccaagctgccaaggacaagacttgcgacacttcccaagcggcaaaggagaagacccaacagaatacaggagctgctcaacaaaagacctcagagatgggccagtccacgaaggaatcggcccattcagggaag

SEQ ID NO: 284588 - DNA, 259 bp, Glycine max
  unsure (1)..(259): unsure at all n locations
gctcgttgttggtgctatgagacaggagttgctcttggaatagaagttgatgacaaaatgccacaacacgagtattatgaatattttggtccagattatacccttcancttgccccaagtaacatggaaaacagaattcccgtcatttacttgaagaaattcgatctaaactacttgagaatctttccaagctgcagcatgctcctagtgtccaatttcaggaaagacctcctgattctgatcttggagaggccgatga

SEQ ID NO: 284589 - DNA, 216 bp, Glycine max
  unsure (1)..(216): unsure at all n locations
ggtcnacanaggctcngccngcatgctttgatgatncatgataactcgncggatcgcacggccnttgtgccggcgangcatcattcaaatttctgcccnatcaactttcgatgntaggatagtggcctaccatggnggtgacgggtgacgganaattagggtncgantccggagagggagccgancaaacggnaccacatccangcaggcgcncaa

SEQ ID NO: 284590 - DNA, 216 bp, Glycine max
  unsure (1)..(216): unsure at all n locations
gggaaaaatggtgtcgctgaaactgcagaagcgcctctccgcaagcgtgctcaagtgcggcagaggaaaggtttggcttgaccccaatgaagtcaacgaaatctccatggccaattctcggcaaaacatcaggaagttggttaaggatgggtttatcatcaggaagccaaccaagattcactcccgctcacgtgctcgtaggatnaaagaggaagg

SEQ ID NO: 284591 - DNA, 210 bp, Glycine max
  unsure (1)..(210): unsure at all n locations
tcagttttttacttgaattttcttcatccttctctgttctcctagaacttgattacttgaacattccctatgacagatgaggnggtcctctggatttctggccaagtccatttgggatgagggtcaggattgcacttgctgaaaagggtatcgaatatgagtacaaagaagaggacttgaggaacaagagtcctcttcatgaacccggtt

SEQ ID NO: 284592 - DNA, 208 bp, Glycine max
  unsure (1)..(208): unsure at all n locations
ggagggtctcattgcagtttttgatcttggaggtggaacatttgnngtgtccatcttagagatttctaatggtgtttttgaggtgaaagccacaaatggtgacacgttcttgggaggagaggattttgataatgctttatnggattttctagtgaatgatncaaaagaactgagaatattgatctttcaaaggaaaagcnggggctnc

SEQ ID NO: 284593 - DNA, 215 bp, Glycine max
  unsure (1)..(215): unsure at all n locations
gaccttgctctatactacacagtacanacactagaagaatggtggcttccatcctccactactttntagnccnccnctctntcttgctctacnctantctncnnanccgactcagtcacccctacaaaaccaatagaccttgttgtnctacccgttcaaaatgatggttccacagggcncnngggancaancctccaaaaaagantgcaagtacc

SEQ ID NO: 284594 - DNA, 214 bp, Glycine max
  unsure (1)..(214): unsure at all n locations
gcggtgaananattgactaaaaaatctccccctgatattgtgctgtacgtggatcgcctggacctgcaaactagagatatgaatgatctgccaatgttaagatcaattaccagtgtcctgggttcatcaatatggcgaaatgtcatagtcactctgacccatgctgcctctgctcctccagacgggccatcaggtgccccatgatgtatttgtt

SEQ ID NO: 284595 - DNA, 208 bp, Glycine max
  unsure (1)..(208): unsure at all n locations
gtgtgatcttctcaggatcaacactgataggggtgtcatgatccatgatagccaaacaaggttttctataaagggacaacctatttaccattttgttggtacctctacattcagtgaatacactgttgttcatgctggatgtgttgccaaagtcaaccctgctgccccacttgacaaaatctgtgttctcagttggcacaggtctngg

SEQ ID NO: 284596 - DNA, 205 bp, Glycine max
  unsure (1)..(205): unsure at all n locations
caaganagaacttccttataaccaaaaccancaacaactatggcnagttntcagaagcactacgatgatcagggtcgcaaggtcgacgagtatggcaatgttgagaggcaaactgacgaatatggcaacccggttcatgccactagtgtcacttatgtngccaccaaaagtgttggtggctacatgatggcgctacatgatatta

SEQ ID NO: 284597 - DNA, 211 bp, Glycine max
ctcaaaaccctgccgtcagtcaccgtcttctctgccgccatgaagctcgtcaggtttctgatgaagctgaacaacgaaaccgtatcaatcgagctcaagaacggcacagttgttcacggcaccattacaggtgttgatatcagtatgaatacacatttgaaaacagttaaactaactctgaaagggaaaaacccagttacatctcagtgtg

SEQ ID NO: 284598 - DNA, 205 bp, Glycine max
  unsure (1)..(205): unsure at all n locations
gagaatggctcccaagggtttaaccttgctggctgtgttaatatgcgtttcagcactgtcactgagtccttctgttgcgggggaagggcaaaataatggccttgttatgaacttctacaaggaatcatgccctcaggctgnagacatcatcacagaacaagtcaagcttctctacaagcgccacaagaacactctggctcaggaa

SEQ ID NO: 284599 - DNA, 206 bp, Glycine max
  unsure (1)..(206): unsure at all n locations
ttcaaatgagaactttgaangccgaagaggggaaaggttccatgtgaacggcacttgcacatgggttagtcgatcctaagggacgggggaagcccgtctgatagcgctctgtgcgcgtactccgaaagggaatcgggttaaaattcccaaaacgacgccgtccaaaccctctccaagctcctcatgatgtccaaccctccccctcc

SEQ ID NO: 284600 - DNA, 207 bp, Glycine max
tcgttcttctcgttttcgccgattctcgccatgccgaaagctaaatccgacgccaaagccgccgatagcaggttgaagcggaagggcgctggtgctgggaggaagcaatcgaggaaagctgctaaggaccctaacaagccgaagagacctccaagcgctttcttcgttttcatgtccgagttcagagagcatttcgcatcctaacaa

SEQ ID NO: 284601 - DNA, 211 bp, Glycine max
  unsure (1)..(211): unsure at all n locations
ggcagaccgngctagctagctngcaagcaagcacagagatggaggcaaagcgaggccatgccctncatgtgcttggtcacgtgtttcactcttcctctgcgctctaaccctctccgctgctcacggangcaccacggttcaannannacacgagaaannatgaaactcggggacaacgagcttctgcgcacggagaagantttcatggaga

SEQ ID NO: 284602 - DNA, 204 bp, Glycine max
  unsure (1)..(204): unsure at all n locations
gnaaacctaagcttagaattagaaacaaagaaaagaagaaaggaaagaattgatcgttgaaaatgcagggaggaaagannagcgggagagtccattaaggaaacagctacaaacattggtgcttctgccaaggctggcatggagaagaccaaggccactgtccaagagaaggcagaaagaatgacagcngtgcaaaggggtngg

SEQ ID NO: 284603 - DNA, 202 bp, Glycine max
atactggcgcacttgatgagctcattcttgccttctctcgagagggacccaccaaggagtatgtacaacataaaatgatggagaaggcttcagaaatttggagcatgatatcacaaggagcttacatttatgtgtgtggtgatgccaagggcatggccagggatgtacaccgcgccctgcacacaattttagggttctctcg

SEQ ID NO: 284604 - DNA, 202 bp, Glycine max
  unsure (1)..(202): unsure at all n locations
atatttttcattctaggtgatgtatcatgtatgnncccaaaatattcnggtacgtaagtnttttaaaaagtttgcatctcctctttggttttccttagttctgaaagttatctcctaagangacaatcatatgtactgtacgtagtgnggagatatagtattgtatgctgcagaatatgattgtctaatatagctgtaataa

SEQ ID NO: 284605 - DNA, 204 bp, Glycine max
  unsure (1)..(204): unsure at all n locations
gctcgttgttggtgctatgagacaggagttgctcttggaatagaagttgatgacaaaatgccacaacacgagtattatgaatattttggtccagattatacccttcatgttgccccaagtaacatggaaaacaagaattcccgtcatttacttgaagaattcgatctaaactacttgagaatctttccaagcnctccnagtgtc

SEQ ID NO: 284606 - DNA, 205 bp, Glycine max
  unsure (1)..(205): unsure at all n locations
tctaacctacctctttttcttctctctcaacaacttcaccttcttcctcctcgatcatgtctcacttcaagggnnagtaccatgatgagcttatcgccaatgctgcgtacattggcactcctggaaagggtattcttgctgctgatgagtcaacaggganaattggcnagcgtttggcnagcatcagtgtagatatccaccaggg

SEQ ID NO: 284607 - DNA, 269 bp, Glycine max
tcgcagagaagaacagagagagatccatccatcaattccaatggccgatcagctcaccgacgaacagatctccgagttcaaggaagccttcagcctcttcgacaaggacggggatggttgtattaccaccaaggaacttgggaccgtgatgcggtcacttggccagaacccaactgaggcagagctgcaggacatgataaatgaggttgatgctgatgggaatggtaccatgatttcccagaattcctgaatctcatggctcgcaagat

SEQ ID NO: 284608 - DNA, 267 bp, Glycine max
gcgatagctgataagagagataccaacaagaaaagaaaaaaagaagagttgagattccctttgaagaaaagatggcatcccataggcaaagctatgaagctggtcaaactaagggccgaactgaggaaaagacgaaccagacgatgggcaatattggagagaaggctcaagctgcaaaggagaagacccaggaaatggcccaagctgcaaaggagaagacccaacaaacagcccaagctgccaaggacaagacttgcgacattccca

SEQ ID NO: 284609 - DNA, 265 bp, Glycine max
  unsure (1)..(265): unsure at all n locations
aactctttggaanttgagcaactactgtggtgtgaatcgattattagactctgtttgcttaccaccaccagtgttttatatgatgcagcaccggccatccagcgcctncaattctcccttctggactacaaattctgtctgctcctatttggaacaacaactcctctttaaccgttggagctagaggtccaattctgctggaggattatcatcttgtggagaagctgcaaattttgatagggaacgtatcccagaacgtgttgtc

SEQ ID NO: 284610 - DNA, 261 bp, Glycine max
  unsure (1)..(261): unsure at all n locations
attctagagacctccttccancagcgaatncgagngnaataaacagggttttgtngggagaggaagaggagcagaggcagcaagagggagtgatcgtngaactctcaaaggaacaaattcggcaactgagcagacgtgccaaatctagttcaaggaaaaccatttcctccgaagatgaaccattcaacttgagaagccgcaaccccatctatccaacaattnggaaanncnttgagatcaccctgagaaaaacccacagct

SEQ ID NO: 284611 - DNA, 264 bp, Glycine max
  unsure (1)..(264): unsure at all n locations
ctacctctttttcttctctctcaacaacttcaccttcttcctccncgatcatgtctncacttcaagggcaagtaccatgatgagcttatcgccaatgctgcgtacattggcactcctggaaagggtattcttgctgctgatgagtcaacagggacaattggcaagcgtttggccagcatcagtgtagagaacattgaatccaacaggcgagctcttagggagctgcttttcactgctcctggtgttcttcaatatctcagtggt

SEQ ID NO: 284612 - DNA, 265 bp, Glycine max
  unsure (1)..(265): unsure at all n locations
atgaagacggagactttncngangccttggaggtgacagtgaagttggtgtcaattccaaggcctcggatgaagacggagactttgccgaactatacatgttcaaatggaccacccttcttattcctccaacaacccttctnanaataaacttggtgggggtngttgctggcatctcctatgccatcaacagtggctaccaatcttggggacccctctttggtaagcttttctttgcattttgggtgatcatccatctataccct

SEQ ID NO: 284613 - DNA, 260 bp, Glycine max
  unsure (1)..(260): unsure at all n locations
ggagacgcatcttccagatacacacgtcaaggatgacattagctgatgatgtcaacttggaagaatttgttatgactaaagacgaattctccggagctgatataaaggcaatatgtactgaagctggtttacttgctctacgagaacgtcgaatgaaggtgactcatgccgactttaagaaggccaaggataaagtgatgtttaagaagaaagaaggggtgcctgaagggctgtatatgtgaaaactancctctattatc

SEQ ID NO: 284614 - DNA, 259 bp, Glycine max
  unsure (1)..(259): unsure at all n locations
tgccggagnattttgattggagagagaaaggagctgtcaccgaagttaagttacagggtagatgtggatcatgctgggctttcagcaccacaggatctatagaaggagccaattttcttgccaccggaaagctcgtcagtcttagtgaacaacagctccttgactgtgacaacaagtgtgacataacagaaaagacttcatgtgacaatgggtgtaatggaggtcttatgacaaatgcctacaattatttgctcgagtc

SEQ ID NO: 284615 - DNA, 259 bp, Glycine max
  unsure (1)..(259): unsure at all n locations
cagttctccgatctcaccgangacgagtttgagaagntctacactggcgtcaatgnncgnccttcccgtcatccgaataatgccgccggcggtattgcgccgccgttggaggtggacgggctgccggagaattttgattggagagagaaaggagctgtcaccgaagttaagttacagggtagatgtggatcatggctgggctttcagcaccacaggatctanagnaggagccaatttcttgccacggnaagctctcatt

SEQ ID NO: 284616 - DNA, 260 bp, Glycine max
  unsure (1)..(260): unsure at all n locations
aaagatttggagaaaaaattgacctttatgaaaaggctagaggcaagtacattgtgaatcagggtattctcaatgtgatgcagagacatgctgtggttatgcaccctcttccaagacttgatgaaatcaccttggaagttgatgctgatccaagggcagcttactttagacaagccaaatatggtctatatattcggatggcacttttgaaactcttgcttgncgggtggtagaactgcattcatcttcaaaacgtatgg

SEQ ID NO: 284617 - DNA, 264 bp, Glycine max
  unsure (1)..(264): unsure at all n locations
agaagaagngntgcanaattnncagaggagatgnncactggagaacgcaaagagtggganagnagctancgatncatgatgtcnncaatganntgaggtgatccggataaaggtgaaaatcatgcccgncctgtncttggaggaaatgacacctttccttatcctcgnagggggagaactggtagaaaacnaacanggaaagatcctaatagtgagagtaggagcaatnatgtgnatcngccnngagatgagnctnncggggct

SEQ ID NO: 284618 - DNA, 263 bp, Glycine max
tgttaggttacctctgtgacatttgtgctgctagttcatatatttgcggctgacaccgagaaggaaagcaggaaaaaaacaaaaaggagcagatgggtagctcaggtttctcatggaaattggcggatcatccaaagcttccaaagggtaagactgtggctgttgtggtattggatggttggggagaggccacacccaatgagtacaactgcatccacaaggctgaaacaccctgcatggattcacttaaaaagggtgctcct

SEQ ID NO: 284619 - DNA, 258 bp, Glycine max
ctacctctttttcttctctctcaacaacttcaccttcttcctcctcgatcatgtctcacttcaagggcaagtaccatgatgagcttatcgccaatgctgcgtacattggcactcctggaaagggtattcttgctgctgatgagtcaacagggacaattggcaagcgtttggccagcatcagtgtagagaacattgaatccaacaggcgagctcttagggagctgcttttcactgctcctggtgttcttcaatatctca

SEQ ID NO: 284620 - DNA, 256 bp, Glycine max
  unsure (1)..(256): unsure at all n locations
aagaaagaacttccttataaccaaaaccaacaacaactatggcnagttatcagaagcactacgatgatcagggtcgcaaggtcgacgagtatggcaatgttgagaggcaaactgacgaatatggcaacccggttcatgccactagtgtcacttatgtagccaccaaaagtgttggtggctacaatgatgacgctaataagcaacatgatattactggtgtctatcccgagaaagacaccggtagacatcattttgg

SEQ ID NO: 284621 - DNA, 257 bp, Glycine max
tggacataagaaagaagttcgacattgagtaggttcatgttggattttaatagccatagtgacgtattgatcattcttggcctttcaactaaatagtatttgtgtagtaaattaaaggcacttggatgtaccaaacttcatgctttttgtaggagtgcgtaggttttaaaaattttctgatgtatctttcatgtgtttgttggttttgtaacagaatattctcctatattatacatatatttgagtcactagtaaaa

SEQ ID NO: 284622 - DNA, 257 bp, Glycine max
  unsure (1)..(257): unsure at all n locations
caaaccttgctctatactacacagtacanacactagaagaataatggcttccatcctccactactttttagcccnctctctttcttgctcttttcttntcttcttatccgactcagtcacccctacaaaaccaataaaccttgttgttctacccgttcaaaatgatggttccacagggctcnattgagcacaacctccaaaaaagaacccctctaatgcaagtaccagtcctggtggacctcaatggaaatcattgt

SEQ ID NO: 284623 - DNA, 258 bp, Glycine max
  unsure (1)..(258): unsure at all n locations
aactaattcagactgtgaaactgcgaatggctcattaaatcagttatagtttgtttgatggtatctactactcggataaccgtagtaattctagagctaatacgtgcnanaaaccccgacttctggaagggatgcatttattagataaaaggtcaacacaggctctgcctnctgctttgatgattacatgataactcgtccggatccgcacggccttgtgccggcgacgcatcattcaaatttctgccctatcaactt

SEQ ID NO: 284624 - DNA, 256 bp, Glycine max
tatgagtccaaagaagaggacttgcagaacaagagccctttgctcctcaaaatgaacccggttcacaagaaaatcccggttctcatccacaatggcaaacccatttgtgaatctctcgttgctgttcagtacattgaggaggtctggaatgacagaaatcccttgttgccttctgacccttaccagagagctcaggctagattctgggctgactttgttgacaataagatatttgatcttggaagaaagattcgac

SEQ ID NO: 284625 - DNA, 258 bp, Glycine max
gcgatgcggatgaggcgccactcgatgtttccatttgcctgcatgcctttggtattgtggggtgtggttcgtttagtggtgtcaagtcttgcgaacgtgagggtgcatgagtggtaatcgggatgtttttgttgcacggctccatgcttgcgcatgcaacgtgtgacatgcatccttttcattgtcaccttagccttcgtggcttaggtgctgacgattggttcctgtgttgcctacctaccaaacggtattcgtgtg

SEQ ID NO: 284626 - DNA, 255 bp, Glycine max
  unsure (1)..(255): unsure at all n locations
gggtgctataatattcggggatgcacctaacaacatgcgacantttcaaaaccaagatattttccacgatttggccttcaccccattaaccatcaccctgcagggagagtacaacgtgagagtcaactcaataagaatcaaccagcacagtgtgttcccactgaacaagatatcatccaccatcgtagggtcgactctggaggaaccatgattngcacctcanctcctcacatggttctccagnatccgtgtacc

SEQ ID NO: 284627 - DNA, 254 bp, Glycine max
gttcattcacattattcctgacaagaccaacaccgccattgtctatcattgacagtggtattggcatgactaaggccgatttggtgaataacctcggtactattgcaaggtctgggaccaaggaattcatggaagccctggctgctggtgctgatgtgagcatgattggacagtttggtgttggtttctactcggcttatcttgtagctgacaaggttattgttaccacaaagcacaatgatgatgagcatatg

SEQ ID NO: 284628 - DNA, 255 bp, Glycine max
tcaaaccttgctctatactacacagtacacacactagaagaataatggcttccatcctccactactttttagccctctctctttcttgctcttttcttttcttcttatccgactcagtcacccctacaaaaccaataaaccttgttgttctacccgttcaaaatgatggttccacagggctccattgggccaacctccaaaaaagaacccctctaatgcaagtaccagtcctggtggacctcaatggaaatcact

SEQ ID NO: 284629 - DNA, 254 bp, Glycine max
  unsure (1)..(254): unsure at all n locations
caatttcaaattcactctcagaaattagaatggctagccaatcaaacactaaatcagttcacgatttcacagttaaagatgccnggggaaataatgttaatctcgccgattacaaaggaaaggtccttctcattgtcaatgttgcctcacaatgnggcttgactaattcaaactacacagagcttaaccaattgtatgagaaatacaaagggaaaggacttgaaattctggcattcccatgcaatcagtttggg

SEQ ID NO: 284630 - DNA, 255 bp, Glycine max
gtgatggcaaggggaacttttgccaacattcgccttgttaacaagctcttgaaaggggaagttggtccaaagacagttcacattccaacaggggaaaagctttacgtgtttgatgcagcaacgagatacatggcttctgggcaagacaccattgtgctggctggagctgaatatggcagtggaagctctagagattgggctgccaagggtccaatgctactgggagtcaaagctgtgatagccaagagtttcgag

SEQ ID NO: 284631 - DNA, 256 bp, Glycine max
  unsure (1)..(256): unsure at all n locations
tccactttcnctggaatcacaatcctgaaacaaaaacatcttagcatttaacatactactagacaacatgaccaccacattggaaagaggtttctcggaagagcaagaagctctggtggtgaagtcatggaatgtcatgaagaagaattctggagagttgggtctcaagtttttcttgaaaatatttgagattgctccatcagctcagaaattgttctcatcttgagagattcaacggttccttggngcaaaatcc

SEQ ID NO: 284632 - DNA, 256 bp, Glycine max
  unsure (1)..(256): unsure at all n locations
cacaactacaagaaagaacttccttataaccaaaaccaacaacaactatggcaagttatcagaagcactacgatgatcagggtcgcaaggtcgacgagtatggcaatgttgagaggcaaactgacgaatatggcaacccggttcatgccactagtgtcacttatgtngccaccaaaagtgttggtggctacaatgatgacgctaataggcaacatgatatcgcnggtgttanccngaaaaacnnngggnagttttt

SEQ ID NO: 284633 - DNA, 251 bp, Glycine max
  unsure (1)..(251): unsure at all n locations
aggcgatctcggttgggaagcggggaagatggggaagcttgtaattaagcatttggctgccaacncggtgcagaagaatggttgttgttaacaggactgaagagaaagttaatgccattcggaaagagttgaaggatgttgagattgtatttagaccattttcagatatgctggcgtgtgctgctgaagctgatgtgatcttcaccagcacagcgtctgaatcaccatgttctctaaacagaatgtgcaga

SEQ ID NO: 284634 - DNA, 249 bp, Glycine max
gggaagcaccagcaggtgagaagccagaaccagttcgcacccatctccgcaacatgattattgtgcctgagatgattggtagcatcattggagtctacaatggcaagaccttcaaccaggttgaaatcaaacccgagatgattggacattatctcgctgagttctctatttcatacaaacccgtcaagcacggtaggcctggtattggtgccatcactcttccaggttcattcctctcaagtgaaaaaa

SEQ ID NO: 284635 - DNA, 252 bp, Glycine max
  unsure (1)..(252): unsure at all n locations
aaataccaaggccgcctttatcaaggtcaagtccgcacccactcccaggaggctccgccctctcagagtcgttaatgagaaagtcgtcggtatcntttgggaaccaccaactccgccgtggccgccatggaaggcggcaagcccaccatcatcaccaacgccgagggccagagaaccactccctccgtcgtggcctacaccaagaacggcgacaggctcgtgggccaaatcgccaagcgtcaggccgtcgtc

SEQ ID NO: 284636 - DNA, 250 bp, Glycine max
gttaatttgcaccttttgtttctctctagaaattagaagttcatgcttaaactttaccttgatacttctttctcgcatgaattttcgaacattgaacaggaaattaaccatggctcaacctgcaagcctcacaagaataggccttgctggcctggctgtgatgggccaaaaccttgctctcaacattgctgagaaaggctttcccatttctgtctacaaccggaccgcgtccaaggttgatgagacagtt

SEQ ID NO: 284637 - DNA, 253 bp, Glycine max
  unsure (1)..(253): unsure at all n locations
caaaatggctgcagagatggagagggagtcattgataactgaagctcctaatgcaccagttactgcacagagaagggtcagaaatgacttagaaaattctctaccaaaacnctacttgccaagagcattgaaagctcctgatacgggtcacccgnatggaacagcaggccacaggcaccacaacttatctgttcttcagcagcattgtgctttttttgatcagatgacatggattcatttnccttgggaactt

SEQ ID NO: 284638 - DNA, 248 bp, Glycine max
tagcttgtaacctaagtgggggcattaaagtgatgggacatggctcgggctatgctcggtcgggctgttagatgcataattctggcctgcccgctccaagttaagagctgagtcatgggatttgggcgaaggctcaggtctcttggctcctaaactggagggcacagcgtgaggctggtttaacagagcagcgagcacctccggctcctgacagtggagggataacaggctgcagcactttcagccca

SEQ ID NO: 284639 - DNA, 259 bp, Glycine max
cagtgggaaagacagatggtgaaaaatcagttcctgcacccaaagccgctgaagttcctcctgataatgagtttgagaagcgaataaggcccgaggtaatactagcaaatgagattgatgtcacattctctgatattggtgccttagatgagaccaaagaatcccttcaagaactagtaatgcttcctcttagaaggccagaccttttcactggaggccttctaaagccttgtagaggaatattgctgtttggacctcc

SEQ ID NO: 284640 - DNA, 245 bp, Glycine max
  unsure (1)..(245): unsure at all n locations
gaaaactagaggccagggtctcggngtgtttgggtttgtttatcttaaacaccacaaacacagaacagaggtgtagagaagaaagctcaaaaatatggcggcagagtcatcactgagggtggcgactcccactctttgcaacctcaatgggtctcagagacgaccaaccaccaccactctctctccgcttcgcttcatgggttttcgtcctcgaccctcctctcactctctcacctcctcttccc

SEQ ID NO: 284641 - DNA, 238 bp, Glycine max
caccagttactgcacagagaagggtcagaaatgacttagaaaattctctaccaaaaccatacttgccaagagcattgaaagctcctgatacgggtcacccaaatggaacagcaggccacaggcaccacaacttatctgttcttcagcagcattgtgctttttttgatcaagatgacaatggaatcatttacccttgggaaacttacatggggctgcgttctattggatttaatgttgt

SEQ ID NO: 284642 - DNA, 249 bp, Glycine max; identical to SEQ ID NO: 133733

SEQ ID NO: 284643 - DNA, 249 bp, Glycine max
  unsure (1)..(249): unsure at all n locations
cccaattttctttctcaacaatggccgcagcaacacaactccacttaccccctggattccgattccaccccaccgatgaacnactcgtcgttcactatctctgccgcaaatgcgcttcgcaagaaatcgcagttccaataatcgccgaaatcgatctctacaagtacgacccatgggaccttccaggaatggctttgtacggagagaaagantggtattttttcacgccgagggaccgcaatncccgaa

SEQ ID NO: 284644 - DNA, 246 bp, Glycine max
  unsure (1)..(246): unsure at all n locations
atagttttcgcagcagcaaactaacaaattactcatatcatataataanatgnnacgccctctctcgcnagccaaacgtattggtgtccttgttgctcaatctatctccctaattcccgttcatcggcgaggttacgcatggcatccgatgtatcggtaagagttggattgggtaatattgggcgaaggaatggaatcgtgggaggtgtagaagagaagcctgatacaagagatggttcaaaagcc

SEQ ID NO: 284645 - DNA, 243 bp, Glycine max
gttgagtctcacaggcgagctgctgcagctactgctgctggtaaatttaaagatgaaattgtcccagttaccaccaagattgtggacccaaaaaccggtgaggagaaatctgtcaccatttctgttgatgatggaattcgacctggcacaacagtgtctgatctaggaagactcaaacctgtgttcaagaaagacggaagcaccactgctggtaattctagccaggtgaccgatggggcttca

SEQ ID NO: 284646 - DNA, 246 bp, Glycine max
cttgtttgtaatgtagtcatctttgctgcactcacgacccaaatcaacagttggaacaccagcttacatagcaccggaagttctttctaggcgagagtatgacggaaagttggctgatgtatggtcatgtgcggtgactctttatgtcatgctggttggagcatatccctttgaggaccaggatgaccctaggaattttaggaaaacaattcagcgtataatggctgttcaatacaaaatccctga

SEQ ID NO: 284647 - DNA, 245 bp, Glycine max
  unsure (1)..(245): unsure at all n locations
acttacttacccgatctcaaggttgctgtcttttatggtggagtcaacatcaaagntcacaaggatctgctgaaaaatgagtgccctcatattgttgttggaacaccgggaagaatactagcattgactagggataaggacctttctttaaagaatgttagacatttcatattggatgaatgcgacaagatgctggaatcactggatatgaggaaagatgttcaagacattttcaagatgactcc

SEQ ID NO: 284648 - DNA, 240 bp, Glycine max
taaacacagagaaaggcacagcacgatgacgatgaagataatggtagcgattaagcgagtggtggactacgccgtgaaaatcagggtgaagggcgacaagacaggggtggtgacccataacgtgaaaatgtcgatgaaccccttctgcgagatcgcgctggaagaggccctccgcatcagggagtctggcttggcctccgaggttgtcgccgtcaccatgggaccctctcaatctgtaga

SEQ ID NO: 284649 - DNA, 243 bp, Glycine max
aggcgagaaagacaatgtggtaaggcagatagaaagacaagtgcaggagcttgcgttccctgggtctgcacaagatgttgagaggctattaaagaagcagagggaatcctactttgttgatgctcagcctcagcagaaggaggaggggagtaagggaagaaagggtccttttccttcaatcttaggtgctctctactgaataactacgtaaatgtatgctgtaagagctcatcgtgagcgtgg

SEQ ID NO: 284650 - DNA, 244 bp, Glycine max
ggagaatagaagaggagcaggaggcatcaccattgccacaatggttaaaggtcgccaaggagaacgtgtaagactctacgtcaggggttcaattcttggatacaagaggtccaagtcaaatcaatacccaagcacctccctaatccagattgagaatgtaaactctaaggaagaagttgcgtggtactgtgggaagcgcatggcttacatctacaaagcgaaggtaaagaagaacggaagccat

SEQ ID NO: 284651 - DNA, 248 bp, Glycine max
  unsure (1)..(248): unsure at all n locations
tggaggtcttatgacaaatgcctacaattatttgctcgagtctggtgggttggaggaggagtcttcatatccctacactggggagagaggtgaatgcaantttgatccagagaaaatagcagttaagatcacaaatttcaccaatatccctgctgatgagaaccaaattgccgcatatttagtaaaaaatggtccacttgctatgggcgtgaatgcaattttnatgcaaacatacatggtggtgtctc

SEQ ID NO: 284652 - DNA, 259 bp, Glycine max
  unsure (1)..(259): unsure at all n locations
ggtttctcttcctccctggaagaaaaagaagagtcaccgctacgacgccgttcgtgcttttttgaggtgccacagtcatgtttgggcgtggtggaccaaggaggagtgacaactccaaatattatgatattctcggggtttccaaaaatgccagtgaagatgaaatcaagaaggcctatagaaaggctgctatgaagaaccatccagataagggaggagatcctgaaaagttcaaggagttaggtcaagcatatgantt

SEQ ID NO: 284653 - DNA, 269 bp, Glycine max
  unsure (1)..(269): unsure at all n locations
ttctnttgttgtttgtgtgtttgttttttctctcacctgaaaatgtcttgctgcggtggtaactgtggttgcggaagcgcctgcaagtgcggcaacggctgcggaggctgcaagatgtacccagacttgagctacaccgagtcaaccaccaccgatgaccttggtcatgggantggcaccagttaaggctcaatnngagantgctgaaatgggtgttcccgntaaaaccnatgnnnnnnaaatgtggannnaactgnccttnnacccct

SEQ ID NO: 284654 - DNA, 266 bp, Glycine max
  unsure (1)..(266): unsure at all n locations
cacacacaactactacaagtacttccttacaatcaaaaccancaacaactatggcaagttatcaaaagcactacgatgatcagggtcgcaaggttgacgagtatggcaacgttgagaagcaaaccgacgaatacggcaaccctgttcatgctgctagtgtcacctatgtagccaccagaactgctgctggtggttacagtgctgncattactaagccaacatgataccaccaatgcctacggcgtagacactggtngacagcttct

SEQ ID NO: 284655 - DNA, 261 bp, Glycine max
  unsure (1)..(261): unsure at all n locations
tttctctcaattcaattgccttctcccctgcgaatctcttctccacgtatcggagaacatggggaacaagatgaatgcgatcgcgttgtgcttgttagtgtcgaccctgttggtttctgcggtgtattgtgcaccgaatgctgggctccgtaggattgggctgaagaagattaaattggaccctaaaaacaggcttgctgctcgagttgggtccaaggatgttgattctttccgggcttctatagaaantttcatctccaa

SEQ ID NO: 284656 - DNA, 264 bp, Glycine max
  unsure (1)..(264): unsure at all n locations
gttgcagaccgagctagctancctagcaagcaagcacagagatggaggcaaagcgaggccatgccctcatgtgcttgnncacgtgtttcactcttcctctgcgctctaaccctatccgctgctcacggaagcaccacggttcaanacntcgcgagaaanttgaaactcggggacaacgagcttctgcgcacggagaagaanttcaaggttttcatggagaattacgggaggagctactccacagaggaggagtatttgcgccgt

SEQ ID NO: 284657 - DNA, 259 bp, Glycine max
  unsure (1)..(259): unsure at all n locations
caaagccttgtgacttgggcaacaccaaagcttagtgaagataaggtgaagcagtgtgttgatgttagactaaagggagagtacccttcaaaatcagttgcaaagatggctgctgttgctgcattgtgtgtgcaatatgaagctgagtttcgaccaaatatgagcattatagtgaaagctctacagcctctactgaatactcgttctgttcactcaaaggaagcacccaagatgtattaaaacctgtaattcccaaanc

SEQ ID NO: 284658 - DNA, 263 bp, Glycine max
cattttcattatcttaccactttcaattccaaattcactctcagaaattagaatggctagccaatcaaacactaaatcagttcacgatttcacagttaaagatgccaggggaaatgatgttaatctcgccgattacaaaggaaaggtccttctccttgtcaatgttgcctcacaatgcggcttgactaattcaaactacacagagcttaatcaattgtatgagaaatacaaagggaaaggacttgaaattctggcattcccgt

SEQ ID NO: 284659 - DNA, 261 bp, Glycine max
atctgctagtcttgattgatgacatctacaaatatgttgacgatgttgtggaaggacgagtggcaccagacaacaaaatcgggagatttatatcagaagctgtaggttcccttcccaaattgtccccatcagtttttgataagcttgtgaatgacagtttgcaggatcacttgcttttgctgtatttatctagtatcacaagaacgcagcttagcttggctgaaaaattgaacacagctgctcagattctgtgattcttcc

SEQ ID NO: 284660 - DNA, 261 bp, Glycine max
  unsure (1)..(261): unsure at all n locations
ggtttttgactacacaggtagcagcaaactcagtggtctctacatctaaagagtctctcgcttggngcttcgctgactgcattacatgcttggataaatgacttgtccaagactttggaatcaggagaggatcttccaccactgcttggaattaataccggtcatgggaaacacaggtattcggacaaaggtttggcaaatgttgtcgaatcacatttgaacgaactcaatgctccattccatgaggctccggataaggct

SEQ ID NO: 284661 - DNA, 258 bp, Glycine max
ctatttttcttcctcagtagtgtcatttacgcttctcttctctgcagcaactatgcctaaccctaaggtcttcttcgacatgaccatcggcggtcaatctgctggccgcatcgtgatggagctctacgccgacgtcactccccgcaccgccgagaacttccgcgcgctttgcaccggcgagaagggcgtagggcggagggcaagcccctccactacaagggctcgtccttccaccgcgtgatcccgagtttcatgtgt

SEQ ID NO: 284662 - DNA, 265 bp, Glycine max
  unsure (1)..(265): unsure at all n locations
gaaaacctaagcttagaattagaaacaaagaaaagaagaaaggaaagaattgatcgttgaaaatgcagggaggaaagaaagcgggagagtccattaaggaaacagctacaaacattggtgcttctgccaaggctggcatggagaagaccaaggccactgtccaagagaaggcagaaagaatgacagcacgtgatccggtgcaaaaggagttggcaacccaaaagaaagaggcaaanatgaaccaggcggntnnggacaacaggcg

SEQ ID NO: 284663 - DNA, 257 bp, Glycine max
aatttacagagacttcaaggcctcaaatatattgcttgatggatcctataatgcaaagatatcagattttggcttggcaaaactgggtccttcagctagtcaatcccatgtgacaacaagggtgatgggcacatacggctatgcagctcctgaatatgtagccaccgggcatctatatgtaaagagtgatgtatacgggtttggagttgttttggttgaaatactaacaggccaacgagcacttgataccaaccgtc

SEQ ID NO: 284664 - DNA, 257 bp, Glycine max
gcagcttatccatttgtcgtcaacgctacctcaaacctcaatttccttgcttttggtatcaatgctgagaacaaccagaggaacttccttgcaggcgagaaagacaatgtggtaaggcagatagaaagacaagtgcaggagcttgcgttccctgggtctgcacaagatgttgagaggctattaaagaagcagagggaatcctactttgttgatgctcagcctcagcagaaggaggaggggagtaagggaagaaaggg

SEQ ID NO: 284665 - DNA, 259 bp, Glycine max
  unsure (1)..(259): unsure at all n locations
gtacncanggnagcagtgaacaagagagtnncacaaattaggaacctaattgaggctgctgagcangagtatgagaaagaaaagctgaatgagagaattgctaaattgtctggtggtgtggcngtgatacaggttggcgcacaaactgagacagagctcaaggaaaagaaattgagagttgaagacgctcttaatgctacaaaggcanntgtanaggaaggtattgttgttggtggtggttgcatcttctgagacttgc

SEQ ID NO: 284666 - DNA, 230 bp, Glycine max
  unsure (1)..(230): unsure at all n locations
ctctcnctctcccctccgccatggctgaggataaggagatgtctacctctgtcatcaatgggaatgattccctaactggtcacatcatatctacaactattggaggcaaaaatggggaacccaaacagactattagctacatggcagancgggttgtaggaactggatcatttggaatcgttttccaggcaaaatgcttggaaactggggaggcagtggcaattaaaang

SEQ ID NO: 284667 - DNA, 256 bp, Glycine max
  unsure (1)..(256): unsure at all n locations
ctccttcaaaatcgttgtcaatttcgcctctttctttctcaactcccttagattctctccatcgggtcttcaaaaatgcggatgagctgcaatggatgtcgagttctcagaaaaggttgcagtgaaaattgcagcatcagaccctgtttacaatggatcaaaagcccagaatctcaagccaatgctactgtgtttcttgcnaagttctacggccgtgctggtctaatgaacctggttaacgcaggccccgaacatc

SEQ ID NO: 284668 - DNA, 255 bp, Glycine max
  unsure (1)..(255): unsure at all n locations
gggacttanacaaagactttgacatcacatggggagatggccgctccaagatactaaaccatggagagttactcactctttcattggacaaagcatctggctcaggttttcaatcaaagaatgagtatctctttgggaagattgacatgcagctcaagcttgtccctggaaactctgctggcaccgtcactgcctattatgtaagttcttcctttaactttattactattatattattgtagaataataaaaata

SEQ ID NO: 284669 - DNA, 221 bp, Glycine max
  unsure (1)..(221): unsure at all n locations
ccgagctanctagctagcaagcaagcacagancatggaggcaaagcgaggccatgccctcatgtgcttggcacgtgtttcactcttcctctgcgctctaaccctatccgctgctcacggaagcaccacggttcaanacntcgcgagaaanttgaaactcggggacaacgagcttctgcgcacggagaagaanttcaaggtttgcatggagattacgggngg

SEQ ID NO: 284670 - DNA, 253 bp, Glycine max
gaccgagctagctagctagcaagcaagcacagagatggaggcaaagcgaggccatgccctcatgtgcttggcacgtgtttcactcttcctctgcgctctaaccctatccgctgctcacggaagcaccacggttcaagacatcgcgagaaagttgaaactcggggacaacgagcttctgcgcacggagaagaagttcaaggttttcatggagaattacgggaggagctactccacagaggaggagtattgcgcc

SEQ ID NO: 284671 - DNA, 254 bp, Glycine max
cgagtttcacagcgaagtcgtaggagggtttcaaaagatggagaacatgcagagcttctggcaattgggcgatgaactccgtggacactcaaaagcatcggaggatcacaaatggttaatggttgcttcgaaattggcggaacagacaagattgaagggggagcgtgtgaacaaccttgatctttcaaagggccccattgaaacaaggtcaagggataatttgggttccaggaagagaacaatttgttctctta

SEQ ID NO: 284672 - DNA, 249 bp, Glycine max
gtccctcgactgaggaaggaaagagagaatggactgttcaaacccgatcctcgatttgaagaggcaaagaagtttattaggagtggggtgtttggaagctatgactataatccattgcttgagtccttggaaggaaattctggttatggccgtggtgattactttctagttggtcatgactttccaagctacatggatactcaggcaaaagttgatgaagcataccgtgataggaaaagatggctaaaa

SEQ ID NO: 284673 - DNA, 251 bp, Glycine max
gagaaaatggatgtgattgacttggaagatgagacaattgatgctgaaatattgaactccatggcagtgacaaatgagcatttccagactgctcttggatcaagcaatccttctgctctacgtgaaacggttgttgaagtgcccaatgtcagctgggaagatattggtggtctgaaaatgttaagagggaactccaagagactgttcaatatccagtggaacaccctgaaaaatttgagaatttggaatgt

SEQ ID NO: 284674 - DNA, 265 bp, Glycine max
  unsure (1)..(265): unsure at all n locations
aagacagcaggaggtggaaaacacatgggttcggagttagcacagcgaattggcattaatgaagttgctgagagcattatggctttcaacaccaattacaaggacacgggtctttttggtgtttatgctgttgccaagcctgatagcttggatgatttgtcttatgctataatgtatgagacaaccaagttggctatcgcgttccagagagnatgtaaaangtgcccgaaancngttgaatctacangctactacacatngatgg

SEQ ID NO: 284675 - DNA, 256 bp, Glycine max
gcaaaatacctatacagtagcaatgatctctttcacagtctttgttttccttacactcttgttcactttgtcattggttaaacagctgagaaagcctactgcagaaaagagaagactactacctccaggaccaaggaaactacccttcattggcaacctccaccagcttggtacgttgccacatcaatcccttcaatacctttcaaataagcatggacctctcatgttcttgcagctgggttcaatacccaccttg

SEQ ID NO: 284676 - DNA, 251 bp, Glycine max
gagctggtgaaacagaattcaagatatcatcaactgaaattacggatgctatcaaagctggattggatgaacctattcagccagagcctgagcttgaggtgccaaaagagctaatacaatcaacaaagctagaagagttgaaaaagctgcgcaagccggcctttattcctgtaaatcctgaaacagatgctacaaagcttcatgatgaggaaactgggatcacccggcgccgtctcgctatggattcctgt

SEQ ID NO: 284677 - DNA, 248 bp, Glycine max
cgagtttcacagcgaagtcgtaggagggtttcaaaagatggagaacatgcagagcttctggcaattgggcgatgaactccgtggacactcaaaagcatcggaggatcacaaatggttaatggttgcttcgaaattggcggaacagacaagattgaagggggagcgtgtgaacaaccttgatctttcaaagggccccattgaaacaaggtcaagggataatttgggttccaggaagagaacaatttgat

SEQ ID NO: 284678 - DNA, 270 bp, Glycine max
gtatggtactgcaattgatcccaaaagaggtgctgttagcaatattgcacctttggcaattggactcattgttggggcaaacatccttgttggtggaccatttgatggagcatgcatgaaccctgctctggcttttgggccttccttagtgggctggagatggcaccagcactggatcttctgggtgggtccactgattggggcagcactagcagcactggtctatgaatatgttgtgatcccaatgaaccccctcatcaacacaacttt

SEQ ID NO: 284679 - DNA, 265 bp, Glycine max
  unsure (1)..(265): unsure at all n locations
accttgctctatactacacagtacacacactagaagaataatggcttccatcctccactactttttagccctctctctttcttgctcttttcttttcttcttatccgactcagtcacccctacaaaaccaataaaccttgttgttctacccgttcaaaatgatggttccacagggctccattggncccaacctccaaaaaagancccctctantgcaagtaccagtcctggtggacctcaatggaaatcacttgtgggttaactg

SEQ ID NO: 284680 - DNA, 261 bp, Glycine max
  unsure (1)..(261): unsure at all n locations
caacctctcaagtccaacctacccctttttcttctcccaccaacttcaccgtcntcttcctcgatcatgtctcacttcaagggcaagtaccatgatgagcttattgccaatgctgcttacattggcactcctggaaagggtattcttgctgctgatgagtcaacagggacaattggcaagcgtttggccagcatcagtgtagagaatgttgaatccaacaggcgtgctcttagggagctgcttttcaccgctcccggtgct

SEQ ID NO: 284681 - DNA, 265 bp, Glycine max
  unsure (1)..(265): unsure at all n locations
ctctccattggtccttaaacantcatcagtcatnaccatggccaagcnnagttntttccctttgttttctgcttttcagtggctgctgcttcgctttnagtncccagagagnaggcctgcagacngaacgagtgccagatgcannaactgcaatgccctcaaaccggataaccgtataganccagaaggagggctcattgagacatggaaccntaacaacaagcnattcagtgtgccggtgttgnnctctntngctgcaccctca

SEQ ID NO: 284682 - DNA, 262 bp, Glycine max
  unsure (1)..(262): unsure at all n locations
ctaataaacatcatggaactactggtggctataatgatgacaccaatagacatcatggaactaccggtgtctatggtatagacaccgataggcaacaacatgggactactggtggctatgccggtgacactggtaggcaacatgggaacatcggtggcccttactatggaaccaacaccgcagacaccggtactggtcccagaagtggaaccacgggcgncaccggttatggaggcactgntggcactgattatggaacacc

SEQ ID NO: 284683 - DNA, 263 bp, Glycine max
aaagaatcaaagaaaggggtggtggctgcttcgaaagcttaataatttgtttatttccagaacatcatagttttccgcagcagcaaactaacaaattactcatatcatataataagatggcccgttctctctcgcaagccaaacgtattggtgtccttgttgctcaatctatctccctaattcccgttcatcggcgaggttacgcagtggcatccgatgtatcggtaagagttggattgggtatattgggcgaaggaatggat

SEQ ID NO: 284684 - DNA, 264 bp, Glycine max
  unsure (1)..(264): unsure at all n locations
atcgttttctacataatacaaacctntctaatttttgaagcttattatacccaatctccgatatgcagatcttcgtgaaaaccctaactggcaagacgatcaccttggaggtggagtcctctgacaccatcgacaacgtgaaggccaaaatccaagacaaggagggcattcctccggatcaacagcgtttaactncgccgnaaancagctcgaagagggcagacccnnggnggntaanaatatccaangggtnccacncncccc

SEQ ID NO: 284685 - DNA, 208 bp, Glycine max
  unsure (1)..(208): unsure at all n locations
cacgaaatgaattagcgttgccattctcatcctcctctgtcctctctctctccaccattgccatggatccttacaagctccggccatcccagcgccttcaattctcccttctggactacaaattctggtgctcctgtttggaacaacaactccncttnaacgtgggagcagggtccaattnngtcgggantaanncnngtgggnaagt

SEQ ID NO: 284686 - DNA, 268 bp, Glycine max
  unsure (1)..(268): unsure at all n locations
cacacaactactacaagtacttccttacaatcaaaaccannaacaactanggcaagttatccaaaagcactacgatgatcagggtcgcaaggttgacgagtatggcaacgttgagaagcaaaccgacgaatacggcaaccctgttcatgctgctagtgtcacctatgtagccaccagaactgctgctggtggttacagtgatgacattantaagcaacatgataccaccaatgcctacggcgtagacactggtagacagcattctagt

SEQ ID NO: 284687 - DNA, 262 bp, Glycine max
aaagaacttccttataaccaaaaccaacaacaactatggcaagttatcagaagcactacgatgatcagggtcgcaaggtcgacgagtatggcaatgttgagaggcaaactgacgaatatggcaacccggttcatgccactagtgtcacttatgtagccaccaaaagtgttggtggctacaatgatgacgctaataagcaacatgatattactggtgtctatcccgagaaagacaccggtagacatcattttggtcgtggtta

SEQ ID NO: 284688 - DNA, 261 bp, Glycine max
  unsure (1)..(261): unsure at all n locations
acataaactaccaaatctagggtttcagagtggtggggtgtgcagaagagcgtcgcagttgtaaccctaatcagaagaagcgcanttcaagcgagtgacagccaccagccatgggtcgtatgcacagccgcggtaagggtatatcctcttctgctttgccctacaaaaggacacctcctagctggctcaagatctcttcgcaagatgtcgaagaaaatatctgcaatttgcgaagaaaggtttgaccccgtctcagattgg

SEQ ID NO: 284689 - DNA, 262 bp, Glycine max
  unsure (1)..(262): unsure at all n locations
gaaaacctaagcttagaattagaaacaaagaaaagaagaaaggaaagaattgatncgttgaaaatgcagggaggaaagaaagcgggagagtccattaaggaaacagctacaaacattggtgcttctgccaaggctggcatggagaagaccaaggccactgtccaagagaaggcagaaagaatgacagcacgtgatccggtgcaaaaggagttggcaacccaaaagaaagaggcaaagatgaaccaggcggactggacaagcc

SEQ ID NO: 284690 - DNA, 275 bp, Glycine max
  unsure (1)..(275): unsure at all n locations
tattgatncgcctggacatagggatttcattaagaatatgattactggtnacatcccaagctgactgtgctgttcttatcatcgattcgaccactggtggtttctgaagctggtatttccaaggatggacanactcgtgaanatgctctgntttcattcacccttggtgtganncagatggatttgctgctgtaacaaantgnattccactacnacccagttntccnanggccaggntntcatnngattggtgagnggaacntctntncctgctc

SEQ ID NO: 284691 - DNA, 264 bp, Glycine max
  unsure (1)..(264): unsure at all n locations
gcagaccgagctagctagctagcaagcaagcacagagatggaggcaaagcgncgccatgccctcatgtgcttggcacgtgtttcactcttcctctgcgctctaaccctatccgctgctcacggaagcaccacggttcaagacatcgcgagaaagttgaaactcggggacaacgagcttctgcgcacggagaagaagttcaaggttttcatggagaattacgggaggagctactccacagaggaggagtatttgcgccgtttggg

SEQ ID NO: 284692 - DNA, 263 bp, Glycine max
  unsure (1)..(263): unsure at all n locations
aaaaggttttgaatagatgcactgaaactaaccttgttctaaattttgaaaaaatgtncattttatggttgaacaaggtatagttttaggccacattatttccaaaaagggcattgaagtagatcctgacaaaaatttttgttatttcacaattgccttacccctcttgcgtacgagaggtgcgatcttttcttggtcatgcaggattctacaggcgctttataanagattttagcaaggtagcccttccactatccaacttg

SEQ ID NO: 284693 - DNA, 225 bp, Glycine max
  unsure (1)..(225): unsure at all n locations
ctctccattggtccttaaacactcatcagtcatcaccatggccaagctagttttttccctttgttttctgcttttcagtggctgctgcttcgctttcagttccagagagcagcctcagnaaaacgagtgccagatccaaaaactcaatgccctcaaaccggataaccgtatagagtcagaaggagggctcattgagacatggaaccctaacaacaagccattcca

SEQ ID NO: 284694 - DNA, 262 bp, Glycine max
ctccattggtccttaaacactcatcagtcatcaccatggccaagctagttttttccctttgttttctgcttttcagtggctgctgcttcgctttcagttccagagagcagcctcagcaaaacgagtgccagatccaaaaactcaatgccctcaaaccggataaccgtatagagtcagaaggagggctcattgagacatggaaccctaacaacaagccattccagtgtgccggtgttgccctctctcgctgcaccctcaaccg

SEQ ID NO: 284695 - DNA, 264 bp, Glycine max
  unsure (1)..(264): unsure at all n locations
gnagaaagnagtgcaatggacatcggaacctatggctatcctacaccagcagtgaaaaagattgagtcttactatgatgttccagagggagtggatatncggggaagatatgatgcagagtttgcaaaaatcctcacaaaagatgcttacgaaattcgttgctgacttggcaacgtgagttcaggaaccatatcangtatgcattagagtgcagaagagaagcaaagaagagtacaatgaaggggctcttccagagtttgatcc

SEQ ID NO: 284696 - DNA, 264 bp, Glycine max
  unsure (1)..(264): unsure at all n locations
accttgctctatactacacagtacanacactagaagaataatggcttccatcctccactactttttagcccnctctctttcttgctcttttcttttcttcttatccgactcagtcacccctacaaaaccaataaaccttgttgttctacccgttcaaaatgatggttccacagggctccattgaaccaacctccaaaaaagaacccctctaatgcaagtaccagtcctggtggacctcaatggaaatcacttgtgggttaactg

SEQ ID NO: 284697 - DNA, 262 bp, Glycine max
  unsure (1)..(262): unsure at all n locations
gaaaacctaagcttagaattagaaacaaagaaaagaagaaaggaaagaattgatncgttgaaaatgcagggaggaaagaaagcgggagantccattaaggaaacagctacaaacattggtgcttctgccaaggctggcatggagaagaccaaggccactgtccaagagaaggcagaaagaatgacagcacgtgatccggtgcaaaaggagttggcaacccaaaagaaagaggcaaagatgaaccaggcggantggacaagca

SEQ ID NO: 284698 - DNA, 245 bp, Glycine max
gggagaaccatttaaaccatttgatcagctaatggggaccctacctgcttcaagttcaagtgcacttcctgaaaaatatagggatttgatgattgatccttcatcacctattcttcaattctaccctgctgattttgagattgatatgaatggaaaacgatttgcatggcagggtgttgccaagttgccattcattgatgagaagaaattgctttctgccacaagcaagcttgaagccacattaa

SEQ ID NO: 284699 - DNA, 261 bp, Glycine max
cgagtttcacagcgaagtcgtaggagggtttcaaaagatggagaacatgcagagcttctggcaattgggcgatgaactccgtggacactcaaaagcatcggaggatcacaaatggttaatggttgcttcgaaattggcggaacagacaagattgaagggggagcgtgtgaacaaccttgatctttcaaagggccccattgaaacaaggtcaagggataaatttgggttccaggaagagaacaaatttgattctcttaactt

SEQ ID NO: 284700 - DNA, 264 bp, Glycine max
  unsure (1)..(264): unsure at all n locations
gatctgaagaaggcttacaagaaagccgncatgcaagaatcaccctgacaagggcggtgatcccgagaagtttaaagagctggcacaagcatatgaggttctgagtgaccctgagaagcgtgagatatatgatncagtatggtgaagatgcgcttaaggaaggaatgggtggtggcggtggccatgatccgtttgatatcttttccatcctttctttgggaggtgggagtcccttgggatcagtgganttaanncgaggtagga

SEQ ID NO: 284701 - DNA, 142 bp, Glycine max
atcctattgtgttggccttcgggatcggagtaatgattaacagggacagtcgggggcattcgtatttcatagtcagaggtgaaattcttggatttatgaaagacgaacaactgcgaaagcatttgccaaggatgttttcatt

SEQ ID NO: 284702 - DNA, 260 bp, Glycine max
caacaacctttcaaaccctccaaccttagtttcaattcaaaacttgttcaccctttattctctgcctcttccaaacatcaaccatggcttcaataatgaccttgatgatatccaccttgctctttctttctttcactttgtcatgtgctattgacacctccaccatcaccaactacactgacaatgaggtcatgaccatgtacgaggagtggttggtgaagcaccaaaaggtgtacaatgggttgggagagaaggacaag

SEQ ID NO: 284703 - DNA, 259 bp, Glycine max
aattacactttctatctcatttccaatctcattttcgttcggttcaaacactctcatggcatcagacaagaagattaggatcggcatcaacggatttggaaggattggccgtttggtggccagggttgctcttcagaggaatgacgttgaacttgttgctgtcaacgatcctttcatcaccactgattacatgacatacatgttcaagtacgacaccgttcatgggcagtggaagcattttgatgtgaagctgaaggac

SEQ ID NO: 284704 - DNA, 258 bp, Glycine max
  unsure (1)..(258): unsure at all n locations
ataggatanggtgcaagtgctgtgtgtccgtacttngcattggagacttgtcggcagtggcgtttgagcaataaaaccgtaaatctgatgaggaatggaaagatgcctactgtatcaattgaacaggcacagaagaactattgcaaggctgtaaaancaggccttcttaaaattctttccaaaatgggcatctcgttgctatcaagttactgtggtgcacaaatatttgaagtctatggattagggaaggaagttgtt

SEQ ID NO: 284705 - DNA, 238 bp, Glycine max
  unsure (1)..(238): unsure at all n locations
gggcaacattaccgttcacaagttantgggtaggttggacanacagtgcgatttctgccacaggtgcaaagttggcatttaagtccaatgaagagatagcttttcaagtaaggactgttcctcttgatgaagtgattccgaaatcagagcgtgtgcttctgcttaaaatagatgttcagggctgggaatatcacgttcttaaaggagcatcaaagttgctctcaggaaaggaagccaa

SEQ ID NO: 284706 - DNA, 273 bp, Glycine max
  unsure (1)..(273): unsure at all n locations
caagagatggcttctcctcttcttactccttacaagatgggcnctcttcaatctgtcccatagagttgttttggcaccgctgaccagacagaggtcttacgacaacgtcccacaaccccatgccatcctctactactcccagagancttccaacggaggccttctcattactgaagccactggcgtctctgacacggctcaaggctatccgcaaacccctggcatatggactaaagaccatgttcaagcttggaaacccattgtcgatgccgt

SEQ ID NO: 284707 - DNA, 269 bp, Glycine max
  unsure (1)..(269): unsure at all n locations
cgttgccattctcatcctcttctttctctctctaccattgccatggatccctacaagcaccggccatccagcgcctncaattctcccttctggactacaaattctggtgctcctatttggaacaacaactcctctttaaccgttggagctagaggtccaattctgctggaggattatcatcttgtggagaagcncgcaaattttgatagggaacgtatcccagaacgtgttgtccatgccaggggcgctagtgcaaagggtttctttga

SEQ ID NO: 284708 - DNA, 268 bp, Glycine max
aaaccaacaacaactatggcaagttatcaaaagcactacgatgatcagggtcgcaaggttgacgagtatggcaacgttgagaagcaaaccgacgaatacggcaaccctgttcatgctgctagtgtcacctatgtagccaccagaactgctgctggtggttacagtgatgacattaataagcaacagcataccaccaatgcctacggcgtagacactggtagacagcattctagtggtggctacgatggtgacataataaacatcatgg

SEQ ID NO: 284709 - DNA, 273 bp, Glycine max
  unsure (1)..(273): unsure at all n locations
ggcgccactcgatgtttccatttgcctgcatgcctttggtattgtggggtgtggttcgtttagtggtgtcaagtccttgcgaacgtgagggtgcatgagtggtaatcgggatgtttttgttgcacggctccatgcttgcgcatgcaacgtgngacatgcatccttttcattgtcaccttagccttcgtggcttaggtgctgacgattggttcctgtgttgcctacctaccaaacggtattcgtgtggctagtcagacccattccatccaggcc

SEQ ID NO: 284710 - DNA, 220 bp, Glycine max
  unsure (1)..(220): unsure at all n locations
ggtttggagaanatagaatctctggcttcactctcttcactgctgtgggtggtnnctgatnccaaaccctnttggttttggcaccatggaaaacgaacacactttggcggttgctgacanaganatgtggctgaacagtgaccaatacgagttcctaggagtcnatgntnnttccntgttctacgccganntccctcntctccctgatttcccttgcatg

SEQ ID NO: 284711 - DNA, 267 bp, Glycine max
  unsure (1)..(267): unsure at all n locations
aatggccaaatcaatcaaattctttgagttgaacacaggggccaagattccttctcttgggttagggacttggcaagctgaacctggtgttgtagctgaagctctcaccacagccntgtcaggttggatacaggcatattgactgtgctagtgcgtataagaatcaagcagagattggttctgctcttaagaagcttttgatgatggtgtggtgaagcgtgagganttatggatcacttccaaactctggtgttcagatcatgcacc

SEQ ID NO: 284712 - DNA, 266 bp, Glycine max
  unsure (1)..(266): unsure at all n locations
tgggtaaggaaaaggttcacatcagtattgtggtcattggccatgtcgactctgggaaatccactaccactggtcacntgatttacaagcttggaggcattgacaagcgtgttattgagaggtttgagaaggaagctgctgagatgaacaagaggtctttcaagtatgcctgggtgctggacaaacttaaggctgagcgtgaaagaggaatcaccattgatattgctttgtggaagtttgaaacaacaaagtattgngcacagtta

SEQ ID NO: 284713 - DNA, 271 bp, Glycine max
cccgatgacgcggctgcagcgagggaagtgagagacaaatcagcctcaaagtcaccaggtatctacaattctgccactgctgacaacaaaaccggttccaaggtcggagagtacgcagattatggttctcagaaggcgaaagaaacaaaagatgcaacgaaggaaaaagctggagagtacacagattatgcttcgcagaaggcgaaggaaacgaaggacaagacaatggaaaaggctggagagtacactgattatgcttcgcagaaggcga

SEQ ID NO: 284714 - DNA, 274 bp, Glycine max
  unsure (1)..(274): unsure at all n locations
cacacacacacaaattctcanacccaaatcccnagtctcctaaaaccctaattcgcagtgnaaatgagagaaatcttgcacatccanggagggcnatgcggtaaccagatcggngcgaagttctgggaggtgatatgcgacgagcacggcatcgaccacaccggaaagtacancggcgactccgagctccaattgcncgcgcatcantgtttattacaatgaagccagcggcggaaggtacgttccacacnacataannnnncaaanngtnact

SEQ ID NO: 284715 - DNA, 275 bp, Glycine max
  unsure (1)..(275): unsure at all n locations
gatgacatcttgaacaagttncgaccctgtcgttgaaagggtcatcaagaagcgncgtgagatacgtgcagaaggagaaagaacggagaagttgttganggcgaggccagcggcgtcttcctcgacactttgcttgaattcgctgaggacgagaccatgganatcanaattaccaaggagcaaatcaagggccttgttgtcgactttttctctgcagggacagattccacagcggtggcaacggagtgggcattggcagagtcatcaacaatccc

SEQ ID NO: 284716 - DNA, 273 bp, Glycine max
  unsure (1)..(273): unsure at all n locations
atgggaatagcttgggtaggcctggtggtattgctgtgtttgattgtcacggccatcgccgaacaatgcggtcgtcaagctggcgggcagacatgtcccaacaacctatgctgcagccagtacggttggtgtggaaacaccgaagaatactgttccccttctaagaactgccagagcaannnnnnnnnnnnnnnnnnnnnnnnnnnnnnnnntggcggcggtgaaagtgcttctaatgtccgcgccacatatcattactatgagccagagcaa

SEQ ID NO: 284717 - DNA, 270 bp, Glycine max
  unsure (1)..(270): unsure at all n locations
agcattgcctgctgatcttataaaaagaggaatgggcaattgaggatccatcgtgccctcatggcattcgccttgtgatagaggactacccttatgctgttgatggacttgagatatgggatgctatcaagacatgggtccatgaatacgttttcttgtactacaaatcagatgacacacttagagaagatcctgaactccaagcctgctggaaagacncnnagaagtnggtcanngagacacgagaaatgngccncgtggcnangnanc

SEQ ID NO: 284718 - DNA, 266 bp, Glycine max
  unsure (1)..(266): unsure at all n locations
ggtagaacccttccacggtggtgactgcgcgatgggtgcctacaagtatgtttcagagctatggcgcaagaagcagtctgatgtcatgcgcttcttgcagcgggtgaggtgctcggagtataggcagcaaccttccattgttcgcttgacaaggtcgacccgccctgacaaggctcgtcgcttgggcttcaaggctaagcagggctatgtgatataccgtgttngtgttaggaggggtggccgaaagaggccagttcccaaaggta

SEQ ID NO: 284719 - DNA, 265 bp, Glycine max
gtcaaaatggcggcgagtagaagcactttacctctgatgaagtacttgagagtgcgcgtggacgctcttccccgcaacactcccttgaccctcgcttccaacttgttgattcgccgcttctccgaagaggttaggggttgttttctcgacaagtccgaggtcacagatcgcgtcatttcctgcgtcaaaaacttccagaaagtcgatccttctaaggttaaccctaatgctcacttccagaatgaccttggattggatagtttag

SEQ ID NO: 284720 - DNA, 272 bp, Glycine max
  unsure (1)..(272): unsure at all n locations
agcattgcctgctgatcttataaaaagaggaatggcaattgaggatccatcgtgccctcatggcattcgccttgtgatagaggactacccttatgctgttgatggacttgagatatgggatgctatcaagacatgggtccatgaatacgttttcttgtactacaaatcantcgacacacttagagaagatcctgaactccaagcctgctggaaagaactcgtagaggtgggtcatggagacaagaaaaatgagcnatggtggctaagatgcc

SEQ ID NO: 284721 - DNA, 271 bp, Glycine max
ggttgttgtctctgacagaattgttgattccccttgctgtttggtgactggtgaatatggatggagtgcaaacatggagaggatcatgaaggcacaggctctgagagacagcagcatgagtggctacatgtctagcaagaagacgatggagatcaaccctgacaatggtatcatggaggagttgaggaagagggctgaagctgataagaatgacaagtctgttaaggaccttgtgttgcttctctttgagactgcccttttgacttcaggt

SEQ ID NO: 284722 - DNA, 276 bp, Glycine max
  unsure (1)..(276): unsure at all n locations
atcacacacaactactacaantacttccttacaatcagaagccnnccaacaactatggcaagttatcaaaagcactacgatgatcagggtcgcaaggttgacgagtatggcaacgttgagaagcaaaccgacgaatacggcaaccctgttcatgctgctagtgtcacctatgtagccaccagaactgctgctggtggttacagtgatgacattaataagcaacatgataccaccaatgcctacggcgtagacactggtagacagcattctagtggt

SEQ ID NO: 284723 - DNA, 262 bp, Glycine max
  unsure (1)..(262): unsure at all n locations
gattgggaaaaaataatggaaggtgacaacatcataggactcaaaaatggcaagcaaagcatatcattagaacctggtggtcaatttgagcttagtggtatgcctttgaaaacattgcatcaaacttgtgatgagattaattcacatctctatcaggctaaaactgttgctgaggaaatgggaattggatttttgggatnnggtttncaccctangngganactggnananacacntggagcgcctngggtncgatataaca

SEQ ID NO: 284724 - DNA, 270 bp, Glycine max
cagcatgcctacattcagcaactgagggaaggtgtgcacaatttttttgtgacattcattgaggtgctacgcgatagaccacctggtcatgattgggagcttgaaccaggtgtcacatgtggtgactacctgtttggtatgctacagggaacaaggtcagccctgtatgccaataaccgtgaatccatcactgtcacagtgcaagaagtgacacccagatcagttggtgcccttgtagccctttatgaacgggccgttggaatatatgct

SEQ ID NO: 284725 - DNA, 262 bp, Glycine max
  unsure (1)..(262): unsure at all n locations
attcaaaccttgctctatactacacagtacanacactagaagaataatggcttccatcctccactactttttagcccnctctctttcttgctcttttcttttcttcttatccgactcagtcacccctacaaaaccaataaaccttgttgttctacccgttcaaaatgatggttccacagggctcnattngccnaacctcnaaaaangaaccctctantgnaantaccagtcctggtggacctnaatggaaatcattgtgggt

SEQ ID NO: 284726 - DNA, 266 bp, Glycine max
  unsure (1)..(266): unsure at all n locations
cttgctctatactacacagtacanacactagaagaatnntggcttccatcctccactactttntagcccnctctctttcttgctcttttcttttcttcttatccgactcagtcacccctacaaaaccaataaaccttgttgttctacccgttcaaaatgatggttccacagggctccattgtncaaaacctccaaaaaagaacccctctaatgcaagtaccagtcctggtggacctcaatggaaatcacttgtgggttaactgtga

SEQ ID NO: 284727 - DNA, 267 bp, Glycine max
  unsure (1)..(267): unsure at all n locations
ctttgntcactcttcttctcttggcggctanggttttagcgcanttnttctagatttaaggaagatggctaaggaaaaggttcacatcagtattgtggtcattggccatgtcgactctgggaaatccactaccactggtcacntgatttacaagcttggaggcattgacaagcgtgttattgagaggtttgagaaggaagctgctgagatgaacaagaggtctttcaagtatgcctgggtgctggacaaacttaaggctgagcgtga

SEQ ID NO: 284728 - DNA, 270 bp, Glycine max
  unsure (1)..(270): unsure at all n locations
agctagctagcaagcaagcacagagatggaggcaaagcgaggccatgccctcatgtgcttggcacgtgtttcactcttcctctgcgctctaaccctatccgctgctcacggaagcaccacggttcaagacatcgcgagaaagttgaaactcggggacaacgagcttctgcgcacggagaagaagttcaaggncttcatggagaattacgggaggagctactccacagaggaggagtatttgcgccgtttggggattttcgcccagaacat

SEQ ID NO: 284729 - DNA, 270 bp, Glycine max
gaagacaaaggattatgccactgacgcagcacagaagaccaaagattatgctactcagaagaccaaggactatgcaagtgatgcaactgatgctgcaaagaagactaaagattatgctgctcagaagactaaggactatgcaagtgaagctagtgatgttgcacagaacacaaaagattatgctgctcagaagaccaaggactatgccagcggtggtgcgcagaagaccaaggattatgccagcggtggtgcgcagaagaccaaggacta

SEQ ID NO: 284730 - DNA, 270 bp, Glycine max
tgttaggttacctctgtgacatttgtgctgctagttcatatatttgcggctgacaccgagaaggaaagcaggaaaaaaacaaaaaggagcagatgggtagctcaggtttctcatggaaattggcggatcatccaaagcttccaaagggtaagactgtggctgttgtggtattggatggttggggagaggccacacccaatgagtacaactgcatccacaaggctgaaacaccctgcatggattcacttaaaaagggtgctcctgaacggt

SEQ ID NO: 284731 - DNA, 273 bp, Glycine max
  unsure (1)..(273): unsure at all n locations
gtacttccttacaatcaaaaccancaacaactatggncagttatcaaaagcactacgatgatcagggtcgcaaggttgacgagtatggcaacgttgagaagcaaaccgacgaatacggcaaccctgttcatgctgctagtgtcacctatgtagccaccagaactgctgctggtggttacagtgatgacattaataagcaacatgataccaccaatgcctacggcgtagacactggtagacagcattctagtggtggctacgatggtgacacta

SEQ ID NO: 284732 - DNA, 260 bp, Glycine max
  unsure (1)..(260): unsure at all n locations
ctccggattatcctttcaagcctcctaaggttgcctttaggactaaggtgtttcacccgaacatcaatagcaatggtagcatttgtcttgatatcctgaaggagcagtggagccctgcactcaccatctctaaggtactgctttctatctgctcattgctgactgatccaaatcctgatgatccacttgttccggaaatcgnccacatgtacaaaactgaccgggccaagtatgaggccatgcangcagctggacccaga

SEQ ID NO: 284733 - DNA, 261 bp, Glycine max
  unsure (1)..(261): unsure at all n locations
ctnngttcactcttcttctcttgcggctanggtnntagcgcanttcttctagntttaaggaagatggctaaggaaaaggttcacatcagtattgtggtcattggccatgtcgactctgggaaatccactaccactggtcacntgatttacaagcttggaggcattgacaagcgtgttattgagaggtttganaagnncgctgctgagatgaacaagaggtctttcaagtatgcctgggtgctggacaaacttaaggctgag

SEQ ID NO: 284734 - DNA, 264 bp, Glycine max
  unsure (1)..(264): unsure at all n locations
caagaaagnacttccttataaccaaaaccanccaacaactatggctcnttatcagaagcactacgatgatcagggtcgcaancntcgaacgagtatggcantgttgagaggcaaactgacgaatatggcaacccggttcatgccactagtgtcacttatgtagccaccaaaagtgttggtggctacaatgatgacgctaataagcaacatgatattactggtgtctatcccgagaaagacaccggtagacatcattttggtcgt

SEQ ID NO: 284735 - DNA, 260 bp, Glycine max
  unsure (1)..(260): unsure at all n locations
ggggcagaagtaaccttgggcatggttaacatgattggcattaattttgaggacaaccatgtagcaaccgggcttggaaatcatcttgctaggccaattctccgtgacgagtggcatgaaaacttgacctttgaagagggcgtcaaattactggaaacctgcatgcgtgtgcttttataccgtgataggtctgctgtcaacaaaattcagatatcnaaaantaccgatgaagtgccatgttttcccacatctcgcngaaa

SEQ ID NO: 284736 - DNA, 131 bp, Glycine max
  unsure (1)..(131): unsure at all n locations
cacaaaagcaaagatcaaacaaaccaaggacgagaacacgatgttgcttgaacttgcacttggtttattggttttggctctgtttctgcacttgcgtcccactcnannatacnancngnaaagcacttccc

SEQ ID NO: 284737 - DNA, 262 bp, Glycine max
  unsure (1)..(262): unsure at all n locations
ctccattgtctttgnacactccatcaccatgggccaagcttgttctttccctttgtttccttcttttcagtggctgcttcgctctgagagagcaggcacagcaaaatgagtgccagatccaaaagctgaatgccctcaaaccggataaccgtatagagtcggaaggtgggttcattgagacctggaaccctaacaacaagccattccagtgtgccggtgttgccctctctcgctgcacccnnaaccgcaatgcccttcgtag

SEQ ID NO: 284738 - DNA, 257 bp, Glycine max
  unsure (1)..(257): unsure at all n locations
tggacataagaaagaagttcgacattgagtaggttcangttggattttaatagccatagtgacgtattgatcattcttggcctttcaactaaatagtatttgtgtagtaaattaaaggcacttggatgtaccaaacttcatgctttttgtaggagtgcgtaggttttaaaaattttctgatgtatctttcatgtgtttgttggttttgtaacagaatatttcctatattatacatatatttgagtcactagtaaaaa

SEQ ID NO: 284739 - DNA, 257 bp, Glycine max
  unsure (1)..(257): unsure at all n locations
tggcatctgtgatccaactaagaaaaatgcaaaggcggtgaacattgatgggtacgaggatgttccaccgtatgatgagaatgcctgaagaaagctgtcgctcgtcaacccgtaagcattgctattgaagcctctggcagagctttgcaactttatcnatcgggtgtatttactggtgaatgtgggacaagtttagaccatggtgtggttgttgttggatatggctctgaaaatggtgtggattactggctagtgag

SEQ ID NO: 284740 - DNA, 258 bp, Glycine max
gacaaatataggccaattcctaatgtctacaatcttgtgctggccatgctgtggcgtcaccctgagaacgttgagcttgacaaagttaaagtggttcactactgtgctgctgggtctaagccttggaggtacactgggaaggaggagaatatggagagagaagatatcaagatgttagtgaaaaagtggtgggatatatatgaggatgagactttggactacaacaatccactcaatgtggataagttcactgcggca

SEQ ID NO: 284741 - DNA, 189 bp, Glycine max
  unsure (1)..(189): unsure at all n locations
tgcggctgcctgtnttggtgatgctgggnantgaactcctggcatnagncngtgtcnnattaaangtgagagatgancagaataacccttnntacttgngangctcnaacagcttccanactctctttgagancnaaaacggtcgcattcgtctcctccagagattcaacaaacgctccccacaacttg

SEQ ID NO: 284742 - DNA, 258 bp, Glycine max
  unsure (1)..(258): unsure at all n locations
attattattattaaacatgaggccgattctgatgaaaggccacgagaggccactgacgttcctcaagtacaacagggnccggcgatctccttttctcctgcgccaaggaccacaaccccaccgtctggttcgccgacaacggcgaacgcctcggcacctaccgcggccacaacggcgccgtttggtgctgcgacgtctcaagagattcgggtcggctcataacgggaagtgcggatcagaccgccaagctatggaacg

SEQ ID NO: 284743 - DNA, 257 bp, Glycine max
  unsure (1)..(257): unsure at all n locations
ccttgctctatactacacagtacanacactagaagaataatggcttccatcctccactactttttagccnnctctctttcttgctcttttcttttcttcttatccgactcagtcacccctacaaaaccaataaaccttgttgttctacccgttcaaaatgatggttccacagggctccattgtcgcaacctccaaaaaagaacccctctaatgnaagtaccagtcctggtggacctcaatggaaatcacttgtgggt

SEQ ID NO: 284744 - DNA, 259 bp, Glycine max
  unsure (1)..(259): unsure at all n locations
ggggaagcagggcctcttgatcttaggggacaacattttcaacttctcccatttgggtctgggaggagaatgtgccctggagtcaatctggctacttcgggaatggcaacacttcttgcatctcttattcagtgcttcgacttgcaagtgctgggtccacaaggacagatattgaagggtggtgacgccaaangctagcatggaagagagagccggcctcactgttccaagggcacatagtcttgtctgtgttccactt

SEQ ID NO: 284745 - DNA, 287 bp, Glycine max
  unsure (1)..(287): unsure at all n locations
gatcttggatagtaattaacctcactcaaactcgggatcacagaaaccaacaacagttcttgcactgaggtttcacgatgttgctggaacttgcacttggtttgtttgtgttagctttgtttctgcacttgcgtcccacnccaagtgcaaagnnaaanngcacttcgccacctcccanancctccaagcccaaagcctcgtcttcccttcattggccaccttcacctcttaaaagataaactttcaanntatgcactcatngatctctccaaaaagcatggnccctt

SEQ ID NO: 284746 - DNA, 274 bp, Glycine max
  unsure (1)..(274): unsure at all n locations
gaagagtaaatcataaaatggatatggagaagagagaagagatgattaggaggactgtttatgtgtcagacattgannaactggttactgaagagcagtgngcggngctctttctnaactgtggccaggtcgttgattgccgtgtttgtggggatcctaattctattctgaggtttgccttcgttgagtttacagatgaagatggtgcaagggctgctttgaagctgtctggaaccatgcttggatattacccgttgagagtactaccttcgaa

SEQ ID NO: 284747 - DNA, 276 bp, Glycine max
cagtgggaaagacagatggtgaaaaatcagttcctgcacccaaagccgctgaagttcctcctgataatgagtttgagaagcgaataaggcccgaggtaatactagcaaatgagattgatgtcacattctctgatattggtgccttagatgagaccaaagaatcccttcaagaactagtaatgcttcctcttagaaggccagaccttttcactggaggccttctaaagccttgtagaggaatattgctgtttggacctcctggaactgggaagacaa

SEQ ID NO: 284748 - DNA, 271 bp, Glycine max
  unsure (1)..(271): unsure at all n locations
aaactcaatattctcaacaacacactactntccttcttccaataatgtcttcttcnntctctgttcgttttcttgctcctccatcatcatgcttccccagctctcggcccangacatggctctgcgccgccaccaccccaacggtggctccggcaactgcctcctggaggaggaggcttaaggtngagcctagagtggaggagagagaanggctcanggctttnaaggaagagnncaggggaggcatcagccctcaggaaaaagtgaagct

SEQ ID NO: 284749 - DNA, 205 bp, Glycine max
  unsure (1)..(205): unsure at all n locations
ctttgaataaatttgctgcatatgtacttacgtacgtacagtgncttgtcatgtatgtggaggatatagtatatggttatagtttatgtagaagaataaaaaatgtatgcntgtagtaatgtaagggtcttatatatgtggctgaaatataaaccataagnaaggcagagacnctgnnccaanncancagncnntnagagntnct

SEQ ID NO: 284750 - DNA, 273 bp, Glycine max
  unsure (1)..(273): unsure at all n locations
aaatattcaaacctngcnctatactacacagtacacacactagaagantaatgggttccatcctccactactttttagncctctctcatnctngctcttttcttncttcnnatccgactcagtcacccctacaaaaccaannaaccntgangntctacccgcacaaaagtacggaaccacagggcaccagngggcttaaccncnaaaaaagaaccccnctanagnaagnancagacntggcggcaccnnaaangaaaanacctntggggtnac

SEQ ID NO: 284751 - DNA, 273 bp, Glycine max
  unsure (1)..(273): unsure at all n locations
cacacacacacaaattctcaaacccaaatcccaagtctcctaaaaccctaattcgcagtgaaaatgagagaaatcttgcacatccagggagggcnatgcggtanccagaccggngcgaagatcnnggaggngagangcgangagnacggcatcgaccacaccggaaagtacagcggcgacnccgagcaccaannggagcgcaacaatgnnnattacaaggaagccagcggcgnnaagggagtcccagcgccgacacngctttnnggannccaa

SEQ ID NO: 284752 - DNA, 276 bp, Glycine max
  unsure (1)..(276): unsure at all n locations
aaagaacnnccttatnnaccancaaccancgaacaacnanaaannaaaaatcagaagcactanngatgatcagggtcgcaangtcgacgagnatggcaatgttgagaggcaaactgacgaatatggcaacccggntcatggccactagtgtcacttatgtagccaccaaaagtgttggtggctacaatgatgacgctaataagcaacatgatattactggtgtctatcccgagaaagacaccggtagacatcattttggtcgtggttagaggtgac

SEQ ID NO: 284753 - DNA, 139 bp, Glycine max
  unsure (1)..(139): unsure at all n locations
tgcagaccnagctagctagctagcaagcaagcacagagatggangcaaagcgaggccatgccctcatgtgcttggcacgtgtttcactcttcctctgcgctctaacccnatccgctgctcacggaagcaccacggntta

SEQ ID NO: 284754 - DNA, 268 bp, Glycine max
  unsure (1)..(268): unsure at all n locations
aacatgncggcacggaactacagcattcctgaagttgacaagctgaaggccaagtttnctgccggacggatcattccagcaattgcaacatcaactgccatggccacagggcttgnctgcctngagcagnacaaagcattgganggagggcacaaagnttaggacnancgaaacacanttncaacatancacagtcactctntttccantgcagagccagttncaccaaaggnnattagttatcaagatatgagttggacagtttgga

SEQ ID NO: 284755 - DNA, 201 bp, Glycine max
  unsure (1)..(201): unsure at all n locations
tttgaataaatttgctgcatatgtacttacgtacgtacagtgncttgtcatgtatgtggaggnnctagtatatggttatagtttatgtagaagaataaaaaatgtatgcatgtngtaatganagggtcatagacagggggcngaaaataaaccanannanaggcagagangtgtcccaanacaccntatgtggagagagtt

SEQ ID NO: 284756 - DNA, 276 bp, Glycine max
  unsure (1)..(276): unsure at all n locations
caaaacanagcaagagagagagtgtgtgaaaagtgaaacaaaaaacagaacaacaatggcgacacttaaggttcctcagcctcttccccccgttgcagatgattgtgagcagctccgaaaagccttctcaggttggggaactaacgaggagctgattgtatcgatcttggctcataggaatgctgctcagaggaagcttatcagagaaacttatgcccagacctatggagaagatctcctcaaggccttggacaaagaactcacgagtgattttga

SEQ ID NO: 284757 - DNA, 126 bp, Glycine max
  unsure (1)..(126): unsure at all n locations
gggcgccannccgatgtttccatttgcctgcatgcctttggtattgtggggtgtggttcgtttagtggtgtcaagtcttgcgaacgtnagggtgcatgagtggtaatcgggatgtttttgtntcac

SEQ ID NO: 284758 - DNA, 272 bp, Glycine max
  unsure (1)..(272): unsure at all n locations
tcaaattngttcattctctttgcgcagttccctacctctcctttcangatgcagncnttcgtcaagaccctacaccggaaagaccatcacccttgaggtggaaagctctgacaccatcgacaacgtcaaggccaagatccaggacaaggaaggaattcccccggatcagcaacgtctcatcttcgccggaaagcagctcgaggacggccgtaccctcgccgactacaacatccagaaggagtcaacccttcaccttgtccttcgtctccgtg

SEQ ID NO: 284759 - DNA, 263 bp, Glycine max
  unsure (1)..(263): unsure at all n locations
tattgatgaggttgatgcaatagccactgctagatttgatgcccaaactggagctgatagagaagtacagcgtatccttatggaacttttgaatcagatggatggttttgaccaaacggtaaatgttaaagttataatggcaactaacagagcagacaccttggaccctgctctgttgcgtcctggaaggcttgatcgtaaaattgagttccctttgcctgatagacgccaaaagaggctcgtattcangtttgcacagccaa

SEQ ID NO: 284760 - DNA, 153 bp, Glycine max
  unsure (1)..(153): unsure at all n locations
tcacacacaactactacaantacttccttacaatcaaaaccancaacaactatggcaagttatcaaaagcactacgatgatcagggtcgcaaggttgacgagtatggcaacgttgagaagcaaaccgacgaanncggcaacccanntnannca

SEQ ID NO: 284761 - DNA, 263 bp, Glycine max
  unsure (1)..(263): unsure at all n locations
gtttctcttcctccctggaaganaaagangagtcaccgctacgacnccgttcgtgcttttttgaggtgccacagtcatgtttgggcgtggtggaccaaggaggagtgacaactccaaatattatgatactcacgggggttccaaaaacnccagnnnagaagaaagnaagaaggcctatagaaaggcagcaatgtaagaaccatccaganaagggaggagacccagaaaagctcaaggagttnggcnaagcatnnnaagctttt

SEQ ID NO: 284762 - DNA, 203 bp, Glycine max
  unsure (1)..(203): unsure at all n locations
gaaaacctaagcttagaattagaaacaaagaaaagaagaaaggaaagaattgntcgttgaaaatgcagggaggaaagaaagcgggagagtccattaaggaaacagctacaaacattggtgcttctgccaaggntgcanngagaagaccaaggccacagtccaagagaaggcagaaagaangtcagcacgagnaacnggngnaa

SEQ ID NO: 284763 - DNA, 264 bp, Glycine max
  unsure (1)..(264): unsure at all n locations
gtgaganacaaagaaaggnaataattgatctttgaaaatgcagggaggaaaganagctggagagtccatcaaggaaacagctgcaaacattggtgcttctgccaaggctngcantgagaaaaccaaggccacagtccaggagaaggcagaaagaangncggcacgngatccnacgcnaaaggagncggnaacccagaagaaagaggcaaagangagncaggcagagcngganaagcaggcggcgcgacacagaanacggcggcg

SEQ ID NO: 284764 - DNA, 271 bp, Glycine max
cacacacaactactacaagtacttccttacaatcaaaaccaacaacaactatggcaagttatcaaaagcactacgatgatcagggtcgcaaggttgacgagtatggcaacgttgagaagcaaaccgacgaatacggcaaccctgttcatgctgctagtgtcacctatgtagccaccagaactgctgctggtggttacagtgatgacattaataagcaacatgataccaccaatgcctacggcgtagacactggtagacagcattctagtgg

SEQ ID NO: 284765 - DNA, 263 bp, Glycine max
  unsure (1)..(263): unsure at all n locations
cgatagtgataagagagataccaacaagaaaagaaaaaaagaagagtncagattccctttgaagaaaagatggcatcccataggcaaagctatgaagctggtcaaactaagggccgaactgaggaaaagacgaaccagacgatgggcaatattggagagaaggctcaagctgcaaaggagaagacccaggaaatggcccaagctgcaaaggagaagacccaacaaacagcccaagctgccaaggacaagacttgcgacacttc

SEQ ID NO: 284766 - DNA, 244 bp, Glycine max
  unsure (1)..(244): unsure at all n locations
gaacttccttataaccaaaaccaacaacaactatggcaagttatcagaagcactacgatgatcagggtcgcaaggtcgacgagtatggcaatgttgagaggcaaactgacgaatatggcaacccggttcatgccactagntgtcacttatgnntgccaccaaaagnnntngangccacaannannacgcgnannagcaacannannntncnngcnncnancccgagaaagacaccggnngacaa

SEQ ID NO: 284767 - DNA, 141 bp, Glycine max
  unsure (1)..(141): unsure at all n locations
cacaactactacaagtacttccttacaatcaaaaccanccaacaactatggcaagttatcaaaagcactacgatgatcagggtcgcaaggttgacgagtatggcaacgttgagaagcaaaccgacgaatacggcaacccnt

SEQ ID NO: 284768 - DNA, 195 bp, Glycine max
  unsure (1)..(195): unsure at all n locations
aacggcaacgtcaaactcgactgccccgccattggcaaacagttcgctgccgaggaaatttctgcccaggttctgaggaagcttgttgatgatgcttccaagtttttgaacgataaggttaccaaggccgatnntncggagcccncatncctnaaagacncccaaaggaccgncaccaaggagccggtcngannt

SEQ ID NO: 284769 - DNA, 269 bp, Glycine max
cccgatgacgcggctgcagcgagggaagtgagagacaaatcagcctcaaagtcaccaggtatctacaattctgccactgctgacaacaaaaccggttccaaggtcggagagtacgcagattatggttctcagaaggcgaaagaaacaaaagatgcaacgaaggaaaaagctggagagtacacagattatgcttcgcagaagggcgaaggaaacgaaggacaagacaatggaaaaggctggagagtacactgattatgcttcgcagaagg

SEQ ID NO: 284770 - DNA, 252 bp, Glycine max
  unsure (1)..(252): unsure at all n locations
ccgctgttcctacaatcattccaaatggtgcccttccggtcgcaccctcctcccttcctccgtctcccgatttccgaccggcattcgacnncctcgatgccgaccgcgacggcaaaatcagccgcgacgacctccgcgccttctacgccggagtcggcggcggaggagatgacgtgatcggggcaatgatgacantggctgacaccaataaggacgggttcgtggagtacgaggagttcgagcgcgtggtct

SEQ ID NO: 284771 - DNA, 262 bp, Glycine max
  unsure (1)..(262): unsure at all n locations
aaaggctcctggngaaacttgtcatattgtgattgatcatggtggaaatgttccctactgggaaggacagagttatggtgttattccaccgggtgaaaatccaaagaaacctggggctcctcataatgttcgactatattcaattgcttntacaaggtatggagacttttttgatggaaaaactgccagcttgtgtgtgcntcgtgcngttgaattaggatcctgaaacnggannggaggtnccttccaannatgggcnttt

SEQ ID NO: 284772 - DNA, 259 bp, Glycine max
  unsure (1)..(259): unsure at all n locations
ggagttaacacatacacactgatcaacaaggctgggaaanggntgtatgtgaaatttcactggaagaccactagtggtataaagtgnctattggaggaagaggccattaaggtgggaggagccaaccacagccatgccactcaagaccttcatgattcaattgctgctggtaactatcctgagtggaaactgttncgttcagacaatagatcctgagcatgaagacaaatttgactttgaccctcttgatgttactaag

SEQ ID NO: 284773 - DNA, 260 bp, Glycine max
  unsure (1)..(260): unsure at all n locations
cnggttncntctgtgcatcgtntagggattttggacattaggattcttaacaccgataggcatgctgggaacttgttggttagnaaacttgatggcattgggagttttggtcaggtggagttgattcccattgatcatgggctctgcctgcctgaaactttggaggatccatattttgaatggattcattggccacaggcttccattccgttctcagaggatgancttgcctacatgggngatcttgaccctnatcggga

SEQ ID NO: 284774 - DNA, 262 bp, Glycine max
catttcaggaagaaagaagtgcaatggacatcggaacctatggctatcctacaccagcagtgaaaaagattgagtcttactatgatgtgccagagggagtggatattcggggaagatatgatgcagagtttgcaaaaatcctcacaaaagatgctttgaaattcgttgctgacttgcaacgtgagttcaggaaccatatcaagtatgcattagagtgcagaagagaagcaaagaagaagtacaatgaaggggctcttccaga

SEQ ID NO: 284775 - DNA, 261 bp, Glycine max
cgcacactgaagcaggatataggaaggaacatcgtcagcatgaccaatctcatggtgatcagaacgagaagaaagggattatggacaagattaaggagaagcttcctggaggacacagtgacaagtagatgcatcgtgcatcatgcatgcatgcatatatataatattgttgtctttgaataaatttgctgcatatgtacttacgtacgtacagtgtcttgtcatgtatgtggaggatatagtatatggttatagtttatg

SEQ ID NO: 284776 - DNA, 267 bp, Glycine max
  unsure (1)..(267): unsure at all n locations
gggaggaggcatccgtcaacctcaacgccattaaccaggtcaatgggaagaagccatggtcactctctttctcctttggaagggcacttcaacagagcacccttaaggcatggggcggaaaagaagagaatgtgaagaaggctcaggaagcccttttggtaagagccaaggctaactcagaggcaactctgggaacctacaagggtaactcacagcttgctgatggtgcctcagagagcctncatgtttcgaactacagctactgat

SEQ ID NO: 284777 - DNA, 256 bp, Glycine max
  unsure (1)..(256): unsure at all n locations
tacttccttacaatcaaaaccaacaacaactatggcaagttatcaaaagcactacgatgatcagggtcgcaaggttgacgagtatggcaacgttgagaagcaaaccgacgaatacggcaaccctgttcatgctgctagtgtcacctatgtagccaccagaactgctgctggtggttacagtgatgacattaataagcaacntgataccaccaatgcctacggcgtagacactggtagacagcattctagtggnggg

SEQ ID NO: 284778 - DNA, 266 bp, Glycine max
  unsure (1)..(266): unsure at all n locations
ccgagctagctagctagcaagcaagcacagagatggaggcaaagcgaggccatnccctcatgtgcttggcacgtgtttcactcttnctctgcgctctaaccctatccgctgctcacggaagcaccacggttcaagacatcgcgagaaagttgaaactcggggacaacgagcttctgcgcacggagaagaagttcaaggttttcatggagaattacgggaggagctactccacagaggaggagtatttgcgccgtttgggattttcg

SEQ ID NO: 284779 - DNA, 250 bp, Glycine max
  unsure (1)..(250): unsure at all n locations
ttgaaaaccccaaggttacagatccacatgttaaaactaatgctttgcttcaggcccatttctctagacaattcgtaggtgggaaccttgcattggaccagaaggaggtgcttctttctgcaaatagactgcttcaggcaatggtagatgtgatatccagcaatggttggctgngcctggcccttcttgctatggaagttagtcaaatggtgacacagggatgtgggaacgtgactccangctgctcaac

SEQ ID NO: 284780 - DNA, 254 bp, Glycine max
  unsure (1)..(254): unsure at all n locations
ctcacaaacacacactgaactaaaaaacatcaaaagagacatggctgagcaaaccttcatgcatgatcaagcctgatggcgtccaaagaggccttattggcaacntcattagcagatttgagaagaaaggtttctacttgaaaggtttgaaacttgttactgtggaccgtccttttgctgagaagcactatgctgatttgtctgccaagcctttctttagtggtttggtggattacattatctctggccctgtt

SEQ ID NO: 284781 - DNA, 258 bp, Glycine max
  unsure (1)..(258): unsure at all n locations
gaaggttgntgtctctgacagaattgttgactctcctttcttggagagactcaagaagaagggctatgaagttctcttcatggtggatgcaattgatgagtatgcagttgggcaactcaaggaatacgatggcaanaaattggtttcagccacaaaggaagggttgaagctggatnatgagactgaggaggagaaaaagaagaaagaggataagaagaagtcatttgatgagctctgcaaggtcatcaaggaaattct

SEQ ID NO: 284782 - DNA, 264 bp, Glycine max
  unsure (1)..(264): unsure at all n locations
accaaaatgaccaagcttacaattctcctcatcgctcttctaattcatcgcccacacctgctgcgcctnccaaatggcaacagcaccagcaagagagctgccgcgagcagctcaaggggatcaacctcaacccctgtgagcacatcatggagaaganncaagcngccgccgcggcgaggacggcagcgacgaagagcacantcncancaggaccatnccgggaagaatcaactacatcaggaagaaggaaggaaaagaagaaga

SEQ ID NO: 284783 - DNA, 262 bp, Glycine max
  unsure (1)..(262): unsure at all n locations
caggctttgaccgaacctgactatggaagtgatgctagtgctttgaagaccactgccacaaangtggagggaggttggatcctggagggtcaaaagcggtggataggaaacagtacatttgctgatgttttggttgtctttgctaggaatgcatcaactaatcagataaatggatttattattaaaaaggatgctcctggtttaacagtcacaaaaatagagaataaaattgactcaggattgtacaaaatggagacattgt

SEQ ID NO: 284784 - DNA, 175 bp, Glycine max
  unsure (1)..(175): unsure at all n locations
caaaccttgctctatactacacagtacanacacnagaagaatnntggcttccatcctccactactttntagnccacctctctttcttgcncttttcttttctncttatccgantcagtcacccctacaaaaccaatancaccttgttgttctacccgttcaaaatgatggttnca

SEQ ID NO: 284785 - DNA, 258 bp, Glycine max
  unsure (1)..(258): unsure at all n locations
ctttgtttcccaatttccattgcctccgcttccacctcgcaaccatganccatcccggagaagaaccgcaaggagatctgcaaatacctcttccaagagggagtttgcttcgcgaagaaggacttcaatttggccaagcaccctgagatcgacgtgccgaatctgcaggtgattaagctgatgcagagtttcaagtctcgcgagtacgtgaganaaacttttgcttggatgcactattactggttcctcaccacgatg

SEQ ID NO: 284786 - DNA, 251 bp, Glycine max
  unsure (1)..(251): unsure at all n locations
ccnttccgntcatttcctctgtnttttcttcaaanccnattgtttcgtggaaanccccgaaatttaaccatgcttcnccgaaccgccgcctccgccgctnctgcttcgtccctctccctcttcagccctanctccgaacctntccgttcggttcccgctcgtggattggtggttcgcgccgcgaaaggatccangaacnaccgcgcctaaccggngtgatctttgaaccgttcgaaaggtgaagaagganc

SEQ ID NO: 284787 - DNA, 162 bp, Glycine max
  unsure (1)..(162): unsure at all n locations
caaaccttgctctatactacacagtacanncactagangaatnntggnttccatcctccactactttntagcccgntctctttcttgcncttntgnttgctncttatccgactcagtcacccctacaaaaccaatanaccttgttgttctacccgttcaaaa

SEQ ID NO: 284788 - DNA, 233 bp, Glycine max
  unsure (1)..(233): unsure at all n locations
ttcgtttgttgttcaatctaacaaacttctctatatcgtttactttttcnacacaacntacgnttnacttannatnncttcatanaaanatnatggcttcgagggtgnttcggtnnngagatnntatgatgttnttgcnatgaactgtanngcactagtgtggccacatgccttcaaccanagaggaaggtcacgatttcaggaggctaagcaagacaacacaaactggaaca

SEQ ID NO: 284789 - DNA, 181 bp, Glycine max
  unsure (1)..(181): unsure at all n locations
attcaaaccttgctctatactacacagtacanacactagaagaataatggcttccatcctccactactttttagcccnctctctttcttgctcttttcttttctncttatccgactcagtcacccctacaaaaccaataaaccttgttgttctacccgttcaaaatgatggttccacaggg

SEQ ID NO: 284790 - DNA, 253 bp, Glycine max
ctatacttgttccttttgaaggttagaagtgctacaatacaaacaatggcagctactcaggaagatgtgaagcttttgggtattgtgggaagcccatttgtgtgcagggtccagattgcccttaagttgaagggagttgaatacaaatttttggaagaaaatttgggcaacaagagtgatttgcttctcaaatacaaccctgttcacaagaaggttccagtgtttgttcacaatgagcagcccatagcagagt

SEQ ID NO: 284791 - DNA, 253 bp, Glycine max
  unsure (1)..(253): unsure at all n locations
gagaggncgaggataagtgggagctgganacagcgaaagtgaaataccactacttttaacgttattttacttattccgtgaatcggaagcngggcactgcccctctttttggacccaaggtcggcttcggccggtcgatccgggcggaagacattgtcaggtggggagtttggctggggcggcacatctgttaaaagataacgcaggtgtcctaagatgagcncaacgagaacagaaatctcgtgtggaacaa

SEQ ID NO: 284792 - DNA, 262 bp, Glycine max
  unsure (1)..(262): unsure at all n locations
gctggatgtgttgccaaagtcaaccctgctgccccacttgacaaaatctgtgttctcagttntggaatttgcacaggtcttggggccactatcaatgttgcaaaaccaaaacctggttcttctgttgccattttggacttggagctgttggccttgccgctgctgaaggggcaaggatttctggtgcatcaagaatcattggggttgatttagtttctagcagatttgaagaagctaagaagtttggggtcaatgaatttgt

SEQ ID NO: 284793 - DNA, 255 bp, Glycine max
  unsure (1)..(255): unsure at all n locations
caacaatggtggatacaccatcgaggttgaaattcatgatgggccgtacaatgtgattaagaactggaattacactgggttgattgatgcaatccacaatggtgaagggaaatgctggactgccaaggtgttctgtgaagaggagctagttgaagcaattgccacagccacaggacccaagaaagactccttatgctncattgaggtgattgttcataaggatgacaccagtaaagaattgcttgaatggggctc

SEQ ID NO: 284794 - DNA, 161 bp, Glycine max
  unsure (1)..(161): unsure at all n locations
cntgctctatactacacagtacagacacgagaagaatnntggcttccatcctccactactnnntagncctnctcnnctntctngcnctttncngttctncttatccgantcagtcacccctacaaaaccatanaccttgttgttctacccgtncaaaatga

SEQ ID NO: 284795 - DNA, 266 bp, Glycine max
cagtaggcatttgacttaatttcagcttcatgtctcataagaaggacatatcatgtatcaaggatctaacatttctatatgaagttgccactattgaggatatataccgtgcatatgaacagttgaaagtggtgagaattctttatattcatgcattggaattgctggtgctcaggctgcacaagaaatagcagctccgttagaagaggaagtagcagatgatgtttatccaggtgttattccggtgggacgaggtttatctacaa

SEQ ID NO: 284796 - DNA, 264 bp, Glycine max
gtattctgtggaaatgtctgctgtagtttacaaggattgggtttgtacagatcaagcattgcctgctgatcttataaaaagaggaatggcaattgaggatccatcgtgccctcatggcattcgccttgtgatagaggactacccttatgctgttgatggacttgagatatgggatgctatcaagacatgggtccatgaatacgttttcttgtactacaaatcagatgacacacttagagaagatcctgaactccaagcctgctg

SEQ ID NO: 284797 - DNA, 261 bp, Glycine max
  unsure (1)..(261): unsure at all n locations
aaaggaaataattgatctttgaaaatgcagggaggaaagnaagctggagagtccatcaaggaaacagctgcaaacattggtgcttctgccaaggctggcatggagaaaaccaaggccactgtccaggagaggcagaaagaatgacggcacgtgatccgatgcaaaaggagttggcaacccagaagaaagaggcaaagatgagccaggcagagctggacaagcaggcggcgcgtcacataacacggcggcgaanaggctgcc

SEQ ID NO: 284798 - DNA, 263 bp, Glycine max
ggaagcgggtcgtccgggaaggtttacaaggttgtgcttaccagcggggaatctgttgccgtgaagaagatatggggcggggtcaaaaaggaaatagatagcggagatgttgagaagggtcatcagtttcgtcaagacagttcttttgatgcagaggttgaaactttgggcaaaattaggcacaagaacattgtcaagttgtggtgttgctgcaccactagggacagcaagctattggtttatgagtatatgccgaatggtag

SEQ ID NO: 284799 - DNA, 256 bp, Glycine max
  unsure (1)..(256): unsure at all n locations
gtgctattcagataaggaggtcctcataccatgatntgattagggtgaatgagattcagaaggtgttggacatcacaggggtcccaaacctacattatcaacagcgcgagggttgttttcttgatgagaggccgcagccnaggcctggtaaaggtgtcaccaacacttgtgaagtctgcgagcgtanccttcttgattcctaccgattctgttctctaggttgtaagatngttgggacttcaaggaacttcctgaa

SEQ ID NO: 284800 - DNA, 257 bp, Glycine max
  unsure (1)..(257): unsure at all n locations
cacacacaactactacaagtacttccttacaatcaaaaccanccaacaactanggcaagttatcaaaagcactacgattctcagggtcgcaaggttgacgagtatggcaacgttgagaagcaaaccgacgaatacggcaaccctgttcatgctactagtgtcacctatgtagccaccagaactgctgctggtggttacagtgatgacattaataagcaacatgataccaccaatgcctacggcgtagacactggtag

SEQ ID NO: 284801 - DNA, 263 bp, Glycine max
  unsure (1)..(263): unsure at all n locations
aacanagtnaggnaataattgatctttgaaaatgcangganganaganagctggagagtccatcaaggaaacagctgcaaacattggtgcttctgccaaggctggcatggagaaaacnaaggccactgtccaggagaaggcagaaagaatgacggcacgtgatccgatgcaaaaggagttggcaacccagaaganagaggcaaagatgagccaggcagagctggacaagcaggcggcgcgtcagcataacacggcggcgaant

SEQ ID NO: 284802 - DNA, 253 bp, Glycine max
  unsure (1)..(253): unsure at all n locations
ctcggctcttgcatcgatgaagaacgtagcgaaatgcgatacttggtgtgaattgcagaatcccgtgaaccatcgagtctttgaacgcaagtngcgcccgaagccattaggccgagggcagcctgcctgggtgttcatcatgaggctaactttganactaaaggtgaaaaaaagaaggatttagtgggaagagagcggaacaaagaggagaaacaaagaagcagtccaagaggaaaagtagaggcagagaaag

SEQ ID NO: 284803 - DNA, 259 bp, Glycine max
  unsure (1)..(259): unsure at all n locations
aagctttgntacctttctttgacagtgcnnatcagggntntgctagnggaagtctagattgcngatggcccaacctgttcgtttgtntgttgntgatgnaggcgaattgctggtagcacaaagctatgcnaagaatctgggtcttnatggggaacgtgttggcgccttaagcanngtctgcaagtcanctgatgttgcaagcagggttgagagccagctgaagctagtgataggcccatgtactcaagtcctcccattt

SEQ ID NO: 284804 - DNA, 252 bp, Glycine max
gtattctgtggaaatgtctgctgtagtttacaaggattgggtttttacagatcaagcattgcctgctgatcttataaaaagaggaatggcaattgaggatccatcgtgccctcatggcatcgccttgtgatagaggactacccttatgctgttgatggacttgagatatgggatgctatcaagacatgggtccatgaatacgttttcttgtactacaaatcagatgacacacttagagaagatcctgaactc

SEQ ID NO: 284805 - DNA, 156 bp, Glycine max
  unsure (1)..(156): unsure at all n locations
gagtgcggtttcctttgttggtgttgctgggaactgttttcctggcatcagtttgtgtctcattaaaggtgagagaggatgagaataaccctttctacttgagaagctctaacagcttccaaactctctttgagancccaaaacggtcgcattcgt

SEQ ID NO: 284806 - DNA, 286 bp, Glycine max
  unsure (1)..(286): unsure at all n locations
ctaaacaactactttctcttcttccttcgctcgttgttctccctcgcgtagatcgacaatggcggagacagagacgtttgctttccaggctgagatcaaccngctcctcagtctcatcatcaacaccttctactccaacaaggagggantccntcgtgaactcatcagcaacgcctccgatgctttggacaagattcgatttgagagtttgacagataagagcaagctcgatgctcagcnagagttgttcattcatattattccacacaacatacganaacccncg

SEQ ID NO: 284807 - DNA, 278 bp, Glycine max
  unsure (1)..(278): unsure at all n locations
cttttccatctttctagatatcngagaactttggagctcgcttaggtttaanaaaacaccacgcaaacggcaagatggccacttccgacagaaacatgttannaaattatgttccagtttatgtgatgctncccactcggagttgtcactgttgacaatgtttttgaagacccagatggccttaaagaacagctcttgcagcttcgagccgcaggtgttgatggggttatggttgatgtgtggtgggggatcatagaactgaaggggcctaagcagta

SEQ ID NO: 284808 - DNA, 284 bp, Glycine max
  unsure (1)..(284): unsure at all n locations
atgagcagnaggaccaagtagcagtggagcagattttgcgagttgtttttctagatccagagcgtccttgtcctgctttggaaaaactgaaccgacagctggctgatgctgatgctgcccttgaggcacgtaaganacctgcggaagatgcaggtcctaaaattatncggggaagggctcgtcatagacgattggaaaganaggagggaaagntacctcgcaaagcagcagggtgaanttggttgnnnattctgtatgggncttggtcctggaatncctntagt

SEQ ID NO: 284809 - DNA, 277 bp, Glycine max
  unsure (1)..(277): unsure at all n locations
gatgataagatgcttcagaccaggatattctcttatgctgattcacaaaggcacagacttggaccaaactatctgcaacttcctgctaatgctcccaagtgtgctcaccacaataatcatcatgaaggtntcatgaatttcattcacagggatgaggaggtcaattacttcccttcaaggtatgatcctgttcgtcatgcngaaaggttccccatacctcctgctatctgcagtggaaggcgtgaaaagtgtggaattgagaaggagaacaacttct

SEQ ID NO: 284810 - DNA, 276 bp, Glycine max
  unsure (1)..(276): unsure at all n locations
cgctcttcgatcttcgtccggggactgctccgaataccaccaccaccactcgccgatngncacgatcggaggcttacacgactacccaaggctctcaaaacagcgtcgaaaccgaagccctcgctcgattcgccgtagacgaacacaacaagaagcagaattcgcttctggagtttgctagggtggttagggcacaggaacaggttgttgctggtaccctgcatcaccttactcttgaggctattgaggctggtgagaagaagctctatgaagcca

SEQ ID NO: 284811 - DNA, 192 bp, Glycine max
  unsure (1)..(192): unsure at all n locations
gtgcggtttcctttgttggtgttgctgggaactgttttcctggcatcagtttgtgtctcatnaaaggtgagagaggatgagaataaccctttctacttgagaagctctaacagcttccaaactctctttgagaaccaaaacggtcgcattcgtctcctccagagattcaacaaacgctccacacaacataga

SEQ ID NO: 284812 - DNA, 294 bp, Glycine max
  unsure (1)..(294): unsure at all n locations
tgcaagtntgatccagagaaaatagcagtncaagatcacaaatttcaccnatatcccngcgggatgagaaccaaattgccgcatatttagtaaaanatggtccacttgcnatgggcgtgaatgcaantttgcatgcaaacatacatnngtggtgtctcatggncctcctcatatgtngcaaagaaaaggctgaaaccnatggngtgttaacttgtgggatatggtggcaaaagggctnctcaaatcttaggctngggcaaacanacccatactgggatcatccaagatntgggg

SEQ ID NO: 284813 - DNA, 283 bp, Glycine max
  unsure (1)..(283): unsure at all n locations
gcatagaaaaaacccttttctggagaaagaatatagtcttcagctggacaaggatcattcatcttgaaagangagtttgtgtgtgacaatctttatagttctanngagggtgcaagagagaactgaatttgctgtgatggcaactcgtagatatgcttttggaagagctgatgaggccactcatccagactccatgagggccactttggctgaatttgtttctactttcatctttgtctttgctggagaaggctctggccttgctttggttaaaattaccagg

SEQ ID NO: 284814 - DNA, 276 bp, Glycine max
  unsure (1)..(276): unsure at all n locations
atctgtggcaccatttgggttatgcttcaantccaanaatatcaatgcatcatcctagcgtggaccttgtgatggacaagcccaatggtcctgtttggagaatctctggtgaggacttgatggtngcaggcacaacctggggtcacgtgtttggntgttatgaatggaggaatgcaacctaganctgaaattaancnaaggggtcacntcattgggaaganaacctggtggtnttcgatntggnaaggtctngggtggggtnagcccntnancngt

SEQ ID NO: 284815 - DNA, 276 bp, Glycine max
  unsure (1)..(276): unsure at all n locations
ctacaagtacttccttacaatcaaaaccanccaacaactanggcaagttatcaaaagcactacgatgatcagggtcgcaaggttgacgagtatggcaacgttgagaagcaaaccgacgaatacggcaaccctgttcatgctgctagtgtcacctatgtagccaccagaactgctgctggtggttacagtgatgacattaataagcaacatgataccaccatgcctacggcgtagacactggtagacagcattctagtgggtggctacgatggtgac

SEQ ID NO: 284816 - DNA, 252 bp, Glycine max
  unsure (1)..(252): unsure at all n locations
tnaatctctcgtcgttctttttatttgcggtttcttcttcttctcacgttctacctaacattttctannaacatgtctggggaagaggaagaaaacgccgcagagctcaaaattggagacgagtttttgaaggcaaagtgcttaatgaactgtgaagtttcattgattcttgagcacaagtatgagcagcttcaacagacatccgatgatcccatgaatcangtttctcaggtatttgaaaagtcactgcag

SEQ ID NO: 284817 - DNA, 273 bp, Glycine max
  unsure (1)..(273): unsure at all n locations
cgcgcggccttcggccttggcgcggcggccaccgccctctcctcctccctctacaccgtggacggcgngcagcgcgccgtcctcttcgaccggttccgcggcatcctggactncnncgtcggcgaggggncnccacttcctggtcccatgggtccagaaaccctacatcttcgacatccgcactcgcnnccacanattctcctcgggctccggcncaaaggatcttnaaatggttaacctaaccctccgcgtcctctcccgcnccgncacnga

SEQ ID NO: 284818 - DNA, 269 bp, Glycine max
cctttctgtgtcatgtgcccaaatgaatgaaattgtttcagctttgaacacgagtggtgtttgttacttgtgggtggttcgtggagaagtttcatggttaaaagagaaatgtggggataggggtttagtggtgccttggtgcgaccaattgaaggttttgtcacatccttctgtaggtgggttttggagccactgtgggtggaattcaactctagaagctgtttttggtggtattccaatgctgacattccctcttttcttagaccaag

SEQ ID NO: 284819 - DNA, 277 bp, Glycine max
  unsure (1)..(277): unsure at all n locations
cgctcttcgatcttcgtccggggactgctccgaataccaccaccaccactncgccgatggccacgatcggaggcttacacgactcccaaggctctcaaaacagcgtcgaaaccgaagccctcgctcgattcgccgtagacgaacacaacaagaagcagaattcgcttctggagtttgctagggtggttagggcacaggaacaggttgttgctggtaccctgcatcaccttactcttgaggctattgaggctggtgagaagaagctctatgaagccaa

SEQ ID NO: 284820 - DNA, 271 bp, Glycine max
  unsure (1)..(271): unsure at all n locations
cgctcgcgaggttcttaagatctttggcgaatacagcctcactgacttcatctggccattgaagcatctcaaggttggaaagtatgagaagaggatcgacgacatcttgaacaagttcgaccctgtcgttgaaagggtcatcaagaagcgccgtgagatcgtgaggaggagaaagaacggagagnntgttgagggtgaggtcagcggggttttccttgacactttgcttgaattcgctgaggatgagaccatggagatcaaaatcaccaag

SEQ ID NO: 284821 - DNA, 262 bp, Glycine max
  unsure (1)..(262): unsure at all n locations
agctagctagctagcaagcaagcacagagatggaggcaangcgancgccatgccctcatgtgcttggcacgtgtttcactcttcctctgcgctctaacccnatccgctgctcacggaagcaccacggttcaanacntcgcgagaaanttgaaactcggggacaacgagcttctgcgcacggagaagaanttcaaggtttcatggagaattacgggaggagctactccacagaggaggagtatntgcgncgttggggatttcc

SEQ ID NO: 284822 - DNA, 256 bp, Glycine max
  unsure (1)..(256): unsure at all n locations
agctagctngcaagcaagcanagagatggaggnaaagcgaggccatgccctcatgtggcttggcacgtgtttcactcttcctctgcgcnctaacccnatccgctgctcacggaagcaccacggttcaanacntcgcgagananntgaaactcggggacaacgagcttctgcgcacggagaagaanttcaaggttttcatggagaattacgggaggagctactccacagaggaggagtagcancgccgtttggggat

SEQ ID NO: 284823 - DNA, 255 bp, Glycine max
  unsure (1)..(255): unsure at all n locations
caacaatggtggatacaccatcgaggttgaaattcatgatgggccgtacaatgtgattaagaactggaatanncactgggttgattgatgcaatccacaatggtgaagggaaatgctggactgccaaggtgttctgtgaagaggagctagttgaagcaattgccacagccacaggacccaagaaagactccttatgcttcattgaggtgattgttcataaggatgacaccagtaaagaattgctgaatggggctc

SEQ ID NO: 284824 - DNA, 255 bp, Glycine max
  unsure (1)..(255): unsure at all n locations
ttaggnntgggaataaggttacttttgatgaggctaaccnttttgcgaatgagggtgaggaggttgcttctgtggcttataggtataggaggtggaagcttgntgatgatatgtatcttgttgcgaggtgtgaggtgcatagtgttgttgatgtgaacaagcagaggtcgttccttactttgaatgcgttgaacgagtttgatcctaagtattccggtgtggattggaggcagaagttggagactcagaggggtg

SEQ ID NO: 284825 - DNA, 253 bp, Glycine max
  unsure (1)..(253): unsure at all n locations
ctaaatangananantnnngnnctcatcagcagggatnntggtgnaatttgtgatcttaactgctatttnctctggatcaancttgcattcacctctctcnccagtgtagggatatgaagactcctcctccaacccaccagactcgngcaaataattgtaggcatttgtcataagacctccattacaccaatatccctgctgatgagaaccaaattgccgcatatttagtaaaaaatggtccacttgctatgg

SEQ ID NO: 284826 - DNA, 254 bp, Glycine max
  unsure (1)..(254): unsure at all n locations
gagaggtgtaggataagtgggagctggaaacagcgataagtgaaataccactacttttaacgttattttncttattccgtgaatcggaagcngggcactgcccctctttttggacccaaggtcggcttcggccggtcgatccgggcggaagacattgtcaggtggggagtttggctggggcggcacatctgttaaaagataacgcaggtgtcctaagatgagctcaacgagaacagaaatctcgtgtggaacaa

SEQ ID NO: 284827 - DNA, 254 bp, Glycine max
  unsure (1)..(254): unsure at all n locations
agaatcaaagaaaggggtggtggctgcttcgaaagcttaataatttgtttatttccagaacatcatagtttnccgcagcagcaaactaacaaattactcatatcatataataagatggcccgttctctctcgcaagccaaacgtattggtgtccttgttgctcaatctatctccctaattcccgttcatcggcgaggttacgcagtggcatccgatgtatcggtaagagttggattgggnaatattgggcgaag

SEQ ID NO: 284828 - DNA, 254 bp, Glycine max
gggaaaaactccaagacattgcatctgaggctggtcaatacagtacagagaaggccagagaaatgaaggatgcagcagcagagaaggctagtgacattgcaaaggctgcaaagcaaaaatcacaagagctgaaagacaaattaggtggacaacaccgggatgctgagctttgagaattgagacggtttttaatcactttgtaccttttaattatgccacaatagttgtccattctgccagaattatattgtgtg

SEQ ID NO: 284829 - DNA, 257 bp, Glycine max
  unsure (1)..(257): unsure at all n locations
agaaaacctaagcttagaattagaaacaaagaaaagagccaaaggaaagaattnatcgttgaaaatgcagggaggaaagaaagcgggagagnccattaaggaaacagctacaaacattggtgctnctgccaaggctggcatggagaagaccaaggccactgtccaagagaaggcagaaaagaatgacagcacgtgatcccggtgcaaaaggagttggcaacccaaaagaagaggcaagatgaaccaggcggactgga

SEQ ID NO: 284830 - DNA, 256 bp, Glycine max
ggaggaggcatccgtcaacctcaacgccattaaccaggtcaatgggaagaagccatggtcactctctttctcctttggaagggcacttcaacagagcacccttaaggcatggggcggaaaagaagagaatgtgaagaaggctcaggaagcccttttggtaagagccaaggctaactcagaggcaactctgggaacctacaagggtaactcacagcttgctgatggtgcctcagagagcctccatgtttcgaactac

SEQ ID NO: 284831 - DNA, 248 bp, Glycine max
  unsure (1)..(248): unsure at all n locations
gcgtggaantgattggngttttattgtatggnccaggaaaaggttcttctgttctacaatccatgagggcnccctggtcttgcccttgttgatgactggacatgcctaaaatcaatggttcgggtgtttgagactcactgtgggacactgactcagtatggcatgaaacacatgcgngcatttgccaacatttgcaacagcggtgtttctgaggcctccatggaagaggtttgtgtggcagcttgtga

SEQ ID NO: 284832 - DNA, 249 bp, Glycine max
  unsure (1)..(249): unsure at all n locations
gcgtggaantgnttggagttttattgtatggaccaggaaaaggttcttctgttctacaatccatganggcnccctggtcttgcccttgttgatgactggacatgcctaaaatcaatggttcgggtgtttgagactcactgtgggacactgactcagtatggcatgaaacacatgcgagcattngccaacatttgcaacagcggtgtttctgaggcctccatggaagaggtttgtgtggcagcttgtgaa

SEQ ID NO: 284833 - DNA, 251 bp, Glycine max
  unsure (1)..(251): unsure at all n locations
ggaggaggcatccgtcaacctcaacgccattnaccaggtcaatgggaagaagccatggtcactctctttctcctttggaagggcacntcaacagagcacccttaaggcntggggcggaaaagaagagaatgtgaagaaggctcaggaagcccttttggtaagagccaaggctaactcagaggcaactctgggaacctacaagggtaactcacagcttgctgatggtgcctcagagagcctccatgtttcga

SEQ ID NO: 284834 - DNA, 256 bp, Glycine max
  unsure (1)..(256): unsure at all n locations
gcaaacctaagctnagaattagaaacaaagaaaancaganaggaaagaattgatcgttgaaaatgcagggaggaaaganagcgggagagtccattaaggaaacagctacaaacattggtgcttctgccaaggctggcatggagnagaccaaggccactgtccaagagaaggcagaaagnatgacagcacgngatccggtgcaaaaggagttggcaaccccaaaaganagaggcaaagatgaaccaggcggagctgg

SEQ ID NO: 284835 - DNA, 251 bp, Glycine max
  unsure (1)..(251): unsure at all n locations
gtctganttagacgatcaaattcacnactgccttcgatccttttgctgatgcaaatgctgatgactcgggtgctgggtcaaaggagtatgtgcatattcgcgtacagcagcgaaatggaaggaaaagcctgacaaccgttcagggattganaaaagaattcagctataacaagatacttaaagatgttaaganagagttctgttgcaatggaacagttgttcaggacccagaactaggacaggttattcaa

SEQ ID NO: 284836 - DNA, 246 bp, Glycine max
cataaactaccaaatctagggtttcagagtggtggggtgtgcagaagagcgtcgcagttgtaaccctaatcagaagaagcgcacttcaagcgagtgacagccaccagccatgggtcgtatgcacagccgcggtaagggtatatcctcttctgctttgccctacaaaaggacacctcctagctggctcaagatctcttcgcaagatgtcgaagaaaatatctgcaatttgcgaagaaaggtttgacc

SEQ ID NO: 284837 - DNA, 268 bp, Glycine max
gtgcggtttcctttgttggtgttgctgggaactgttttcctggcatcagtttgtgtctcattaaaggtgagagaggatgagaataaccctttctacttgagaagctctaacagcttccaaactctctttgagaaccaaaacggtcgcattcgtctcctccagagattcaacaaacgctccccacaacttgagaaccttcgagactaccggattgtccagtttcagtcaaaacccaacacaatccttctcccccaccatgctgagccga

SEQ ID NO: 284838 - DNA, 268 bp, Glycine max
  unsure (1)..(268): unsure at all n locations
tgcagaccgagctagctagctagcaagcaagcacagagatggaggcaaagcgaggccatgccctcatgtgcttggcacgtgtttcactcttcctctgcgctctaaccctatccgctgctcacggaagcaccacggttcaagacatcgcgaganagttgaaactcggggacaacgagcttctgcgcacggagaagaagttcaaggttttcatggagaattacgggaggagctactccacagaggaggagtatttgcgccgtttggggat

SEQ ID NO: 284839 - DNA, 269 bp, Glycine max
  unsure (1)..(269): unsure at all n locations
cacaactacaagaaagaacttccttataaccaaaaccaacaacaactatggcaagttatcagaagcactacgatgatcagggtcgcaaggtcgacgagtatggcaatgttgagaggcaaactgacgaatatggcaacccggttcatgccactagtgtcacttatgtngccaccaaaagtgttggtggctacaatgatgacgctaataagcaacatgatattactggtgtctatcccgagaaagacaccggtagacatcattttggtcgt

SEQ ID NO: 284840 - DNA, 267 bp, Glycine max
attttatttggtcttggtttcaacaagcagatgcaagcaaagaagacacgcgatttctctggtggttggagaatgaggattgctttagcacgtgctctatttatgaactctaccatccttttacttgatgaaccaaccaatcaccttgatttggaagcttgtgtgtggctcgaagagaatctgaagaagtttgaacgtattctggttgtggtttcacactcacaggatttccttaatggtgtctgcacaaatatcatccacatgcaa

SEQ ID NO: 284841 - DNA, 267 bp, Glycine max
gcagagttgcatgctcagaaagaccaagagagaaaggctctcattgacattagaaacagtgctgacaccaccatatatagcattgagaagagtttaggtgaatacagagacaagattcccagtgaagtggccaaagaaattgaggatgcagtttcggatctgaggaaggcgatgtcagaggataatgttgatgaaatcaagtcaaagcttgatgctgcaaacaaagctgtatccaagattggagagcacatgtcaggaggttctagt

SEQ ID NO: 284842 - DNA, 269 bp, Glycine max
  unsure (1)..(269): unsure at all n locations
tagcctcacaaaagcaaagatcaaacaaaccaaggacgagaacacgatgttgcttgaacttgcacttggtttattggttttggctctgtttctgcacttgcgtcccacnccncactgcaaattaaaaagcacttcgccatctcccaaacccaccaagcccaaagnctcgtcttcccttcataggacaccttcatctctnaaaagacaaatttcaanctacgcactcancgacctctccaaaaaacatggtccnatattctctctctact

SEQ ID NO: 284843 - DNA, 267 bp, Glycine max
  unsure (1)..(267): unsure at all n locations
actacaagtacttccttacaatcaaaaccancaacaactatggcaagttatcaaaagcactacgatgatcagggtcgcaaggttgacgagtatggcaacgttgagaagcaaaccgacgaatacggcaaccctgttcatgctgctagtgtcacctatgtagccaccagaactgctgctggtggttacagtgatgacattaataagcaacatgataccaccaatgcctacggcgtnnacattggtagacagcattctagtggtggctac

SEQ ID NO: 284844 - DNA, 268 bp, Glycine max
  unsure (1)..(268): unsure at all n locations
tgcagaccgagctagctagctagcaagcaagcacngagatggaggcaaagcgaggccatgccctcatgtgcttggcacgtgtttcactcttcctctgcgctctaaccctatccgctgctcacggaagcaccacggttcaagacatcgcgaganagttgaaactcggggacaacgagcttctgcgcacggagaagaagttcaaggttttcatggagaattacgggaggagctactccacagaggaggagtatttgcgccgtttggggat

SEQ ID NO: 284845 - DNA, 266 bp, Glycine max
  unsure (1)..(266): unsure at all n locations
taagaaggtcttgacctgttccgactttgaccatgacattgcatccaagcttgtactcgagggcctatttttcaaggccgaggctccgcaccgccaacggtcgctggcagcagaagactccgcttcttcaaaccgtcgttttgtggagagggcatacaagtaccgccccgtgaaggtggtagnatcgaacttccccggcagcagtgtgtggtgtacttggatctaaagcgggaggagtgtaacaacctgttcccgtccggccgggt

SEQ ID NO: 284846 - DNA, 278 bp, Glycine max
  unsure (1)..(278): unsure at all n locations
aaccctctccaaagaaaaccgtcgacaccttcggccaacgcacctccatctaccgcggcgtcacccgacatagatggacgggaagatacgaagctcatctatgggacaatagttgtagaagagaaggccaaagcaggaaaggaagacaagtttacctggtggttatgacaaggaagannaggcagccagggcgtncgannangcagcncncaagnnccngggnncaacgtccaccaccaacgttnccattncaactangagaaggaacttgaggagat

SEQ ID NO: 284847 - DNA, 266 bp, Glycine max
  unsure (1)..(266): unsure at all n locations
ataatttctcacctttcaaatctccattcagcttcantttntgcatagaaaaaacccntttctggagaaagaatatagtcttcagctggacaaggatcattcatcttgaaagaagagtttgtgtgtgacaatctttatagttctaaggagggtgcaagagagaactgaatttgctgtgatggcaactcgtagatatgcttttggaagagctgatgaggccactcatccagactccatgagggccactttggctgaatttgtttcta

SEQ ID NO: 284848 - DNA, 230 bp, Glycine max
  unsure (1)..(230): unsure at all n locations
agttgcagaccgagctagctagctagcaagcaagcacagagatggaggcaaagcgaggccatgccctcatgtgcttggcacgtgtttcactcttcctctgcgctctaaccctatccgctgctcacggaagcaccacggttcaagacatcgcgaganagttgaaactcggggacaacgagcttctgcgcacggagaagaagttcaaggttnccatggagaattacgggagg

SEQ ID NO: 284849 - DNA, 207 bp, Glycine max
  unsure (1)..(207): unsure at all n locations
gtgcggtttcctttgttggtgttgctgggaactgttttcctggcatcagtttgtgtctcattaaaggtgagagaggatgagaataaccctttctacttgagaagctctaacagcttccaaactctctttgaganccaaaacggtcgcattcgtctcctccagagattcaacaaacgctccccacaacttgagatngatacgagacta

SEQ ID NO: 284850 - DNA, 232 bp, Glycine max
  unsure (1)..(232): unsure at all n locations
aggtgccggcagcaagtttcgtcacgccggaacgatgnaccggcggcgganaccacggggaggttgccnacgtggaaggagagagagaacaacaagaggagagagagaagacgaagagcgattgcagctaagatctacactggccttcgagncccaggggaactacaagcttccaaagcactgcgacaanaacgaggtcctgaaagctctctgcgccgaagctggctggatc

SEQ ID NO: 284851 - DNA, 267 bp, Glycine max
  unsure (1)..(267): unsure at all n locations
tagcctcacaaaagcaaagatcaaacaaaccaaggacgagaacacgatgttgcttgaacttgcacttggtttattggttttggctctgtttctgcacttgcgtcccacncccactgcaaattgaaaaagcacttcgccatctcccaaacccaccaagcccaaagnctcgtcttcccttcataggacaccttcatctcttaaaagacaaactttcaanttacgcactcatnanncctctccaaaaaacatggtcccttattctctctc

SEQ ID NO: 284852 - DNA, 265 bp, Glycine max
  unsure (1)..(265): unsure at all n locations
ggcttcattacagancaagttgccttttacactggtcccacagttggaggacttntgaatgctacatgtgggaatgttactgagctcataatagcaatatttgcccttagcagtaacaaaattgccgtggtcaagtattctctgtnggttctattctttcaaaccngcgtcnnggtcntnggaccgcgccaatngncngnngcatncaaacgttngagnngaacaaaaatatganngaagacaagcagannnaacnnacttanct

SEQ ID NO: 284853 - DNA, 269 bp, Glycine max
  unsure (1)..(269): unsure at all n locations
acgacgtgggaatgaagaagaaaggcgtggacgagttcccgttctgcgtgcacctggtctcgtgggagaaggagaangtctccagcgaggctttggaggcggcgcgcatcgcatgcaacaagtacatggccaagttcgccggaaaagatgccttccacctgcgcgtgagggtgcatcccttccacgtgctccgcatcaacaagatgctatcgtgcgccggggccgacagctccagaccggcatgaggggcgcctttgggaagccgcagg

SEQ ID NO: 284854 - DNA, 266 bp, Glycine max
  unsure (1)..(266): unsure at all n locations
taagnaggtcttgacctgttccgactttgaccatgacattgcatccaagcttgtactcgagggcctatttttcanggccgaggctccgcaccgccaacggtcnctggcagcagaagactccgcttcttcaaaccgtcgttttgtggagagggcatacaagtaccgccccgtgaaggtggtagaattcgaacttccccggcagcagtgtgtggtgtacttggatctaaagcgggaggagtgtaacaacctgttcccgtccggccggg

SEQ ID NO: 284855 - DNA, 267 bp, Glycine max
  unsure (1)..(267): unsure at all n locations
cncacttntttattngagcctttcatataaatatcatggcttcgagggtggtttcggttttngtnatagcgatgntgttgtttgccatgaactgtaactgcactagtgttggccacatgccttcaaccaaagagganggtcacgattttcaggnggctaaagccaagacaacacaaactgcgaacaaggccatggaaactggtaaagatgggaaagaagccgcagagtcatggacagaatgggctanagagaaactcactgaggtcc

SEQ ID NO: 284856 - DNA, 264 bp, Glycine max
ctatacttgttccttttgaaggttagaagtgctacaatacaaacaatggcagctactcaggaagatgtgaagcttttgggtattgtgggaagcccatttgtgtgcagggtccagattgcccttaagttgaagggagttgaatacaaatttttggaagaaaatttgggcaacaagagtgatttgcttctcaaatacaaccctgttcacaagaaggttccagtgtttgttcacaatgagcagcccatagcagagtctcttgtgatt

SEQ ID NO: 284857 - DNA, 269 bp, Glycine max
  unsure (1)..(269): unsure at all n locations
gtaacaaagaaaggnaataattgatctttgaaaatgcagggaggaaaganagctggagagtccatcaaggaaacagctgcaaacattggtgcttctgccaaggctggcatggagaaaaccaaggccactgtccaggagaaggcagaaagaatgacggcacgtganncganncaaaaggagnttgcaacccagaagaaagaggcaaagattagccaggcagagcctgacaagcagcggcgcgnnacataacacggcggcgaanntgcttc

SEQ ID NO: 284858 - DNA, 265 bp, Glycine max
  unsure (1)..(265): unsure at all n locations
tgttacttgatcgttcaaattcagctgtaatgacacgatatgtgagctcaagagacaacttgaggattttaatgaatcttcttagagagtcaagcaagagcatacagattgaagcatttcatgttttcaagctatttgctgccaaacaacatangccggganagatatcgtcagtatatttgttgcnaacaaaagtaagatgctgatactattggaanactncaaaattgataaagaggatgaaaatnannnnccgnncaaagct

SEQ ID NO: 284859 - DNA, 262 bp, Glycine max
ggcacaagttgaacttcgtgacgagcatgggaacccagttgaactaacagatgcatatgggaatccggtttggttaacggacgagaaaggcaacccggtgcacctcacggctgtggcaaccaatgcacacaaatctatgcttcagaatgacaccccacaagagcttcctcactccaagagttcaagctcgtctgaggatgaagggcatggagagaggatcaggaagggactgaaggataacatagaagaaaagttaccagct

SEQ ID NO: 284860 - DNA, 262 bp, Glycine max
tggatagcgaaaaattcatggggagaagattggggagaagatggttacatttggatccaaagaaacacgggtaatttattaggagtgtgtgggatgaattatttcgcttcatacccaaccaaagaggaatcagaaacactggtgtctgctcgcgttaaaggtcatcgaagagttgatcactctcctctttgagccgtaaaggttcaatacaacgagtgcttgttttcttagggacaagcattgtacttatgtatgattctgt

SEQ ID NO: 284861 - DNA, 261 bp, Glycine max
  unsure (1)..(261): unsure at all n locations
tcttgaggttcttcggattcatacaaanaacatgaaacttgctgaagatgttgatttggaaaaaatagccaaggatactcatggttatgttggtgctgatctagctgctttgtgtactgaagctgcacttcaatgcatcagagagaaaatggatgtgattgacttggaagatgagacaattgatgctgaaatattgaactccatggcagtgacaaatgagcatttccagactgctcttggatcaagcaatccttctgctct

SEQ ID NO: 284862 - DNA, 258 bp, Glycine max
  unsure (1)..(258): unsure at all n locations
agaaaggaaataattgatctttgaaaatgnagggaggaaagaaagctggagagtccatcaaggaaacagctgcaaacattggtgcttctgccaaggctggcatggagaaaaccaaggccactgtccaggagaaggcagaaagaatgacggcacgtgatccgatgcaaaaggagttgccaacccagaagaaagaggcaaagatgagccaggcagagctggacaagcagcggcgcgtcacataacacggcggcgaacagt

SEQ ID NO: 284863 - DNA, 259 bp, Glycine max
  unsure (1)..(259): unsure at all n locations
attccacatcctgcatatggnaacttttctggaaatccttatggctcttnaggggctggatatggtgttgctgctggttatcaacagccaatgatatatggtaggggtccaatgccagcaggaatgcaaatggttccaatggtgtnaccagacggtcgaattggctatgttcttcaacaacctggtgtacaagtgccagcaacccgaccccgcagaaattgatcggagcaatggtccaagtgggcagccagggcgagga

SEQ ID NO: 284864 - DNA, 260 bp, Glycine max
  unsure (1)..(260): unsure at all n locations
acaaatttgactttgaccctcttgatgttactaagacttggcctgaggacattatacccttgcagcctgttggtcgcttggncctgaataagaacatagataatttctttgctgagaatgaacaacttgcattttgccctgccattgtggttcctggtgtatactactcagatgataagatgcttcaaaccaggatattctcttatgctgattcacaanggcacagacttggaccaaactatctgnaacttcnnggctaa

SEQ ID NO: 284865 - DNA, 240 bp, Glycine max
  unsure (1)..(240): unsure at all n locations
caacanncggcaaagcaaagcanngtgagtnactctggagtttatgacacagaaggacgttatgtgccagcaaanattgagaacanatncagnaagnangctncgnacagcaccggacaagcncacacntggggagcgctgggacttgacaganggnaaccgaaangcttcnnacanatgnnggcnnccttggagcaaaatngaatgnggagcacgtgcagcggcaagggatgaggnagg

SEQ ID NO: 284866 - DNA, 275 bp, Glycine max
  unsure (1)..(275): unsure at all n locations
gaaacactcaaggtgtggctgggttaggccatgcaccaatttctcttccaaaccaactcgcttcncactttggcctacaacgccaattcaccacttgcctttctcgctaccctacttcaangggtgctataatattcggggatgcacctaanaacatgngncaggtcaaaaccaaggtantntgcaangattggggcctgnaccnccattangccancaccntggggggggagtttanaagggnggggggcnannncngangggngncccccncg

SEQ ID NO: 284867 - DNA, 122 bp, Glycine max
  unsure (1)..(122): unsure at all n locations
gcagaaacaggaagangaacctttggaagtgcaaaggtacagagctgaattgtctgaagacgatgtatttgtaattccagncagctatccatttgtcgtcaacgcnaccgcaaacctcaatt

SEQ ID NO: 284868 - DNA, 259 bp, Glycine max
  unsure (1)..(259): unsure at all n locations
caacatacacaaagcaaagcatggggagtgactctggagtttatgacacagaaggacgttatgtgccagcaaatattgagaacatattcagtaagtatgctcgtacagtacctgacaagctcacacttggggagctctgggacttgacagagggaaaccgaaatgcttttgacatattcngctggcttgccagcaaaatttgantggggggttcctgtacattctggcaaagggntgaggaaggttnctgtcctaanga

SEQ ID NO: 284869 - DNA, 256 bp, Glycine max
gctggatgtgttgccaaagtcaaccctgctgccccacttgacaaaatctgtgttctcagttgtggaatttgcacaggtcttggggccactatcaatgttgcaaaaccaaaacctggttcttctgttgccatttttggacttggagctgttggccttgccgctgctgaaggggcaaggatttctggtgcatcaagaatcattggggttgatttagtttctaggcagatttgaagaagctaagaagtttggggtcaat

SEQ ID NO: 284870 - DNA, 253 bp, Glycine max
  unsure (1)..(253): unsure at all n locations
cacaactacaagaaagaacttccttataaccaaaaccaacaacaactatggcaagttatcagangcactacgatgatcagggtcgcaaggtcgacgagtatggcaatgttgngaggcaaactgacgaatatggcnacccggttcatgccacnngtgtcacttatgtngccaccaaaagtgttcgtggtacaatgatgaccgctaatnagcnanatggtnttacgggtggtctatcccgagaangacaccggta

SEQ ID NO: 284871 - DNA, 256 bp, Glycine max
  unsure (1)..(256): unsure at all n locations
gtattctgtggaaatgtctgctgtagtttacaaggattggntttttacagatcaagcattgcctgntgatcttataaaaagaggaatggcaattgaggatccatcgtgccctcatggnattcgccntgtnntngngnantacccttnatgctggtnggntggncttgaggntatgggatggnagcaggacatggggtnccatgagtacgtttnnnggncngacaagtcnagnnganncanttaagagaangtccng

SEQ ID NO: 284872 - DNA, 252 bp, Glycine max
  unsure (1)..(252): unsure at all n locations
atactctctagagtaattgcggaatctgctagaattttctaataatggcgaaagacgttgagcaggtcacagagcaaggtgaatactccgcgaaggactaccatgaccctcctccggcnccgttgatcgacccagatgagctcacaaagtggtccttgtacagagccgccatagctgagttcataggcaacactcctttttctttacatcaccgtgttgacnattattggctacaaagngacggngtggccc

SEQ ID NO: 284873 - DNA, 250 bp, Glycine max
  unsure (1)..(250): unsure at all n locations
gctgaacaggattttttgaacatgtacttcaaggacaaatataggccaattcctaatgtctacaatgcttgtgctggccatgctgtggcgtcaccctgagaacgttgancttgacaaagttaaagggtctaagcctnggaggtanactgggaaggaggagaatatggnganagangatatcangatgttagtgaaaaagtggtgggatgtttatgnggatgagactttggactacagcantccactcagt

SEQ ID NO: 284874 - DNA, 253 bp, Glycine max
  unsure (1)..(253): unsure at all n locations
gtgaagaagagaggttgatcctgaagaggatttggttgacggtgctgcaaagtccttgactgatttgaatgtgaatgagcatggtgaaaatgttganatggaggaagatgatgattttgaggagttagacccctcttgttgctttatgtgtgatcaagagcacaaaacaatagaagactgcatggttcacatgcnnaagcatcatggattcttcattccagatgttgagtatttgaaggatccaaaaggcctc

SEQ ID NO: 284875 - DNA, 248 bp, Glycine max
  unsure (1)..(248): unsure at all n locations
caacaatgaagacactcctgttgttgccgtttctattattgacaccanncagcttggaganccagctcgaccagatgcctaggagnttctatcttgctgggaaccaagagcaagagtttctaaaatatcagcagcagcagcaaggaggttcccaaagccagaaaggaaagcnnnnnnnnnnnnnnnnnnnnnnnagcaacatattgagtggcttcgcccctgaattcttgaaagaagcgttcggcgtg

SEQ ID NO: 284876 - DNA, 246 bp, Glycine max
  unsure (1)..(246): unsure at all n locations
tgcttgtaaaaaagcagggttgaactttgcaggggttcatgattcatattggacacatgcgtgtgatgttgatgaaatgaacaggatactcagggaaaagtttgttgaactctatgatgctccaatattggaaaatttgttggagagctttcaaaagacttttcccgcatngaacttccctcccttacccgaacgaggtgactttgatcttcaggaggttttggagtctacctannttttaactag

SEQ ID NO: 284877 - DNA, 246 bp, Glycine max
aacctggtggtgttcgatcttgcaaggtcaagggttgggtttggcacctcatcactgcactcgcatggagtcaaatgtgctgacctcttcaactttgccaatgcatgatgagccaagatcgcgagactttttataatatgcttatttataattaagcaagcatctactacatgttatggttaataaaagtaataatgtaagaataaagactttgaactaaataataatatgaacgattctctttcg

SEQ ID NO: 284878 - DNA, 250 bp, Glycine max
  unsure (1)..(250): unsure at all n locations
tccaagtatatcatttgcngcaatagggctactggatatgttcaacactggaggagcagnggagcaggttgagattcataaccgagcagcaacgaaaacaatagctctnngtgtaaggggaagaggcagatttggagtttactcntcccagagaccactgaagtgtgtggtaggtggcgctgaaaccgacttcaactatgactcagagaccgggttgacaaccttctccattccagtttctccagaggag

SEQ ID NO: 284879 - DNA, 245 bp, Glycine max
ggcttgttgaatgctttggtaaaagctccaagctgagagagcttgtgaatcttgtggtagttggtggctacattgatgtacagaagtctacggacatagaagaaatgagggagatagagaaaatgcacaatctcatagaagaatacaacttacatggccaattccgttggataaaggcccaaatgaatcgcgctcgtaatggagagctctaccgttatattgctgatgtgaaaggtgcttttgtg

SEQ ID NO: 284880 - DNA, 235 bp, Glycine max
  unsure (1)..(235): unsure at all n locations
gtaaaggttcantacancgagtgcttgttttcttagggacaagcattgtacttatgtntgattctgtgtaaccangagtcttccacgttgtactaatgtgaagggcaaaaataanacacagaacaagttcgtttttctcaaataatgtgaaggtagaaaatggaaccatgcctcctctcttgcntgtgaaaaannaanannnananaaaaaagnnnnanaannaagannnnnaaa

SEQ ID NO: 284881 - DNA, 255 bp, Glycine max
  unsure (1)..(255): unsure at all n locations
tcttctttctctctctaccattgccatggatccctacaagcaccggccacnccagcgccttcaattctcccttctngactacaaattctcntgctccnatntggaacaacaactcctctttaaccgttggagctagaggtccaattctgctggaggattatcatcttgtggagaagcttncaaattttgatagggaacgtatcccagaacgtgttgtccatgccangggcgctantgcaaagggtttcnttgagg

SEQ ID NO: 284882 - DNA, 246 bp, Glycine max
  unsure (1)..(246): unsure at all n locations
anaganannnaatanttnatctttgaaaatgcagggaggaaaganagctggagagtccatcaaggaaacagctgcaaacattgncgcttctgccaaggctggcatggagaaaaccaaggccactgtccaggagaaggcaganagaatgacggcactgatccgatgcaaaaggagttggcaacccagaagaaagaggcaaagatgagccaggcagagctggacaagcaggcggcgcgtcanntnaca

SEQ ID NO: 284883 - DNA, 252 bp, Glycine max
  unsure (1)..(252): unsure at all n locations
ctntccttctcnntctnngcagctttgacttttntnggaaantaaggcctaatcaaaatggtgaagttccacagctnaagagctacgtcgtattatggactataagcataatatccgtnatatgtctgtcattgctcangttgatnacggaaaatcaaccctcactgattctcttgtggctgctgctggtattattgctcaagaagttgccggtgatgtccgtatgactgatacccgtgcagatgaagctga

SEQ ID NO: 284884 - DNA, 246 bp, Glycine max
  unsure (1)..(246): unsure at all n locations
aacaaagaaaggaaataattgatctttgaaaatgcagggaggaaagaaagctggagagtccatcaaggaaacagctgcaaanattggtgcttctgccaaggctggcatggagaaaaccaaggccactgtccaggagaaggcagaaagaatgacggcacgtgatccgatgcaaaaggagttggcaacccagaagaaagaggcaaagatgagccaggcagagctggacaagcaggcggcgcgtcacat

SEQ ID NO: 284885 - DNA, 257 bp, Glycine max
  unsure (1)..(257): unsure at all n locations
ggnctgaagcacaactacgagaccagcatggcaaccctgtcccactgcaccgatcaataacggtaatccggttatcttaactgacgagcgcggtaatcccgtccaactcactggtgtcgctaccaccgctaccggcacagcaggttctgggtntgggtcctatggtaccggtgcttacggtggtggtncaagtgcaaccaccgttgcagatcttttggcaacccaaccaaggagtggcagggaggctagagagcttc

SEQ ID NO: 284886 - DNA, 253 bp, Glycine max
  unsure (1)..(253): unsure at all n locations
atcatcaacaaaaaaagcacctgataattgatagtattatatattatggcttatcaagtgttggtgatttgtgtggtctccagcatagtgtttgcatacatagtatggagaaaagaaaggaagaaaaagcttccaccgagtccaaagggcttcccatcattgggcacctccaccttgtgtccccaataccccaccaagatttttanaagctctcactccgccatggacccatcatgcaatttttcctcggctc

SEQ ID NO: 284887 - DNA, 255 bp, Glycine max
  unsure (1)..(255): unsure at all n locations
gcatagaaaaaacccttttctggagaaagaatatagtcttcagctggacaaggatcattcatcttgaaagaagagtatgtgtgtgacaatctttatagttctaaggagggtgcaaganagaactgaagctgctgtgatggcaactcgtagatatgcttttggaagagctgatgaggccactcatccagactccatgagggccactttggctgaatttgtttctactttcatctttgtctttgctggagaaggctc

SEQ ID NO: 284888 - DNA, 229 bp, Glycine max
  unsure (1)..(229): unsure at all n locations
tgaatctctcgtcgttctttttatttgcggtttcttcttcttctcacgttctacctaacattttctanaacatgtctngggaagaggaagaaaacgccgcagagctcaaaatnggagacgagtttttgaaggcaaagtgcttaatgaactgtgaagtttcattgattcttgagcacaagtatgagcagcttcaacagacatccgatgatcccatgaatcaagtttctca

SEQ ID NO: 284889 - DNA, 254 bp, Glycine max
  unsure (1)..(254): unsure at all n locations
atgagcagaaggaccaagtagcagtggagcagattttgcgagttgtttttctagatccagagcgtccttgtcctgctttggaaaaactgaaccgacagctggctgatgctgatgctgcccttgaggcacgtaaganacctgcggaagatgcaggtcctaaaattatcggggaagggctcgtcatagacgaatggaaagagaggagggaaagatacctcgcaaagcagcagggtgaagtggttgtagattctgtt

SEQ ID NO: 284890 - DNA, 254 bp, Glycine max
  unsure (1)..(254): unsure at all n locations
gtgagaaacaaagaaaggaaataattgatctttgaaaatgcagggaggaaataaagctggagagtccatcaaggaaacagctgncnnccattggtgcttctgccaaggctggcatggagaaaaccaaggccactgtccaggagaaggcagaaagaatgacggcacgtgatccgatgcaaaaggagttggcaacccagaagaaagaggcaaagatgagccaggcagagctggacaagcaggcggcgcgtcacata

SEQ ID NO: 284891 - DNA, 257 bp, Glycine max
  unsure (1)..(257): unsure at all n locations
ctacaagtacttccttacaatcaaaaccanccaacaactanggcaagttatcaaaagcactacgatgatcagggtcgcaaggttgacgagtatggcaacgttgagaagcaaaccgacgaatacggcaaccctgttcatgctgctagtgtcacctatgtagccaccagaactgctgctggtggttacagtgatgacattaataagcaacatgataccaccaatgcctacggcgtagacactggtagacagcattctag

SEQ ID NO: 284892 - DNA, 259 bp, Glycine max
cttttccatctttctagatatcagagaactttggagctcgcttaggtttaaaaaaacaccacgcaaacggcaagatggccacttccgacagaaacatgttactaaattatgttccagtttatgtgatgctcccactcggagttgtcactgttgacaatgtttttgaagacccagatggccttaaagaacagctcttgcagcttcgagccgcaggtgttgatggggttatggttgatgtgtggtgggggatcatagaact

SEQ ID NO: 284893 - DNA, 261 bp, Glycine max
  unsure (1)..(261): unsure at all n locations
actcgatgctgaagctgaatccttatgccaagactgctaagaggatggcccttctcgctgaggcncagcgggttaaggtcaagaaggagaagctcgacaagaagaggaagactgtctctaaggaggaagcgtctgccatcaaggctgctgggaaagcatggtatcacactatggtgtcagattctgattatacagaattcgacaacttttctaagtggttgggtgtttcacagtaaacttcatgatttattttttcgtatt

SEQ ID NO: 284894 - DNA, 291 bp, Glycine max
  unsure (1)..(291): unsure at all n locations
caacaggcctttccgttcacgnncactcccttttatcgtttcacttccgtcgtcgtcgtcttcnattttggatcttgcgaatcgaatcgcatcctatgggtagcagcagaggacacacgctcatggaggttggacccgacggggttgccgtcatcaccatcgtcaaccctcccgttaattcactttcctttgatgtattgcgcagtttaaagganagttttgatcaggcgatacanagagatgatgtcaaggcaattgttgttacaggtgcaaagggaaaattttctggag

SEQ ID NO: 284895 - DNA, 283 bp, Glycine max
gcttcaacagacatccgatgatcccatgaatcaagtttctcaggtatttgaaaagtcactgcagtatgtgaagcgcttcagccgctataaaaatcccgatgctgttagacaagttcgagaaattctcgccagatatgaattggctgagtttgagttgtgtgtccttggcaacctttgcccagaaactgtggaggaagctattgctatggttccatctatcaagtcaagaggacgggctcaggatgatgaagcaatcgagaaaatgttaaatgacctgtcgttg

SEQ ID NO: 284896 - DNA, 282 bp, Glycine max
  unsure (1)..(282): unsure at all n locations
gtttcggaggagaagaaaatagtcgttcgagatggcccgtacgaagcaaantgctcgtaagtncacaggaggacaggctcctaggaagcagcttgcaaccaaggctgcacgtaagtctgcaccaactactggtggtgtgaagaagccacatacgttaccgtcctggtaccgttgctcttcgtgagattaggaaataccagangagtaccgagcttttgatcaggaagctccccttccagaggntggttcgtgaaattgctcaggattcaagactgcnctgcg

SEQ ID NO: 284897 - DNA, 279 bp, Glycine max
  unsure (1)..(279): unsure at all n locations
ggcattgtanaatgttggaggggtgactggnnacaatggacntagacatgatatggttgagtctgaaatattttgtttgcatggtgggctttcaccttcaattgagactcttgataacataaggaacttcgatcgtgttcaagaggttcctcatgaagggcccatgtgcgatctgttgtggtctgatccagatgataggtgcggctggggaattctcctcgtggtgctggatatacattggccaggatatatccgaacaatttaatcactcaaacaagc

SEQ ID NO: 284898 - DNA, 283 bp, Glycine max
  unsure (1)..(283): unsure at all n locations
atcacacacaactactacaantacttccttacaatcaaaaccanccaacaactatggcaagttatcaaaagcactacgatgatcagggtcgcaaggttgacgagtatggcaacgttgagaagcaaaccgacgaatacggcaaccctgttcatgctgctagtgtcacctatgtagccaccagaactgctgctggtggttacagtgatgacattaataagcaacatgataccaccaatgcctacggcgtagacactggtagacagcatctagtggtggctacgat

SEQ ID NO: 284899 - DNA, 285 bp, Glycine max
  unsure (1)..(285): unsure at all n locations
gcttcaacagacatccgatgnggcccatgaatcaagtttctcaggtatttgaaaagtcactgcagtatgtgaagcgcttcagccgctataaaaatcccgatgctgttagacaagttcgagaaattctcgccagatatgaattggctgagtttgagttgtgtgtccttggcaacctttgcccagaaactgtggaggaagctattgctatggttccatctatcaagtcaagaggacggggctcaggatgatgaagcaatcgagaaaatgttaatgacnggncgttga

SEQ ID NO: 284900 - DNA, 184 bp, Glycine max
  unsure (1)..(184): unsure at all n locations
gcttcattacagancaagttgcnttttacactggtcccacagntggaggacttntgaatgctacatgngggaatgttactgagctcataatagcaatatttgcccttagcagtaacaaaattgccgtggtcaagtattctctgttgggttctattctttcaaaccttcttctggttcttgggac

SEQ ID NO: 284901 - DNA, 278 bp, Glycine max
  unsure (1)..(278): unsure at all n locations
cacaactancnagancagnacttcnnnataaccaannccanccaanccactanggnggngntatcagcagcactacgatgatcanggtcgcanggtcgacgagnatggcaatgttgagangcaaactgacgaatatggcaacccggntcatgccactagtgtcacttatgtagccaccanaagtgctggtggctacaatgangacgnaataagcaacatganattactggngncnatcncgngnnagncaccggtagncatcacttggtcgtgggtac

SEQ ID NO: 284902 - DNA, 160 bp, Glycine max
aacctggtggtgttcgatcttgcaaggtcaagggttgggtttagcacctcatcactgcactcgcatggagtcaaatgtgctgacctcttcaactttgccaatgcatgatgagccaagatcgcgagactttttataatatgcttatttataattaagcaag

SEQ ID NO: 284903 - DNA, 158 bp, Glycine max
tgatgatgaaatggaagagtgaattttatgataaaatgtaattagtttgatggcgcaagctcctcttgaacttccttctttgtcttttatgtgttttgaatgggtgtgagtgaaaattgaagaagtcccttgtaacacctgctttttgtctgatcaat

SEQ ID NO: 284904 - DNA, 161 bp, Glycine max
  unsure (1)..(161): unsure at all n locations
anaacccacagcntcgggacatggatancttactcagttctgtggatancaacgaaggagctctncttctaccacacnncaatncaaaaagccanagtgatactagtgattaatgaaggagatgcaaacattgaacttgtaggcattaaagaacaacaaca

SEQ ID NO: 284905 - DNA, 263 bp, Glycine max
  unsure (1)..(263): unsure at all n locations
cgatctcagattccggccactcctctcgccggcgagcccttactcttccctnctccgtccgagccctctccgattcgaatcgttcccagcctcgcaccaccatgaatcccgaatacgattatttgttcaagcttttgctgattggagattctggtgtaggcaagtcatgtcttcncctgaggtttgctgatgattcataccttgacagctatatcagtaccattggagtggactttaaaatccgcactgtggagcaggatggg

SEQ ID NO: 284906 - DNA, 271 bp, Glycine max
  unsure (1)..(271): unsure at all n locations
tctctttgcgcagttccctacctctcntttcaagatgcagatggttcgtcaagaccctcaccggaaagaccatcacccttgaggtggaaagctctgacaccatcgacaacgtcaaggccaagatccaggacaaggaaggaattcccccggatcagcaacgtctcatcttcgccggaaagcagctcgaggacggccgtaccctcgccgactacaacatccagaaggagtcaacccttcaccttgtnntgcgtctccgtggtggctgcagatc

SEQ ID NO: 284907 - DNA, 273 bp, Glycine max
  unsure (1)..(273): unsure at all n locations
tcaatttccaattagggtttcgcttagagtaaccaattaccatgggagtcttcacctttgtacgttcgcaaatccggcgccgaatggagcgccaagcaacattccggcgacatcgaggcctccgccgactccacctnacgatctccaaaggaagctcgtgcaagccgctctcgccgttgattcctccggtggagtccagtcctccttctctcccgtgtctcctacctccgctgtgttccaggtgatagtnggtggtgctgtattcgttgggag

SEQ ID NO: 284908 - DNA, 266 bp, Glycine max
  unsure (1)..(266): unsure at all n locations
gagggntgtgttggaatttttcacactgccaccccaattgattttgcggtgaacgagccagaggaagtggtgaccanaagagccattgatggagcactaggcatattgaaagcaggcctaanagcaaagactgtgaagagggttgtttacacttctagcgcctccactgtttcctcagcagcctagangagaaagatgtggtggatnagagtgtttggagtgtgtggatttgctcaggagtgtgannccttttaggttngtcctat

SEQ ID NO: 284909 - DNA, 267 bp, Glycine max
  unsure (1)..(267): unsure at all n locations
agctagctngcaagcaagcacagagatggaggcaaagcgaggccatgccctcatgtgcttggcacgtgtttcactcttncctctgcgctctaaccctatccgctgctcacggaagcaccacggttcaagacatcgcgagancgttgaaactcggggacaacgagcttctgcgcacggagaagaagttcaaggttttcatggagaattacgggaggagctactccacagaggaggagtattgcgccgtttggggattttcgcccagaa

SEQ ID NO: 284910 - DNA, 265 bp, Glycine max
  unsure (1)..(265): unsure at all n locations
accttnactctatactacacantacacacactagaagaatantggcttccatcctccantacttttnagcnctctctctttcttgctcttttcttttctncttatccgactcagtcacccctacaaaaccantaaaccttgntgttctacccgttcaaaatgatggttccacagggctccattgggccnccctccaanaaagaacccctctaatgcaagtaccagtcctggtggacctcaatggaaatcacttgtgggttaatgt

SEQ ID NO: 284911 - DNA, 266 bp, Glycine max
  unsure (1)..(266): unsure at all n locations
ggaacatcccaaattcaaaagaaaggctgatgaagcgccggacacaattactggggatatcgtctttgtccttcagcagaaggaacatcccaaattcaaaagaaaggctgaagatctttttgtagagcacactttgtcccttaccgaggccttgtgtggcttccaatttgtgctgactcacttggatagccgtcagcttcttnttaaatcaaatccggggaaattgtaaancctgattcatacanggctataaatgatgagggaat

SEQ ID NO: 284912 - DNA, 267 bp, Glycine max
  unsure (1)..(267): unsure at all n locations
gtacccaggaagcagtgtacaagagagttgcacaaattaggaacctaattgaggctgctgagcaagagtatgagaaaganaagctgaatgagagaattgctaaattgtctggtggtgtggctgtgtaacaggttggcgcacaaactggngacggggctcaaggaaaagacattgagagttgaagacgctcttaatgctacaaaggcagctgtaanaggaaggtttgttgttggtggtggttncntcttcggagacttgnngcanagg

SEQ ID NO: 284913 - DNA, 259 bp, Glycine max
  unsure (1)..(259): unsure at all n locations
gcggctgncaagagcaccgcacgtcgcgtggtgtccggtgcgcccccggcggcccttganaatccggaggaccnantgcctcccacgcccggtcgtagtcataaccgcatcangtctccaaggtgaacagcctctggtcgatggaacaatgtaggcaagggaagtcggcaaaatggatccgtaacctcgggaaaaggattggctctgagggctgggcacgggggtcccagtcccgaacccgtcggctgtcggtggactg

SEQ ID NO: 284914 - DNA, 260 bp, Glycine max
  unsure (1)..(260): unsure at all n locations
cacagccttgggacttggagcaacaccaaagcttagtgaagataaggtgaagcagtntgttgatgtgagcactaaagggngagtacccttcaaaatcagttgcagagatggctgctgttgctgcattgtgtgtgcaatatgaagctgagtttcgaccaaatatgagcattatagtgaaagctctacngcctctactgnatactcgtnctgtncactcnaaggaancanccaagatgtaataaaaacangtaantcccaaa

SEQ ID NO: 284915 - DNA, 257 bp, Glycine max
  unsure (1)..(257): unsure at all n locations
tatgagtccaaagaagaggacttgcagaacaagagccctttgctcctcaaaatgaacccggttcacaagaaaatcccggttctcatccacaatggcaaacccatttgtgaatctctcgttgctgttcagtacattgaggaggtctggaatgacaganatcccttgttgccttctgacccttaccagagagctcaggctagattctgggctgactttgttgacaataagatatttgatcttggaagaaagatttggac

SEQ ID NO: 284916 - DNA, 256 bp, Glycine max
aggagatgcaaacattgaacttgttggcattaaagaacaacaacagaagcagaaacaggaagaggaacctttggaagtgcaaaggtacagagctgaattgtctgaagacgatgtatttgtaattccagcagcttatccatttgtcgtcaacgctacctcaaacctcaatttccttgcttttggtatcaatgctgagaacaaccagaggaacttccttgcaggcgagaaagacaatgtggtaaggcagatagaaaga

SEQ ID NO: 284917 - DNA, 266 bp, Glycine max
tgctgtgtgttggaattcctaccgagtggtctgttgtggaggatctaccagaaggacctgctgttaaaattggtgagaacaaagatgcaatggatggttggtttagacttgagagagtttctgatgatgaattcaataactataagcttgtgttctgtccacagcaagctgaggatgacaaatgtggggatattgggattagtattgatcatgatgatggaaccaggcgtttggtggtgtctaagaacaaaccgttagtggttcag

SEQ ID NO: 284918 - DNA, 265 bp, Glycine max
  unsure (1)..(265): unsure at all n locations
ctacaagtacttccttacaatcaaaaccanccaacaactatggcaagttatcaaaagcactacgatgatcagggtcgcaaggttgacgagtancgcaacgttgagaagcaaaccgacgaatacggcaaccctgttcatgctgctagtgtcacctatgtagccaccagaactgctgctggtggttacagtgatgacattaataagcaacatgataccaccaatgcctacggcgtagacactggtagacagcattctagtggtggct

SEQ ID NO: 284919 - DNA, 233 bp, Glycine max
tggctgatacaagtggaggagatgcagtgagaccggtggtaatatgtgataacaagtgtggctgcacagttccatgcactggtggttccacttgcaggtgcacaagtgtcggcatgacaactggaggcggtgatcacgtgacatgctcgtgcggagagtactgtgggtgcaatccatgctcatgtcccaagactgcggcttctggaactggttgcagatgtggcacagattgc

SEQ ID NO: 284920 - DNA, 271 bp, Glycine max
  unsure (1)..(271): unsure at all n locations
gagagtctcttgctctgtatctntgatttgatcattccaatcttcaatnttnctatatatccatcaatccgctgagtncaaagttctaatctttcgcctattgggnncnactcctntctctctncgtntccgatcgatccaatttncttgnccatggctacgatcggacacaacaatctcaatgccaaattggttcttctcggggacatgggtgctgggaaatccagcctcgttttgcgctttgtcaagggtcaatttctcgaatttcagg

SEQ ID NO: 284921 - DNA, 268 bp, Glycine max
  unsure (1)..(268): unsure at all n locations
acaactactacanatacttccttacaatcaaaaccancaacaactanggcnngttancaaaagcactacgatgatcagggtcgcaaggttgacgagtatggcancgttgagaagcaaaccggccgaatacggcaaccctgttcatgctgctagtgtcacctatgtagccaccagaactgctgctggtggttacagtgatgacattaataagcaacatgataccaccaatgcctacggcgtagacactggtagacagcattctagtggt

SEQ ID NO: 284922 - DNA, 263 bp, Glycine max
  unsure (1)..(263): unsure at all n locations
tgttgctgtgggagtcatcaagaacgttgagaatcaggatcctaccggagccaaggtcaccaaggctgcccagaagaagaagtgaatcgtgcgggctggttcatcaggggatgttggttacaataaatgttggtttcttttctgtantttgtgtcttcttttctaggtagcttgtttttcggacaaagtttgaagtctccaccatcatctcgcaactgttgttcccagaactgggttcttgatcgacggtggcaaaattgctt

SEQ ID NO: 284923 - DNA, 233 bp, Glycine max
  unsure (1)..(233): unsure at all n locations
aaatatttttcattctaggtgatgtatcatgtatgtaccaaaatattttggtacntaagtcttttaaaaagtttgcatctcctctttggttttcctnngttctgaaagttatctcctaagaagacaatcatatgtactgtacgtagtgtgaagatatagtattgtatgctgcagaatatgattgtctaataaggtggactagctgtaataaaagatatttccaggttgaaaac

SEQ ID NO: 284924 - DNA, 263 bp, Glycine max
  unsure (1)..(263): unsure at all n locations
ctctttttgtctcccctgcaatcaacggcnnnccccacaanaatgacagncagngacagtnnacccaaaagcttaccctttggccgatgcgcaactcgnaataacaatcttggatcttgtnccaacaagctgccaactacaagcaantaaaaaagggtgctaatgaagcgactangacactgaacagaggcatttctgagttcgttgtgatggccgcagacactgagcctcttgagattctctccatcttcctctcctgctga

SEQ ID NO: 284925 - DNA, 265 bp, Glycine max
gtgggggttcaaggaaaccaaggaaatttagtagcaggagtgtcgggttcttcagcaattctgcgagccataactttagttctagaagcatgtataggggtaggagtgcacccctgacatgtaaaattactagttcattggctgcagtattggctcagatgctatctcacagggcaactcatgtctgggtgaccgaggacgagaacgatgaagttttggtcggtgtggtcggatatgctgatattttagctgctgtaaccaaacc

SEQ ID NO: 284926 - DNA, 264 bp, Glycine max
  unsure (1)..(264): unsure at all n locations
aaactctcagagagaaacaacgatgagaaactgagaaaccgttgtggancagttcaaatgccttatactctncttttgccttctagtaaggaaggattaactttcagaggaattcccgccagtatctctatctgaagaggtttgtggttccttaagttttgtggctttgaataaaagatagaagagaaggaatctgaatttcttcatccaacctgcacatggtaatctagtgtgtttgagtgctttcatgtttggcttaataaa

SEQ ID NO: 284927 - DNA, 262 bp, Glycine max
  unsure (1)..(262): unsure at all n locations
cgtgccacactacaacctgacaancgaacagnataatatacgcattgaatggacgggcattgatacaantggtgaattgcaacggtgagagagtgtttgatggagagctgcaagagggacgggtgctgatcgtgccacaaaactntgtggtngctgcaagatcacagagtgacaacttcgnctatgtgtcattcaancncaatgatacacccatgatcggcactcttgcaggggcaaactcattgttgaacgcattaccaga

SEQ ID NO: 284928 - DNA, 267 bp, Glycine max
  unsure (1)..(267): unsure at all n locations
gctgtgngttagaattcctaccnantgagtcnggtanggangatntactcagaaggncctgntgntaaaattagtgagaanaaagatgcaatggatgagnnnnttagacttgagagagtttctgatgatgaattcaataactataancttgtgttctgtncacagcaaggctgaggatgacaaatgtggggatattgggattagtattgatcatgangatnganccaggcgtttggtggtgtctaagaacaaaccgttagtggttca

SEQ ID NO: 284929 - DNA, 262 bp, Glycine max
  unsure (1)..(262): unsure at all n locations
ananatttnncatnctaggngatgtatcatgtatgnaccaaaatattttggtacntaagtctntcnaaaaagttngcatctcctactntggttcnccttngtnctgaaagtnntncccctaagangacaatcatangtactgtncgtagtgtgaagatatagtattgnatgctgcagaatatgnttgnctaataaggtggactagctgtaatagnaggtatttccaggttgacancaganantgttttnggtanttatatnc

SEQ ID NO: 284930 - DNA, 247 bp, Glycine max
  unsure (1)..(247): unsure at all n locations
aaatatttttcattctaggtgatntatcatgtatgtaccaaaatancttggtacgtaagtcttttaaaaagtttgcatctcctctttggttttccatagttctgaaagttatctcctaagaagncaatcatatgtactgtncgtagngtgaagatatagtattgtatgctgcagaatatgattgtctaataaggtggactagctgtaataaaagatatttccaggttgaaaacngnganannnaaaa

SEQ ID NO: 284931 - DNA, 261 bp, Glycine max
catagttcagtgtgtcgtttaaaaatgtcgcagttgctggataaagccaagaacttcgtgtcggagaaggtaaatgatatggccaagccggagggagtgtcactgacgtggacttcaagcgcgtgagcaaagataatgtcgagtacttggccaaggtctctgttcgtaacccttattcaacttccatacccatttgtgagatcaactactctttcaaaagcgcatccagggagatagcatcagggaaaattccagacccag

SEQ ID NO: 284932 - DNA, 258 bp, Glycine max
  unsure (1)..(258): unsure at all n locations
gcaggcaangcttganggntanaaagcccacncccttgtaaantacanatcagatgacacacanagagaagntncctgaactccaagcctgacggaaagaactcgtagaggtgggtcatggngacaagaaaaatgagccatggtggcctaagatgcaaactcgtgaagagctagttgaagcttgcgcnatcatcatatggactgcttcagcacntcatgcagctgttaatttggacagtatccctatggaggnttaat

SEQ ID NO: 284933 - DNA, 255 bp, Glycine max
  unsure (1)..(255): unsure at all n locations
ggtgatctcaactcaagaagaaggacagatcnacagttttggngacaaacctggtggccttaaggtggttgatgccctggtaggtcttnctgagatgttccagtatgtcagcacactcagagggatgacaaagggccgtgcatcctacacaatgcaattagccatgtttgatgtggtgcctcagcacattcagaaccaacttgccacaaaagagcaagaagttgccgcttaatgtatttgcttggtctcctaaca

SEQ ID NO: 284934 - DNA, 260 bp, Glycine max
  unsure (1)..(260): unsure at all n locations
agnnaacctaagcttagaattagaaacaaagaaaagnaganaggaaagnnttgatcgttgaaaatgcagggaggaaagaaagcgggagagtccattaaggaaacagctncaaacattggtnnttctgccaaggcnggcatggagangaccaaggccactgtccaagaggaggcagaaagaatgacagcacgtgatccggtgcaaaaggagttgcnaccaaaagaaagaggcaaagatgaaccaggcggactngacaagca

SEQ ID NO: 284935 - DNA, 255 bp, Glycine max
  unsure (1)..(255): unsure at all n locations
accacttactattnngttaacctacacgaccaccagaatctcaaaataatcaaacttgccatacccgtncaacaaacctggcagatatgatgatttcttcttatctagcactcaagcccaacagtcctacttgcaagncttcagccataatattctagagacctccttccatagcgaattcgaggagataaacagggttttgtttggagaggaagaggagcagaggcagcaagagggagtgatcgtggaactctc

SEQ ID NO: 284936 - DNA, 253 bp, Glycine max
  unsure (1)..(253): unsure at all n locations
agggtttctctgtctgcttcttcactttctctcgtttcaatcgaaaccaaaacaaaaacatgggcagaaaattcttcgtnggtggcaactggaaatgcaatgggaccactgaggaggtaaagaagattgttactactttgaatgaggctaaagtccctggngaagatgtcgtagaagttgttgtgagccctccttttgtgttccttcctgttgtaaaaagtttgctgcgccctgatttccatgtttcgnncac

SEQ ID NO: 284937 - DNA, 282 bp, Glycine max
  unsure (1)..(282): unsure at all n locations
acacaactactacaagtacttcctttacaatcaaaaccancaacaactatggcaagttatcaaaagcactacgatgatcagggtcgcaaggttgacgagtatggcaacgttgagaagcaaaccgacgaatacggcaaccctgttcatgctgctagtntcacctatgtagccaccagaactgctgctggtggttacagtgatgacattaataagcaacatgataccaccaatgcctacggcgtagacactggtagacagcatctagtggtggctacnatggna

SEQ ID NO: 284938 - DNA, 276 bp, Glycine max
  unsure (1)..(276): unsure at all n locations
cgcaagcaaaaagaaagaatcccaggcgaggagaaagatggaggggaaggagcaggatgtgtcgttgggagcgaacaagttccccgagagacagccgattgggacggcggcgcagagccaagacnncngcaaggactaccaggagccggcgccggcgcngctggttgacccgacggagtttacgtcatggtcgttttacagagcagggatagcagagtttgtggccacttttctgtttctctgacatcaccgtcttaaccgttatgggatcgccgg

SEQ ID NO: 284939 - DNA, 278 bp, Glycine max
  unsure (1)..(278): unsure at all n locations
gnatttcgatgctcagtcatctctccntaccattntcttctctcttgctcttgcaggagagagccatgtccangcatcgctancncnnagaagattattgggaagctgtttggccaaacactcccattcccactgcactgcgacgngtctaagcgnntccntgcaggngttgaaatcgatgaactccctaagcaaattgatgatacacagnacccaaaaanattcttctataaagaagaccttcatccaggcaaaacaatgcngtacaatnnannagc

SEQ ID NO: 284940 - DNA, 277 bp, Glycine max
  unsure (1)..(277): unsure at all n locations
tgtgtgcagattggattacctatgctcattctantggtcataatacaacagtatttgaagaggcttcatcatgctgctcttcaagtacttgagnggtttgctttacttctctgcattgctgtcatctgggcatttgctgctatccttatgtggctggtgcatacaatactgctaaatcacagacccaagtgagctntcgcacagatcgctcgnancttatgnnttctgctccttggatnanagttccgtatccgttccagtggggtacccccatatt

SEQ ID NO: 284941 - DNA, 276 bp, Glycine max
  unsure (1)..(276): unsure at all n locations
ctccttctcaaactagtaatatatactattantncatgcattccattcctatatatttcataatgggngttttcacattcnaggatgnnaccacntctcctgnggctcctgctaccctttacaaagctctagttacggatgctgacaagtcatcccaaaggctgttnacgccttcnggagtgttgaaaacgttgagggnaatggtggccccggaaccatcaagaagatcatttccttgaggatggagaaaccaagtttgtgttgcacaaaatagaa

SEQ ID NO: 284942 - DNA, 273 bp, Glycine max
  unsure (1)..(273): unsure at all n locations
ggnacagactccacnnnggtggcaacntagtgggcattggcagaactcatcagcaatcctaaggtgttggaaaaggctcgtgaggnggtctacagtgttgtgggaaaggacagacttgtggacgaagttgacactcaaaaccttacttacattagagcaatcgtgaaggagacattccgcatgcacccgccactcccagtggtcaaaagaaagtgcacagaagagtgtgagattaatggatatgtgatcccagagggagcattgntctcttca

SEQ ID NO: 284943 - DNA, 273 bp, Glycine max
  unsure (1)..(273): unsure at all n locations
cttattacnactttccttagttcaatatggcncaagcccttcttcantctntcnctncnntccctttggcttgctantcttgtncgagtgcatgntttgctattacttccagcaagtncaacgacganccaantcaacaacctcaanggttggaacccgancaccgcgtngagtccgaaggtggtcttattgaaacatggaatctcaacaccctgagctgcnngcgccggtgtcactgnttccanacgcncncnctgaacnacggcntccanc

SEQ ID NO: 284944 - DNA, 261 bp, Glycine max
  unsure (1)..(261): unsure at all n locations
caactactacaagtacttccttacaatcaaaacccncnaacaactatggcaagntatcaaaagcactacnnccgatcagggtcgcaaggttgacgagtatggcaacgttgagaagcaaaccgacgaanncggcaccctgttcatgctgctagtgtcacctatgtagccaccagaactgctgctggtggttacagtgatgacatttntaagcaacatgataccaccaatgcctacggcgtagacactggtagacagcatcta

SEQ ID NO: 284945 - DNA, 267 bp, Glycine max
  unsure (1)..(267): unsure at all n locations
gttcagtntgtcgtttaaanntgtcgcnnttnntggataaagccaagaanttcgtgtcnngtaaggtaaatgatatggccaanccggagggagtccncactgacgtggacttcaagcgcgtgagcaaagataatgtcggtacttggccaancncctctgttcgtaacccttattcaactcncatanccatttgtgncnncaactactctttcaaaagcgcatccagggagatagcatcaggganaattccagacccaggatcgttga

SEQ ID NO: 284946 - DNA, 264 bp, Glycine max
  unsure (1)..(264): unsure at all n locations
ggaagctccncccnctccaganntgtcatatgcncncaagtgcactggtangggcncncnntctggtgcttcgatgaagtgtgcaggttgncaaggaactggtatgnaggtttctataagncatcttggcccgtccangatcagcagatgcagcatgcttgcaatgaatgcaagggtactggagaaaccatcaacgacagagatcgctgcccacagtgcaagggaganaaggttgtgcaggagaaaaaagtcctgaagttatgt

SEQ ID NO: 284947 - DNA, 266 bp, Glycine max
  unsure (1)..(266): unsure at all n locations
tcanncacaactactacaantacttcctncacaatcaaaaccnncaacaactatgggcnagcctacccnaagcactacgatgatcagggtcgcaaggttgacgagtatggnaacgttgagaagcaaaccgacgaatacggcaaccctgttcatgctgctagtgtcacctatgtagccaccagaactgctgctggtggttacagtgatgacattaataagcaacatgataccaccatgcctacggcgtagacactggtagacagcat

SEQ ID NO: 284948 - DNA, 261 bp, Glycine max
  unsure (1)..(261): unsure at all n locations
ttgctctatactacacagtacacacactagaagaataatggctnccatcctccactactttttagccctctctctttcttgctcttttcttttcttcttatccgactcagtcacccctacaaaaccaataaacctgttgttctacccgttcaaaatgatggttccacagggctccattgnncccaacctccaaaaaagaacccctctaatgcaagtaccagtcctggtggacctcaatggaaatcacttgtgggttaatgt

SEQ ID NO: 284949 - DNA, 263 bp, Glycine max
gtgggtatgcagaggaaggtgaaggaatcagacttggacaagatggagtatttggatatggttataaaggaaaacatgaggctccatccagtggcaccgttactaataccacaccaatcgagggaagattgcatggttgagattttttcataccaagaaaatcaagagtggtaataaatgcatgggcaattatgagagactcaagtgtatggagtgaggcagagaagttctggccagagagatttgaaggaagcaacatagat

SEQ ID NO: 284950 - DNA, 261 bp, Glycine max
gcaggcaatgcttgatctgtaaaaacccaatccttgtaaactacaaatccagatgacacacttagagaagatcctgaactccaagcctgctggaaagaactcgtagaggtgggtcatggagacaagaaaaatgagccatgtggcctaagatgcaaactcgtgaagagctagttgaagcttgcgctatcatcatatggactgcttcagcacttcatgcagctgttaattttggacagtatccctatggaggtttaatcttaa

SEQ ID NO: 284951 - DNA, 261 bp, Glycine max
  unsure (1)..(261): unsure at all n locations
accttgctctatactacacagtacacacactagaagaataatggcttccatcctccactactttttagccctctctctntctngctcttttcttttcttcttatccgactcagtcacccctacaaaaccaataaaccttttgttctaccngttcaaaatgatggttccacagggctccattgnanncaacctccaaaaaagaacccctctgaatgcaagtaccagtcctggtggacctcaatggaaatcattgtgggttaa

SEQ ID NO: 284952 - DNA, 260 bp, Glycine max
tgaatttgtgaacccaaaagaccatgacaagcctgtacaagaggtgattgctgcaatgacgaatgggggtgtggatcgtgctgttgaatgtactggcagcatccaagccatgatctcggcattcgaatgcgtccacgaggttggggtgttgctgtacttgttggagtgccaaacaaagatgatgcattcaaaactcatccagtgaatttcttgaacgagagaactctaaagggtaccttctacggaaactacaaaccccg

SEQ ID NO: 284953 - DNA, 262 bp, Glycine max
atttgatatgctgcgcagacagtcacttcggccagactatatcaagatgtttgtattggatgaggctgatgaaatgctttcccgtggttttaaagatcagatctatgatatattccagttgcttccatctaagattcaaatcggagttttctctgctacaatgcctcccgaggcacttgagatcacaaggaagttcatgaacaaacctgtgaggatccttgtgaagcgtgatgagctcaccttggagggtatcaagcaattt

SEQ ID NO: 284954 - DNA, 262 bp, Glycine max
  unsure (1)..(262): unsure at all n locations
caaagtaccaaganagtggaccaaaagggccactgtnggaggagatctcagcgttgatgaggaaaatggggtacaaccggancgccaaaaggtgcaaagagaagtgggagaacatcaacaagtacttcaagaaggtcaagaaagcaacaagaagaggcctgaagattcaaagacatgtccctattttcaccagttggaggctctatacagggagaagaacaagggagaggggcagatgaagccggagagcatgatggcgccg

SEQ ID NO: 284955 - DNA, 261 bp, Glycine max
  unsure (1)..(261): unsure at all n locations
aaggctgatattttgcttgcgtttggggtgaggtttgatgaccgtgtcacggggaagctcgaggcttttgcgagccgggctaagatagttcacattgatattgattcggcagagattggaangaacaagcagccgcattttcggtttgcgctgatttgaagctggcgttgaaggggattaatcacatgttggagagcagaggggttggggggaagcttgattttagaggttggagggnagagctgaatgagcagaagcgaa

SEQ ID NO: 284956 - DNA, 264 bp, Glycine max
  unsure (1)..(264): unsure at all n locations
caaggctgatattttgcttgcgtttggggtgaggtttgatgaccgtgtcacggggaagctcgatgcttttgcgagccgggctaagatagttcacattgatattgattcggcagagattggaaagaacaagcagccgcatgttcggtttgcgctgatttgaagctggcgttgaanncgattaatcacatgttggagagcagaggggttggggnnaagcttgattttagaggttggagggaagagctgaatgagcagaagcgaagt

SEQ ID NO: 284957 - DNA, 250 bp, Glycine max
  unsure (1)..(250): unsure at all n locations
tttgcttcttcgagtttcacagccaagtcgtaancagggtttcaagggatggnaaacatgcagagcttctggcaattgggtgatgaactccgtgggcactcaaaagcatcggaggatcacaagtggttatggttgcctcgaaactggccgaacagacaagattgaagggggagcgtgtgaacaaccttgatctttcaaagggacccattgaaacaaggtcaagggataaatttgggttccaggaagagaa

SEQ ID NO: 284958 - DNA, 258 bp, Glycine max
  unsure (1)..(258): unsure at all n locations
accttgctctatactacacagtacanacacnagaagaatnntggcttccatcctccactactttntagcccnctctctttcttgctcttntcttntcttcttatccgactcagtcacccctacaaaaccaatanacntgttgttctacccgttcaaaatgatggttccacagggctcnatngggaaacctccaaaaaagaacccctctaatgcaagtaccagtcctggtggacctcaatggaaatcacttgtgggtta

SEQ ID NO: 284959 - DNA, 260 bp, Glycine max
  unsure (1)..(260): unsure at all n locations
ccgagctagctagctagcaagcaagcacagagatggaggcaaagcgannccatgccctcatgtgcttggcacgtgtttcactcttcctctgcgctctaancctatccgctgctcacggaagcaccacggttcaagacacgcgagaaagttgaaactcggggncaacgagcttctgcgcacggagaagaagttcaaggttttcatggagaattacgggaggagctactccacagaggaggagtatttgcgccgtttgggga

SEQ ID NO: 284960 - DNA, 261 bp, Glycine max
  unsure (1)..(261): unsure at all n locations
ctaacctacctctttttcttttctctcaacaacttcacnttcttcctcctcgatcatgtctnacttncaagggcaagtaccatgatgagcttatcgccaatgctgcgtacattggcactcctggaaagggtattcttgtgctgatgagtcaacagggacaattggcaagcgtttggccagcatcagtgtagagaacattgaatccaacaggcgagctcttagggagctgcttttcactgctcctggtgttcttcaatatct

SEQ ID NO: 284961 - DNA, 259 bp, Glycine max
atttaccagctatacttgttccttttgaaggttagaagtgctacaatacaaacaatggcagctactcaggaagatgtgaagcttttgggtattgtgggaagcccatttgtgtgcagggtccagattgcccttaagttaagggagttgaagggagttgaatacaaatttttggaagaaaatttgggcaacaagagtgatttgcttctcaaatacaaccctgttcacaagaaggttccagtgtttgttcacaatgagaagc
